United States Patent Application Publication US 2007/0054278 A1 - sequence listing, part 146

SEQ ID NO: 530483 - DNA, 201 bp, Homo sapiens
ggccaagagagattttagttcagatggggtgggagagattcaaaataatagagggataatcagcagagcagtcttcacaggatggcttaaggcaatatgaycctgagcctgcctttttaatgagggaaggagaagcatgtatatatgtattttatgagaaagagattgatgttttcttatgctgtcttctgttttttccct

SEQ ID NO: 530484 - DNA, 201 bp, Homo sapiens
caggtaagttgcctgttcttctctacagacagaagtatgtttttagatgattacctttgagtttactcatttagatacaattgttctttaattcacgcatrtatactgttgcagaggaagtacgagtttatgacaatacagagattgaaaggaagttcccatgctgttcatgaaatgaaaagtttaaaacaagaaaaagca

SEQ ID NO: 530485 - DNA, 201 bp, Homo sapiens
tggacgcggtgacgggtgcctataatcccagttactcgggagactgaggcaggagaattgcttgaacccgggaggtggagtttgcagtgagccgagatcaygccacggcactccagcctgggcgacagagtaagactgtctgaaaaaaaaaaaggaaagaaatgagtaaaatattaccttattataaattcccttttcctc

SEQ ID NO: 530486 - DNA, 201 bp, Homo sapiens
gacttcctcttttcctaattgaataccttttatttccttctcctgcctgattgccctggccagaacttccaacactatgttgaataggagtggtgagagarggcatccctgtcttgtgccagttttcaaagggaatgcttccagtttttgcccattcagtatgatatcggctgtgggtttgtcatagatagctcttattat

SEQ ID NO: 530487 - DNA, 201 bp, Homo sapiens
tttttaattatactttaagttttagggtacatgtgcacattgtgcaggttagttacacatgtatacatgtgccatgctggtgcgctgcacccactaactcrtcatctagcattaggtatatctcccaatgctatccctccccactccccccaccccaccacagtccccagagtgtgatattccccttcctgtgtccatgtg

SEQ ID NO: 530488 - DNA, 201 bp, Homo sapiens
gcaagtttgaatgtcatcccacagataagagggagacaggaaatggttttaagcaagggatctatattttaccatggagacaccttaaatgcacattgctmagtgaaagaagccagcctgaaaaggctacatactatatgattccaactataatgacattttggaaaaagcaaaaactggagtaaagagatcagtagctgc

SEQ ID NO: 530489 - DNA, 201 bp, Homo sapiens
cacaggcgtgcctggccaggcctcagttttttctcacctcctctgggcagtggttctcatctcagtttagctttttttttttttttttttttttttttttwaattatactttaagttttagggtacatgtgcacattgtgcaggttagttacacatgtatacatgtgccatgctggtgcgctgcacccactaactcatcat

SEQ ID NO: 530490 - DNA, 201 bp, Homo sapiens
ccaccactcccagctaatttttgcatttttaatagagacagatgggggtttcaccatgttggccaggctggtattgaacagctgaccttaggtgatccacrcgccttggcctcccaaagtgctgggattacaggcatgagccaccatgcctggcctgaaaatgtctttttatacactaagtattgtcaaatagttgacatc

SEQ ID NO: 530491 - DNA, 201 bp, Homo sapiens
tcacaggcgtgcctggccaggcctcagttttttctcacctcctctgggcagtggttctcatctcagtttagcttttttttttttttttttttttttttttttaattatactttaagttttagggtacatgtgcacattgtgcaggttagttacacatgtatacatgtgccatgctggtgcgctgcacccactaactcatca

SEQ ID NO: 530492 - DNA, 201 bp, Homo sapiens
actcagtaccaattgtctctgttttgtgctgttacaacagaatatctgagactgcacaatctgtaaacaacagaaatttatttctcacagtcctggcagcyggatgtccaagcatctgataggggctttcttgctgcatcctcacatggcacagggcagaagagcaaaaacaggatgaacgttgtgtgcccacagggtgga

SEQ ID NO: 530493 - DNA, 201 bp, Homo sapiens
tttttatggttattcattcaggacccaaatgaagactctgctccctttctttaaaaatttttttttagaaaaggaactatgggccaggtgcggtggctcaygcctgtaatcccagcactttgggaggccgaggcgggtggatcacctgaggtcaggagtttgagaccatcctggccaacatggtgaaatcccgtttctact

SEQ ID NO: 530494 - DNA, 201 bp, Homo sapiens
tccactctaacctttgtaattaatacataatttgtggggaaatattttgagacagtaaattgatttttagtatacaaattaaatcttttctttttttttttagtatgatttttcaaatttttatcagtctaagtataagagaagaactctaacctccccaggtaagccggtattttgtatatttgggggtttcaaaaattt

SEQ ID NO: 530495 - DNA, 201 bp, Homo sapiens
ttttttaaagcctagatgatgaactggattctttccatgatttgaagaaacaggaaacagaagaagagttaattgaaaatgattataaagttagtacctcraaaataaccaagcagtcttttaaagaaatagaaaaaggtaaaataaatattttagaacaatcaattcagtagtaactttgtcaagtagagtaaatgaagc

SEQ ID NO: 530496 - DNA, 201 bp, Homo sapiens
agaagagagatgattttacttctccaatttggatactttttatttctttttcttgcccagtttcactggctggtactatagtgaacagaagtggtgagggygtgcttgtcttgttcctgattttggaggaaaggctttcattcttttaccttcagagtgtaatctgtgggctttttatatatagcctttattatatcgagg

SEQ ID NO: 530497 - DNA, 201 bp, Homo sapiens
agtgaaactatgtggatgagatttcttttgggggaggttttaaattatgaatttaagttctttaatagttacagggctgttctagttatgtaattcatatsgatgatttgtagtagtttgtgctttttgagggactgaaccattcaaatgtatgcacatttatgtgtgtagagtttttcatagtattctcttatccttttg

SEQ ID NO: 530498 - DNA, 201 bp, Homo sapiens
gcacatttatgtgtgtagagtttttcatagtattctcttatccttttgatgttttcagtatctgtagtggtagcattatttccttcttgatatggataatwtgtgttttctttctttagttcatctcttttgctagaagtttctctgtttctccattttattgatctttcaaaggatcatctctttgtttcatttcttttt

SEQ ID NO: 530499 - DNA, 201 bp, Homo sapiens
agtgatgatcatagatcactgcagcctccagctcctgggctcaagcaatccttctgcctcagcctcctgtgtagctaggattacagacgttcgccaccacrcctggctaattaaaaagttttttttttttttttgatagaggcattgtcttgctttgttgcccaggctggtctctaactcttggcctcaagtgatcctcct

SEQ ID NO: 530500 - DNA, 201 bp, Homo sapiens
ttgaataaagcacagaagctttacttccctttttatcccttaaccttttctgtatacgcttagaaccacattagagaatgttaccatttttgcttcaaccrtcaaacagaatttatagaactcaagaagagaaggaaagtttattgtatttacccatatttttgtttactatgttcttctctccttccagatgtgccacag

SEQ ID NO: 530501 - DNA, 201 bp, Homo sapiens
atataacaaattaaagtcagccttagaacacgtttcagctagagaaaatttggattacatttgttagctttattttaaaatacttccaaatgtaaataaartattctttagctctttggtctcttctctttatttgttctggcaaccaactgacaaacaaaagaaaaaaacctgataacctgagaactgattacattttta

SEQ ID NO: 530502 - DNA, 201 bp, Homo sapiens
gctgtccaaaatctaaagcatcagacaagcggagtttacttccacatcagatcagtcagatatatgacgaattatttcagatacatctgaaattgcaggtragaactaaatactgaatcgagaattcagaaatatttatgttctaagaaccaagcatttacgaaatttgaatataatatatttcattttaattactttaga

SEQ ID NO: 530503 - DNA, 201 bp, Homo sapiens
gctgttcatgaaatgaaaagtttaaaacaagaaaaagcaccagtttcaaaaacttacaaggtaagtttgaattatgatttgatatgattgaaaatttctcrgctgggtacggtggctcacacctgtaatcccagcactttgggaggctgagatgggcggatcacgatgtcaggagatcgagaccatcctggccaacatggt

SEQ ID NO: 530504 - DNA, 201 bp, Homo sapiens
gtgatgcaggtgactctcctttgaaacctgtcagctgtccaaaatctaaagcatcagacaagcggagtttacttccacatcagatcagtcagatatatgaygaattatttcagatacatctgaaattgcaggtaagaactaaatactgaatcgagaattcagaaatatttatgttctaagaaccaagcatttacgaaattt

SEQ ID NO: 530505 - DNA, 201 bp, Homo sapiens
tgcaatctcggctcactgcaagctccgcctcccgggttcacgccactctcctgcctcagcctcccgagtagctgggactacaggcgcccaccaccacgccmggctaatttttttgtatttttagtagagacggggtttcaccgtgttagccaggatggtctcgatctcctgacctcgtgatcggcccgcctcggcctccca

SEQ ID NO: 530506 - DNA, 201 bp, Homo sapiens
tgagattcgtccattgtttaaaagaaactagattggtttctgagaattttgagtttggaggagcatttgtcattatcatattctacttcttactaaagttsataaaaaccaagttctgcaatttcagacaggctttttatttttcatttcaagttggaaaaagttttgaatgcacaagaactgcaaagtgaaacaaaagga

SEQ ID NO: 530507 - DNA, 201 bp, Homo sapiens
tatctgaactgtgctcccccaccttcccagtatgcctctattccaatttagtctccacattgcagtctgaataatcttttcagaaggcaaatctgatcacrtctcccttttgtgtaaagccttttgatgttacctcattgtttttaaaattaagataaaattaacctggtctataaggcctttatgatctcacattcatgt

SEQ ID NO: 530508 - DNA, 201 bp, Homo sapiens
ggtttcatgtatatttttggaagatatggaaagtattattaatgagagaaaaacattaacaccaaatggtggtcttaacttttaatgatagaacaaacagrcattttatgaatgaatgaggagttcagtcatatttttccattgctattttgaaattacatgtgactttaaggttcctttcaaatttcagtttcaagtccc

SEQ ID NO: 530509 - DNA, 201 bp, Homo sapiens
agactatcaagccttacttgggagaaatagaatgaaaattgatattctactgatagaaacaaaaatggagtaaatgtttttggtgataaacctattttaaygggtttccatgcccagattatttgaaaaacattagaaaaaaatttatagtctctgccagatatacgggatatcaagatgaattgcatatagtttctcaag

SEQ ID NO: 530510 - DNA, 201 bp, Homo sapiens
ctactgatagaaacaaaaatggagtaaatgtttttggtgataaacctattttaacgggtttccatgcccagattatttgaaaaacattagaaaaaaatttrtagtctctgccagatatacgggatatcaagatgaattgcatatagtttctcaagtagttcacagcctaatagggacagaaatgaagacaaatcattgtaa

SEQ ID NO: 530511 - DNA, 201 bp, Homo sapiens
ctttagctttgttcttaactccaaggggactttctgcctcttggaatttcactaggaattcacaagtgaagatgttacgtttctcacttcggaacactaamaaactattttcaagatcattgaaatttatgctggattgacataatcctatacaaatctagtaataaagacaaatgtaaattgtgtccaaaaatgtatgtt

SEQ ID NO: 530512 - DNA, 201 bp, Homo sapiens
tcaagtagttcacagcctaatagggacagaaatgaagacaaatcattgtaacagtaaacactatggtagaggtaagaaaaggaaggaatagctaccgtgaragcaagtattgatgtcgccccattgttttagaattaagataaaatctttaacgtggtctataaggccttttatgatctcatattcatgtggtccagccat

SEQ ID NO: 530513 - DNA, 201 bp, Homo sapiens
tcacaagtgaagatgttacgtttctcacttcggaacactaaaaaactattttcaagatcattgaaatttatgctggattgacataatcctatacaaatctrgtaataaagacaaatgtaaattgtgtccaaaaatgtatgtttatcctttccagatttctataatgatttctgggcagtgggtttttttttagcctatgtg

SEQ ID NO: 530514 - DNA, 201 bp, Homo sapiens
taattttataaaatctttaattatgaactttcactgttttgatcctgtatgaaaagggatatggtatcaatggctgcatgatatgtgaggacacaaagggwttaacagtgcttacatccaggcagaaaagtcttcaactcattgtggctcaagttttgaccagactaaaacatttatcattaattctactaatgtcttcct

SEQ ID NO: 530515 - DNA, 201 bp, Homo sapiens
atacatatttgttttttacaagctcatcatcttatgtatcctaatactatgccaaatgttttcttgggattgaataaatgtaatttttttaacttggcctmtgttgattcattggatgtttgttactttgaatataaaagcagaacttggcaagtcatacaactcaatttggcagatcactcactcttagcaaatgaactg

SEQ ID NO: 530516 - DNA, 201 bp, Homo sapiens
aggctatcactacctgcgatcaactgtgaggtaggtggggaaattctcctttcttcctggtggcagtcaccaacaatttgtttctccacctatacatttgytatctaaaaaaagccattttatttgctcctgtctgaactactaacaacacgtttgtagttagaatattccagttcagacttttggtggtaattttataaa

SEQ ID NO: 530517 - DNA, 201 bp, Homo sapiens
agtgtttacaaggaaagagatcaacatttattgaggacttaaaatatgctagagaggtttctaagggatgtacattcttattttgatattcacaatatcayagataaatggacaaatggatacatcgggaaactgaaaaacttctgtggtcccttgaaaaagaagaatcaattcaagaataaattagacatttgcatttag

SEQ ID NO: 530518 - DNA, 201 bp, Homo sapiens
tcttgacctctgttctttgaaacaaaactaaaagagaaacttgttttgaaatcagtggggggttgtattctagaatttacttctgctatgcttctatatamttttctattgtcaaagaaagaaaaaatttcttattttgcagaaattccttgcccacaattcagaactgttatatactctttgcaaattttagtttcaaag

SEQ ID NO: 530519 - DNA, 201 bp, Homo sapiens
ttggcattttaaaaaatgtgatggaatttactttctcattttggtggggtaaaagcagcatgtgtgtgttttgtgccatgaggagcctgtcttactaacaytttgtcactatatggacttaggggtcttcgatcacaaagcatttgagaagttattaaaaatattttattattcatttttacatgtaagcgtaatatgatc

SEQ ID NO: 530520 - DNA, 201 bp, Homo sapiens
gcttttctcttaaccttttctctttctcatatttttttcttagacaaatgtattttcttggactatgtgacatgattgatttcattttctttatgtgtgayaaatattatactaaaataagaccttcattgcacgggagaattttgtctatgataactagctgagattaatattatttttcatttctattgaaaattctat

SEQ ID NO: 530521 - DNA, 201 bp, Homo sapiens
tcagaacatgtatataataccttacttgatatttcctcctggtcctctcaaaaacacaccaataaaaccaaacttgaacatttccccttccatccactctygtaccaacattgtcttctctgcattaaagaattttttctcctataatccatctaggctgtcgtcagactcttatcaatcagtgatccttggctccgccct

SEQ ID NO: 530522 - DNA, 201 bp, Homo sapiens
tccccacatacttccagcttccatagaggaagctagaattaggttatgtgctatatcctcaaagacctaaaaatgcatttgttgagaggaattagtgtaayaataatgaatatgaagcattaggtaacatgtctagcatattaaaacatttaataaaaggaggctattacaactttaacactaacatttatttctggcaca

SEQ ID NO: 530523 - DNA, 201 bp, Homo sapiens
tttatacaaatcagcttggccatcactctctcccagggccaacttattcatatacacactaggcacagtacctaaggcccacaatacttttgggggctcaygaaaatgttttattttaaaatctaaaggaaaaattaaactttaggtcataaaagttttattacataagagtaatttatttgccattatgccaatgcagtt

SEQ ID NO: 530524 - DNA, 201 bp, Homo sapiens
gatatacataaactgatcaataaatgtttgattgttctttgctcaaatataaaaattaggtcccccaaagtctttttaaacataacttagagttataattrgattctcttaattagtatggaaacattgcctttatccatatgattgaaccaaataggatgcactgaagatctctaagattattgacttcctgtgtcatct

SEQ ID NO: 530525 - DNA, 201 bp, Homo sapiens
gcagtggtgcaatctcggctcactgcaagctccgcctcccgggttcacgccactctcctgcctcagcctcccgagtagctgggactacaggcgcccaccaycacgccaggctaatttttttgtatttttagtagagacggggtttcaccgtgttagccaggatggtctcgatctcctgacctcgtgatcggcccgcctcgg

SEQ ID NO: 530526 - DNA, 201 bp, Homo sapiens
aataagataatgtgcatcaagcatttagcccgaggtatagcacataataaacatgcaacaaatggtagctatcattattttataaaaacacttttcttctrttctttagttataacatgtaggcagtggttacatagggttaaaaaagatatacataaactgatcaataaatgtttgattgttctttgctcaaatataaaa

SEQ ID NO: 530527 - DNA, 201 bp, Homo sapiens
gagtgcagtggtgcaatctcggctcactgcaagctccgcctcccgggttcacgccactctcctgcctcagcctcccgagtagctgggactacaggcgcccrccaccacgccaggctaatttttttgtatttttagtagagacggggtttcaccgtgttagccaggatggtctcgatctcctgacctcgtgatcggcccgcc

SEQ ID NO: 530528 - DNA, 201 bp, Homo sapiens
gcccccgtccctttttttttcttttaaatagtaaaggcataactttttccctgaacagggttaaaaggggttaaacactacacaaattaatcaaatatccyttttttttttttttttttttgagacggagtctcgctctgtggcccaggcgggagtgcagtggtgcaatctcggctcactgcaagctccgcctcccgggtt

SEQ ID NO: 530529 - DNA, 201 bp, Homo sapiens
tttggcagtattcaggtttgaacaaataaaccttggactcatggaaattctgaaagatgatctactggataatgtgaactcaattgccacaaagttccccygggaattagctgttacagtaatatgaagctttgccattttcctttgaccacaaacatctggccgctttcccatatgtgctaagtctatgagttgctagga

SEQ ID NO: 530530 - DNA, 201 bp, Homo sapiens
gtccagtataaagcctaaaaattacaatcatagtttaatgcagtaatttagtttttgtagaaaacttggaagataattagtaatgaagttttatgcccccrtccctttttttttcttttaaatagtaaaggcataactttttccctgaacagggttaaaaggggttaaacactacacaaattaatcaaatatccttttttt

SEQ ID NO: 530531 - DNA, 201 bp, Homo sapiens
atgttttattttaaaatctaaaggaaaaattaaactttaggtcataaaagttttattacataagagtaatttatttgccattatgccaatgcagttttaartttttaattttaatagtttttttatttttttaaatgaaggaccccataaaggcaaaggtggcatggactcatgagtcatattatgatcctggtctcttct

SEQ ID NO: 530532 - DNA, 201 bp, Homo sapiens
ttcttcaaaatggcaacataaacaaaatcttttgacttttttcctaaactcaagtaaatgtatgccaattaggcatatgtgtcctaactagaaaatatgcygagaaaggtgaagaaatagatgtaaaaaaacaaaacaaaacaaaacaacaacaaaaaaaacaaaacaaaaaaacaaatagatgaaaagaaataaaaagtg

SEQ ID NO: 530533 - DNA, 201 bp, Homo sapiens
actaaaaagcactatgtaacactaagtgtcctaaatggccagtttactctctcagagactcactcatgaaatgtgttctatcattaaacaatgctctaagwttattcctgtttaagaaaataaaaaatgcatgaagtgaaaataacttgcaaactgtaccacttattcagcaatttcaagtaaaattagcttcattgtcta

SEQ ID NO: 530534 - DNA, 201 bp, Homo sapiens
ggacagatcatgaggtcaggagatcgagaccatcctgactaacaaggtgaaaccccgtctctactaaaaatacaaaaaattagccaggtgtggtggcgggygcccgtagtcccagctacttgggaggctaaggcaggagaatggcatgaacccgggaggcagagcttgcagtgagccgagatcgcaccactgcactccagc

SEQ ID NO: 530535 - DNA, 201 bp, Homo sapiens
catttcttggccgggcgcagtggctcatgcctgtaatcccagcactttgggatgccagggtgggcggatcacctgaggtcaggagttcaaaaccagcctgrccaacaaggtaaaacccctgtctctactaaaaatacaaaaattagccgggtgtggtggcgtgcacctataatcccagctcgtcaggaggctgaggcagga

SEQ ID NO: 530536 - DNA, 201 bp, Homo sapiens
gtgcacgcctgtaatcccagctattcgggaggctgaggcaggaggattgcttgaactggaggttgcagtgagctgagattgtgccactgcactccagcctrggtaacagagtgagactctgcctgaaaaaaaaaaaaaagtttcttgatctgtcaggggtaaaagacatgtttaaaagttgtttatgctacacatcagttg

SEQ ID NO: 530537 - DNA, 201 bp, Homo sapiens
gggatgccagggtgggcggatcacctgaggtcaggagttcaaaaccagcctgaccaacaaggtaaaacccctgtctctactaaaaatacaaaaattagccrggtgtggtggcgtgcacctataatcccagctcgtcaggaggctgaggcaggagaatcacttgaacccgggaggcggaggttgcagtgagccgacattgcg

SEQ ID NO: 530538 - DNA, 201 bp, Homo sapiens
cttttgaatacatcactgttggatagatgttttaacagttttttctggtttaaaaaccaaattgtaaatggagtgtgtacttgtagagagtgacaaggtaktgtttccctatgtgctgtttgagcagtattttaaccaacttgtattacagatgttacagttccatgttaggaagtcagaaaagacttgtgtttgtctttg

SEQ ID NO: 530539 - DNA, 201 bp, Homo sapiens
ggggtttggggtttatatgtgtacaggatagcatggtgtggcaggccaaaaggcaacatttgggtgcaaaaacagggatgcctgttcccatttagggccayaggtttccaggcttgagggtggggccttagctggggtactgccttcttctacccagcatttccctgtctcctgtccatatcactagggtttttgtttttg

SEQ ID NO: 530540 - DNA, 201 bp, Homo sapiens
aaatccactcaaccatcttcctctaaaaatacaaggctttcacctttatagtccttatggtttagtcttttttgcgaagaggatttgaggaaggaagaccrggaaaacaaaatccagtgtttgggcatttggttgtgggaggagcccagaaatgctacaaaaatctaaacacatttaagttacttagattgtacttatttt

SEQ ID NO: 530541 - DNA, 201 bp, Homo sapiens
ttttccattttctcttctccaagactaccattttcaactcttagctaattcttttggtaattacatgtatatattaaataatatgcttggagctaattcatttttttttttttgagatggagttttgctctgttgcccaggctggggtgcagtggtgcgatctcggctcactgcaacctccgcctcccaggttcaagcgat

SEQ ID NO: 530542 - DNA, 201 bp, Homo sapiens
taattacatgtatatattaaataatatgcttggagctaattcatttttttttttttgagatggagttttgctctgttgcccaggctggggtgcagtggtgygatctcggctcactgcaacctccgcctcccaggttcaagcgattctcctgcctcagcctcctgagtagctgggattacaggtacgtgccaccaagcctgg

SEQ ID NO: 530543 - DNA, 201 bp, Homo sapiens
ttcttattcaaactgagttacagagctctaggtcaattcatccctagggattttggcctggaaaacaaggtggcaatgtggagagaattggagagttaggkgagatggtcagggcttccagctcgccttcctcagtcatgctcatctttagtcactagtggaattttcctgttttatagaactaatctgttcagtttctga

SEQ ID NO: 530544 - DNA, 201 bp, Homo sapiens
caagaagatgcccaggtgcccagccagtctgataacagtgctggcaacatggcacagttgtccatggcctctcgtgcaactcaggttgagactagttttgrtcaggaagctgcacctgagaaaagtagttttcagtgtgaaaaccctgaggttggccttggtgagaaggagcacatgagagtggtggttaaatctgagccc

SEQ ID NO: 530545 - DNA, 201 bp, Homo sapiens
ctcgccaccatggccggctactttttgcatttttagttgagatggggttttgccatgttgcctaaggtggtctcgaactcctgagctcaaacaatctgccygcctcagtctcccaaagggttaggattacagccatgagctaccacacccagcctatagttccataaggcttataggtaaaaagaaacaaaaacaacaaca

SEQ ID NO: 530546 - DNA, 201 bp, Homo sapiens
gaggagccagtgacacaggcagagcggtgcagccctccttcccttccatttggaggaggtggtgccaggagcctgcccgcttacctctgctgaagcataartggactttgcttttggggcttatctctgatacatgctggagccctgcctctccactgctagatggaacctggaatctctcatctacctcttagtctgtca

SEQ ID NO: 530547 - DNA, 201 bp, Homo sapiens
tccagcctgagtgagagagtgagatcctgcctcaaaaaaagaaaaaaaaaaaaatcctagcctgcacttccggagcctgtggtaggaggattgcttgagcsctggagttcaaaagcagcctgggcatattgagaccccacctgtatttaaaaaaaaaaaatcctagcctacttgagtgggtccttgctttgttctgctctc

SEQ ID NO: 530548 - DNA, 201 bp, Homo sapiens
ctgtccatatcactagggtttttgtttttgctgagcccacacagaagtaggatctgctagggttttatctagattgggctactgaatgttaaggattcctyagaatgttaatttgctttctgcaggtgacaactgtgtggatcctgcctggcaggcaagcagcaaattacttgatatggtagtagatgatgtttgagtatg

SEQ ID NO: 530549 - DNA, 201 bp, Homo sapiens
gtgtttagctacctcagtagcctcttttcaaagatcccctggctcttggaaaatttcctcaaaatggtgtttctgggaccacaatttaaaaaaattgtttrtttatttattttagagatgagggcttgccatattgcctaggctgttctccaactcctaggctcaggtaatcttcccatcttggccttccaaagtactggg

SEQ ID NO: 530550 - DNA, 201 bp, Homo sapiens
ctttgcttttggggcttatctctgatacatgctggagccctgcctctccactgctagatggaacctggaatctctcatctacctcttagtctgtcagtttmtacgtgtgagaagcaagcttgtgggccagtgtccttgtacatgctgtagcacttaaaaaataattccagggttccctggaaaaccagtcccagggttcct

SEQ ID NO: 530551 - DNA, 201 bp, Homo sapiens
agctgaactaccagagacttcatggccagctctgtgattgtgtcattgtagtggggaatagacactttaaagcccaccgctccgtgctggcagcatgcagyacgcatttccgagccctgttctcagtggcagaaggagatcagaccatgaacatgatccagctggatagcgaggtggtgacagcagaggcctttgctgcac

SEQ ID NO: 530552 - DNA, 201 bp, Homo sapiens
gccatttcagatgttacaccggagaatgggccttcaggggttcattctcgggaggagttcttttcaccagattctctgaaaattgtggataatcctaaagytgacggaatgactgataaccaggaagatagtgcgatcatgtttgatcagtcttttggcactcaagaagatgcccaggtgcccagccagtctgataacagt

SEQ ID NO: 530553 - DNA, 201 bp, Homo sapiens
tttcagatgttacaccggagaatgggccttcaggggttcattctcgggaggagttcttttcaccagattctctgaaaattgtggataatcctaaagctgayggaatgactgataaccaggaagatagtgcgatcatgtttgatcagtcttttggcactcaagaagatgcccaggtgcccagccagtctgataacagtgctg

SEQ ID NO: 530554 - DNA, 201 bp, Homo sapiens
aatgcagaattctaacaaacttctgtgggatagatatgccatcactcacacactggtctttactaatttagacccttagtgttatacatggctcatatgamgagtaaaggggagcctgtcggtagctaggcccacatgtgtgcatgcctcctgggctgatggctgaattgccatttgcttcttatatgacaagctcttagt

SEQ ID NO: 530555 - DNA, 201 bp, Homo sapiens
ccctccacagttgaccagggcatctgcagatgttctgtcaaagtgcaagaaggccttatcagagcacaatgttttggttgtagagggagctcgcaagtatkcctgcaaaatctgctgcaaaacttttctgactttgacagattgcaagaagcacatccgtgttcacacaggtgaaaagccttacgcctgcctgaagtgtgg

SEQ ID NO: 530556 - DNA, 201 bp, Homo sapiens
cattggtaatttgttgtcctagtatgggctgttgtgcttagatgtaaaaggctgggcagaacttgcttttcatttgcctaaactcttgtgatttctgtggrgacggtggttggcagtaagctaatagttcagagggaaaagtccagatgggaagaagacaaggaattttagagaaaagcccctaagccaaaggaaaccgtt

SEQ ID NO: 530557 - DNA, 201 bp, Homo sapiens
ttcctagtgttacatgaaataatgcattttataatcacagacatcttagatttaatgaaatttggtaaaattaatagaattttagctcaggtggcacacayctgtagtcccaactacttgggagtctgaggcaggaggatcacttgagttcaaaccagcccaggcaacatagtaaaatcctggctgcctatcccccataaa

SEQ ID NO: 530558 - DNA, 201 bp, Homo sapiens
aagtgatccccctcagcctcccaagtagctgggactgcaggcacataccaccatgcctggctaattgtttttgtatttttagtaagagatggggttttgcsccatgttgcccaggctggtcttgaactcctgggggctcaagggacccacctacctcggtctcccaaagcgctgggattacaggcgtgaaccaccaagttg

SEQ ID NO: 530559 - DNA, 201 bp, Homo sapiens
tcttcagttctcaaaatttaaaaaataccatttcttggccgggcgcagtggctcatgcctgtaatcccagcactttgggatgccagggtgggcggatcacytgaggtcaggagttcaaaaccagcctgaccaacaaggtaaaacccctgtctctactaaaaatacaaaaattagccgggtgtggtggcgtgcacctataat

SEQ ID NO: 530560 - DNA, 201 bp, Homo sapiens
tagactcctggactcaagcatttctcccaccttggcctcccaacatgttgagattataggcgtgagccaccatgcccagcacccagctaattaaaaaaaawtttttttgtagagaaaaggttttgctatgttaaccaagcaggtctcaaatgagcctcccgcttcagcctcccaaagtactgggattacaggtgtgagccc

SEQ ID NO: 530561 - DNA, 201 bp, Homo sapiens
ggctgaggtaggcagatcacaaggtcagtagcttgagactagcctggctaatatgatgaaacccagtctttactaaaaattaaaaaaaatggcctggcgcrgtggctcacgcctgtaatcccagcactttgggaggccgagacggacagatcatgaggtcaggagatcgagaccatcctgactaacaaggtgaaaccccgt

SEQ ID NO: 530562 - DNA, 201 bp, Homo sapiens
taaaaaataccatttcttggccgggcgcagtggctcatgcctgtaatcccagcactttgggatgccagggtgggcggatcacctgaggtcaggagttcaaraccagcctgaccaacaaggtaaaacccctgtctctactaaaaatacaaaaattagccgggtgtggtggcgtgcacctataatcccagctcgtcaggaggc

SEQ ID NO: 530563 - DNA, 201 bp, Homo sapiens
ccgccatggctgagctggatccgttcggcgcccctgccggcgcccctggcggtcccgcgctggggaacggagtggccggcgccggcgaagaagacccggcygcggccttcttggcgcagcaagagagcgagattgcgggcatcgagaacgacgaggccttcgccatcctggacggcggcgcccccgggccccagccgcacg

SEQ ID NO: 530564 - DNA, 201 bp, Homo sapiens
ctgtaatctcagctactcgggaggctgaggcaggagaattgcttgaacccgggaggtggaggttgcagtgagccgagatcgtgccactgcactccagcctyggcgacaagagtgaaaactctgtctcaaaaaaaaaaaaaaaaaacagaaccaggggttctaactcaggtgaagtgcattttaggaaggaatttttggtat

SEQ ID NO: 530565 - DNA, 201 bp, Homo sapiens
gaagttttgctgaactgtcaagaaagggatattctctgtatacagaatccgttgttctcagagggagtaatgacacctgttttttttttttttttttttttgagatggagtcttgctctgttgcccaggctggagtgcggtggtgcgatctcggctcactgcaagctccacctcctggattcacgccattctcctgcctca

SEQ ID NO: 530566 - DNA, 201 bp, Homo sapiens
tcaaaaaaaaaaaaaaaaaacagaaccaggggttctaactcaggtgaagtgcattttaggaaggaatttttggtattaatatagcacaattgtgttttgtrttaaggaaagtaatggtccaacagacagttatgcagctatttcacaagtggatcgattgcagtcagagcctgaaagtatccgtaaatggagagaagaaca

SEQ ID NO: 530567 - DNA, 201 bp, Homo sapiens
ggaagttttgctgaactgtcaagaaagggatattctctgtatacagaatccgttgttctcagagggagtaatgacacctgttttttttttttttttttttttgagatggagtcttgctctgttgcccaggctggagtgcggtggtgcgatctcggctcactgcaagctccacctcctggattcacgccattctcctgcctc

SEQ ID NO: 530568 - DNA, 201 bp, Homo sapiens
ttttgagagaagtacaacatttggccttgcattccaactgaattgaattcacttggttcatgaacaaggtgttccttcaatttcaccttttttccttgcaraaactgtgagaaagcacgcgatgctaaaaatagagaaccggtgccagtggttttcagcctagctgctggctacattctcaagtaattttcttttctctga

SEQ ID NO: 530569 - DNA, 201 bp, Homo sapiens
aggaagttttgctgaactgtcaagaaagggatattctctgtatacagaatccgttgttctcagagggagtaatgacacctgttttttttttttttttttttttgagatggagtcttgctctgttgcccaggctggagtgcggtggtgcgatctcggctcactgcaagctccacctcctggattcacgccattctcctgcct

SEQ ID NO: 530570 - DNA, 201 bp, Homo sapiens
ggctaaggacttgttttattaatgctccacaggagcagagacagacagagagacatagtgagccttgaaccaaacacctgtattccaacattttacacagyggtctgggcaccctgtgcctaggagagccagctacgtgtctacctgagtctgacctgggccaggggctgttatcttgggaaagccagaatgtcattaaga

SEQ ID NO: 530571 - DNA, 201 bp, Homo sapiens
gcaggttgttactataagacctttcttgcaaaggccctaaaaatgcccaagaatacttcatttttcatcccttctagtagttacttgacaccgctactgctatctactctccttctcaaagacactaattacagtttgggctcttggtctgcactttcaaaactctgtccagatcactggtggtcacgttttgtgattatt

SEQ ID NO: 530572 - DNA, 201 bp, Homo sapiens
ataccaggtacactttcagatcccagcagtagctccacaggttaagtggtagtgtcatatttcagatgagaatggatcggtgtggaagttgagcagtgtcmctaaggtagcaaggtaataaatggctcaagtgcagcttcaaacgtaggtctgcttgacttcaaatgtttctggaatgtggaaagttgaaagtgggtttgg

SEQ ID NO: 530573 - DNA, 201 bp, Homo sapiens
gagaatagggcactactggggcatataggagtagtgtctaccctaaattcaaaccttaaggagccaggtaggtaacatatacgagagaagctggcttgacmtgagacagtagaagtgttggagactgaggctttgctgcactatagtagtgctctgtgtaaaggcattcagatccagcagtctcaagttactgtgccagcc

SEQ ID NO: 530574 - DNA, 201 bp, Homo sapiens
tgcaggttgttactataagacctttcttgcaaaggccctaaaaatgcccaagaatacttcatttttcatcccttctagtagttacttgacaccgctactgctatctactctccttctcaaagacactaattacagtttgggctcttggtctgcactttcaaaactctgtccagatcactggtggtcacgttttgtgattat

SEQ ID NO: 530575 - DNA, 201 bp, Homo sapiens
ttatgggtttataagccagcctgccttgccttttcctcccactcattctgcccacaaacaactctgttttcctgctgagtcactttaagttataatcagcytgctctttttgctttctttaaatttccacaaaacacctcctgtgtataaaacaaaatgggaaagaaggaagggcatgtgtgagcttaaaaattaacttaa

SEQ ID NO: 530576 - DNA, 201 bp, Homo sapiens
ttgcaggttgttactataagacctttcttgcaaaggccctaaaaatgcccaagaatacttcatttttcatcccttctagtagttacttgacaccgctactgctatctactctccttctcaaagacactaattacagtttgggctcttggtctgcactttcaaaactctgtccagatcactggtggtcacgttttgtgatta

SEQ ID NO: 530577 - DNA, 201 bp, Homo sapiens
tgacaggagtcatgaaacctctactcttcttgtggagggaaacccaagttgaaatcgatcaggtttagtcctttgtgtaaactaaaagggttatgggtttmtaagccagcctgccttgccttttcctcccactcattctgcccacaaacaactctgttttcctgctgagtcactttaagttataatcagcctgctcttttt

SEQ ID NO: 530578 - DNA, 201 bp, Homo sapiens
gcaagctctgcctcccgggttcacaccattctcctgccctcagcctcctgagtagctgggtctacaggcgcccgccactacgtcccgctcattttttttttgtatttttagtagagacagggtttcaccgtgttagccaggttggtctcgatctcctgaccttgtgatccacacaccttggcctcctaaaatgctgggatt

SEQ ID NO: 530579 - DNA, 201 bp, Homo sapiens
gtatataagcacatcttggttttatttgttgtatatagcacctaccacagggatagcatttagtagctcaaggttcatacagcatatgatgctgtattctrctgtacaaccctttggcccagtgtttgaccagtccttattgatagaccaaaatcttatgtcttgcagatgctgttgatggagtaatgaatggtgaatact

SEQ ID NO: 530580 - DNA, 201 bp, Homo sapiens
gccactttgctccagcctgggcgacagagcaagactgtctcaaagatgaagctgcaggtctctgctcactatgggtgattccaggccacacttttttttttccctcatgcagaattttcatagagaaacactgttctctttctgctagtcttccatttgttaccactgtaaaatagaaaacagaaaataaaatcaaaagct

SEQ ID NO: 530581 - DNA, 201 bp, Homo sapiens
cctcccaccttggcctctcaaagtgctgggattataggtgtgagccaccgcgcccagctgtaacccagcaattctacaccaagaaatttattacagaggcraaattgaatatgcttcccccatgctttcactagtttgataaacttcatatttccaaaactttatagagtgcttaaaaaactacataggtaggtggcacat

SEQ ID NO: 530582 - DNA, 201 bp, Homo sapiens
tgcttacagttatattaagtatctagtgaattccagctactattagtgggagaaaggagttacaaggcctttaggctttgaagtgtactgagtaaattgargttttaggcgggagctctctttctgatgtattatacagagatatataggcagtcagctatgacagattgatgagaggaaaataaactggccccagccttg

SEQ ID NO: 530583 - DNA, 201 bp, Homo sapiens
catttgttaccactgtaaaatagaaaacagaaaataaaatcaaaagcttttggacttgggagcttaaggacagatgtgtacacattttggtgaaatttgtrtataagcacatcttggttttatttgttgtatatagcacctaccacagggatagcatttagtagctcaaggttcatacagcatatgatgctgtattctact

SEQ ID NO: 530584 - DNA, 201 bp, Homo sapiens
acgcctgaaatcccagcactttcggaggctgaagtgggcggatcacctgaggtcaggagtttgagaccagcctgaccaacatagtgaaacctcgtctctaytaaaaaatacaaaaattagccgggcatggtggcacgtgcctgtaatcccagctattcgggaggctgaggcaggagaatcacttgaacctgggaggcggag

SEQ ID NO: 530585 - DNA, 201 bp, Homo sapiens
gccaaatcatttatctctctagtccaatttaggtggctttcagaacaaagaatgcacttagtatttgaacctttatagcaccattcattagtgatttcttyggtggaaatattctgtatctgtgctgtctcgtatggtagccactaaccacatgtaactgttaagtacttgaagtgtggcttcacaattcaagtgtgactg

SEQ ID NO: 530586 - DNA, 201 bp, Homo sapiens
aagattaagatgaataccctactatgaactaatattggcagcattggtaaagaatcatctataattgtttctcccccaattggtgcccagaaggctttttycctattaataatagaagtcagtatttccacatacacccttctcttttgctctgcccaaaacaagacaaaacaaaactaatgacccactaagatgtcagtg

SEQ ID NO: 530587 - DNA, 201 bp, Homo sapiens
aactgacacccagaaataggaagggacatgacccagatgacacagccaattagtgccaaatcatttatctctctagtccaatttaggtggctttcagaacraagaatgcacttagtatttgaacctttatagcaccattcattagtgatttctttggtggaaatattctgtatctgtgctgtctcgtatggtagccactaa

SEQ ID NO: 530588 - DNA, 201 bp, Homo sapiens
cgctcagtcctcatctccctcaagcaggccccgctggtgcactgaagagccaccctgtggaaacactacatctgcaatatcttaatcctactcagtgaagytcttcacagtcattggattaattatgttgagttcttttggaccaaacctttttgtctttagagttgttcattgtttgtgattgcatgtttccttccttca

SEQ ID NO: 530589 - DNA, 201 bp, Homo sapiens
caggtgggaaggaggtttccccacctgggagcaggtggcagtcccaggaggttaggagccagtgagcagcagcaccttgcattgccaaaatcagagctgtsgggcagcattttccatacttggttcattcaaacaatgtggggtcgtttgcctctccctcaggcagaagagtccagagcagagggggttgtctccagtggg

SEQ ID NO: 530590 - DNA, 201 bp, Homo sapiens
gaccactcacctccagccgttttttcctgtaaggttgagattttaaaatgacgatatgtgttcccaggattctggaagtgtatcccacccagacagtgtgrggaagcagtagttagataatccaagataaaactggctttgggtcctagcgcatctggtgtctggcagcattcctgcccagtgcattaactgaaacaggaa

SEQ ID NO: 530591 - DNA, 201 bp, Homo sapiens
ttttttctgtgcccactttgaggctgtttatggaatgaagttctgcattgtattcgtgcctccagagcttgtcctaggtcaggtattcctcttccctcccytctcctaagcctccctgagccccttcctgccttggctgaggattgctactttcaagtgaaggacaaataaggggagggccacctgtgtgtgtgtctgatt

SEQ ID NO: 530592 - DNA, 201 bp, Homo sapiens
ggttgccagtggtgatggcttccatcagctacgtggggctgttgttgagcctgtggtcagtaggtggtgctgacaggtccaggctcctgtgtcctctgctscctcaagatgattttctcccaggtggaagttcagatcggtaaagccgagtggggactgtgtgcaagcaccctgcgagccctgagaactcccccagcctgc

SEQ ID NO: 530593 - DNA, 201 bp, Homo sapiens
cctactcagtgaagctcttcacagtcattggattaattatgttgagttcttttggaccaaacctttttgtctttagagttgttcattgtttgtgattgcaygtttccttccttcaactgtgttctccctggcattcagagaggagggagaggaggaagaggaaggggagggaagcttcccaagagtagcctcaacctgtgc

SEQ ID NO: 530594 - DNA, 201 bp, Homo sapiens
tgtagcaaggcagccaccaggttgctcaaagggggttctgcataaaccaacatattttgttgttgcttccagggcagcagaagaagcctttgtaaatgacrttgacgagtcgtccccaggcactgagtgggaacgggtggcccggctgtgtgactttaaccccaagtctagcaagcaggccaaagatgtctcccgcatgcg

SEQ ID NO: 530595 - DNA, 201 bp, Homo sapiens
ggctctgggcttcagcggtgtttgccacggccatccctgtgatagtgccacccctccgtccccacagaccagtcatctccattgcttttgctttgcccgtratgcttgttggagtagatgaatatagtgtgtcttagcgctgtcctttccggctgtagctcccaccagttaattccgaactgggggtgggctgaccttgat

SEQ ID NO: 530596 - DNA, 201 bp, Homo sapiens
tcacctttaagcacaaacataaaccatccttgctacagcctagaacagttaagtaaacctttctcactgcccctaactgtgtgtgccatgaagtcgcagtrttgtagtggctctgggcttcagcggtgtttgccacggccatccctgtgatagtgccacccctccgtccccacagaccagtcatctccattgcttttgctt

SEQ ID NO: 530597 - DNA, 201 bp, Homo sapiens
gttggtaatatgcagtggtcagcatttcctttggagtttagagaactgattggacactttttctctcttagttttctttttccttctttttttttttttttaaagatatgctctagtggttaagattctatgctatcctaaactgcttgagtgtgagtttagctttgtgatctcagacaatgtatataactaccaccactg

SEQ ID NO: 530598 - DNA, 201 bp, Homo sapiens
tgtggaaacactacatctgcaatatcttaatcctactcagtgaagctcttcacagtcattggattaattatgttgagttcttttggaccaaacctttttgyctttagagttgttcattgtttgtgattgcatgtttccttccttcaactgtgttctccctggcattcagagaggagggagaggaggaagaggaaggggagg

SEQ ID NO: 530599 - DNA, 201 bp, Homo sapiens
gccaccctgtggaaacactacatctgcaatatcttaatcctactcagtgaagctcttcacagtcattggattaattatgttgagttcttttggaccaaacytttttgtctttagagttgttcattgtttgtgattgcatgtttccttccttcaactgtgttctccctggcattcagagaggagggagaggaggaagaggaa

SEQ ID NO: 530600 - DNA, 201 bp, Homo sapiens
tagctttgtgatctcagacaatgtatataactaccaccactgcccggcctcagttttctcctttgtaaaagttgcataatataatttataatgctatgtgkcatctttaggattacattaaagagtgtctataaagtgcttacagttatattaagtatctagtgaattccagctactattagtgggagaaaggagttacaa

SEQ ID NO: 530601 - DNA, 201 bp, Homo sapiens
gaacccgggaggcagaggttgcagtgagctgagattgcgccactgcactccagcctgggcaacagagcgagactcagtctgaaaaaaagaaaagaaaaaaraaaacggggtgctcatttcaagcaagtatgattctctctgggtgacttctgcagtagctagatgttaaggggacccgagagataaggcagaaagatgaga

SEQ ID NO: 530602 - DNA, 201 bp, Homo sapiens
ggtgtagtgcgataacagacaggcagctgtggctgtcccaggtggaacagatttgggagaagcagaacccaagatctgtagttggaagattgtcctgattsaaggacagtgttacccttactgttttatctccactgcctagcagtgtgtctgacatgtagtagatgctcacgtttgacaaagaaatgggcaaaaatgtca

SEQ ID NO: 530603 - DNA, 201 bp, Homo sapiens
cgccattctcctgcctcagcctcccgagtagctgggactacaggtgcccgccaccatgcccagctaatttttttctgtttttagtagaaacaaggtttcastgtgttagccaggatggtctcgatctcctgacctcgtgatctgccttccttggcctcccaaagtgctgggattacaggcgtgagccaccgcgcctggcca

SEQ ID NO: 530604 - DNA, 201 bp, Homo sapiens
ctacaaaaaaatagaaaaattatccaggcgtggtggcgcatgcctgcaatcccagctcctgtggggactgaggtgggaggttcgcttgagcccaaaaggtygaggctacagtaagccatgattgggccactttgctccagcctgggcgacagagcaagactgtctcaaagatgaagctgcaggtctctgctcactatgggt

SEQ ID NO: 530605 - DNA, 201 bp, Homo sapiens
aggagggcggaaaaaaataagaatggaaatatcgtttttgagagatacaaacaaaagtagcaatgcagttcagcatttaagcacttaaggtgtacagagtrttggattacgaggaggaaggagggagtagggaactcgaaagatgatctaggtctggagaaagaactgccaagcgcggtaggagtttgctatcgttgagcg

SEQ ID NO: 530606 - DNA, 201 bp, Homo sapiens
cacgggtagggcttccgctttacccgtctccctcctggcgcttgtcctcctctcccagtcggcaccacagcggtggctgccgggcgtggtgtcggtgggtyggttggtttttgtctcaccgttggtgtccgtgccgttcagttgcccgccatggctgagctggatccgttcggcgcccctgccggcgcccctggcggtccc

SEQ ID NO: 530607 - DNA, 201 bp, Homo sapiens
cccacagttctcagagatggcaaacatttttttctgtgcccactttgaggctgtttatggaatgaagttctgcattgtattcgtgcctccagagcttgtcstaggtcaggtattcctcttccctcccctctcctaagcctccctgagccccttcctgccttggctgaggattgctactttcaagtgaaggacaaataaggg

SEQ ID NO: 530608 - DNA, 201 bp, Homo sapiens
aaggaacttccccactgctcactgagaatgtagagctgcttaggaagcaggtcacttgccttgtgggaaccttgcagcacagggctgactcttgagagcataacgctagtggcacactagccattgtcaccagggctctaggacagaagagatggtttttacagtttattccagtgattcttcactggttggaggtgggat

SEQ ID NO: 530609 - DNA, 201 bp, Homo sapiens
gggctttaatgccctacacttagagcccttcttggaagcagcaaagagaggatatgtggtgttgcttccctcagggcaggcaggttcagagcccaactttyactgaatagtcaatccattcacttcagtgtataaacgggccagaccgagcctggggatatttttaattttcagggtagagccttgggttctcgtatgcag

SEQ ID NO: 530610 - DNA, 201 bp, Homo sapiens
ttgtttagccatcccaattgtagtgagcttagctctctgagagtttggttaatatgcataacctgtaatggtgtgattcagccaagggaaaagttactttycatggaaccctgaaacgaaagctgggtgtcatgaatacacccagatctagttactttggatatgattatagacttggtcatgttgagtctcctcaatata

SEQ ID NO: 530611 - DNA, 201 bp, Homo sapiens
agaaacttcatgtttcatgtttgagaatccaatctagcaaacctgctaggtatgcattttcttgctgtcatttctagaacctttaggttaactgttagcartgatcccatacctctaccccctgcacttctctccagtggagtttcttttgtagctctgccctggctctgccacaaacacactgcagaccaagtaggagta

SEQ ID NO: 530612 - DNA, 201 bp, Homo sapiens
tattagaaaaggagggcggaaaaaaataagaatggaaatatcgtttttgagagatacaaacaaaagtagcaatgcagttcagcatttaagcacttaaggtrtacagagtgttggattacgaggaggaaggagggagtagggaactcgaaagatgatctaggtctggagaaagaactgccaagcgcggtaggagtttgctat

SEQ ID NO: 530613 - DNA, 201 bp, Homo sapiens
ttttggtgtctgttttcagtggagtagttgagctggactctacttttattcctttttagctcacattaaccagtgtcattgtctggtctttgggaagataycttctcagcctgaaggttacaaggctacctgcacagagatgcctaatcacaggccattgtgtgaggagtagggtagccggagatccccaagatcctctca

SEQ ID NO: 530614 - DNA, 201 bp, Homo sapiens
ctgtctatgggtaaagagtgaatatttttagaaaagaaaatgggggccggacaccgtgactcaacatctgtaattccagcacattgggaggctgaggcggrcagatcacttgaggtcaggagtttgagaccagcctgcccaacatggtgaaaccccatctctactaaaaatgcgaaaattaactgggtgtggtggtgtgtg

SEQ ID NO: 530615 - DNA, 201 bp, Homo sapiens
tttaaccccaagtctagcaagcaggccaaagatgtctcccgcatgcgctcagtcctcatctccctcaagcaggccccgctggtgcactgaagagccacccwgtggaaacactacatctgcaatatcttaatcctactcagtgaagctcttcacagtcattggattaattatgttgagttcttttggaccaaacctttttgt

SEQ ID NO: 530616 - DNA, 201 bp, Homo sapiens
gatgtctcccgcatgcgctcagtcctcatctccctcaagcaggccccgctggtgcactgaagagccaccctgtggaaacactacatctgcaatatcttaaycctactcagtgaagctcttcacagtcattggattaattatgttgagttcttttggaccaaacctttttgtctttagagttgttcattgtttgtgattgca

SEQ ID NO: 530617 - DNA, 201 bp, Homo sapiens
ttgcatgtttccttccttcaactgtgttctccctggcattcagagaggagggagaggaggaagaggaaggggagggaagcttcccaagagtagcctcaacytgtgcttctgtgcattattctgagaataaatttctgtttcaaactgtattatgtgaagcttctttattgacctcaagatgtgttgtagtttggagtgagg

SEQ ID NO: 530618 - DNA, 201 bp, Homo sapiens
tgtaatggtgtgattcagccaagggaaaagttactttccatggaaccctgaaacgaaagctgggtgtcatgaatacacccagatctagttactttggataygattatagacttggtcatgttgagtctcctcaatatagccctgccccctgaaagccacttcatgaaggggtccgttggcaggaatatgtgctttgtaatt

SEQ ID NO: 530619 - DNA, 201 bp, Homo sapiens
acaaaaaatgtaaacctaatttggcagtttgttaggttagacaactgacagcctcatttcattcctacaagttggttttcagtaatctcttccttcccccyagtaaggctggaagaggctcttggcaaacttcttagtgcaagcaatggttagattaatttgtgaggcagctctttaagacgttcagaggtaagaaatact

SEQ ID NO: 530620 - DNA, 201 bp, Homo sapiens
caaaccggtattgagtgtttaggcgagtggaaagtggctacaatccaaaattttaaatttaactctgcctcggccattcaaaagtctaataacaaaaaatrtaaacctaatttggcagtttgttaggttagacaactgacagcctcatttcattcctacaagttggttttcagtaatctcttccttccccccagtaaggct

SEQ ID NO: 530621 - DNA, 201 bp, Homo sapiens
agtgccctctggctttacagtgcagagctgaagcctcattttgactgaactgtaagatgcagcagtgattatctctgatattagaccctttttctttattwtttttttttttttgagacggagtttcgctcttgttgcccaggctggagtgcaatggtgcaatcttggctcaccgcaacctctgcctcccaggttcaagcg

SEQ ID NO: 530622 - DNA, 201 bp, Homo sapiens
tagacaactgacagcctcatttcattcctacaagttggttttcagtaatctcttccttccccccagtaaggctggaagaggctcttggcaaacttcttagygcaagcaatggttagattaatttgtgaggcagctctttaagacgttcagaggtaagaaatactggatttataaagcaaatggctgtttgggggattccaa

SEQ ID NO: 530623 - DNA, 201 bp, Homo sapiens
gggaggggtaccgaaatcgttaaatttgtcagtttgcaaaaatatcaatctttaatgggagaattttcaatttgccaattttttccttgaatgggtttaastatgctacaatatacagttcaggcaaaatttaagatgtaattatcttcaatacttaagtgtgcttgctttctagtgccttggttttctttcttgatgctg

SEQ ID NO: 530624 - DNA, 201 bp, Homo sapiens
aaaatagtattgatatattttatgtgactgcatttttggggaggggtaccgaaatcgttaaatttgtcagtttgcaaaaatatcaatctttaatgggagamttttcaatttgccaattttttccttgaatgggtttaagtatgctacaatatacagttcaggcaaaatttaagatgtaattatcttcaatacttaagtgtg

SEQ ID NO: 530625 - DNA, 201 bp, Homo sapiens
tttggagactagactgaaacttttttgggggagggggcaaaggggactttttacagtgatggaatgtaacattatatacatgtgtatataagacagtggamctttttatgacacataatcagaagagaaatccccctggctttggttggtttcgtaaatttagctatatgtagcttgcgtgctttctcctgttcttttaat

SEQ ID NO: 530626 - DNA, 201 bp, Homo sapiens
acatagtttcagtgtgatttctagagctaattcaaaatagtattgatatattttatgtgactgcatttttggggaggggtaccgaaatcgttaaatttgtyagtttgcaaaaatatcaatctttaatgggagaattttcaatttgccaattttttccttgaatgggtttaagtatgctacaatatacagttcaggcaaaat

SEQ ID NO: 530627 - DNA, 201 bp, Homo sapiens
cttcaaggatccgagccgagatgttcgccaagggccagccggtcgcgccctataacaccacgcagttcctcatggatgatcacgaccaggaggagccggayctcaaaaccggcctgtactccaagcgggccgccgccaaatccgacgacaccagcgatgacgacttcatggaagaagggggtgaggaggatgggggcagcg

SEQ ID NO: 530628 - DNA, 201 bp, Homo sapiens
aacagttccaggctgcagtgagcgtcatccagaacctgcccaagaacggtgaggctgcggggactcgcatttggactcgcattcaggacgcctggggtctractctgaagaaagaatggtcctgatcactgcagtttttgcagacaagcccctgcctgggctgtcctgggggttccctccgcttcctatcctagtccagat

SEQ ID NO: 530629 - DNA, 201 bp, Homo sapiens
ctcctatcttgtttctccacctgttcgggagttggagatgtgcacctaaaggaggcgcatctggggacggacacatctggcactgaggccctcgccacctscctcgccacctggcgaccctgaccccaccacactgccttgaggtaggaaaaggaggctcctcaaccacaacttctgacctcccagggtgtctgaggcctc

SEQ ID NO: 530630 - DNA, 201 bp, Homo sapiens
gcaggagaatcgcttgaatccaggaggcggaggttgcagtgagccgaggtcattgtgccactgcactccagcctgggcaacagagcaagactgtctaaaamaaaaaaaaaaaaggtaatgacttgatctgtgtcataagcggccatgctgggattaaacccatagcagcccattactcagctacatagatggactttgcaa

SEQ ID NO: 530631 - DNA, 201 bp, Homo sapiens
ctgtatttttgtacccatttccccccctccccagtacccttcccagcctctggtaaccatcattctgcgatgtccattttgcttactctttttttttttttgagatggagtctcactctcgcccaggctggagtgcagtggggcaatcttggctcactgcaatctccacctcccgggttcaagcgattctcctgcctcagc

SEQ ID NO: 530632 - DNA, 201 bp, Homo sapiens
ctatttgcatgatcttgaaagagctgtgctgaatggttgaggtaggtaagccgaatgtgaaacaggctctctcattggcctaaattccccccctcgatctrcgtcgccatcccggccctgctggaccccggggtcagtaggaagccgcggggtggtggcgagagaggacccaggtgtcctggcagtgggcgccgcggggca

SEQ ID NO: 530633 - DNA, 201 bp, Homo sapiens
agtccccgccctccctcctctccccaaagggcacccaggagtctgcaccctctgcaggtcctgagtaaggccagcgggatgggagtcctagcccagttctyccacctacagctgcacagcctcaggaagtcatccatattctctggactcccccgtttggaaatctcagaagacaatgagttctgccctcttcccttctag

SEQ ID NO: 530634 - DNA, 201 bp, Homo sapiens
acaggaggccactccgtccccaacagaccccctcccctacaggtgatcgacacagtgcccctgggtgaggtggcagaggacatgtttggttacttcgagcycctgtaccaggtgatccctgacatgccgaggcccccagagaccttcctgagaagggtcacaggtcagactcccaggctgggagctccaaaagtgctgagt

SEQ ID NO: 530635 - DNA, 201 bp, Homo sapiens
caggcccagtgctcggccatggccccttgggctcccggggcccgcgctgctcttcttcctcctgtggcccttcgtcgtccagtggctcttccgaatgtttyggacccaaaagaggtgactgtcagtggaggggtctctgcagccaactgagactatcttgctgtgccctgagccttcctagggtttagaagaacagcattc

SEQ ID NO: 530636 - DNA, 201 bp, Homo sapiens
cccagggacgcctggaacagtctgggcaagatgagcagggaggaggccatgtctgcctacatcactgaaatgaaactggtggcacagaaggtaagggctgyaggttctctgtccccaggctcctggccaggtggcctcacccttccagttctgacccccactacgtttcctacacatggaccccctcatgggaatcaccac

SEQ ID NO: 530637 - DNA, 201 bp, Homo sapiens
accacaggacatgactttttttaatccccagtgcctaagtgtctagagagctgagtgggttgcctcggatcggccaggcctggatatcagcgaacagatgmggatttccaccagggggcgctaggacgccacgacctttcactatgtgcaccagggggcgctgccgcccgccttggccatcccgggctgggaagtccgacc

SEQ ID NO: 530638 - DNA, 201 bp, Homo sapiens
ttgatctgtgtcataagcggccatgctgggattaaacccatagcagcccattactcagctacatagatggactttgcaagaatcacacttggtacagcgaytgggttccactcctacactttcctgggcttgccccagcctgcccccaccctgcccagagctgaattgcctcctgagcccccttccctgtgtgtctgtgct

SEQ ID NO: 530639 - DNA, 201 bp, Homo sapiens
ctgggaagtccgacccttcgattaagccccgcctgattgggaaaggctctgagaaactatttgcatgatcttgaaagagctgtgctgaatggttgaggtakgtaagccgaatgtgaaacaggctctctcattggcctaaattccccccctcgatctgcgtcgccatcccggccctgctggaccccggggtcagtaggaagc

SEQ ID NO: 530640 - DNA, 201 bp, Homo sapiens
cctgatcactgcagtttttgcagacaagcccctgcctgggctgtcctgggggttccctccgcttcctatcctagtccagatgccctgggtgggacccatcmccacctctgccctttccaagcagggttctcccgcccctccgccccttggagctgggagtgatgctttgccctggcttcccaactctctgcccaggttctt

SEQ ID NO: 530641 - DNA, 201 bp, Homo sapiens
tggtggcgagagaggacccaggtgtcctggcagtgggcgccgcggggcacacgctgggccaaggtgcaggcggccagggtgggagactgttcgccccgccytgagtactcctatcttgtttctccacctgttcgggagttggagatgtgcacctaaaggaggcgcatctggggacggacacatctggcactgaggccctcg

SEQ ID NO: 530642 - DNA, 201 bp, Homo sapiens
cacctgaggtcaggagttccagaccagcctggccaacatggcaaaaccccgtctctactaaaaatacaaaacttagctgggcgaggtggcaggcacctgtratcccagctactcaggaggctgaggcaggagaatcacttgaaactggcaggcagaggttgcagtgagctgagatggtgccattgcactccagcctgagct

SEQ ID NO: 530643 - DNA, 201 bp, Homo sapiens
cccggtgctgggttggccgtgactcgggggcggggcgatcgggtctcagcccctgccttccccagtctctgggtcacccgaattttcccacccctgcttcyccccgaggaggttgagctcttgagcaagttgggacttgggccggggcctggaagaatgattggctgggaggccgcgggagggaggccaggaggcccggac

SEQ ID NO: 530644 - DNA, 201 bp, Homo sapiens
gagctgtttcctcttcccacgttacttaatctctcaccccctctatttcagctgagcgtgtttttccccatcgtgttctgcatatgctccgtgtttctggkgatagtgcccctcttcactgacaccattaattccctcattggcatcgggattgccctttctggagtccctttctacttcatgggtgtttacctgccagag

SEQ ID NO: 530645 - DNA, 201 bp, Homo sapiens
ctctttcgggtactttggaaaaagaaagatgtggaatgggcaagcagcaacatgggagagtgaggtaggtgttgcagacacagtgatacccaggcatgtattttttttttttttttgagaccaagtcttgctctgttgccaggcagtggcgtgatcttggctcactgcaacctccgactccctggttcaagcgattctcct

SEQ ID NO: 530646 - DNA, 201 bp, Homo sapiens
tcctgacagaaatttgcccttggccattgggatttctatgccaattgtgacgctcatctacatcctgaccaatgtggcctattacacagtgctgaacattwcagatgtccttagcagtgatgctgtggctgtggtgagtctcttgggatccccatttgttcatcatctcctgatactgagccaccctgcacagctcagtct

SEQ ID NO: 530647 - DNA, 201 bp, Homo sapiens
gtgcgcgcctgtaatcccagctacttaggaggctgaggcaggagaatggcttgaaaacaggaggcggaagttgcagtaagccgagattgtgccactgccchccagcctaggtgacagagcaagattccatctcaaaaaaaaaaaaaaaaaaagaattgcccttgttgggctgggcgcggtggctcatgcctgtaatctcag

SEQ ID NO: 530648 - DNA, 201 bp, Homo sapiens
gtttttttttctttcccctgccttcttgttttttctttcttgttcctccccattcctcctttttttcatcttcccttcctctttcctattctcctttcgtwtctttctcttacacctcccatctcctcttcctttctcctttggcctgttccttctctctgaacccctcacctgcctttgcccccacaggacactctgagc

SEQ ID NO: 530649 - DNA, 201 bp, Homo sapiens
ctattttggggctaaaacattacctcctgacaacacaaatcacctgggaagatgagttgtgcatcagactctggttgggcatgggacagaggatgatgagrcttgttgggagacaggggcaaagcctgatatagggtacttaaggggcaggtggcgagggagccatagatgttactagtcagccttgttcaggttagggct

SEQ ID NO: 530650 - DNA, 201 bp, Homo sapiens
agaagtattgtcacatcagagggcggccaagaatgtctttggttttttattgtctagttttattaaaggaatgtgagctttcctgaggaagtgggtggggkggtaaagtgtagggagctagtggttgttgatcttttggtgttaaattatgtttttttttctttcccctgccttcttgttttttctttcttgttcctcccc

SEQ ID NO: 530651 - DNA, 201 bp, Homo sapiens
aggatgatgaggcttgttgggagacaggggcaaagcctgatatagggtacttaaggggcaggtggcgagggagccatagatgttactagtcagccttgttyaggttagggctgtagctagatgtttactaaaccctgtgcttgctctattttcatttagctgctatcaccagaggcacccagcagctttgcttttgtgtcc

SEQ ID NO: 530652 - DNA, 201 bp, Homo sapiens
ctagatgtttactaaaccctgtgcttgctctattttcatttagctgctatcaccagaggcacccagcagctttgcttttgtgtcctgactgagcttgatgyagccgaagaaaaaaaggatgagaggaaaactgactagaggtcagaggtggctttctgaggcctggaaggcaggccaaccagcaaaatcctgataacaaga

SEQ ID NO: 530653 - DNA, 201 bp, Homo sapiens
tgtggtgagtctcttgggatccccatttgttcatcatctcctgatactgagccaccctgcacagctcagtctgtcttactgcaccctcctcagctctgcargatgaggtcatgagtctaggccagagggtgggctgcttagcagtgattgcatttgttccgagatcatagatgcaggaggattatgaaaccctgtgcgttt

SEQ ID NO: 530654 - DNA, 201 bp, Homo sapiens
cccaagcaatcccaacctggtgctaggtcatttcacttttctgaaaacctcacatcaggctgcatcctcttctgtccctggcaccaggctttgtttacacytggagccaccttggtgtgggtcaccgggacagtgtactcctctcctgccagcctccccttccccgaggtgtggtggctgcagtctcaggaagagcttggt

SEQ ID NO: 530655 - DNA, 201 bp, Homo sapiens
cttcactgacaccattaattccctcattggcatcgggattgccctttctggagtccctttctacttcatgggtgtttacctgccagagtcccggaggccaytgtttattcggaatgtcctgggtgagcttctctgtgccccattactcactggcggctatgtgtgcatgcgcatgcagaggtggggggtggctaacagctt

SEQ ID NO: 530656 - DNA, 201 bp, Homo sapiens
gccttatgatctgcctgcctcagcctcccaaagtgctgggattacaggcgtgagccactgcgcccagcatgcattttgttactgaatgaagataaagaagyctggcatggtggctcacacctgtaatttcagcacttcaggaggccaaggtaggaggatcagttgaggccaggagttcaagaccagcctgggcaatgtagt

SEQ ID NO: 530657 - DNA, 201 bp, Homo sapiens
tttcagcacttcaggaggccaaggtaggaggatcagttgaggccaggagttcaagaccagcctgggcaatgtagtgaaacactgtctctacagacaaattaaaaaaaaaaatacataaataaatagctgggcatggtggcaagcacctttagtcctagctactcatgaggccgagatagaggactgcttgagcctaggagt

SEQ ID NO: 530658 - DNA, 201 bp, Homo sapiens
tttcccagatttttatcttaaaccagttaaagtcatcagtgagaaagtaggcttcactagactgtgggagtcctacggtgttaaacttcaggcccacaggwccctttcctgtctgccattgctgctctttgcggcttgctctgagcagcaggtacaacaaaacaccttttcttcctagtgtatcagacttctttacactga

SEQ ID NO: 530659 - DNA, 201 bp, Homo sapiens
gttgtagtcagcagagcctagaatgacatcccgggagtggattctaaatgtgattttcctaggctactgcaggagccccttctcttctcagaaaggtctgyttttgttcccgattgtaatgcaaaatccttgctcaataaataaaaaagaatatagaattcttttttttttaaagaaggaatcactttcctatcatctaaa

SEQ ID NO: 530660 - DNA, 201 bp, Homo sapiens
aagttaggcctgctctggcctaatggatcttactgtatgagcaggacggctgcattggattgtacaactgttttgtgatgcccccagacactgtcatcctrggccgagaagaacctgctagcttgacataccccatgggcttatccttaggttttggaattggtcaacagtgaggcagtctcccttcctgaccattcttct

SEQ ID NO: 530661 - DNA, 201 bp, Homo sapiens
tcactggggtcagatttctctgcttgtctccatgttgacttgggtagaaaaggcatcctaggtctctttgcacctgactcttatgtgagactataggctcyccagctgtgtactggttttgttctaatggatgcctgggctcacctgacaggcacatgaaaacaaatatgtttccaggtgcctgcacaggaaacctgcatg

SEQ ID NO: 530662 - DNA, 201 bp, Homo sapiens
tgcagaactagtgttttaaatgagaaagacccagaattctatgttccttagcactgtactgccagaggtacttaataatattctgttctttccacatctcygcttgcaaaagcattggcagtatatgcagtttatccagtgttaaaaatagcctgagagtaccttggagttagcaataaaggactgtagaatacccatgcc

SEQ ID NO: 530663 - DNA, 201 bp, Homo sapiens
aagactttccccctcacttcccagaaaatgccgaggccatcaggtctcctgatctcctctgtgcagacatctataagcgtgctggtccttcctgttgttgmagaggaaggagcaggtgtgcctttcctggcagactctgctacttgggctcggggttccagcacttcccctcttcttcagcagtttgctccatcagttggc

SEQ ID NO: 530664 - DNA, 201 bp, Homo sapiens
ggatgcaataggctgattgtatttaaaaatcaaagtacccaaaactgagtccctttgggctcagaaatgtctgtggtattgggtcagactctgaccacagrttttatgctgtttagcacaatttctattgagtcttacctgcaacaatgaaccttaaagatttttttactcacgtacctgttacactttagcatacagata

SEQ ID NO: 530665 - DNA, 201 bp, Homo sapiens
tgtggaatccaacatgaggggcatgctggggaagaaagcaaatacaccagtggcaaattagccctgggttgggatgcccctggatgtcctttctctacccwgtcttattacgtaacccttctctttcgggtactttggaaaaagaaagatgtggaatgggcaagcagcaacatgggagagtgaggtaggtgttgcagacac

SEQ ID NO: 530666 - DNA, 201 bp, Homo sapiens
agaaaccctgtctctactaaaaatacaaaaaattagccgggggtggtggtgggtgcctctaatcccagctactcgggaggctgaggcaggagaatcgcctkaaactgggaggcagaggttgcagtgagccaagatcttgccattgcactccagcctgggcaacaagaacgaaactctgtctcaaaaaacagaaaaagaaaa

SEQ ID NO: 530667 - DNA, 201 bp, Homo sapiens
tgatggctccaagaaaaattgttgtttgtcactggagtgggaatgtgctatccatcctgagtggaagctggaagttgaggactttccattttatattggatttttttttttttttttgaaacagtcttgctctgttgcccaggctggaatgcagtggcatgataatggcttaccgcagccctgacctccttggctcaagaa

SEQ ID NO: 530668 - DNA, 201 bp, Homo sapiens
agaagtgtgactggcacaggagttgagggagggagaagatcacgctgggtgcagggtcaggaaggtgcttattttcctttgatagattctgggtccttcayaggtaggttaatgtggaatccaacatgaggggcatgctggggaagaaagcaaatacaccagtggcaaattagccctgggttgggatgcccctggatgtcc

SEQ ID NO: 530669 - DNA, 201 bp, Homo sapiens
gtgactactgtcagcgtagctgggagtacagcttcagattgccaggcaatctcctcatcagaaagagagtatgaaaggcacagttctgcgagagggtgcayatgttattcactattaacttgggtttcagacaacagaaaacctttagcagcatggctcaaacatgttgatgtttgtttctctcacatgttaaaaggaggc

SEQ ID NO: 530670 - DNA, 201 bp, Homo sapiens
agtttgagaccagcctggccaacatggagaaaccctgtctctactaaaaatacaaaaaattagccgggggtggtggtgggtgcctctaatcccagctactygggaggctgaggcaggagaatcgccttaaactgggaggcagaggttgcagtgagccaagatcttgccattgcactccagcctgggcaacaagaacgaaac

SEQ ID NO: 530671 - DNA, 201 bp, Homo sapiens
gtacctacctgcaggagaggctgggcaatgtcagctttattttggacagccatgccttcagctaaaatttctattacgaatgaaaaagggaaatgaaaaagggaaaaagatagaggaagataactagccatgtctgccacagagactttggggatttgtttctgctttggctttcagtttggatctgccatttgagtactc

SEQ ID NO: 530672 - DNA, 201 bp, Homo sapiens
tacctacctgcaggagaggctgggcaatgtcagctttattttggacagccatgccttcagctaaaatttctattacgaatgaaaaagggaaatgaaaaagggaaaaagatagaggaagataactagccatgtctgccacagagactttggggatttgtttctgctttggctttcagtttggatctgccatttgagtactcc

SEQ ID NO: 530673 - DNA, 201 bp, Homo sapiens
gttaaactgtgccagggtaagtggtgggaaggggggtaccaccaacagttcctctggattccctgaggagaacatggcgactctgttagcttcactgctcrgctgtttctatgtacatgctagcatgtgtcagtgagtgcaagagatgggagtagatttctttctgggctttttgggccaggctggcttggccaagtggac

SEQ ID NO: 530674 - DNA, 201 bp, Homo sapiens
aaatagcctgagagtaccttggagttagcaataaaggactgtagaatacccatgcctcttgactttatggaatttgttaaagacaaattaaagggaaaacsctccatattccttgggatagtgagggggaaacggatacccttaggattagggaaggcggctgctcagctgtatgtctgataggctttggctagggagact

SEQ ID NO: 530675 - DNA, 201 bp, Homo sapiens
agtggtgggaaggggggtaccaccaacagttcctctggattccctgaggagaacatggcgactctgttagcttcactgctcggctgtttctatgtacatgmtagcatgtgtcagtgagtgcaagagatgggagtagatttctttctgggctttttgggccaggctggcttggccaagtggacatgagtcagcctgtccctc

SEQ ID NO: 530676 - DNA, 201 bp, Homo sapiens
tctgcccacccggcctcccaaagtgctgggattataggtgtgagcccccatgcctggcctattattattattattattattatttttcttttttgagacckagtcttgctctgtcgcctaggctggagtacagtggctcgatctctgctcactgcaacctctggctcactgcatcctccacctcccgggttcaagagattc

SEQ ID NO: 530677 - DNA, 201 bp, Homo sapiens
gtgtctctgtgtcactgataatagaccacaatatttcattctctggggcttaggcataagagttccttttttccctccttctcatgggcatatagggtgtktgtgtgtgtgtgtgtgtgtgtgtgtgtgtgtgtgtgtttggtatgtgggcatgtacttgcctttgtgcaagtagcacatttgtatgctggtagctcatgt

SEQ ID NO: 530678 - DNA, 201 bp, Homo sapiens
caggtgtgcaggaaccgtttgtcatggaagccagggagcctgggaggcccacacccacctaccatcttgtccctaacaccagccagtcccaggtggaagawgatgtcagctcgccacctcaaaggtcctccgaaactatgcagctgaagaaggagatctccctgctgaatggggtcagcctggtggtgggcaacatgatcg

SEQ ID NO: 530679 - DNA, 201 bp, Homo sapiens
tgtttccaggtgcctgcacaggaaacctgcatggcttggtgccagagtgagagcaaaagtggtgctgccttaaagctcagcctcactgaagcagaggtagsctgccttcactcctgggactgggggaaggcttcactagggcctaggaggagcttttttacttggtctcaggtccagacttgaaggggtttgggacaggga

SEQ ID NO: 530680 - DNA, 201 bp, Homo sapiens
ggacttgccttttctcttgaaaaatcaaaagttcaggcatcattggacccaaattcctgcccgataaaataagctggatttcagtagtcgtagcttctttaaaaaaaaaaaaaatttcttttttgtttatttaaaaggagtatccctatgttgcccaggctggtctcaaactcctggctcaagtgatgctcctgcctcagc

SEQ ID NO: 530681 - DNA, 201 bp, Homo sapiens
ttgccatcattgtcatgggccttgttaaactgtgccagggtaagtggtgggaaggggggtaccaccaacagttcctctggattccctgaggagaacatggsgactctgttagcttcactgctcggctgtttctatgtacatgctagcatgtgtcagtgagtgcaagagatgggagtagatttctttctgggctttttgggc

SEQ ID NO: 530682 - DNA, 201 bp, Homo sapiens
cttccactcactctataactggtgttgtccccagggccgggggtataatagtcatccaataaatatttgccatgtgaacacacagaagcatgaaaaataaragagagttttgtcccgttcattctttttactggttttcacacaccagtccatgtgttgtgcctccctggggcaagcaaagaattagagaagtcaaggcct

SEQ ID NO: 530683 - DNA, 201 bp, Homo sapiens
tggcaagtgtgtggaaaaccaccagcctgattttctcctctcttcctctccttgtcctccttccctatttggccgtggatgtatttttattgcatataccrgttttatgatccccatctccctggaacttcttagtagaagaaatttcctgacctttgtgcttcctgctgtaatttcttggatgtatattagtttctaaaa

SEQ ID NO: 530684 - DNA, 201 bp, Homo sapiens
ccatgtgttgtgcctccctggggcaagcaaagaattagagaagtcaaggccttgtaaaagaacatagtgtccagctgggcgtggggctcacacctgtaatyccagcactttgggaggcttaggtgagaagattaccttaggtcaggagttcgagaccagcctgaccaatatggtgaaaccctgtctctactaaaaatacaa

SEQ ID NO: 530685 - DNA, 201 bp, Homo sapiens
ggctggtttcctttggtggaggctgggagcattgcaggaagccagccaagggcctaggagctcctgaagcttgggtcatgattgggtcataaaagtaatcwgtggggatagagtggctcctgtttgtggtctgtgactgccaagctacaagtaggaagactgggccctccttgagacaggtggcagggtatatggagctgg

SEQ ID NO: 530686 - DNA, 201 bp, Homo sapiens
cgttccttcctgctggatattgctcttatgtcgtccccatggatcagtcattgtttagcaggagcaaagtgccggggctctcagcacagggcccagatgtyactgaagtgtgtgaggagctagaacttaaagccacgtgagcctagggagtactcgagtgggtgcgcttctccatggacttcattgagaattgggaggtat

SEQ ID NO: 530687 - DNA, 201 bp, Homo sapiens
aggcgggagtgcaatggtgtgatcatggctcactgcagcctcaaccttcttgggctcaggtgatcctcccacttcagcctcctgagtaactaagactacaggtgtgtgccaccatgcccagctaacttttgtagttttttggtgtagacagggttttgccattgcccaggctggtctcctgggctcaagtgatccacctgc

SEQ ID NO: 530688 - DNA, 201 bp, Homo sapiens
cttctccctgggaggacaaggaaagtctgtgacccttcccccatatgtggctctgcaaacctcttcatctgtatcctttgtaatagcctttataatatacmagtaaaggtaagtaagtgtttctctgagttctgtgagccgctctagcaaattaattgaactgaaagaggagtcttgggagccccaacttgaaacagttcg

SEQ ID NO: 530689 - DNA, 201 bp, Homo sapiens
actttggggatttgtttctgctttggctttcagtttggatctgccatttgagtactcctttctcagcaataagctcccagagagccttgaagaccctcacrtgggtcccacgctccttggtgcaggcttgtccagcaaggaaatgagatcaggagaagagggaaggcttggatgttttaattgtggtagctgaatcttagc

SEQ ID NO: 530690 - DNA, 201 bp, Homo sapiens
tgctgccctttcccaggggtttatggtttttattctttagaggagaagggtataggttggcctttgtattttccctcccataagccagcactaccaagagmggttttctcaggttacttgcccagtatttcttctgagtaaccactgaggtctatggaaaaaacctgagtgtctgtggctcttactaacccacacttgaca

SEQ ID NO: 530691 - DNA, 201 bp, Homo sapiens
tgtgtactggttttgttctaatggatgcctgggctcacctgacaggcacatgaaaacaaatatgtttccaggtgcctgcacaggaaacctgcatggcttgstgccagagtgagagcaaaagtggtgctgccttaaagctcagcctcactgaagcagaggtaggctgccttcactcctgggactgggggaaggcttcactag

SEQ ID NO: 530692 - DNA, 201 bp, Homo sapiens
tcctcgcccttcccatcacctcctcatgttctgtactggcctgagagtagctgcagatgtctccatgtcttgctggacattgcagaagtcccagtttacaytgggtagaggtgactgggcaggattacctgggtatggacagtgagaagccttttaggctggtgatgactgtgtaccaggtgcagggactctggtcttctc

SEQ ID NO: 530693 - DNA, 201 bp, Homo sapiens
gtggaaaaccaccagcctgattttctcctctcttcctctccttgtcctccttccctatttggccgtggatgtatttttattgcatataccggttttatgayccccatctccctggaacttcttagtagaagaaatttcctgacctttgtgcttcctgctgtaatttcttggatgtatattagtttctaaaaaagttatgca

SEQ ID NO: 530694 - DNA, 201 bp, Homo sapiens
ttgagcccggaaagtcaaggctgcagtgagccatgatttggacttcatgtaagaaagcaaaaaattacttctaccttgtttaagccagttattgtgggacyttgttgtttccaactaatcagtatatgaactcagttttgtaggggaaagtatttaaatacatgcccccacaccaccacactccagcctgggtgacagagt

SEQ ID NO: 530695 - DNA, 201 bp, Homo sapiens
tcaatgatggcggtcacagcaggtgccgacttctgctatgccatcgaggtaagccattcccttcaggtgtgtgtcctgcatcttgcatgggaaatcccctrtgctcttgcactttccccgtctgttccttcacaaacattcatggagtgctcactctgtgccaagcacagagccaggctctgagcgtatagagatgagtca

SEQ ID NO: 530696 - DNA, 201 bp, Homo sapiens
ggacctctctgtgtggagctctgacagtaaggacttggtttctcttgatgtttattttcctgctagttaaaactagtcaacaaggagtagactagagctartcaggtccagcaatggagacgcaaacaaaacctacatttgctttaagcaaattggaattcttatggggctcaactcttgagtttcaactaccaataatta

SEQ ID NO: 530697 - DNA, 201 bp, Homo sapiens
ttgatcccctgaggtcaagtgatccacccgccttggtctcccaaagtgctgggattatgggcatgagctactgcgcccggccatcgtgtgcttgtttaccrtgtgtatatctttgttctagtctagggttatgaacataggtgtgattcttgatagacactgccacattgccttcaaaaagggttccagattcactgtaat

SEQ ID NO: 530698 - DNA, 201 bp, Homo sapiens
ctttttgtatttttagcagagacggggtttcaccatgttggccaggctggtcttgaacccctgacctcaggtgatccgcctgcctcagcctcccaaagtgytaggattataagcgtgagccaccatgcctggcctccagaatattttttatagtctagaactttgtttcagtctttgaaaatttcacatgccactgacact

SEQ ID NO: 530699 - DNA, 201 bp, Homo sapiens
actgtagttttaatttccatttttaattttaattttatttttttgagactgggtctctgttgcccagtgcagtggtgtgatctcggctgcactgcagcctmgacttcttgggcttaagcgatcccccaacctcagccttcccagtagctgggactacaggcatgccaccatgcctggctaatttttgtatgttttgtagag

SEQ ID NO: 530700 - DNA, 201 bp, Homo sapiens
ggtgagggacgacactggctttggatattgtcagggtggaggcaaagtgattggtgagaactagggtttaaggccctcaaaccacatctaaaaacatcaakgcaaatcctagaaataatttgaaatagatgatgaagatttttctaggagaacatgtgtgtgtattccatgtaaatactgcgcgctaatcaattgcacaac

SEQ ID NO: 530701 - DNA, 201 bp, Homo sapiens
aatttgtatttgcccaatgactgatgatggtgaacatcatttcgtgtgcttgtcttgcttggtgaaatgtctattcaagccttttgcccatttaaaaaaayaacagttttattgagatataattcacataccttacgattcactcagtgatttttgtatattcataaggttgtgtaaccatcaccacatcagtttaagaac

SEQ ID NO: 530702 - DNA, 201 bp, Homo sapiens
aaaaaaaaaaaaataaataaagataaaagacaaccaaaaaatagtttaaaatagatgacacgtttgttctatctgtttagcaatgtgtttatatatgtgartactcttgtgtgttgatgtgtatcatgcaaaggttactgacttttttgttttttaggtcatcttatgcagatatgctacatgacaaagacagagtaagtg

SEQ ID NO: 530703 - DNA, 201 bp, Homo sapiens
ttttgtcatgtttcccaggctgatctcaaactcctgaactcaatccattgggtatttatagttttcttatcattttttgcagtctccctcccaatattaarcatacagaatagctgtaagagcagtacagtaaacacttatgatcccttaccctagatttatcaattagcgttttgtcatacatttacatatggatttttt

SEQ ID NO: 530704 - DNA, 201 bp, Homo sapiens
tcctccttgtaaatggccatgcaagtttacaactcttggagaatgaggaggggttcagagaatatctcctgaatctgtagtgtagactgcttctgggagaraacaaataataatggatgagggcattcagccagagaaggtgtgtagtgcccaccagaagaggttcatgccttcataaaattgttaacacaagacatagtt

SEQ ID NO: 530705 - DNA, 201 bp, Homo sapiens
acctgtggcggatccggagcccctgtggtgactgcgaaggcttcgacgtgcacatcatggacgacatgattaaggtaggcagggccacactctgcatagtmcccccgacctgctcctgtatcgcaggcctctcacagggtcccagcttgggcagcacaggctcttctgttgggggcagtgaggtcaggtgctgccattttg

SEQ ID NO: 530706 - DNA, 201 bp, Homo sapiens
ggcgggcgggtgtggacggggctgctccttcctcacaggacctgtggcggatccggagcccctgtggtgactgcgaaggcttcgacgtgcacatcatggaygacatgattaaggtaggcagggccacactctgcatagtccccccgacctgctcctgtatcgcaggcctctcacagggtcccagcttgggcagcacaggct

SEQ ID NO: 530707 - DNA, 201 bp, Homo sapiens
ccgccccgcgtgctggccgcggtaaaagtggtagcagcggaggcgagcggagggtttcccgcggcgggtgaggcgctgggtatgctgggaaggtggggtckctttggggttctgtgtgcagcgagcatggtgtccttggcaccagggtttcggcagaggagcctagcgtgggcctacttggactcctccgcgtggggcagc

SEQ ID NO: 530708 - DNA, 201 bp, Homo sapiens
ctggggcatcagaggggccttccggccttcagtgccaggctgtgcctcaagctcccccagaccctgcagccacaccggccctgccccatgtgtggcccggytgcagggctcgggttggctcaggtgggggcttggctgcggctcttctggctggggtttttctgaggaacgtttatgtaactgcagcactaggaactcccg

SEQ ID NO: 530709 - DNA, 201 bp, Homo sapiens
gggtctcactctgtcacccaggctggagttcagtggcgccatctctgctcactgcaacctctgcctcccgggctcaagtgattcccctacctcagcctccygagtagctgggagtaactgggactacaggcacaggccaccgcgcccggctaatttttttaaaaattttttgtagagaacggggtctcactatgttgcgca

SEQ ID NO: 530710 - DNA, 201 bp, Homo sapiens
ctacagctgaggctcccttgttggatcacagctcaggaagatgggagcttacttcctgtggtcaccgatgcaccattttcctgaaccctcctgggagctgragcaggtcagggtcagcaagtgctgcttgcgtccagggacgggcagccctgtcctgctccggccctcaccccaccctcgcccgaggagtgacttctcctg

SEQ ID NO: 530711 - DNA, 201 bp, Homo sapiens
gcaacccattgatgggtcctgaccagcaagtaaaagtgcagctgggtgccgtggtgcatgccggtagtctagctacttgggaggctgacgtaggaggatcrcttgagtccaggagtttaaggctgtagagtgtaatgatcatgcctgtgaatagccactgtgatccaacctggacagcagggagatcccatctcttaaaaa

SEQ ID NO: 530712 - DNA, 201 bp, Homo sapiens
attttgcttatgcaacctagttctttctaccttagggccttttcttgggaaagttggggtaaggattcctgacctgtaaaaactcttccccaacttttatyccggtctgtcttgtagatctcaaatgctagtttcctcagagtccttctgtaaccttggttttctctttctacaacgctctgtgtatttcttgcattcatg

SEQ ID NO: 530713 - DNA, 201 bp, Homo sapiens
ctcaggcttttggcacattttgcttatgcaacctagttctttctaccttagggccttttcttgggaaagttggggtaaggattcctgacctgtaaaaactsttccccaacttttatcccggtctgtcttgtagatctcaaatgctagtttcctcagagtccttctgtaaccttggttttctctttctacaacgctctgtgt

SEQ ID NO: 530714 - DNA, 201 bp, Homo sapiens
gcactgtgggagctcgcggggtgtgatgggatagctttccagttctgctttaggacccgccccccagcacgctcctcgacgctgcgaggtcccgccccgcstgctggccgcggtaaaagtggtagcagcggaggcgagcggagggtttcccgcggcgggtgaggcgctgggtatgctgggaaggtggggtcgctttggggt

SEQ ID NO: 530715 - DNA, 201 bp, Homo sapiens
gtttcagtggcgggaccactggatgcagtgtgtgtacttcctgccacaagaggagcctgtggtgcagggctcagcgctctatctggtagcccaccacgatractactgcgtatggtacagcctgcagaggaccaggtacgtcgagcctcgtgggggtggaggatgagcctctgagacttgtatgtaaattccccatttaca

SEQ ID NO: 530716 - DNA, 201 bp, Homo sapiens
ttgacaggcccgggcagagccacgcagcggtgctatggatggagtaccacctgaccccggagtgcacgctcagcactggcctcctggagcctgcagacccygaggtagtgcctgcgcaccgggcccagtgtgcgtgcagaccctgagagcaggcgccgcctggggaggcctccctgcccccatgctctgggtgtttctgtc

SEQ ID NO: 530717 - DNA, 201 bp, Homo sapiens
cacctggattggatggtggtgcttcctgttgacggggagtgcaggaagaggggtagccttgggaaggttgggaagtggtgagggcgattcttctggtttasacagagtttgagctctctaaaggtcagccaagcaaagaggcccagagatgcatggatttactcagtgaagagggcatggttgaggtcactgtggagagtg

SEQ ID NO: 530718 - DNA, 201 bp, Homo sapiens
ggctccatcactgaaagtctgggcatttctcctgtgttacttgtttacctaatcagatttccacatgaattctggttttcatggccaaagaggggatgtcmcgatccatgcgtgcgtgtgaccaggaggaagggagggaaggctgtgtggcctgagtgtcctctgggttcctcttggcagggcctttttctctccccagca

SEQ ID NO: 530719 - DNA, 201 bp, Homo sapiens
aggacgtggagtggatgcaagaggtaggaggagagccggacaaggagccggagccggagccacagccctaggggctgagtgtgcagcagtgcccagcggcrctagagggctgggcagctgagggggcaccgtggtccacagggctttgccacaaggaggctcttgttttggtgctgggcaggagcggcactgaagggacac

SEQ ID NO: 530720 - DNA, 201 bp, Homo sapiens
gctgctgtgaagattgtggagaaaaatggctttagtgataagattaaggttatcaacaagcattccaccgaggtgactgtaggtccaggtgagatttacayaccctgtgttgaaagctttgcttgctcttgtgtgagagaggaaaagggttattccagttacctggaacaaatccaggtcatagcatagaaatgggacctc

SEQ ID NO: 530721 - DNA, 201 bp, Homo sapiens
tgtgggagtacccatgccgcagcctctccgagccctggcagatcctgacctttgacttccagcagccggtgcccctgcagcccctgtgtgccgagggcacygtggagctcagaaggtgggtgcagagagggctggggggcagggaggggctgctgcttgcccttggagttctcacccccgtggtgagcacagctggcctgg

SEQ ID NO: 530722 - DNA, 201 bp, Homo sapiens
gcagggagggttgttcaggtgtgtcctctgtcttaggatggtcttgtcgcattttaatctttaatttcttctctgttaagtgaatatcttacaactaatarcgtggtgttccctctaggtgtttacagtcgagagttcagcagcttctcacaaactgttgagaaaagtaagtgagaattgttgttgctgaaatagtgagag

SEQ ID NO: 530723 - DNA, 201 bp, Homo sapiens
ctaaggcagatggccgagagtggtgggtatcccacagtggggtgccaggcatttttacttctatgctttccaaatccacctgcccttccccacccttagcstggcccttccagtgccctgtcttagacctggcgccacttcacacgaccagccaggcccagggccccgggcatcctccctggcaagtcctcccatcccctg

SEQ ID NO: 530724 - DNA, 201 bp, Homo sapiens
atgcgctctacgcctcctctgggcccctgctcatggcctgcccaccctggctgtccctgtcccctcttgctgatacggttctgctactctggtcctgggcyagtgtctgtctctcgtgtgctaaggcagatggccgagagtggtgggtatcccacagtggggtgccaggcatttttacttctatgctttccaaatccacct

SEQ ID NO: 530725 - DNA, 201 bp, Homo sapiens
atctcatggacaccagaggagcgggaagcagcggtggccccgcagcagcagctatgcatcgggaggtggggcttttctgcttctgctcacctttctgctcwcattttcccatagtgaacatggattgcctgtgtgtgaacacttttttaagtaaattaaaccttgtggatattttcagtttgtatcttatctgcccctcac

SEQ ID NO: 530726 - DNA, 201 bp, Homo sapiens
ggaagcacagcctggggaaggcagcgggagtgagtccagttagagcagcatttgtctaccagagcaaggttgggagatgcttcgcagggaggccagttatkctgctagccttttaccatgcccagagcaacccctacagcagagaatcatttggcccaagaggccagtggtgtcctggtggtgaaagccatgtgggtagca

SEQ ID NO: 530727 - DNA, 201 bp, Homo sapiens
acccctacagcagagaatcatttggcccaagaggccagtggtgtcctggtggtgaaagccatgtgggtagcagctgtgagtgtgctcttgccgggtccctrttgcctggtgcatggaggacgtggagtggatgcaagaggtaggaggagagccggacaaggagccggagccggagccacagccctaggggctgagtgtgca

SEQ ID NO: 530728 - DNA, 201 bp, Homo sapiens
cagctgtgagtgtgctcttgccgggtccctattgcctggtgcatggaggacgtggagtggatgcaagaggtaggaggagagccggacaaggagccggagcyggagccacagccctaggggctgagtgtgcagcagtgcccagcggcgctagagggctgggcagctgagggggcaccgtggtccacagggctttgccacaag

SEQ ID NO: 530729 - DNA, 201 bp, Homo sapiens
catgggctgtcctgacagcgccagtggtccttggattcatgaggactgaagctgagagtcgtgttccatccacatgagaggggcagggtgaggagcatggsccgtgctgtgtattaaggaaatgcacgtggctcctgcttgtcatcccagcactctgggaacctgaggctggtggattgcttgagcccagacgtttgagac

SEQ ID NO: 530730 - DNA, 201 bp, Homo sapiens
tatccttattctgggtcacattttccttcttcacatgtctaaccatttttgtttggatgctgtggctatttggaattccccattgttgagtgctagacttygttggttttgctttttaaactttggcatgcagttgggttacttgcagttcagattgatcctttcagggcttgtttaagctttctttggagtggggttaga

SEQ ID NO: 530731 - DNA, 201 bp, Homo sapiens
gacccagaggagatgcaggtaagaggcaggagcctagcatgtgccctgtcaggaaacttgtccactgctgttcatgggaaagtaacagttgagccttggayccaggagaatttagagacaggagggctgtgtcagaatcaaagacaaaagtttttaaaaagcaagcaaaggctagctgtagtaacgtagccttcccagggt

SEQ ID NO: 530732 - DNA, 201 bp, Homo sapiens
attggcttacagatttcttcccaaagaaatgatgttcaggatggcccggataggagtgtgcagcccccagcctaggagctctggccgactgtcccttatasgagaggactcaggtgtcacgtcagagcttgcaggttcccgcccagcccagtctgttacagaaaccgttgtggatctttgttctctctgagccccttcata

SEQ ID NO: 530733 - DNA, 201 bp, Homo sapiens
acagcacctatgctcccagcctctcaggagactgaggcaggagggttgcttgaacccaggaagttgaggctgcagtgagtcgggactgcattactgcactsccgcctgggcaataagatgagaacctgtctctaaaaaaaaaaaaaaagagaaatgcaactttaaactgcaatgagatctcattttcacctactagtgaat

SEQ ID NO: 530734 - DNA, 201 bp, Homo sapiens
tgagatgggagagtcagctgctttgtgcaagaaaaaatggaaaagcttccttttaattttctcatcaaagcagaaccatagtcacaaagtcattttgggargggcatttttattaaaaggatttgaaaagctttaccctggatggagagtgtatctcatttgatgagagtggttttctctcctagcttagtggctccatca

SEQ ID NO: 530735 - DNA, 201 bp, Homo sapiens
cttcatacttgggggtctctttcaggtgtgcagggaacagcaagatgtgcctcttgttcttgctgccacgcttccctgtgtcctggcgggcgggtgtggayggggctgctccttcctcacaggacctgtggcggatccggagcccctgtggtgactgcgaaggcttcgacgtgcacatcatggacgacatgattaaggtag

SEQ ID NO: 530736 - DNA, 201 bp, Homo sapiens
caatttaattcaaagaataatccaaaacctttttgtattttcccacctttttattttgaaaaattatatatccacagaataagtgaaaatgaacactgatrgtcgctttattaatttaaatttaccagttgttaacgtttgccacatctgctttatctttgtctttctgcctcccttcctgcatctctacacacacacaca

SEQ ID NO: 530737 - DNA, 201 bp, Homo sapiens
aaccgttgtggatctttgttctctctgagccccttcatacttgggggtctctttcaggtgtgcagggaacagcaagatgtgcctcttgttcttgctgccaygcttccctgtgtcctggcgggcgggtgtggacggggctgctccttcctcacaggacctgtggcggatccggagcccctgtggtgactgcgaaggcttcga

SEQ ID NO: 530738 - DNA, 201 bp, Homo sapiens
agcacagcttattaaaaattgaccgtggatcattgtcaaccatgtttcacaatttagaatattcagttatttaaatacttcaatttaattcaaagaataakccaaaacctttttgtattttcccacctttttattttgaaaaattatatatccacagaataagtgaaaatgaacactgatagtcgctttattaatttaaat

SEQ ID NO: 530739 - DNA, 201 bp, Homo sapiens
ttgtgaacactcaagccttggaggctctcagctgtctgtgctctaaccagacagggaagaagcctgttgtcatggactggaaggtggcctgcaggtggtgyaggccttcagcggggcccctctgggttgaggggtgtctttcctgacactggggacaggtggggagatgtgagcaaggcgggcatgtttgtggctgggggt

SEQ ID NO: 530740 - DNA, 201 bp, Homo sapiens
ctctgcagcccccaggcccccttctgttcgcagcgtgccctggacttcagggagagcagggaagctgagccccacccgctgtgggagtacccatgccgcarcctctccgagccctggcagatcctgacctttgacttccagcagccggtgcccctgcagcccctgtgtgccgagggcaccgtggagctcagaaggtgggtg

SEQ ID NO: 530741 - DNA, 201 bp, Homo sapiens
gcttctcgcccattcaccaggtctctctcctcctgggcgagccgttcttcactaccagcctgctgccgtggcacaacctctacttctggtacgtgcggacygctgtggaccagcacctggggccaggtgccatggtgatgccccaggcagcctcgctgcacgctgtggttgtggagttcagggtaggccacccaggggatg

SEQ ID NO: 530742 - DNA, 201 bp, Homo sapiens
ttgctggtataaataattctgtgatttgcatttttatgtgaatataacttttttttttcttttggggttttcttaggatagaaacctgtatgtggggtttrtagtaaggactagcacagcttattaaaaattgaccgtggatcattgtcaaccatgtttcacaatttagaatattcagttatttaaatacttcaatttaat

SEQ ID NO: 530743 - DNA, 201 bp, Homo sapiens
gcctcctaagtagctgatattacaggcatgcaccaccacctggctaatttttgtatttttagtagagatggggtttcactatgttggccaagctggtcttsaactcatgacctcaagcgatctgcctgccttggcctcccaaaatgctgggattacaggcatgaaccaccacgcctggccaatttcgtaatacttttcttc

SEQ ID NO: 530744 - DNA, 201 bp, Homo sapiens
gcacaccccttgtgactgcagtcagtgggagccaagccggggagcggtacctctgtctagctgccggcctgtctctgcagcccccaggcccccttctgttygcagcgtgccctggacttcagggagagcagggaagctgagccccacccgctgtgggagtacccatgccgcagcctctccgagccctggcagatcctgacc

SEQ ID NO: 530745 - DNA, 201 bp, Homo sapiens
agatttacacaccctgtgttgaaagctttgcttgctcttgtgtgagagaggaaaagggttattccagttacctggaacaaatccaggtcatagcatagaartgggacctctctgtgtggagctctgacagtaaggacttggtttctcttgatgtttattttcctgctagttaaaactagtcaacaaggagtagactagagc

SEQ ID NO: 530746 - DNA, 201 bp, Homo sapiens
tgtctccagtatgtgcctcttctggcatatctcaaaagtgaggtacgcagtgtgtggtcttgtgagtctggctcctttcgctgagcataatgtctttgagrttcacccatttcgttcttttgaaggctgtgtagcattccacggtgtggctatccattcatgtgcttatggacgtttggattgtgtccagtttttggccac

SEQ ID NO: 530747 - DNA, 201 bp, Homo sapiens
gtgacagaaatcaataatttatctaatgtgtgttgactgttacggggcactagaccttgtgggtgctggggtacagtagtggacaggcagtcagcggtccygctgtcctggaactagtaaatgatgcccagattcctggactatgtgactcattgattgattgaggcagaaaccctggagggaggagcaggcgtgttagct

SEQ ID NO: 530748 - DNA, 201 bp, Homo sapiens
cgctgcgaggtcccgccccgcgtgctggccgcggtaaaagtggtagcagcggaggcgagcggagggtttcccgcggcgggtgaggcgctgggtatgctggraaggtggggtcgctttggggttctgtgtgcagcgagcatggtgtccttggcaccagggtttcggcagaggagcctagcgtgggcctacttggactcctcc

SEQ ID NO: 530749 - DNA, 201 bp, Homo sapiens
aagaggccagtggtgtcctggtggtgaaagccatgtgggtagcagctgtgagtgtgctcttgccgggtccctattgcctggtgcatggaggacgtggagtrgatgcaagaggtaggaggagagccggacaaggagccggagccggagccacagccctaggggctgagtgtgcagcagtgcccagcggcgctagagggctgg

SEQ ID NO: 530750 - DNA, 201 bp, Homo sapiens
gggtccctattgcctggtgcatggaggacgtggagtggatgcaagaggtaggaggagagccggacaaggagccggagccggagccacagccctaggggctragtgtgcagcagtgcccagcggcgctagagggctgggcagctgagggggcaccgtggtccacagggctttgccacaaggaggctcttgttttggtgctgg

SEQ ID NO: 530751 - DNA, 201 bp, Homo sapiens
ttttaaaaaatgcgataatttgacatacgaaatggaaatggctgagtgttgtcattttacaattgtggcttatcagaataatttaaaaatataaattaagygtttcagaagccatgccgtgtggcctgctctgctctcattaatagccgaggcttcgattgttaaaggcattttgagatgggagagtcagctgctttgtgc

SEQ ID NO: 530752 - DNA, 201 bp, Homo sapiens
gtcctcagcagcatcttctaaatcacattccttctgattttgaaccctgatgaaaacttctagtgacatccaccacccccactgccgcctccgggatgagwccagcccctcaccctgtcctggctgccttgggctgggctggcttctgtccagctccacaccctcaccttggggggccttgctgtctcccggcctcactct

SEQ ID NO: 530753 - DNA, 201 bp, Homo sapiens
tctcaaaagtgaggtacgcagtgtgtggtcttgtgagtctggctcctttcgctgagcataatgtctttgaggttcacccatttcgttcttttgaaggctgygtagcattccacggtgtggctatccattcatgtgcttatggacgtttggattgtgtccagtttttggccactttgaataaggcttctgtgaacatggatt

SEQ ID NO: 530754 - DNA, 201 bp, Homo sapiens
ctcccaaattcctgggagcctgttgatagtctgcatccccatgccccaggcctggcagccactggtctggtttgtgtctccagtatgtgcctcttctggcrtatctcaaaagtgaggtacgcagtgtgtggtcttgtgagtctggctcctttcgctgagcataatgtctttgaggttcacccatttcgttcttttgaaggc

SEQ ID NO: 530755 - DNA, 201 bp, Homo sapiens
cggagtgcacgctcagcactggcctcctggagcctgcagaccccgaggtagtgcctgcgcaccgggcccagtgtgcgtgcagaccctgagagcaggcgccrcctggggaggcctccctgcccccatgctctgggtgtttctgtcacaagttcttcgggccagatgatgacccctcagtggtcctgggccatctggcccctg

SEQ ID NO: 530756 - DNA, 201 bp, Homo sapiens
ccacaaaattaatgcatttcaattgtacagttgagtgatttttttaagtaaatatatggagttagccgtcacccagtctcatttagaacatttccaggccmgacatggtggcacatgtctgtaatcccagaacttcggaaggccaaggtgggaggatcgcttggacccaggagttcaagaccaatctgagtaacataggga

SEQ ID NO: 530757 - DNA, 201 bp, Homo sapiens
ctgtcttcattccccgtccacggcttcctgctgcagtcaggcttccgggccctgaaactgcttctgccagcaacctcgtcgttactcccacggtctccctscaggcttcatctgctctacccgcttgtccttgtgacccgggacttctgcctgtgctggggaggtcgctttcccctcaccttcctggctgctccttacctt

SEQ ID NO: 530758 - DNA, 201 bp, Homo sapiens
atgcagttttagctgctcacagcacctatgctcccagcctctcaggagactgaggcaggagggttgcttgaacccaggaagttgaggctgcagtgagtcgkgactgcattactgcactcccgcctgggcaataagatgagaacctgtctctaaaaaaaaaaaaaaagagaaatgcaactttaaactgcaatgagatctcat

SEQ ID NO: 530759 - DNA, 201 bp, Homo sapiens
agccttttggccacgctgggctgtgttagggtggtcagcacggcactgaagtagcccaggccccaccctgtccctggagtctcacagtgggtcctccacaygcaaccttacctcctacgagctcccaccatcaagggtgtggtgaagctttcatggagctgcccggtgagcagatggttgcactgctcttttttttttttt

SEQ ID NO: 530760 - DNA, 201 bp, Homo sapiens
cagtgctgagggagccagtgctcacagcctgatgggagatggcatttctctccctggccagtaactggtttgatttcctctccaaaggggaactcccttcrccagaactgcaggctcgcactgagtcctggtgtgcacatgcgggagaaatttcttttgcttttatcacattgtgctcctgatctcatccgtggtctatag

SEQ ID NO: 530761 - DNA, 201 bp, Homo sapiens
tccccatttacagatcctctggaggtgccagtgggttgatttgtgtctggacagaataacataagaacaaagatttgtgaccagtgtgtcagtgcccattygtgtgtacccaggagaggctgtcatgggttgctggaatctgtttagagcagatgcgtaggaaaagtctggaattagcgggtgctctaagccctcatgcct

SEQ ID NO: 530762 - DNA, 201 bp, Homo sapiens
attatgagcgaaataaacctcattatataaaataaaaatatcactcatggtcctccctttcactcaaaatagctccctttgtttggtctctctccaaacgygtgggtgtcatcggtgctcatctctgttccgggccccgtggccttcagcagcagcgtttaagatgtctgtccgtattctgcacgagggtttatatcccgt

SEQ ID NO: 530763 - DNA, 201 bp, Homo sapiens
atgtgtgcattttgggggatggggggaggatccaagccatcctgagtttctctcagaggggtctgtcacccagaaaggcatccttgcctttgggcagtcarttgtgaacactcaagccttggaggctctcagctgtctgtgctctaaccagacagggaagaagcctgttgtcatggactggaaggtggcctgcaggtggtg

SEQ ID NO: 530764 - DNA, 201 bp, Homo sapiens
aaaaaaaaattagctgggagtggtggtgggcgcctgtaatcccaggtactcgggaggctgaggcaggaaaatcacttgaactcgggaggtggaggttgcartgagccaaggttgtgccactgcactccagcctgggtaacagagtgagactctgtctcaaaaaaaaaaaaaaaaaaattacagcacagtgagataaaggca

SEQ ID NO: 530765 - DNA, 201 bp, Homo sapiens
tatctcacagtataatacaattatcttagaattgtttgatgattaaatgtaatacagtatctggtgcagaattagggcttaaaatatttacttttttttctttttttttttttgagacagagtctcgctctgtttcccaggctaaagtgcagtggcacgatctctgctcactgcaagctccgcctcctgggttcacgccat

SEQ ID NO: 530766 - DNA, 201 bp, Homo sapiens
agaatcacttgaacttgggaggcagaggttgcagtgagctgagattgcaccactgtactccagcctgggtgatggggtgagaccctgtctcaaaaaaaaawaaataaataaagataaaagacaaccaaaaaatagtttaaaatagatgacacgtttgttctatctgtttagcaatgtgtttatatatgtgaatactcttgt

SEQ ID NO: 530767 - DNA, 201 bp, Homo sapiens
ttcaaaactgggtcattaaaaagtgacagctaatttaatggcatcgttaaagtgaaggctgtgccatccctggtttacaattgaggacgctgttcatcaattttttttaacttaaaaaataaataaaacaaggccaggcacggtggctcatgcctgtaatcccagcactttgggaagccgaggcaggcagatcacggggtc

SEQ ID NO: 530768 - DNA, 201 bp, Homo sapiens
gatgctggggagagaattggcttacagatttcttcccaaagaaatgatgttcaggatggcccggataggagtgtgcagcccccagcctaggagctctggcygactgtcccttataggagaggactcaggtgtcacgtcagagcttgcaggttcccgcccagcccagtctgttacagaaaccgttgtggatctttgttctct

SEQ ID NO: 530769 - DNA, 201 bp, Homo sapiens
aactcagttttgtaggggaaagtatttaaatacatgcccccacaccaccacactccagcctgggtgacagagtgagactttatctcaaaaaaatcaaaacsaaacaaaggctgggcacagtgtctcacccctgtaatcccagcactttgggaggccgaggcttggatcatgaggtcaggagttcaagaccagcctgaccaa

SEQ ID NO: 530770 - DNA, 201 bp, Homo sapiens
ctgggcacactcagacccagaggagatgcaggtaagaggcaggagcctagcatgtgccctgtcaggaaacttgtccactgctgttcatgggaaagtaacakttgagccttggacccaggagaatttagagacaggagggctgtgtcagaatcaaagacaaaagtttttaaaaagcaagcaaaggctagctgtagtaacgta

SEQ ID NO: 530771 - DNA, 201 bp, Homo sapiens
tgagggagggagggactgatgagggagggagggaatgagtgagtgactgagtgagggagggagagggagggagtgagggagtgacttgagtgactgagtgrcctgttgcttccgtgttcctgttaacactcctggaccgagccctactgacacctgggccctgcttctcgcccattcaccaggtctctctcctcctgggcg

SEQ ID NO: 530772 - DNA, 201 bp, Homo sapiens
cacctactgctcttactaagtagtgcagcctcctcaggatccccggcatccccgctgtgcctggcacggaatgagagtccctaatcacaagttaaagccarctgaatctcagccctttttcatgatgcacatttggagaataaagtatttaagttacatatcttaggaccagaatcaaggaatagcttgctcaccttaaag

SEQ ID NO: 530773 - DNA, 201 bp, Homo sapiens
atcatcatggagttcaggcatgcagataccccagactgaccactcttgagcaataaagtggcctgagggctggggttctgagtggctcatggctttctagsggggaaggctgaaggccctcctctcctctctgggagctgctcggcctcagggatgggaaagactgcgccgtgttgcatcttgttgcatctttgcactgct

SEQ ID NO: 530774 - DNA, 201 bp, Homo sapiens
agctcactgcaactgtgaactcctgggcacaagcgatcctcccacctcagcctcctgagtagctgggactacaggcacttgccactatgcatggctaatcktgtgttttttgtagaaatgggtgtcactggtatgttacccaggctggtcccgtacacctggcctcaaacgatttgccagcctcggcctcccaaattgttg

SEQ ID NO: 530775 - DNA, 201 bp, Homo sapiens
ggccggtggctcactcctataatcccagcacttgggaggccaaggcaggtggatcacctgaggtcaggagttcaagaccagcctggctaacatgttgaaamcctgtctctactaaaaatacaaagaaaattagccgggcatggtggcaggcgcctgtaatcccagctacagggctgaggcaggagaatcacttcaacctgg

SEQ ID NO: 530776 - DNA, 201 bp, Homo sapiens
tttgcattgctatatgaattttaggatcagctggtcaattctgccagaaaggcagctgggattttgatggagtttgcattgaatctgtagattagtttacrgattattgctgtcataacaatatttagtattccaatccatgaacatgagatgtctttatttaggtcttctttaatttctttttttttttttttttgagat

SEQ ID NO: 530777 - DNA, 201 bp, Homo sapiens
atgccacacatgtacatactagctgaatatctgctgtgttctcatggttcaaaaattgaagccagataaaaagcatagattgaggctgggcttggtggccsatgcctgtaatcccagcactttgggaggctgaggcgggcagatcacctgaggtcaggagttcaagaccagtctggccaaaagaatgaaaccgcatgtcta

SEQ ID NO: 530778 - DNA, 201 bp, Homo sapiens
tgaattttaggatcagctggtcaattctgccagaaaggcagctgggattttgatggagtttgcattgaatctgtagattagtttacggattattgctgtcrtaacaatatttagtattccaatccatgaacatgagatgtctttatttaggtcttctttaatttctttttttttttttttttgagatgaggtctcactctg

SEQ ID NO: 530779 - DNA, 201 bp, Homo sapiens
atggagtttcaccatgttggccaggctggccttgaactcctgacctcgtgatccacccgcctcagcctcccaaagtgctgggattacaggcgtgagctgcygcgtctggcctctctcattctgattttaataatttttgtcttctctctttttttccactggtagtctagctaaaagtttgtcaattttgttaatattttc

SEQ ID NO: 530780 - DNA, 201 bp, Homo sapiens
tttgatgacctgaatactgcatggagagaatggccacagaaacacctagagcatttgttaatctgatggtgggtatgctgcgggaagtcccatggatactrtgaggattctttggccattgtccctaggtactccgatgagtgagtaggaggtcattgtgcccacttggctggggttgtgacttgctggggctcataggga

SEQ ID NO: 530781 - DNA, 201 bp, Homo sapiens
cccagctggtctcaaactcctggcctcaagtgatccccctgcctcagcctcccaaaatactgggattacaggacttagccatcacactggccatgtgtttytgtttaaaggcatattatttaatatataccattgattcacttaacattgaacccactaacatgggtaatagtgctataatttcatgccgaaacaaagctt

SEQ ID NO: 530782 - DNA, 201 bp, Homo sapiens
tccaagtccacctttttctgctggcagtgagctagtctagtgggctggctgtttaagagaaagccagcctgactctgttgttggtgtgtggggtgtgtgtstgtatgtgtgtgctgcatgggtgtgtttgtcagtgcatgtgtatctgtgtcagggcagtggttgatgcagcctcttgtgttcccaggggacttcagacgc

SEQ ID NO: 530783 - DNA, 201 bp, Homo sapiens
agcacttgtaatggaaccttttagagatgttgctctgagcatgaaggatgggactagaatgagaatttttattgtatttcttgatgaacctgtcagtcccscccttaaaatgtaagtgcctctttaaggcctgccagggtgaccctaagacctcaggccaagtctgcctcctggagcagcacctagagactgttccttcct

SEQ ID NO: 530784 - DNA, 201 bp, Homo sapiens
cgatacgaggcggcagtggggccttgacccaatggaccatgagggcggagggcttctggcgattggttacctggttcctgggattctctttagttgttccycattgccctgagatagcttgtcccgtgctggtatccgaggttgcagctgttttcccagatgtgttccctgcgcagggtctggtaatccgtgtttattgag

SEQ ID NO: 530785 - DNA, 201 bp, Homo sapiens
tccttctggagcttcagtaaccatcctgtgtggtcctcttcctcagctagaagataccctgagccttgtgaagcggatagagaggactggcattgctgccrtcgcagttcatgggaggtgagtggtcacctttctagtgactggcagggaggtcctaacccatcttagtgatccttccttaattgatctgtcaccccaagt

SEQ ID NO: 530786 - DNA, 201 bp, Homo sapiens
tgaatctgtagattagtttacggattattgctgtcataacaatatttagtattccaatccatgaacatgagatgtctttatttaggtcttctttaatttctttttttttttttttttgagatgaggtctcactctgttacccaggctcaagtacagtgacatgatctcagctcactgcaacctatgcctcctgggctgaag

SEQ ID NO: 530787 - DNA, 201 bp, Homo sapiens
cagcagctcggtgtctcagttcctctcatttctgcagctcctttcaggagctgagtagtgccctggctgagggagggagcggtgatggtgggtgaccccarctgcttcccttcctttccccaggagagcatacccagcccagatcacccctaagatgtgcctactagagtggtgccggagggagaagttggcacagcctgt

SEQ ID NO: 530788 - DNA, 201 bp, Homo sapiens
ggagtgcagtggtgcggtcttggctcactgcaacctccgcctcctgggttcaagcgattctcctgcctcagcctcccaagtggctgggattacgggcacgygccaccacgcctgactaatttttgtatttttagtagagatggagtttcaccatgttggccaggctggccttgaactcctgacctcgtgatccacccgcct

SEQ ID NO: 530789 - DNA, 201 bp, Homo sapiens
tgttggccaggatggtcttgaactcctgacctcaagtgatctgcctgactcggcctcccagagtgctgggattatagacatgagccaccgtgctggcgtgttttttttttttttttgagacaggtgtcactctgttgcccagggtggcatgcagtggcacaatcacagctcactgcaacctcgagcatctgggcttaagcg

SEQ ID NO: 530790 - DNA, 201 bp, Homo sapiens
gcttgctttgttgctgagcacagctcaggtcaggcctcacgtcagcagccctaaaactcatgcacaagaacttgcagttgactttggaaggaggggccccaggttgtggtcctgcctcccttgtgccgtggtgtggcagccatggtccgtgcctttcctgggtgcggggcctaccctgtgtcaggtgcctctccctaggat

SEQ ID NO: 530791 - DNA, 201 bp, Homo sapiens
gcgacctcagcatcctgtcagctgtgaagtcatcaaagccattgctgataccctctccattcctgtcatagccaagtaagcctcctgtcttcatcatgtaytctgtgtcccacagagctaagggctgggtggtagccaggcccagccttccctagagtgaaaagttttaggggtggcttgaaaagggcagggctttccaca

SEQ ID NO: 530792 - DNA, 201 bp, Homo sapiens
  misc_feature (1)...(201): n = A,T,C or G
gggataggtgggatattctttgatggggtgggcttctgctgagaccagtaggtgaggaaattttccaagtgaatacatcctgaatgattattgtctttctngctaagtggttcattcattctaggccccaaccatctccaagtttcctgggaaggacagctaattgagagtagctcactctggctcctgcttgccatgctt

SEQ ID NO: 530793 - DNA, 201 bp, Homo sapiens
cctcctgtcttcatcatgtactctgtgtcccacagagctaagggctgggtggtagccaggcccagccttccctagagtgaaaagttttaggggtggcttgraaagggcagggctttccacaagaccccagacctgttccttctgctgccacctgagaccctcccctctgcatgcctgtctcaggactgaggctgccgactg

SEQ ID NO: 530794 - DNA, 201 bp, Homo sapiens
ctacatgtcccaaaagccgtggtttgttcttggtagtagggcgactggccaagcgatcctcattaggtgtgtgatgaaaatccttcatgcccagagcctayatgttcaggaatgacaagcgtcctctgattcctctgcaggagctgatcgacctcaagatgattcagtgcaagagagttgttaatggtgagtacagatctg

SEQ ID NO: 530795 - DNA, 201 bp, Homo sapiens
catctgtgggattagataatcaaatgacctcacccagctcacaggacctcgtgcatatcaagcatgtaggcacctccttaaaaaccccacaaagtcgccgrgcgtggtggctcacgcctgcaatcccagcactttgggaggccaagacaggtggatcacctgaggtcaggagttcaagaccagcctgaacaacatggtgaa

SEQ ID NO: 530796 - DNA, 201 bp, Homo sapiens
accatgttgcccagggtggtctcgaactccctaacctcaggtaacccacccgcctcggcctcccaaagtgctgggattacaggtgtgagccaccgcacccrgccacttgggaccattttaaacagtgagatcaccaacaaaaagcatagacatgcagaaatgtggcatgaaatataccacaaaagggacacttgttgacag

SEQ ID NO: 530797 - DNA, 201 bp, Homo sapiens
acctgtgacctgcaagattcgcatcctgccatcggtaaggatggtgtgttacatatgaaggtccattctctctggtgatgttggatttaggtttgtgaacrattcttgaggtgctaaattaggcttggaggagagagtagagctgagcctactttaggaggcagcagctgctccttctggagcttcagtaaccatcctgtg

SEQ ID NO: 530798 - DNA, 201 bp, Homo sapiens
gagcctacatgttcaggaatgacaagcgtcctctgattcctctgcaggagctgatcgacctcaagatgattcagtgcaagagagttgttaatggtgagtayagatctggctccagaattatgcatatgccctgctgggctcaagcagcactaccactgcccttgcctggggtgacagtgtcttgcctggcttcattgagta

SEQ ID NO: 530799 - DNA, 201 bp, Homo sapiens
ccacgagtgaaagcaggggtcctcaaacacagctccaaactagaattgtctagaacgcctccttccaccaataccagatttactgatgtccacccagtttmtctccctgaggcctagcgatttccaaaaaattttccagtgattttgacatgcagctaagtttgggaacccccgagccagcctacagcagccttgatgttc

SEQ ID NO: 530800 - DNA, 201 bp, Homo sapiens
tgtgcaaatgtgattgtgatgaattgtagttttgctgatactttattgatgaggctgattctgctttgattagagttgtggtatattccttgagttttctratacatacgtatatgcttgtgaaatctttttttttttgagacggaatctccctctgttgcctaggcttgagtgcaacggcgcggtcttggttcactgcaa

SEQ ID NO: 530801 - DNA, 201 bp, Homo sapiens
tggtatattccttgagttttctgatacatacgtatatgcttgtgaaatctttttttttttgagacggaatctccctctgttgcctaggcttgagtgcaacrgcgcggtcttggttcactgcaacctctgcctcccaggttcaagcagttctcctgcctcagcctcccgagtagctgggactacaggtgcccgccaccacac

SEQ ID NO: 530802 - DNA, 201 bp, Homo sapiens
actggcggagcaggctgcagccatcgtctgtctgcggagccagggcctccctgagggtcggctgggtgaggagagcccttccttgcacaagcgaaagaggsaggctcctgaccaagaccctgggggccccagagctcaggagctagcacaacctggggatctgtgcaagaagccctttgtggccttgggaagtggtgaaga

SEQ ID NO: 530803 - DNA, 201 bp, Homo sapiens
gccgactgactcctgatgaaatgtacagagacagagcagggggtccttggagcagcaggctgcagggaggggaaagtatgacctaactgggcctccttccytcctcttgtcatcactagggtgtctgttcctctcgccagggttttgacttagccctcagtgaacatataagtggcccattcagcttgggggttttcctgt

SEQ ID NO: 530804 - DNA, 201 bp, Homo sapiens
ctgctccttctggagcttcagtaaccatcctgtgtggtcctcttcctcagctagaagataccctgagccttgtgaagcggatagagaggactggcattgckgccatcgcagttcatgggaggtgagtggtcacctttctagtgactggcagggaggtcctaacccatcttagtgatccttccttaattgatctgtcacccc

SEQ ID NO: 530805 - DNA, 201 bp, Homo sapiens
cctgtggtgaggacgggctcagtggccatatgtgtttgtatgtgtgtgggtggattggcctctcccagggggcttgatgagaggagcagtgggtcccctaygtcctgaaagagtctaccccagcccttggagagaagcccgggccagggtcagaggaggcaagctgaagttagtctctctctgttcccctttctttggtga

SEQ ID NO: 530806 - DNA, 201 bp, Homo sapiens
agccgtgtgttcttaaccaaggctaggcctcagaatgattctgaggacgggctggagtgtgttgggcagagccttttgaaaacacacattcctaagccctkcccctagagactgactcaggaaataatagtgtggaattcaagagtgtgtatttcttcagttctccagataattctggtatttgtcctggcaaaggctcag

SEQ ID NO: 530807 - DNA, 201 bp, Homo sapiens
gtgtgctgcatgggtgtgtttgtcagtgcatgtgtatctgtgtcagggcagtggttgatgcagcctcttgtgttcccaggggacttcagacgcagagcgarcccttgctgtggccaggcttgtgtaagttcatcctctgtctttagcactgcctttgcctctcctttgagctgtgagggtttaatgtcctggtgactttgt

SEQ ID NO: 530808 - DNA, 201 bp, Homo sapiens
ggtgctaaattaggcttggaggagagagtagagctgagcctactttaggaggcagcagctgctccttctggagcttcagtaaccatcctgtgtggtcctcytcctcagctagaagataccctgagccttgtgaagcggatagagaggactggcattgctgccatcgcagttcatgggaggtgagtggtcacctttctagtg

SEQ ID NO: 530809 - DNA, 201 bp, Homo sapiens
gagcactttgtgtgagcccccagctgccagctgtgcttgctgttcctctccttttctttttagctcatgtagtgtagctgcactagctcactgctttattsggtctccccagctgcaatgctaagagaggatgctggggggcatacccctaccatctcctaaagcttccagaggtttgcaggtcatagcaagaaccttcta

SEQ ID NO: 530810 - DNA, 201 bp, Homo sapiens
tttagctcatgtagtgtagctgcactagctcactgctttattcggtctccccagctgcaatgctaagagaggatgctggggggcatacccctaccatctcytaaagcttccagaggtttgcaggtcatagcaagaaccttctagatccaggatgctgttggaaccccgaacacatgatatatatctttctttttctcacac

SEQ ID NO: 530811 - DNA, 201 bp, Homo sapiens
ccccagggaaggttgctccatgctgcccagtcttcccgggaaatttggtaagaggcacaataagatgtccatctgtccttgtacgcattgcccaagtttgwctttgagccctaagctgactccaccaggggaccagggacacagcttctggatgtagatgtagaggagtggagtgatggtacagctttgcctcccaggagg

SEQ ID NO: 530812 - DNA, 201 bp, Homo sapiens
tgtgtgtgtatgtgtgtgctgcatgggtgtgtttgtcagtgcatgtgtatctgtgtcagggcagtggttgatgcagcctcttgtgttcccaggggacttcrgacgcagagcgagcccttgctgtggccaggcttgtgtaagttcatcctctgtctttagcactgcctttgcctctcctttgagctgtgagggtttaatgtc

SEQ ID NO: 530813 - DNA, 201 bp, Homo sapiens
ttcaggctgtaacagaggaggaaatgattttgaatagcctctctctgtgttaccataataagctaatcctggccccaatggttcgggtagggactcttccratgaggctgctggccctggattatggagcggacattgtttactgtgaggtaaggggctctgattttctgggtgggcttctccacaagtacagactcctct

SEQ ID NO: 530814 - DNA, 201 bp, Homo sapiens
ctgctggcagtgagctagtctagtgggctggctgtttaagagaaagccagcctgactctgttgttggtgtgtggggtgtgtgtgtgtatgtgtgtgctgcwtgggtgtgtttgtcagtgcatgtgtatctgtgtcagggcagtggttgatgcagcctcttgtgttcccaggggacttcagacgcagagcgagcccttgctg

SEQ ID NO: 530815 - DNA, 201 bp, Homo sapiens
gttggccaggatggtcttgaactcctgacctcaagtgatctgcctgactcggcctcccagagtgctgggattatagacatgagccaccgtgctggcgtgttttttttttttttttgagacaggtgtcactctgttgcccagggtggcatgcagtggcacaatcacagctcactgcaacctcgagcatctgggcttaagcga

SEQ ID NO: 530816 - DNA, 201 bp, Homo sapiens
tttcacggtctgtggagtgatggtgacagttgcacctcacacttgtatagataaatgtagtcatgagtaacccatgtgaactaaatgatgctgtgttttayccacgtagggggaagttagaggctattcaagatgtgggaagggaaggtgcccattctggttagaaggaatagaagaatctcacccctttcctggcactgg

SEQ ID NO: 530817 - DNA, 201 bp, Homo sapiens
aatagtgtggaattcaagagtgtgtatttcttcagttctccagataattctggtatttgtcctggcaaaggctcagtgagctgcacacaggtgtacacgcrtacccattcactcactcattcagtatatttgacaaatatgtgtataccactaggtgccaggcaggtgctggggctccagtatagaacaaaggcaggtccc

SEQ ID NO: 530818 - DNA, 201 bp, Homo sapiens
gtatattatattacatatatatttattctatataatataataatacacatatatgtaattatatgtaatctataattatatattacacatataaatatatmcaataaatatataaatatataatatataattatataatacatataaatatatgtaatatatatttatatatatatgtaatatatatgttataaatatata

SEQ ID NO: 530819 - DNA, 201 bp, Homo sapiens
atatataatatatgtagtatataaaataaatatataataaatatatattacatatataaatgtatataattgtgtatgtgtatagatacatatatatatakagagagagagagagaaagagagagagagagagaactcatgcccaagtaataaaacaatgcaaaggtacagagaaaaatagaggggacagggctgtgtctt

SEQ ID NO: 530820 - DNA, 201 bp, Homo sapiens
tttgggaggctgatgcaggaggatcacttgatcccaggagattgagatgagtctgggcaacagagtgaaaccctgtctctataaaaattttcaaaagtttaaaaaaaaaaggccaggcctggtggctcatgcctgtaatcccagcactttgggaggctgaggtggtcagatcacctgaggtcaggagtttgagaccagcct

SEQ ID NO: 530821 - DNA, 201 bp, Homo sapiens
tggtcttgcctggcagaagttagatgtcctggcaggggccatcagcctagagcatggaccaggggccgcccaggggtggatcctggcccctttggtggatytgagtgacagggtcaagttctctttgaaaacaggagcttttcaggtggtaactccccaacctgacattggtactgtgcaataaagacaccccctaccctc

SEQ ID NO: 530822 - DNA, 201 bp, Homo sapiens
ccaaagcactggaattatagcatgagctaccatgcctggcctctttgtgactgtttagaggagaccatatttggttagaataaatcatattaggctgggcrtggtggctcatgcctgtaatcccagcactttgggaggccgaggtgggcggatcacgaggtcaggagttcaagaccagcctggccaatatggcaaagcccc

SEQ ID NO: 530823 - DNA, 201 bp, Homo sapiens
cacagagaaagggagcggctttcaagcataggcagggctgcttctggtccagccaggtgccttcttcccagacaagctgagtcaaggacttgccaccagcmggggcgccccgacttacttcccactttgtcctgagcgtgccgtggcactttcccagccactgaagtcataggcccacgtggagttactagagcagcatag

SEQ ID NO: 530824 - DNA, 201 bp, Homo sapiens
ttcacggtctgtggagtgatggtgacagttgcacctcacacttgtatagataaatgtagtcatgagtaacccatgtgaactaaatgatgctgtgttttacycacgtagggggaagttagaggctattcaagatgtgggaagggaaggtgcccattctggttagaaggaatagaagaatctcacccctttcctggcactgga

SEQ ID NO: 530825 - DNA, 201 bp, Homo sapiens
gctgccctgctgtcagaccctgacaagattgagaaggtaagtcctccacgagtgaaagcaggggtcctcaaacacagctccaaactagaattgtctagaasgcctccttccaccaataccagatttactgatgtccacccagtttctctccctgaggcctagcgatttccaaaaaattttccagtgattttgacatgcagc

SEQ ID NO: 530826 - DNA, 201 bp, Homo sapiens
cctagccactgcccccacagctccctgtctacctgtctgcttccagaactccacacctgtgcttgtaatgggtcgtctgcctggaaggctctctccctctsacgtgagctatctgtagcctccctcttacatagatgcctttctgaaccacttttgccattggggatctatcttcgtttgagtcttccagccttcaagatg

SEQ ID NO: 530827 - DNA, 201 bp, Homo sapiens
aagtcacctacctttttaacacagccgaactagtcccaacgcgtttgcaaatattcccctggtagcctacttccttacccccgaatattggtaagatcgakcaatggcttcaggacatgggttctcttctcctgtgatcattcaagtgctcactgcatgaagactggcttgtctcagtgtttcaacctcaccagggctgtc

SEQ ID NO: 530828 - DNA, 201 bp, Homo sapiens
acgtgagcagtcagcaccagttctgcaccagcagcgcctccgtcctagtgggtgttcctgtttctcctggccctgggtgggctagggcctgattcgggaaratgcctttgcagggaggggaggataagtgggatctaccaattgattctggcaaaacaatttctaagatttttttgctttatgtgggaaacagatctaaat

SEQ ID NO: 530829 - DNA, 201 bp, Homo sapiens
gttggttttagtatacgctccttctacaggttgagcattgcaaatccaaagtctgaaatgctccaaaatgggaaaaatcttgggcaccaacatgacgctcwaaggaagtgctcattggagcatttcaggttttggattttcagatttgggatgctcagccaataagtatataatgcaaatataccaaaatctgaaacactt

SEQ ID NO: 530830 - DNA, 201 bp, Homo sapiens
cagggccccacctgacaggctggagggtgacctgaacacccaggggcgtggtaactgagatgggcagcttcagcagtgtctaggactttgaagcaactttwaaaaatgctgaaaaataagaaacacgcatatcttcctttgttccaacagtaggtttagtcagccctaggaggcctgtgcagctgacgttcgctcgcctcc

SEQ ID NO: 530831 - DNA, 201 bp, Homo sapiens
cattctttatgacggcaagggctccactttctggtgtttgtgataagtctagtcagcttaccatgtgtggtccttgcctatcattaattcttccagaagtkgtcttttgcttgggtaggtggtttggctgcctctggacctaagggccaggtgaggtagcagtgtatcaagacagtgctccccgccggcacccaccctcag

SEQ ID NO: 530832 - DNA, 201 bp, Homo sapiens
caaagtcctggtgacagtggcaggctctgtcataccctgccctatatcatgaaggagtggggagagaaggcaaagaggagctgactcacttttctttgtgygatgatcttaacgggaggttaaaactcactcttcaggggagtgcgggcgaggagcagaggaggttgtggttagcggggctcctcccagaacatggggccc

SEQ ID NO: 530833 - DNA, 201 bp, Homo sapiens
ttccttacccccgaatattggtaagatcgagcaatggcttcaggacatgggttctcttctcctgtgatcattcaagtgctcactgcatgaagactggcttrtctcagtgtttcaacctcaccagggctgtctcttggtccacacctcgctccctgttagtgccgtatgacagcccccatcaaatgaccttggccaagtcac

SEQ ID NO: 530834 - DNA, 201 bp, Homo sapiens
aaaataaccacccctttgagagaaatatcagtcttcctgttaagcccctcagatgctgtcactgcttatgaaccatatcctgcttgatggcgcggttctckgagagacttaatgagaagcttggccacagaggtgagctaactgtcatcttcttcctgcagcctgccaggtcaacagccacctctggctctgctgtcgcag

SEQ ID NO: 530835 - DNA, 201 bp, Homo sapiens
acacccaaagaatgatgcagtattaaaggggtggtagaagctgctgtttatgataaaagtcatcggtcagaaaatcagcttggattggtgccaagtgttttattgggtaacaccctgggagttttagtagcttgaggcaaggtggaggggcaagaagtccttggggaagctgctggtctgggtgctgctggcctccaagct

SEQ ID NO: 530836 - DNA, 201 bp, Homo sapiens
ccaggttcagatgagataaaggcttgtgtccttgctggggcttcccagctgggccacgatgtgaggccattccttgagagcagtggcacatcgtgtgccayggtggtgtgctttctctcttccatggaatatgggtgattacactgttgctgggcatttagagagcaacggggccatgaggcagaacctggggagggtgtg

SEQ ID NO: 530837 - DNA, 201 bp, Homo sapiens
ggcagtgccaccttggaagactgtagttgcctgccgaggcactgggggaaatcacggtagcagagtgttagggctgctgccctataggatctgccccagakggcctaacgtcaagtcatgcatctccgggactgatccttggattgttgcatgtgtccagactcacagggtagcgctcaggagcaagcactgagagccccc

SEQ ID NO: 530838 - DNA, 201 bp, Homo sapiens
cattccttgagagcagtggcacatcgtgtgccacggtggtgtgctttctctcttccatggaatatgggtgattacactgttgctgggcatttagagagcarcggggccatgaggcagaacctggggagggtgtgtggcgtcacctttcccaccacccagtgtgatgcaggttgcgtcacactgtgcacatgggcatcttgt

SEQ ID NO: 530839 - DNA, 201 bp, Homo sapiens
acctgaacacccaggggcgtggtaactgagatgggcagcttcagcagtgtctaggactttgaagcaactttaaaaaatgctgaaaaataagaaacacgcayatcttcctttgttccaacagtaggtttagtcagccctaggaggcctgtgcagctgacgttcgctcgcctcccgtgggggtcagcctctcgggtgctcttt

SEQ ID NO: 530840 - DNA, 201 bp, Homo sapiens
tgttgaaacagctgtccatcccatttgttagtgtgttttaatttgctcgagattatgcaggctttgacaaaatcccagcgctttctagccattagcggtaycagcttcatgctgcgctgacggttgctgcacacacagtccccacgtcagatcctgagcttgcaggggagagctccgtcgggctgggaagcgccagccctg

SEQ ID NO: 530841 - DNA, 201 bp, Homo sapiens
ataactgtaaacgtgatcttactattcagtcaaccatgtggccctctaggtgtggcaccctggctgtcacctaagccaacccttgttctgtcagggtactstgggcgtcactgggcaggctgggaggtccaggcccttggcacctcagccatgtgtgacctgcaggctggggtcaagtcttggcattgcaccatcaggtct

SEQ ID NO: 530842 - DNA, 201 bp, Homo sapiens
caccttggaagactgtagttgcctgccgaggcactgggggaaatcacggtagcagagtgttagggctgctgccctataggatctgccccagagggcctaaygtcaagtcatgcatctccgggactgatccttggattgttgcatgtgtccagactcacagggtagcgctcaggagcaagcactgagagccccctagtctgc

SEQ ID NO: 530843 - DNA, 201 bp, Homo sapiens
cctccctgctcacccctccctggttgggtattaaccacagcctgggggagctgctgaaatggagcaaacttttttttttttttttttgagacggagtctcrctctgtcccccaggctggagtgcagtgcgtgatctcggctcaccgcaagttccgcctcccgggttcacgccattctcctgcctcagcctcccgagcagct

SEQ ID NO: 530844 - DNA, 201 bp, Homo sapiens
gtacaggagggggccttcaagctgtactgtgagcagacgcattggtattatcattcaaagcagtctccctcttatttgtaagtttacatttttagcggaarctactaaattattttgggtggttcagccaaacctcaaaacagttaatctccctggtttaaaatcacaccagtggctttgatgttgtttctgccccgcatt

SEQ ID NO: 530845 - DNA, 201 bp, Homo sapiens
cagccaattttgtattttttttttttttagtagaaacagggtttctccatgttggtcaggctggtctcgaactcccgacctcaggtggtctgcccacctcrgcctcccaaagtgctgggattacaggcgtgagccacggcacccagcctttaaagacacaattttaaaaacaattcatatcaaaagctctcaagaaccagg

SEQ ID NO: 530846 - DNA, 201 bp, Homo sapiens
tgggttcaagcgattctcctgcctcagcctcccgagtagctgggattacaggcatgcaccgtcacacccagccaattttgtattttttttttttttagtaraaacagggtttctccatgttggtcaggctggtctcgaactcccgacctcaggtggtctgcccacctcggcctcccaaagtgctgggattacaggcgtgag

SEQ ID NO: 530847 - DNA, 201 bp, Homo sapiens
ttttctttgagatggtgttttgaccttgttgcccaggctggagtgcaatggtgtgatctcagcacaccacaacctccaactcctgggttcaagcgattctyctgcctcagcctcccgagtagctgggattacaggcatgcaccgtcacacccagccaattttgtattttttttttttttagtagaaacagggtttctccat

SEQ ID NO: 530848 - DNA, 201 bp, Homo sapiens
acttgctgggacagctgagtgagtggctctgcgggtggtcaggattcactgggcgtcttgttccatgatcgttagcagttgggaggctgtgtgtgaactcrggggtctcctggactgctgtcccccctccattcccctcttctccagctcagctgtgccaggccaggagtccggttctgcaagccttggtggggacgctta

SEQ ID NO: 530849 - DNA, 201 bp, Homo sapiens
cggccccggtcccgacccaggccgcccgggccgctccggagtcggcctcccagcgcagggcgccaggcccgggccgccccctgactccttgttcccacagrgggacccccccgcccgggccctctgtcccggctggacagccccaaacccggcctccgggcccagtctcccctgcccgctgggccgctcccggagcccggg

SEQ ID NO: 530850 - DNA, 201 bp, Homo sapiens
gtcatcaaactctgaggcctagacttatcggaaggcttgtatatgtgtggtttaaaaaaaaaagaaaagagtaagtgaccgttttctgatcagctattgarctcttccgttcctcctggggggtgatctctttctagtgtgacctcaccatcggttctcattgcaacactttctgtgagccaatattttaaatttggaggg

SEQ ID NO: 530851 - DNA, 201 bp, Homo sapiens
tcgccgtgtttacacaggtcacctgtgtgctggctaccagcaatggccttagtgcctgcagtgcggctgctcttgtctgtcctggggtgctgtgtgtcctscctgtgttgagggctcttctctgctgtgctgaggggacactggctctgggacgtgttctagagtggcatgacatggttccagtggccaagttgaagtagt

SEQ ID NO: 530852 - DNA, 201 bp, Homo sapiens
gtgatcattcaagtgctcactgcatgaagactggcttgtctcagtgtttcaacctcaccagggctgtctcttggtccacacctcgctccctgttagtgccrtatgacagcccccatcaaatgaccttggccaagtcacggtttctctgtggtcaaggttggttggctgattggtggaaagtagggtggaccaaaggaggcc

SEQ ID NO: 530853 - DNA, 201 bp, Homo sapiens
aactttaaaaaatgctgaaaaataagaaacacgcatatcttcctttgttccaacagtaggtttagtcagccctaggaggcctgtgcagctgacgttcgctygcctcccgtgggggtcagcctctcgggtgctctttagactctggcttcccaacatgcgttggtggatgggtcccctgatctttctccgaaggacttgctg

SEQ ID NO: 530854 - DNA, 201 bp, Homo sapiens
acccagccgtcataaatgacctgactcacagcacagcaggaagtcataaatgttttctttccctttgacatttgacagtgatttcacacacttgcgtttcrttgctgttgaaacagctgtccatcccatttgttagtgtgttttaatttgctcgagattatgcaggctttgacaaaatcccagcgctttctagccattagc

SEQ ID NO: 530855 - DNA, 201 bp, Homo sapiens
gcgagcagcgcgactacatcgacaccacctggaactgcggctacctgctggcctcgtccttcgtcttcctcaacttgctgggacagctgagtgagtggctytgcgggtggtcaggattcactgggcgtcttgttccatgatcgttagcagttgggaggctgtgtgtgaactcgggggtctcctggactgctgtcccccctc

SEQ ID NO: 530856 - DNA, 201 bp, Homo sapiens
ggtggttcagccaaacctcaaaacagttaatctccctggtttaaaatcacaccagtggctttgatgttgtttctgccccgcattgtattttataggaatastgaaaacatttagggacacccaaagaatgatgcagtattaaaggggtggtagaagctgctgtttatgataaaagtcatcggtcagaaaatcagcttggat

SEQ ID NO: 530857 - DNA, 201 bp, Homo sapiens
atgtgcattctggttggttttagtatacgctccttctacaggttgagcattgcaaatccaaagtctgaaatgctccaaaatgggaaaaatcttgggcaccracatgacgctcaaaggaagtgctcattggagcatttcaggttttggattttcagatttgggatgctcagccaataagtatataatgcaaatataccaaaa

SEQ ID NO: 530858 - DNA, 201 bp, Homo sapiens
cgggttcaagctattctcctgcctcagcctcctcagtagctgagatgacaggcccacgccaccacgccccgctaatttttgtgtttttagtagagacagcrttttgccatgttgtcatgttgtccaggctggtctcaaacacctgaccttaggtgatccgccttggcctcctaaagttctgggattacatgcctgagccac

SEQ ID NO: 530859 - DNA, 201 bp, Homo sapiens
ttgaccagaaagtgtgggctgctgaaagcaagacctaagtaagcttagtttcccaggcccagtgtcttccagtattatgacaatgacattaagtctttcastgggccgggtccatgatagacattccttttgtgaacttcttgactgtaggaggttggccagagcgtcaccatcttcagatgggcagagggaggttggctg

SEQ ID NO: 530860 - DNA, 201 bp, Homo sapiens
atgtgtggtttaaaaaaaaaagaaaagagtaagtgaccgttttctgatcagctattgagctcttccgttcctcctggggggtgatctctttctagtgtgamctcaccatcggttctcattgcaacactttctgtgagccaatattttaaatttggagggaaaaagtaatcaacttgacgaagcattttttccctaagattc

SEQ ID NO: 530861 - DNA, 201 bp, Homo sapiens
catcagcctgatggatagagacttcatgacgtgcagcagctggaacttttgtttataaagcatctcttttcctcacatttattttgaatttcttacgtttsaacctatgcagattgtccagaacatcgtgggcacagctctgatgattttagtggccattggttttaaaaccaagctggctgctttgactcttgttgtgtg

SEQ ID NO: 530862 - DNA, 201 bp, Homo sapiens
ccttggccaagtcacggtttctctgtggtcaaggttggttggctgattggtggaaagtagggtggaccaaaggaggccacgtgagcagtcagcaccagttytgcaccagcagcgcctccgtcctagtgggtgttcctgtttctcctggccctgggtgggctagggcctgattcgggaagatgcctttgcagggaggggagg

SEQ ID NO: 530863 - DNA, 201 bp, Homo sapiens
ggagcttggcatttggaagccatgggaagggtccagaaactaatgaactcagcaatccaaactaatgtccatgcctgcagctgctcctcattgcctattasacactctgtaaaatgtagcttctaagcagtttatacccataaacagcaatattagcacttaatgggttctgcctggtggctcatcaccaaggtgacagaa

SEQ ID NO: 530864 - DNA, 201 bp, Homo sapiens
acttcagtcttccccaaaccttccacatttcaaagctggtgctttattgcctcctgcctccctttggcttttatctccctacttgcaccagcagccgtctyagcagtagctacatcagcctgatggatagagacttcatgacgtgcagcagctggaacttttgtttataaagcatctcttttcctcacatttattttgaat

SEQ ID NO: 530865 - DNA, 201 bp, Homo sapiens
gcgtcatccttgaacgcaggatccgggaccttcagacccagggaaagggtgagggagactggggcctggtctgctttcccgggcctgaaagcttccccgargtttgcagggtcagggaggaggaacggtgggggtgggcagtcactgcctgttccccactgcctgtgttcgcaggagccacgggacagaagacggtggcct

SEQ ID NO: 530866 - DNA, 201 bp, Homo sapiens
tccgggaccttcagacccagggaaagggtgagggagactggggcctggtctgctttcccgggcctgaaagcttccccgaggtttgcagggtcagggaggargaacggtgggggtgggcagtcactgcctgttccccactgcctgtgttcgcaggagccacgggacagaagacggtggcctctgctgccgggccacgttagt

SEQ ID NO: 530867 - DNA, 201 bp, Homo sapiens
cctcccaggtggaggtgagcgaagacgagccggccagcaaggcgcagcgcagaaaagagaagaggcagagggtgaaggggaacctcacgccgctgaccggraggaactaccggcagctgctggagcgcctgcaggcacggcagagccggctggacgagctgcgcggccaggatgaggggaaggcgcaggagctggaggcga

SEQ ID NO: 530868 - DNA, 201 bp, Homo sapiens
tcccgggcctgaaagcttccccgaggtttgcagggtcagggaggaggaacggtgggggtgggcagtcactgcctgttccccactgcctgtgttcgcaggarccacgggacagaagacggtggcctctgctgccgggccacgttagtccgcagctcacccgaacagaggacaaccctgaggtgtggcatatgggcacctggc

SEQ ID NO: 530869 - DNA, 201 bp, Homo sapiens
ttctcgactatgggccaggctgggggaccctgggatcgagagaactttaatgagtgggtgcctctttcccccagggcagtgccaaggagctgtcccctgcmgccttggagaaaaggcggcggagaaagcaggaacgggaccggaagaagaggaagcgaaaggagctgcgggcgaaagagaaggccaggaaggctgaggagg

SEQ ID NO: 530870 - DNA, 201 bp, Homo sapiens
ggccaggaaggctgaggaggccacggaggcccaggaggtggtggaggcaaccccagagggggcctgcacggagccgcgggagccgcccgggctgatcttcmataaggtgagcgggagctgggtccttgggcgggctgggtcggcttcaggcctcagcgttgccccttgttagcttcatgatctctctccgaaccccatcat

SEQ ID NO: 530871 - DNA, 201 bp, Homo sapiens
caggcttggctaatcgagcgcgcgggctggcggctcggcgttcgtttggccgcgcctgcccgtgtggtggtttccggcggaggtggtgagagtcgcacgcrcagcggggaaggtgtgagtcgtgaacggcccgggtctccgccatggcctctctactcgccaaggacgcctacctgcagagcctggccaagaagatctgct

SEQ ID NO: 530872 - DNA, 201 bp, Homo sapiens
cccgtgtggtggtttccggcggaggtggtgagagtcgcacgcgcagcggggaaggtgtgagtcgtgaacggcccgggtctccgccatggcctctctactcrccaaggacgcctacctgcagagcctggccaagaagatctgctcccattcggccccggaacagcaggcgcgcacgcggggtaacgcacagggccgggccgg

SEQ ID NO: 530873 - DNA, 201 bp, Homo sapiens
tgtatgacatttgaaaccatgtgcgtaatgtatcctggcacggggtaagcacccgggaattggaagctgtgattcttatttgggggtcccttctctctttwggggtcatttgctttttggggaacatcatggtggaacattgaactccgcgggccccttgtttgcgtgaggattttctcacctgccttccagccctgattc

SEQ ID NO: 530874 - DNA, 201 bp, Homo sapiens
tcatggtggaacattgaactccgcgggccccttgtttgcgtgaggattttctcacctgccttccagccctgattcttctcgactatgggccaggctggggraccctgggatcgagagaactttaatgagtgggtgcctctttcccccagggcagtgccaaggagctgtcccctgccgccttggagaaaaggcggcggagaa

SEQ ID NO: 530875 - DNA, 201 bp, Homo sapiens
catggtggaacattgaactccgcgggccccttgtttgcgtgaggattttctcacctgccttccagccctgattcttctcgactatgggccaggctgggggmccctgggatcgagagaactttaatgagtgggtgcctctttcccccagggcagtgccaaggagctgtcccctgccgccttggagaaaaggcggcggagaaa

SEQ ID NO: 530876 - DNA, 201 bp, Homo sapiens
aaaaggaagaaaacacaaaagaaattccggaagcgagaagagaaggctgctgagcacaaggccaagtccttgggggagaaatctccagcagcctctggggscaggaggcctgaggcagccaaagaggaagcagcttgggcttccagctcagcagggaaccctgcaggtgagaggcttcagggcatgttggttctgtgcagg

SEQ ID NO: 530877 - DNA, 201 bp, Homo sapiens
gaaaacacaaaagaaattccggaagcgagaagagaaggctgctgagcacaaggccaagtccttgggggagaaatctccagcagcctctggggccaggaggsctgaggcagccaaagaggaagcagcttgggcttccagctcagcagggaaccctgcaggtgagaggcttcagggcatgttggttctgtgcagggcggggct

SEQ ID NO: 530878 - DNA, 201 bp, Homo sapiens
aagaaattccggaagcgagaagagaaggctgctgagcacaaggccaagtccttgggggagaaatctccagcagcctctggggccaggaggcctgaggcagscaaagaggaagcagcttgggcttccagctcagcagggaaccctgcaggtgagaggcttcagggcatgttggttctgtgcagggcggggctggggctgggc

SEQ ID NO: 530879 - DNA, 201 bp, Homo sapiens
gtccttgggggagaaatctccagcagcctctggggccaggaggcctgaggcagccaaagaggaagcagcttgggcttccagctcagcagggaaccctgcargtgagaggcttcagggcatgttggttctgtgcagggcggggctggggctgggcttgggcttggtcccctttgctcttaagaaaaaaaaagcagcagcagg

SEQ ID NO: 530880 - DNA, 201 bp, Homo sapiens
tttcagtcccttcactacgggcatggtgcggtgtggggaggaggaggatggcagagggctcctgcgcttagggttctcatggcctggtgaccacgctgcayaagggaagtagataatcgggtggggaagccgacagcggggacgtgtcagtgctgtctgggcccaggaggagaggagagcagcagggtctctggaaccacc

SEQ ID NO: 530881 - DNA, 201 bp, Homo sapiens
gggcttgggcttggtcccctttgctcttaagaaaaaaaaagcagcagcaggcgcacagggatagcacgagacttccccaagagcaaagatcacaggagtgytagggtggatgggaccgaaggaactgtgtggcattccaggccacatggctagcaggatgtcagggggcaaggctgtgtctctctgaggacctggagcagc

SEQ ID NO: 530882 - DNA, 201 bp, Homo sapiens
tgatgaacgtccttgaagcctcatctttgtgcctgatgaattctcacaagcagaactactgggtcaaggttgtggttctgagctctaggatcagtgtctcwggcccccgatcctgatcctctttcggcatcttcctgggatcaaagccttggtgagcctttcctgcctattgaatgggccatgagattgggacttaactct

SEQ ID NO: 530883 - DNA, 201 bp, Homo sapiens
ctagggtggatgggaccgaaggaactgtgtggcattccaggccacatggctagcaggatgtcagggggcaaggctgtgtctctctgaggacctggagcagvttggcttgaagagcttccctgccctcaggtctctgcaggggccttgtgagagccaacttgttctggggcccaggctacaaaatttggaggaggtggtttg

SEQ ID NO: 530884 - DNA, 201 bp, Homo sapiens
gcccaggctacaaaatttggaggaggtggtttggcttgcaccgtaggaagtgttttctcataccacggtgacctacctcgtgaggcactgagttacctgtyctggaggatgttgtaggaaccagtccaggttgaagcggtggagtggaatttactggaattgccctgcagatccatgagtggccacagtgggacagggatt

SEQ ID NO: 530885 - DNA, 201 bp, Homo sapiens
ggcccttccttaaggcctcgtgctgtgtgggggacagtccccagctactctcctccgccatcccgaggtacagtgtgtggttcctaagaggtgagcaaggstctgggcccttgttcctgaagcacaggtctcgtttgggctggtgtagggctcttgttggcccggggatgggaaaggccattggggagggcttcgttgggt

SEQ ID NO: 530886 - DNA, 201 bp, Homo sapiens
cccccagggcagtgccaaggagctgtcccctgccgccttggagaaaaggcggcggagaaagcaggaacgggaccggaagaagaggaagcgaaaggagctgygggcgaaagagaaggccaggaaggctgaggaggccacggaggcccaggaggtggtggaggcaaccccagagggggcctgcacggagccgcgggagccgcc

SEQ ID NO: 530887 - DNA, 201 bp, Homo sapiens
aggcacaggaagcaccaatgcagctctttgtgctgaatggtactgtctcccctgtgttggcccctacccacccttttcctggggcccttccttaaggcctygtgctgtgtgggggacagtccccagctactctcctccgccatcccgaggtacagtgtgtggttcctaagaggtgagcaaggctctgggcccttgttcctg

SEQ ID NO: 530888 - DNA, 201 bp, Homo sapiens
ttggagaaaaggcggcggagaaagcaggaacgggaccggaagaagaggaagcgaaaggagctgcgggcgaaagagaaggccaggaaggctgaggaggccayggaggcccaggaggtggtggaggcaaccccagagggggcctgcacggagccgcgggagccgcccgggctgatcttcaataaggtgagcgggagctgggtc

SEQ ID NO: 530889 - DNA, 201 bp, Homo sapiens
actgctggtcattcattcatttcgcccctactcatgagcgcctgctgtgtcggggttgggggtgaggggagcacaggaacacgtgcgggaccggggtgatwgaggcactgaggccaggccccgggggtgccctgctgcaccgactccgggcggagattggctgtcctcggcccgcaatgctgtgcgccccgccccgcgcgc

SEQ ID NO: 530890 - DNA, 201 bp, Homo sapiens
ggccgccgtcttccgtcctaggagactccaggacaccctctgagtccttgacgctggctctgtcccaggatctccacagacctcggcctctccatgtgagsgggacacagtggtgctctgctgagttgtgagggcccagatcacagatcccatgtgagaaagagagagtttcagcgtcatccttgaacgcaggatccggga

SEQ ID NO: 530891 - DNA, 201 bp, Homo sapiens
ttcagacccagggaaagggtgagggagactggggcctggtctgctttcccgggcctgaaagcttccccgaggtttgcagggtcagggaggaggaacggtgkgggtgggcagtcactgcctgttccccactgcctgtgttcgcaggagccacgggacagaagacggtggcctctgctgccgggccacgttagtccgcagctc

SEQ ID NO: 530892 - DNA, 201 bp, Homo sapiens
caccctctgagtccttgacgctggctctgtcccaggatctccacagacctcggcctctccatgtgagggggacacagtggtgctctgctgagttgtgaggscccagatcacagatcccatgtgagaaagagagagtttcagcgtcatccttgaacgcaggatccgggaccttcagacccagggaaagggtgagggagactg

SEQ ID NO: 530893 - DNA, 201 bp, Homo sapiens
ggatcagtgtctctggcccccgatcctgatcctctttcggcatcttcctgggatcaaagccttggtgagcctttcctgcctattgaatgggccatgagatkgggacttaactctttcttattttgcatttcagctggcaaaactcaaggctcagaaactgcagggcccccaaaaaagaaaaggaagaaaacacaaaagaaa

SEQ ID NO: 530894 - DNA, 201 bp, Homo sapiens
caatcaaaatgagtgcaggttgaaagaaaacaggtgaattttagtggcatatggatgataaagctgtaaataaaattcttttgatgaaactctccggttaygagacaaagactgtaactgaacaggagctggtgtgactgttaccagacagaggcaactgatgaaaaagccctgtgaaagataggatgtgaggtgagcatg

SEQ ID NO: 530895 - DNA, 201 bp, Homo sapiens
gagggcgtgaagatccgtgacgacgaacgcctgctgcaggaggccctgaagcgcaaggagaagcgcagggcgcagcggcagcgccggtgggagaagcgcayggccggcgtggtggagaagatgcagcagcgccaggaccggcggcggcagaacctgcgcaggaagaaggcggcccgcgccgagcgccgcctgctcagagcc

SEQ ID NO: 530896 - DNA, 201 bp, Homo sapiens
cgtatcccaatgtcattaaaaaaaatttgagctatttttttttgttttttagatagagtcttgctctgtcactcaggctggagtgcagtggcatttcatayttggaatttttaaaacacacttataaattacctatgagttaaagaattccgaatggctattagaaatatttgggactaaaggataatgaaaatgctacgt

SEQ ID NO: 530897 - DNA, 201 bp, Homo sapiens
tcccggagtccacgcatgtgagttgggtcaagtgcattggacctagggaaagagaaagaaagaataaaagctggagagagagtgaagtgaatgcaagatamaaagtgggatggaagaattaaatccagagttccaggcaatcaaaatgagtgcaggttgaaagaaaacaggtgaattttagtggcatatggatgataaagc

SEQ ID NO: 530898 - DNA, 201 bp, Homo sapiens
tcttgctctgtcactcaggctggagtgcagtggcatttcatatttggaatttttaaaacacacttataaattacctatgagttaaagaattccgaatggcyattagaaatatttgggactaaaggataatgaaaatgctacgtattaaaatttgtggaacagggcctggcatggtggctcatgctgtcaatcccagctctt

SEQ ID NO: 530899 - DNA, 201 bp, Homo sapiens
aggagctggaggcgaagatgaagtggaccaacctcctctacaaggcggagggcgtgaagatccgtgacgacgaacgcctgctgcaggaggccctgaagcgyaaggagaagcgcagggcgcagcggcagcgccggtgggagaagcgcacggccggcgtggtggagaagatgcagcagcgccaggaccggcggcggcagaacc

SEQ ID NO: 530900 - DNA, 201 bp, Homo sapiens
aaggagctgcgggcgaaagagaaggccaggaaggctgaggaggccacggaggcccaggaggtggtggaggcaaccccagagggggcctgcacggagccgcrggagccgcccgggctgatcttcaataaggtgagcgggagctgggtccttgggcgggctgggtcggcttcaggcctcagcgttgccccttgttagcttcat

SEQ ID NO: 530901 - DNA, 201 bp, Homo sapiens
atttgtggaacagggcctggcatggtggctcatgctgtcaatcccagctctttgggaggcgggtggatcacttgagatcaggagttcaaggctagcctggmcaacatgataaaaccccatctctattaaaaataaaaaattagctgggtgtggtggtgcaaacctgtagtcccagctgcttgggaggctgaggcgggagaa

SEQ ID NO: 530902 - DNA, 201 bp, Homo sapiens
gtattaaaatttgtggaacagggcctggcatggtggctcatgctgtcaatcccagctctttgggaggcgggtggatcacttgagatcaggagttcaaggcyagcctggacaacatgataaaaccccatctctattaaaaataaaaaattagctgggtgtggtggtgcaaacctgtagtcccagctgcttgggaggctgagg

SEQ ID NO: 530903 - DNA, 201 bp, Homo sapiens
tgatttctcccatttaaaatgtaaacattgtccggccgtgcggcctcatgcctgtaatcccagaattttgggaggctgaggagggcggatcacaagatcaraagatcaagaccatcctggacaacatggtgaaaccccgtctctaccaaaaatacaaaaattagccgggcacagtggtgggcgcctgtagtcccagctact

SEQ ID NO: 530904 - DNA, 201 bp, Homo sapiens
tttttttttttgcatttttagtagagacaggagtaatggtcagtcagtgggaaaagaccctttcagtcccttcactacgggcatggtgcggtgtggggagraggaggatggcagagggctcctgcgcttagggttctcatggcctggtgaccacgctgcacaagggaagtagataatcgggtggggaagccgacagcgggg

SEQ ID NO: 530905 - DNA, 201 bp, Homo sapiens
gaattttctcattacctagtatgtcttccgtctgtctttctcatcctttttgaaattttttttttttttcattaaaacgattcagctcctactttacttasactgatttctcccatttaaaatgtaaacattgtccggccgtgcggcctcatgcctgtaatcccagaattttgggaggctgaggagggcggatcacaagat

SEQ ID NO: 530906 - DNA, 201 bp, Homo sapiens
ttttagtagagacaggagtaatggtcagtcagtgggaaaagaccctttcagtcccttcactacgggcatggtgcggtgtggggaggaggaggatggcagarggctcctgcgcttagggttctcatggcctggtgaccacgctgcacaagggaagtagataatcgggtggggaagccgacagcggggacgtgtcagtgctgt

SEQ ID NO: 530907 - DNA, 201 bp, Homo sapiens
ggtggagtggaatttactggaattgccctgcagatccatgagtggccacagtgggacagggattcgtggccctagggagggagggggaggggaagagaggsccccctgcagtcctgtctccttccctgcagatggcctggccactgagcctgagtctgtctttgctctggatgttctgcgacagcgactgcatgagaagat

SEQ ID NO: 530908 - DNA, 201 bp, Homo sapiens; identical to SEQ ID NO: 114064

SEQ ID NO: 530909 - DNA, 201 bp, Homo sapiens
gttacctggacccatggttgtgtcacagttgcttttatacatgtactgtctttacacagaaaattatgcatgatgccattggattcagaagtacattaackggcaagaactacacaatggaatggtatgaacttttccaacttggcaactgtacatttccccatctccgacctgaaatggatgcccctttctggtgtaatc

SEQ ID NO: 530910 - DNA, 201 bp, Homo sapiens
cccaggtctggatcgaattctcctgggagccagaccaaagcaccttcctggactgcaaagtgtggaagccgccgcgggccgggcgcggggaggtgtcatgygccggaacctgcgcttggggccaagctctggagctgacgcgcaggggcaaggcgccccgcgtcccggactggcggctccgcgcatgctcctcccaccggc

SEQ ID NO: 530911 - DNA, 201 bp, Homo sapiens
gtgcggggacagcgccgggtgacgctcggagcgcacttgagagcaaagttgaggactggggagtcgcagccgctcgttacgtgcagccctgggacctttcrtcccctctggtcacttgcggcagactcaggacagtcctgaatcgtggaagaagaaaaggagagtaatgttatttaatggagggacttctgggtacaagta

SEQ ID NO: 530912 - DNA, 201 bp, Homo sapiens; identical to SEQ ID NO: 114076

SEQ ID NO: 530913 - DNA, 201 bp, Homo sapiens
ttgccctccccaccccattcatcccatacctggttaacaatgatttgtccttcctgtgtgcccataggactcattcctttagtctagcacataccacactyattacttgttcagtgtctttccagctcccacccacagttccatgagaaagggaacagtgttttaatttttgtttccctccttcttactatagttcactat

SEQ ID NO: 530914 - DNA, 201 bp, Homo sapiens
acttgttcagtgtctttccagctcccacccacagttccatgagaaagggaacagtgttttaatttttgtttccctccttcttactatagttcactatataygtagtggagcctcaataaatattggttgaatgaatgttaattcgtaagtaaatataaaatgtattctgttactcataattatctgaataatcttaatgta

SEQ ID NO: 530915 - DNA, 201 bp, Homo sapiens
aaagtgggtgaaacaggacaatgaaacaggaatttattatgagacatggaatgtaaaagccagcccagaaaagggggcagagacatggtttgattcctacractgttccaaatttgtgttaaggacctttaacaagttggctgaatttggagcagagttcaagaacatagaaaccaactatacaagaatatttctttacag

SEQ ID NO: 530916 - DNA, 201 bp, Homo sapiens
tattatgaatctgaaaccagctcctgtacctagctcctggaaggtgagaagaggcccagaagtggcagggcaggcaggtaacacctcttgatttccatacyctgttgtagtcacttttccaggttaacccatcaccatgtgaggtctgtagagctgcttccagagactggcatgggggctcctcacacttattctaagctc

SEQ ID NO: 530917 - DNA, 201 bp, Homo sapiens
caaagctggggtggatgagggcctggagtttggggccacagagtggatatgacaatagcagcatggaagaacagctgaacagttgttctacttgatatgcwtttgtgatgtgccacattttctcctatcaggttacctggacccatggttgtgtcacagttgcttttatacatgtactgtctttacacagaaaattatgca

SEQ ID NO: 530918 - DNA, 201 bp, Homo sapiens
aactatatcaggtaagttgtgaaaatatagcaatatttgatcattgcatcaaaaaccaaatgaaagaaattgttatacttccattgaaacatttcagtaawgttttacttagaggtcatttgtaaaatgtacttttggaaccattaaactttgggaatttttttcatctcttatttgtattttttatttattttatttgaa

SEQ ID NO: 530919 - DNA, 201 bp, Homo sapiens
tttaaactaggaaacatgttcaaccaaatggcaaagtgggtgaaacaggacaatgaaacaggaatttattatgagacatggaatgtaaaagccagcccagvaaagggggcagagacatggtttgattcctacgactgttccaaatttgtgttaaggacctttaacaagttggctgaatttggagcagagttcaagaacata

SEQ ID NO: 530920 - DNA, 201 bp, Homo sapiens
ttagccataaaaagattttattaccccttcaaaccacatttgccaactaaagaatttctgttgagtctcttgcaaatttttgatgcagtgattgtgcacaracagttctatttgttttataattttgaatattggtttttacctatgaaattcccttttattaaaataacatatgaagaaatccctttacctatcagaaac

SEQ ID NO: 530921 - DNA, 201 bp, Homo sapiens
ggaacacctgcctgtgaggggagcggtaggggagggtagattcggcagcactcgggtagtggcagggaccacatattgtcggtgttaaccactgttatcaytggcccaggtcgagtgaggacgagtcatttccccactaagcacttggggagtggcagggaccacatattgtcagtgttaaccactgttatgactggccca

SEQ ID NO: 530922 - DNA, 201 bp, Homo sapiens
ctatcccagttatggagggtgatgatgacattgaagtttttcgattacaagccccagtatgggaatttaaatatggagacctcctgggacacttggtaagratgcatcttggtcttataactttggttaattcaatgatttggttattaagttgatttttaaggagtaatcactatttagatggctgactttagatcatgt

SEQ ID NO: 530923 - DNA, 201 bp, Homo sapiens
tagcgtgggccctgtgggatggggtaaaagttcggtgttgggaggagccccggtgacagatttttggttttggtggtggcttttgggcaaggacaggtcarttcataaaagatgacgccccaggtctggatcgaattctcctgggagccagaccaaagcaccttcctggactgcaaagtgtggaagccgccgcgggccggg

SEQ ID NO: 530924 - DNA, 201 bp, Homo sapiens
catgcaggcctcctatttgagatgagccaaataggggtgtagtggccaaagctggggtggatgagggcctggagtttggggccacagagtggatatgacartagcagcatggaagaacagctgaacagttgttctacttgatatgcatttgtgatgtgccacattttctcctatcaggttacctggacccatggttgtgtc

SEQ ID NO: 530925 - DNA, 201 bp, Homo sapiens
atcattgcatttccctgagcattttcatgtttcttggccatttgtatatcttctgagaattgtctatttgtgtccttagccacccccaccccgcctttttkttgttgttgtttgtttgtttgaggtggagttttattcttgtcgctcaggctggagtgcaatgacacaatctcagcttgctgcaacctccacctcttgggt

SEQ ID NO: 530926 - DNA, 201 bp, Homo sapiens
tggaaagattcttctggtctagtacaagatggtagaagagagggttagccatcctggagtatgaactcggcctaaaacatttccagtttagttgatttgtyggaaggacttaacgtggcaggtggagaggtcatcagcagcatcccagcaactccaagtacagggaagaaagaaacgtaccaaacacacaaggtggatggg

SEQ ID NO: 530927 - DNA, 201 bp, Homo sapiens
tattaggcattataaatgcccaagatgagagttgtaaccatgcagagtagtgttttctgaatatttggaaagattcttctggtctagtacaagatggtagragagagggttagccatcctggagtatgaactcggcctaaaacatttccagtttagttgatttgttggaaggacttaacgtggcaggtggagaggtcatca

SEQ ID NO: 530928 - DNA, 201 bp, Homo sapiens
ggggtgattttacttttgtgaattccttagcctttcttccttggtgcataaagttaaaatgcacatcagcagaattgctgcatattaacatctcaggactyttctcttgtaaagaagctgaaattcgtactatattggccaaagtgagcgagttaggtgatcttggtttcaatttccgagcctttgttaatatggagaatt

SEQ ID NO: 530929 - DNA, 201 bp, Homo sapiens
cttttattaaaataacatatgaagaaatccctttacctatcagaaacaaaacactctctggtttataaaacaccttaattctactgctcttttttctccartcaccagcatctgtttttcagggggtgattttacttttgtgaattccttagcctttcttccttggtgcataaagttaaaatgcacatcagcagaattgct

SEQ ID NO: 530930 - DNA, 201 bp, Homo sapiens
cttagcctttcttccttggtgcataaagttaaaatgcacatcagcagaattgctgcatattaacatctcaggactcttctcttgtaaagaagctgaaattygtactatattggccaaagtgagcgagttaggtgatcttggtttcaatttccgagcctttgttaatatggagaattatggttcatatcagttatgtaggac

SEQ ID NO: 530931 - DNA, 201 bp, Homo sapiens
gccaaagtgagcgagttaggtgatcttggtttcaatttccgagcctttgttaatatggagaattatggttcatatcagttatgtaggacctttggacccarggtcctacagatagatatggtgtgcccagattttaaaaataccttcaaaaataaaaaatacattcagtgacattttcatggtgggagctcttctttctga

SEQ ID NO: 530932 - DNA, 201 bp, Homo sapiens
ccagctgttgtcaaacctagatagtgtattctgctcactgaaatgtttacaacacttttttgttttgtgtgatatactacgtggaaagagaagtttgtggytgaagctagttttctggaaaatgttaataataaaatgtttgtaagaagtcaaaattactcaatagaacaagaattgtaaatccaaacgatttgatttaac

SEQ ID NO: 530933 - DNA, 201 bp, Homo sapiens
tttcaactttcaagtacttcctgagaggttagtacattattattgagctctcacagaaagcttaatcatagatataattaacctgatccaaatgagtaaastggaccttagaaaggctaagtgatctttctctggctatccagctagtagtaatgaagtcaggtcttgaaccccggttctgctgactgaattggatgcact

SEQ ID NO: 530934 - DNA, 201 bp, Homo sapiens
cagtgattgtgcacaaacagttctatttgttttataattttgaatattggtttttacctatgaaattcccttttattaaaataacatatgaagaaatcccyttacctatcagaaacaaaacactctctggtttataaaacaccttaattctactgctcttttttctccaatcaccagcatctgtttttcagggggtgattt

SEQ ID NO: 530935 - DNA, 201 bp, Homo sapiens
tagcccttgttacccttgcccacttctcctttccgttgtagtgatagattatcaagttctcaaaactgaattttatttatttacctgtttgtttattgttyagagacagggtctcacactgtcacccaggctggagtgcagtggcacaatcacggctcactacagccttgaactcccaggctcaagtgatccttccatctc

SEQ ID NO: 530936 - DNA, 201 bp, Homo sapiens
ccaagagtgagggaaaaggctaggtgcagtggctcatgcctgtaatcccagcactttgggaggccaaggcgggcagatcacttgaggtcaggagttcgagrccagcctggccaacatggtgaatccctgtttctactaaaaatacaaaaattacctgggcgtggtggcatgtgcctgtagtcccagctactcgggaggctg

SEQ ID NO: 530937 - DNA, 201 bp, Homo sapiens
ctgccatgcaactgggacacaacagtgaagaaggaatagatctgccttcatctggcttctttccgctcatttctttcactctgacagtcttccctctcccstcacaccaagctgcttctgaaaactggctcttcttaaaaagccagcgttgattggttgtcatagatttgctaaagaaacagagactcctaggtcagcagt

SEQ ID NO: 530938 - DNA, 201 bp, Homo sapiens
actataaagatttcacaaaacaggacctgcctacggctgaacggagccaggaggccacgtgtcccagcccagcgtccagtggtgcctctcaagaaaccccsaacgaatgttcggatgactttggagagtttcaaagtgaaaagcccaaaatcagcaaatttgacttcttagtagccacttcacaaagcaaaatgaaatcca

SEQ ID NO: 530939 - DNA, 201 bp, Homo sapiens
acagatattaaggggcttctattaatttgattgatttcaggattcagagttttcccagattctaattatttctcaaatagccctgattcagtaacatgatractatctgtaatgtggattacagagatgatactatgttttaacctcttttaaaagcttgctaagagttcgtcaaagtgaataattgtgatcatcatatag

SEQ ID NO: 530940 - DNA, 201 bp, Homo sapiens
ttggttgctgaaaagctctgagatgcagaaaaagcctgacttgccccacatctctgtttatttctggcaggcattcaactcagaaacagacagtttcaagytggcctatggagggcaccagtatcacgccagctgtgccaacttctggatcaactgtgtcgaaccaaagcctcctggcctcgtcctgcctgacctgctctg

SEQ ID NO: 530941 - DNA, 201 bp, Homo sapiens
ccacgtcctcacacacagccacacagcgttataactggggcgtggaaagccagtggcttaatagcagtttctgtaccagatagctacatgctgagtgcctycgaagaaaggcttacactgttactgatggaacaaatgaggcaacactcacagggggaagctgctggaaagcatgtcccttagactcacaggtcctgtgct

SEQ ID NO: 530942 - DNA, 201 bp, Homo sapiens
aggcacagactgaaggcctgcttctttctcaagaggtgaaactcacctggtttagtgagatgtgatgcactctgagattggctcccaagtgacttgtcatytaaggttttatcttgtgaagtgggttgaagttcagtaggtttggaacaaacagagaattctgtcctggaaaattaatcgatttttgccatataaaatcta

SEQ ID NO: 530943 - DNA, 201 bp, Homo sapiens
tccgcctcctgggttcaagcaattctcctgcctcagcatccctagtaccagggattacaggtgtccgccaccttgcccagctaatttttgtattttagtaragatggggtttcaccatgtcggccaggctggtctcgaactcctgacctcaagcaatccacccacctctgcctcccaaagtgccgggattacaggcatgag

SEQ ID NO: 530944 - DNA, 201 bp, Homo sapiens
atatgtatatatttttttaaatcttaactaaatgcatgaaatacttgccaaataaggagatgatcaatttaaggtgacttgtagagggcataccttcttatatgatgacagccaaactgttatcttatatgattggtgccaaactgttaatattacactacaataaacaccctgtttatacatgtgtacttaagaaggtta

SEQ ID NO: 530945 - DNA, 201 bp, Homo sapiens
tttttgtatttttagtagagacggggtttcaccatgttggccaggctggtctccaaagcctgacctcgtgatccgcccgccttggcctcccaaagtgctgrgattacaggtgtgagccaccgctcccggcatttttttgtatttttagtagagacggggctttgccatgttggccaggctggtcttgaactcctgacctca

SEQ ID NO: 530946 - DNA, 201 bp, Homo sapiens
gtgaaactcacctggtttagtgagatgtgatgcactctgagattggctcccaagtgacttgtcatctaaggttttatcttgtgaagtgggttgaagttcartaggtttggaacaaacagagaattctgtcctggaaaattaatcgatttttgccatataaaatctaagagaagagaaaaggttgttattcgcctgaatttt

SEQ ID NO: 530947 - DNA, 201 bp, Homo sapiens
tatacatgtacaataaaatgcgaaaatcttggttgtaccactcaatgagttttgaaaaatgcataccctcatataacccatgcctctatcaagatatagaytactccatcattccagaagttttcttatgcaccttcccaatcatcaccctactcagatataatccctggtgtgattgtttttttataccaaggatcagtt

SEQ ID NO: 530948 - DNA, 201 bp, Homo sapiens
ttaagtaaattgtggtgaatctttagcccaggatcttacgcagccattttgtaaaggagcacgaagtttgaatgacacagaagtgttactacagggcttgmaggaaatctgccaaaatgatattagggatgtgtctgggtgatgagacactggatttttttttttttcttttttagacagggtctccctctgtcacccatg

SEQ ID NO: 530949 - DNA, 201 bp, Homo sapiens
ttctaagacaaagcagccaaagtctttttctttaacctttaatcttgctgacaggcattatactgtttggaagctgctcaccattttttttttttttttttgagacggagttttgttgcccaggctggagtgcaatggcacgatctcggctcactgcaacctccgcctcccaggttcaagcgattctcctgcctcagcctc

SEQ ID NO: 530950 - DNA, 201 bp, Homo sapiens
attaagtgcacaaagttgttctttgtaaacgtgaaaaattagagacaacctgaaagtccaaatctagaggattggttaagtaaattgtggtgaatctttascccaggatcttacgcagccattttgtaaaggagcacgaagtttgaatgacacagaagtgttactacagggcttgaaggaaatctgccaaaatgatattag

SEQ ID NO: 530951 - DNA, 201 bp, Homo sapiens
aatttttattttaatattaaatattaattaaaataattaatattgtaattaatataattaaaattaatattattgtaattaatataattaaaattaattawtattgtaattaatataattaaaataattaatattgtaattaatataattaaaataatattcataaacattattttatgacttacacaattatctgaaaaa

SEQ ID NO: 530952 - DNA, 201 bp, Homo sapiens
atgcccggcctgcctactaattaagcccaatttttgtatggtctgtttgtatgaatactaatagtgttgatgtggtaaaatgtggactacatactgtaggrtggaatcacctatggaaagagaagtttggcaccatgctttctccctgactgtgaacttcttgaagacagagatcaagactgtgtttttcatcttttcttc

SEQ ID NO: 530953 - DNA, 201 bp, Homo sapiens
ttaatttttattttaatattaaatattaattaaaataattaatattgtaattaatataattaaaattaatattattgtaattaatataattaaaattaattaatattgtaattaatataattaaaataattaatattgtaattaatataattaaaataatattcataaacattattttatgacttacacaattatctgaaa

SEQ ID NO: 530954 - DNA, 201 bp, Homo sapiens
tttgccttcttggttcatttgaattgacagaggcaaacttcaggagagccttacttggatgtccctgggcaaagagtaactctgtggaagtcatgcatctwaggtgaggcttctttcacacttacaatagcagaccggctcatgtgtcagtcatcccctcatctgtcattgtgtttaagaaataacaaagtgatttcatta

SEQ ID NO: 530955 - DNA, 201 bp, Homo sapiens
atcattaatttttattttaatattaaatattaattaaaataattaatattgtaattaatataattaaaattaatattattgtaattaatataattaaaattaattaatattgtaattaatataattaaaataattaatattgtaattaatataattaaaataatattcataaacattattttatgacttacacaattatct

SEQ ID NO: 530956 - DNA, 201 bp, Homo sapiens
ttaataaacaactgctctaattgatgtgtttagacattataaagctttacctttaaaatattttcagggtctgttctgaaatcaccccttgttaaacttcyctaaccaaaatacaagtgtagaagaatgtcaggctactaagccttttcttggtcttgtctttgttgggttgatttcacatagatgcaagtcactaggatg

SEQ ID NO: 530957 - DNA, 201 bp, Homo sapiens
gagaggtgtagggcaagtgaaatagttaccattttacagatgactgactgcagaacaagcgttagcaccagcgtcttccacatttgaccagagtgaccacrgttgcactacaaaagaaaagagagaaaagaaaaaatatcctatgacttggctaaggccatgtaagtttactttgatcacctacaccagagtccttttgca

SEQ ID NO: 530958 - DNA, 201 bp, Homo sapiens
tcagttaaaatcaataaaactttaagtccaaagaaataagacggaaaacatcttactgtggctattttcaatctgtgtattctaattctccctgacacctygtgatctttgtacttggtgttctttggtctggaatatttttcccaaacatctgcatggcttggttctttatttacttgaggttcttgttgaaatactacc

SEQ ID NO: 530959 - DNA, 201 bp, Homo sapiens
gtttatgaggtttaagcaaagaagctatctccataacaaaaaagtacaaggtgaagcagcaagtgctgatgtagaagctttagcaagttattcagaagagytaagatcattgatgaaggtggctacgctaaacaatagattttctttttttttttttttatagacagagtctcactctgtcacccaggctggagtgcagtg

SEQ ID NO: 530960 - DNA, 201 bp, Homo sapiens
ccagcctgggcaacaagagcgaaactctgtctcaaaaataaaaaattccctttaacaccttcaaggtcaaatgcctgcctttgtgaacagttaataaactttgacattttcagacatttgccattcagaagggagcattgtagcctgctgtagaccattccagcaaatgtcagaatgcagggcaagatgtgtgtcgactat

SEQ ID NO: 530961 - DNA, 201 bp, Homo sapiens
cacctagggcctgccgatccttgtgctatatgctttacattcattctaatttaatcctggtaaccccatgtaatcacatgatgagtccttataaggggaargtaggaggggaagagtgggagaaagtgatgtgacaacagaagtagacagaagaagagagtggcagatgctacctgctggctttgagataggaccacgagc

SEQ ID NO: 530962 - DNA, 201 bp, Homo sapiens
gtttggagatttttttttaacagttgttagaatggactttttgatcatttgaaggctttaaattatgcatggatcatttctgaaaacatatgtaagaaacygacagcaaggtcatggccacaagatcatgagtacttgaaccggagacagaggagagaaagagacctattttttactgtgtacacttttgtgccttgaaat

SEQ ID NO: 530963 - DNA, 201 bp, Homo sapiens; identical to SEQ ID NO: 338630

SEQ ID NO: 530964 - DNA, 201 bp, Homo sapiens; identical to SEQ ID NO: 338632

SEQ ID NO: 530965 - DNA, 201 bp, Homo sapiens
tagttttctaacttttaaagcagagagccatgagttttaatgaaatacctgtttgccattttaattctaacttccttttagatgataaaggagggattcartgtcatcaaaatatgtttattttttccttcagtgccccttctttgttgatgccacttcctggaactaaagcattgccttcaatggacaaatatgctgtgt

SEQ ID NO: 530966 - DNA, 201 bp, Homo sapiens
gaaatgtgtcattaccctccattcacttgcacaaaccctccctgtagatagcccttgttacccttgcccacttctcctttccgttgtagtgatagattatsaagttctcaaaactgaattttatttatttacctgtttgtttattgtttagagacagggtctcacactgtcacccaggctggagtgcagtggcacaatcac

SEQ ID NO: 530967 - DNA, 201 bp, Homo sapiens
actcaggacttcccccaagtaagcacacccagcactcatggcactgcacgggctcccctggcgcccacctgagactgagttctcagaggtcagagggcgtsttgtactggtgccggccttcctagcacctggaaccgtggcaggttcccagtggatgtgtgggaggttaattcttgtagtggtggtgttagagtactgtac

SEQ ID NO: 530968 - DNA, 201 bp, Homo sapiens
cagcctgggcaacaagagcgaaactctgtctcaaaaataaaaaattccctttaacaccttcaaggtcaaatgcctgcctttgtgaacagttaataaactttgacattttcagacatttgccattcagaagggagcattgtagcctgctgtagaccattccagcaaatgtcagaatgcagggcaagatgtgtgtcgactatg

SEQ ID NO: 530969 - DNA, 201 bp, Homo sapiens
ttccacctggaggtaaaaagttggtaaattcataaacttgtgaatgctaaattgcatactatttaaattgtatgaatctttaagtggtggtcttctgtgckaaatatgtaaaatgcctgtataccacatgttaatagtgtttggttaaaccaatctgcctcacttcctggagctgtgatttcaagattcctaaccttaact

SEQ ID NO: 530970 - DNA, 201 bp, Homo sapiens
ttagtataagtatgtcccatgcaatattggcattctttattttagccctgtatctaacaacatttcccacttggtcctttggaaaacccatgttattgtcraaaactcaccaactgtacccccctttttaagacacttgttctgcttcctcaccttaacagaaactgggtctttccttaaaggctgtatttccgtagcacc

SEQ ID NO: 530971 - DNA, 201 bp, Homo sapiens
ggagctggcgcggggtccgccgggggaggcgggtaggtgtgaagagccgggcgggagcccgctggcctccgcgggggcggcgaggggcgcttggcagttayggcagttttctccagccctgatccttttccttggaactgggctgcgggaggagggtcatcccccagggacccaggccgaaaggggcgtgtggagcccagg

SEQ ID NO: 530972 - DNA, 201 bp, Homo sapiens
gcagaaaactctctccatttgtcctctcagcaggaagtggatccccctcagccacctcaattcttcaaaagaaagagacttcatttggcagttctgaaaayatcaccatgacatctctctccaaagtaacgacctttgtaagtgaagatgctcttccagagaccaccttcccagctcttgccagttttaaagacacgattc

SEQ ID NO: 530973 - DNA, 201 bp, Homo sapiens
gttggtttcttacaaagttattgtttgttgttacgtttatatatcaagagctacaggctaagagcttaatgttacaattagaaataagcataaataaatgrcttccttcaaactaaaatgaagatgtgttcaccctccaagagtgagggaaaaggctaggtgcagtggctcatgcctgtaatcccagcactttgggaggcc

SEQ ID NO: 530974 - DNA, 201 bp, Homo sapiens
gttagatattaaggggagccttccatttttagcatcttttaatataatatatttctttgtatatttgcatcttttatttatttgcatctttgcatcttttwatccaatatatttctattttttacaaataagagtattaagatagaatttatggaagtcacatttttgtgtgtgataattaaagggataaattgtgttttt

SEQ ID NO: 530975 - DNA, 201 bp, Homo sapiens
aagagacttcatttggcagttctgaaaacatcaccatgacatctctctccaaagtaacgacctttgtaagtgaagatgctcttccagagaccaccttcccmgctcttgccagttttaaagacacgattcctcagaccagtgagcaaaaggaatatgaaaacagagactataaagatttcacaaaacaggacctgcctacgg

SEQ ID NO: 530976 - DNA, 201 bp, Homo sapiens
tgcctgtaattccagcactttgggaggccgagacgggcggatcacctgaagtcaggagttcaagaccagcctggccaacatggtgaaaccccgtctctacycaaaatacaaaaactagccaggcgtggtggcggctgcctgtaatcccaactaatcgagaggctgagaccggagaatcgcttgaacccaggaggcggaggt

SEQ ID NO: 530977 - DNA, 201 bp, Homo sapiens
accataatccccaccgcttcctgtctcagcggacctacttaagttgttcactttacttgcctggtctctgaaggcatttgagtttgcctcttctgctttartctcatcctgacaggaggggtcgttgatttcaactggattgagagactgtgaaggaactcggttacaaatccataacaaatgactggaaaagccacacaa

SEQ ID NO: 530978 - DNA, 201 bp, Homo sapiens
gtaactgggattccaggtgcctgccaccacgcccagctaatttttgtatttttagtagaagtgggttttcaccatgttggccaggctggtgtcaaactccygacctcaggtgatccacctgcctcggcctcccaaagtagtgggattacaggtgtgagccaccacacccggcctagaagaagatgaggattttgaatagga

SEQ ID NO: 530979 - DNA, 201 bp, Homo sapiens
gcttaaaaaccaaatattttattctgaatcggaggcaggggggaccaagtattttaattgtattggtgactttttttagtgtctccagccagtgctctttrtaaaaaaccatgactcagtgtgatttcgccatcttctccatggaccactatatacattaatgtttcttaccttctaggtgtgggagtatttccctcacag

SEQ ID NO: 530980 - DNA, 201 bp, Homo sapiens
aaaaagataaactgcggctgggcatggtggctcatgcctgtaatctcagcactttggaaggccaagtcgggcagatcactcgagctcaggagttcaagacmagcctgagcaacatggtgaaaccccacctctaccaaaaatacaaaaattagcctcatgtggtggtgcgtgcctgtagtcccagctgctctggaggctgag

SEQ ID NO: 530981 - DNA, 201 bp, Homo sapiens
aacaatttattaaatgaccctaatcttatatcaaacagtgtatactttggtagatgaacctcctatctttttttagtaatttttatagccaaagaaaatgrttcttggtaactaaatgtaaatgccaactcaaggctaatgtgggtttttttaagatcagattttacagcccaactcttaattttagtacaaactctaaat

SEQ ID NO: 530982 - DNA, 201 bp, Homo sapiens
ctgtagatagcccttgttacccttgcccacttctcctttccgttgtagtgatagattatcaagttctcaaaactgaattttatttatttacctgtttgttyattgtttagagacagggtctcacactgtcacccaggctggagtgcagtggcacaatcacggctcactacagccttgaactcccaggctcaagtgatcctt

SEQ ID NO: 530983 - DNA, 201 bp, Homo sapiens
tagggcccagggtagagagaaactgaaatgtacaagtattttatggtttgctttagtaaatgaagtttagattacatgagtactgtaaattaaaatatatrtcttagtccaatgaacatttttattgctatataaaatgagaatagtggaatttgtacatatatctcctttcttctttctccaaactccttcaaaagccag

SEQ ID NO: 530984 - DNA, 201 bp, Homo sapiens
tgctataggtttaaacaaaatactgttttgtttaccctgatgccaagtaacatatggttagtgcttcacttcatgtatcagtgcctgagaaagtatacctrtgtatctgttgttctatagtcactctgttgttcacatcagaatccctgctgatttttagaagtagcaaatgacggccaggcacagtggctcacgcctgta

SEQ ID NO: 530985 - DNA, 201 bp, Homo sapiens
agtcctctgaaaatactgttccacctggaggtaaaaagttggtaaattcataaacttgtgaatgctaaattgcatactatttaaattgtatgaatctttargtggtggtcttctgtgctaaatatgtaaaatgcctgtataccacatgttaatagtgtttggttaaaccaatctgcctcacttcctggagctgtgatttca

SEQ ID NO: 530986 - DNA, 201 bp, Homo sapiens
taatccgggtttggggtgtctttttttttcccccattttatttggaggttggtttttttgaccaagcttgttcttactgacctgttaaaataatcttctgkgctcatgttcttttatgtatgtttggaacatcctcagcttggagcctgtaatgttcaagctaactcttcagttggaggatattcttaaaagcagattgtt

SEQ ID NO: 530987 - DNA, 201 bp, Homo sapiens
aataatccttcatgctctttgtttaggcccttccttggaggagaagttcctagtatcttgtgatataagtacatctgggcaggaacaaattaaattaaatrcttctgaagttggccacaaagccctaggcccaggttccagtaagaagtatcccagtttaatggccagtaacggggttgctgtagatggatgtgtaagtgg

SEQ ID NO: 530988 - DNA, 201 bp, Homo sapiens
catgttggccaggcttgtcttgaactcctcctggcctcaagtgatacaccctccttggtcttccaaagtgctgggattacaggtgtgagccactgtgttcrgccttggcataactatatttacatttggtttatctctggtttttattacctggtatagcctagtggattttatggtagaccttcagatgctattagaaaa

SEQ ID NO: 530989 - DNA, 201 bp, Homo sapiens
gcccgggaggtggaggttgcagtgagctgagattgccctactgcatcccaactttggtgacagagtgagatcctgtctcaaaaaaaaaaaaaaaaaaaaaagaatttaaagtgaatcctcaatgtttttctctccagcatggttcagtggtttttgtataagcatagagaagtcgattagttgattctaatcaggggtgaa

SEQ ID NO: 530990 - DNA, 201 bp, Homo sapiens
aatatgcctctcttcaagaacctctagccctatttcttattgtattgtctgcttggctggctagctgtgggaacaaaaagtcttgagaggagtacttttarccagttgtaggatctagagctaagagagatcccacactaaaagcatgagcaaatgaaaatggtaccgtcaggtactttcagttcgatttctatttatttc

SEQ ID NO: 530991 - DNA, 201 bp, Homo sapiens
tcctctgtctttccatattaattttgggatagtcttgtctatctttggaaaaactcttgctggagttttgataggcattgtgttaaacctctgtatgaatktagggagaattgatgtcttccaacatatcaatatgagatgtcttttcatttgtttagatctttggtttcttctatcagaagactgtgtaaactatcattt

SEQ ID NO: 530992 - DNA, 201 bp, Homo sapiens
atgtaggatttttcataatactttattggtacctctgatttttttaatgggtaacatgtttatctttaaagggccactgttttaatatgcctctcttcaaraacctctagccctatttcttattgtattgtctgcttggctggctagctgtgggaacaaaaagtcttgagaggagtacttttagccagttgtaggatctag

SEQ ID NO: 530993 - DNA, 201 bp, Homo sapiens
atgatggacatgtgtaaacctgttgcaaactgttgtgttattgtaagaaataatagaaatcctttgcccagttcccctattggtaaaacttgtagaaatayagtaacacaaccagcatatggacattggcacagctgagatacagaacatttccatctccccaaggatctcctcacattgtccttttgtagctgtattcac

SEQ ID NO: 530994 - DNA, 201 bp, Homo sapiens
aggtagaaaagagtttaatatatttaacattgcatttaaccattaagaaagaggcatccataataggaaggctaggtgtgagaaatttaaaaattaagacyccttactctactactttctgtgtttattccctctgtattaatacttttacttttcaaacttctctcccctttgtccatcttaaacttcagctcctactgt

SEQ ID NO: 530995 - DNA, 201 bp, Homo sapiens
gctaccccaactacatgtcttcagcagcacatcctctcaccattgtcatgttgcttctggtttgtaatattaaagtctttaagagtttaagtaatttccaraactttttcttgttcccttgaatcacttctcattttctaacctaaaattgtatgtagataattaaaaaaaaaaatactgttctggcaagtgaaataagaa

SEQ ID NO: 530996 - DNA, 201 bp, Homo sapiens
ttgaagtgtacagggtaaccaagcgtgtggagctggggataaaagccactgcagtgtgcagtgagaaactccagcagttgctgaaggacatcgataaagtrtggaataacctaatcggcttcatgtcactcgccacactcacagtaagcccatgagacaactcagcagttgctttcctttccagaaacctaagttgtaaag

SEQ ID NO: 530997 - DNA, 201 bp, Homo sapiens
agaaaaagcctgacttgccccacatctctgtttatttctggcaggcattcaactcagaaacagacagtttcaagctggcctatggagggcaccagtatcaygccagctgtgccaacttctggatcaactgtgtcgaaccaaagcctcctggcctcgtcctgcctgacctgctctgaacaactcctctgtgaagcattgact

SEQ ID NO: 530998 - DNA, 201 bp, Homo sapiens
atctttgtattttaattagcacctttttttttttttggctgcttttctgatgtctttttttcaatttagacattttctgtgtgaatgtgccttcaaatttrctttagtatattcctctgcaaatactgatctgcatgcttattctgatgacttcttttccagctcttctgtatcactctcttttgtgatctgtaagtcttg

SEQ ID NO: 530999 - DNA, 201 bp, Homo sapiens
catggaatatttattaggtatgttctttcatattttactattgaaaatgatggccctttgcattattttcagttttccctttaattattttaagctagatmtctcaagttacatatgacttcagtaagaagcatctgtatttgtgggtaagacactcaagctacaggcagtaaactattggacttaattaaaaagtctcta

SEQ ID NO: 531000 - DNA, 201 bp, Homo sapiens
gacttcatttggcagttctgaaaacatcaccatgacatctctctccaaagtaacgacctttgtaagtgaagatgctcttccagagaccaccttcccagctyttgccagttttaaagacacgattcctcagaccagtgagcaaaaggaatatgaaaacagagactataaagatttcacaaaacaggacctgcctacggctga

SEQ ID NO: 531001 - DNA, 201 bp, Homo sapiens
ttaaggggagccttccatttttagcatcttttaatataatatatttctttgtatatttgcatcttttatttatttgcatctttgcatcttttaatccaatrtatttctattttttacaaataagagtattaagatagaatttatggaagtcacatttttgtgtgtgataattaaagggataaattgtgttttttaagcctt

SEQ ID NO: 531002 - DNA, 201 bp, Homo sapiens
agctgaggcgggagatcacaagtccaggagtttgaggctgcacgtgacagcgtaggtgatgacagagcgagacactgtctcttaaaaaaaaaaaaaaaaaagtttcccagtttgaatttgtattgctgaagcatttttttgaaatgctatatagatgcctgtcatgtcacagtggcccagtatcaacattttaaaaagctc

SEQ ID NO: 531003 - DNA, 201 bp, Homo sapiens
gtcacctctgggacagtgaagggaatggaggggttagatattaaggggagccttccatttttagcatcttttaatataatatatttctttgtatatttgcwtcttttatttatttgcatctttgcatcttttaatccaatatatttctattttttacaaataagagtattaagatagaatttatggaagtcacatttttgt

SEQ ID NO: 531004 - DNA, 201 bp, Homo sapiens
atatacataatttaggtaaatcattctttagactcatgtcaaatattttggaattaatatagtgaggaaacaggattgtcgtaagaaaactagatatttarcaatgaaatttacacttctggaagtgcaacatgatattgctgaaactgttagaaatctgaatataaaacacagtgtataatcccgggagctggttcttta

SEQ ID NO: 531005 - DNA, 201 bp, Homo sapiens
ctgttgcccaggctggagtgcaatggcgcgatcttggctcacttcaacctccacctcctgggttcaagcaattctcctgcctcagcctcctgaatagctgrgattacaggcaagcgccaccacacccggctaatttttgtatttttagtagagacggggtttcaccatgttggccaggctggtctccaaagcctgacctcg

SEQ ID NO: 531006 - DNA, 201 bp, Homo sapiens
atctcagctcactgcagcctccatctcttgggttcaagctattctcctacctcagcttcccaaatagctgggattacaggcacccgccaccacgtccggcyaattgttttgttttgtttttgagacggagtctcgctctgttgcccaggctggagtgcaatggcgcgatcttggctcacttcaacctccacctcctgggtt

SEQ ID NO: 531007 - DNA, 201 bp, Homo sapiens
taccttttcccaagctcctgtggctacaagcttgctacagctgcaccttctagactctgaacacccctccacaccttttcttttcttttttttttttttttgtaaaatatatatacatgtacaataaaatgcgaaaatcttggttgtaccactcaatgagttttgaaaaatgcataccctcatataacccatgcctctatc

SEQ ID NO: 531008 - DNA, 201 bp, Homo sapiens
aaaaagcacgtgtttactgcagtcctccaattttctttgagcttctggaattcagttcattatcctctggatcagagaaatgcattaaactctgcatttacttcctgagctccagctactaatgaaattgattcgctagtgatatgtgccgagggtgcctgtgaagctgtggggtagagaaggatgtgtcaccatttgtga

SEQ ID NO: 531009 - DNA, 201 bp, Homo sapiens
tggttgaggtttggactctacttttccatggctgactgtagcttactgataagcctgttcatctggaaataattcttatgtgtttaatgcccattcatttygaggcatttttttttaactccatacctgtttggactttttgataatgtagattcattaggcattagggtcaatgccattagaccctaagagttgttatct

SEQ ID NO: 531010 - DNA, 201 bp, Homo sapiens
tctctgtctcccttcactagaatgaacctccaagaaggcaaggattttggtctgttttgttcactggtgtgtccccaacacctaatctagtgtcttgcacrtagttggcactcaaaaatatttgctggatgagtggagagtgaagggatgtagtctctgccttactcctgccacctcacttggggtcttcttttcctgctc

SEQ ID NO: 531011 - DNA, 201 bp, Homo sapiens
tacaggcatgagccaccacgcccgtttttttgtgtgttttttttttttttttttaagacagagtttccctcttgtcacccaggctggagtggaatggcgcratcttggatctcggctcactgcaacctctgcctctgaggttcaagtgactctcctgcctcagcctcccaagtaactgggattccaggtgcctgccaccac

SEQ ID NO: 531012 - DNA, 201 bp, Homo sapiens
tggtgcaatctcggctcactgcaacctccgcctcccagattaaagcaattctcatgcctcagcctcccaagtagttgggattacaggtgcgtgccaccacrcccagctagtttttgtatttttagtagagacagggtttcaccctgttggccaggctggtctcgaactcctggcctcaagtaattcacccacctctgcctc

SEQ ID NO: 531013 - DNA, 201 bp, Homo sapiens
agacaaagcagccaaagtctttttctttaacctttaatcttgctgacaggcattatactgtttggaagctgctcaccattttttttttttttttttgagasggagttttgttgcccaggctggagtgcaatggcacgatctcggctcactgcaacctccgcctcccaggttcaagcgattctcctgcctcagcctcccaag

SEQ ID NO: 531014 - DNA, 201 bp, Homo sapiens
cagatgcgcaccaccacgcctagctaatttttgtattttttgtagagacgggatttcaccatgttgccctggctagtctcaaactcctgggctcaagcagkccacctgctttagccttccaaagtgctaggattacaggtgtgagcaactgtgcctggcccatcatttaacttttatacttctttttaatcatatacctag

SEQ ID NO: 531015 - DNA, 201 bp, Homo sapiens
gaatatttattaggtatgttctttcatattttactattgaaaatgatggccctttgcattattttcagttttccctttaattattttaagctagatctctyaagttacatatgacttcagtaagaagcatctgtatttgtgggtaagacactcaagctacaggcagtaaactattggacttaattaaaaagtctctatggc

SEQ ID NO: 531016 - DNA, 201 bp, Homo sapiens
ggtttcaccctgttggccaggctggtctcgaactcctggcctcaagtaattcacccacctctgcctcccaaagtgctagaggcattacaggtatgagccaycatgcccggcctgcctactaattaagcccaatttttgtatggtctgtttgtatgaatactaatagtgttgatgtggtaaaatgtggactacatactgtag

SEQ ID NO: 531017 - DNA, 201 bp, Homo sapiens
agctaagtacagatttggatgttctcaaatatacagtggcttaagagctctggtctggataacaactgtcttgggaggaaaaaacctctttgtcttctaaktaaatatcagtatgacaatttcacctgtaagttttctgtatataaatatgttaacattagtaaaatctattcactcagagcaaatgtaataaaggagttt

SEQ ID NO: 531018 - DNA, 201 bp, Homo sapiens
agaagtgggttttcaccatgttggccaggctggtgtcaaactcctgacctcaggtgatccacctgcctcggcctcccaaagtagtgggattacaggtgtgrgccaccacacccggcctagaagaagatgaggattttgaataggactcctaagagatcacttgtagtgtcttaaatatgccatttaagaaagaaaagttgc

SEQ ID NO: 531019 - DNA, 201 bp, Homo sapiens
atttcctatggtctctgtcatgcagcctaatatgcaaggcattatgggaatgaattacagctctcagatgtcccaaggacctattgctatgcaggtacttrcttctttagttggtttcttacaaagttattgtttgttgttacgtttatatatcaagagctacaggctaagagcttaatgttacaattagaaataagcata

SEQ ID NO: 531020 - DNA, 201 bp, Homo sapiens; identical to SEQ ID NO: 338623

SEQ ID NO: 531021 - DNA, 201 bp, Homo sapiens
cccgggttcaagcgattctcctgcctcagcctcgtgagtagctgggattacaggcgtgcaccaccacgcccagctaattttgtatttttagtagaggcaargtttctccatgttggccaggcttgaactccggacctcaggcgatccgcccgcctcagcctcccaaagtaccgggattacaggcgtgagccactgcgcctg

SEQ ID NO: 531022 - DNA, 201 bp, Homo sapiens
gtcttgtctatataattgctgcttttacataatttattttcccctctcaggacaaattctgtcttgctccatcttacagcttttccatgttctccaagaawggtgtggaacattttcattaaacagctgttgctgaggcttctgcttgaccttctgcgtgcccgaatgcacagagaggcaccgaggagagaaaggcttttc

SEQ ID NO: 531023 - DNA, 201 bp, Homo sapiens
actctgcttcctgccaagtaacaagtcctttaggtacttatggttttaagaaaataaactttaaaacacattgactttaataatgtctttatattttcagsaggcctgatgccgatgcagcaacaaggatttcctatggtctctgtcatgcagcctaatatgcaaggcattatgggaatgaattacagctctcagatgtcc

SEQ ID NO: 531024 - DNA, 201 bp, Homo sapiens
gggtgacagggaccaataaatagaatgcgagcactgcacagttcgcttccctgaatcgatatgaagaacaccgcaagggacggggcccccgtcatccccayggccagtctgcaggacttcaggtaaaattgtcccacccaaactgcacgtggcaccagaagcttgctcacttatctctacttaagattttctgaaatacgg

SEQ ID NO: 531025 - DNA, 201 bp, Homo sapiens
gaaaactagatatttagcaatgaaatttacacttctggaagtgcaacatgatattgctgaaactgttagaaatctgaatataaaacacagtgtataatccygggagctggttctttattagatcatttttccttcaggaaacgatttgaacagcagcaaaaactcttagaagaagaaagaaaaagacgccagtttgaagag

SEQ ID NO: 531026 - DNA, 201 bp, Homo sapiens
ctctacttttccatggctgactgtagcttactgataagcctgttcatctggaaataattcttatgtgtttaatgcccattcatttcgaggcatttttttttaactccatacctgtttggactttttgataatgtagattcattaggcattagggtcaatgccattagaccctaagagttgttatctgtcgttctctaactc

SEQ ID NO: 531027 - DNA, 201 bp, Homo sapiens
agaaagaaaaagacgccagtttgaagagcagaagcaaaagctcagacttttgagcagtgtgaaacccaaggtagtatttcaatacttctcttcacccagarcatacacaccctgaatgtgcctcttcccactcattgagtggatttcgtcactggggcaccagcccaagctgaggctgtgattgattcttctcattttggt

SEQ ID NO: 531028 - DNA, 201 bp, Homo sapiens
atgaattccttggtgttgatgaattatgctggtgaattggttaactatctcaggttaggaggaaaaattagcttgtattgtttttggtgctttttttttttcatctgctatatccaagtacatatcttgttacaagcacagtatattttattttttaaatttatttttatttttattttatttatttatttattttgatac

SEQ ID NO: 531029 - DNA, 201 bp, Homo sapiens
tgtgtgtgtgtgtgtgtagtgaattagataatgcatataaagagcttagtatagtgcttgaaagtaagggcgtattagctgttgttctatttatggtcttyagctggtgaccttcagatctctccacaagcaggaggcctgtatgtgtatccaaccacctgcttatatagcatgtggccttcgctgtcccacaggcagctc

SEQ ID NO: 531030 - DNA, 201 bp, Homo sapiens
tgacctcaggtgatctgcccgcctcggcctcccacagtgctgggattacaggcgtgagccaccacacttggccagtctttttcttttcaagatttttttttctattgttgttgcggtacttggtaccattattatttggttttttttagcctttcactcatgatctagaaagaaaatattctagaataacattattaaaaa

SEQ ID NO: 531031 - DNA, 201 bp, Homo sapiens
ccagggagctgcctgggtctgataagagaagaagaagaagaagaagaagaaaaagtaatgcttttatagtatgtgtttaagccttctaagaattacctgcmcagatgctactcattacgctatttttccatccagcacgaaatatgtccacaggcaaaagtatctttatctaattttgaagtgattgttgttttgttacaa

SEQ ID NO: 531032 - DNA, 201 bp, Homo sapiens
ctactaaaaataaaaagtagccaggtgtagtggcacacacctgtagtcccagctactcaggaggctgaggcaaaaggattgcttgatcccaagagtttgargctgcagtgagccatgatcacacacgcccctgcactccaccctgggtgacagagtgagattctatctcaaaagcaagacaaaacacaaatgatataaact

SEQ ID NO: 531033 - DNA, 201 bp, Homo sapiens
attccattctgtcgcactagtgtgttaaatccagttcttactggcttgcaagagtggattgttaaatgttcaggaattttatgagccagttgttaaacacsgttattactaaaaattaaatgaagactgggtgcagtggctcatgcctctaattccaacactttggaaagctgaggtgggaggattgcttgaggccagaag

SEQ ID NO: 531034 - DNA, 201 bp, Homo sapiens
tcttaactaaatgcatgaaatacttgccaaataaggagatgatcaatttaaggtgacttgtagagggcataccttcttatatgatgacagccaaactgttrtcttatatgattggtgccaaactgttaatattacactacaataaacaccctgtttatacatgtgtacttaagaaggttaattttgtcagctgaaagagta

SEQ ID NO: 531035 - DNA, 201 bp, Homo sapiens
cttgaacccaggaggcagaggttgctgtgagcggagatcatgccattgtactccagcctgggcgacagagccagactctgtctcaaaaaaaaaaaaaaaaagaaaaaaaatgtggggccaggagtggtggtgcacacctgtattcccagctactcaggaggctgaggcagaagaattgcttgaacctgggaggcagaggtt

SEQ ID NO: 531036 - DNA, 201 bp, Homo sapiens
caagaccagcgtggccaacatggtgaaaccccatctctactaaaaatacaaaaaattagccaggcatggtggcacgtccctataatctcagtcacttggtrggctgaggcaagagaatagcttgaacctgggagatagaggctgcagtgagtcgagactgcgccactgcactccagcctggacgacagagtgagactccat

SEQ ID NO: 531037 - DNA, 201 bp, Homo sapiens
gggcgtgtggagcccaggtgctggacgctggtgttccgggatcagttgggggcgccggccgcctggaatcgagcggggagcgagcgcgcgcccagtgtggkaggggagagaagatgagggtcctcttggggtgggggggggcggggcaaatcaggaaccgcgactccgctcctagtcctagctgcctctgaagcgaccagg

SEQ ID NO: 531038 - DNA, 201 bp, Homo sapiens
tctgcctcccaaagtgccgggattacaggcatgagccactgcgcctggccatatttttatacttgtattattttatatatttgtatactcatgagcaatatatcatatttcctaggttttaaattttacgtatgtacccttcaaattcttgactttttaatttatgccaagttcattcatagtagctgctgtgtggtattt

SEQ ID NO: 531039 - DNA, 201 bp, Homo sapiens
tagctgttacagaactcaagtactcttattcaagaagggtatgtcttcaatctgagtgcttgagagaataaattctcagcacgttttgaatcccagaaagrccagaactgtattttttccgtctttgttatttccagccctcaatatgggcatattgaatgacttcagtgagttagtgtctcttcttttgaatcccagggt

SEQ ID NO: 531040 - DNA, 201 bp, Homo sapiens
aaaaatggggtttcagatctttgtgacgaaatagaatactgtttcatatttgaatcagagggcttcttgttctgagaaataggttcaaaatcattggaacyaggaacaagaatagcttattgttatctgtgataacactgttttctaaacacaaggattttcttttttattaatatgcaacatagacattgccataacaga

SEQ ID NO: 531041 - DNA, 201 bp, Homo sapiens
tgtagaggtcttgcagcttgagcatggtcagggctatgggataggaatgctatgtggctgcgtagggttagttttctccagcgaagtagaagagcctaggsagacccagctagagatcagaaagcaaataagtggcagcaatgaagacaccggggtccagaaaaagagctgttaacctggccatggaggatgatccttgta

SEQ ID NO: 531042 - DNA, 201 bp, Homo sapiens
gtattcctgttattaagtgtagagttttatgagtataatttgattttattaccttcttttttacaagctgttttctcagtatttttcttggatgggatgaygctaggctggaaagtttttttcatcactatgattttataaaacaattttttctatgaacctttacttacttgactggattggactaaaagcactgatcag

SEQ ID NO: 531043 - DNA, 201 bp, Homo sapiens
gaggagacccgtgtcatgtttgagaagatagcgaaatagtaggagcgcgcggggcggacgcgggagtgtgtgggtgtggtggccaagggtggagtgggggygcggtgccggagaccggttcgttcgggcgcggtctccagtcctctttttgccctcagcattggggagaatcttcaactgctggtggaccggcccgatggc

SEQ ID NO: 531044 - DNA, 201 bp, Homo sapiens
cgaagccattccaaggacagacggctgtatggaaaggccgagctttgtttcctgtgtttgtgtggactccaccatcatgttgaattttgtcaacactctgrcctcttcagggacttcttatttactgtactctctatcactgacaaatgcaggctggattcttattatatacagagatggctcaaaaatggggtttcagat

SEQ ID NO: 531045 - DNA, 201 bp, Homo sapiens
gtacggggctagagaggaaggctttgggattgccggggagcagcgagcgaccgacttccgtttccagttaccaaggcacgaggatccggtgttccaacccrgggggaaaaatgcggcctttgactgaagaggagacccgtgtcatgtttgagaagatagcgaaatagtaggagcgcgcggggcggacgcgggagtgtgtgg

SEQ ID NO: 531046 - DNA, 201 bp, Homo sapiens
ctcttggattttaattctcttatagtataaagtttggataaagcctggtgcagagcagtccttcctgtatgggaaccatgtgttgaaatctggtctgggtsgaatcactgaaaatacttctcagtaccagggcgtggtggtgtactccatggcagacatccctttggtgagtagagatggtagctgttacagaactcaagt

SEQ ID NO: 531047 - DNA, 201 bp, Homo sapiens
tagtaggagcgcgcggggcggacgcgggagtgtgtgggtgtggtggccaagggtggagtgggggcgcggtgccggagaccggttcgttcgggcgcggtctycagtcctctttttgccctcagcattggggagaatcttcaactgctggtggaccggcccgatggcacctactgtttccgtctgcacaacgaccgggtgtac

SEQ ID NO: 531048 - DNA, 201 bp, Homo sapiens
agcgcgcggggcggacgcgggagtgtgtgggtgtggtggccaagggtggagtgggggcgcggtgccggagaccggttcgttcgggcgcggtctccagtccwctttttgccctcagcattggggagaatcttcaactgctggtggaccggcccgatggcacctactgtttccgtctgcacaacgaccgggtgtactatgtga

SEQ ID NO: 531049 - DNA, 201 bp, Homo sapiens
tagctagaaatctggacttttattataaaaccttttatacctcttgagttttgttttatgtgcatgtattacctattcacaggagaaactgtgtgtaccastgtgcccagccagtttgtctagtttttgaaacaagaacaccatgcctcgagtgacagtaattgtagtcatgactgaagtaaaacaagtattttatgagtt

SEQ ID NO: 531050 - DNA, 201 bp, Homo sapiens
ggccctttcacagagccaagcacatatagtaggttctcaagaaatagtatgtttaaaaagtcttaactctgctgggcacaatggctcacatctgtaatccyagcactttgggaggccagggttagagaattgcttaaaagccagaagtttaagaccaacttgggcaacacagtgagacctcgcctctacaggattttttaa

SEQ ID NO: 531051 - DNA, 201 bp, Homo sapiens
ttttgcagctgaacttttagcatgtgcttaaaagatgttatactggttacagtgccaaagcaactagatggaaataaatagtccctctagaaaatagtcakcctgatatacgatctgaaataaggacatcattgcctcccccacccagtttggtgggatgagggtgattctgaatcttctgctagaatgagggtggggcag

SEQ ID NO: 531052 - DNA, 201 bp, Homo sapiens
atcctgcaacattgctataattgcttatcagttttaggagttgtgtacagggtctcactctgttgccaaagctggaatacagtggcataatcatggctcayggcagcctcaacctcctgggctcaagcaaccttctacctcagcctcccaagtagctgggaccacaggtgcacaccaccatgctgagattttttttgttgt

SEQ ID NO: 531053 - DNA, 201 bp, Homo sapiens
tataatcctagcactttaggaggccagggcaggagggtcacttgagcccaggagttcaagaccagcctggcaacatagtgagaccctgtctctacaaaaawtttttttttaaagtagttgggtgtggtggtgcacatctgtggtagtcccagttaactgggaggctgaggtgggaggatcacttgagacctgtatggtcaa

SEQ ID NO: 531054 - DNA, 201 bp, Homo sapiens
agtagcagcaagaatgctgattttgtagtgttagaaaatgaactcagcttgtttttcctaattttgaaggtggtatatatctgcaaacatttaaaatggtwtaatatcatataaaatgtcaaaattagcacagtccctggatctcaaagaataggtaatattgacttggatgttctttatgctctctgaagaaaggtctag

SEQ ID NO: 531055 - DNA, 201 bp, Homo sapiens
aaagctggaatacagtggcataatcatggctcacggcagcctcaacctcctgggctcaagcaaccttctacctcagcctcccaagtagctgggaccacagrtgcacaccaccatgctgagattttttttgttgttttttgttttcttttgtttttgtaaagacagggtgtctctgtattgcccagattggtctcaaaatcc

SEQ ID NO: 531056 - DNA, 201 bp, Homo sapiens
gcagcctgggcaacatggtgaaaccccgtctttactaaaaaaaaaaaaaaaaaaaaaaaaaaaaaaaatccgtgcacagtggctgatgcctgtaatcccaragctttgggaggccgaggcaggtggattgcctgagctcaggagttcgcaaccagcctgggcaatacagtgaaaccccatctctactaaaacacaaaaaat

SEQ ID NO: 531057 - DNA, 201 bp, Homo sapiens
ggcaatacagtgaaaccccatctctactaaaacacaaaaaattagccaggcgtggcagcatgtgcctgtagtcccagctgttcgggaggctgaggcaggaraattgcttgaactcgggaggcggaggttgcagtgagccaagatcacaccactgcactccagtctgggcgacagagtgagactccgtctcaaaaacaaaca

SEQ ID NO: 531058 - DNA, 201 bp, Homo sapiens
tgtagtcccagctactcgggagactgagtgagttgagatcataccactgcactccagcctgggcaaccagagtgagaccctgtttcaaaaaaaaagatacwcgaatgcttaccattgtgttacagctggctacagtattcagcgcagtaacatactatgtaagtttgtagcctaagagcaataggcagtaccatagagctt

SEQ ID NO: 531059 - DNA, 201 bp, Homo sapiens
ctcttctctccagtagatatactatttgatcaagatgtgggtaattagtctctaatttccctacaagaaaatattttctaggccaggcgcggtggctcackcctgtaatcccagcactttgggaggccaaggtgggtggatcgggagttcgagaccagcctgaccaacatggagaaaccctatctctactaaaaatacaaa

SEQ ID NO: 531060 - DNA, 201 bp, Homo sapiens
acatggagaaaccctatctctactaaaaatacaaaattagccgggcgtggtggtgcatgcctgtaatcccagctactcaggaagctgaggcaggagaatcrcttgaacctggaaggtggaggttgctgtgagccaagatcactccattgcactccagcctgggcaacaagagcaaaactccatctcagaaagaaaaaaaaa

SEQ ID NO: 531061 - DNA, 201 bp, Homo sapiens
gagttcaagaccagcctgaccaacatggagaaaccccgtctctactaaaaatacaaagttagctgggcgtggtggctcatgcctgtaatcccagctactcrggaggctgagggaggagaatcgcatgaactcggtaggcagaggttgtggtgagctgagatcgcaccattacttacactccagcctgggcaacaagagtga

SEQ ID NO: 531062 - DNA, 201 bp, Homo sapiens
agcacttcccacaatgctttgcgtgtagtaggccatcaataaatcttagttgaattaaattatttacttaagttatagtttctctgtcatggttacattargaacttgacagtaatcctacaaaaatatgtaaccatgtcttagtaattataattagaacaattaaatttatattttccaagatttagaatttaggaatat

SEQ ID NO: 531063 - DNA, 201 bp, Homo sapiens
tggttcatacctataatcccaatactttgggaggctgaggcgggtggatcacctgaggtcaggaatttcagaccagcctgaccaacatggtgaatcccccwctctactaaagatacaaaaactagccaggcttggtggcacttccctgtaatcccagctggggaggctgaggcaggagaatcgcttaaaccaggaggtgga

SEQ ID NO: 531064 - DNA, 201 bp, Homo sapiens
gtggatcacctgaggtcaggaatttcagaccagcctgaccaacatggtgaatcccccactctactaaagatacaaaaactagccaggcttggtggcacttscctgtaatcccagctggggaggctgaggcaggagaatcgcttaaaccaggaggtggaggttgcagtgagctgagaccgcgccattgcactccagcccggg

SEQ ID NO: 531065 - DNA, 201 bp, Homo sapiens
tgatacagaaactattgataaggtttcatattccacattgcaattaatctttaccaaaccacttgttgagttttggttctgtggacagaaggctatccacrtaatgtgaatgggctattaaaatactcttcccttttccaactacatatttatgtgaggctgtaactgcatattacaatagaatgctgaagcagatgtcaa

SEQ ID NO: 531066 - DNA, 201 bp, Homo sapiens
cagaaactattgataaggtttcatattccacattgcaattaatctttaccaaaccacttgttgagttttggttctgtggacagaaggctatccacgtaatstgaatgggctattaaaatactcttcccttttccaactacatatttatgtgaggctgtaactgcatattacaatagaatgctgaagcagatgtcaaaattc

SEQ ID NO: 531067 - DNA, 201 bp, Homo sapiens
ggcaggaggattatttgagcccaggagttcaagactggtatcttgtctgactgtgataccaggggtcattttatgggaaaacagaatggtctgtatttcasagactataatcttgctttgaaatgtctatatccaaaaactgctgattgcttttataagtttctcttatcaatgagcacaaattcctgacatttttgtctg

SEQ ID NO: 531068 - DNA, 201 bp, Homo sapiens
agaaaactctctccctggtcattggcagtttgtcaatttgtagcctaccatgaaaaacactaaaggctttttttttccattttaaaagatatatatgttcwcagcagagtatatatcttagtcatttatttatttatttgacttttaaaattcatctttgcaagaactttgattgaaacacaaaacaatattcaatagatt

SEQ ID NO: 531069 - DNA, 201 bp, Homo sapiens
cactcctgttagtaactcctgttactgtcctaacactgtctccctggctggaatgtttctcccagatatttgcatggccaactcccccatctcctaaagtmtttgttcaaacatcttattaatggcttaccctaactaccatatttaaaatttacaaactgacaccctgggcagcatttctgaccccttcccttgctgtgt

SEQ ID NO: 531070 - DNA, 201 bp, Homo sapiens
ctagcccaagttggtctttctgattttttttttttttttttttttttttttgagacagagtttcgctctgtcacctaggctggatctcggctcactgcaayctccacctccctggttcaggcagttcccctgcctcagcctcccgagtagctgggattacaggcacacgccccaacgcccggctaaattttttgtattttt

SEQ ID NO: 531071 - DNA, 201 bp, Homo sapiens
actcctgttagtaactcctgttactgtcctaacactgtctccctggctggaatgtttctcccagatatttgcatggccaactcccccatctcctaaagtcwttgttcaaacatcttattaatggcttaccctaactaccatatttaaaatttacaaactgacaccctgggcagcatttctgaccccttcccttgctgtgtt

SEQ ID NO: 531072 - DNA, 201 bp, Homo sapiens
accatattggccaggctggtcttgaacttctgacctcaggtgatccaccgacctcaggtgatccgcctaccttggcctcccaaagtgctgggattacaggygtgagccaccacgcctggtcttcggtttatttatttatttttttagagatgaggtcttactgtgttgcccaggctggtctcaactcctggcttcaagcta

SEQ ID NO: 531073 - DNA, 201 bp, Homo sapiens
actgcaacctccacctccctggttcaggcagttcccctgcctcagcctcccgagtagctgggattacaggcacacgccccaacgcccggctaaattttttrtatttttggtagagtcaaggtttcactgtgttggccagactggcctcaaactcctgacctcaggcaatctgcccgccttggcctcccaaagtgctgagat

SEQ ID NO: 531074 - DNA, 201 bp, Homo sapiens
ctcctgttagtaactcctgttactgtcctaacactgtctccctggctggaatgtttctcccagatatttgcatggccaactcccccatctcctaaagtctytgttcaaacatcttattaatggcttaccctaactaccatatttaaaatttacaaactgacaccctgggcagcatttctgaccccttcccttgctgtgttt

SEQ ID NO: 531075 - DNA, 201 bp, Homo sapiens
aatagtaattgttctgtgcttttggcattgttcaaaatcctcatgattttaaaaaggtagcacgttcacatggttgaaaaatcaaacaaaaaattaatggrtgaaaactcttgccctcattcccgttacctatccacctgttatgccttttgccctggaaaggtaacaactcttattcctttctattgaatcttttgagag

SEQ ID NO: 531076 - DNA, 201 bp, Homo sapiens
aagtgtcaagattataagtgtgagccaccacacccagccagtaaaacatttacttttaaaaatcagtttatcttttttttttttttttaagacagagtctygctctgtttccaggctggagtgcagtggcgcagtctcagctcactgcaacctctgcctcccgggttcaagcgattctcctgcctcagccttctgagtagc

SEQ ID NO: 531077 - DNA, 201 bp, Homo sapiens
attcatcctgtttaattgaaactttgtaccatttgaccaacatctcactttccccatctaccccttacctcagcctctaggaactaccattccactctacttttttttttttttttgagacagggtctcattctttcacctgagctggagtgcagtggtataatcatggctcagtgcagcctcaacctcctgggcccaagc

SEQ ID NO: 531078 - DNA, 201 bp, Homo sapiens
gaagctgggtacactggctcatgcctgtaatccctgcactttggaaggctaaggctggcgcattgtttgagcccaggagtttgagaccagcctgggtaaartggtgaaacctcatctctactaaaaatacaaaaatttagctgggagtggtgacacacatctgtagccccagctactcaggaggctgaggtaggaggatca

SEQ ID NO: 531079 - DNA, 201 bp, Homo sapiens
acaagaattgcttgaacctgggaggcggagtctgcagtgagctatgatcacaccactgcactccaacctgggcaacagtgggaaactctgtctcaaaaaawatatatatatatatatgtatatgcattgggccaagcacggtagttcacgcttgtaattccagtactttgggaggctgaggtgggcggatcacttgagccc

SEQ ID NO: 531080 - DNA, 201 bp, Homo sapiens
gacaaatgtggcatgttctcacttatatgggagctaaaaaagtggccaggcgtggtggctcacacctataatcccagcactttgggaggccgaggcgcgcrgatcacctgaggtcaggagttcgagaccggcctgaccaacatggagaaaccccatctctactaaaaatacaaaattagccaggtgtggtgatgcatgcct

SEQ ID NO: 531081 - DNA, 201 bp, Homo sapiens
tggttcgcacctataatcccagcactttgggaggctgaggcaggtggatcacttgagctcagtctgggcaacatggcgaaaccccgtctctacaaaaaatwaaaaaattacccaggcctggtggtgtgtgcctgtagtcccagttactcaggaggctgaggtaggagggttgcttgagcccgagaggtcaaggattcagtg

SEQ ID NO: 531082 - DNA, 201 bp, Homo sapiens
gttgcttgagcccgagaggtcaaggattcagtgagctatgattacgtcactgcactccagtctgggcaacagaacaagaccctgtctcaaaagaaaaaagraaattgttgggagattcagaactgtctgttaaaactatagttggcaaaaagaaatcagttaagctgttccttgtctctatgttttggttatagtttaccc

SEQ ID NO: 531083 - DNA, 201 bp, Homo sapiens
tcatttaatatatctgtaatacttaccatgcagttaggacctggatatctagcttgcagatcttttgtttttcagtgttttgtttcacctccctttttctccttctacctttgtctatttgttgctaattatccactcaaccagaagtagctgacatagtaatcactatcatactattactaaagaagttcttattaccat

SEQ ID NO: 531084 - DNA, 201 bp, Homo sapiens
acatggtgaaaccccatctctactaaaaatacaaaagttagctgggcgtggtggcgtacacctgtagtcccagctactcgggaggctgaggcaggagaatygcttgaaaccaggaggtgaaggttgcagtgagccgcgattgtcccgctgcactccagcttggcgacagagcaagactgtctcagaaaaaaaaaaagatag

SEQ ID NO: 531085 - DNA, 201 bp, Homo sapiens
ttcctatgtgcagtcactgggaaggatgccccagcctttctctgagacagttctgggctgtcaggccaggtctaacctgaaagacctactcccttctgagktgctctgagtaacacacacagtcctatggctgctagagagatgggcctggggacttgctggaaacactagatagggccccccagagccccagaaacagga

SEQ ID NO: 531086 - DNA, 201 bp, Homo sapiens
gagatgggcctggggacttgctggaaacactagatagggccccccagagccccagaaacaggacctgtagcatagaactctgccattaggttctttatccytcatgacacactgataaccaccagcagttctcatttaaaaaaacacatagttggcccagcgctgtggcttatgcctgtaatctcagcactttgggaggcc

SEQ ID NO: 531087 - DNA, 201 bp, Homo sapiens
tgtttgtttgtttgtttttagagagacagtctcattctgttgcccaggctggagagcagtgtcacgaacatggctcactgcatccaggctgaagcaatcckcccaccacagcctcccaagtaactgggactacaggtgcatgcaactatgcctggctaatttttgtaattttggtagggatagaatctcactatgttgcct

SEQ ID NO: 531088 - DNA, 201 bp, Homo sapiens
caggcacccgccaccacacccagctaatttttatatttttagtagagacggggtttcaccatgttggtcaggctggtctcaaacccctgactttgcgatcygcctgcctcggcctcccaaagtgctgggattacaggcgtgagccaccacgcctagcacaaaacacactttagaagtttccatacaggttaggtatcacac

SEQ ID NO: 531089 - DNA, 201 bp, Homo sapiens
tcctgttagtaactcctgttactgtcctaacactgtctccctggctggaatgtttctcccagatatttgcatggccaactcccccatctcctaaagtcttwgttcaaacatcttattaatggcttaccctaactaccatatttaaaatttacaaactgacaccctgggcagcatttctgaccccttcccttgctgtgtttc

SEQ ID NO: 531090 - DNA, 201 bp, Homo sapiens
agtctcgctttgtcgcccaggctggagtgcagtggcaccatctcagctcactgcaacctctgcctccctggttcaagcaattctgctgcctcagcctcccragtagctgagattacatgcacgtgccaccatgcctggctaatttttcgtatttttagtagagatggggtttcaccgtgttagccaggatggtcccaatct

SEQ ID NO: 531091 - DNA, 201 bp, Homo sapiens
cctgttagtaactcctgttactgtcctaacactgtctccctggctggaatgtttctcccagatatttgcatggccaactcccccatctcctaaagtctttkttcaaacatcttattaatggcttaccctaactaccatatttaaaatttacaaactgacaccctgggcagcatttctgaccccttcccttgctgtgtttca

SEQ ID NO: 531092 - DNA, 201 bp, Homo sapiens
tggagtgcagtggcaccatctcagctcactgcaacctctgcctccctggttcaagcaattctgctgcctcagcctcccgagtagctgagattacatgcacrtgccaccatgcctggctaatttttcgtatttttagtagagatggggtttcaccgtgttagccaggatggtcccaatctcctgacctcatgatctgcccgc

SEQ ID NO: 531093 - DNA, 201 bp, Homo sapiens
aactcccgacctcaagtgatccacctgccttggcctcccaaagtgctgggattataggtgtgagcccccgtgcctggcccacaataaattttcatttcagrgaaggaaaaaaatctcttgaacgtccagaaatgatttctggaatcagaatttcaatatgtaataccctcaggtaggcaatcttgaaccctctatgcagtg

SEQ ID NO: 531094 - DNA, 201 bp, Homo sapiens
atgtggtttttgtctttggctctgtttatatgctggattacatgtattgatttgcgtatattgaaccagccttgcatcccagggatgaagcccacttgatyatggtggataagctttttgatgtgctgctggattcgttttgccagtattttattgaggatttttgcatcaatgttcatcaaggatattggtctaaaattc

SEQ ID NO: 531095 - DNA, 201 bp, Homo sapiens
acaggctgggcatggtggctaatgcctgtaatcccagcattttgggaggccaaggagggtggatcacctatggtcaggagtttgagaccatcctggccaayatggcaaaaccctatctctactgaaaaaaaaaaaaatacaaaaattagcagggcgttgtggtgcgcccctgtagtcccagctactagggaggctgaggca

SEQ ID NO: 531096 - DNA, 201 bp, Homo sapiens
ttttttacccctttaacttcagtacttactattgtgctgctattgtgtgtctttttctatttctggtaacaaccctgttaaacaaaatcaacatactgaattttttttttttttttttttttttttttttgagacaaagtattgctctgtctgccaggctggagtacagtggcccgatcttgatctctgctcactacaacc

SEQ ID NO: 531097 - DNA, 201 bp, Homo sapiens
tttttacccctttaacttcagtacttactattgtgctgctattgtgtgtctttttctatttctggtaacaaccctgttaaacaaaatcaacatactgaattttttttttttttttttttttttttttttgagacaaagtattgctctgtctgccaggctggagtacagtggcccgatcttgatctctgctcactacaacct

SEQ ID NO: 531098 - DNA, 201 bp, Homo sapiens
ttttacccctttaacttcagtacttactattgtgctgctattgtgtgtctttttctatttctggtaacaaccctgttaaacaaaatcaacatactgaattttttttttttttttttttttttttttttgagacaaagtattgctctgtctgccaggctggagtacagtggcccgatcttgatctctgctcactacaacctc

SEQ ID NO: 531099 - DNA, 201 bp, Homo sapiens
tttacccctttaacttcagtacttactattgtgctgctattgtgtgtctttttctatttctggtaacaaccctgttaaacaaaatcaacatactgaattttttttttttttttttttttttttttttgagacaaagtattgctctgtctgccaggctggagtacagtggcccgatcttgatctctgctcactacaacctct

SEQ ID NO: 531100 - DNA, 201 bp, Homo sapiens
aaaaaaaaaaaaaaatctcaggccaggtgccgtgcctcacacctgtaatcccagcactttgggagaccgaggcaagtgggttgcctgagctcaggagttcragaccagcctgggcaagatggcaaaaccccgtctctactaaaaaatacaaaaaattagctgggtgtggtggtgcccgcctgtaatcccagctactcagga

SEQ ID NO: 531101 - DNA, 201 bp, Homo sapiens
cctgaccaacatggtgaaaccctgtctctactaaaaatacataaattggcctagtgtggtggcacgctcctgtaatcccagctactcaggaggttgaggcrggagaattgcttcaacctgggaggcagaggttgcagtgagccaagatcacgccactgcaccagcctgggagacagagcgagactctgtctccaaaaaaaa

SEQ ID NO: 531102 - DNA, 201 bp, Homo sapiens
cttggcactcaagcagtccttctgcctcagcctcccaaagtgctgggattacagatgtgagccactgcacctggccccagaaattatgcttaaaaaaaaawttaagctgtgtggaatctggacaaggctatgtttctcctagaaacaggttttgctgtaaatggttttgatgggcgaaagtgtgagaaaaggttataatag

SEQ ID NO: 531103 - DNA, 201 bp, Homo sapiens
gctgggattacagatgtgagccactgcacctggccccagaaattatgcttaaaaaaaaaattaagctgtgtggaatctggacaaggctatgtttctcctaraaacaggttttgctgtaaatggttttgatgggcgaaagtgtgagaaaaggttataatagattcttttttttaattttgtgagaaattccaggtcttcttg

SEQ ID NO: 531104 - DNA, 201 bp, Homo sapiens
cagaggtggaggctgcagtgagccaagatctcaccactgcactccagcatggatgcccagcctggatgacagagcaagactccatctcaaaaacaaacaamcaacctactttttgtataggtatagtttgaacctagtattcagaccagtaaaatgaaaaccttgcagtaaatgcttcccagtctttattgggctaaaata

SEQ ID NO: 531105 - DNA, 201 bp, Homo sapiens
ctcctgcctcagccttctgagtagctgggactacaggcgcgtgccaccatgcccagctaatttttgtagagatggggtttcaccatgttggccaggatggkcttgatctcctgatctcttcatccgcctgacttggcctccccaagtgttgggattacaggcgtgagctaccatgcctggcccaaaatcagtttatcattt

SEQ ID NO: 531106 - DNA, 201 bp, Homo sapiens
ctgttagtaactcctgttactgtcctaacactgtctccctggctggaatgtttctcccagatatttgcatggccaactcccccatctcctaaagtctttgytcaaacatcttattaatggcttaccctaactaccatatttaaaatttacaaactgacaccctgggcagcatttctgaccccttcccttgctgtgtttcat

SEQ ID NO: 531107 - DNA, 201 bp, Homo sapiens
ttatcagtatctacaaaataacttgctgggattttaatgggatggcattgaatctgtagatcacctaaaagagaactgacatcttaatatggagtctttctacccatgaacgtaaaatatctcttgatttatttagatcatctttgctttctttcaggaaagttttgaagtttttctcatagagattctatacatattttg

SEQ ID NO: 531108 - DNA, 201 bp, Homo sapiens
tgggattttaatgggatggcattgaatctgtagatcacctaaaagagaactgacatcttaatatggagtctttctacccatgaacgtaaaatatctcttgrtttatttagatcatctttgctttctttcaggaaagttttgaagtttttctcatagagattctatacatattttgttggacttatgcttaagcatttcatt

SEQ ID NO: 531109 - DNA, 201 bp, Homo sapiens
aggggagcttctgagccaccctgcttgttggttatatgaggatgtaaaataggtggaattaaaatgtgagcaggaaaggcaaggcatgtgtgcattttcaytcattttggtcaaggttaaactgacatgtatagcactgaggtctgtagggttcttaatatcttttgagtcttgctgtgaaatgaaagtgtgggaggtttc

SEQ ID NO: 531110 - DNA, 201 bp, Homo sapiens
agaacaacaaaagtatatagagctcaacaaaagtatatagagctcaggggcagcttttgaagtcagagacggagaaaaatctttgtttatcaaaatagacrtatatgatttatttttaatttttaaaaagtatctatttgttgttattatttttttttagagacagggtttcactctgttgcccaggttggagtacaatgg

SEQ ID NO: 531111 - DNA, 201 bp, Homo sapiens
gaacctgggaggtggaggttgcagtgaaccaagatcgtgacattgcactccagcctgggtgacagagcaagactctgtctaaaaacacaataataataatwaataaaatacaatggagaactcttggaacatagtttaagtgttttcttaagctgctaagttctgggttaatacaatttttaaaaaatacagcacagtgag

SEQ ID NO: 531112 - DNA, 201 bp, Homo sapiens
ttgctgtgaaatgaaagtgtgggaggtttcctttgtccattagcagccccaagaaccagaacccttttgctgcttttcttacatacctaacagctctccartcatgatgaccaaggttgttcttcaatcaaatgtgtttgtgggattttcagtccgcaaatgaagtgctctctaatgaatgggacaccatgataaatatgt

SEQ ID NO: 531113 - DNA, 201 bp, Homo sapiens
ccatttaaaaaattaaaaaaaaaaaaaaaacttttaacatttaaaaaataaaaattaacaaaatttcacttattccaggacacgctggcatttggactcartgaaaagggcacctaaagaaaataaggctgactgaatgttttccataattttcacacaataacagtccctttctatccagcttgccttccatttatctct

SEQ ID NO: 531114 - DNA, 201 bp, Homo sapiens
ggattacaggcgtgagctactgtgcctggccagaatctattatttattgagaacttcctcttaatattgtctgatcagctaaagactggtgagtactcttyttcacttgtagtatgaggaagcagaagtgaacagcactgctgctcagctgcagttgcttccataggcttgctagaagcaccagaagtctcccactgggca

SEQ ID NO: 531115 - DNA, 201 bp, Homo sapiens
aactcactcttcaagagttcactaaagggaatgattaattgggggatgaaagaattgagtatgacttcctagggaaaggagacaggcttgagggacaggcwacttctctgtagactgaagtcagttcaagttgaggggatggcctgaacaaaagccaaaatgagcatgacatatgatacaaagtgaggggaatggctaatt

SEQ ID NO: 531116 - DNA, 201 bp, Homo sapiens
tcacagctcactgcagcctcaaactctcaggctcaagtgatccttgcacctcagcctcctgagtagctaggaccaccggtatgcaccactgtgcctggctrattaaaaagaaaaaaatttgtagagatgagggtggggaggtcttaccatgttacccaggctggtcctgaacttctgggctcaagccgtcctctgtcctcg

SEQ ID NO: 531117 - DNA, 201 bp, Homo sapiens
ctgctggtgagaatgtgaaatgtatacttgctgtgcaaggcagtctggcagtttctcaaaagctaaacatagagtcaccctgtgacccacaattccattcytaagttatgcctaagagtaacgaaaacttatgtccacatcaaaacatacgtgactgttcataatagcattattcacaatagccaaagagtggaaacaacc

SEQ ID NO: 531118 - DNA, 201 bp, Homo sapiens
gccttagcatcccaaagtactgggattacaggtgtgagccaccgtgcccagctgataaatactatcattttagagttctttttttttttttttttttttttgagactctcactctgttgcccaggctagagtgcggtggcatgatctcgactcactgcaacctctgctcccaggttcaagtgattctcctgcttcagcctt

SEQ ID NO: 531119 - DNA, 201 bp, Homo sapiens
aatgtgaaatgtatacttgctgtgcaaggcagtctggcagtttctcaaaagctaaacatagagtcaccctgtgacccacaattccattcctaagttatgcytaagagtaacgaaaacttatgtccacatcaaaacatacgtgactgttcataatagcattattcacaatagccaaagagtggaaacaacctaagtgtccat

SEQ ID NO: 531120 - DNA, 201 bp, Homo sapiens
gtcgatccccctcccttggatctgaccttacatttgctaccaggacaggctctcgacagggcattgagatgcatctcttcagggtggagacacatcgggawctgtcatcctggaccaggatacttgttcagggttgccatgctgctgctgagctgatcaaggaagtctctctaggtagagatgctgactttttatttctag

SEQ ID NO: 531121 - DNA, 201 bp, Homo sapiens
tgaggctgtaggaattcaaggctgtaggattgtgccactgcatttcagcctaagtgacaaagattgtctctaaaaataaaaaaagaaaagtgagatgtttyctattaaagaagccattatggttcatacgtgtatgttctcctactcattccaggtacttctttgcattgttactgagataatgtttgtttaccattcttc

SEQ ID NO: 531122 - DNA, 201 bp, Homo sapiens
gtccaggctccttagtacttccaatggctcaaaaacgaccatttgcttctggagtgggaagcctactgacttaaatattgatccctgatcatttttttttwaaagtctggatatctgacatagaaaaagtgagttatttctgagtgaaaagactgtggcctgaatctttacagtacgttaacggtaaagtaataaaatgta

SEQ ID NO: 531123 - DNA, 201 bp, Homo sapiens
tttttagagacaaggtctccctatattgcccaggctagtctcaaactcttggcctcaagcgatccacttgcctcagccttccaaagccctaggattacagraataaaccactgtgcctggcccagttctatgtgttttgatgggtatatacggtctataactgtcaccacaattaagatacataatatttctatcaccccc

SEQ ID NO: 531124 - DNA, 201 bp, Homo sapiens
atagctctaatacacacaccacttcacacctcccggtggagagtccctaccagtgtaaacttggtgagatgtttcctgaatgtaaagtccatcaggttggraaaacaaaatggagacccattgtgttaggccatcattgaaggaacttttacaaagacgtgattatagttagccctgatttctgaatttttccattgtaac

SEQ ID NO: 531125 - DNA, 201 bp, Homo sapiens
tcctcctgcctcagtttcccaaagtgctgggattccaggcagtggcacctggccttttcagtttacttatttatttttttgacatggagtctcactctgtygcccaggctggagtgcagtggcatgatctcagctcactgcaacctccgcctcccaggtacaagctattctcccacctcagccttctgaatagctgggatt

SEQ ID NO: 531126 - DNA, 201 bp, Homo sapiens
cgtctcaaaaacaaacaaacaaacaaaaacaaacctgagggtggtggtgtgcatctgtagtcccagctactcgggagactgagtgagttgagatcataccwctgcactccagcctgggcaaccagagtgagaccctgtttcaaaaaaaaagatacacgaatgcttaccattgtgttacagctggctacagtattcagcgca

SEQ ID NO: 531127 - DNA, 201 bp, Homo sapiens
ggcatcaaatcattagagagaaactagggaaagaaaagtaccccattggccgggtgcggtggctcacacctgtaatcccagcactttgggaggccgaggcrggcggatcacaaggtcaggagttcgagaccagcctggccaatatggtgaaaccccatctctactaaaaatacaaaaattagtcaggcgtggaggcgtgca

SEQ ID NO: 531128 - DNA, 201 bp, Homo sapiens
cacacccacttttctttatgttcttatatactttgaaaaaatttttcattctaatagtctgtactatgataaatactgttattcttcttatttttttttttgagatggagtctcactctgtcactgaggctggagagcagtggcataatcttggctcactgcagcctctgcctcctgggttcaagtgattctcctgcctca

SEQ ID NO: 531129 - DNA, 201 bp, Homo sapiens
gtcctatgtgaaacctttcctgactgactccaccctaccacccccacttcaaagttgagcatgcctttgtgtttgtatttatttatttatttatttatttwtttttgagacagagtctctctgtcaccaggctggactgcagtggcgtgatctcagctcactgcaacctctgcctcccgggttcaagcgattctcctgcct

SEQ ID NO: 531130 - DNA, 201 bp, Homo sapiens
ggctgaggtgggagaatcatttgaacccaggagtttgaggtttgagtccagcttgggcaacataatgagaccccatctcaagggaaaaaaaaaaaaaaaaagggaaagaaaagaaaaacaggcggaagtgaaaaatatttcctatgtgccttctgttgttaattggtttgtttgttttacgtggatttatatattaaagct

SEQ ID NO: 531131 - DNA, 201 bp, Homo sapiens
tcctgggttcaagcaattctcctgcctcagccttccaagtagctaggactacaggcacgcgccaccacgcttggcaaatttttttttttttttttttttttaattatactctaagttttagggtacatgtgcacattgtgcagtagagacggggtttcaccacgttggccaggctggtctcaaactcttgaccttgtgatt

SEQ ID NO: 531132 - DNA, 201 bp, Homo sapiens
ccagtactttgggaggtcgaggcgggtggatcacctgaggtcaggagtttgagaccagccgggccaacatggcaaaaccccatctctactaaaaataaaamaataaaataaaataaactgccagactttcttccaaagtaattgtgccattttatgttcctgccaatatatgagagtttccattgctccacatcctcacca

SEQ ID NO: 531133 - DNA, 201 bp, Homo sapiens
aaagtgaattctggaaaccattcttcaccagagatgttttgatattgatctctgttgtcctttacaatgtaacagagttgattttttttttttttttttttggggggtaggggaacagagcctcgctctgtcgcctaggctggagtgcagtggcaatctcagctcactgcaacctccacctcgcgggttcaagcgattctc

SEQ ID NO: 531134 - DNA, 201 bp, Homo sapiens
taaagtgaattctggaaaccattcttcaccagagatgttttgatattgatctctgttgtcctttacaatgtaacagagttgattttttttttttttttttttggggggtaggggaacagagcctcgctctgtcgcctaggctggagtgcagtggcaatctcagctcactgcaacctccacctcgcgggttcaagcgattct

SEQ ID NO: 531135 - DNA, 201 bp, Homo sapiens
ctcttgggctcaggtgatcctcttgccttaacctctggagtagttgggattacaggcatgaactaattactgttcctggtttgcattttttttttttttttagtaagaattattttggttgcagaaacccaaaaccaactaatttaagcagaagtggaatgtattgccttatgtaactcctgagaccgggggtggatctag

SEQ ID NO: 531136 - DNA, 201 bp, Homo sapiens
cagacattcattacattgctctaaaaccatcagaagataatatagattaaaggagaaaccaccatattaagagatttagaaacattatagacagctgtaaracaaaagtcagaataataaatttgcttaggtacaggtgagcttgttggagcttttaaaaaatgcttgacatgtcaagtgaataataaattattttcagta

SEQ ID NO: 531137 - DNA, 201 bp, Homo sapiens
gcagtgagccaagatcgcgtcactgcactcctgcctgggagacagagcgagactccatctcaaaaaaaaaaaaaaaaaagaggagctcttagctgggtgcyatggcacgtgcctgtaatcccagcttcttgggaggctggaagagtcacttaagcccagtagttcaagaccagcctgggcaacatagtgagacctctggtc

SEQ ID NO: 531138 - DNA, 201 bp, Homo sapiens
gccaccatgtccagcccagacttatttatggtaagatgaattgatcaactaacaaaaattttaaaaaagaaagaaaatgcacatgccttattcaaggctcyttgggtttcaaaacacagaaacccatttaaactagttcagataaaaggatggagatgttataaagaaccagacaggtctcgggacttcaggaagagctgc

SEQ ID NO: 531139 - DNA, 201 bp, Homo sapiens
agaggcaccatctcggctcactgcaacctccgcctcctgggttcaagaaattctcctgcctcggcctcccaagtagcttggattactggtgtgtgccaccrtgcctggctaatttttgtatttttagtagagacagggtttctccatgttggccaggctggtctcaaactcctgacctcaggtgatccgcctgcctcggcc

SEQ ID NO: 531140 - DNA, 201 bp, Homo sapiens
aaaaggctaccagcctggtgcggtgactcatgcctggaattccatcacttagggaggccaaggtgggtagatcatctgaggtcaggcattcgacatcagcytggccaacatggtgaaaccccgtctctactaaaaatacaaaaattggttgggcgtggtggtgtgtgcctgtaatcccagctacttgggaagcagaggtag

SEQ ID NO: 531141 - DNA, 201 bp, Homo sapiens
gactagttttttgtattttgtttgtagagacggggtttcactgtgttagccaggatggtcttgatctcctgacctcgtgatccacccgcctcagcctcccraagtgttgggattacaggcgtgagccaccacacccggccgacagttcttcagtcttgtcttttcttttatgaccttgacactttagaagaatactggtca

SEQ ID NO: 531142 - DNA, 201 bp, Homo sapiens
gcaacctctgcctcccaggttcaagcgattctcctgcctcagcctccctagtagctggaattacaggctcgcgccaccacgcccggctgattttttgtatygttagtagagacggggtttcaccatgttggccaggctggtctcgaactcctgacctcatgatccgcttgccttggcctcccaaagtactgggattacagg

SEQ ID NO: 531143 - DNA, 201 bp, Homo sapiens
gcatttacaaggatttatattgttaaaatatatgaagaaagagttttctgtgaccatattattcaccatttcttagaaattatcttgagtcctttttactcatcggtttggcaaatatttttcagtatatactctgtgcttttactagctataataaaataaggtaagcatagcccctatttttcaagtaggaaggacaga

SEQ ID NO: 531144 - DNA, 201 bp, Homo sapiens
aacatttaagaaatctcaggccggtcgcggtggctcatgcctgtaatcccagtactttgggaggccgaggcgggtggattacctgaggtcaggagtttgaraccagcctggccaacatggtgaaaccctgtctctactaaaaatacaaaaaatcagccaggcctggtggcacatgcctgtaatcccagctactcgggaggc

SEQ ID NO: 531145 - DNA, 201 bp, Homo sapiens; identical to SEQ ID NO: 338743

SEQ ID NO: 531146 - DNA, 201 bp, Homo sapiens
ctcctgaaaggcctctctgcctttgctcctttggttggtccttcttgcccagttcagtccttctgcctcttcctccctgcctgtccagttttaccaattcttttttttttttttttttttttttttgagacagtgtctcgctcttgtcacccaggctggagtgcagtggcgtgatttcatctcactgcaacctctgcctcc

SEQ ID NO: 531147 - DNA, 201 bp, Homo sapiens
acacgtttttatcggccaaagtcactcgtatgggactgcttgtatgagcaacaaaaaatcagaaaagagccttgactgtcacaagaaatatttccacctcaaaaaaaaaaaagcacaaaaagaaactctttgctctccttcagcacagtgccttcccaaggacctgcaaataactgctgaaccataaccgtgtttaaagaa

SEQ ID NO: 531148 - DNA, 201 bp, Homo sapiens
aagaaccagacaggtctcgggacttcaggaagagctgcgcctcagaaatgtcacaaacccaaggcagtgctgaggacagttgctctgtctcccatttcttstcattgcagtttctctgtttctctctgagaatgtcttttgcaacagctttattctagtccttttatggtttcaattcttacatttaacttcttaatctat

SEQ ID NO: 531149 - DNA, 201 bp, Homo sapiens
gctcactgcaacctctgcctcctgggttcaagcctcctgcctcagcctcctgagtagctgggcttacaggcgtgcaccactatgcctggctaatttttgtwtttttagcagaggtggggtttcaccatgttggccaggctggtcttgaactcctaacctcaagtgatctgctcactttagcctctcaaagtgctgggatta

SEQ ID NO: 531150 - DNA, 201 bp, Homo sapiens
agaggttgaggatgcccaggttgatgaagcttaaattgagcttcccctttagaagagagctgccaccagtaaagacacagaagtgcaagacattaaaaagytattctagccagtagggtagagcagaagcaaggactttgtggtcagatgtgggtttgtttctggctagtggtttgtaacccctaggcaagttacttaatc

SEQ ID NO: 531151 - DNA, 201 bp, Homo sapiens
ttaatcatcattgcatcactgtggtgtgatgtactcaatgtttagagaaaaactgtttaattggttcgatttggcacagcatttacatgaccaggtcacastctcattcagaagaatctggtattaattatacattttaaactatggccgggtgtagtggctcatgcctgtaatcccagcattttaggaggccgaggcggg

SEQ ID NO: 531152 - DNA, 201 bp, Homo sapiens
gaaagagactcagatggtatagacttttttttttttttttttttttttttttgagacagtgtcttgctctgttgctcaggctggagtgcagaggcaccatytcggctcactgcaacctccgcctcctgggttcaagaaattctcctgcctcggcctcccaagtagcttggattactggtgtgtgccaccgtgcctggctaa

SEQ ID NO: 531153 - DNA, 201 bp, Homo sapiens
tacacttagaaaaattggaagctttaatttttcattgaaagagactcagatggtatagacttttttttttttttttttttttttttttgagacagtgtctygctctgttgctcaggctggagtgcagaggcaccatctcggctcactgcaacctccgcctcctgggttcaagaaattctcctgcctcggcctcccaagtag

SEQ ID NO: 531154 - DNA, 201 bp, Homo sapiens
cacttaatcatcattgcatcactgtggtgtgatgtactcaatgtttagagaaaaactgtttaattggttcgatttggcacagcatttacatgaccaggtcwcagtctcattcagaagaatctggtattaattatacattttaaactatggccgggtgtagtggctcatgcctgtaatcccagcattttaggaggccgaggc

SEQ ID NO: 531155 - DNA, 201 bp, Homo sapiens
tttgttgttgtctagtggaaatttcgttgtctcgtggaagttttgttgtctagtggaaaaacattagtaagtatttttatatttttcagtgattttatttyatttgctgctgttacatccaattatgtgtaacattgtatttacacctctatagcatgtatcatgttttgccttattataatttctactttattagttggc

SEQ ID NO: 531156 - DNA, 201 bp, Homo sapiens
ggtggatcacgaggtctggagatcgagaccatcctggctagcacggtgaaaccccgtctctactaaaaatacaaaaaattagccgggcgtggtggcgggcrcctgtagtcccagttactggggaggctaaggcaggagaatggcgtgaacccaggaggcagagtttgcagtgagctgagattgtgccactgcactccagcc

SEQ ID NO: 531157 - DNA, 201 bp, Homo sapiens
ttggagtcttcataagagcaatttcagcaaagtgacaggaacagaagcttcataaagccaaggaattgacagtggtgaccttactagtttggctgccgttwtcagaatgcaacttattgcagtttacttgagcctggttgagtggatttatattatctgcatttaattacattaatcttcacaaaatgaacaagtggctta

SEQ ID NO: 531158 - DNA, 201 bp, Homo sapiens
attcgggaggctgagataggagaattgcttgaacccaggaggtggaggttgcagtgagctgagattgcagcactttgcaaaactctgtctcaaaaaaaaawttttaaaaataaaaaattttgcaaatgatttgctttttgtaaaatataaattggaagagattcaaggttattcctatgttgataccacttatactcgcat

SEQ ID NO: 531159 - DNA, 201 bp, Homo sapiens
gccgggtgcgggtggtgaagcaagaggcgggcggcctgggcatcagcatcaagggcggccgcgagaaccggatgccgatcctcatctccaagatcttcccsgggctggctgccgaccagagccgggcgctgcggctgggcgacgccatcctgtcggtgaacggcaccgacctgcgccaggccacccacgaccaggccgtgc

SEQ ID NO: 531160 - DNA, 201 bp, Homo sapiens
caaaatggagacccattgtgttaggccatcattgaaggaacttttacaaagacgtgattatagttagccctgatttctgaatttttccattgtaacaggcraaactagatggtggaagacagcaatggagacctgtcctcatggctgtgactgagaaggatttgctgctctatgactgtatgccgtggacaagagatgcct

SEQ ID NO: 531161 - DNA, 201 bp, Homo sapiens
tttattcaaacagttgcaagaatccttaatctagagcaattagcaacaacatttaactgaattgtgttactcatgccagaaatatttctgagaatttcackaggacagacaaattaggactgtaaaagtatatctgtatttgtgcagaatctctcataattcatctaatcaatattgactgtacatcttctgtgcattagt

SEQ ID NO: 531162 - DNA, 201 bp, Homo sapiens
cctcagcctcccaaagtgctgggattacaggtgtgagccacggtgcggcctttttttttttttttttttttttttttggagacggagtctcgctctgttgycaggctggagtgcagtggccccatcttggctcgttgcaacctctgcctcccgggttcaagcgattctcttgcctcagcctcccgagtagctgggactaca

SEQ ID NO: 531163 - DNA, 201 bp, Homo sapiens
aaggcaataaagggaaattaagtgtgactttagatatgctggtacatcaagaactcaaattcaatttgtgtgagatatgaggttctggtgactgtcctgtractctccactgttatcacaaatcacccctcccagttcttcagacaaaataaaagcattaagagacatggatttcctggttttaagtagaagaaaataata

SEQ ID NO: 531164 - DNA, 201 bp, Homo sapiens
tggttaaaatagtaaactttatgttgtgtatattttacaattacaaaaaaaaaaaaaagcagcagcagcagcagccactacagtggctggtctgagttaaycaaggcatgttggcagtggaaactgaggggagtaggtaggctagagaacaatttcagatgtgatttggcacctgattagatgtagcgggtagggacagag

SEQ ID NO: 531165 - DNA, 201 bp, Homo sapiens
ccgtacatggtctgcctcccagccccgttacctttgtgaccccatttactactctgtccccctcacttacccagctccagttactctgggtctccttactrtctaacactcctgttagtaactcctgttactgtcctaacactgtctccctggctggaatgtttctcccagatatttgcatggccaactcccccatctcct

SEQ ID NO: 531166 - DNA, 201 bp, Homo sapiens
tgctgtgtttcattttcccattacacttaacatcttccaatatactgtataatttacttattttattttgtaattatcatactgtacaattgaattttttycccttaaggtatacagttctatgaatctggacacatacataaattcttgtaactgtcaccacaatcaggatacaggaccattccatggtttcagaaaact

SEQ ID NO: 531167 - DNA, 201 bp, Homo sapiens
agtaagaatcagttggattttggatcctatccagtgcattatagtttttgaagcctcaagatttccgtttacatgtctttcatgtttaaagtttgagcaasaggctgggtggtggctcatgcttgtaatcccaacgctttgagaggctaaggcgggagggttgcttgaagccaggagtttgagatcagcctgggcaaaata

SEQ ID NO: 531168 - DNA, 201 bp, Homo sapiens
agcttcagcatctgaacactcaaaacagtttgtaaacatcagtgtttaattaaattattttgaggattatcttcaactatcaggaaaaatgaaatgattcygaaatatgttgtggattctgagttgaactgaaagctccatgtgggggtgtaaaggctctgcttatccagccacgtgtccaggttaaggccttaacatagg

SEQ ID NO: 531169 - DNA, 201 bp, Homo sapiens
tgatccgcccacctcagcctcccaaagtgctgggattacaggtgtgagccaccacgcctggctgtcctttgcccatttttttttaattaattaattaattwatttatttatttatttattgatcattcttgggtgtttctcacagagggggatttggcagggtcataggacaatagtggagggagggtcagcagataaaca

SEQ ID NO: 531170 - DNA, 201 bp, Homo sapiens
ttcagttttaagagttctttatatattttggataccagtcctgtatcagatatgtgttttgcaaaatttttttgtccgcagcttgtcttttcattctctctttttttttttttgagacggagtctcgctctgttgcccaggctgcagtgcagtggcgcagtcttggctcactgtaagctctgcctcccgggttcacgccat

SEQ ID NO: 531171 - DNA, 201 bp, Homo sapiens
gatcatagctcactgtaacctcaaactcctgggctcaagccatcctcccacctcagcttctcgagtagctaggactataggcataagccactatgccaggytaattttttatggaggtgaggtcttgctgtgttgcccagtctggtctcaaactcctgggctcaaacaattctcatgcctctcagtctcccaaatttctgg

SEQ ID NO: 531172 - DNA, 201 bp, Homo sapiens
ctggatttttcaggatatggattttgttgtcttttcctataagccttctttggaagagaaaaaagatctcaaaaaaaaaaaaaagtgtggtgactttagartgtggaatattgagtagtgctgtgcttatgggacttgtggggcaaaagctgccaaaatgcctttgcatgaactcatctggcctctccacaaaaggggggc

SEQ ID NO: 531173 - DNA, 201 bp, Homo sapiens
caagtgattctcctgcctcagcctcccgagtagctgggattacaggcgcacgccaccatgtccagctaattttgtatttttagtagagatgggtttctccrtgttggttaggtaggtcttgaactcctgacttcaggtgattcacccgccttagcctgccaaagtgctgggattacaggcgtgagccaccacgcctggcct

SEQ ID NO: 531174 - DNA, 201 bp, Homo sapiens
aaacgatgtgataaagaggaacaaattgcaactacatttgtcaactagctgtcaggctgagaaaagtatagagtcaattttgttataaatcatttctttctttttttttttttttttttgagacagggcttcactcccctcgcctaggctagagtacaatggcctggtctcagctcactgcaacctctgcctcctgggctc

SEQ ID NO: 531175 - DNA, 201 bp, Homo sapiens
ggtgcatgtttagtttaaaaaaaaaaaaaaaaaaaaaaaactaggccaggcacagtggctgacgcctgtaatcccagcactttgggaggccgaggtgggcmgatcacctgaggtcaggagttcaagaccagcctgaccaacatggagaaaccccgtctctactaaaaatacaaagttagctgggcgtggtggctcatgcct

SEQ ID NO: 531176 - DNA, 201 bp, Homo sapiens
caattcacgtgttgagtactttttaagggactgggaatacagcaatgaacagcacaggtctgaatgaggaaggtaggaccgggtcacgaaggtatgccacsagttaacaaagacactctcaaaacaggaaggatggcaagtcgttaaaataacatccagggctccatttttacctgaagaagaatagatgataagaattat

SEQ ID NO: 531177 - DNA, 201 bp, Homo sapiens
atgaagcttaaattgagcttcccctttagaagagagctgccaccagtaaagacacagaagtgcaagacattaaaaagttattctagccagtagggtagagyagaagcaaggactttgtggtcagatgtgggtttgtttctggctagtggtttgtaacccctaggcaagttacttaatcttgctaagtaaaccttagtttcc

SEQ ID NO: 531178 - DNA, 201 bp, Homo sapiens
aacactcctgttagtaactcctgttactgtcctaacactgtctccctggctggaatgtttctcccagatatttgcatggccaactcccccatctcctaaastctttgttcaaacatcttattaatggcttaccctaactaccatatttaaaatttacaaactgacaccctgggcagcatttctgaccccttcccttgctgt

SEQ ID NO: 531179 - DNA, 201 bp, Homo sapiens
ggagaacatgacgaaacctcgtctctactaaaaatacgaaaattagccaggcgtggtggcagatgcctgtaatcccagctcctagggaggctgaggcaggrgaatcgtttgaacctcagaggtggaggctgcagtgagccaagatctcaccactgcactccagcatggatgcccagcctggatgacagagcaagactccat

SEQ ID NO: 531180 - DNA, 201 bp, Homo sapiens
acactcctgttagtaactcctgttactgtcctaacactgtctccctggctggaatgtttctcccagatatttgcatggccaactcccccatctcctaaagwctttgttcaaacatcttattaatggcttaccctaactaccatatttaaaatttacaaactgacaccctgggcagcatttctgaccccttcccttgctgtg

SEQ ID NO: 531181 - DNA, 201 bp, Homo sapiens
aaaattgtgaatatttacactctgaaataattgatttcaccccagtttagaaaagaatgtttaagggttgagaatttaaaggcttggtttcctgtttgaaaaaaaaacaaaatttctaaaacgttgtttagctttattaaaatttagttatttgtattgaggttaaaccgttgagtcaaagcctcttttttgctataagcc

SEQ ID NO: 531182 - DNA, 201 bp, Homo sapiens
tgaatatttacactctgaaataattgatttcaccccagtttagaaaagaatgtttaagggttgagaatttaaaggcttggtttcctgtttgaaaaaaaaacaaaatttctaaaacgttgtttagctttattaaaatttagttatttgtattgaggttaaaccgttgagtcaaagcctcttttttgctataagccatatgtt

SEQ ID NO: 531183 - DNA, 201 bp, Homo sapiens
accaaaccccaatctgagatcaggctttttagggacaaaccctgcccccaggtcaggtgtgtttccaggcccaggccttgggcccaacccaagaccaagtrgcctgggcccaggccctaatctagatgccagagcaggtggcctcttgggcacaggatctggtcttaacttaagaatggctggacctcaaggcctcgatct

SEQ ID NO: 531184 - DNA, 201 bp, Homo sapiens
tggtggctcacacctgtaatcccagcactttgggaggctgaggcgggtgaatcacgaggtcaggagttcaagaccagcctggccaacatggtgaaaccccrtctctagggccgggcgcggtggctcacacctgtaatcccagcactttgggaggccaaggtgggtggatcacgaggtcaggagatcgagaccatcctggct

SEQ ID NO: 531185 - DNA, 201 bp, Homo sapiens
catttcctagagtggggagcctccctggcacaaacccagctgctttccccagaccagggggtccaatggctgcaatgtacccaaatggaatgttgcccccwtaaacaccattttccctccaggaccaccttggtttctaggcactgtggttcttggcaggggctgtcttaggtaaaagggtagttgtggagctacagtctg

SEQ ID NO: 531186 - DNA, 201 bp, Homo sapiens
cctgctgctttcgtagaatgctttagtccgttataaacattaatatgctaacacagtgtagtattaagacattctatttgatgaatactaagaaaatgccmcctttctctgggaaatcgatagcttgaccctgaaggcttaccatgtgtcagacaatgtgctaaaagctttacattcattactcgttcttgcaacagcctt

SEQ ID NO: 531187 - DNA, 201 bp, Homo sapiens
ggggtttcatcatgttggccaggctggtctcaaactcctgacctcaggtgatccacccactttggtctcccaaagttctggaattgcaggcgtgagctacygctcccggccaaagtctgttatctaattatctaagatattttcatatctaagtgaaaggtggtgaaagcttttgataagaatcacatcagaagtcagctt

SEQ ID NO: 531188 - DNA, 201 bp, Homo sapiens
ttaaagtgcttttagttctgttgagagtagtggtggggcctcttttggaaatgtttgggttctgagcttgggtattaccccttttccagtggtcccacaayctgtgctggtgcagaaggtctgactcaattcaaggatgctctcttgattccatattgcccttctgaccagctattgcatatactccatgcctgcctgatg

SEQ ID NO: 531189 - DNA, 201 bp, Homo sapiens
gtggtccagtgtggctgctcaacaatggcagagccagaccagggattggaggtgccagcatagcctgccaagagcagctttaggaggcgcctgagtgttayggccttgccccggaacctcaggaatctcgttcttgttctgccaaagggaatccctgtgctgatcgtggggcatcatatcctgtatgggaaaatcatccac

SEQ ID NO: 531190 - DNA, 201 bp, Homo sapiens
agaaaattgtgaatatttacactctgaaataattgatttcaccccagtttagaaaagaatgtttaagggttgagaatttaaaggcttggtttcctgtttgaaaaaaaaacaaaatttctaaaacgttgtttagctttattaaaatttagttatttgtattgaggttaaaccgttgagtcaaagcctcttttttgctataag

SEQ ID NO: 531191 - DNA, 201 bp, Homo sapiens
gaaaattgtgaatatttacactctgaaataattgatttcaccccagtttagaaaagaatgtttaagggttgagaatttaaaggcttggtttcctgtttgaaaaaaaaacaaaatttctaaaacgttgtttagctttattaaaatttagttatttgtattgaggttaaaccgttgagtcaaagcctcttttttgctataagc

SEQ ID NO: 531192 - DNA, 201 bp, Homo sapiens
tggtggctcactcctgtaaacacagtactttgggaggctgaggcgggtggatcacctcaggtcagaagttcgagaccagcctggcgtggtggcgggcgccygtaatcccagctactcaggaggctgaggcaagagaatcacttgaagctggaaggtgaaggttgtggtgagccgagatcatgccactgcactccagcctgg

SEQ ID NO: 531193 - DNA, 201 bp, Homo sapiens
attctcctatgtggggctagaaagtaaaaagggcacatgggtgggtggtccagtgtggctgctcaacaatggcagagccagaccagggattggaggtgccrgcatagcctgccaagagcagctttaggaggcgcctgagtgttatggccttgccccggaacctcaggaatctcgttcttgttctgccaaagggaatccctg

SEQ ID NO: 531194 - DNA, 201 bp, Homo sapiens
acaaaggaaatgaacagcctctaactttcatactgagttcaccatccttggacagcatgatataagaccatagtatgggtaaaagtacttgacctttgaayaagtaacttgaaaacacttaccgtcctaaaaaaaaaaaataggattaactggccgaatacaaaaaacttgacctagtgaatctctgacttgccagaattg

SEQ ID NO: 531195 - DNA, 201 bp, Homo sapiens
agatccacccacactggcctcccaaagtgttgggattatggtcatgagccactgccccggccttttgttttgtttttaaataatggaaaacttcagtactyaaactagagagctcttccagaggacctctagatttagatgtactcagcatgtcgttaccattccaggtgatgttttatgttctctgtatatggtagaaga

SEQ ID NO: 531196 - DNA, 201 bp, Homo sapiens
cttccacaaaacacttccttacctcaattgcatccagagtatcattcagttgttttctttccttctgtttgtgatcagtctcaggcccctcatagaagacyccaaagttgaggtacacttgcacagaaccgaagtgattatgctgattacttagacaaagctgataaaaacctgtaggaattcttagatcattaccaagtc

SEQ ID NO: 531197 - DNA, 201 bp, Homo sapiens
ctgataaaaacctgtaggaattcttagatcattaccaagtctttggtctcctcccctttgttaaggattccctggaggtatctgtcctctagttttggaaytctactacaggaccttctttttacttagaaagtacaaagatcccgtttttgacatggaagacacggaccttatgttaaacttatactaaatattacttat

SEQ ID NO: 531198 - DNA, 201 bp, Homo sapiens
taaggaaaaagtcagccattttcctcatccgggcaaagttgtagtatcgccacatgtgaaagatattgttctgcaccttttgtgtgccgtcctatgagagrgacaattttaagggggattcttccaaacccccatctagcctcacctgagcgctcactagcactaacctatctcaagtcaaataatttacccatatgattt

SEQ ID NO: 531199 - DNA, 201 bp, Homo sapiens
tttggtctcctcccctttgttaaggattccctggaggtatctgtcctctagttttggaattctactacaggaccttctttttacttagaaagtacaaagaycccgtttttgacatggaagacacggaccttatgttaaacttatactaaatattacttattatatttggccaaattttagtaactcgttctttccatactg

SEQ ID NO: 531200 - DNA, 201 bp, Homo sapiens
tccaaggcggtgtgtacagtgactcatggtttggttatatctgttggggctggggttgcctccctttgtgtgtgcgggggggaggggggcgcggggtgggragcgggtgggaaggagcaaggtggagaggaccggtagaagatgggtggggtgggattagaaaggtgtggcagtgtttgaaagtcaaaatgattggaaggc

SEQ ID NO: 531201 - DNA, 201 bp, Homo sapiens
cataatttatgaagaaattcacatccccttgcctgtttggtttctacctaaatgaagtcatcttccctctgaagttaaaaatcagtttccacagatgtttytcttccacaaaacacttccttacctcaattgcatccagagtatcattcagttgttttctttccttctgtttgtgatcagtctcaggcccctcatagaaga

SEQ ID NO: 531202 - DNA, 201 bp, Homo sapiens
ccaaggcggtgtgtacagtgactcatggtttggttatatctgttggggctggggttgcctccctttgtgtgtgcgggggggaggggggcgcggggtggggwgcgggtgggaaggagcaaggtggagaggaccggtagaagatgggtggggtgggattagaaaggtgtggcagtgtttgaaagtcaaaatgattggaaggca

SEQ ID NO: 531203 - DNA, 201 bp, Homo sapiens
tccgggcaaagttgtagtatcgccacatgtgaaagatattgttctgcaccttttgtgtgccgtcctatgagagagacaattttaagggggattcttccaarcccccatctagcctcacctgagcgctcactagcactaacctatctcaagtcaaataatttacccatatgattttaagatgtacaatacaatgatagttgt

SEQ ID NO: 531204 - DNA, 201 bp, Homo sapiens
agtctattactatgtaaacaaaaattagaaagttaaccgatttctaagataaagaacaaaggaaatgaacagcctctaactttcatactgagttcaccatycttggacagcatgatataagaccatagtatgggtaaaagtacttgacctttgaataagtaacttgaaaacacttaccgtcctaaaaaaaaaaaataggat

SEQ ID NO: 531205 - DNA, 201 bp, Homo sapiens
aaaaaaaaaaaaagtaaaatgggcaaaggattttcatttttttgagatagggtctcactgtcacagccttgacatcctgggttcaagcaattctacctaagcctcccgagtggctgggaccacaagtatgtgccaccacacccgggtcatttaaaaagttgttttgtttgtagagacagggtcttaccatgtttcccaggc

SEQ ID NO: 531206 - DNA, 201 bp, Homo sapiens
taacaaggctctgggctgtcgaccaccagttcacgtagttatagtttgattggataaggaaaaagtcagccattttcctcatccgggcaaagttgtagtaycgccacatgtgaaagatattgttctgcaccttttgtgtgccgtcctatgagagagacaattttaagggggattcttccaaacccccatctagcctcacct

SEQ ID NO: 531207 - DNA, 201 bp, Homo sapiens
atccgcccaccttggcctcccaaagtgctgagattacaggtgtgagccaccacgcccagcctgttcaagatcttttaacactgatacacatgctgtgcttmatagtgaaggactgtctgatgcccctgttgagaaaatgtcttttttagtgcagctggctattaaagagggcagttaagacactgctgctctccaaagtgg

SEQ ID NO: 531208 - DNA, 201 bp, Homo sapiens
tttaacatataattcccacatcttgtattaaggaactcctgctcaacagattgagttgaagttaagagcatggtgtttgcctggtccttgtatacaattaragctagggacaccatcttgaacttgaaattaggaaagacaaaaaaaaaaaatagatgcatagtgcatgaaagcagctctcctggagtgattgcctccaag

SEQ ID NO: 531209 - DNA, 201 bp, Homo sapiens
gtgggcagattacaaggtcaggagttcgagaccagcctggctaacatggtgaaaccctgtctctacttaaaaaatacaaaaattagcctggcatggtggcrtgcgcctataatcccagctactttggaggctgaggcaggagaattgcttgaacccgggaggcagggattgcagtgactcgagatcatgccactgcactcc

SEQ ID NO: 531210 - DNA, 201 bp, Homo sapiens
ttctgaatctgcttttagtaactgactcaaatattctgatgactggaaagacatgcttccctgtaatccatttgttaattggaattctgtattataaatgsgtctctgttttttggtcactttcccagaatctgattaactggagatgatgagataaaattgagcggctgaaccctagacttagaatgctcacctggagtg

SEQ ID NO: 531211 - DNA, 201 bp, Homo sapiens
gatcttctgcaagatggactacttcaggtaggctgcggccgccgagccagcagtgtcgccgagggcaggccccgggcgcattcggaggccacttttgcggmgtgtggtctctcctccagaaccccggcgtcccgagtgcacttccggcgcgcagcgctggtccaacctgccggcgctcagcggcgcgaacccagagctcca

SEQ ID NO: 531212 - DNA, 201 bp, Homo sapiens
tggggtagagagtagggtgtgcagccactgtgggaagaggcaggagactgggcccagtctggccagtagtgaccttcgcaagttgctgcttctctcggccyttagttcgccctttccaaggctgtctcccagagctgccaaagaggccactgttggggggaagtctctataaaggctccctaaatggtggttggtatgaat

SEQ ID NO: 531213 - DNA, 201 bp, Homo sapiens
ttcaagcttcaggggctgggtaagtggtggcaccattctctgaaatagagggtgtaccagaggaaacaggctgctagggttgggacagagtcacaggtgastcatccactttaaagaacacactttccctggtgcccgggatcaggccctgggctgacttctgggatggagtaaaccagactccgctgcctcctggagggg

SEQ ID NO: 531214 - DNA, 201 bp, Homo sapiens
ctgggtaagtggtggcaccattctctgaaatagagggtgtaccagaggaaacaggctgctagggttgggacagagtcacaggtgagtcatccactttaaaraacacactttccctggtgcccgggatcaggccctgggctgacttctgggatggagtaaaccagactccgctgcctcctggaggggcttccagtctggtgt

SEQ ID NO: 531215 - DNA, 201 bp, Homo sapiens
atagctcaaagtcagagattggatgagaaccttgctttttttttttttttttttttttagacagagtttcactcttatcgcccaggctggagtgcaatggmgcaatctcggctcactgcaacctccacctcctgggttcaggtgattctcctgcctcagcctcccgaagtagctgggattacaggcgcctaccaccatgcc

SEQ ID NO: 531216 - DNA, 201 bp, Homo sapiens
accccatgaggtcagatcaagaccatcctggctaacacggcgaaaccccgtctctgctaaaatacaaaaaattagctgggcgtggtggtgggcacctgtastcccagctacttgggaggctgaggcaggagaatggcctgaacctgggaggcagagcttgcagtgagccaagatcgtgccactgcactccagcctgggcga

SEQ ID NO: 531217 - DNA, 201 bp, Homo sapiens
cactcgccggctctgaaccttcgattcctcctatgaaaaccggatgccagagtccccacctcaccgggttgcgacgaagccgaggtggcgcaacgttgagscccaggaccccggcccgtagtaaggtctctacgcgcggctgggctccccctcctcccgcagcacaaataatcggaagccagcctcccctcagaggccaga

SEQ ID NO: 531218 - DNA, 201 bp, Homo sapiens
aggggcgagactggaaacagggagaccggggaggaggttgacagtgagggttgcatgatgggagcctggcctaggagggcaacagtggagatggtgagaaggagatggatcccagagatacttgggaaacagaaccaacagcatcgatgattggctggatgaggggttgaggagagagaggagtgcatgattatgattttc

SEQ ID NO: 531219 - DNA, 201 bp, Homo sapiens
agaacaatgaagtattaaaaataaaatgggaatatggttagtgttttagtatgactgtaaaagtaatatgagtggaaagagaatatctaacatatacgccrgttaacaaaattaaaccttacagaagtaaggcaacatatgattgtttttaaatacctcaaaagttacaggaatactgaaagtaaaaagtttccataatca

SEQ ID NO: 531220 - DNA, 201 bp, Homo sapiens
caggggcgagactggaaacagggagaccggggaggaggttgacagtgagggttgcatgatgggagcctggcctaggagggcaacagtggagatggtgagaaggagatggatcccagagatacttgggaaacagaaccaacagcatcgatgattggctggatgaggggttgaggagagagaggagtgcatgattatgatttt

SEQ ID NO: 531221 - DNA, 201 bp, Homo sapiens
ctactgaaaccttgcccagggctacccaggaggtaagtggcagagatgaaactggtttcagggctccagtctgtagagagcacggggcaggtgggatcctrtgtgcagcctgggggatgagctccaaggcatcctctcgtccacaggtcaggtacagtgcgggcaggtgcactgccggctgccttacaccgcaccccccgt

SEQ ID NO: 531222 - DNA, 201 bp, Homo sapiens
ctggactaggatctggaggtgagagggtgaggtgaggggattctgaaatcccatcattccactcccaccctctcctctgagggggcattcctgcttaagggcctccacccaggcactgagggatgaagggggtgataagaacgtatttgtgaatctggacggctgtgtgtgtgtgtgtgtgtagtcagacaggggttaatg

SEQ ID NO: 531223 - DNA, 201 bp, Homo sapiens
ggccctgagagatgaggtcacagggctaagtggtagagactagataagccctatagctgcctggctccgccatccctgcccctaaacacccccatactctyctataggtgagatatatcagccacccgtctgtgcatcgtggggcccctctctgctgatccaaagagtccctgcccagtttggttggcacgcccgctgtgt

SEQ ID NO: 531224 - DNA, 201 bp, Homo sapiens
ttggaaatcaaggagagggcggtgacatattggaccagaagaggcactagccattttaaggagaggaaagagaaaactctggggtcagggagagaccctayccccacctaattatccagcatatatgtaagaaacatagcagcgatggtattcgatctgtgccatgactcttctgaatgtttggacaggttagagttgggg

SEQ ID NO: 531225 - DNA, 201 bp, Homo sapiens
caccagaaaaatgtgacaggactcttaatttcttcaccttttggtgaagaccatttttctttctgttttcttccaaaaatggaagaaaattctggaggaaraatagtgctcctttccgggacattcacatttcccctgctaccgacaaccatagccccagacatacctgcagctgctgccctacaatagggcatggcccga

SEQ ID NO: 531226 - DNA, 201 bp, Homo sapiens
atgtccccaaaggaaagctatgttctaattttatcatttccatctgtctggttatgtcaagttaattcagaaagagaagagacagtgaccaaccctgagargcctaatagggcagagatggaggcctgcccagactaggaggcagcggggatagacagggaatggggagaagaaagacccccattggtttggaaatcaagg

SEQ ID NO: 531227 - DNA, 201 bp, Homo sapiens
gcaagttgctgcttctctcggcccttagttcgccctttccaaggctgtctcccagagctgccaaagaggccactgttggggggaagtctctataaaggctycctaaatggtggttggtatgaatgcctcgattatcactgttgtcatcattggcagggtggatgctgggcacaagcccatgatggcatttccccacgcagc

SEQ ID NO: 531228 - DNA, 201 bp, Homo sapiens
tgtagtcatgcccaccagatgcccctcacactttactgtgaaatgacacattgccattgaccagccagccagtgatccttgacctgaacttcagggaactrgctgtgtcagcagcagtgagatgtcaaccaagtgctagaggtgggagtgggagggggaaagggacagacagtcctgatctcccactgtgtatcgggcacc

SEQ ID NO: 531229 - DNA, 201 bp, Homo sapiens
gcagggtcatggccttgtctgctgatcccagtgggaggcatcaactggcctgaggcttggaccaccaggcctataggatcagaggagaatggtggagaatyacttcctgagagggatgcttgttcccaagtgctttctcaaaaagtggagaaagctgcttccctataactaccctccaacccacagacatctttcctatcc

SEQ ID NO: 531230 - DNA, 201 bp, Homo sapiens
gcaggggcgagactggaaacagggagaccggggaggaggttgacagtgagggttgcatgatgggagcctggcctaggagggcaacagtggagatggtgagaaggagatggatcccagagatacttgggaaacagaaccaacagcatcgatgattggctggatgaggggttgaggagagagaggagtgcatgattatgattt

SEQ ID NO: 531231 - DNA, 201 bp, Homo sapiens
gtgtgacagtgggtgagtttcttagctttcttgcatactcattccctcatctgtaaaaatgaggacaacagtatctcaaagcagtgttctgagcatcaaaygaggtaactgaaaatcctcaacattcagcaagtgccgcataagtattggctgctcttgtgatggtgggagtggttttggttggcagaactaggagtgcag

SEQ ID NO: 531232 - DNA, 201 bp, Homo sapiens
cctcgaggctgaggctgccgaggctgtcgttccaggtgtggtttcaaaactgccgggcgcgtcataaaaagcacacgccgcaacacccagtgccgccctcsggggcgcccccgtcccgccttccctccgccctgtccgacgacatccactacaccccgttcagcagccccgagcgggcgcgcatggtcaccctgcacggct

SEQ ID NO: 531233 - DNA, 201 bp, Homo sapiens
gtgggacgggggtgggcggggcctggggaccgcgggcacgccccggagctcgtagctgggctcggcgcggagggtggtgcgtgcacgtggccatccttctscaggaggcgacgaggcagtcccgcctggggtctcccggcggcgcgtccgactcttttcctcgaggctgaggctgccgaggctgtcgttccaggtgtggtt

SEQ ID NO: 531234 - DNA, 201 bp, Homo sapiens
gctcagccacctcccatgccctcctcttgcaggtcatcctttttcagtactaacgctgccggcacttccgcatctgcccgtgggcgccccacagctgcccytcagccgctgagatccagtgtccaagctgcggccaggagtccacccacctccgcatccacccccgtccgccatcctgcccaccaccaggtcggttcccga

SEQ ID NO: 531235 - DNA, 201 bp, Homo sapiens
gaagaagaaacaggatttgccaaaaattacatactagtagatttgcctagctccaaagcccagcctcttaactaccataccataccatatcataccatacsacaccaccttggccctaagctctagggcaccttaatcagatctcataaagccaaggaggcttctgggatgtagctgcctctgttttagtttcccatctaa

SEQ ID NO: 531236 - DNA, 201 bp, Homo sapiens
tccccatggggctggcccctgaacccactcatctagaccagcactggcctggccaggagaacagtgctctgagcactcaggggagcatcccctgcctccaycgcatcgtcatttggccacacacacctgtgaggttccagagccacatttcttcctggttgtgtcccctgatcccacaaatccaacacttggaaagttctt

SEQ ID NO: 531237 - DNA, 201 bp, Homo sapiens
ggaccagggtctctaactataaggggaaaggaccaggtttctgagtctggagaccaggctctcccatactgtgttgacatatgaggtttccttttctctcygggcctcagtccctacatctgtgcaagacagatactggactagaatgatccctaaatctcttctggctctgacattgtgattccccagattgcccaggaa

SEQ ID NO: 531238 - DNA, 201 bp, Homo sapiens
actaaacaaacagtagtagtcattgctgttgtcatctagttcagtgcaggacaaggaaaacgagaactcagagttaaacagtttgcctagtgtcacaaagycagtaagtgcttatctgtctgttcatctaagaaactgcacttctgtacagctggcgctatagcttatattcatctctggagcaggatcgctagggttcct

SEQ ID NO: 531239 - DNA, 201 bp, Homo sapiens
ccggggtcggctcttcgagggggagtaggctgggttgggcaaagctgtttcctctcccctttactgcgggacggggaacagagaccgtggtctgggctggrcactccgctggggaagccgcgtttccgaggtccggaaccgcctgtgcttaggggagcggtggattcaacgaaggtgctctgcgcctcctgagggaaccgc

SEQ ID NO: 531240 - DNA, 201 bp, Homo sapiens
cgtaaactgagctgagccacgaggagcacaggaggatcctagagctgggacagcttccagcatttcgggagacacgcggagcatgagaaagttgctgagarttcactagcggcgcctacctcggaccaagggtatgaggacactgtgactgacctacctgtgtaggcgcagaacggactcgggcgtcggggactcgcggga

SEQ ID NO: 531241 - DNA, 201 bp, Homo sapiens
taaagggttaactgcttcccctcgtgtttatgggggtgggggttcagtgagtgccctggaggctaaagttcctcttcccagctaggcccaaacgacttcakgcaagcccctagccttctctggccctccgccttgagcccaagctctgtcgcgggctccagcgggagaagcctaccccctcccgcaaagcgagggtcccag

SEQ ID NO: 531242 - DNA, 201 bp, Homo sapiens
tgcacagagcctgttaaaggtgccaaggatcaggggcgctataagtaccaggggtctgagctacctgctaatacttggtgtagagtcaataagaaatctasatgatccctttggacttggggccatgacctccagagtccctgccaggactctgtccatacactctgttgaccaaacttagatctgtctttgctgcttaga

SEQ ID NO: 531243 - DNA, 201 bp, Homo sapiens
ggactgtttcaaaaagtcttttgaggactgttctcctttgcaatcctctgtaaatgcaccattgcattccaacccgggcaacaagagcaaaactctatctaaaaaaaaaaaaattcatccacaggacagcgctggccttccgttagacttttgctgttgagtctgtaagttttcagcagctgtgtttctccaaggagcggg

SEQ ID NO: 531244 - DNA, 201 bp, Homo sapiens
tgaggcaggagaatcgcttgaacctgggaggcagagattgcagtgagccaagatcacaccactgcactccagcctgggcaacagagcgagactccatctcaaaaaaaaataaaaaggttatttggaaagattatatccatctacttaatgctagggattggattgtggcacgtggactgtgaaaatgcaaaattggaggta

SEQ ID NO: 531245 - DNA, 201 bp, Homo sapiens
ctttcccccactgccctgcccctccctgcaccctagcagctgacacagtgttttgggatttgaagataacacaaaggctgtgttcagttaaacgtatgtcktgtgtgtgtgtgtgtgtgtgtgtgcttgtgtgtgtgtgtgttttaataattttaacttctctgggtgaaggtgtaaattacaaaataaaggaccatgtag

SEQ ID NO: 531246 - DNA, 201 bp, Homo sapiens
tacccaggctggtcttgaactcctgagctcaagcaatctgccctcctacgcctcccaaagtgctgggattacaggtgtgagccactgtacctggctggttktttttttttttcttttctttcctttttttttgagacagtgttttgctctgtcgcccaggctggagtgcagtggagtgatcttggctcactacaagctcca

SEQ ID NO: 531247 - DNA, 201 bp, Homo sapiens
atcccagcactttgggaggctgaggtgagtagatcacttgagaccaggagttcaagaccagcctggccaacatggcaaaaccccgtctctactgaaaatgaaaaaaaaaaaaaaaaaaaaaacttagccaggcgcagtggctcacatctgtaatcccagctactcaggaggctgaggcaggagaatcacgtgaacctggga

SEQ ID NO: 531248 - DNA, 201 bp, Homo sapiens
gtgttagccaggatggtctcaatctcctgaccttgtgatccacccgcctcagcctcccaaagtgctgggattacaggcatgagccactgcgcccagcctgttttttttttttatagtttgtatttttctgctgagattcaccatgttttcattcattagacctgtcttttcctctaaatcctagaaggtatttgtaataaa

SEQ ID NO: 531249 - DNA, 201 bp, Homo sapiens
tgaggcaggagaatcacgtgaacctgggagctggaggttgcagtgagcctagatcgcaccactgcacttcagcctgggcgatggagtgagactccaactcaaaaaaaaaaaaaaaaaatttcaattggcttctattaaagcttttttatgtttgtcattgttttctagtaataacaacaatccacattttttgtgagaaat

SEQ ID NO: 531250 - DNA, 201 bp, Homo sapiens
tttagtagagacagggtttcaccgtgttagccaggatggtcttgatctcctgacctcgtgatccgcccgccttggcttcccaaagtgctgggattacaggygtgagccactgcgcctggcctgaatcttcttttttttttttttttgagacagggtctcactccgtcacccaggctggagtgcactggcatgatcttggct

SEQ ID NO: 531251 - DNA, 201 bp, Homo sapiens
ggctgtcagcgtcaaaaagatgtatctgcagatttggcaaggaatttgcatttcagtgattattatcaagcgttcacacactttccatgtttaatggtaattttttttgtttttttttgagacgatgtctcactctgttgcccaggcagagtgcagtgccgcgaccttggctcactgcaacctctgcctcccaggttcagg

SEQ ID NO: 531252 - DNA, 201 bp, Homo sapiens
ttgtatttttagtagagacagagtttagccatattggctaggttggtcttgaattcctggcctcaagtgatctacccgcctcagcctcccaaagcggtgcrattacaagtgtgagccactgcgcccagcctctattgaatattcttaccctttggtagttgagtgttttggaatggcggtgtgtaacaaacataccttatg

SEQ ID NO: 531253 - DNA, 201 bp, Homo sapiens
aaaaaaatcaattccctgctggagctactgtctatttggaatttacacattctccagtgtcctcgtggaacttaactcttgtttatatcaattaccttgcygattgatggacaaatcatggaaaattggttttgttatatgtcattttgctcaaagccccagtttccaagaacctatcaatgacattaagtgagaacttac

SEQ ID NO: 531254 - DNA, 201 bp, Homo sapiens
cgtcaaaaagatgtatctgcagatttggcaaggaatttgcatttcagtgattattatcaagcgttcacacactttccatgtttaatggtaattttttttgtttttttttgagacgatgtctcactctgttgcccaggcagagtgcagtgccgcgaccttggctcactgcaacctctgcctcccaggttcaggtgattctcc

SEQ ID NO: 531255 - DNA, 201 bp, Homo sapiens
ctgggtttaagggtacatgcgtttgtcatttctgttagtagatggattctacttggtagatagctaccattttgcgtatgtctgtgtgtatatatatgtgwgtgtatatgtgtgtgtatgcatgtgtgtgcatatatatatatatatatatatatatatttttttttttttaagacagggtctggctctgttatgcaggct

SEQ ID NO: 531256 - DNA, 201 bp, Homo sapiens
gaagataaatttaacaaattactacagaattaggtgtaagacaacagtaaatgattggaatgaattacagaaatctagaaagctttgacagtgggaatgcrtagtgaatggctctaagttctccctccatctgtaggaaattgaagctggaagtgagatgatacattcattatagggaggacttacagaagaaaacatcaa

SEQ ID NO: 531257 - DNA, 201 bp, Homo sapiens
aagggtacatgcgtttgtcatttctgttagtagatggattctacttggtagatagctaccattttgcgtatgtctgtgtgtatatatatgtgtgtgtatakgtgtgtgtatgcatgtgtgtgcatatatatatatatatatatatatatatttttttttttttaagacagggtctggctctgttatgcaggctggagtgca

SEQ ID NO: 531258 - DNA, 201 bp, Homo sapiens
tcagtggtggagccggtataggaggcttcacatttcttcccctaggacacgctgtcattgtttaggtttcttgttttgttttttcctgaaacagggtctcrctctgttgctcaggctggagtgcagtggcacagttacagctcactgcagctctaacctcttaggctcaagtgattgtcccatctcagcctctcaactagc

SEQ ID NO: 531259 - DNA, 201 bp, Homo sapiens
tggtagatagctaccattttgcgtatgtctgtgtgtatatatatgtgtgtgtatatgtgtgtgtatgcatgtgtgtgcatatatatatatatatatatatwtatatttttttttttttaagacagggtctggctctgttatgcaggctggagtgcagtggcatgacctcggctcactgcagcttcagtcctcggggctcaa

SEQ ID NO: 531260 - DNA, 201 bp, Homo sapiens
gtagatagctaccattttgcgtatgtctgtgtgtatatatatgtgtgtgtatatgtgtgtgtatgcatgtgtgtgcatatatatatatatatatatatatwtatttttttttttttaagacagggtctggctctgttatgcaggctggagtgcagtggcatgacctcggctcactgcagcttcagtcctcggggctcaagt

SEQ ID NO: 531261 - DNA, 201 bp, Homo sapiens
ctatggcttttaaagaatgtcgtcttagaatcagtttctaattacttgtgtgcagaagagtcctgcagctgtgaggtgatcacagtctttggcctaagccrctgccaggtgagtgaaagccaatctggagtcacagagtggcagcgactgcaccggagatgtgtgtgccatttgttaagatgagtcaaatggtagttaggg

SEQ ID NO: 531262 - DNA, 201 bp, Homo sapiens
agattgttttaagacagtcaaattgttttgcctgttgaagaaggtgatcagaccctaatgaaactgaaaatgaggagagtgttcccatctcctgcctggtyctagcgactctgcaaatgggtgcctgattggtctgttggctctgaagccagcctttgctggatatattcagcctgttttgaagttgtgcagagaacctca

SEQ ID NO: 531263 - DNA, 201 bp, Homo sapiens
tgcagtggtctgatcatagctcattacagccttgaacttctggactcatgcagtcctcctgagtagctgggactacattaattaccacacctagtattttwtttttatttttattttttgtagcaacagggtctcgctgtgctgcccaggctgggtttgaactcatggcctcaaacactctttctgcctcagcgtcccaaa

SEQ ID NO: 531264 - DNA, 201 bp, Homo sapiens
ttggtgagtaagcccggggctctgaagagagggtctcgcgccgcacccccagggtgacacaggcgctggggaagacgcacgggcggctcactgcacaaaayctcgttggaatatttgtgctctgccgacgttcagccgcgggtaaaatgaggcctgtatgggatgggtgtgtgcgtgtgtgcacatatgcacatgtatgta

SEQ ID NO: 531265 - DNA, 201 bp, Homo sapiens
tttttaacttttttttttgagatggagtctcgctctgtcacccaggctggagtgcagtggcgcgatcttggctcactgcaagttccgcctcctgggttcaygccattctcctgcctcagcctcccgagtagctaggactacaggcgcccgccaccacacctggccaatttttgtatttttagtagagaccaggtttcacca

SEQ ID NO: 531266 - DNA, 201 bp, Homo sapiens
tcagctgtcatggaacctgtctgcagcaatgtggctgtcacaaaacgcagcccaggacgagtatgcgctgaagctccattttgcattaactagtcaagtayttacccactgaaaagcacttcctgaaataatttcaccttcgtttttttccttctgcaggaggacaccatggaggtggaagagttcttgaaagaagctgca

SEQ ID NO: 531267 - DNA, 201 bp, Homo sapiens
gagggccgagacatcagcaacggggcactggctttcacccccttggacacagctgacccagccaagtccccaaagcccagcaatggggctggggtccccartggagccctccgggagtccgggggctcaggcttccggtctccccacctgtggaagaagtccagcacgctgaccagcagccgcctagccaccggcgaggag

SEQ ID NO: 531268 - DNA, 201 bp, Homo sapiens
cgaggttgacgcaccagagggaggcactcaagtgccttttcaggacagcctgaaggaagcctccctccccagcatgctttttcatgttaaattatcaattrtgtaagtttagggccaggcgcggtggctcctgcctgtaatcccagcactttgggaggctgaggtgagtagatcacttgagaccaggagttcaagaccagc

SEQ ID NO: 531269 - DNA, 201 bp, Homo sapiens
ggagcgtggtgatgcaatcttggctcactgcaacctccaccttccgggttcaagcgaaacccctgcctcagcctcccgagtagctgggactgcagatgtgyaccaccacgcccagctaattgttgtatttttagtagagacgtggtttagtagagacgacctcccaaagtgctgggattacaggagtgagccaccacacct

SEQ ID NO: 531270 - DNA, 201 bp, Homo sapiens
gttggtttatcccaaagagatgttttagagcacattcatttctgaaagttctcggtcatgtttccggaagtttgatcaggtgggttctttttctttttttwaaagataattttttttttaaagataattcagaatcagtcccacccctgagatggtattattacccaggaaagaatgcgtgaggatcctctaaatccatag

SEQ ID NO: 531271 - DNA, 201 bp, Homo sapiens
acaatgttcttcaactgtaagatctacttgaggttatttgatttgctggtttgcaagaactcgtctacacgttgtctttatcacaaagaaattctggagcrtttgagccctgttcaaaaaaaaaaggcaagaagaaacttcaggaacaaataacctatttgaccctgtaatgaataatattcacacattttctaatttaag

SEQ ID NO: 531272 - DNA, 201 bp, Homo sapiens
gttgcaaatggcctgtgacaataaaaatgcctttgtgggtattagcaggctgactgtggacagtctggatctgcggccactgcagggattcctggaacctkttgggaaggtgtccggcgagctcactgtggtgtctgttaggaatctggagcaaatcctatttcttttgaaagcacagagaactgtgtttttacattatac

SEQ ID NO: 531273 - DNA, 201 bp, Homo sapiens
gtgatcaccaaaaaaacagctctgcctctgggagcggagaggactgggatagaaagtatttgtctttcattttaagcccttctgtacgatttgacttttcttttttttttttttttttttttttgagatggagtctcactctgtcacccaggctggagtacagtggcacgatcttggctcactgcaacctccgcctcccag

SEQ ID NO: 531274 - DNA, 201 bp, Homo sapiens
cttattgtcttgctagagttttgttgttagcaagttacttaaaataggaggaatatctgttgggttttggacacattttttacaataagattcttcctttaaaaaaaatattttataatgatagaaatcatccccaacgagaaaaattcaaataatagataacctttcttagagcgaaagaccactttactatcccctccc

SEQ ID NO: 531275 - DNA, 201 bp, Homo sapiens
gatagctaccattttgcgtatgtctgtgtgtatatatatgtgtgtgtatatgtgtgtgtatgcatgtgtgtgcatatatatatatatatatatatatatatttttttttttttaagacagggtctggctctgttatgcaggctggagtgcagtggcatgacctcggctcactgcagcttcagtcctcggggctcaagtgat

SEQ ID NO: 531276 - DNA, 201 bp, Homo sapiens
ttggtctgtctatccgtatgccagtaccaaacttgtaattgctatggcttcataccatgttgtggtatctgataggctagtccccacttacctttttaactttttttttttttggctgtcttcacacattcacttgtaccatatgaacatacatatacttcctttttaatgttcttatttttcttcacatcccaaagtctt

SEQ ID NO: 531277 - DNA, 201 bp, Homo sapiens
atagctaccattttgcgtatgtctgtgtgtatatatatgtgtgtgtatatgtgtgtgtatgcatgtgtgtgcatatatatatatatatatatatatatatwtttttttttttaagacagggtctggctctgttatgcaggctggagtgcagtggcatgacctcggctcactgcagcttcagtcctcggggctcaagtgata

SEQ ID NO: 531278 - DNA, 201 bp, Homo sapiens
tctatccgtatgccagtaccaaacttgtaattgctatggcttcataccatgttgtggtatctgataggctagtccccacttacctttttaacttttttttkttttggctgtcttcacacattcacttgtaccatatgaacatacatatacttcctttttaatgttcttatttttcttcacatcccaaagtcttctggctga

SEQ ID NO: 531279 - DNA, 201 bp, Homo sapiens
taccattttgcgtatgtctgtgtgtatatatatgtgtgtgtatatgtgtgtgtatgcatgtgtgtgcatatatatatatatatatatatatatattttttyttttttaagacagggtctggctctgttatgcaggctggagtgcagtggcatgacctcggctcactgcagcttcagtcctcggggctcaagtgatactcct

SEQ ID NO: 531280 - DNA, 201 bp, Homo sapiens
accttaaggaccctggatatttctcagataggactttttcttttctttttttgagacggagtcttactctgttgcctaggctggagtgcagtggcatgatytcagctcactgcaacctccgcctccccaaattggcgattctccttcctcagcctcacgagtagctgggattacaggcacccgccaccacacccagctaat

SEQ ID NO: 531281 - DNA, 201 bp, Homo sapiens
tcctcccacctcggtctcttgagtagataggactacaggtgtgcaccaccacacccagatttttttttttttttttttttttgtagagaagggtctcactmtgttgaactcctggtggcctcaagggatcctcctacctcggcctcacaaagtattggaattacaggtgtgagtcactgcagctggccttcacttatcact

SEQ ID NO: 531282 - DNA, 201 bp, Homo sapiens
ctggggagaggcctaagtatcagtttttttgttttgttttagttttttagtaaggagagactttattgaaaaggatttttgcaaggaggggaaaacgactrttgaaatagggaggacactctgaccataaggaggtgtgcaggcatcttctttttcaaaaaatgttttcagttttaaaatttaaaaaaaaatttattttat

SEQ ID NO: 531283 - DNA, 201 bp, Homo sapiens
caggctggagtacaatgatatgatcactgttcactgcagcctcgaactcctcaagtaaactgtaagcttgtgaatgcaggtttcatctcattttctgtttycccagcataatgctgaatacataggctctccataaaaaaaattcttgataagaatgatattaaatggactaaatgagaaattaaactttttattcactta

SEQ ID NO: 531284 - DNA, 201 bp, Homo sapiens
ttccttggcatctgcttgtgcctactgtttgccccctttgcctgtgtgttaaaacagcctctgtctcagaacagtgtctttttttttttttttttgagacrgagtctcactctgttgtctaggccggagtgcagtggcacaatctcggctcactgcaacctccacctcccaggttcaagatattctcctgcctcagcctac

SEQ ID NO: 531285 - DNA, 201 bp, Homo sapiens
tacctcagcctcccagagtgctgggattataggcatgagccaccacacccggccctggactttttcttaattgaataaatatttatcaagttcttcacttstatttgacggttcctgggctcaacactggattagaaaatgaatgggacagagttcttcatctgagacatagggtggtccaggtagtaggaggaagaagga

SEQ ID NO: 531286 - DNA, 201 bp, Homo sapiens
ggaataccagttaccatgccggagtaacagttacggcactgatgcaccagttaccatgccagagtaacagttacagcactggtataccagctaccatgccrgagtaacagttaccacactgatataccagttaccatgccggagtaacagttaccgcactgatgcaccagttaccatgccagagtaacaattatagcactg

SEQ ID NO: 531287 - DNA, 201 bp, Homo sapiens
accagacccaagaaatggggccttgaccagctcagcaaactgagaatggcctagatttcagcacactttcaccaggatttgtcaaatgaaggaagattccaagcgcaaaataccctagatttcaaccagtaaaagcttgtctgaaaacttccaagatcgggttgtacaacttgacatttgaggaaacgctacttcagtaga

SEQ ID NO: 531288 - DNA, 201 bp, Homo sapiens
taccatgccggagtaacagttaccgcactgatgcaccagttaccatgccagagtaacaattatagcactggtataccagctaccatgccagagtaacagtyaccacactgatatactagttaccatcccagagtaacagttaccgcactgatgcaccagttaccatgccagagtaacagttacagcactggtataccagtt

SEQ ID NO: 531289 - DNA, 201 bp, Homo sapiens
actgatgcaccagttaccatgccagagtaacaattatagcactggtataccagctaccatgccagagtaacagttaccacactgatatactagttaccatsccagagtaacagttaccgcactgatgcaccagttaccatgccagagtaacagttacagcactggtataccagttaccatgccggagtaacagttactgca

SEQ ID NO: 531290 - DNA, 201 bp, Homo sapiens
ttctctctgtttctctctcacacacaccttttcagttagttttgctgagggtttaccaattttattaatcttttcaaaaaaaatttgttaactttctcaaytgttttccattttattgatttctgctctttattttctttcttttacttaaaaaaatttttttttgtagagatagggtcttgctatgttgcccaggatggt

SEQ ID NO: 531291 - DNA, 201 bp, Homo sapiens
aaaaaatatttttaaaattagttgggcatggtggcatgcacctgtagtcccagctacatgggaggttgaggtgggaggatcacttaagcctgggaggtggmggttgcagtgagccaagattgcaccactgtgctccatcctgagcaagagtaagaccctgtctcaaaaaaccaaaacaaaatcaagtctccctcagtcttc

SEQ ID NO: 531292 - DNA, 201 bp, Homo sapiens
ttacttaaaaaaatttttttttgtagagatagggtcttgctatgttgcccaggatggtctcaaactcctggcttcaagcgatcctcctgccttggcctccygaagtgctgggattataggcgtgagccactgcacccagcctactttgggtttaatttgttctttatttctagcttcttaaagtagaaatttagatcgatt

SEQ ID NO: 531293 - DNA, 201 bp, Homo sapiens
ttgggaggccgaggcgggtggattacgaggtcaggagatcgagaccatcctggctaacatggtgaaaccccgtctctactaaaaatacaaaaaattagccrggcgtggtggcgggcacctgtagtcccagctactcgggaggctgaggcaggagaatggcgtgaacctgggaggcggagcttgcagtgagccgagatcgtg

SEQ ID NO: 531294 - DNA, 201 bp, Homo sapiens
aacactgcgttagctctatcacataagttcatcacataagttttcatgtgttattatcaaagtgtttgatttccaagtatttgggaattctagatatcttsgtttctaatttaatttcattgtggtcagagaacatcttctgtagaatttcagtcttctgacatttaccaagactaattttatggcccagcatataacctg

SEQ ID NO: 531295 - DNA, 201 bp, Homo sapiens
tttccaagtatttgggaattctagatatcttggtttctaatttaatttcattgtggtcagagaacatcttctgtagaatttcagtcttctgacatttaccragactaattttatggcccagcatataacctgtcttagtgaatgttccatttgtagttgaaaaaagtttgtgttgttgcatgtagttttctataaatcaag

SEQ ID NO: 531296 - DNA, 201 bp, Homo sapiens
aaaaataaaaactgaattgatgacagcccaacctgtcacttttttcagatccctttttatgaaagaatttgcttaagttgtgtctgaagacaaaccaattwctttggaccctgggtattctttttctaagggaataccatgttattttgtgttacagattgtttgcgatctttcataggctgatctttctagagttggtta

SEQ ID NO: 531297 - DNA, 201 bp, Homo sapiens
aatatgtgtgtatcgtatgtatgtttatatgtatatcagatgtacgcacattagtatgtgctattaagatactttatattatataatatatactgtataayaccgtatattataaagcattcataaaatgaaaatgaagatgaaataaattgcattgtaaatatttaaaactttaaaaaatgcgttactggtacaaaattt

SEQ ID NO: 531298 - DNA, 201 bp, Homo sapiens
cttaaattctctatagaaacctagtctttatctgtcttacaagccctcaaatttagctaatagcgttgttcattgaataccttaaaattgtatttaaagayaggccgtgaatacaattaggcattgctttttgaagccaaaataccatgagggtggggagggtcatgttcatttacccagatcagcaataaaaatactaat

SEQ ID NO: 531299 - DNA, 201 bp, Homo sapiens
tgatacctcctggtctctctctccctctcctctgcttgcatattctggtctataacaggaaatggaacctcctggagtgaggggaaaatgaccttcacatwtaggtttctcactctaaagttatttcttaaatattttagcctgagttcttttaataacagacctcagctctagttctttgaaatgcatgtgggaaaatgt

SEQ ID NO: 531300 - DNA, 201 bp, Homo sapiens
tcccaattttctcttcctttttcttttttctgttcccccctttctcttccagaagcccttcagcggccagtagcatctgactttgagcctcagggtctgartgaagccgctcgttggaactccaaggaaaaccttctcgctggacccagtgaaaatgaccccaaccttttcgttgcactgtatgattttgtggccagtgga

SEQ ID NO: 531301 - DNA, 201 bp, Homo sapiens
aacaccctaacctggtgcagctccttggtgagtaagcccggggctctgaagagagggtctcgcgccgcacccccagggtgacacaggcgctggggaagacrcacgggcggctcactgcacaaaacctcgttggaatatttgtgctctgccgacgttcagccgcgggtaaaatgaggcctgtatgggatgggtgtgtgcgtg

SEQ ID NO: 531302 - DNA, 201 bp, Homo sapiens
ttttaaatgaataattatgtttttaaatttcagtattcatttctaatgtggtaactattgatgagataacctacacaaactaagcctcttaggggccttcrgttatttttcaagagtgtgacaagggcctgagattaaaaagtttgaggccaggcactgtggcttatgcctgtaatttcacactttgggaggccaaaggca

SEQ ID NO: 531303 - DNA, 201 bp, Homo sapiens
ctgcactgcagcctgggtaacagagcaagaccccatctcaaaacaaagtttgagaactgttgctatggaaagtctatcaagaaggcacatagggatgtttsttgctgaagtactaacactgaatgatgtctgtgttgtggtgagtagaaaaaaagcaatttgaaaatcattatttatggtatggccccatttttgtaaaac

SEQ ID NO: 531304 - DNA, 201 bp, Homo sapiens
tgtgtctgaagacaaaccaatttctttggaccctgggtattctttttctaagggaataccatgttattttgtgttacagattgtttgcgatctttcatagsctgatctttctagagttggttaatatccatgtaggttagattgaaaaacttgaattcagaaatgtacggtgttggagcagacatggatctggaagccaag

SEQ ID NO: 531305 - DNA, 201 bp, Homo sapiens
tctttctagagttggttaatatccatgtaggttagattgaaaaacttgaattcagaaatgtacggtgttggagcagacatggatctggaagccaagaatarcgttggtgttgttgttgatggtgaatctgaaagagtgggcagatggcaactttttgccagaatcattcagggtcaaagggctagtcatatttacaaggga

SEQ ID NO: 531306 - DNA, 201 bp, Homo sapiens
cctctacgaggtggtctctcctgggctttcctctcgagcttcaagtcccacctctggagtgtgaatcgccttcctcagtctaactctatccctccagtggtttttttttttttgctttttgtttttgtttttgtttttttgagacagagtctcactctgtcacccaggctggagtacagtggcgtgatctcggctcaccgc

SEQ ID NO: 531307 - DNA, 201 bp, Homo sapiens
ttaggaggccaaggcgggcggatcacttgaggtcaggagttcgagaccaccctggccaacatggtgaaacctcgtctctactaaaaatacaaaaattagtmggcatggtggcacacacctatagtcccacctacatgggaggctgaggcagagggatcacgtgaacctgggaagcagaggttgcagtgagccaagatcatg

SEQ ID NO: 531308 - DNA, 201 bp, Homo sapiens
ccaggatggtctcgatctcctgacttcatgatctgccctcctcggcctcccaaagtgctgggattacaggcgtgagccaccacacccagcagtctcttcartgtatttagctgtgttgatcctgattcatctgatgggtgaaggaatattggaaataaggataatccctgtggtgtttcactgtgcctgtaacctctctca

SEQ ID NO: 531309 - DNA, 201 bp, Homo sapiens
tggccaggctggtctagaactcctgacctcaggtgatctgcctgccttggcctcccaaagtgctgggattacaggtgtgagccactgtgcacagccacccttttttttttttttttaactgtgtatttggcctgaggtccaaatatggtgcacagtgtatctgctgatctgttaagtctcctctataagccccctctccat

SEQ ID NO: 531310 - DNA, 201 bp, Homo sapiens
tttcatcttttttatatcagtggctgcctgtggcctctcaccaaatctggtggactcattttctctgtgtatttagtttttctcctggaaatgactaacarctgcttaagtccttattcctttctccaggtttctggtgctgccataatttgttctatccacttgggatactgctgtagtgggaatattgtccctgttacc

SEQ ID NO: 531311 - DNA, 201 bp, Homo sapiens
aggctggtctagaactcctgacctcaggtgatctgcctgccttggcctcccaaagtgctgggattacaggtgtgagccactgtgcacagccaccctttttyttttttttttaactgtgtatttggcctgaggtccaaatatggtgcacagtgtatctgctgatctgttaagtctcctctataagccccctctccatgtctt

SEQ ID NO: 531312 - DNA, 201 bp, Homo sapiens
gctactcgggaggctgaggcaggagaatggcgtgaacctgggaggcggagcttgcagtgagccgagatcgtgccactgcactccagcctgggcgacagagygagactccgtctcaaaaaaaaaaaaaaaaaaaaaaatttactatcatgtaaaggggagttggtctcaccctacactgctttggaaggcacaattaggagc

SEQ ID NO: 531313 - DNA, 201 bp, Homo sapiens
ccctgttgatattcagattgtctcgtctttggccagtgggaacttcacattagctcctagtcattttgacattaactttgtagttttccatgacgtccgcrccctcaaatgacaagctattgcaggttcattctgtgccccaggcctgaatcacccatttctctaaggaatcttatcctttaatgggaaatggaattttaa

SEQ ID NO: 531314 - DNA, 201 bp, Homo sapiens
tgaggcaggagaatggcgtgaacctgggaggcggagcttgcagtgagccgagatcgtgccactgcactccagcctgggcgacagagcgagactccgtctcaaaaaaaaaaaaaaaaaaaaaaatttactatcatgtaaaggggagttggtctcaccctacactgctttggaaggcacaattaggagctgcggatggaagtc

SEQ ID NO: 531315 - DNA, 201 bp, Homo sapiens
cacaattaggagctgcggatggaagtcacaaaataaggcacatttggactcagtatgaaaagagctttcagataatgagagcaatcaagtaatgggggggscttggaagccagtgattattggtcattggaggtattaaaggagaggcaagataggaagatatagatggggtttgaataccgtgcggggcttctcagcact

SEQ ID NO: 531316 - DNA, 201 bp, Homo sapiens
ctcagccaacccatattggaggtggggggtaggccaagcatctgggttcacagaggatcctggggatggcaatggtggactccattctaatggactgcagrctgggtacatgtgaagggactggacaaagccctacttcttgaagatttatggtgggatgtttactgacagcagaatctataaacctgagttttatcacgt

SEQ ID NO: 531317 - DNA, 201 bp, Homo sapiens
acaattaggagctgcggatggaagtcacaaaataaggcacatttggactcagtatgaaaagagctttcagataatgagagcaatcaagtaatggggggggcttggaagccagtgattattggtcattggaggtattaaaggagaggcaagataggaagatatagatggggtttgaataccgtgcggggcttctcagcactc

SEQ ID NO: 531318 - DNA, 201 bp, Homo sapiens
ttaccttatgtttttctctttcctcaagggtcacagccttgccttgccttgcctgtcatctaatgcctgaaaacagtcgtctcaaatattttattcagccrtacagttgtttaggacaaaaggatatctaataccacttttactgcattatggacagaagcagaagttcaattctgcatattctttttttttttttaagat

SEQ ID NO: 531319 - DNA, 201 bp, Homo sapiens
gcctcccattcaaatccctcccttgctgtcaaggggtctccccttcccccaaggtggctcccgcgagcctctaatgccctgacttcttccaatgtcacctwcggcccccttagtctcagctcagccaaaaactttaatgcaaaggaaaagtctggattggttccacaggccttttaaaaagcggacttaaaagttgctggc

SEQ ID NO: 531320 - DNA, 201 bp, Homo sapiens
ctgaaattggccagccacagtggctcatgtctgtaatcccagccctttgggaggccaaggtgggaggattgtttgagcctaggagttcaagaccagcctgrgcaacacgatgaaacctggtccctgtaaaaaatacaaaaattagctggggcatggtagcgcatgcttgtagtcccagctactagggaggctgaggtggga

SEQ ID NO: 531321 - DNA, 201 bp, Homo sapiens
ctcatcgatttgctgagcatacttctcagatgtgatggtttcgccgggattcagaaggctgtagtggatcacacaggcagcagaccaccaagctgtgaccrtgacctttttttggtgctagtttggctttgggaagtgctttggaacctctttcggtccgaacactgagctggtcattgctgtttgtcgtataaaatccac

SEQ ID NO: 531322 - DNA, 201 bp, Homo sapiens
ataaggctgtaataatgtatgagttaggagacccttttgaccaattcccctctgttttccatcttggaaaaaccagaactctgttttcttgagcaaatgaygttgccaccagccctgaagctccttttcctgggtttgtaggggttggtggaatcctggcagtctgccgctcttcctggcctccagagatcagggctgtga

SEQ ID NO: 531323 - DNA, 201 bp, Homo sapiens
tgtagtggatcacacaggcagcagaccaccaagctgtgaccgtgacctttttttggtgctagtttggctttgggaagtgctttggaacctctttcggtccraacactgagctggtcattgctgtttgtcgtataaaatccactttttgtcgcacatcacaatctgatcaagaaatggtttgttgttgcgtagaggaagaga

SEQ ID NO: 531324 - DNA, 201 bp, Homo sapiens
ttagacatgtaaaaacacctttgtcactctgactggtaaagaatggcatctcattatgttgaatatccatgtggcatattttgggtcatctttatgccatytagtaaattcatctttttcctacatgttagaaatataccaagtgtatatgtgtatctaggcctgttgacctctctgttctcttccattggtctgtctatc

SEQ ID NO: 531325 - DNA, 201 bp, Homo sapiens
acttgggatactgctgtagtgggaatattgtccctgttaccatcttcaggttacaaaccttttccccagcttgtggtaaaatcccgggggtctggtggatyccacgcattttaggatgtatatgggaagctaacattataggcacagtgtttttttttttttcactgtgtccgtctgttcttcagaggagcaaaggctagc

SEQ ID NO: 531326 - DNA, 201 bp, Homo sapiens
tccactttttgtcgcacatcacaatctgatcaagaaatggtttgttgttgcgtagaggaagagaagacgacacttaaacatgattttttaaaaatttttgctcagctgatgtgggacccgcttaacttcccaatttgcttcaaatgccaaatgatcatagaatggtcaacattgagtttttcagcaacttcttttatggtt

SEQ ID NO: 531327 - DNA, 201 bp, Homo sapiens
ggatactgctgtagtgggaatattgtccctgttaccatcttcaggttacaaaccttttccccagcttgtggtaaaatcccgggggtctggtggatcccackcattttaggatgtatatgggaagctaacattataggcacagtgtttttttttttttcactgtgtccgtctgttcttcagaggagcaaaggctagcatgac

SEQ ID NO: 531328 - DNA, 201 bp, Homo sapiens
ccactttttgtcgcacatcacaatctgatcaagaaatggtttgttgttgcgtagaggaagagaagacgacacttaaacatgattttttaaaaatttttgctcagctgatgtgggacccgcttaacttcccaatttgcttcaaatgccaaatgatcatagaatggtcaacattgagtttttcagcaacttcttttatggttg

SEQ ID NO: 531329 - DNA, 201 bp, Homo sapiens
gttacaaaccttttccccagcttgtggtaaaatcccgggggtctggtggatcccacgcattttaggatgtatatgggaagctaacattataggcacagtgtttttttttttttcactgtgtccgtctgttcttcagaggagcaaaggctagcatgacctttaagtcctcctttaagagtactgaatttctgccaggagcgt

SEQ ID NO: 531330 - DNA, 201 bp, Homo sapiens
cactttttgtcgcacatcacaatctgatcaagaaatggtttgttgttgcgtagaggaagagaagacgacacttaaacatgattttttaaaaatttttgctcagctgatgtgggacccgcttaacttcccaatttgcttcaaatgccaaatgatcatagaatggtcaacattgagtttttcagcaacttcttttatggttgt

SEQ ID NO: 531331 - DNA, 201 bp, Homo sapiens
aggatggtcttgaattcctgggctcaggtgattctcctgcctccgcctctcaggtagctgtgagtacaggcgtgcaccactgcgcctggctgtaaagcacttttttttttttttttttttttgagacagagtctcactcgttgcccaggctggagtgcagtggcgtaatctcggctcactgtaagctccgccacctgggtt

SEQ ID NO: 531332 - DNA, 201 bp, Homo sapiens
ggtggtaatatttacagatgccatattttaatatcttataatgaaatgtattatttggaagatctacataaatcagtaaatcaatattttcttttttgttygtttttgcgacagagtcttgctgtgttgtctaggctggagtgtagtggcatgatctcggctcactacaacctccacctcccaggtttaagcaattctcgt

SEQ ID NO: 531333 - DNA, 201 bp, Homo sapiens
gtacaggcgtgcaccactgcgcctggctgtaaagcacttttttttttttttttttttttgagacagagtctcactcgttgcccaggctggagtgcagtggygtaatctcggctcactgtaagctccgccacctgggttcacaccattctcctgcctcagcctcccgagtagctgggactacaggcgcccgccaccgcgcct

SEQ ID NO: 531334 - DNA, 201 bp, Homo sapiens
caggctggagtgcagtagtgtgatctcggccccaccgcaacctccgcctcctaggttcaagcaattcttctgcctcagcctcccaagtagctgggattacwggcatgtgccaccacacccggctaattttgtatttttagtagagacggggtttctccatgttggtcaggctggtctcaaacttccgatctcaggtgatct

SEQ ID NO: 531335 - DNA, 201 bp, Homo sapiens
tgtgatctcggccccaccgcaacctccgcctcctaggttcaagcaattcttctgcctcagcctcccaagtagctgggattacaggcatgtgccaccacacycggctaattttgtatttttagtagagacggggtttctccatgttggtcaggctggtctcaaacttccgatctcaggtgatctgcccacctcggcctccca

SEQ ID NO: 531336 - DNA, 201 bp, Homo sapiens
agctgggattacaggcatgtgccaccacacccggctaattttgtatttttagtagagacggggtttctccatgttggtcaggctggtctcaaacttccgayctcaggtgatctgcccacctcggcctcccaaagtgctgggattacaggcgtgagccactgtgcccggccggttgaacgtttttaacatgtttaggggaga

SEQ ID NO: 531337 - DNA, 201 bp, Homo sapiens
gtggcacaatctcggctcactgcaacctccacctcccaggttcaagatattctcctgcctcagcctaccaactagctgggattacagatgtgcaccgccayacccagctaattttttgcgtttttaatagagatagggtttcaccatattggttaggctggtctcaaactcctgacctcgtgatccgcccacctccacctc

SEQ ID NO: 531338 - DNA, 201 bp, Homo sapiens
gtagtctcaatgcaaagatacaatcagaacattgcacaagggggaaagaaatgtcatgctagtgtttgtattttaattgtctttccttatttagaccaatagtagtaacaggtaacttgggttgcatgcttactaagttccaggcagtagtcgaataacttttaatatttaatattcagaacaataaggaagaaatgaaaa

SEQ ID NO: 531339 - DNA, 201 bp, Homo sapiens
actttttgtcgcacatcacaatctgatcaagaaatggtttgttgttgcgtagaggaagagaagacgacacttaaacatgattttttaaaaatttttgctcagctgatgtgggacccgcttaacttcccaatttgcttcaaatgccaaatgatcatagaatggtcaacattgagtttttcagcaacttcttttatggttgta

SEQ ID NO: 531340 - DNA, 201 bp, Homo sapiens
ctttttgtcgcacatcacaatctgatcaagaaatggtttgttgttgcgtagaggaagagaagacgacacttaaacatgattttttaaaaatttttgctcagctgatgtgggacccgcttaacttcccaatttgcttcaaatgccaaatgatcatagaatggtcaacattgagtttttcagcaacttcttttatggttgtaa

SEQ ID NO: 531341 - DNA, 201 bp, Homo sapiens
gaaaagttgattacacttctcatttattaaaaaaaaatgacttgatagcatagtagatggccccttatgtaagccacttagtattatttcaaaggaagcawgtctgtgagaaaaggggcaaccacttttctcatagagaagaacaggtttttaaatgaaaagatcaacaaatccaaatgctgtggtatttatactgattta

SEQ ID NO: 531342 - DNA, 201 bp, Homo sapiens
ggacccgcttaacttcccaatttgcttcaaatgccaaatgatcatagaatggtcaacattgagtttttcagcaacttcttttatggttgtaagaggatcarcttctgtgattgatctcccaactggtcgttgtcaacttctgatggccggtcattgcactcctcatcttcaaggctctcgtctcctttgtaaaacttcttg

SEQ ID NO: 531343 - DNA, 201 bp, Homo sapiens
aaaatgaatcagagaagaggcccagaccgtgcctccgaaaattctcattgtagggactaagtcctctcactctgaactcacacccgtctgttcgcagcctsacctcatatcctggtctggatgtgcggcctcaccggggtgtcgtgcgcacgtgtggttgtcctgtgggtgccagctctgacttcctccccagacacccac

SEQ ID NO: 531344 - DNA, 201 bp, Homo sapiens
ttccagagtgttgggattataggcatgagccaccacacctggcctgtattaatatagagtaatagagatctatattggtagatatttccacattttcttcygtagacatcattctagtttacagtcccatcgctggtaatacagaggttgccttcatccccaaagcctagctaagagagtgtattgtcaagctttgggact

SEQ ID NO: 531345 - DNA, 201 bp, Homo sapiens
ttgcttcaaatgccaaatgatcatagaatggtcaacattgagtttttcagcaacttcttttatggttgtaagaggatcagcttctgtgattgatctcccarctggtcgttgtcaacttctgatggccggtcattgcactcctcatcttcaaggctctcgtctcctttgtaaaacttcttgaaccaccactgcactgtacgt

SEQ ID NO: 531346 - DNA, 201 bp, Homo sapiens
taagaaaattgctcgaatttgctttttgtctaacatcattttcacagtctaaagtaaacataaacagcaaggaataagtcattagcaaaaaaatgtaaagygagaaatgcccattaaaataatgtataacataaccacatttatttaagaatgtactcgaatatcaaatgacaaattccaacagtgtaaaaactgtgattc

SEQ ID NO: 531347 - DNA, 201 bp, Homo sapiens
ctcactgcagctctaacctcttaggctcaagtgattgtcccatctcagcctctcaactagctgggactacgtgcttgtgccacacatttaggtaatttaattttttttttttttttttttttttttggagacggggtcccactacgttgtccaggctggcctctaactcctgggcttaggcaatcctcccacttcagcctc

SEQ ID NO: 531348 - DNA, 201 bp, Homo sapiens
tcactgcagctctaacctcttaggctcaagtgattgtcccatctcagcctctcaactagctgggactacgtgcttgtgccacacatttaggtaatttaattttttttttttttttttttttttttggagacggggtcccactacgttgtccaggctggcctctaactcctgggcttaggcaatcctcccacttcagcctcc

SEQ ID NO: 531349 - DNA, 201 bp, Homo sapiens
cactgcagctctaacctcttaggctcaagtgattgtcccatctcagcctctcaactagctgggactacgtgcttgtgccacacatttaggtaatttaattttttttttttttttttttttttttggagacggggtcccactacgttgtccaggctggcctctaactcctgggcttaggcaatcctcccacttcagcctcct

SEQ ID NO: 531350 - DNA, 201 bp, Homo sapiens
ggcaggagaatcacttgaacctgggaggcgaagtttgtggggacccaagatcacgccattgcacttctgcctgggcaacaagagcgaaactcccagctcaaaaaaaaaaaaaaaattcacaagtacagaaagagatgctgaagaaggtaacagttacctagaaccccacccccagagataaccaccttgtggtaacattta

SEQ ID NO: 531351 - DNA, 201 bp, Homo sapiens
ggttatttttcaagagtgtgacaagggcctgagattaaaaagtttgaggccaggcactgtggcttatgcctgtaatttcacactttgggaggccaaaggcrggtggattgcttgagcccaggagttcaagatcatcctgggcaacataagaagaccctgtctctacaacaagaacaaaagaaattagccagacgtgttatc

SEQ ID NO: 531352 - DNA, 201 bp, Homo sapiens
atagatgtaccacagtttgtttatccattcaccagctgaaggacagtgctccagggtcctagagcacagaactctggctttgttgtctttatttctaccagttgtctctctctctgtctctctctctctcttttttttttaaaccctagaagattattaagatttataagactgggtatggtggctcatgccagtaatccc

SEQ ID NO: 531353 - DNA, 201 bp, Homo sapiens
aaatataaatgtaaaaaaaatttttaagctttattatttattataaaaacaacatacatttttgtaaattattcaatcaaggaaaattgattcagaaagcyatttgaaattcaatcagcatgatcaatgatactttaacccctattcaaatgaaagttatcctaattaaaagtaggtgccctaagaccatttttcagggtg

SEQ ID NO: 531354 - DNA, 201 bp, Homo sapiens
acatttttgtaaattattcaatcaaggaaaattgattcagaaagctatttgaaattcaatcagcatgatcaatgatactttaacccctattcaaatgaaarttatcctaattaaaagtaggtgccctaagaccatttttcagggtgcatttgggttctattgcttccacatcaggaactcataattactgtatggatttta

SEQ ID NO: 531355 - DNA, 201 bp, Homo sapiens
cgaacagtatttttttttaacagactagctacttagtgaatacgcagttgaatctacttgtttggcaggttcaggcattgaacaagtactaagtgcctgtyctgtatcaggtactgtgtcagtctggggtaagagagccaggaacaacatagccaacaaaaggctctttgtgtctaatttatattcctgaggaccaccact

SEQ ID NO: 531356 - DNA, 201 bp, Homo sapiens
aggagcaaaggctagcatgacctttaagtcctcctttaagagtactgaatttctgccaggagcgtggcttgttcctcaagtgtcgctaggtgaattgttawtagcaaggagggatgaaattgcgaaatcttaaaaagtagagaattccttcagatttcattcttgagaggtagaaaacaggaaatagaattgctaaacaga

SEQ ID NO: 531357 - DNA, 201 bp, Homo sapiens
ttgaccaagacctttgggttgtacagaaggggtgagaccatacctgtcctcaagcatttccaacctagtgtagagaaaaacaggagcaagataagaacaaygtactgaaaaggaaattggatgagggcctggaaaaaggggtaaagtgagctggttgggattggtgagtgccacagcttcctgccccttaacagatcagtg

SEQ ID NO: 531358 - DNA, 201 bp, Homo sapiens
ttggccccaaaggggaaaattctttctgccatcaagttgctggtcagctgtcatggaacctgtctgcagcaatgtggctgtcacaaaacgcagcccaggaygagtatgcgctgaagctccattttgcattaactagtcaagtacttacccactgaaaagcacttcctgaaataatttcaccttcgtttttttccttctgca

SEQ ID NO: 531359 - DNA, 201 bp, Homo sapiens
cctagtcctttgttgtggtgcgaggctcagtcgtcagcccaccgagtcatgtatgttctctggttgcccctggttttggctgaactcaaaggatggctgtytgtgaggagtactggtactttttgccacttgtgtgccctaactgtggtggatgccattttggggattatgctcagcagtgagtcacgtgagatgcacacg

SEQ ID NO: 531360 - DNA, 201 bp, Homo sapiens
caacaaaagcacttccacctctcctgaagtgcattgggaaaactggaggccattactagatttacagatgatgggccgtgcttaaataacccatcttagcyagactccaggtttcgtcacatattccctacctgttgctgccattgagggctttctctgtgctaggcactaccaaataatgctttggtaactttggtaatt

SEQ ID NO: 531361 - DNA, 201 bp, Homo sapiens
agtgattctcctgcctcagcctcccaagtagccaggattacaggcttgcgccaccatgcccggctaatttttgtattgttagtagagatggggttttgccrtgttagccaggctggacttgaactcgtgacctcaggtgatccacccgtcttggcctcccaaagtgctgggattacaggtgtgagccaccacgcccagcct

SEQ ID NO: 531362 - DNA, 201 bp, Homo sapiens
tgaagggatcctcccacctcggtctcttgagtagataggactacaggtgtgcaccaccacacccagatttttttttttttttttttttttgtagagaaggrtctcactctgttgaactcctggtggcctcaagggatcctcctacctcggcctcacaaagtattggaattacaggtgtgagtcactgcagctggccttcac

SEQ ID NO: 531363 - DNA, 201 bp, Homo sapiens
ccgggttcaagagattctcctgcctcagcctcccgagtaactgggactacaggcgcatgccaccatgcccagctaatttttgtatttttagtagagatggrgtttcaccgtgttggccaggatggtctcgatctcttgacctcgtgatccacccgcctcggcctcccaaagtgctgggattacaggggtgagccaccacgc

SEQ ID NO: 531364 - DNA, 201 bp, Homo sapiens
ccctaccaaattgaagatcaaataaataaagtggacctggaaaagtaaggcttgccattgtgtgtcaaaccagcccttcccagctgtgggctttgtacttaacggactcagaacgtgaatggaagtacagactctggaacatgtaggagctgttatcccttgccagtttcatgcttcactgtccatctcctggccaaatag

SEQ ID NO: 531365 - DNA, 201 bp, Homo sapiens
tcctggccaaatagagagacaagggtgacattaaaatcatgggtttatctgaattcaaatctcagctgctcacttactaacagtatgaccgcagacaccarcaaaacgtcccactgctgcttatttccaagcctttccaaggtcttctggtcagggcagattcttctttcttgttcctaaatttaaagtttcaagaattta

SEQ ID NO: 531366 - DNA, 201 bp, Homo sapiens
atgcaggtgcttgggaccatgttggaagttgggcccaggactgaggagcagagtcagaatccttcagaaggctttttctttagacagttgtttgttcagtygggagcggagccacgtgttgaagtcctcgttgtcttgttggcaggggtctgcacccgggagcccccgttctatatcatcactgagttcatgacctacggg

SEQ ID NO: 531367 - DNA, 201 bp, Homo sapiens
tagatgtaccacagtttgtttatccattcaccagctgaaggacagtgctccagggtcctagagcacagaactctggctttgttgtctttatttctaccagttgtctctctctctgtctctctctctctcttttttttttaaaccctagaagattattaagatttataagactgggtatggtggctcatgccagtaatccca

SEQ ID NO: 531368 - DNA, 201 bp, Homo sapiens
agatgtaccacagtttgtttatccattcaccagctgaaggacagtgctccagggtcctagagcacagaactctggctttgttgtctttatttctaccagttgtctctctctctgtctctctctctctcttttttttttaaaccctagaagattattaagatttataagactgggtatggtggctcatgccagtaatcccaa

SEQ ID NO: 531369 - DNA, 201 bp, Homo sapiens
gtcttactggctgtattgggtgagacattgggaaatgctttcataactggtgatcactgttgacggggttccctgacttcataaaggcccagattatgttrccccgagaaagtctttgaaggagcaagctctttcttatgcttttgttattaagttagggaaaatgactttaaataatggaaccttagttacaatgtaggt

SEQ ID NO: 531370 - DNA, 201 bp, Homo sapiens
aaaccctagaagattattaagatttataagactgggtatggtggctcatgccagtaatcccaatgctttgagaggccaaggcgggaggatcacttgaagcygggagttcaagaccagcttgggcaatgtagcaagaccccatctctacaaaaaattgaaaaattagccgggtgtggtggtgcacacctgtagtcccagcta

SEQ ID NO: 531371 - DNA, 201 bp, Homo sapiens
agttaacctaaaaagctgtggtgaggctgggcgcggtggctcatgcctgtaatcccagcactttgggaggccgaggcaggcagatcacctgacgtcaggcrttcgagaccagcctggccaacatggcgaaaccccgtctctactaaagatacaaaaattatctgggcgtggtggctacttgggaggctgaggcaggagaat

SEQ ID NO: 531372 - DNA, 201 bp, Homo sapiens
tgaggcaggagaatcacctgaacctgggaggcggaggttgcagtgaccagagatcgtgctactgtactctagcctgggcgacaaagtgagactctatctcaaaaaaaaaaaaaagcagcagctgtggtgactcttttcttgaggtctttgggggctgcctgttggtggacaggctggtgtgaagttggtagccctggagga

SEQ ID NO: 531373 - DNA, 201 bp, Homo sapiens
ctgtcaatcaaaaaaagctttgtgtaataatggacgctaccttgacagagtgtgttagtcaagagaggatacttatttataaattttgggatatttatacttttttttttttctttagagatggagtcttgctctgtcgccaaggctagagtgcagtggcgcaatctcggctcactgcaacctctgcctccccagttcaag

SEQ ID NO: 531374 - DNA, 201 bp, Homo sapiens
gaggcaggagaatcacctgaacctgggaggcggaggttgcagtgaccagagatcgtgctactgtactctagcctgggcgacaaagtgagactctatctcaaaaaaaaaaaaaagcagcagctgtggtgactcttttcttgaggtctttgggggctgcctgttggtggacaggctggtgtgaagttggtagccctggaggag

SEQ ID NO: 531375 - DNA, 201 bp, Homo sapiens
atcctggttgtccattcatgcttaagaacatgggaatggaaggggtgttgggagtcctatatatgtggatggggttgtccattggctggtttcagtattgsactaatgagtagaggaatcaaggaacctctcagggctttgtgttgggacgctgacacactgcattagtaccttctagactatgagcaggggaatcgagga

SEQ ID NO: 531376 - DNA, 201 bp, Homo sapiens
ccaggctggagtgcagaggcacgatctcggctcactgcaacctctgcctgctgggttcaagcaattctcagcgtcagcctcccaagtagctgggattacakgggcccgccaccacacccagctaatttttgtatttttagtagagacggggtttcaccctgttgaccaggctggtcttgaatgcctggcctcagtgaccca

SEQ ID NO: 531377 - DNA, 201 bp, Homo sapiens
actccgggcgcagtggcaggcacccgtaatcccagctactctggaggctgaggcaggagaatcgcttgaacccaggcagcagaggttgcagtgagccaagrtcacaccactgcactccagcctgggcgacagagtgagactcagtctcaaaaaagaaattgaacagcccattttgtgaaccacttcaaaaaaaagcaaaca

SEQ ID NO: 531378 - DNA, 201 bp, Homo sapiens
cacacatatgcatatatgtacatatacagctgaagaaggtctggattagtacttttccttattgtggagcacagtgagtgatattttctttttctttttcttttttttttgagacagtcttactctgttgcccaggctggagtgcagtggtgtgatctcggcttactgcaacctccaccttccaggttcaagcagttctcc

SEQ ID NO: 531379 - DNA, 201 bp, Homo sapiens
tattaatatagagtaatagagatctatattggtagatatttccacattttcttccgtagacatcattctagtttacagtcccatcgctggtaatacagagrttgccttcatccccaaagcctagctaagagagtgtattgtcaagctttgggactttttccaatctgatatctaagaaatagtattttagtatggttttaa

SEQ ID NO: 531380 - DNA, 201 bp, Homo sapiens
atagtacagctgctatgaacatttgtgtattcaccattgtgtgagcatatgattttccctaccttcttttctatttcactttcttttcctttttctttcctttttttttttttcttttttttgagacagtctctctgtgtcgcccaggctggagtgcagaggcacgatctcggctcactgcaacctctgcctgctgggttc

SEQ ID NO: 531381 - DNA, 201 bp, Homo sapiens
cgtcccactgctgcttatttccaagcctttccaaggtcttctggtcagggcagattcttctttcttgttcctaaatttaaagtttcaagaatttaatgcgtttttttttttttaatgaatttaatgccttttggggggtaggttttcctaatttaactttatttttttaaattttatttttaaattagtgaacagtaaaat

SEQ ID NO: 531382 - DNA, 201 bp, Homo sapiens
tgagaaattgccaaactgttttacagagtggcagtcatttcacgttcctaccagcacccttgaacgccagaattcctggtatcctcggctgaactggctaktgtcggtatttttaattttagccattctagtgagtatctcatcatggttttgcttttccctgacagctaatgaggtggattgagcatctttttgtgtgaa

SEQ ID NO: 531383 - DNA, 201 bp, Homo sapiens
cttggcttactgcagtctccacctcctgggctcaagtgatcctcccacctcatcctcctcaatagctgggactacaggcgtgagccaccatgcctagctamttttttttttttttgagacggagtcttgctctgtcgcccacactggagtgcagtggcgtgatcttggctcactgcaaccttcgcctcccgggttcaagca

SEQ ID NO: 531384 - DNA, 201 bp, Homo sapiens
gtgatcctcccacctcatcctcctcaatagctgggactacaggcgtgagccaccatgcctagctacttttttttttttttgagacggagtcttgctctgtygcccacactggagtgcagtggcgtgatcttggctcactgcaaccttcgcctcccgggttcaagcagttcttctacctcagcctcccaagtagctgggatt

SEQ ID NO: 531385 - DNA, 201 bp, Homo sapiens
ccatattcgctccaaattcttaacctgatatgaagatgtatgggtataatgtagggatgctttggaccctgtaattttatgcacacttgggaatgtgcacmagaacatttttctttcattagattctcaaaggggacgatgacccgacagaggctaagcaccattaaccagataagttaagtgatgaagtgcccagattct

SEQ ID NO: 531386 - DNA, 201 bp, Homo sapiens
ttctgaaggcaggcaggcctagatgtgaatcctgtctctgcttcatagctgttgtgagatcttgggcatgttatttcacttctgtaacccttaactttctsatctttaagatagggttctgaggatacttttatggaggtttcatggtaccagcatcctactgggaactgtaactcctgctgcctaccaaatatctataat

SEQ ID NO: 531387 - DNA, 201 bp, Homo sapiens
aagatggagtctcactctgtcgcccaggctggagtgcagtggtgtgatcttggctcactgcaacctccacctcctgggttcaagcgattctcctgcttcarcctcctgtgtagctgggactacaggcatgcaccaccacaccaggctatttttttttttttttgcatttttggtagatagggtttcatcatgttggccagg

SEQ ID NO: 531388 - DNA, 201 bp, Homo sapiens
cattctccctgtccctctccttttggtattgtagttacccactggaacacgtgacattatgtagcaagtctctgagtctgttcatttttttccttcagtctttttttttttttttgaaatggtctctctctgttgcccaggctggatggtacagcggtgtgatcacgactcactgcaactttggcctcctgggtttaagcc

SEQ ID NO: 531389 - DNA, 201 bp, Homo sapiens
agctcttattaagtagggggatgaagggggaagcccttcagttaaacaaagttactgacctgtcttttagacaggcaggacagaggatctcctcatgaggtttttttaacctttttgttctgaagttaatgtgtgttttaaatgaataatcttatttataacaacattttcagcgtggcaactgcagtttcagaatggtgg

SEQ ID NO: 531390 - DNA, 201 bp, Homo sapiens
acccccttgcacatttaaattgacatctaagatttttattataagtttaaatagttgtaaaggatgtattttccattatattttatacattccttaatttwatatatatatatatatatatatagttttttttttttttttttttgagatggagtctcactctgtcacccaggctggagtgcaatggtgcgatctcggctc

SEQ ID NO: 531391 - DNA, 201 bp, Homo sapiens
cagagtagaacatttcatgattcaggggtattgattggagtactaagaagagttgtattagtgaaggttcttgagagagagagagagagagagagagagaktgtgtgtgtgtgtgtgtgtgtgtgtgcacgtgtgaagagatttattgtaaggaattgccacgtgattatggaggctgataagtcccaaaaatctgcaggg

SEQ ID NO: 531392 - DNA, 201 bp, Homo sapiens
agagtagaacatttcatgattcaggggtattgattggagtactaagaagagttgtattagtgaaggttcttgagagagagagagagagagagagagagagwgtgtgtgtgtgtgtgtgtgtgtgtgcacgtgtgaagagatttattgtaaggaattgccacgtgattatggaggctgataagtcccaaaaatctgcagggc

SEQ ID NO: 531393 - DNA, 201 bp, Homo sapiens
gggtattgattggagtactaagaagagttgtattagtgaaggttcttgagagagagagagagagagagagagagagtgtgtgtgtgtgtgtgtgtgtgtgygcacgtgtgaagagatttattgtaaggaattgccacgtgattatggaggctgataagtcccaaaaatctgcagggcgagtcagcaagatggagacttagg

SEQ ID NO: 531394 - DNA, 201 bp, Homo sapiens
tgtgtatgtcttcttaatattctgtgggttaaaaaggggggtatgcatcaagcacttctgtacagtaaagtataatgattatctccaggaaaagcactttsgtggttgggttgcaaactgaactagccacttttttcatggactgccatttttacttgaaactatgacaaactatggttattcagactaaaaagtgtatga

SEQ ID NO: 531395 - DNA, 201 bp, Homo sapiens
ggttgcagtaagccaagatcgtaccactgcactccaacctgggcgagagagcaagattccgtctccacaaaaaagaaagatacagagatgaaaaatacactgaatgaagactgtcagaataaacattgcacaagtaaagatttgtgattttgaagacttaaccatagaaactatccaaaatgaagcagaaaaaaaaaagaa

SEQ ID NO: 531396 - DNA, 201 bp, Homo sapiens
gaagggtcctggaggtttgccacttctccgtgttgaggtacagagttcctagactaagggactggctgcattgttatgtgtgagtgctagtcatggtgctrcctggcacccacaaatgccacagcagacccatggtcgagggagaggagcaggaataccagttaccatgccggagtaacagttacggcactgatgcaccag

SEQ ID NO: 531397 - DNA, 201 bp, Homo sapiens
gttgcagtaagccaagatcgtaccactgcactccaacctgggcgagagagcaagattccgtctccacaaaaaagaaagatacagagatgaaaaatacactgaatgaagactgtcagaataaacattgcacaagtaaagatttgtgattttgaagacttaaccatagaaactatccaaaatgaagcagaaaaaaaaaagaaa

SEQ ID NO: 531398 - DNA, 201 bp, Homo sapiens
ttgcagtaagccaagatcgtaccactgcactccaacctgggcgagagagcaagattccgtctccacaaaaaagaaagatacagagatgaaaaatacactgaatgaagactgtcagaataaacattgcacaagtaaagatttgtgattttgaagacttaaccatagaaactatccaaaatgaagcagaaaaaaaaaagaaac

SEQ ID NO: 531399 - DNA, 201 bp, Homo sapiens
tgcagtaagccaagatcgtaccactgcactccaacctgggcgagagagcaagattccgtctccacaaaaaagaaagatacagagatgaaaaatacactgaatgaagactgtcagaataaacattgcacaagtaaagatttgtgattttgaagacttaaccatagaaactatccaaaatgaagcagaaaaaaaaaagaaacc

SEQ ID NO: 531400 - DNA, 201 bp, Homo sapiens
aagagctttcagataatgagagcaatcaagtaatggggggggcttggaagccagtgattattggtcattggaggtattaaaggagaggcaagataggaagrtatagatggggtttgaataccgtgcggggcttctcagcactcttccttttctgagtgcttttaacaagcggactagggaatagatagggcctctgctctc

SEQ ID NO: 531401 - DNA, 201 bp, Homo sapiens
ttttttcctttttttttctttgtttgaggcagagtcttattctgttgcccaggctggagtccagtggcacagtctcggctcactccaaccttgacctcctsggctcaagcggtcctccaacttcatcctcctgagtagctgggactataggtgtgtgccaccacttctggttaattttggcattttttgtagagttggggt

SEQ ID NO: 531402 - DNA, 201 bp, Homo sapiens
gttgaaggaatttgttaaaatatcagagctatgatttaagaaaattattctgtaatctgaatttaggttgggagtggaaaggagtacccttaagtaggacrtgagaagagcctgaagaaaggcagaggacaccagtaggcatcttggatgtgggattggtcagaggggagagaggtaaaaatgattccatgactgtgagtc

SEQ ID NO: 531403 - DNA, 201 bp, Homo sapiens
gatgtgggattggtcagaggggagagaggtaaaaatgattccatgactgtgagtctggcgactagaaatgggggtgacattcacagagtagggtggttccytgtagttcctccttgtgcagaaggtgaggctttgcttgtcgacctgcttcagtagtagcattgacagaacagtctctgtgtactctgtcccctcagtgct

SEQ ID NO: 531404 - DNA, 201 bp, Homo sapiens
aatatctttggcttggcactcaaggtcttctctgaagtagcccaaacatgctttcttgccctactgcagggttgctatgagggtgaagtatagaatgcctstatggtgaatgcctggtatagtgcctggccccaaaaagcaaccaataagtagtcttctcttcccaaagctagtcactgcatgtatgtatgtattcattca

SEQ ID NO: 531405 - DNA, 201 bp, Homo sapiens
tgttcctgttcattcataaggctgtaataatgtatgagttaggagacccttttgaccaattcccctctgttttccatcttggaaaaaccagaactctgttytcttgagcaaatgacgttgccaccagccctgaagctccttttcctgggtttgtaggggttggtggaatcctggcagtctgccgctcttcctggcctccag

SEQ ID NO: 531406 - DNA, 201 bp, Homo sapiens
ttgccaccagccctgaagctccttttcctgggtttgtaggggttggtggaatcctggcagtctgccgctcttcctggcctccagagatcagggctgtgacyttccatctgcagatggcagttctagctgcgaggttggtggccgaggaggacgaggacacagctcagggcctgtccttcaagggcttccgtgtgcagcagc

SEQ ID NO: 531407 - DNA, 201 bp, Homo sapiens
ggaaggcacaattaggagctgcggatggaagtcacaaaataaggcacatttggactcagtatgaaaagagctttcagataatgagagcaatcaagtaatgkggggggcttggaagccagtgattattggtcattggaggtattaaaggagaggcaagataggaagatatagatggggtttgaataccgtgcggggcttctc

SEQ ID NO: 531408 - DNA, 201 bp, Homo sapiens
cattttctcttcacttttgggattctgctcactgtgtttaaggcagctcgatagcattttgccaaaaaagagaagttagggctagtgtgagttgaggggarggggatgtttctgttgttgctccttgctgagtatcttcagatatctaaaagaaacttgtaacacagcgtcagcctgacactggcctttgcagcatcagcc

SEQ ID NO: 531409 - DNA, 201 bp, Homo sapiens
tgaggggaaggggatgtttctgttgttgctccttgctgagtatcttcagatatctaaaagaaacttgtaacacagcgtcagcctgacactggcctttgcascatcagccttggttgactgtgttctaatagggatgcctgatctgtatcctctttaacttggctataagaaggttttggagaatgtatgtctgagggtgtt

SEQ ID NO: 531410 - DNA, 201 bp, Homo sapiens
taatcccttccttgaagagatgttgttaatagtacttagatgatttgctaacttatatcaagcacttactctgacccaggtatcggactgggtgcttgacrtatattatctctattgtgttttgcagagtggctaagattttttttttttttcttttttgagacagagtctcgctctgtcacccaagttggagtgcagtgg

SEQ ID NO: 531411 - DNA, 201 bp, Homo sapiens
ggtgggtttcttatatcactgaatctaaagtgggtgcctttcagaatgtgctttactaataatgtgttactctgcttttaattatacttctaataattttycccaagagcctaattaacttacgatctcacagttggtaaagaattacaggatgtcattgcgtggatttctgtgggcagtcacccggagtggtatctaatt

SEQ ID NO: 531412 - DNA, 201 bp, Homo sapiens
attaaggagcagagagggctcagaagaattaaacggccaatggggtggtgacagaggtgagctctttccccctcggacagcttggcatggtgactaccaaygaggtttaattgacattaagagcagctcaccatttttaaagagcgataaattgtttccaagtttcagcctcacggagccctgagctaagagataatgggc

SEQ ID NO: 531413 - DNA, 201 bp, Homo sapiens
actccgagagcagtgggcaggtggccgcccctgaggcttcacgccgggagaagccaccttcccaccccttcataccgcctcgtgccagcagcctcgcacargccctagctttacgctcatcacctaaacttgtactttatttttctgatagaaatggtttcctctggatcgttttatgcggttcttacagcacatcacctc

SEQ ID NO: 531414 - DNA, 201 bp, Homo sapiens
cttgtgacgtgcactgtgaatcctggcaagaaagcttgagtctcaagggtggcaggtcactgtcactgccgacatccctcccccagcagaatggaggcagrggacaagggaggcagtggctagtggggtgaacagctggtgccaaatagccccagactgggcccaggcaggtctgcaagggcccagagtgaaccgtccttt

SEQ ID NO: 531415 - DNA, 201 bp, Homo sapiens
gaaggaagattccaagcgcaaaataccctagatttcaaccagtaaaagcttgtctgaaaacttccaagatcgggttgtacaacttgacatttgaggaaacrctacttcagtagatggtgctgtggcattgttttctgaacaactgaaggaggagactccagagaagggtacctgctggagacctgtgtggtttgtggggtg

SEQ ID NO: 531416 - DNA, 201 bp, Homo sapiens
gggacccggggtctcctggaccttgacagagcagctaactccgagagcagtgggcaggtggccgcccctgaggcttcacgccgggagaagccaccttcccrccccttcataccgcctcgtgccagcagcctcgcacaggccctagctttacgctcatcacctaaacttgtactttatttttctgatagaaatggtttcctc

SEQ ID NO: 531417 - DNA, 201 bp, Homo sapiens
agtgagctatgatcgcaccactgcattccagcctgggtgacagagtgagaccctctgtctaaataaacaaacaaataaaagaaaactggagctataaaaakaaatgaagacaatgcaaagggtaactaagtggataaatacataagatattttttctttttgtttcagtctcattaaaagatatgtcttagaggtaattac

SEQ ID NO: 531418 - DNA, 201 bp, Homo sapiens
tcatgcctgtaatcccagcattttgggaggtggattaggaggatcacttgaagccaggagtttgagaccagctttggaagccaagtgagactccatctctmcaaaaaaaaaaaaaaaaaaaaaaattagccaggtgtggtggtgtagttccactcaggaggctacggtgggaggatcacttgagcccaggagtttgaggct

SEQ ID NO: 531419 - DNA, 201 bp, Homo sapiens
gtccagctctactacctacgtttgcaccgcctgccctcccgcaccttcctcctccccgctccgtctctgtcctcgaattttatctgtggagttcctgctcygtggactgcagtcggcatgccaggacccgccagccccgctcccacctagtgccccagactgagctctccaggccaggtgggaacggctgatgtggactgt

SEQ ID NO: 531420 - DNA, 201 bp, Homo sapiens
ggtgggcggatcacgaggtcaggagaccgagaccatccttgctaacacggtgaaaccccgtctccactaaaaatacaaaaaattctccgggcgtggtggcrggcgcctgtagtcccagctactcaggaggctgaggcaggagaatggcttgaacctgggaggcggagcttgcagtgagccgagattgcaccactgcactcc

SEQ ID NO: 531421 - DNA, 201 bp, Homo sapiens
gcttatgcctgtaatcccagcactttgggaggccaaggtgggcagatcacctgaggtcaggagttcgagaccagcctggccaacatggtgaaaccccctcyctactaaaaatacaaaaattagctgggcgtgatggcgcctgtaatcccagctacttgggaggctgaggcaagagaatcgcctgaacccaggaggtggagg

SEQ ID NO: 531422 - DNA, 201 bp, Homo sapiens
atggtggcaggcacctgtaatcccagctattgggaggctgaggcaggagaattgcttgaacctgggaggcatagcttgcagtgagccaagattgcaccacygcattccagcctgggtgacagagtgagactctgtctcaaaaataataaataaataaataaataaataaataaataaataaagctatgcatttcccacaaa

SEQ ID NO: 531423 - DNA, 201 bp, Homo sapiens
ggcagatcacgaggtcaggagattgagaccatcctggtgtaacacagtgaaaccccgtctctactaaaaatacaaaaaaattagcagggcgtggtggcggkcccctgtagtccgagctactcgggaggctgaggcaggagaatggcgtggtgaacccgggaggcggagcttgcagtgggcggagatcgcgccactgcactc

SEQ ID NO: 531424 - DNA, 201 bp, Homo sapiens
acagagctagagtacctggcaggctcttgctggacaatgtttgctgaatcagagaaagtgggctttgttggcatttgcatgtgaaatactgtgcacatacmtcaagatctttgctgttccccccctaaagctactagctatgctggaaacagtgaaggggtcagccagacctggggtcaccttgtcctggggtcccaagcc

SEQ ID NO: 531425 - DNA, 201 bp, Homo sapiens
tctctgcctcagcctcccgagtagctgggattacagatgcccgctaccacgcccagctaatttttttgtacttttagtagagatggggtttcaccatctcaaaaaaaaaaaaaatcttaaatagctctagttccctgaattattttctcctaagacatgttttcccaacagttaatgttacttatttcatcttctgatctt

SEQ ID NO: 531426 - DNA, 201 bp, Homo sapiens
tagtatggacctggctggtttaattattgttttgggaaaaaaatctaaaactcattccaacatgtcttgaaatgaattataatgttgactctaaagtctcaaaaaaaaaaaaaagttctagtacagcagactgccttgggttaaaccttcttctaggaaggtgtcactctaggaattctttcttactgagttttcttcttt

SEQ ID NO: 531427 - DNA, 201 bp, Homo sapiens
aaaagtaattccctctcctattcattttccccacctagaggcaatcaccctggagttttatgtgtgtccttctagaaatactgtgtgcacatataagcatttattataacatgtgaattttgctctccagctttttgtgaatatgcatgtttatagcagtatctattcaccaggaccgcatttagctttgcaatattcggt

SEQ ID NO: 531428 - DNA, 201 bp, Homo sapiens
tccagctgccttcttcccccacccccaaatgtaacgtgatctcctaggcctgctctgctgcttttgcagattcttttagtcttagagaaagagaggaaaayattaaccattggtttaccaattcaaagttaacaacattttaaacaaaaggagcttgtcaataaccagggcttgggcttttcttttatcagttcctcctac

SEQ ID NO: 531429 - DNA, 201 bp, Homo sapiens
gccgagatggcgccactgcactccagcctgggcaacagagcaagactccgcctcagaaaaaaaaaagaaaagaaatgccccgtagaggctctgcactcagragcctgacccccagcatgggtccgggtaggccattggccgaaaatagtggagtgggcaaagagcagattttttaaaagtctgcatactgaatagtaagat

SEQ ID NO: 531430 - DNA, 201 bp, Homo sapiens
aagccattttcctgcctcagcctcccgagtagctgggattacaggcgtgtactaccacgtctggctaatttttgtatttcagtagagatggggtttcaccrtgttggccaggctgctctcggaactcctgactccggtgatccacccgccttggcctcccaaagtgctgggattacaggcatgagccaccagagacggagt

SEQ ID NO: 531431 - DNA, 201 bp, Homo sapiens
acactcacacacacgtacacacacattcacaaataggacatctcttttaaacagaaatggccacctgcatttgagaaaataaagtttcatgcagaagaaartgacatgttaaattcaatcatcaagatttagactggtgggaattctgcacaacaaatgacttggtttaattaacatggaaattgcgaggaaaaaaatgaa

SEQ ID NO: 531432 - DNA, 201 bp, Homo sapiens
ttcataataaccctgtgagataactactcttatgactacctcccatttttcagatgagaaaattgaggctctgagaggtgaagtcgttgcccatggccccmcagtgagtggcagatctgagactcagcgctagcctttgtgacacataactcgtgaccagcaggtagtgctacccgattgaaaaaatgtgagacttaaagg

SEQ ID NO: 531433 - DNA, 201 bp, Homo sapiens
ggtgtcttagcatgattcagggttgtggcacctaactatacttgtagtcattgcattcttcatgacgtgcactcacagttaaacaaactaaatatatatayacacacacacacacacatatatatccacttttcactgaaaaatgtccttttttttttttttttttttttttttttttgagtcagagtctctgtgtgtcac

SEQ ID NO: 531434 - DNA, 201 bp, Homo sapiens
cacgctgtcattgtttaggtttcttgttttgttttttcctgaaacagggtctcactctgttgctcaggctggagtgcagtggcacagttacagctcactgyagctctaacctcttaggctcaagtgattgtcccatctcagcctctcaactagctgggactacgtgcttgtgccacacatttaggtaatttaatttttttt

SEQ ID NO: 531435 - DNA, 201 bp, Homo sapiens
ataactcgtgaccagcaggtagtgctacccgattgaaaaaatgtgagacttaaagggatgcatgtgtccctatacagtggcaaaaactggtatgacagaartgatgttttaagctatgttatcctttagttggacatacactggacccacagagctagagtacctggcaggctcttgctggacaatgtttgctgaatcaga

SEQ ID NO: 531436 - DNA, 201 bp, Homo sapiens
ttaatgtgatgtgccactatattttacacgtatctcttggtatgcatcttttatagacgctcttttctaagtggcgtgtgcatagcgtcctgccctgcccyctcgggggcctgtggtggctccccctctgcttctcggggtccagtgcattttgtttctgtatatgattctctgtggttttttttgaatccaaatctgtcc

SEQ ID NO: 531437 - DNA, 201 bp, Homo sapiens
tcaggctggagtgcagtggcacagttacagctcactgcagctctaacctcttaggctcaagtgattgtcccatctcagcctctcaactagctgggactacrtgcttgtgccacacatttaggtaatttaattttttttttttttttttttttttttggagacggggtcccactacgttgtccaggctggcctctaactcct

SEQ ID NO: 531438 - DNA, 201 bp, Homo sapiens
ttggttgctacatttgtgaatttgtaaaataattcatgctctgctaggtctgtaacttgggaggcttggtgtgcacgggcatttagcagcaactcagagcrtatggaagactgtcactggcaagagcaaagtccccccaggacagagccagtgacgactagctgtgtatcctcagtctgatggcggtggaagtgaggcagc

SEQ ID NO: 531439 - DNA, 201 bp, Homo sapiens
tgggattacaggcgtgagctactgtgtctggcccccaaacagtggatttccatcttacatatgcatacagatcatctgggagcttcagatccagcccattrcacatattctgattctagactagaaaccaagactccgcattttaagcaagccccacattattcaaaatagattgtccatggattatgcttttagaaacat

SEQ ID NO: 531440 - DNA, 201 bp, Homo sapiens
ggtcacagaccaatttgggttaactttgccattgccttgcctgcagatcatggtgctgttgggatgtcattttgctgtaccaagggtaaacagtagctccstccttaacatcagtcctttagtgtaggacttctctattaagagctgggacactgttggccattaggattcctgttccttttgggtttgtaatagaagcta

SEQ ID NO: 531441 - DNA, 201 bp, Homo sapiens
tcgctctgttgcccaggctggagtgtggtggtgcgatcactgctcactgcatcctccacctcccaggttcaagcaattctctgcctcagcctcccgagtasctgggattacagatgcccgctaccacgcccagctaatttttttgtacttttagtagagatggggtttcaccatctcaaaaaaaaaaaaaatcttaaatag

SEQ ID NO: 531442 - DNA, 201 bp, Homo sapiens
gctctgacttcctccccagacacccactgcctcagccttaatcacaggacgcgcgttgagtagaaatgagaccagttagtattggtaactgcagaggaatwtgcattttcaccagcgttctcgggtcagagggtttgcctggcaccgcgtactgggaaactcgccaaaagcggtgcaggttggagacgccccaggccgcgg

SEQ ID NO: 531443 - DNA, 201 bp, Homo sapiens
agctaactttccagcggatgcttcatgtggtgccagccatacagatacgcttttagaacttgagctttggagaagcttatgcttgctttctgctctctcckgaggtcatcagatacttcccttgttcagtaacaaagaaagtgagactctttctgttacctaataaaaggccagtctgtccatttcattttgggtgctatt

SEQ ID NO: 531444 - DNA, 201 bp, Homo sapiens
cagatcatggtgctgttgggatgtcattttgctgtaccaagggtaaacagtagctccctccttaacatcagtcctttagtgtaggacttctctattaagarctgggacactgttggccattaggattcctgttccttttgggtttgtaatagaagctactgtccccctgatcattactgattgaaacaagaaatctgttgt

SEQ ID NO: 531445 - DNA, 201 bp, Homo sapiens
ttaaattggaaattttctgccattttacaaagttcaagactttcctaccttcctacctcctggctgtgtgaacttggacagaatacttccccctctccctycagtcagttttcttacttgtgaaatggaattaaactatacaaaatcattaggttactgtgaggcttaagagtgcctggcacatattacatgcacattaaa

SEQ ID NO: 531446 - DNA, 201 bp, Homo sapiens
ggtgctgttgggatgtcattttgctgtaccaagggtaaacagtagctccctccttaacatcagtcctttagtgtaggacttctctattaagagctgggacrctgttggccattaggattcctgttccttttgggtttgtaatagaagctactgtccccctgatcattactgattgaaacaagaaatctgttgttcctggat

SEQ ID NO: 531447 - DNA, 201 bp, Homo sapiens
tggacagaatacttccccctctcccttcagtcagttttcttacttgtgaaatggaattaaactatacaaaatcattaggttactgtgaggcttaagagtgyctggcacatattacatgcacattaaaaatgtatttcttcccaaactaatgcaacatagcaaacaagttagttcacagtctttaatttctttccttttccc

SEQ ID NO: 531448 - DNA, 201 bp, Homo sapiens
gatcattgacttctaggtgggagaatggcatctctcttttctcctcatgataaggacttagtctgtaaaccttccagtccctccctaccctgaagcctccyatggtcttttctctctcccttgtgaaggaaaggtccctcttttaaagcattattcagaccggaaggaggacaaaatcaagacatgctgaaaaacccctgt

SEQ ID NO: 531449 - DNA, 201 bp, Homo sapiens
tatggaaagtataggccaggtttgatacagaagtgtagtttggcagttttttcagtatccattgccactaattcagtattttgttagatctgttgatgtayggttttataactaaaattaaaaagatttgggtacagtttataagcattattcattttaagaggatttaagaggataagaccattttagactcaagagcag

SEQ ID NO: 531450 - DNA, 201 bp, Homo sapiens
tgtaatcccagcactttgggaggccgaggcgggtggatcacctgaggtcgggagttagagaccagcctgacgaacgtggggaaacccccgtctctactaamaatacaaaattagctgggcttgctggcgcgtgcctgtaatcccagctacttgggaggctgaggcaggagaatcacttgaacctgggaggcgaagtttgtg

SEQ ID NO: 531451 - DNA, 201 bp, Homo sapiens
tttctcgcgatggcccctaggcgccgccggcggagcgtggcccccagccccggcaccagccccggtagagccacgccggatggtgacggcggcgtccgggrccccacagtgcgggctcccccgaaaaagtttgagaaagccaactcgccaggccttaacatccctgggatcccacgttgtggaatttccaccgttaattgg

SEQ ID NO: 531452 - DNA, 201 bp, Homo sapiens
attgagggaaagctctgaaactggtaagagttaaatgtatgtttgtgttatgttgatacgagattcctctgagatgctctttagtccaggcaggtttatgrctcacacagcgttcctagggtctcattcttctgcacaggcaggcagctcccgagccagccagtctggacccaaatgccacctgtgctcttggctggtctt

SEQ ID NO: 531453 - DNA, 201 bp, Homo sapiens
aatgtgatgtgccactatattttacacgtatctcttggtatgcatcttttatagacgctcttttctaagtggcgtgtgcatagcgtcctgccctgccccckcgggggcctgtggtggctccccctctgcttctcggggtccagtgcattttgtttctgtatatgattctctgtggttttttttgaatccaaatctgtcctc

SEQ ID NO: 531454 - DNA, 201 bp, Homo sapiens
gacaaagccctacttcttgaagatttatggtgggatgtttactgacagcagaatctataaacctgagttttatcacgtactctcattagtaaaaaaaaaamaaaaaaaaacagaacatgcagcccatatatatggtatataaagtacgtatgtccactactgtaggagtagagtgcgtatgttatgtaccaaaacgcacat

SEQ ID NO: 531455 - DNA, 201 bp, Homo sapiens
ttgacatttgacagacgtggttagcagagagctttctcattcggttttcctggagagagctctgcctcttgggcttcctgcatttgtatggaagttttaatttttttttttttgtcaaatgaaaggttgccatttcatttgttcagatttcccacacactgttgcagcaatctttagatttcaaattggctaattcagtgg

SEQ ID NO: 531456 - DNA, 201 bp, Homo sapiens
catcatcatctccactttgcagatgggtgcctaaggcggggatgaatggacttttgtaagtgcagagctggagcaaagtttaggtcacagctttgccaagkcattgttttgttttcctgggagtaaaccggagatttagtatggacctggctggtttaattattgttttgggaaaaaaatctaaaactcattccaacatgt

SEQ ID NO: 531457 - DNA, 201 bp, Homo sapiens
aatatatttgtaaatgcagttcttgctgtcactgtctctctggggttttacaatccatattcctgccagcatctaacgtcttttcaaattcttaatgtctrtaacaggacatgatgacattcatcgttttgacttgttgcagcaaaagatggttagcaggattggaatgttgctttcattctagacttttccttgagaact

SEQ ID NO: 531458 - DNA, 201 bp, Homo sapiens
agcctcctaaactgctgggattacaggcatgagccaccacacccagccagttgtttagttttaaagatttaacctggttgaaatgtggctagtccccttaygcttgggtcacagaccaatttgggttaactttgccattgccttgcctgcagatcatggtgctgttgggatgtcattttgctgtaccaagggtaaacagta

SEQ ID NO: 531459 - DNA, 201 bp, Homo sapiens
ttgttagatctgttgatgtacggttttataactaaaattaaaaagatttgggtacagtttataagcattattcattttaagaggatttaagaggataagaycattttagactcaagagcagaatattagtaataataattagcttaaaaaaataaacatataccaatataaagaacagcacaaggcaagcaaatatctggg

SEQ ID NO: 531460 - DNA, 201 bp, Homo sapiens
gtgttatttttggcattacgtgtagaggttgacagattcaagacaacactaaacatgttagcagtcaccacacgcaggctgtccagcagaatgacagcgcytcccagatcctagaaagcatccagagtcactgcacccatcccctgggggccctgtagtcctgcatctccagatgatgggagctgcaaacttccctgatgg

SEQ ID NO: 531461 - DNA, 201 bp, Homo sapiens
aacataaagatggctagcaattattaaatgcttactatgtgccaaatactgttttattactctatgtgatctgatatagttatatttcatgatagcactaygattatttccattttatagatgaggaaactgagtcaccaaaaggttaggtaacttgtctagggtcacagagccagtgagtgggggtactggaatttgaac

SEQ ID NO: 531462 - DNA, 201 bp, Homo sapiens
aggagtttgagagagtggcctggacaacatagcaacaccctattagtactaaaaataaaaaagttagctaggcataataatgtcctgtgcttgtctagctrcttgggaggctgaggcagaaggattacttgagtccaggagttcgaggctgaagcaaactgtgatcatatcattgtactccagcctgtgtgataaagcaag

SEQ ID NO: 531463 - DNA, 201 bp, Homo sapiens
tgcagtctcatgtttggttattggtttttgggtttgctatttttgggcgaggaggtccatatccttcatcagcttctcaaggggttttttcagaggtacawggggaggctttggtttggttatgacagtgctacagccagcaacccgggggccacctgggtgctgctcccccacttcaaaacgtgtagctagcaggatgga

SEQ ID NO: 531464 - DNA, 201 bp, Homo sapiens
aagtaagctgttgttactttaagcaaatatttagcagcctaaaatggtggctttaccagtttctgtaatggttgaagtgatgacagaattcagccaatccyacccatagtttttcttgctaataaagcagtttgtttctaagtgtgttttgatgcgtataattaatacttcctgtccttgatttttggctgaaaaatgtct

SEQ ID NO: 531465 - DNA, 201 bp, Homo sapiens
gacagtgctacagccagcaacccgggggccacctgggtgctgctcccccacttcaaaacgtgtagctagcaggatggaaatcctgtctacatggaaatccwtgtggtgttggataggccatgattcatttccctaagcctcaaatgcttctattgtttgtagtttttctcccagaatcttcatgatccatttttgtacatt

SEQ ID NO: 531466 - DNA, 201 bp, Homo sapiens
ttaagcaaatatttagcagcctaaaatggtggctttaccagtttctgtaatggttgaagtgatgacagaattcagccaatcccacccatagtttttcttgytaataaagcagtttgtttctaagtgtgttttgatgcgtataattaatacttcctgtccttgatttttggctgaaaaatgtcttctcttcctcgcaccctc

SEQ ID NO: 531467 - DNA, 201 bp, Homo sapiens
ccaaacctggccttgtctgtttttgatgccttaggacttggggacaaggccacagcctgtgaccccagcatcatctccccccagggccttgccaccctctrgctttcatccttgcctcctcctctgccctctctttcttgtccgatacagtcacaagtgcctagaataaacctcacaccacccactgctctgctgtcaggg

SEQ ID NO: 531468 - DNA, 201 bp, Homo sapiens
agatcaataacttgtaactattataaaaggtagttataaagttagtaagggccaaaggtctaactagagtaggtcggttatagaggaaaacagtttaatcwgttgttgtttaacttttatggaatgcaacttctttagctttaatttggagagccaaactatggccctagtcttttttttttttttttttttttgagttgg

SEQ ID NO: 531469 - DNA, 201 bp, Homo sapiens
tgtattgtattattttttagtcaggtttattgaggtataatttacatatcataatattccccttctttattatacagttctatggactttgacaaatacayacacttgtgaaattgccaccccttttgagatacagaacagttctatcaccccctagaattcccttgtgcggcccttttgtagtcatcctttctctcttct

SEQ ID NO: 531470 - DNA, 201 bp, Homo sapiens
aaaagattgacaatacagtcttcttcagagtctccataggaaaggagcggcacgaaatgcaaattatttggaggttttggaggtttcaaacttttaattayttggcacatatagtgcttactgtgtgcaggcactgttctaaatattgctttcaaatatttaaaagtgcttagaacagttacagcacatagtaaatgctat

SEQ ID NO: 531471 - DNA, 201 bp, Homo sapiens
gtcatgtggtatcacatggcagctcactcaggaatcataaagctggccttgggataacagagctaaactttagagtcctgagtcctgttaatactcaatcmtctgtgaaattcaattaagtgagcttcaagttaacctaaaaagctgtggtgaggctgggcgcggtggctcatgcctgtaatcccagcactttgggaggcc

SEQ ID NO: 531472 - DNA, 201 bp, Homo sapiens
ttctccccaaagacaaaaagaccaacttgttcagcgccttgatcaagaagaagaagaagacagccccaacccctcccaaacgcagcagctccttccgggaratggacggccagccggagcgcagaggggccggcgaggaagagggccgagacatcagcaacggggcactggctttcacccccttggacacagctgacccag

SEQ ID NO: 531473 - DNA, 201 bp, Homo sapiens
tacccgggaattgacctgtcccaggtgtatgagctgctagagaaggactaccgcatggagcgcccagaaggctgcccagagaaggtctatgaactcatgcragcatgtaagccttcctcagcctgttctcacgagtatatgtgggcattccaggaaattcaactgtgcaggagtgtgtacacaaagttgaaagtttttcca

SEQ ID NO: 531474 - DNA, 201 bp, Homo sapiens
aaaatacaaaattagctgggcttgctggcgcgtgcctgtaatcccagctacttgggaggctgaggcaggagaatcacttgaacctgggaggcgaagtttgyggggacccaagatcacgccattgcacttctgcctgggcaacaagagcgaaactcccagctcaaaaaaaaaaaaaaaattcacaagtacagaaagagatgc

SEQ ID NO: 531475 - DNA, 201 bp, Homo sapiens
tgacctcatgatccacccccggcttttttttttgacacggagtttctcgttacccaggctggagtgcagtggcgcaatctctgctcactgagacctccacytcctgggttcaagcgattctcctgcctcagcctcctgagtagctgggactacaggtgtgcgtcaccatgcccggctaatttttgtatgtctaatggagac

SEQ ID NO: 531476 - DNA, 201 bp, Homo sapiens
gctaaactttagagtcctgagtcctgttaatactcaatcctctgtgaaattcaattaagtgagcttcaagttaacctaaaaagctgtggtgaggctgggcrcggtggctcatgcctgtaatcccagcactttgggaggccgaggcaggcagatcacctgacgtcaggcgttcgagaccagcctggccaacatggcgaaacc

SEQ ID NO: 531477 - DNA, 201 bp, Homo sapiens
tctgtgaaattcaattaagtgagcttcaagttaacctaaaaagctgtggtgaggctgggcgcggtggctcatgcctgtaatcccagcactttgggaggccraggcaggcagatcacctgacgtcaggcgttcgagaccagcctggccaacatggcgaaaccccgtctctactaaagatacaaaaattatctgggcgtggtg

SEQ ID NO: 531478 - DNA, 201 bp, Homo sapiens
ttaaaataggaggaatatctgttgggttttggacacattttttacaataagattcttcctttaaaaaaaatattttataatgatagaaatcatccccaacragaaaaattcaaataatagataacctttcttagagcgaaagaccactttactatcccctcccccacagacgcctggcacgtgggcttcttcctgcggatg

SEQ ID NO: 531479 - DNA, 201 bp, Homo sapiens
ctaaagatacaaaaattatctgggcgtggtggctacttgggaggctgaggcaggagaatcacctgaacctgggaggcggaggttgcagtgaccagagatcrtgctactgtactctagcctgggcgacaaagtgagactctatctcaaaaaaaaaaaaaagcagcagctgtggtgactcttttcttgaggtctttgggggct

SEQ ID NO: 531480 - DNA, 201 bp, Homo sapiens
gttttggacacattttttacaataagattcttcctttaaaaaaaatattttataatgatagaaatcatccccaacgagaaaaattcaaataatagataacytttcttagagcgaaagaccactttactatcccctcccccacagacgcctggcacgtgggcttcttcctgcggatgaacacattcatggagaggtgtgtgg

SEQ ID NO: 531481 - DNA, 201 bp, Homo sapiens
cagataagttgccagaactgactgaaggttatgtgcatcaccaggtcaccctctatagaaattgtacaaatttgttctcccacaaacaatccatgaaaggrcttgtttccccttaacccacaccaacagtttattattagacatgtaaaaacacctttgtcactctgactggtaaagaatggcatctcattatgttgaata

SEQ ID NO: 531482 - DNA, 201 bp, Homo sapiens
cagcagctgtggtgactcttttcttgaggtctttgggggctgcctgttggtggacaggctggtgtgaagttggtagccctggaggagctggggggagttgyagggctagtgtagacaagctacagaagccacaagggaggtgctgcttagagggggctctttattctttgtttggttttaatttgagacgggttcttccta

SEQ ID NO: 531483 - DNA, 201 bp, Homo sapiens
atagaaattgtacaaatttgttctcccacaaacaatccatgaaagggcttgtttccccttaacccacaccaacagtttattattagacatgtaaaaacacytttgtcactctgactggtaaagaatggcatctcattatgttgaatatccatgtggcatattttgggtcatctttatgccatttagtaaattcatcttttt

SEQ ID NO: 531484 - DNA, 201 bp, Homo sapiens
attttttttttccccatttagtttcctaaacagtgaggcttctgggcaggaaatgagagaagaggaggaggtaatatagaataatgcagtggctttcaagyattgtgacccatatgaggaatacatattcagttatgacttagcattcacatatgcacacatacatgtacgtatatacatcacattcacacatatgcatat

SEQ ID NO: 531485 - DNA, 201 bp, Homo sapiens
ccccatttagtttcctaaacagtgaggcttctgggcaggaaatgagagaagaggaggaggtaatatagaataatgcagtggctttcaagcattgtgacccrtatgaggaatacatattcagttatgacttagcattcacatatgcacacatacatgtacgtatatacatcacattcacacatatgcatatatgtacatata

SEQ ID NO: 531486 - DNA, 201 bp, Homo sapiens
agaataatgcagtggctttcaagcattgtgacccatatgaggaatacatattcagttatgacttagcattcacatatgcacacatacatgtacgtatatayatcacattcacacatatgcatatatgtacatatacagctgaagaaggtctggattagtacttttccttattgtggagcacagtgagtgatattttctttt

SEQ ID NO: 531487 - DNA, 201 bp, Homo sapiens
ttaagctacaggaggcttagagtgctaaaaccgagatgcttcccctgcataaggccatgcaacacggccattttattctgtagccatccgtgttgggatgrgtggaaggttgcatctgcgaggtggtcttctcctagagtttcaattaggaagtggggcaaaagccccagtgccttcccttcaacctgacgaccagtctac

SEQ ID NO: 531488 - DNA, 201 bp, Homo sapiens
tgaaggaaatcagtgacatagtgcagaggtagcagcagtcaggggtcaggtgtcaggcccgtcggagctgcctgcagcacatgcgggctcgcccatacccrtgacagtggctgacaagggactagtgagtcagcaccttggcccaggagctctgcgccaggcagagctgagggccctgtggagtccagctctactacctac

SEQ ID NO: 531489 - DNA, 201 bp, Homo sapiens
gacatagtgcagaggtagcagcagtcaggggtcaggtgtcaggcccgtcggagctgcctgcagcacatgcgggctcgcccatacccgtgacagtggctgasaagggactagtgagtcagcaccttggcccaggagctctgcgccaggcagagctgagggccctgtggagtccagctctactacctacgtttgcaccgcctg

SEQ ID NO: 531490 - DNA, 201 bp, Homo sapiens
gtcaccctggtaaatcagagcactccatgccaaaaaacagcatggtctgctgagcacattaaggagcagagagggctcagaagaattaaacggccaatggrgtggtgacagaggtgagctctttccccctcggacagcttggcatggtgactaccaatgaggtttaattgacattaagagcagctcaccatttttaaagag

SEQ ID NO: 531491 - DNA, 201 bp, Homo sapiens
gttgggacactgactcactgcattagtaccttctagactatgagcaggggaatcgaggaacctctcagggctttgtgttgggacgctgacacactgcattrgtactttctagactgtgagcaggggaatcgaggaacctctcagggctttgtgttgggacgctgacacactgcattagtactttgtagactgtgagcaggg

SEQ ID NO: 531492 - DNA, 201 bp, Homo sapiens
gaagtttgtgcatgtgttttttgtttgtttgtttgtttgttttttgttttttttgtgacagagtctcgctctgtcgcccaggctggagtgcagtggcgcartctccactcactgcaacctctgcctcctgggttcaagcgattctcctgcctcagcctcccgagtagctgggatgacaggcgggcatcaccacgcccagct

SEQ ID NO: 531493 - DNA, 201 bp, Homo sapiens
ttctccagggccactttaattgattctaaaatgtacattatttctcatttttaaaaaaaatctctaaaatcagggtacatcttaaaagcaatataatgccrtggtttaattggcacatgatttagtgatacataaaataaaggcacctcttgcagtggcatcttcgatttgaagaagtataatattctacgaatatacaaa

SEQ ID NO: 531494 - DNA, 201 bp, Homo sapiens
atcagccgtttgggcacctggggacttctgagcccacagcgtcatccagcagaccgtctgcggaggttccttcctgtgagggccgcactcgagggggtgtrttgggtgggatcgtatcactggaatgagtgaacatcgttagagggagctcccacagctatgcgtgtgaccgtgtggctcgccgctgaaaaatgctgctca

SEQ ID NO: 531495 - DNA, 201 bp, Homo sapiens
tatcactggaatgagtgaacatcgttagagggagctcccacagctatgcgtgtgaccgtgtggctcgccgctgaaaaatgctgctcacatagcagaacttygatgcaatcctttttggatttctaaggggaaattttaagaccgataggaggaataggctggggttgaataagtttggttcttatttttaaattagctcat

SEQ ID NO: 531496 - DNA, 201 bp, Homo sapiens
gcagctttgaaatctggactgcagggatatccaaaacaacaactgcatgtttctaagggagtcgactctccttagaggagttcttgtacaatagccctggrcaaaaacagaacttgccctattttttatactgaaaaggacagctggacaaaatactgaacgcaatttttcccctaagaaaaagcattatttccctaaaat

SEQ ID NO: 531497 - DNA, 201 bp, Homo sapiens
tacacagttccccaacaagtgctgctcaaaacctggaactaatcagaaggaagcaccagccttgactgttagtgggacacggggaagatggctgtgaaccraatatgcggtgcctttgggggagaatggttttagtatttagtaagtgtcagtatgtaagttttatgttgaaaaatgaactaagtcacaacaaggtctata

SEQ ID NO: 531498 - DNA, 201 bp, Homo sapiens
tagtaatggtgcctgacataacccacagccaaaggccttggccttgctgtgtgtatttcaggctttttcttcccttttctttttttttaagtaataagatrttacagttatagctgaagcctgatcctgttcccttttctccctctcgtcccaagcatcaccactgtcccaaatctgctccttcttcccacatctttgcag

SEQ ID NO: 531499 - DNA, 201 bp, Homo sapiens
aatttcttgcttgttatctccaaatccattctgctttgccatgtttcgtgacatgggaactggactctgtcaacagttttcctttgcctgctggcgaggtrttaggctttgtcaacagagtgctggagggacatggcaaggtcatggtgggaggagggcgtcctttcccagtgtgctgattttcactggtgagtgagtatc

SEQ ID NO: 531500 - DNA, 201 bp, Homo sapiens
tgctgtagctctcacacggggaccgaatgctcttgtgtcgtaaatccttccttttgcttcctcgtgttggatgtgtttagtggttttcatcttctggtcastatttcattctaggtttatcccctttaaattataaattaaatgaattcttcgcttttcctaccagcaactacccaccaagttctaccatgtgttaattta

SEQ ID NO: 531501 - DNA, 201 bp, Homo sapiens
ctccaaccacacacaccctgcagggagtttctccaccacgtggtgggctgctgccctgggccagctctggatcacgccctctgacaagcatgtttgccacyggcatgctgtgtgttcctgtggagctgtgccctttctgaagagtctgaatctcagctttggggttgggggaggctctcctaagttcttagttcctccctc

SEQ ID NO: 531502 - DNA, 201 bp, Homo sapiens
agcaactacccaccaagttctaccatgtgttaatttaatcaacagttatttattgagtacttattacatgttgatttcctgttctcaacattggaatgaaracagcttagggttctgctttcatgaagcttgcatgctcttaggtggagacagacagtaattaagcagataaacaggaaattatgagctagtagtgggtcc

SEQ ID NO: 531503 - DNA, 201 bp, Homo sapiens
acaagaatcgcttgaacccgggagatggtggctgcagtgagctgagatcgtgccactgcactccagtctgggcgacattctggaactctgtctcaaaactaaaaaaaaaaaaaaaaaaaaaaaaaaatctcctgtgggacttcagtctgtggaggttattgagtgatggcacagaaaggccaatcccaataaaagaaaatg

SEQ ID NO: 531504 - DNA, 201 bp, Homo sapiens
caagctgggcgggggccagtacggggaggtgtacgagggcgtgtggaagaaatacagcctgacggtggccgtgaagaccttgaaggtaggctgggactgcsgggggtgcccagggtacgtggggcaaggcgtctgctggcattaggcgatgcatctgcctggaagtctacctcctgcctgctgtccgagggcttcattggc

SEQ ID NO: 531505 - DNA, 201 bp, Homo sapiens
atatagtaacttaataagtgaaaaaaacatcttggaccaataaggatggaagaaaagtatcggaaaactagtcagaattaaaataaggactaaatcacgacttttatttctgtgatttctttttgtatttttgaagctcttttcttaggtcagggccaccatggctttttgttgcattgatctctttatcattatatgctg

SEQ ID NO: 531506 - DNA, 201 bp, Homo sapiens
ttccttgctctgagtctactttgtctgataggcacttcagctttcttttgatcacgcttgcataatacaccttttcccatccttttactcgtagcctgccygtgtcattgccccagtggggaactgctgttgctctttacttggagccaggctcatggtaagaggatggggactttcttggttctcttagtctgactccat

SEQ ID NO: 531507 - DNA, 201 bp, Homo sapiens
cacccccaggagcagcagatctttgcctgggtcccggggacagggaaggtttcttgcccttcccccagtggattacggcttttgcattaggtctgagagasgggctcaggaaggaggcaagattttacccgagtccggtattgaggggtgctctctccagcctcgtgctctgctcccagtcgtcgccacgagcacctggta

SEQ ID NO: 531508 - DNA, 201 bp, Homo sapiens
attaggtctgagagaggggctcaggaaggaggcaagattttacccgagtccggtattgaggggtgctctctccagcctcgtgctctgctcccagtcgtcgycacgagcacctggtagtggcccatggaaaagggtttgcaagtgagttcagacaggaattctagtgttacaccagcccatgctcagctccataagaattca

SEQ ID NO: 531509 - DNA, 201 bp, Homo sapiens
aacaccagtactgatggctgctggatttttgtttctgtccctgtatgattcttagaagtggaaaaggagctggggaaacaaggcgtccgtggggctgtgastaccttgctgcaggccccagagctgcccaccaagacgaggacctccaggagagctgcagagcacagagacaccactgacgtgcctgagatgcctcactcc

SEQ ID NO: 531510 - DNA, 201 bp, Homo sapiens
tttttaaattttatttttaaattagtgaacagtaaaattgactttttcaatgtatggttttatgaattttaagacatttatagatttgtataactaccatygccaccacaggacataaaatatttccataatcccaataactttcttcgtgctattctgctctcctgcctcctggcaaccactgatctgttctcatcacta

SEQ ID NO: 531511 - DNA, 201 bp, Homo sapiens
agctccataagaattcattaaaaattgagatgttttcccgtcacctgttgacatggcagcctcatcttcctcctgtgctctgtgaagggtcacagggtttrcgtgtcccatttctccttggagggatttgtcactgattagaattcagttcacctgatggccttgtggcctcagctctctgattagctcaagaaaagttag

SEQ ID NO: 531512 - DNA, 201 bp, Homo sapiens
tcagttcacctgatggccttgtggcctcagctctctgattagctcaagaaaagttaggattttgttgattatctggctttttctttttgttgggttgaaadttctcttatggctttctgcatcttaagcaaggggagtagaactctatttcttcacctgtccctcagcagaattatgtaagtaaaataaaatttaggttcc

SEQ ID NO: 531513 - DNA, 201 bp, Homo sapiens
ttcgagtcatcaatttttaacgtattgctacattacatttgctttaccatttccccccttctatatgtgtatgggtataaaatttgtttttcggaatcatytgggagtaggtcacaacattttgtccttttatcccttaatatttcaagtgtatgttgtaagaacaaggatcttctcttatgtaactatagtataattatt

SEQ ID NO: 531514 - DNA, 201 bp, Homo sapiens
ggccaaggctgggtcccaagcaactacatcacgccagtcaacagtctggagaaacactcctggtaccatgggcctgtgtcccgcaatgccgctgagtatcygctgagcagcgggatcaatggcagcttcttggtgcgtgagagtgagagcagtcctggccagaggtccatctcgctgagatacgaagggagggtgtaccat

SEQ ID NO: 531515 - DNA, 201 bp, Homo sapiens
tttcttttctttttttgagacggagtcttactctgttgcctaggctggagtgcagtggcatgatctcagctcactgcaacctccgcctccccaaattggckattctccttcctcagcctcacgagtagctgggattacaggcacccgccaccacacccagctaatttttgtatttttagtagagatggggtttcgctgtgt

SEQ ID NO: 531516 - DNA, 201 bp, Homo sapiens
agcccagccagccgggagagggcctcaaaaagcccgtgctcccggccactccaaagccacagtccgccaagccgtcggggacccccatcagcccagccccygttccctccacgttgccatcagcatcctcggccctggcaggggaccagccgtcttccaccgccttcatccctctcatatcaacccgagtgtctcttcgga

SEQ ID NO: 531517 - DNA, 201 bp, Homo sapiens
ccctgtatcaacattttaatgctgagaaaatggaagagagagaggttaagtgactgacctggcatcacacagccaggagtggcagcatcaggatttgaacyggggcactcagctccaaagctcagctcttcttttttaaaattgaacccagattcttatttctcaaataccataaaatatttacataagccacagttatgc

SEQ ID NO: 531518 - DNA, 201 bp, Homo sapiens
ctccagtggtttttttttttttgctttttgtttttgtttttgtttttttgagacagagtctcactctgtcacccaggctggagtacagtggcgtgatctcrgctcaccgcaagctccacctcccgggttcaagcaattctcctgcctcagcctcccgagtagctgggactacaggtgcctgcgaccacgccggctaatttt

SEQ ID NO: 531519 - DNA, 201 bp, Homo sapiens
atttttaacgtattgctacattacatttgctttaccatttccccccttctatatgtgtatgggtataaaatttgtttttcggaatcatttgggagtaggtyacaacattttgtccttttatcccttaatatttcaagtgtatgttgtaagaacaaggatcttctcttatgtaactatagtataattattaactttaggaaa

SEQ ID NO: 531520 - DNA, 201 bp, Homo sapiens
cagagtctcactctgtcacccaggctggagtacagtggcgtgatctcggctcaccgcaagctccacctcccgggttcaagcaattctcctgcctcagcctyccgagtagctgggactacaggtgcctgcgaccacgccggctaattttttgtatttttagtagagacagggtttcaccatgttagccaggatggtctcgat

SEQ ID NO: 531521 - DNA, 201 bp, Homo sapiens
tttcggaatcatttgggagtaggtcacaacattttgtccttttatcccttaatatttcaagtgtatgttgtaagaacaaggatcttctcttatgtaactayagtataattattaactttaggaaatttaactttgatagaatatttttatttaacctaaaatccgtattccaatttcctcaattctcccagtaatgtcctt

SEQ ID NO: 531522 - DNA, 201 bp, Homo sapiens
atggagcagttattgtatagaatgtttttcaattttggctggaacatttcagtttcagtttgtttgatgtttccttactattagattcaagttacacattkctgttttagaatattacagaagtaatgctgtatctttctcatggtgttacatccatttgcataccttgtctttctgcctgtcgttaatgatattaatttt

SEQ ID NO: 531523 - DNA, 201 bp, Homo sapiens
cttccctaactcagagtttccatagatcattgcagccaatatgaacacaccaaaaaaggacatacacacacacacacacacacaccctgaaacaagatatsatgcgcaagagtcagtagaaacaatagttgttcctgacaatttcagatattggaaatattgaatatagactataagttaatttactacctttggggaagc

SEQ ID NO: 531524 - DNA, 201 bp, Homo sapiens
cgcgccgcacccccagggtgacacaggcgctggggaagacgcacgggcggctcactgcacaaaacctcgttggaatatttgtgctctgccgacgttcagcygcgggtaaaatgaggcctgtatgggatgggtgtgtgcgtgtgtgcacatatgcacatgtatgtatgagagggagaatgtgattattttaagtggatacct

SEQ ID NO: 531525 - DNA, 201 bp, Homo sapiens
ttcctgacaatttcagatattggaaatattgaatatagactataagttaatttactacctttggggaagcaaaagaaggaattgaaaatatgaggaaagaragagatacatcaaaaacaaccaggcagttttatttttaaaaatcaaatataatgttcagaagtaaaaagcataatcattgagataaaaaatttatggatt

SEQ ID NO: 531526 - DNA, 201 bp, Homo sapiens
tggggccaggtctgcgtctgaattctgtggcagcctctccctgcgtaaattcaagttcactggcttgagaagaagaaaagagcctggccatgtccctcccrcacgagcacagtctcaggatgcaggtgcttgggaccatgttggaagttgggcccaggactgaggagcagagtcagaatccttcagaaggctttttcttta

SEQ ID NO: 531527 - DNA, 201 bp, Homo sapiens
gcccataggccatgtctaaatatttaaaagttacaaatgtgacagactgtgaaataaaatatgtctatactcctaccttgacaaatatgtctctctgatamtctagaagatgaggtttaaatgtagagttcttgaactccacagagctctatgctggcacatagcagcacagagtgagccagaccttcgcctgtggccccc

SEQ ID NO: 531528 - DNA, 201 bp, Homo sapiens
gctttgttttattttgtcccatcaagtctgaataggacaagtggagatgcactctgatagaagtttcttgcaatcaaggactgggctcagtgtttgtctcygtgcctggcatagagtagcaataactgcacttactattctcgacacttcaatcaaagcacttagcatattaattaattacactcacagcaaccctaagag

SEQ ID NO: 531529 - DNA, 201 bp, Homo sapiens
gagacagggtttcattctgttggccaggctggagtgcagtggtctgatcatagctcattacagccttgaacttctggactcatgcagtcctcctgagtagytgggactacattaattaccacacctagtattttttttttatttttattttttgtagcaacagggtctcgctgtgctgcccaggctgggtttgaactcatg

SEQ ID NO: 531530 - DNA, 201 bp, Homo sapiens
tcttggcctcccaaagtgctgggattacaggtgtgagccaccacgcccagcctagtttattcttttaatagtgcttgggggaggtagcctctaagatgacycccagtgattccccacctcctggtattcctggctcttttgcaaatgtcaattctaatttggtcctaaggtctctctcttgagagtggctatagattctag

SEQ ID NO: 531531 - DNA, 201 bp, Homo sapiens
gtattttttttttatttttattttttgtagcaacagggtctcgctgtgctgcccaggctgggtttgaactcatggcctcaaacactctttctgcctcagcstcccaaagtgctgggattacaagcatgagccactgtgtcgggccagcattccactttgataatagacctgtggaaaaggcccatgcaagtcctgaatgtg

SEQ ID NO: 531532 - DNA, 201 bp, Homo sapiens
ctcctggtaccatgggcctgtgtcccgcaatgccgctgagtatctgctgagcagcgggatcaatggcagcttcttggtgcgtgagagtgagagcagtcctrgccagaggtccatctcgctgagatacgaagggagggtgtaccattacaggatcaacactgcttctgatggcaaggtaggggacccttggcagggggcgct

SEQ ID NO: 531533 - DNA, 201 bp, Homo sapiens
cttaagagtccataaagagaagggaggagttaacattgactgaggtattgctataatacctgcatctttgcattaaagaaagggaggcataaagagatctygcccgatgtcaacctagtgagtcactgatggaataggcttggatcccacagtttattctactgcaccaggctgtagttgaggtacagtgttgataggtgg

SEQ ID NO: 531534 - DNA, 201 bp, Homo sapiens
tccagaaatgtgggatactcagcactggagacatttgggctggaattcttgtttccattcttttcttaccatatgaccaagtaagtccaagaaagtagatwggattctgagtgggcagtgaaggtggaaatgtggtcctaaagagaacgggcaaattaagaaaagattgttttaagacagtcaaattgttttgcctgttga

SEQ ID NO: 531535 - DNA, 201 bp, Homo sapiens
ttctgatagtcagttcagtagacagtagcattttttaagtcaaaaagaggcttagtgatgtaggccaaggtcaaggctctgtgtcatggggctctccccarggctcagtgccacggcacttcagacttgaccccagactgaaaagatgagaggacctgtagaagtcacggcctgtctgtcccgggcccatgctcctatctt

SEQ ID NO: 531536 - DNA, 201 bp, Homo sapiens
cagcctgggcaacagagcgagactccatctcaaaaataaataaataaataaaagacaaaataaattttctcatccttttttgtcatcttcatcacagctgsctctctaatgttcgttgaatgaaagggccattcccaaatctctgataagtcaagcatttttaggagagctaaaccagccaaatgagaccaggaagtgaag

SEQ ID NO: 531537 - DNA, 201 bp, Homo sapiens
tgattgagggaaagctctgaaactggtaagagttaaatgtatgtttgtgttatgttgatacgagattcctctgagatgctctttagtccaggcaggtttakggctcacacagcgttcctagggtctcattcttctgcacaggcaggcagctcccgagccagccagtctggacccaaatgccacctgtgctcttggctggtc

SEQ ID NO: 531538 - DNA, 201 bp, Homo sapiens
ttaggaaaaccacaaacggagcccctgaaagcctcacgtatttcacagagcacgcctgccatcttctccccgaggctgccccaggccggagcccagatacrggggctgtgactctgggcagggacccggggtctcctggaccttgacagagcagctaactccgagagcagtgggcaggtggccgcccctgaggcttcacgc

SEQ ID NO: 531539 - DNA, 201 bp, Homo sapiens
cccgtgccgcgccccgacagcttccctcagccccaagccgccccttattccggatcccggccccaactttggccacggagcctcccattcaaatccctccyttgctgtcaaggggtctccccttcccccaaggtggctcccgcgagcctctaatgccctgacttcttccaatgtcacctacggcccccttagtctcagctc

SEQ ID NO: 531540 - DNA, 201 bp, Homo sapiens
aggaatttggagatttttagtagttacacaagaatcaatgaaaaagaacgaagctggtttccaaagctgatatgtctgatttggttcctttcttctcaggygaaaagctccgggtcttaggctataatcacaatggggaatggtgtgaagcccaaaccaaaaatggccaaggctgggtcccaagcaactacatcacgccag

SEQ ID NO: 531541 - DNA, 201 bp, Homo sapiens
aactgacatttgagctgggggactaggagaggaagacccaccctcaacgtgggtgggcaccatccagttggttgccagtgcagctagaacaaagcaggcaraagaaggtgggataagcttgctgagtctcctggcttccttccttctcccatcctggatgcttcctcccactcctcctgcccgtccacataagactccagg

SEQ ID NO: 531542 - DNA, 201 bp, Homo sapiens
cacagccacccttttttttttttttttaactgtgtatttggcctgaggtccaaatatggtgcacagtgtatctgctgatctgttaagtctcctctataagmcccctctccatgtctttatttcccttgctgtttattgaagaaaccatccttagagtttcgtacgttctgggttttgctcattgtctcccatggtgtgatt

SEQ ID NO: 531543 - DNA, 201 bp, Homo sapiens
ttctcagagtacagtttaatttactttgtggacatcattaacaaaaggcagagaaagacattggaccatactaattgtgggacttagaaaagctatattastgatggttattaagtatcgcttgcagtggagtctgtaacatattcctatgaagttaatctaactactgagatagtgggagtgcagaggaggcatgctgtg

SEQ ID NO: 531544 - DNA, 201 bp, Homo sapiens
gttcatcacataagttttcatgtgttattatcaaagtgtttgatttccaagtatttgggaattctagatatcttggtttctaatttaatttcattgtggtyagagaacatcttctgtagaatttcagtcttctgacatttaccaagactaattttatggcccagcatataacctgtcttagtgaatgttccatttgtagtt

SEQ ID NO: 531545 - DNA, 201 bp, Homo sapiens
tgcatagaaagtgcttgaggcattgtaagtacacagtaagtgaagtgttgaccattattaatatcatgatgataaagtgtgtaacttattttataagtacmatataattgaaatttgccaatagtaactcctcggagacttccagggaactctgtcaatcaaaaaaagctttgtgtaataatggacgctaccttgacagag

SEQ ID NO: 531546 - DNA, 201 bp, Homo sapiens
tactgagagagtgatgctgaagatcaacagctataatgatatattcgtttattttttcctttaattctatcacttcttttactcttaaaagcatttattcygccgggcgtggtggcacacgcctgtaatcccagcaatttgggaggctgaggtgggtggatcacaagttcaggcgttcaagaccagcctggccaagatggt

SEQ ID NO: 531547 - DNA, 201 bp, Homo sapiens
cagtaagtgaagtgttgaccattattaatatcatgatgataaagtgtgtaacttattttataagtaccatataattgaaatttgccaatagtaactcctcrgagacttccagggaactctgtcaatcaaaaaaagctttgtgtaataatggacgctaccttgacagagtgtgttagtcaagagaggatacttatttataaa

SEQ ID NO: 531548 - DNA, 201 bp, Homo sapiens
attacaggcgtgagccaccatgccaggcctcatctcctcttaaatgtctttagagcaaagattgtgtcataaccccggcacctagtatcatgcctattacrtagtagattttcaataaatgttaaatgcatgaatgaataatgagtaaagaaactgggtaatgtttttagcttggaggagagaagcctaagggaagatgtg

SEQ ID NO: 531549 - DNA, 201 bp, Homo sapiens
atagtcagaggagtacgtggagtaaggcaggaaagcatgtttgggcttcctcaaagatgaccttgagtaccaagccaaagattttggagatatttggtggrcattgggcattatacatacccagtaagatattagcaccatgaaagctccacaaaagtgtcctgagcgcctagaacagtacttggcacatggtagatcttc

SEQ ID NO: 531550 - DNA, 201 bp, Homo sapiens
ttaaggtattatttacatataatatccacccatttttaagtatacattttggtgaattactgtgtgtcaatcatgtaacctcaaacacagccaagattatraaacagttctctacgctgctttggtgatggatacaccaaaatctcagaaaccaccactacagaacttattcatgtaaccaaacaccatgtgttccccaaa

SEQ ID NO: 531551 - DNA, 201 bp, Homo sapiens
aaacacttatccactttctgtgtctgtagttttgtcttttcaagaaattcctatgaatggaaccatataaaagttatataaaaatcatagacttttgtatktgatttcttttactcttagcatcatttttttgagatttactcctgttgtatgtatttacatttcctctttttcttggtgagtaatattgcattatatgaa

SEQ ID NO: 531552 - DNA, 201 bp, Homo sapiens
ggtctatgaactcatgcgagcatgtaagccttcctcagcctgttctcacgagtatatgtgggcattccaggaaattcaactgtgcaggagtgtgtacacaragttgaaagtttttccatgagctctctccattccagttcttcagatgcagctaatgtagccatttgatacctattgacctttatttacagataaatagta

SEQ ID NO: 531553 - DNA, 201 bp, Homo sapiens
caggaaattcaactgtgcaggagtgtgtacacaaagttgaaagtttttccatgagctctctccattccagttcttcagatgcagctaatgtagccatttgmtacctattgacctttatttacagataaatagtatgtgcgtgacttgtcttttaaagcaaaaatggtattgatagataccaaacctgggtgtattcctaaa

SEQ ID NO: 531554 - DNA, 201 bp, Homo sapiens
ttgttgttggcttttgttttgtttttgccccttatagatgtttcactgtcttttggctcatgtgttccgatgagaagtcagcccttcattgggtccttgtkctcatctgtttaatacctgttcccatacctgccctttctctctcactgcttttaagatttgctctttatctttggttttggagtatttgactatgaagtg

SEQ ID NO: 531555 - DNA, 201 bp, Homo sapiens
ttatactgcttcattgagatgattataatagctgcttaaaatctttgtctattccagcattttgttgatctgcaggttagactggcagttgaactaatttrtcccactgtcttgcttctttgtatggtgggtagttctggattgtttactggactgtatgaatgtcaaattctggatattctggattctgttacttttctc

SEQ ID NO: 531556 - DNA, 201 bp, Homo sapiens
tggagtattgctttgggaaattgctacctatggcatgtccccttacccgggaattgacctgtcccaggtgtatgagctgctagagaaggactaccgcatgragcgcccagaaggctgcccagagaaggtctatgaactcatgcgagcatgtaagccttcctcagcctgttctcacgagtatatgtgggcattccaggaaat

SEQ ID NO: 531557 - DNA, 201 bp, Homo sapiens
ctaaacagcagaatacacgttcttttcaagtgcatatggaactgtttccaagacaaatcattttctgggccattttaaaagcctcagtagacccggcgggktggctcacgcctgtaatcccagcactttgggaggccaaggcgggcggatcacctgaggtcaggagttcgagacaagcctggccaacgtggtgaaaccccg

SEQ ID NO: 531558 - DNA, 201 bp, Homo sapiens
gcactagtcaccgacagcggccttgaagacagagcaaagcgcccacccaggtcccccgactgcctgtctccatgaggtactggtcccttccttttgttaaygtgatgtgccactatattttacacgtatctcttggtatgcatcttttatagacgctcttttctaagtggcgtgtgcatagcgtcctgccctgccccctcg

SEQ ID NO: 531559 - DNA, 201 bp, Homo sapiens
ctgtggaagaagtccagcacgctgaccagcagccgcctagccaccggcgaggaggagggcggtggcagctccagcaagcgcttcctgcgctcttgctccgyctcctgcgttccccatggggccaaggacacggagtggaggtcagtcacgctgcctcgggacttgcagtccacgggaagacagtttgactcgtccacattt

SEQ ID NO: 531560 - DNA, 201 bp, Homo sapiens
caacagaaaattattcttccactgttctggaggccagaaatctgaaattagtatcactgggccaaaatcagggggacagcagggccttgcttcctccagaractccaggagagaaatacttcctggcctctctggcttctggaggccacctgcattgcttggtttgtgaccccttgtatcactctgaccccttgttccatt

SEQ ID NO: 531561 - DNA, 201 bp, Homo sapiens
agacattctgctatagtagctaagctcatgaggtgattttttttttttttttttttgagacggagtttcgctcttgtcgcccaggctggagtacaatggcrcaatgttggctcacttcaacctccacctccctggttcaagcgattctcctgcctcagcctcccaagtagctgggattacaggcatgcaccaccacgcccg

SEQ ID NO: 531562 - DNA, 201 bp, Homo sapiens
ggactgggaaaaatatatttgtaaatgcagttcttgctgtcactgtctctctggggttttacaatccatattcctgccagcatctaacgtcttttcaaatkcttaatgtctataacaggacatgatgacattcatcgttttgacttgttgcagcaaaagatggttagcaggattggaatgttgctttcattctagactttt

SEQ ID NO: 531563 - DNA, 201 bp, Homo sapiens
gatctgacttgggtttcatctgtccaggttggcagtggaatccctctgaccggccctcctttgctgaaatccaccaagcctttgaaacaatgttccaggartccagtatctcagacggtaaagtacccatcccggggtacctgcagtggggtgaaagggcagccatgtgggactgcagcctgggtcattcggttcacttcc

SEQ ID NO: 531564 - DNA, 201 bp, Homo sapiens
tcctgagaccagaaagctgggcagaggtgtggagtattgtgctttcttgtctgctgcagccctgcagagttctaagaaatgctaagggctgtttctccggyatccacgtgccttttctttagttgtatgcagatgagcactgttaccttacaaagaaagagaaccaccacaccaagccaacaccagtactgatggctgctg

SEQ ID NO: 531565 - DNA, 201 bp, Homo sapiens
tctgttttgtttgtttgtttgtttgagacagagtctcgcactgtcacccaggctggagtgcagtggcacagtcttggctcactgcaacctctgcctcctgrgttcaagtgattctcctgcctcagcctcccgagtagctgggactacaggcacatgccaccactcccatctaatttgttttgtgtttttagtagagacggg

SEQ ID NO: 531566 - DNA, 201 bp, Homo sapiens
cattgatctccacctgaccccaccgttgacacgtggggcttattacaattcaaggtgagatttgggtggggactcagccaacccatattggaggtgggggrtaggccaagcatctgggttcacagaggatcctggggatggcaatggtggactccattctaatggactgcagactgggtacatgtgaagggactggacaaa

SEQ ID NO: 531567 - DNA, 201 bp, Homo sapiens
gatgcacgcctgtagtcccagctacttggtaggcagaggtgggaggatcacttgagccccagaagttcaagaccagcctggacaacaaagtgaagtgaagmctgtctcaaaaaaattaattatgacataaaatgttatatgtcttaatttacacaaatataagtatatacttttaaatcccattcttacacacaaaagcta

SEQ ID NO: 531568 - DNA, 201 bp, Homo sapiens
ccgttgacacgtggggcttattacaattcaaggtgagatttgggtggggactcagccaacccatattggaggtggggggtaggccaagcatctgggttcayagaggatcctggggatggcaatggtggactccattctaatggactgcagactgggtacatgtgaagggactggacaaagccctacttcttgaagatttat

SEQ ID NO: 531569 - DNA, 201 bp, Homo sapiens
gagccccagaagttcaagaccagcctggacaacaaagtgaagtgaagactgtctcaaaaaaattaattatgacataaaatgttatatgtcttaatttacamaaatataagtatatacttttaaatcccattcttacacacaaaagctagcatactgtgtaaagtattctggacctacacacctttatttttttaacataac

SEQ ID NO: 531570 - DNA, 201 bp, Homo sapiens
ttcatttacgcccgtcagtttcatctgaggggtattttgatagtgatctcttggtgagccgagggtgtcaattaactgctcagtgctgaaactgagtggtrcataattcattgcaatttcactctcctggcctccttccactagattaaagttttgggagggctttggtgttccctgattcagatgtcccgcgtgctgcct

SEQ ID NO: 531571 - DNA, 201 bp, Homo sapiens
tcttgtagctctaaactccagccatactctgatgactcccacatttataaatcccagatttgtatactcaactacttatctaacaggtcaaaactgaactsttaaaattcttacatttgtgtccacacatgattggctaagctaatggggctcagatttaccctgtcacctgaaacaactgtaaaactggagaaaatatgt

SEQ ID NO: 531572 - DNA, 201 bp, Homo sapiens
actgagtggtgcataattcattgcaatttcactctcctggcctccttccactagattaaagttttgggagggctttggtgttccctgattcagatgtcccrcgtgctgccttgggttctgataaatgcatactggtacctctgttgagttacaggtgccaacagaaaacctcttcttgcaagctgacctctgagggagaat

SEQ ID NO: 531573 - DNA, 201 bp, Homo sapiens
caacatcagtaaagtgagggacaacatcaggtagccaaatgtgtgtggaattggagtccctgaaggaagggagggtatgagggaccaaaaaatatatatakagagagaaaaaaaaatggctgaaaaatttccaagtgtaatgaaagcagtaaacacacagatccaagaatttcaaggaactccaagcacaggaaacatgaa

SEQ ID NO: 531574 - DNA, 201 bp, Homo sapiens
agcaaatgaggaacaagtttgccttccgagaggccatcaacaaactggagaataatctccgggagcttcagatctgcccggcgacagcaggcagtggtccrgcggccactcaggacttcagcaagctcctcagttcggtgaaggaaatcagtgacatagtgcagaggtagcagcagtcaggggtcaggtgtcaggcccgtc

SEQ ID NO: 531575 - DNA, 201 bp, Homo sapiens
gatcacctgaggtcaggagttcgagacaagcctggccaacgtggtgaaaccccgtctctacgaaaaataccaaaaattagctgtgtgtagtggtggatacstgtaatcccagctactcaggaggctgaggcaggagaatcacttgaacccgggaggcagaggttgcagtgagccgagattgcactactgcactccagctgg

SEQ ID NO: 531576 - DNA, 201 bp, Homo sapiens
gtgtgtagtggtggatacctgtaatcccagctactcaggaggctgaggcaggagaatcacttgaacccgggaggcagaggttgcagtgagccgagattgcrctactgcactccagctgggcaacagtgagactccgtctcgaaaaaaacaaacaaacaaaagcctcagtgaatgtaagctgattcaatttgtagaaagtat

SEQ ID NO: 531577 - DNA, 201 bp, Homo sapiens
ctgaggcaggagaatcgctttaaccagggagtcggaggttgcagtgaaccgagatcgcgccattgcactccaccctagcgacagaacgagactccgtctcaaaaaaaaaagaaagaaagaaagaaaaagaaaaggccagtctggaaatcaatgaaacagaaaaccagtacagaaatcatgaaaccaaaagctagttatttg

SEQ ID NO: 531578 - DNA, 201 bp, Homo sapiens
cctcccccacaaggaagaagctggaaagggcagtgccttagggacccctgctgcagctgagccagtgacccccaccagcaaagcaggctcaggtgcaccarggggcaccagcaagggccccgccgaggagtccagagtgaggaggcacaagcactcctctgagtcgccagggagggacaaggggaaattgtccaggctcaa

SEQ ID NO: 531579 - DNA, 201 bp, Homo sapiens
tggagtgcagtgcgcgatctcagctcactgcaagctctgcctcccgggttcatgccattctcccgcctcagcctcccaagtactgggactacaggcacccrccaccacccccggctaattttttgtatttttagtagagacgaggtttcactgtgttagccgggatgctctcactctcctgacctcgtgatctgcctgcct

SEQ ID NO: 531580 - DNA, 201 bp, Homo sapiens
acattgtagcatttgtaacttacatagaagtaaagtttatgacaatagcagcacaaagactgggagtgggagaacaaatatactcttgtaagctttttacrctacatgtgaagttgtataatgtcaattgaaggtagactgtgataagttaaagatgcatatgataaaatctatagtagcagagttatagctaatgagcca

SEQ ID NO: 531581 - DNA, 201 bp, Homo sapiens
gcaccagggggcaccagcaagggccccgccgaggagtccagagtgaggaggcacaagcactcctctgagtcgccagggagggacaaggggaaattgtccargctcaaacctgccccgccgcccccaccagcagcctctgcagggaaggctggaggaaagccctcgcagagcccgagccaggaggcggccggggaggcagtc

SEQ ID NO: 531582 - DNA, 201 bp, Homo sapiens
aggggaaattgtccaggctcaaacctgccccgccgcccccaccagcagcctctgcagggaaggctggaggaaagccctcgcagagcccgagccaggaggckgccggggaggcagtcctgggcgcaaagacaaaagccacgagtctggttgatgctgtgaacagtgacgctgccaagcccagccagccgggagagggcctca

SEQ ID NO: 531583 - DNA, 201 bp, Homo sapiens
gatgctgtgaacagtgacgctgccaagcccagccagccgggagagggcctcaaaaagcccgtgctcccggccactccaaagccacagtccgccaagccgtyggggacccccatcagcccagcccccgttccctccacgttgccatcagcatcctcggccctggcaggggaccagccgtcttccaccgccttcatccctctc

SEQ ID NO: 531584 - DNA, 201 bp, Homo sapiens
cgaggcacagtaacgcctccccccaggctggtgaaaaagaatgaggaagctgctgatgaggtcttcaaagacatcatggagtccagcccgggctccagccygcccaacctgactccaaaacccctccggcggcaggtcaccgtggcccctgcctcgggcctcccccacaaggaagaagctggaaagggcagtgccttaggg

SEQ ID NO: 531585 - DNA, 201 bp, Homo sapiens
tgcttgtcgacctgcttcagtagtagcattgacagaacagtctctgtgtactctgtcccctcagtgctttctgcatatgtgttgctcactcatcactatcygcatgttcgtggtctctggaaagaatcaactataatgatcagaataattgcctggtaggacgtatttcctttgagttcagcaagacgtgccccctcacat

SEQ ID NO: 531586 - DNA, 201 bp, Homo sapiens
ctgttagatcaggaattcagaagtgggttagctgagtggttctagcttgtggtctctcatgagattgtagacaagatttcagctgggacttcagagtcatytgaaggcttaactggggctggcaggcctgcctccaagatggctcactcacagggctggcgagcagtgctggcagttgacaggaggccacagttccttgcc

SEQ ID NO: 531587 - DNA, 201 bp, Homo sapiens
caagaaccgcatttcgggaagggcatgcacgggcatgcacacggctggtcactctgccctctgctgctgcccggggtggggtgcactcgccatttcctcaygtgcaggacagctcttgatttgggtggaaaacagggtgctaaagccaaccagcctttgggtcctgggcaggtgggagctgaaaaggatcgaggcatgggg

SEQ ID NO: 531588 - DNA, 201 bp, Homo sapiens
tttccatctgtccacatccccagagcccagctcttgctctcttgtgacgtgcactgtgaatcctggcaagaaagcttgagtctcaagggtggcaggtcacygtcactgccgacatccctcccccagcagaatggaggcaggggacaagggaggcagtggctagtggggtgaacagctggtgccaaatagccccagactggg

SEQ ID NO: 531589 - DNA, 201 bp, Homo sapiens
cgacatccctcccccagcagaatggaggcaggggacaagggaggcagtggctagtggggtgaacagctggtgccaaatagccccagactgggcccaggcasgtctgcaagggcccagagtgaaccgtcctttcacacatctgggtgccctgaaagggcccttcccctcccccactcctctaagacaaagtagattcttaca

SEQ ID NO: 531590 - DNA, 201 bp, Homo sapiens
ccggggtctcctggaccttgacagagcagctaactccgagagcagtgggcaggtggccgcccctgaggcttcacgccgggagaagccaccttcccaccccytcataccgcctcgtgccagcagcctcgcacaggccctagctttacgctcatcacctaaacttgtactttatttttctgatagaaatggtttcctctggat

SEQ ID NO: 531591 - DNA, 201 bp, Homo sapiens
gctcaaacctgccccgccgcccccaccagcagcctctgcagggaaggctggaggaaagccctcgcagagcccgagccaggaggcggccggggaggcagtcytgggcgcaaagacaaaagccacgagtctggttgatgctgtgaacagtgacgctgccaagcccagccagccgggagagggcctcaaaaagcccgtgctccc

SEQ ID NO: 531592 - DNA, 201 bp, Homo sapiens
agccaggaggcggccggggaggcagtcctgggcgcaaagacaaaagccacgagtctggttgatgctgtgaacagtgacgctgccaagcccagccagccggsagagggcctcaaaaagcccgtgctcccggccactccaaagccacagtccgccaagccgtcggggacccccatcagcccagcccccgttccctccacgttg

SEQ ID NO: 531593 - DNA, 201 bp, Homo sapiens
ccacgagtctggttgatgctgtgaacagtgacgctgccaagcccagccagccgggagagggcctcaaaaagcccgtgctcccggccactccaaagccacastccgccaagccgtcggggacccccatcagcccagcccccgttccctccacgttgccatcagcatcctcggccctggcaggggaccagccgtcttccaccg

SEQ ID NO: 531594 - DNA, 201 bp, Homo sapiens
tcctcatcttgatgctttttttccctttccagttcccatcagctacttccctacccctagtggtcctatgagtccttcagttctccccctttctccatgayacaccaggagccatgtcagatgtgatttctgacctgggaccctgaatggcacaaggagaagaagtacggaattgggggagggtataagagggtttaagat

SEQ ID NO: 531595 - DNA, 201 bp, Homo sapiens
catttggagggcacaaaagtgagaagccggctctgcctcggaagagggcaggggagaacaggtctgaccaggtgacccgaggcacagtaacgcctcccccsaggctggtgaaaaagaatgaggaagctgctgatgaggtcttcaaagacatcatggagtccagcccgggctccagcccgcccaacctgactccaaaacccc

SEQ ID NO: 531596 - DNA, 201 bp, Homo sapiens
tcagcgccttgatcaagaagaagaagaagacagccccaacccctcccaaacgcagcagctccttccgggagatggacggccagccggagcgcagaggggcyggcgaggaagagggccgagacatcagcaacggggcactggctttcacccccttggacacagctgacccagccaagtccccaaagcccagcaatggggctg

SEQ ID NO: 531597 - DNA, 201 bp, Homo sapiens
acgggctcatcaccacgctccattatccagccccaaagcgcaacaagcccactgtctatggtgtgtcccccaactacgacaagtgggagatggaacgcacrgacatcaccatgaagcacaagctgggcgggggccagtacggggaggtgtacgagggcgtgtggaagaaatacagcctgacggtggccgtgaagaccttga

SEQ ID NO: 531598 - DNA, 201 bp, Homo sapiens
cctccacctcccaaagtgctgggattacaggcatgagccactgcagtgtcctttcttgaggaatggtggtctattaggagaaaaaccaaaagataagaccygagaccaaggaaattgtagtctcaatgcaaagatacaatcagaacattgcacaagggggaaagaaatgtcatgctagtgtttgtattttaattgtctttc

SEQ ID NO: 531599 - DNA, 201 bp, Homo sapiens
attagccaggcatggtggcgtgcatctatagtcccagctacttgaggggctgaggctgaagtatctcttgaacccaggaggttgaagccgaagctgagatkgcaccactgcactccatcctgggtgacaaagtgagaccctatctcaaaaaagaaagaaagaaaggaagttagaaagtgggggagggagggaaggaggaag

SEQ ID NO: 531600 - DNA, 201 bp, Homo sapiens
gctttcctcagcagtctggtaatcctggttgtccattcatgcttaagaacatgggaatggaaggggtgttgggagtcctatatatgtggatggggttgtcyattggctggtttcagtattggactaatgagtagaggaatcaaggaacctctcagggctttgtgttgggacgctgacacactgcattagtaccttctagac

SEQ ID NO: 531601 - DNA, 201 bp, Homo sapiens
gattaaaatggctactgaggatgggcttcagtaagaggaggtctcccgaaggccttctctgccctgtgcctctgcagttccctgactccttgctgtgttcrtccctgcctttttggtagttgtgcccctgatgtcactcccctgtgtgttcagatcctacctgctggccaggtgcagtggctcacacctgtaatcccagca

SEQ ID NO: 531602 - DNA, 201 bp, Homo sapiens
ccagctgaacaaaagcattgaggggtgtattagtctgttttcatgctgctaataaaggtatacccaagactgggtaatttataaaggaaagaggtttcacygactcacagttccacatggctggggaggcctcacaatcatggctgaaggtgaatgaggagcaaggtcacatcttacttggcggcaggcaagagagcttgt

SEQ ID NO: 531603 - DNA, 201 bp, Homo sapiens
ccctgaatggcacaaggagaagaagtacggaattgggggagggtataagagggtttaagatgcgtgaaaaatgttgagtaggacatttcaagagatagttsaaataatatggtaccttttgtttacgtcaccacacttggcaaatttgatcgtatgacatctcatttgatgtctttgagatgacagatgttgtccctactg

SEQ ID NO: 531604 - DNA, 201 bp, Homo sapiens
aaatagtagattaatctcccttttgctgtccgtgagtcccttcccgtttcttcagcactgcttgatatgactggtatggaggcctaaagctggctggcctrgttagtgttacccaagtggtttcttgtgagcatccatttgcatgcagttgggccttttgtccattggtgaactgctccttgccttgaggtcctgtagcta

SEQ ID NO: 531605 - DNA, 201 bp, Homo sapiens
ttgttttgataaaatctggccttcaaatgatcgaatggccaggaaatacacatatttctatggtctaaggtgtcttaaacttggcctttaaaaaaagactytttcaaagcttgtgagcaaactaaatcagctagttcataaagcaaagtctcttgactatgacatagtctgctaactttatggatgtgggctcacaggtaa

SEQ ID NO: 531606 - DNA, 201 bp, Homo sapiens
cacgagtctggttgatgctgtgaacagtgacgctgccaagcccagccagccgggagagggcctcaaaaagcccgtgctcccggccactccaaagccacagyccgccaagccgtcggggacccccatcagcccagcccccgttccctccacgttgccatcagcatcctcggccctggcaggggaccagccgtcttccaccgc

SEQ ID NO: 531607 - DNA, 201 bp, Homo sapiens
agtccgccaagccgtcggggacccccatcagcccagcccccgttccctccacgttgccatcagcatcctcggccctggcaggggaccagccgtcttccacygccttcatccctctcatatcaacccgagtgtctcttcggaaaacccgccagcctccagagcggatcgccagcggcgccatcaccaagggcgtggtcctgg

SEQ ID NO: 531608 - DNA, 201 bp, Homo sapiens
ctatgtggattccatccagcaaatgaggaacaagtttgccttccgagaggccatcaacaaactggagaataatctccgggagcttcagatctgcccggcgwcagcaggcagtggtccagcggccactcaggacttcagcaagctcctcagttcggtgaaggaaatcagtgacatagtgcagaggtagcagcagtcaggggt

SEQ ID NO: 531609 - DNA, 201 bp, Homo sapiens
aaagtaattccctctcctattcattttccccacctagaggcaatcaccctggagttttatgtgtgtccttctagaaatactgtgtgcacatataagcatttattataacatgtgaattttgctctccagctttttgtgaatatgcatgtttatagcagtatctattcaccaggaccgcatttagctttgcaatattcggtc

SEQ ID NO: 531610 - DNA, 201 bp, Homo sapiens
aagtaattccctctcctattcattttccccacctagaggcaatcaccctggagttttatgtgtgtccttctagaaatactgtgtgcacatataagcatttattataacatgtgaattttgctctccagctttttgtgaatatgcatgtttatagcagtatctattcaccaggaccgcatttagctttgcaatattcggtct

SEQ ID NO: 531611 - DNA, 201 bp, Homo sapiens
tggccttgaagatagtggcatctctatttatgagtgtctttgtactccatttccagtaattggagactttttcaccgtagattcttggaaggtgacacaattttttttttttcctttttggttgagggagggggacagggactgtgtatcttcagaaaggttaatatttgaggccaaggcaggcagatcacttgaggtcag

SEQ ID NO: 531612 - DNA, 201 bp, Homo sapiens
gatctcgactcactgcaacctccgcctccagggttcaaatgattctcctgcctcagcctcctgagtagctgggattacaggcgcctgccaccacgcgcagytaatttttgcattttcagtagagacggggtttcgccatgttggccaggctggtctcaaactcctggcctcaagcaattcccctgccttagcttctcaaag

SEQ ID NO: 531613 - DNA, 201 bp, Homo sapiens
cccgcccccgccacttgcctattgcctctcctggggcgtgacgtcagcggactgacgcaccaccaatgtggtgacgtcgcccccgttgccagggcgacagstgacgcacggctgggctcctgacggcgtcaatgccggggttggccactggggggccgagagcctccgggcccgggtcgccccagcccccacccttcctcc

SEQ ID NO: 531614 - DNA, 201 bp, Homo sapiens
gtttcccgcgctcggcggaagcggaaggggcggggctccgcgctcctagtctccactgctgccgccgtcgccgccacccgagccggagcgggctgggccgmcaaggcaagatggtggactacagcgtgtgggaccacattgaggtgtctgatgatgaagacgagacgcaccccaacatcgacacggccagtctcttccgct

SEQ ID NO: 531615 - DNA, 201 bp, Homo sapiens
atgtgcgggggccgggcgcagagagacggcggcttgggcacagatgggggacgcacaggcagaggcgcgtggagacagacagggacgtgtggaaatagaarcagacagacagggacacagacgccgttcccgaagacgggtgcgctctgcagccaccgatccttgtctgaaatgcttgggggagggagaggctggcttact

SEQ ID NO: 531616 - DNA, 201 bp, Homo sapiens
cgggccccaccgcagctcagtggtatgtggctatgggatgtagcagaagaagcaaaggtagccccaaaaagcgttcccaattcccgcaaacctcccccccmcacacacacacaggcaggagagacatagcagggtttgcaccgatgggggtgggatggggaccggggacagagggacagtgcaaagcaacttaggggtctc

SEQ ID NO: 531617 - DNA, 201 bp, Homo sapiens
gcgtgcaccaccatgcccagctaatttttgtattttttggtagagatggggtttcaccatgttggccaggctggtgtcaaacccttgggctcaagtgatcwgcccgcctcagccaaagtgctgggattataagcatgagccaccacacccgggcagcaataaagtttttaaggtttttctgttttgtttttgagacagggt

SEQ ID NO: 531618 - DNA, 201 bp, Homo sapiens
aggactcagaggaggtgagggagcagaaacacaagaccttcgtggaaaaatacgagaaacagatcaagcactttggtgagtggggcttgtgggttatgggrggcaaggtcgaggcaggccctttgcctccagggccctccagcaccttgccagcatcttcccacaggcatgcttcgccgctgggatgacagccaaaagtac

SEQ ID NO: 531619 - DNA, 201 bp, Homo sapiens
tcagacccaaggaggaaggcaggcaggatccagaagtcttacttaatctgttttttgttttttgtttttttttctgacagagtcttgctctgtcacccaarctggagtgcagtggtgtgatcttggctcactgcaaccaccgcctcccgggtttaagcaattcttctgcctcagcctcccgggtagctgggattacaggcg

SEQ ID NO: 531620 - DNA, 201 bp, Homo sapiens
aaggggggtcgtgtcaccttggcacacacccacatatattgagcacctactgtatcccagtatccagcagataaatgctgagctttgagcgcatgtccttygtgactgtcactgttactgtgactgagtccagcctcagtttccttatccaaaccacattttctctcaatatcagctcacaaaatgcgtgggaaagggagg

SEQ ID NO: 531621 - DNA, 201 bp, Homo sapiens
ctccaggcactgcctccaacgtcggctccaggggagactaggaagaggcgcccctcaccggagtggctggagctcctcctatccagcctgacccccgaggsagcaccctttaatctgagataatcctggcccaaggctgcaacacggcctattatcctggtatcaaagcgtggattgggatgcatggaagtgtgaggtggt

SEQ ID NO: 531622 - DNA, 201 bp, Homo sapiens
cgcgctcggcggaagcggaaggggcggggctccgcgctcctagtctccactgctgccgccgtcgccgccacccgagccggagcgggctgggccgccaaggsaagatggtggactacagcgtgtgggaccacattgaggtgtctgatgatgaagacgagacgcaccccaacatcgacacggccagtctcttccgctggcggc

SEQ ID NO: 531623 - DNA, 201 bp, Homo sapiens
tctgcaaaccgcagctcccagactcactgcctgtctttataataaagttttattagaacaaagaagccacactcaattgtttccctatcatctacaaccgatcttgctctaccacagcagagttgagtcgtgatggagaccatatggctcacggaaccagaaatatttagtctgtccctttaccaaaaaaaaatttgctgg

SEQ ID NO: 531624 - DNA, 201 bp, Homo sapiens
tcaatgtcaggttattattgagagcctgatagtgtaatgttcctaacagttctactgtgtactagctggtttatcccctactttggttcttttgtttctaytttttaaatagagactggggtctcactatgttacccaggctggtctcaaactcctgagctcaaactaaagctcaaactcaaagtgctggaattacaggtg

SEQ ID NO: 531625 - DNA, 201 bp, Homo sapiens
ccactccccctctcaccctaccacagagcatggtaaataccaagcccgagaagacggaggaggactcagaggaggtgagggagcagaaacacaagaccttygtggaaaaatacgagaaacagatcaagcactttggtgagtggggcttgtgggttatggggggcaaggtcgaggcaggccctttgcctccagggccctcca

SEQ ID NO: 531626 - DNA, 201 bp, Homo sapiens
tagatgccatctcgcccgctcctgacttcctctacttgcgctgctcggcccagcctggggggcccgcccagccctccctggcctctccactgtctccactytccagcgcccattcaagtctctgctttgagtcaaggggcttcactgcctgcagccccccatcagcattatgccaaaggcccgggggtccggggaagggca

SEQ ID NO: 531627 - DNA, 201 bp, Homo sapiens
gaacctgggaggcagaggttgctgtgagccgagatcgtgccattgcacttcagcctaggcaacaagagcgaaattccatctcaaaaataaataaataaatwaattaattaattaaataaaagtggaggtcaggccaggcttggtgactgagtactatagtcccaactatttgggaggctgaggcaggaggatcacttgagc

SEQ ID NO: 531628 - DNA, 201 bp, Homo sapiens
cttttcagaaaacagatagatgccatctcgcccgctcctgacttcctctacttgcgctgctcggcccagcctggggggcccgcccagccctccctggcctytccactgtctccactctccagcgcccattcaagtctctgctttgagtcaaggggcttcactgcctgcagccccccatcagcattatgccaaaggcccggg

SEQ ID NO: 531629 - DNA, 201 bp, Homo sapiens
ttctagcctgggcgtgacagagtgagactctgtctcaattaaagaaagaaagaaagaaaggaaggaaggaaggaaggaaggaaggaaggaaggaaggaagraaagagttcatgtcctttgcagggacatagatgaagctggaaaccatcattctcagcaaactaacacaagaacagaaaaccaaacaccgcatgttctcac

SEQ ID NO: 531630 - DNA, 201 bp, Homo sapiens
tcatctgtaaaataggatattcacacccatctgatggggttgttgtgaggatgaagtgaagtaatgcacgtgaatttatttctgttcccctttttttttttaaattgagacagtctcgttctgttgccaggctagagtgcagtggcacaatctcagctcactgcaacctctgcctcctgagttcaagtgattctcctgcct

SEQ ID NO: 531631 - DNA, 201 bp, Homo sapiens
tctgggattctctccaaacacccccaggctgatgacggggccgaatccctaaagggcatacggtgggggtgggggtacgactttcctggggagccggggamccccctaccttcctggccccctcccactgtggcaccgtgtccccctccccaccgcagctcgcagccccaagcttaccttgcggggggcctggggagggga

SEQ ID NO: 531632 - DNA, 201 bp, Homo sapiens
ctccaaggagtaaggggggtcgtgtcaccttggcacacacccacatatattgagcacctactgtatcccagtatccagcagataaatgctgagctttgagygcatgtccttcgtgactgtcactgttactgtgactgagtccagcctcagtttccttatccaaaccacattttctctcaatatcagctcacaaaatgcgtg

SEQ ID NO: 531633 - DNA, 201 bp, Homo sapiens
attctagcctgggcgtgacagagtgagactctgtctcaattaaagaaagaaagaaagaaaggaaggaaggaaggaaggaaggaaggaaggaaggaaggaaggaaagagttcatgtcctttgcagggacatagatgaagctggaaaccatcattctcagcaaactaacacaagaacagaaaaccaaacaccgcatgttctca

SEQ ID NO: 531634 - DNA, 201 bp, Homo sapiens
cctcagttttgtcatctgtaaaataggatattcacacccatctgatggggttgttgtgaggatgaagtgaagtaatgcacgtgaatttatttctgttcccytttttttttttaaattgagacagtctcgttctgttgccaggctagagtgcagtggcacaatctcagctcactgcaacctctgcctcctgagttcaagtga

SEQ ID NO: 531635 - DNA, 201 bp, Homo sapiens
cattctagcctgggcgtgacagagtgagactctgtctcaattaaagaaagaaagaaagaaaggaaggaaggaaggaaggaaggaaggaaggaaggaaggarggaaagagttcatgtcctttgcagggacatagatgaagctggaaaccatcattctcagcaaactaacacaagaacagaaaaccaaacaccgcatgttctc

SEQ ID NO: 531636 - DNA, 201 bp, Homo sapiens
accgcctgacctgttctcctatttttaaaaattgccacaaccaccccaaccttcagcaaccaccaccctcatcagtcagaagccatcaacattgaggcagsaccctccaccaggaaaaagattatgacttgccgaaggctcagatgatggttagcttttcttagcaagaaaggtttttttgtttttgtttttggttttttt

SEQ ID NO: 531637 - DNA, 201 bp, Homo sapiens
gtctagaactcaactcacagtatctctcagctctgtctgtatactttagagcaaattactcagcctctctggccctcagttttgtcatctgtaaaataggwtattcacacccatctgatggggttgttgtgaggatgaagtgaagtaatgcacgtgaatttatttctgttcccctttttttttttaaattgagacagtctc

SEQ ID NO: 531638 - DNA, 201 bp, Homo sapiens
tcctgacggcgtcaatgccggggttggccactggggggccgagagcctccgggcccgggtcgccccagcccccacccttcctcccgcgggggcttccccgsctcggggatcccgcagaaaaaactgggagctcccagagctggccgcgtgcggcgcgtggtccgagccgggggccggaggaagcgtctcctccgagctgtt

SEQ ID NO: 531639 - DNA, 201 bp, Homo sapiens
tgcttccaggcccctatgtgccccttttcagaaaacagatagatgccatctcgcccgctcctgacttcctctacttgcgctgctcggcccagcctgggggrcccgcccagccctccctggcctctccactgtctccactctccagcgcccattcaagtctctgctttgagtcaaggggcttcactgcctgcagccccccat

SEQ ID NO: 531640 - DNA, 201 bp, Homo sapiens
catgaaccactatgctcagtctggttcttatttctttttcttgccttattgccttagctagcacttcagttcaatgtaaattaatggaaactaatgtaaayatcatttcttcaacctagcctttagcacctggtgggccctcaacagacatttgttgaacaaatggatgaatgtataaagatagcttaggccaggcacggt

SEQ ID NO: 531641 - DNA, 201 bp, Homo sapiens
ggctacaatcaacaacaaattgttcagtgtagacaaaatagtctttttttttttttttgagatggagtgtcgctctgttgcccaggctggagtgcagtggygcgatcttggctcactgcaagctccacctcctgggttcacgccattctcctgcctcagcctcccaagtagctgggactacaggcacctgccaccatgccc

SEQ ID NO: 531642 - DNA, 201 bp, Homo sapiens
gctcggccccggcggcctggaccccgtcgaggtctacgagtccctccctgaggtggggctccccggcccaggcgggcagcaggaagaccctgagcgggacsccccagggccacagggacccagcccctgaccccagcccctctgtacccccaggaactccagaagtgcttcgatgtgaaggacgtgcagatgctgcaggac

SEQ ID NO: 531643 - DNA, 201 bp, Homo sapiens
agcctgggtgacagagtgagactccgtctcaaataggtaaaatatcaataggcaggaagccagcttggggatgtgcaagggacaacggggacaacggggamcaccggctggcggccccacctcatctgcctgccttctcctcacaggacgcaaagtaccacatgcagcgctgcattgactctggcctctgggtccccaact

SEQ ID NO: 531644 - DNA, 201 bp, Homo sapiens
gcacccaggcgctgaagattattgctgtgcggccatgggtcagtgtcttaaactctgtgagcctcagtttcttttctgtgaaatggaatgatattccctayagggtccatgtgagaatgaaatgagatcaaaccatattgaacagaatagtgtctggcactcagtaaatatttaataaatggtaacatctgaccctgtggg

SEQ ID NO: 531645 - DNA, 201 bp, Homo sapiens
cttggagaccccgtctttaaaatgaaatgaaaaaaaaaattagccatgtgtggtgctgtgcacctgtaatcccagctactcaggaggctgaggcaggaggrttgcttgagcccaggagtttgaggctgcaagtgagctgcgattgccactgcactccagcctgggtgacagagtaagatcctgtctttaaaaagaaaggag

SEQ ID NO: 531646 - DNA, 201 bp, Homo sapiens
agaggctggcttactttaccttggcacccaggcgctgaagattattgctgtgcggccatgggtcagtgtcttaaactctgtgagcctcagtttcttttctktgaaatggaatgatattccctacagggtccatgtgagaatgaaatgagatcaaaccatattgaacagaatagtgtctggcactcagtaaatatttaataa

SEQ ID NO: 531647 - DNA, 201 bp, Homo sapiens
tcttgaagaggaaccctgcgtgtgcattttccctaggctctgcaaattctgttgctcaaagtctcaaggatttgtgaaatgaagaaagcaatgaagaagaygatgttggaggggtccagccggccaggcgagagaggcagagacatgccccttactgctgtcaggacacaagtgcacatttgcggcaatcagccctggctg

SEQ ID NO: 531648 - DNA, 201 bp, Homo sapiens
gagccgccagggttctgagcagaggacggagggacctgaccccacttgggtgtgcgctggcacctgtgggcgcaggggcggaagctgggagaccagggcaygggaggtggacgcgtactttttcctggggccatctccggtgcagggattgggtatggggcgggggtaagggacagacgactccccagagttgataggccg

SEQ ID NO: 531649 - DNA, 201 bp, Homo sapiens
ccggtccctgccacggacagggcactgcgactcctcttcatctcgccaacctagcgcgccgttgggactgcggtggccatgtcggcagggccagggcctcmtacaagaccaagccaaacgcatctgccatcagtgccccagggctccccctgccggtcgggcctagaacccgcccccgccacttgcctattgcctctcctg

SEQ ID NO: 531650 - DNA, 201 bp, Homo sapiens
tccagcgcccattcaagtctctgctttgagtcaaggggcttcactgcctgcagccccccatcagcattatgccaaaggcccgggggtccggggaagggcaraggtcaccaggctggtctaccaggtagttggggagggtccccagccaaggggccggctctcgtcactgggctctgttttcactgttcgtctgctgtctgt

SEQ ID NO: 531651 - DNA, 201 bp, Homo sapiens
aaaaccccatctctactaaaagtaaaattagccaggcatggtgacaggcgtcggtaaccccagctacttgggaggctgaggcaggagaatcacttgaaccygggaggtggaggttgcagtgaaccgagattgcaccactgcactccagcctgggtgacagagtgagactccgtctcaaataggtaaaatatcaataggcag

SEQ ID NO: 531652 - DNA, 201 bp, Homo sapiens
tctaaatttaaattaaagttaaataaaatttaaatttccagctgggtacggtggctcacgcctgtaatctcagtgctttgggaggccaaggcaggcagatmacctaagggcaggagttcaagaccagcctggccaacatggcaaaaccccatctctactaaaagtaaaattagccaggcatggtgacaggcgtcggtaacc

SEQ ID NO: 531653 - DNA, 201 bp, Homo sapiens
aagagctcgaacgcgaaactgctctgctgcgggacccggggaccagacccctgcccccgtgcgccccctgtcacgggctccccagggcacgcgatgccgtytgccaccgccctccccccgcgcccttctccttatttgaaaaaaaaaaaaaaaaaaaaaaaagactgccggtcttcaacccccacagccacttttctcccc

SEQ ID NO: 531654 - DNA, 201 bp, Homo sapiens
gcccattcaagtctctgctttgagtcaaggggcttcactgcctgcagccccccatcagcattatgccaaaggcccgggggtccggggaagggcagaggtcmccaggctggtctaccaggtagttggggagggtccccagccaaggggccggctctcgtcactgggctctgttttcactgttcgtctgctgtctgtgtcttc

SEQ ID NO: 531655 - DNA, 201 bp, Homo sapiens
cttctatgggcatagccatctagaccaggttctgcaaaccgcagctcccagactcactgcctgtctttataataaagttttattagaacaaagaagccacrctcaattgtttccctatcatctacaaccgatcttgctctaccacagcagagttgagtcgtgatggagaccatatggctcacggaaccagaaatatttagt

SEQ ID NO: 531656 - DNA, 201 bp, Homo sapiens
acccgcccccgccacttgcctattgcctctcctggggcgtgacgtcagcggactgacgcaccaccaatgtggtgacgtcgcccccgttgccagggcgacasctgacgcacggctgggctcctgacggcgtcaatgccggggttggccactggggggccgagagcctccgggcccgggtcgccccagcccccacccttcctc

SEQ ID NO: 531657 - DNA, 201 bp, Homo sapiens
caccggggaatcctcccccttctggagaacttcgctcgctctctccaggcactgcctccaacgtcggctccaggggagactaggaagaggcgcccctcacyggagtggctggagctcctcctatccagcctgacccccgagggagcaccctttaatctgagataatcctggcccaaggctgcaacacggcctattatcctg

SEQ ID NO: 531658 - DNA, 201 bp, Homo sapiens
cccagcgcccgatgacgcggagtctctgcgggaactccagggggccggaacacttacgcagggccctttaaggctggctgggtagctagtgccgctgccgmggttactagggatgtgacgtcacacagggcggggtttcccgcgctcggcggaagcggaaggggcggggctccgcgctcctagtctccactgctgccgccg

SEQ ID NO: 531659 - DNA, 201 bp, Homo sapiens
gggagccgagacccgttttgagggggtccgggtgattccaaagtgtgtgtgtgtgtgtgtgtgtgcgtgtgtgtgtgtgtgtgtgcgcgcgcgcgcgcgckcgcgcgagtcctcgctgcgaatggcaggaggtggaagacaaggagaaggctgttgccgaggcggggaaaccccagctcccaaggcagggccacagtctcc

SEQ ID NO: 531660 - DNA, 201 bp, Homo sapiens
gggtccctgagctgccaggtggctggaggccccctccccagggaaccagcccacaatgctctaggtaaggccgactcctctccactgggactcaagccccwccagtcaccgcatcctagatcaggagagggtggggccagggaggaggagagaagtgggcagattctgccagactttaaaagtggaggccgggcgcagtgg

SEQ ID NO: 531661 - DNA, 201 bp, Homo sapiens
ggtacccattcattgtggccctcagcctcgacctcctgggctaaagcagtcctcccatctcagcctcctgagtagctgggattacaggcacacaccaccaygcccagctaatttttgttttttgggtttttgtttgtttgttgttttgtttgtttttttgagacagaatcttgcactgtcgcccgagctgaagtgcaatgg

SEQ ID NO: 531662 - DNA, 201 bp, Homo sapiens
ggccagcggggtggggagccgagacccgttttgagggggtccgggtgattccaaagtgtgtgtgtgtgtgtgtgtgtgcgtgtgtgtgtgtgtgtgtgcgygcgcgcgcgcgcgcgcgcgagtcctcgctgcgaatggcaggaggtggaagacaaggagaaggctgttgccgaggcggggaaaccccagctcccaaggcag

SEQ ID NO: 531663 - DNA, 201 bp, Homo sapiens
aatccagaccccagaatcccaagcctgggtgatccatgtcccaccaccctctcagtgctcacgagccaatgggatgactaagacttaaaggtttaacctcytgctaccccaaatgagtgtgcctgcattacataccagtgtctgttgtattcctttttttttttttttttttttttttgagacgaagtttccttcttgtcg

SEQ ID NO: 531664 - DNA, 201 bp, Homo sapiens
agccaaacgcatctgccatcagtgccccagggctccccctgccggtcgggcctagaacccgcccccgccacttgcctattgcctctcctggggcgtgacgycagcggactgacgcaccaccaatgtggtgacgtcgcccccgttgccagggcgacagctgacgcacggctgggctcctgacggcgtcaatgccggggttgg

SEQ ID NO: 531665 - DNA, 201 bp, Homo sapiens
ttctagacctgatcctgccctcatgagctcagacccaaggaggaaggcaggcaggatccagaagtcttacttaatctgttttttgttttttgtttttttttctgacagagtcttgctctgtcacccaaactggagtgcagtggtgtgatcttggctcactgcaaccaccgcctcccgggtttaagcaattcttctgcctca

SEQ ID NO: 531666 - DNA, 201 bp, Homo sapiens
gcggccagcggggtggggagccgagacccgttttgagggggtccgggtgattccaaagtgtgtgtgtgtgtgtgtgtgtgcgtgtgtgtgtgtgtgtgtgygcgcgcgcgcgcgcgcgcgcgagtcctcgctgcgaatggcaggaggtggaagacaaggagaaggctgttgccgaggcggggaaaccccagctcccaaggc

SEQ ID NO: 531667 - DNA, 201 bp, Homo sapiens
caggacgcaaagtaccacatgcagcgctgcattgactctggcctctgggtccccaactctaaggccagcgaggccaaggagggagaggaggcaggtcctgrggacccattactggaagctgttcccaagacgggcgatgagaaggatgtcagtgtgtgacctgccccagctaccaccgccacctgcttccaggcccctatg

SEQ ID NO: 531668 - DNA, 201 bp, Homo sapiens
caggcactgttctagacctgatcctgccctcatgagctcagacccaaggaggaaggcaggcaggatccagaagtcttacttaatctgttttttgttttttktttttttttctgacagagtcttgctctgtcacccaaactggagtgcagtggtgtgatcttggctcactgcaaccaccgcctcccgggtttaagcaattct

SEQ ID NO: 531669 - DNA, 201 bp, Homo sapiens
ctagactctagcgacacccagcggccagcggggtggggagccgagacccgttttgagggggtccgggtgattccaaagtgtgtgtgtgtgtgtgtgtgtgygtgtgtgtgtgtgtgtgtgcgcgcgcgcgcgcgcgcgcgcgagtcctcgctgcgaatggcaggaggtggaagacaaggagaaggctgttgccgaggcggg

SEQ ID NO: 531670 - DNA, 201 bp, Homo sapiens
gggctagactctagcgacacccagcggccagcggggtggggagccgagacccgttttgagggggtccgggtgattccaaagtgtgtgtgtgtgtgtgtgtstgcgtgtgtgtgtgtgtgtgtgcgcgcgcgcgcgcgcgcgcgcgagtcctcgctgcgaatggcaggaggtggaagacaaggagaaggctgttgccgaggc

SEQ ID NO: 531671 - DNA, 201 bp, Homo sapiens
taccatgttggccaggctggtcttgaactcctgacctcaagtgatccacctgcctcggcctcccaaagtgttgggattacaggcatgagccaccaccgccygacctgttctcctatttttaaaaattgccacaaccaccccaaccttcagcaaccaccaccctcatcagtcagaagccatcaacattgaggcaggaccctc

SEQ ID NO: 531672 - DNA, 201 bp, Homo sapiens
gggtttcagcatgttagccaggatggtctcgatttcctgacctcgtgatccacccacctcggcctcccaaagtgctgggattacaggcgtgagtcaccgckcccagccctgcttgtgttttctttgccttagacttataatttttttctttttttgagacagagtttagctcttgtcatccaggctggagtgcaatggtgt

SEQ ID NO: 531673 - DNA, 201 bp, Homo sapiens
ctttcttaccccacccccacttaaaattataatacaacctcctaggacttctggtcccccttttcccgctcttcccccctcataccacactatgtaatttrtttattacatttattgtctgtgtctcctcacactggaatattagctgcaggagggcacgaaaactttgtttaattattatgttaacaataatgtagtatt

SEQ ID NO: 531674 - DNA, 201 bp, Homo sapiens
caaagcgtctccaggagatgggaatcgcttacttggaaatttggccttccctgcacacccccgcacagatgaccttgagaggcctccagtggggagggagrggcctctggggaaagatcatttcttctgaagctgcccctcccagcttctgcctagcctcctcttgggactatcctggctgctttagagcaggggactgag

SEQ ID NO: 531675 - DNA, 201 bp, Homo sapiens
ggttaggctgggttggggacgagggtcgggaggcagggcctgcagtcaggggccacagaggagagagatgagggctcttagaatgtggaagggactgtctrgaatggcactgaccttattttcctcccagggtccaccagggtcggcaggccctccgggctatcctggacctcggggagtgaaggtaggtgatacgcttgc

SEQ ID NO: 531676 - DNA, 201 bp, Homo sapiens
gaggttggatggggatggaagaggggagaccccaagggttacgggggtggcagaaaataaggaggtcagggaaaactttggtctttcctaacgttctcagrggagcttggaccctgacagtggaaccgagctggggaccctggagaccaaggcagccagggaggatgaagaaggagatgattccaccatgggccctgactt

SEQ ID NO: 531677 - DNA, 201 bp, Homo sapiens
actcataccttccatgggaagacagacaaggaaaactccaaaagaaatcaataggctggatgtggtagctcacgcctgtaatcccagcactttgggaggcyaagcgggggcagatcacctgaggtcaggagttcgagacaaggctgaccaacatggtgaaaccccgtctctactaaaaataaaaaaatcagctgagcgtga

SEQ ID NO: 531678 - DNA, 201 bp, Homo sapiens
ctcataccttccatgggaagacagacaaggaaaactccaaaagaaatcaataggctggatgtggtagctcacgcctgtaatcccagcactttgggaggccragcgggggcagatcacctgaggtcaggagttcgagacaaggctgaccaacatggtgaaaccccgtctctactaaaaataaaaaaatcagctgagcgtgat

SEQ ID NO: 531679 - DNA, 201 bp, Homo sapiens
ttacaaaatatacaaaaaattaatcgaacgtggtggttcgtgcctctggtcccagctgaagcaggaggatcgcttgagcccaggaggtggaggcttcaggragccatgatcacaccactgcactgcagcccgggtggcagagcaagacctttctctagagaaaagaaaagaggcttgggccaggcgcggtggctcacgcct

SEQ ID NO: 531680 - DNA, 201 bp, Homo sapiens
agactccagctccaaatctgcctccgacccccacgcctttggtcgtcacctccactgtgactactggactcaatgccacgatcctagaggttggatggggmtggaagaggggagaccccaagggttacgggggtggcagaaaataaggaggtcagggaaaactttggtctttcctaacgttctcaggggagcttggaccct

SEQ ID NO: 531681 - DNA, 201 bp, Homo sapiens
gaaaggagcaaaaggagagcccgcagtgattgaaaaggtgaggggtctggattgtgagggggttgagaggcttcatgatgacagcggtcaccgacactcayttctcccttcaggggcagcagtttgagggacctccaggagccccaggaccccaagtaagtcatggctgtgtttccttcttccagtctttcccttccagct

SEQ ID NO: 531682 - DNA, 201 bp, Homo sapiens
gacagcggtcaccgacactcacttctcccttcaggggcagcagtttgagggacctccaggagccccaggaccccaagtaagtcatggctgtgtttccttcytccagtctttcccttccagctgaggggtgtttaatcccctggagtgaggagttggggtgtaatgttgcctggccaagtggagggtagtggacatttgagg

SEQ ID NO: 531683 - DNA, 201 bp, Homo sapiens
gggaaacgtgggtctggattaatgagggtgtgtgtggggaaaatagggggatgtatctgggaactggcaagttggaggctgcgtctggggtttggggtctstctgtgggggaactggaggcttgtctagggttcggggtcttcctttggtaggattgaaggcttgtctgggggatgtgtcagggcaatagggtgtacccca

SEQ ID NO: 531684 - DNA, 201 bp, Homo sapiens
ctctgagggtggactccgtgtgtgtgtgtgtgtgtgtgtgtgcaagtgtgtgtgatcagataactgaagggcttatgtccaagttcacatctcttttctcyccatctcccctgaccccaccccagggtgctggagagaaaggagcaaaaggagagcccgcagtgattgaaaaggtgaggggtctggattgtgagggggttg

SEQ ID NO: 531685 - DNA, 201 bp, Homo sapiens
gactcttgggattctgccagggatctctaggtggctggtgggacctcctcagagatggtgacatggggggggtggcttgtctgccagtggatggagattcyggggggtggcttctgcagaaagaggctcatggagcccctcatcctctgccttgccctcctctcaccagttctcctacgtggacgccgacgggtccccagt

SEQ ID NO: 531686 - DNA, 201 bp, Homo sapiens
cagaaagaggctcatggagcccctcatcctctgccttgccctcctctcaccagttctcctacgtggacgccgacgggtccccagtgaatgtcgtgcagctraacttcctgaaactgctgagtgccacagctcgccagaacttcacctactcctgccagaatgcagctgcctggctggacgaagccacgggtgactacagcc

SEQ ID NO: 531687 - DNA, 201 bp, Homo sapiens
ggatttggggggatgtagctgttgctgcctggtaggggaagttgttctcataaagggggtgtgggaggcagtgattgatagctccagtgccctctctaatsttaaacctgagggaatttttgattctgtttcctgttctcccagggcccacctggacaaccagggatacggggtcctgcaggacacccaggtcccccggtg

SEQ ID NO: 531688 - DNA, 201 bp, Homo sapiens
tggacaaccagggatacggggtcctgcaggacacccaggtcccccggtgagtgcccccatcttttcagtccttctctgggtccttgaagggagggatagtrggagcaaacgacagtggaagcacactgacttaatccaaacctcaaacccaaccctgatcttccctcagtactgacacccaatgtgaactcaatccaagaa

SEQ ID NO: 531689 - DNA, 201 bp, Homo sapiens
gcaggagaagggggttatttttctcctgaagatgcctctgtggggaatgttgggggtcttgtgggaggccccaagctctgactcctctgtctttccagctstctatgaaaggcccccctggtccagtggggctcactgggcgcccaggccctgtggtgagtaaggcgactgcgtggagggggcggtgcatgcattagtgaa

SEQ ID NO: 531690 - DNA, 201 bp, Homo sapiens
tcaacccttgacttcattcccaagccctgttccttaacctagaccccaactccaactcaacactgaccctctctaaacttaatctgaaccctgactccaamccttaacctcagtcttgacccttgagcctcactctgccctaatcactgacccagaccttaaatgtgcccctgtttgtgttcttccagggagcagacgggg

SEQ ID NO: 531691 - DNA, 201 bp, Homo sapiens
aggccccaagctctgactcctctgtctttccagctctctatgaaaggcccccctggtccagtggggctcactgggcgcccaggccctgtggtgagtaaggygactgcgtggagggggcggtgcatgcattagtgaagaatcatctacccacactcctccatctctcctcccccaagggtctccccgggcatccaggtctga

SEQ ID NO: 531692 - DNA, 201 bp, Homo sapiens
gtctctacacaaaatacaaataaaaaattagccaggtgtggtggtgtgcacttgtagtcccagctacttgggaggctgaggtgggaggattgcttgagccwggaattcgaagctgcattgagccatgatcatgccactgcactccagcctgggcaagagagcaagacctcagctctaaaatacataaataaattaaaaaaa

SEQ ID NO: 531693 - DNA, 201 bp, Homo sapiens
ccctgggagactgtgtagcacaggcacctgagagttatcccccttggaggtgagggagctggggtatttatccaccaactcccattagtcattgggtgagkgctgcctcaggggcatgaacctccttcccccattgtgcactggcagagctcgtccatcccagaagccagagaacatcctgacatagtcacaacagcctac

SEQ ID NO: 531694 - DNA, 201 bp, Homo sapiens
ggatcgcttgcattcaggagtttgagactagcctgagcaacagggtgaaacccccaccatctctaccaaaaatataaaaaattagccaggcctggtggcaygcacctgtggtcccagctactcaggaggctgaggttgcagtgagctgagaacgtgccactgcactccaacctgagtgacagaaggagaccctgtcaaaaa

SEQ ID NO: 531695 - DNA, 201 bp, Homo sapiens
cagggtccccatggagctccaggtcctcggggtccccaaggccccactggatcagaggtgagaactcttggggggccaggaaggctcagagatggggacamccatttcctaagaagaggatgttgggattccacagtcccactcttaccccttgctgtctctccagggcactccagggctgcctggaggagttggtcagcc

SEQ ID NO: 531696 - DNA, 201 bp, Homo sapiens
caggctcccagcttgttgctctgtcttggtctcacatcctcttttcccctagggtgtgactggaattgatggtgctcctggtgccaaaggcaatgtggtaygtgccctgtgccctttgacctctgacccttctgacactctgaccccgattgtccacatccctattcccttccatgactgaccccccccaagtcaatttca

SEQ ID NO: 531697 - DNA, 201 bp, Homo sapiens
ggaattgatggtgctcctggtgccaaaggcaatgtggtatgtgccctgtgccctttgacctctgacccttctgacactctgaccccgattgtccacatccytattcccttccatgactgaccccccccaagtcaatttcactaacgccccaacaccatgacccctcttagcttcactgaaaccccactttctccccagggt

SEQ ID NO: 531698 - DNA, 201 bp, Homo sapiens
aatgatcctcctgtctcagcctcttgagtagctgtgcatcacacaggtgtgcatcaccatgcctggctaattttttaaatttcttatagagatgagggtcwcactatgttgcccaggctggtcttgaactcctggcctcaagagatcctcctgcattggcctcccaaggtattgtgattataggcataaaccaccacaccc

SEQ ID NO: 531699 - DNA, 201 bp, Homo sapiens
accttccatgggaagacagacaaggaaaactccaaaagaaatcaataggctggatgtggtagctcacgcctgtaatcccagcactttgggaggccaagcgsgggcagatcacctgaggtcaggagttcgagacaaggctgaccaacatggtgaaaccccgtctctactaaaaataaaaaaatcagctgagcgtgatggcgg

SEQ ID NO: 531700 - DNA, 201 bp, Homo sapiens
cagggatcctggtctaattccgagaccccctggaaggggctgcccagatgaggggaggtggctctccgagggttgtaccttcctgttcccaagtaatgacrcttttccacagggagcagagggacctccagggcccactggccaggctggggagccggtgagtatcagggatccctgggccccttgcttggtgcaggggag

SEQ ID NO: 531701 - DNA, 201 bp, Homo sapiens
cttccatgggaagacagacaaggaaaactccaaaagaaatcaataggctggatgtggtagctcacgcctgtaatcccagcactttgggaggccaagcgggrgcagatcacctgaggtcaggagttcgagacaaggctgaccaacatggtgaaaccccgtctctactaaaaataaaaaaatcagctgagcgtgatggcgggc

SEQ ID NO: 531702 - DNA, 201 bp, Homo sapiens
gaggtctcagtggccagcttgagagctagggacaaattgtggggtgaggaggtgagacttgcaggtctaggattggagtcaggggcctgaatggaatcccrtgaacttagtctgcaggttcccagggatcctggtctaattccgagaccccctggaaggggctgcccagatgaggggaggtggctctccgagggttgtacc

SEQ ID NO: 531703 - DNA, 201 bp, Homo sapiens
gaccttagaccgtgaccaggcttcccaacctccacactcaccgcttctttcttatgccttctctcatcttctttttctgtctccagggactccccggtccmcagggactcattggcactcctggggagaaggtgagtgacagctccacctaccgcgacctcctcaagtcttcttccttcaactctgttgccaggaaaatct

SEQ ID NO: 531704 - DNA, 201 bp, Homo sapiens
ggcttcagggccagcctgactcagcacctcctccatccacggtggctccctctgctggcagccctggtccagctggcacacttttgtctccattggcctcyggtgctctttggggagcctcctctgtccctgtccccggactgggagctcctggggacagtgggagggtgcctcccttttgtcttgattgccctcacccga

SEQ ID NO: 531705 - DNA, 201 bp, Homo sapiens
ttgaccccaaccagggctgcgcgcgggactcgttcagggttttttgcaacttcacggcgggaggagagacctgcctctatcccgacaagaagtttgagatsgtgagtaacccaaacctctcatcgcctcccccaggaagtgctgtcccctgctccccacacccacaaccaccttgtctgggacgttatccttccttcaacc

SEQ ID NO: 531706 - DNA, 201 bp, Homo sapiens
ccatgagggagccccagaatggggtgcatttggtgctgaggctttgaagccaccgtatttttcgttacctgtgactatggagccaatgggatgtgacttcrctcatcacggacagtcattccttctcctttccagggtgctgggggctggggttccctggcccaagggtccagcctcctctcaccccattccaggtggcat

SEQ ID NO: 531707 - DNA, 201 bp, Homo sapiens
tattataccttcgacctcaggaggttgctaccaaccttgtcatctttaattcctcagctcagcattacagagcaatttaatgcatgcaacttatgtgttcrtatccataaccaccacatgcaataggcattttcatcccattttacagacaaggaaaactgagacttggaatggctgaatgacctgcccaaggacatgccc

SEQ ID NO: 531708 - DNA, 201 bp, Homo sapiens
tgccctttgacctctgacccttctgacactctgaccccgattgtccacatccctattcccttccatgactgaccccccccaagtcaatttcactaacgccycaacaccatgacccctcttagcttcactgaaaccccactttctccccagggtcctccaggagaaccaggccctccgggacagcagggaaaccatgggtcc

SEQ ID NO: 531709 - DNA, 201 bp, Homo sapiens
cagctccacctaccgcgacctcctcaagtcttcttccttcaactctgttgccaggaaaatcttcccaccaagacccctctgttagctctggatagtgataractgcaacattccctaagccagcccggagatacaaagtgtccttgttggggaaggattggttgcaagaaacagaaacccaccaaggctagctcacataag

SEQ ID NO: 531710 - DNA, 201 bp, Homo sapiens
aggacatgcccctagcaggcaggagcaaggacttgaaccttgtttccccaactcccatcccattagcccattcaccatgccccagccagcctgacctttcygcctctgacctccaggttgcaatttctgacctttgtcccataacctttctgcagggcaagcttggggtgccaggcctcccaggttatccaggacgccctg

SEQ ID NO: 531711 - DNA, 201 bp, Homo sapiens
aatcctagcactttgggaggctgagatggggggatcacgaggtcaggagatcgagaccatcctggctaacatggtgaaaccctgtctctactaaaaatacmaaaaaattagccgggcgtggtggcgcgcgcctgtagtcccagctactcgggaggctgagtcaggagaatggcatgaacctgggaggcggagcttgcagtg

SEQ ID NO: 531712 - DNA, 201 bp, Homo sapiens
gatccgatggccctctggtgagaaccatgagctgggaaaaggaggaaggagaaaggggagccttgggaattggaatggcaagttttggtctctgacaactkagaatgtttcttccccagggtcacccaggacatgagggccccacgggagagaaaggggctcaggtgagtgaccaggaggttaggctgggttggggacgag

SEQ ID NO: 531713 - DNA, 201 bp, Homo sapiens
gttggcggcaggcattagattcatttgagggacattgtcattttaagggccctgagggtcaccagcattgacagtggtatctgtggtcaatgtggcctttwggggagaggggcctggggtcactgggtactaattctgaccttccacagggtccccatggagctccaggtcctcggggtccccaaggccccactggatcag

SEQ ID NO: 531714 - DNA, 201 bp, Homo sapiens
atggggacaaccatttcctaagaagaggatgttgggattccacagtcccactcttaccccttgctgtctctccagggcactccagggctgcctggaggagytggtcagccaggcgccgtgggtgagaaggtgagtgagggaaggcaggggctgcacggggggaagagataaatctagtcctattgggcagggacattctgg

SEQ ID NO: 531715 - DNA, 201 bp, Homo sapiens
gaaaggggctcaggtgagtgaccaggaggttaggctgggttggggacgagggtcgggaggcagggcctgcagtcaggggccacagaggagagagatgaggrctcttagaatgtggaagggactgtctagaatggcactgaccttattttcctcccagggtccaccagggtcggcaggccctccgggctatcctggacctcg

SEQ ID NO: 531716 - DNA, 201 bp, Homo sapiens
aaggctcagagatggggacaaccatttcctaagaagaggatgttgggattccacagtcccactcttaccccttgctgtctctccagggcactccagggctkcctggaggagttggtcagccaggcgccgtgggtgagaaggtgagtgagggaaggcaggggctgcacggggggaagagataaatctagtcctattgggcag

SEQ ID NO: 531717 - DNA, 201 bp, Homo sapiens
ggtttcaccatgttggccaggctggtctcaaactcatggcctcgagtgatccacccatctcggcctcccaaagtgctgagattacaggtttgagccaccgygcctggccccatgttgttatttttaactggtttattttctcctggtttagtgggagctcagatgcccagtggatgggaatttagacaagcttggacttcc

SEQ ID NO: 531718 - DNA, 201 bp, Homo sapiens
accagggtcggcaggccctccgggctatcctggacctcggggagtgaaggtaggtgatacgcttgcaggtatgagtgatttaccagctttgggttcaggcrtgcgatgcagctccatcagaaacttctggatgtgtggagaggggaatcagttggccaggccaaatgtagtgggactggggtttggagctgcacagccaag

SEQ ID NO: 531719 - DNA, 201 bp, Homo sapiens
gggtcggcaggccctccgggctatcctggacctcggggagtgaaggtaggtgatacgcttgcaggtatgagtgatttaccagctttgggttcaggcatgcratgcagctccatcagaaacttctggatgtgtggagaggggaatcagttggccaggccaaatgtagtgggactggggtttggagctgcacagccaaggaca

SEQ ID NO: 531720 - DNA, 201 bp, Homo sapiens
agacattaaaacatgaaaagaaaatttgtgtctgatgcctaatgctgaaaactgcatgtctcttccccaaggctgtatgtgtgtgtgtgagtgtgtgagtragtgtgtatgtgagtgtgtgagactgtgtgtgtgtgagtgtgtgtgtgagtgtgtgtgtgtgtttgtgtgtatgttggtgggaagggtctccatagacag

SEQ ID NO: 531721 - DNA, 201 bp, Homo sapiens
tttcctttttccttttcttttctttactttctttttttttttttttttttttttttgagacagagtctcgctttgtcgcccaggctggagtgcagtggagygatctccactcactgcaacctctgcctcctcccggattcaagcgattctactgcctcagcttcctgagtagctgggactgcaggcatgcaccaccactcc

SEQ ID NO: 531722 - DNA, 201 bp, Homo sapiens
cctttgttagctgtgtgtgaccgtgatgtgtgtcacctctgggaggccagggacctgatctatctcatgttcctccttatccccagtaccagctcttcccrcaacaagccaagtaggcatcgtcacaatttatggtcttggccgggcgcggtggctcatacctgtaatcccagcactttgggaggccaaggcgggtggatc

SEQ ID NO: 531723 - DNA, 201 bp, Homo sapiens
cctagcaggcaggagcaaggacttgaaccttgtttccccaactcccatcccattagcccattcaccatgccccagccagcctgacctttccgcctctgacstccaggttgcaatttctgacctttgtcccataacctttctgcagggcaagcttggggtgccaggcctcccaggttatccaggacgccctggacctaaggt

SEQ ID NO: 531724 - DNA, 201 bp, Homo sapiens
gggttctgagaggtgagatgaagaggataggctttcctctaccttcctagggatcgcaagctggaggtggggtggcagcagcatcagatgtgtaacaggcmgtcaattgccatacagaatgatggtgccaggataggggaagcacagggcatggtggaaatttagaggcagtgttggaaagaccagaaggcttcctagtag

SEQ ID NO: 531725 - DNA, 201 bp, Homo sapiens
gctttcgtgcaccgttgcagcgtgtgattgtgagattgcagagccacaagacaataatttttttttttttttgagatggagccttgctctgtcacccaggytggagtgcagtggcttgatctcagctcactgcaacctccacctcatgggttcaagcgattctcagcctcccaagtagctgagattacaggtgtgtgccac

SEQ ID NO: 531726 - DNA, 201 bp, Homo sapiens
ggataggggaagcacagggcatggtggaaatttagaggcagtgttggaaagaccagaaggcttcctagtagagatcacagctcatctgaagcctaaagaawgcactgtgttagcaagctaggaaggacaaggacaagtgttccagggagagggaaaggcatatgcaaaggctcagtcaagacagggtctggtgaatttgaa

SEQ ID NO: 531727 - DNA, 201 bp, Homo sapiens
tttttttttttttgagacagagtctcgctttgtcgcccaggctggagtgcagtggagcgatctccactcactgcaacctctgcctcctcccggattcaagmgattctactgcctcagcttcctgagtagctgggactgcaggcatgcaccaccactcctgggtaatttttgtatttttattagagacagggtttcaccatg

SEQ ID NO: 531728 - DNA, 201 bp, Homo sapiens
gaagcacagggcatggtggaaatttagaggcagtgttggaaagaccagaaggcttcctagtagagatcacagctcatctgaagcctaaagaatgcactgtkttagcaagctaggaaggacaaggacaagtgttccagggagagggaaaggcatatgcaaaggctcagtcaagacagggtctggtgaatttgaagaagaaaa

SEQ ID NO: 531729 - DNA, 201 bp, Homo sapiens
tgatgccacctgggctcaccgcaacctctgcctcccaggttcaagcgattctcccgcctcagcctctcgagtagtggtattacaggcatgtgccaccacgyctggctaatttttgtatttttaatagagacaggatttctccatgttggtcaggctggtcttgaacgcctgacctcaggtgatccggccgcctcggcctct

SEQ ID NO: 531730 - DNA, 201 bp, Homo sapiens
aaaggcatatgcaaaggctcagtcaagacagggtctggtgaatttgaagaagaaaaagccacatggctgggtacagtggcctgtaattccagcactttggraggccaaggtaggcggatcacctgaggtcaggagttcaagaccagcctggccaacattgtaaaaccccatctctgctaaaaatacaaaaaattagccaga

SEQ ID NO: 531731 - DNA, 201 bp, Homo sapiens
aagatcccaacccttaccccccaaaaaaggaaaaaaaattaaataaagtaaaaaaaaatccctccttcaaatcagccacatttcaagtgctcaaaagccaygtggctattagacatgtggctgccatattggacagggcagaaatctggtatcagggacagtgagctctgtagatccagcgactcacaagagtggaggcag

SEQ ID NO: 531732 - DNA, 201 bp, Homo sapiens
tggatggagaggtggacagagtggatgttcaggtgactcttgggattctgccagggatctctaggtggctggtgggacctcctcagagatggtgacatggrgggggtggcttgtctgccagtggatggagattccggggggtggcttctgcagaaagaggctcatggagcccctcatcctctgccttgccctcctctcacc

SEQ ID NO: 531733 - DNA, 201 bp, Homo sapiens
actcttgggattctgccagggatctctaggtggctggtgggacctcctcagagatggtgacatggggggggtggcttgtctgccagtggatggagattccrgggggtggcttctgcagaaagaggctcatggagcccctcatcctctgccttgccctcctctcaccagttctcctacgtggacgccgacgggtccccagtg

SEQ ID NO: 531734 - DNA, 201 bp, Homo sapiens
ttcactatgttggccaggatggtctcgatctcctgacctcgtgatcagcatgcctcagcctcccaaagtgctgggattacaggcatgagccaccgcgctckgccaaaactctcccagacttctagccagggattgcatcctctaatttactgatctcatgagtaacccccagaacacggatgaatgaatgaatgggtggat

SEQ ID NO: 531735 - DNA, 201 bp, Homo sapiens
gttcactatgttggccaggatggtctcgatctcctgacctcgtgatcagcatgcctcagcctcccaaagtgctgggattacaggcatgagccaccgcgctyggccaaaactctcccagacttctagccagggattgcatcctctaatttactgatctcatgagtaacccccagaacacggatgaatgaatgaatgggtgga

SEQ ID NO: 531736 - DNA, 201 bp, Homo sapiens
ttttgtatttttagtagagatgggtgttcactatgttggccaggatggtctcgatctcctgacctcgtgatcagcatgcctcagcctcccaaagtgctgggattacaggcatgagccaccgcgctcggccaaaactctcccagacttctagccagggattgcatcctctaatttactgatctcatgagtaacccccagaac

SEQ ID NO: 531737 - DNA, 201 bp, Homo sapiens
tctcatcttctttttctgtctccagggactccccggtccccagggactcattggcactcctggggagaaggtgagtgacagctccacctaccgcgacctcytcaagtcttcttccttcaactctgttgccaggaaaatcttcccaccaagacccctctgttagctctggatagtgatagactgcaacattccctaagccag

SEQ ID NO: 531738 - DNA, 201 bp, Homo sapiens
gtcaggggccacagaggagagagatgagggctcttagaatgtggaagggactgtctagaatggcactgaccttattttcctcccagggtccaccagggtcrgcaggccctccgggctatcctggacctcggggagtgaaggtaggtgatacgcttgcaggtatgagtgatttaccagctttgggttcaggcatgcgatgca

SEQ ID NO: 531739 - DNA, 201 bp, Homo sapiens
tgtctagaatggcactgaccttattttcctcccagggtccaccagggtcggcaggccctccgggctatcctggacctcggggagtgaaggtaggtgatackcttgcaggtatgagtgatttaccagctttgggttcaggcatgcgatgcagctccatcagaaacttctggatgtgtggagaggggaatcagttggccaggc

SEQ ID NO: 531740 - DNA, 201 bp, Homo sapiens
tttccctccctccctggctggggggctgggagattggtgcatcctctgctcccaaactcatcaccctaaggctctaggagaaaaacctccctgaatcctcmcacgtcctcccctgtctgtgcctcttttgtccttcagggccacattggattgatcggtctcattggccccccgggagaagctggtgagaaaggagatcag

SEQ ID NO: 531741 - DNA, 201 bp, Homo sapiens
cagggtctcactctgtcacccaggctagagcacagtggtgggatcacagctcactgcagccttaacctcctgggttcaatgatcctcctgtctcagcctcytgagtagctgtgcatcacacaggtgtgcatcaccatgcctggctaattttttaaatttcttatagagatgagggtcacactatgttgcccaggctggtct

SEQ ID NO: 531742 - DNA, 201 bp, Homo sapiens
cctcgtgtgccacgagctgcaccgcaaccacccgcacctgcctgatggtgaggtccggtccccccgccacttggatgggcggagtgggggtgtgggggggkttggggtccgtcgggtcccatccggactcacccaccctgcctggctctgcggcaggggaatactggattgaccccaaccagggctgcgcgcgggactcgt

SEQ ID NO: 531743 - DNA, 201 bp, Homo sapiens
ccccagggaggacgggtccaatgggggctagagggccccctggacgtgtggggcctgagggtcttcgagggatccctggccctgtggtgagtggagcgggrcaggggtgggacagggtggatccagctcctctctgtctgctcccagcttgtgatcccatcaccgtttggaggggctgcccctggtgcatggtcggggggg

SEQ ID NO: 531744 - DNA, 201 bp, Homo sapiens
actgagaatgtttcttccccagggtcacccaggacatgagggccccacgggagagaaaggggctcaggtgagtgaccaggaggttaggctgggttggggaygagggtcgggaggcagggcctgcagtcaggggccacagaggagagagatgagggctcttagaatgtggaagggactgtctagaatggcactgaccttatt

SEQ ID NO: 531745 - DNA, 201 bp, Homo sapiens
gcctaatgctgaaaactgcatgtctcttccccaaggctgtatgtgtgtgtgtgagtgtgtgagtgagtgtgtatgtgagtgtgtgagactgtgtgtgtgtgagtgtgtgtgtgagtgtgtgtgtgtgtttgtgtgtatgttggtgggaagggtctccatagacagggttcattctccaagtgacttctccctacaggggtc

SEQ ID NO: 531746 - DNA, 201 bp, Homo sapiens
tgcctaatgctgaaaactgcatgtctcttccccaaggctgtatgtgtgtgtgtgagtgtgtgagtgagtgtgtatgtgagtgtgtgagactgtgtgtgtgtgagtgtgtgtgtgagtgtgtgtgtgtgtttgtgtgtatgttggtgggaagggtctccatagacagggttcattctccaagtgacttctccctacaggggt

SEQ ID NO: 531747 - DNA, 201 bp, Homo sapiens
atgcctaatgctgaaaactgcatgtctcttccccaaggctgtatgtgtgtgtgtgagtgtgtgagtgagtgtgtatgtgagtgtgtgagactgtgtgtgtgtgagtgtgtgtgtgagtgtgtgtgtgtgtttgtgtgtatgttggtgggaagggtctccatagacagggttcattctccaagtgacttctccctacagggg

SEQ ID NO: 531748 - DNA, 201 bp, Homo sapiens
aatgagtgagtgaattgggggggcaggggagtgggctagtggggtacccaaggcccctgcagatgctcccgcttcacctctctggggacccccaggaatgygagcagcttgagggagtaggtgggaggtgggagtacccggtgctggggtgaggcttggggaagggtgtcctctggtccaaggcgtcctaaaacagtcagg

SEQ ID NO: 531749 - DNA, 201 bp, Homo sapiens
gatgcctaatgctgaaaactgcatgtctcttccccaaggctgtatgtgtgtgtgtgagtgtgtgagtgagtgtgtatgtgagtgtgtgagactgtgtgtgtgtgagtgtgtgtgtgagtgtgtgtgtgtgtttgtgtgtatgttggtgggaagggtctccatagacagggttcattctccaagtgacttctccctacaggg

SEQ ID NO: 531750 - DNA, 201 bp, Homo sapiens
ccagaatggggtgcatttggtgctgaggctttgaagccaccgtatttttcgttacctgtgactatggagccaatgggatgtgacttcgctcatcacggacrgtcattccttctcctttccagggtgctgggggctggggttccctggcccaagggtccagcctcctctcaccccattccaggtggcatactgcagtctggc

SEQ ID NO: 531751 - DNA, 201 bp, Homo sapiens
aaaacagagggtgtggtgctgaggcgggggttggggagctaatgagtgagtgaattgggggggcaggggagtgggctagtggggtacccaaggcccctgcwgatgctcccgcttcacctctctggggacccccaggaatgtgagcagcttgagggagtaggtgggaggtgggagtacccggtgctggggtgaggcttgggg

SEQ ID NO: 531752 - DNA, 201 bp, Homo sapiens
aacactccaccttgatgatctacactgcccatctctataaccccctgctctgaccttccaccttgatggtctacactgcccatctctataaccctctgctstaatactccaccttgatggtctacactgaccacactgacccttcatcttgatgcctgcactgactctccatcttaatggtctacactgatcacccacgct

SEQ ID NO: 531753 - DNA, 201 bp, Homo sapiens
attcctgagccacccttgaccccaggttacatgaataacgttgactccaggtcacagggctgagtgaggacccacgggccatgagccagcctcaccccagrtgacctgaatgatggggtctctgctggtgggatgctctagacctgactggaacccttctcccaggctccccagggtgaaccagaaacccctcgtcctcgg

SEQ ID NO: 531754 - DNA, 201 bp, Homo sapiens
tctagtcctattgggcagggacattctggggagcccctccctgtctgctaggatgggacctctccccactctcactttgcctcctgcagggtgagcgaggrgacgctggagacccagggcctccaggagccccaggcatcccggtgagtgactgtgtgatgtggtccctgcacccaactcagggaacccctgacccctggg

SEQ ID NO: 531755 - DNA, 201 bp, Homo sapiens
atgagtgaattaatgaatggacaagtgaataactcagtggatggatgaatacgtgaatgaataaatggatgaataaatgagtgaatggatgaacgagtgartgaatggatgaacgagtgaatgaatggatgaacgagggaatgaatgggtgaatgagtgaattaatggaaaaatgaataaatcagtggatatatgaatatg

SEQ ID NO: 531756 - DNA, 201 bp, Homo sapiens
cacggtggctccctctgctggcagccctggtccagctggcacacttttgtctccattggcctctggtgctctttggggagcctcctctgtccctgtccccrgactgggagctcctggggacagtgggagggtgcctcccttttgtcttgattgccctcacccgagacccaaggctccctccatccctgctccagacctcca

SEQ ID NO: 531757 - DNA, 201 bp, Homo sapiens
ccgtcttccgggttcaagcgattcttctgcctcagcctcccaagtagccaggactacaggcacgcgccaccacacccagctaatttttgtatttttagtasagatgggtgttcactatgttggccaggatggtctcgatctcctgacctcgtgatcagcatgcctcagcctcccaaagtgctgggattacaggcatgagcc

SEQ ID NO: 531758 - DNA, 201 bp, Homo sapiens
ggaggttgcaatgagccaaggtcagttctgttgctcactggctgggccgttgtattccttggcaagcctcagtttccttgtctgtaaaatagccatgatgrgaagccttatctcatgtatgatcacaaacctcattgagatcatttatccagtaaatacttacctgtgcattggccatcaacatataaaaaccccttttct

SEQ ID NO: 531759 - DNA, 201 bp, Homo sapiens
ctactctaggccaacagtggggccatcaggagagggtggacctatgaccactctgtgcacctactccctcccgatcccagatgcttcttggcaggggtcasgaggcaggaaccctctgactctggcccctcccttgcctgtgtccatttcagggggagccaggtcctgatgggcccccagggaggacgggtccaatggggg

SEQ ID NO: 531760 - DNA, 201 bp, Homo sapiens
ccaggttcaagcgattctcccgcctcagcctctcgagtagtggtattacaggcatgtgccaccacgtctggctaatttttgtatttttaatagagacaggrtttctccatgttggtcaggctggtcttgaacgcctgacctcaggtgatccggccgcctcggcctctcaaagtgctgggattacaggcatgagccaccaca

SEQ ID NO: 531761 - DNA, 201 bp, Homo sapiens
ctcccaagtagccaggactacaggcacgcgccaccacacccagctaatttttgtatttttagtagagatgggtgttcactatgttggccaggatggtctckatctcctgacctcgtgatcagcatgcctcagcctcccaaagtgctgggattacaggcatgagccaccgcgctcggccaaaactctcccagacttctagcc

SEQ ID NO: 531762 - DNA, 201 bp, Homo sapiens
catgtgccaccacgtctggctaatttttgtatttttaatagagacaggatttctccatgttggtcaggctggtcttgaacgcctgacctcaggtgatccgsccgcctcggcctctcaaagtgctgggattacaggcatgagccaccacacccggccctaaatgttttattttttagagacagggtcttctctgttgcccag

SEQ ID NO: 531763 - DNA, 201 bp, Homo sapiens
cattcctttgcctttaaaatgaggtccgggcctggaatgttcatcctctttctcctgccagaaggaactgtggacaaagcgtctccaggagatgggaatcrcttacttggaaatttggccttccctgcacacccccgcacagatgaccttgagaggcctccagtggggagggaggggcctctggggaaagatcatttcttc

SEQ ID NO: 531764 - DNA, 201 bp, Homo sapiens
cccccgcacagatgaccttgagaggcctccagtggggagggaggggcctctggggaaagatcatttcttctgaagctgcccctcccagcttctgcctagcmtcctcttgggactatcctggctgctttagagcaggggactgagtctgggtcacttcttaagcagggaagaggcttgagagctttttttttttattttcca

SEQ ID NO: 531765 - DNA, 201 bp, Homo sapiens
  misc_feature (1)...(201): n = A,T,C or G
gctggacgaagccacgggtgactacagccactccgcccgcttccttggcaccaatggagaggagctgtctttcaaccagacgacagcagccactgtcagcntcccccaggatggctgccgggtaagagggtggggcagtggccagctagagaggggaggcaagatgtcggccaccttcccggtaactcaccgtctctgtct

SEQ ID NO: 531766 - DNA, 201 bp, Homo sapiens
tttcatcccattttacagacaaggaaaactgagacttggaatggctgaatgacctgcccaaggacatgcccctagcaggcaggagcaaggacttgaacctygtttccccaactcccatcccattagcccattcaccatgccccagccagcctgacctttccgcctctgacctccaggttgcaatttctgacctttgtccca

SEQ ID NO: 531767 - DNA, 201 bp, Homo sapiens
atgtggcggccactgactttggccagacgaaccaaaagtttgggtttgaactgggccccgtctgcttcagcagctgagagtgtccggggtgggagggaccrtgagggagccccagaatggggtgcatttggtgctgaggctttgaagccaccgtatttttcgttacctgtgactatggagccaatgggatgtgacttcgct

SEQ ID NO: 531768 - DNA, 201 bp, Homo sapiens
tcccattttacagacaaggaaaactgagacttggaatggctgaatgacctgcccaaggacatgcccctagcaggcaggagcaaggacttgaaccttgtttycccaactcccatcccattagcccattcaccatgccccagccagcctgacctttccgcctctgacctccaggttgcaatttctgacctttgtcccataacc

SEQ ID NO: 531769 - DNA, 201 bp, Homo sapiens
cagcctcccaaaatgctgggattacaagcatgagccacagtgcccggccctgctcacctttccacctgcatctctcggtgtctcagactcaggctcccagsttgttgctctgtcttggtctcacatcctcttttcccctagggtgtgactggaattgatggtgctcctggtgccaaaggcaatgtggtatgtgccctgtgc

SEQ ID NO: 531770 - DNA, 201 bp, Homo sapiens
gactgaggtcggactacagagggaagagggacttcccttgactgggttgtgtttcttttcctgcctcagcccagctctgcaaatcccctccccctgccccycacctccccaggctcaccttgccatgccaggtggtttggggaccaagatgttgggggggtgaatcaggatcctaatggtgctgccctatttatacctggg

SEQ ID NO: 531771 - DNA, 201 bp, Homo sapiens
ctttgggaggccgaggcgagtggatcacctgaggtcgagagttcaccaccagcctggccaacatggcagaaccccatctctactaaaaatacaagaattarctgggtgcagtggcgggtgcctgtaatcccaggtacatggaggctgaggcaggagaattgcttgagcccgggaagcagaggatgcagtgagctgagatcg

SEQ ID NO: 531772 - DNA, 201 bp, Homo sapiens
aggcctccgaggagtctggaaaatgagggttctgacctaggaagagtgggaatgggggtccttcatccaagcccgtgcctccccaacgtcttagccccccygccccagctccccgtggtgagatcagcagagccgcccccaggggtgaggtcatggcagattctggagaatccagctcccgccaagaggctggggcagggg

SEQ ID NO: 531773 - DNA, 201 bp, Homo sapiens
catgggtcccaggtttgaactgtctttcccaataatggggcatgggagtggtcagttaagaccttagaccgtgaccaggcttcccaacctccacactcacsgcttctttcttatgccttctctcatcttctttttctgtctccagggactccccggtccccagggactcattggcactcctggggagaaggtgagtgacag

SEQ ID NO: 531774 - DNA, 201 bp, Homo sapiens
caggctggagtgcagtggcacgatctcagctcactgcaacctccgtcttccgggttcaagcgattcttctgcctcagcctcccaagtagccaggactacargcacgcgccaccacacccagctaatttttgtatttttagtagagatgggtgttcactatgttggccaggatggtctcgatctcctgacctcgtgatcagc

SEQ ID NO: 531775 - DNA, 201 bp, Homo sapiens
ggagccaaagggagcgtggtgagtcctggggggaagtgggggcagacatgggagggggcacttgaatgtacttgaagctctcccaaactttttttttttttgagatggagtcttgctctgtcaccaggctggagtgcagtggcacgatctcagctcactgcaacctccgtcttccgggttcaagcgattcttctgcctcag

SEQ ID NO: 531776 - DNA, 201 bp, Homo sapiens
caccttggcatggcattgcccggtggatgcggggggctgagcttctcagtgcatattggttacagtagaggagaaggggctctgagggtggactccgtgtrtgtgtgtgtgtgtgtgtgtgcaagtgtgtgtgatcagataactgaagggcttatgtccaagttcacatctcttttctctccatctcccctgaccccaccc

SEQ ID NO: 531777 - DNA, 201 bp, Homo sapiens
cagctggtgtccttgtctcctccagggtccgcctggagcttctggggagcccggcgcccccgggccccccggcaagagggtaagtgataagccacctcctsggtcctcagcttatctacagcccccactcaccttacagacctcactcatcccacagccctcaactcaccccacagaccccacacacccacagaccccact

SEQ ID NO: 531778 - DNA, 201 bp, Homo sapiens
gccaatcagtctgtcctgctgtccatttatgatgaaaggggtgcccggcagttgggcctggcactggggccagcgctgggtctcctaggtgaccccttccrccccctcccccagcaggtcaacctcacagatggcaggtgagcatggggagagtgggcgggggtccgtggataaggggtggggtgagaagcacccgcactg

SEQ ID NO: 531779 - DNA, 201 bp, Homo sapiens
tggaatggctgaatgacctgcccaaggacatgcccctagcaggcaggagcaaggacttgaaccttgtttccccaactcccatcccattagcccattcaccrtgccccagccagcctgacctttccgcctctgacctccaggttgcaatttctgacctttgtcccataacctttctgcagggcaagcttggggtgccaggcc

SEQ ID NO: 531780 - DNA, 201 bp, Homo sapiens
acctgagcccaagagtttgggacaagcctgggtaacatagcgagaccctatctttacaaaatatacaaaaaattaatcgaacgtggtggttcgtgcctctrgtcccagctgaagcaggaggatcgcttgagcccaggaggtggaggcttcagggagccatgatcacaccactgcactgcagcccgggtggcagagcaagac

SEQ ID NO: 531781 - DNA, 201 bp, Homo sapiens
ccaatattcaagcccccccaacttctccctcagtatcagagtcatgatccctgtgtccctcctcacaccccatctgccttcccagggggctggtctctccrcccacacccttccactctgaactcccctctgttccctctccagggtgactttggccatgtggggcaacccggtcccccaggagaggatggtgagagggta

SEQ ID NO: 531782 - DNA, 201 bp, Homo sapiens
tgagtgaccaggaggttaggctgggttggggacgagggtcgggaggcagggcctgcagtcaggggccacagaggagagagatgagggctcttagaatgtgraagggactgtctagaatggcactgaccttattttcctcccagggtccaccagggtcggcaggccctccgggctatcctggacctcggggagtgaaggtag

SEQ ID NO: 531783 - DNA, 201 bp, Homo sapiens
tagcttattacagcccccaattcttggactcaagcagtcctcctgcctcagcctcctgagtagctgggaacaacaggtgcgcaccacctgatgaatttttwaattttttacagagacagggtctcgctatgctgcccaggctgatctcaaactcccagcttcaagtgattctcctaccttggcctcccaaagtgctgggat

SEQ ID NO: 531784 - DNA, 201 bp, Homo sapiens
tctctcccctgctgttcatcttctttcagggtccccctggaaacccaggaattccaggcctcccaggatccgatggccctctggtgagaaccatgagctgrgaaaaggaggaaggagaaaggggagccttgggaattggaatggcaagttttggtctctgacaactgagaatgtttcttccccagggtcacccaggacatg

SEQ ID NO: 531785 - DNA, 201 bp, Homo sapiens
tgtctgtgcctcttttgtccttcagggccacattggattgatcggtctcattggccccccgggagaagctggtgagaaaggagatcaggggttgccaggcrtgcagggaccccctggtcccaagggagaccctgtgagtgtcctgacctgagcgggaagaatgcatttgaaggagggggtcggttgagagactgtgggtgt

SEQ ID NO: 531786 - DNA, 201 bp, Homo sapiens
cggggcaggggtgggacagggtggatccagctcctctctgtctgctcccagcttgtgatcccatcaccgtttggaggggctgcccctggtgcatggtcggsggggggtccacactgtgttctgacagggtgcagcccaccccatgttctgttccattctcagggtgaaccaggcctcctgggagcccctggacagatgggc

SEQ ID NO: 531787 - DNA, 201 bp, Homo sapiens
gatggggggatcacgaggtcaggagatcgagaccatcctggctaacatggtgaaaccctgtctctactaaaaataccaaaaaattagccgggcgtggtggygcgcgcctgtagtcccagctactcgggaggctgagtcaggagaatggcatgaacctgggaggcggagcttgcagtgagccgagatcttgccactgcactc

SEQ ID NO: 531788 - DNA, 201 bp, Homo sapiens
tgggtccttcatcccatttcctctgcagggggatgtgggtgcccccggacacaaggggagtaaaggcgataaaggagacgcggtgagtgaaggtccccagyggggcagggtggggtgggtagcggaagaaagaggaggccagggatgtagagatcattctccatggggtaggagaggccatggagttttctgccttctcgg

SEQ ID NO: 531789 - DNA, 201 bp, Homo sapiens
tcttttccctctgccctttgcccttttattataccttcgacctcaggaggttgctaccaaccttgtcatctttaattcctcagctcagcattacagagcamtttaatgcatgcaacttatgtgttcatatccataaccaccacatgcaataggcattttcatcccattttacagacaaggaaaactgagacttggaatggc

SEQ ID NO: 531790 - DNA, 201 bp, Homo sapiens
accctgggcaacagagtgagactctgtctcaaaagaaaaaaaaaatagacatttgggaagataattgagtgcagaatcctcctagagtttcacatttttgygctgttgagctgatagttatcttgcctacgttggatttgacagtggttttttttttttattttttcagtgatttccctttacattgactccttttccttt

SEQ ID NO: 531791 - DNA, 201 bp, Homo sapiens
aggcaggtggatcatttgaggtcaggagtttgagatcaacctggccaacatggggaaaccccgtctctactaaaaatacaaaaattagccgggcatggcarcgtgcgcctgtaatcccagctactcgggaggctgaggcatgagaatggcttgaatccaggaagcagaggttgcagtgagccagtgcacaccagcttgggt

SEQ ID NO: 531792 - DNA, 201 bp, Homo sapiens
tctgtctctctgtttctgtctctgtatgtctctccatctgcccccatccttctccatccctctctccccttctctttgtctctgttccatctctgtctttycctttccacttctctctacttctctctctttccttgccatgatccctctttgattctgtgtctctctccatctctccctctctctctctttctgactcat

SEQ ID NO: 531793 - DNA, 201 bp, Homo sapiens
gtggaagccaggatggtggtagaaaggcattctaaggaggtgacatctgaatgagatctaaatggtcaggagtggctgactttgtggaggcctaggagacragcatttcagccaaagacagcagccagtgcaaagggctgcagtgaaatgagaagggaggagaggaggggagaggagagaagagggctgccttgtaggagg

SEQ ID NO: 531794 - DNA, 201 bp, Homo sapiens
tggcttttctgtctctgtctatctctctctgtctctctgtttctgtctctgtatgtctctccatctgcccccatccttctccatccctctctccccttctstttgtctctgttccatctctgtcttttcctttccacttctctctacttctctctctttccttgccatgatccctctttgattctgtgtctctctccatct

SEQ ID NO: 531795 - DNA, 201 bp, Homo sapiens
ggaaaagcaggtttattccaagagacagcaaaccaagaagatggtggactgttgttccgaagcaccatcttaagtcagtacaaattttaggctttttttttatgttaagggcagggagaagagaagagggtagagatcaagaggtaactgaggccaggtatggtggctcacacctataatctcagcaatttggtaggttga

SEQ ID NO: 531796 - DNA, 201 bp, Homo sapiens
tattatatgcaatgcatgacacatgtaggtgattacacatggtattatcatgaatatgactgtaagcacatgtatatgtgtttcatgtatctttcaatatmgatgagacagggtttgaatgccgcagcctgcaggcctgtgcctgggtgaacaagggcatgaatctgcgtgcactttgcatgatggtgggcataaatgtgt

SEQ ID NO: 531797 - DNA, 201 bp, Homo sapiens
ttttatctctgtctttctcctgttgtgactctgtctctgtctctcttctgtctctctctgttggtctctgtccctctccctccgtccatctctctatgttygcctctctctctatttctccatctctgtctgtctttcactggcttttctgtctctgtctatctctctctgtctctctgtttctgtctctgtatgtctctc

SEQ ID NO: 531798 - DNA, 201 bp, Homo sapiens
agacagggtttgaatgccgcagcctgcaggcctgtgcctgggtgaacaagggcatgaatctgcgtgcactttgcatgatggtgggcataaatgtgtgcaasaagcttgtacatatgcgtgaaaggacatgtgtatacacatgtgtgtgtttctgtgcacactgagtgatgggtatacatgcatgtattgtatttgtgttgc

SEQ ID NO: 531799 - DNA, 201 bp, Homo sapiens
cggtggatgcggggggctgagcttctcagtgcatattggttacagtagaggagaaggggctctgagggtggactccgtgtgtgtgtgtgtgtgtgtgtgtgcaagtgtgtgtgatcagataactgaagggcttatgtccaagttcacatctcttttctctccatctcccctgaccccaccccagggtgctggagagaaagg

SEQ ID NO: 531800 - DNA, 201 bp, Homo sapiens
gtgcacactgagtgatgggtatacatgcatgtattgtatttgtgttgctatgtgtgtattgtaacagtgttaatgaacattgtatgtacgtacatgagtgyatgtatactgctgtgcttaccaagacaaagtcctcagctgaatccaggccttcatgtgtttacagtgggtatacatgtgtgcaagagatgtattgcatga

SEQ ID NO: 531801 - DNA, 201 bp, Homo sapiens
ccggtggatgcggggggctgagcttctcagtgcatattggttacagtagaggagaaggggctctgagggtggactccgtgtgtgtgtgtgtgtgtgtgtgtgcaagtgtgtgtgatcagataactgaagggcttatgtccaagttcacatctcttttctctccatctcccctgaccccaccccagggtgctggagagaaag

SEQ ID NO: 531802 - DNA, 201 bp, Homo sapiens
attggcctctggtgctctttggggagcctcctctgtccctgtccccggactgggagctcctggggacagtgggagggtgcctcccttttgtcttgattgcyctcacccgagacccaaggctccctccatccctgctccagacctccactgacatccccaagacagagactccagctccaaatctgcctccgacccccacgc

SEQ ID NO: 531803 - DNA, 201 bp, Homo sapiens
actgtcagcgtcccccaggatggctgccgggtaagagggtggggcagtggccagctagagaggggaggcaagatgtcggccaccttcccggtaactcaccrtctctgtcttctctggggacagctccggaaaggacagacgaagacccttttcgaattcagctcttctcgagcgggatttctgcccctgtgggatgtggcg

SEQ ID NO: 531804 - DNA, 201 bp, Homo sapiens
taatgaacattgtatgtacgtacatgagtgtatgtatactgctgtgcttaccaagacaaagtcctcagctgaatccaggccttcatgtgtttacagtgggyatacatgtgtgcaagagatgtattgcatgatgagttctgtgtcatcttcaggctgtggattgccaaatgcatgccatgattacatgcaatcatgtatgca

SEQ ID NO: 531805 - DNA, 201 bp, Homo sapiens
cccggtggatgcggggggctgagcttctcagtgcatattggttacagtagaggagaaggggctctgagggtggactccgtgtgtgtgtgtgtgtgtgtgtgtgcaagtgtgtgtgatcagataactgaagggcttatgtccaagttcacatctcttttctctccatctcccctgaccccaccccagggtgctggagagaaa

SEQ ID NO: 531806 - DNA, 201 bp, Homo sapiens
tcacctccactgtgactactggactcaatgccacgatcctagaggttggatggggatggaagaggggagaccccaagggttacgggggtggcagaaaatarggaggtcagggaaaactttggtctttcctaacgttctcaggggagcttggaccctgacagtggaaccgagctggggaccctggagaccaaggcagccagg

SEQ ID NO: 531807 - DNA, 201 bp, Homo sapiens
gcccggtggatgcggggggctgagcttctcagtgcatattggttacagtagaggagaaggggctctgagggtggactccgtgtgtgtgtgtgtgtgtgtgtgtgcaagtgtgtgtgatcagataactgaagggcttatgtccaagttcacatctcttttctctccatctcccctgaccccaccccagggtgctggagagaa

SEQ ID NO: 531808 - DNA, 201 bp, Homo sapiens
aggctcactggtgtctctggacagggtgatcgtggcttcgatggcctccctgggctgcctggtgagaagggccaaagggtgagtgtgtgaggtccctcccscaagtctaagccctcctcccaatattcaagcccccccaacttctccctcagtatcagagtcatgatccctgtgtccctcctcacaccccatctgccttcc

SEQ ID NO: 531809 - DNA, 201 bp, Homo sapiens
attcctattaaaatttttttaaaatttatttatttaggcagggcgcagtggctcccgcctgtaatccgaacactttgggagacctaggtgggcagatcatktgaggtcaggagattgagactagcctgaccaacgtggtgaaatcccatgtctactaaaaatacaaaaaattagctgggagcggtggcgcgcgcctgtgat

SEQ ID NO: 531810 - DNA, 201 bp, Homo sapiens
ctttgacctctgacccttctgacactctgaccccgattgtccacatccctattcccttccatgactgaccccccccaagtcaatttcactaacgccccaayaccatgacccctcttagcttcactgaaaccccactttctccccagggtcctccaggagaaccaggccctccgggacagcagggaaaccatgggtcccagg

SEQ ID NO: 531811 - DNA, 201 bp, Homo sapiens
ccatgcgtgcggcattcttagctcagcgtctgcacccatgaaacacgagaatgttcgctctaccaagccagggattttatgttttgttcactaatgtgtcyccagaaaccaaactgttcctggatacagttgatctgttccataaatgcatgattgctccacaattcagagatgtgattattaatcattctgtgttccagg

SEQ ID NO: 531812 - DNA, 201 bp, Homo sapiens
ggtgctggggtgaggcttggggaagggtgtcctctggtccaaggcgtcctaaaacagtcaggctcaaacaatgttagctgagaccacagctggtgtccttstctcctccagggtccgcctggagcttctggggagcccggcgcccccgggccccccggcaagagggtaagtgataagccacctcctgggtcctcagcttat

SEQ ID NO: 531813 - DNA, 201 bp, Homo sapiens
ctctggtccaaggcgtcctaaaacagtcaggctcaaacaatgttagctgagaccacagctggtgtccttgtctcctccagggtccgcctggagcttctggrgagcccggcgcccccgggccccccggcaagagggtaagtgataagccacctcctgggtcctcagcttatctacagcccccactcaccttacagacctcac

SEQ ID NO: 531814 - DNA, 201 bp, Homo sapiens
acctgcaggcccaccaggccccccggtgagttccccggggggcgggggaatggacaccaaaacctggggggagagcaaggactatgtctgggtgtccccaragggtccttccgtgcgcagcactgggccaggcacacactaggtgttcagaggatgtaggtgaagagggtagttccctgtaaaaccccaaggaaggtctgg

SEQ ID NO: 531815 - DNA, 201 bp, Homo sapiens
tcccttgcctgtgtccatttcagggggagccaggtcctgatgggcccccagggaggacgggtccaatgggggctagagggccccctggacgtgtggggccygagggtcttcgagggatccctggccctgtggtgagtggagcggggcaggggtgggacagggtggatccagctcctctctgtctgctcccagcttgtgatc

SEQ ID NO: 531816 - DNA, 201 bp, Homo sapiens
cattttcatcccattttacagacaaggaaaactgagacttggaatggctgaatgacctgcccaaggacatgcccctagcaggcaggagcaaggacttgaascttgtttccccaactcccatcccattagcccattcaccatgccccagccagcctgacctttccgcctctgacctccaggttgcaatttctgacctttgtc

SEQ ID NO: 531817 - DNA, 201 bp, Homo sapiens
gggcctccaggcccccctggacctcctggtgaacaaggtcttcctggcctggaaggcagagagggggccaaggtgagacactgtccactggagatcttggytgaacatccaagatcaaccaaggactcagaatcagtctcatgggggagggggccctgagtcacagattggagggagacatcccctccctggagcttgact

SEQ ID NO: 531818 - DNA, 201 bp, Homo sapiens
ttgcgacaggtgagtatgcacttgtgctcttgtctatgtgctgattttcgagggtaaccgtgtgagtggttatgcgtgtgattgtgtgtctctgagtgccsctatgaggggtgtagttatgatttttgggtgcaaataattgcccatgaggatgaaggtgggtggggacaagtattggggggtgctcttcgggaacccaca

SEQ ID NO: 531819 - DNA, 201 bp, Homo sapiens
gcttgacattgtcatgataaaacccatgatggaggctgaggcaggcagatcacttgaggtcaggagttcaagatcagcctggccaacatggtggaaccccrtctctactaaaaatacaaaaattagccaggcatggaggcagatgcctgtaatcccagctactctagaggctgaggcaggagaatcgcttgaacctgggag

SEQ ID NO: 531820 - DNA, 201 bp, Homo sapiens
tagcctgggcaatagagtgaccctgtgtcaaaaaaaaaatgccaagcaaagcaagcaagcaagagaaggaaggaaggaaggaaggaaggaaggaaggaagraaaaaagagagagaaaaaaggaaaagcctgcctgggcaatagagtgactctgaaaaaaaagaaaaaagaaagaagaaagaaaaagagaaagaaagagaaa

SEQ ID NO: 531821 - DNA, 201 bp, Homo sapiens
ctcccccaccccgcggtccccagagccgcgatcagcaccatggacagggcttcggggagggccgcggtgaggggcgagacggggcggggcgcagggcgggrcaggagtggaagttgctccccccctccccaccccagctgctggagccttgggtgtttttcccgaggaatttctcaggagcccccaaggggtcccgggggc

SEQ ID NO: 531822 - DNA, 201 bp, Homo sapiens
aaaggagaggagggagcagaagggccacaggtgagacttgtggagatagggcaggataggatgggaatagccttcccccaggaccacaagatacagtgctsgatggggaaagtgccaaaggggctggggatacccttgcaattgatgactttcctagagaatggtggctcacatctggaatcccagaactttgggaggccg

SEQ ID NO: 531823 - DNA, 201 bp, Homo sapiens
attctagcctgggcaatagagtgaccctgtgtcaaaaaaaaaatgccaagcaaagcaagcaagcaagagaaggaaggaaggaaggaaggaaggaaggaaggaaggaaaaaagagagagaaaaaaggaaaagcctgcctgggcaatagagtgactctgaaaaaaaagaaaaaagaaagaagaaagaaaaagagaaagaaaga

SEQ ID NO: 531824 - DNA, 201 bp, Homo sapiens
ccatcacccactcacccactgggtcacactctcacacagaacggcactcccccatcagaagtccgaggtgttaaagtcacagacacacctgcaagctcackgcaagcgttgcatggccacacgtcaagcaagtgtatctaatccctccattagaagccaaatatttgcacacattgacacctggagaaacgacatatgccc

SEQ ID NO: 531825 - DNA, 201 bp, Homo sapiens
cattctagcctgggcaatagagtgaccctgtgtcaaaaaaaaaatgccaagcaaagcaagcaagcaagagaaggaaggaaggaaggaaggaaggaaggaaggaaggaaaaaagagagagaaaaaaggaaaagcctgcctgggcaatagagtgactctgaaaaaaaagaaaaaagaaagaagaaagaaaaagagaaagaaag

SEQ ID NO: 531826 - DNA, 201 bp, Homo sapiens
aagaaaaaagaaaaaaagaaaagaaaaaaggccaggtgcagtggctcccagtttgagttcagcctgggcaacatagcaagaccctgtctctacaaaaaaawaaaataaaaaatagctgggcatggtgctgtgtgcacctgtggtcccagctactcaggaggctgaggagggaggatcacctgagtctgaggagatcgaggt

SEQ ID NO: 531827 - DNA, 201 bp, Homo sapiens
ggaagtgactcttgtggtcagcagagcctgggagcccagatctcagccccaggggactgcaacccagatttctcttaatgacagcctagccacaaaacagrcaattagagatgggggctggggtgatgggttggggaaggcgggtggagagagagagagattgagaagagagagagagaatgagagaaagagagagagaga

SEQ ID NO: 531828 - DNA, 201 bp, Homo sapiens
gtggagaatgccctgcccatgcctggcatgcagtaagcactcaatatgtgctcgatcctgttgtcattatgtggggctcagggagtgggcagggaggcagrggggatgagatcatgatttctgtttccatttcagggcctccctggtctgcaaggccctccaggattccctgggccaaagggcccccctgtgagtgaggtc

SEQ ID NO: 531829 - DNA, 201 bp, Homo sapiens
gcactttgggaggccgaggagggctgatcacgaggtcaggagattgagaccatcctggctaacatggtgaaacgctgtctgtactaaaaaatacaaaaaaattagctgggcgtggtggcgggcgcctgtagtcccagcttctcgggaggctgaggcagaatggcgtgaacccgggaggcggagcttgcagcaagccgagac

SEQ ID NO: 531830 - DNA, 201 bp, Homo sapiens
gatcatgatttctgtttccatttcagggcctccctggtctgcaaggccctccaggattccctgggccaaagggcccccctgtgagtgaggtcaccctcatygggggttgggtgggtggaggatgtgggaagggaggaagccctgtatctgtgccccaactttttcccacctcatcccccagggtcaccaaggtaaagatgg

SEQ ID NO: 531831 - DNA, 201 bp, Homo sapiens
ttggccgggcgcggtggctcatacctgtaatcccagcactttgggaggccaaggcgggtggatcacttgaggccaggagttcgggaccagcctggccaacrtggcaaaaccttgtctttactaaaaattcaaaaattaactgggcgtggtggcacacgcctgtaatctcagctacttgggaggctgagaatcacttgaacc

SEQ ID NO: 531832 - DNA, 201 bp, Homo sapiens
tccctccacatcccagaccccacccaacatccccgtgggggccctgaccagcacaggggagagtggcagggggcaggctgggcccctgacagaccccccccaccccttgtcccctgtaggcaggactcaatgcagcttgtgtgcctttttgtcataatgccagctgtgaaaagaaagggcagtcagtttctgaaaggtcat

SEQ ID NO: 531833 - DNA, 201 bp, Homo sapiens
tctgtccctccacatcccagaccccacccaacatccccgtgggggccctgaccagcacaggggagagtggcagggggcaggctgggcccctgacagacccyccccaccccttgtcccctgtaggcaggactcaatgcagcttgtgtgcctttttgtcataatgccagctgtgaaaagaaagggcagtcagtttctgaaagg

SEQ ID NO: 531834 - DNA, 201 bp, Homo sapiens
gggacctctaggtgaaagggggcctccaggcccccctggacctcctggtgaacaaggtcttcctggcctggaaggcagagagggggccaaggtgagacactgtccactggagatcttggttgaacatccaagatcaaccaaggactcagaatcagtctcatgggggagggggccctgagtcacagattggagggagacatc

SEQ ID NO: 531835 - DNA, 201 bp, Homo sapiens
aggtcctcctggaaatccctttctaaggtgagctcagtctcccaacacacacacacacacacacacacacacacacacacacacacaccacagcacacttyttactttggagtccaggaaggtgcctgtccatatggttaatccctgattggactatgccgcattcccacgctcacacatccacatggtcatggaatctta

SEQ ID NO: 531836 - DNA, 201 bp, Homo sapiens
agacaggacctggggacacctttgggagtctcttaactgtgaattatctcctccttcagggacctactggcttaaagggtgataagggccccccagggccygtgggggccaatgtaagtataaccccatgtgctgggtgggggcagggtggaggggactcaaggtgtcttggaagcttgacattgtcatgataaaacccat

SEQ ID NO: 531837 - DNA, 201 bp, Homo sapiens
ggcttgtgagcggtacctccccgactgtgacaacctggcaccggcagccacagtggtgagtgagggactccatgactcctaatctcaggacacaggctggktccttcctggctccagatccctagaaagagtgaattctcatcccccagacatggggttaagtgacccgtgacctccaacacatcccaggcatgaatgact

SEQ ID NO: 531838 - DNA, 201 bp, Homo sapiens
cccaggaggcagaggttgcagtgagccaagatctcaccactgaactccagcctggtgacaaagcaagattccatctcaaaaaaaaaaaaaaaaaaaaaaaattagccagatgtggtcccagctacttgggaggctgagatgggaggatcacctgagcccaaggagattgagcctgcagtgagctatgatcgagccactgca

SEQ ID NO: 531839 - DNA, 201 bp, Homo sapiens
ctgcatccctgtctgtctttttgtttgttttgagattagggtctcgctctgtcgcccaggctggagtgcggtggcgagatctcagctctctgcaacctccrgctcctgggttcaggtgattctcatgcttcagcctcctgagtagctgggactacagggacccaccagcacacctggctaatttttgtatttttagtagag

SEQ ID NO: 531840 - DNA, 201 bp, Homo sapiens
cctttctgcagggcaagcttggggtgccaggcctcccaggttatccaggacgccctggacctaaggtaggaagctgggggtggggggtggagatggatatrggcaggattcagagactaacatctgggggtccaggctgtggtcttgggggatgagctgcccaccccaagggtcactgagagaatgtaaaatgtgggcttt

SEQ ID NO: 531841 - DNA, 201 bp, Homo sapiens
atcctgacatagtcacaacagcctactgtgtgaggagggaaatgcagatgagatctagatggcaccaagggcgtcagctacagtgaccctcccttttctcytccaggtgaaattggcctcctggtccaaggaaaagcctggaggctggtatagcacattccgtcgagggaagaaggtgagtcaccgaggccgagatgggga

SEQ ID NO: 531842 - DNA, 201 bp, Homo sapiens
tggggccatcaggagagggtggacctatgaccactctgtgcacctactccctcccgatcccagatgcttcttggcaggggtcaggaggcaggaaccctctsactctggcccctcccttgcctgtgtccatttcagggggagccaggtcctgatgggcccccagggaggacgggtccaatgggggctagagggccccctgga

SEQ ID NO: 531843 - DNA, 201 bp, Homo sapiens
tagaggagaaggggctctgagggtggactccgtgtgtgtgtgtgtgtgtgtgtgtgcaagtgtgtgtgatcagataactgaagggcttatgtccaagttcwcatctcttttctctccatctcccctgaccccaccccagggtgctggagagaaaggagcaaaaggagagcccgcagtgattgaaaaggtgaggggtctgga

SEQ ID NO: 531844 - DNA, 201 bp, Homo sapiens
cactgaccacactgacccttcatcttgatgcctgcactgactctccatcttaatggtctacactgatcacccacgctgaccttggccactgaccactcacrttgtccatcctccagtcaacccctcattagctctcatcatcccaccttggtggcctactctgaccatcccttgacctcatccctggtaattcccatttga

SEQ ID NO: 531845 - DNA, 201 bp, Homo sapiens
tgcctagcctcctcttgggactatcctggctgctttagagcaggggactgagtctgggtcacttcttaagcagggaagaggcttgagagctttttttttttattttccagggcacttcaggcaaccggggcctccagggggagaaaggcgagaaggtgaggagagaaggaactcatcagaggagagggagtcccaatcatg

SEQ ID NO: 531846 - DNA, 201 bp, Homo sapiens
tgacgcttttccacagggagcagagggacctccagggcccactggccaggctggggagccggtgagtatcagggatccctgggccccttgcttggtgcagrggagggagtcaggactcccagggccccaggactcataggacccctagagctcacatggccacacagaggtgatgtggaaataattcgcctgctcccttgc

SEQ ID NO: 531847 - DNA, 201 bp, Homo sapiens
ccctgggccccttgcttggtgcaggggagggagtcaggactcccagggccccaggactcataggacccctagagctcacatggccacacagaggtgatgtrgaaataattcgcctgctcccttgcagggtccacgaggactgcttggccccagaggctctcctggccccacgggtcgcccggtgagtgtcactggctctct

SEQ ID NO: 531848 - DNA, 201 bp, Homo sapiens
actcagtgcctggtggcttaaaaaccctccataaaggacagctactactggtattatacctgattcatcacccctgttctcagggctcccctggtgagcgyggtcctttgggcccagcaggaggcattggacttcctggccaaagtggcagcgaaggccccgttggccctgcaggcaagaaggggtcccgggtaagtgact

SEQ ID NO: 531849 - DNA, 201 bp, Homo sapiens
ggaaagtcagagggaggaggtcagaggggaaagtcaggagaggagatcagaggagacattcagagggaggaggtcagagggcaaagtctgagagaggaagktcatagaggagggtcagagggaagaggttagaggtgaaagtcagagggaagaggtcaaaggggaaattcagaaggaggagtttgggatcagacagaaaaa

SEQ ID NO: 531850 - DNA, 201 bp, Homo sapiens
cccaatattcaagcccccccaacttctccctcagtatcagagtcatgatccctgtgtccctcctcacaccccatctgccttcccagggggctggtctctcmgcccacacccttccactctgaactcccctctgttccctctccagggtgactttggccatgtggggcaacccggtcccccaggagaggatggtgagagggt

SEQ ID NO: 531851 - DNA, 201 bp, Homo sapiens
gggaggaggtcagaggggaaagtcaggagaggagatcagaggagacattcagagggaggaggtcagagggcaaagtctgagagaggaagttcatagaggakggtcagagggaagaggttagaggtgaaagtcagagggaagaggtcaaaggggaaattcagaaggaggagtttgggatcagacagaaaaaggagatcagag

SEQ ID NO: 531852 - DNA, 201 bp, Homo sapiens
tccctgcacccaactcagggaacccctgacccctgggcatcttgggccactttgacctctggacagtgcaagatcatccactcacccctgtcctgtggccrtccctgattaccttgaggaaggacacctggaagttctcagatagggctgctatgtacagttctgcaggttgcacactacacaagactacatgacccaggg

SEQ ID NO: 531853 - DNA, 201 bp, Homo sapiens
ctgcagggggatgtgggtgcccccggacacaaggggagtaaaggcgataaaggagacgcggtgagtgaaggtccccagtggggcagggtggggtgggtagyggaagaaagaggaggccagggatgtagagatcattctccatggggtaggagaggccatggagttttctgccttctcgggtaccatcttgacaattacatg

SEQ ID NO: 531854 - DNA, 201 bp, Homo sapiens
ataggctggggtcaggcagaagaagatcagaaggtcagagggggtaaccagaaaaagaagttagtgggcatggtcagaggcagatggtcagagggaggagrtccaaaatggctgtagtcaaaaggaagaggttgtgggtgatggtggtcaaaggaggaggttagagagagggaggaggtgggggaagaaaacacactggaa

SEQ ID NO: 531855 - DNA, 201 bp, Homo sapiens
gctgctgggccttctggcgaggaaggggacaaggtgaggggttcacagagaggaagggtccaggggaggatgggggtgaatggaagctgggtccttcatcmcatttcctctgcagggggatgtgggtgcccccggacacaaggggagtaaaggcgataaaggagacgcggtgagtgaaggtccccagtggggcagggtggg

SEQ ID NO: 531856 - DNA, 201 bp, Homo sapiens
gggtcaggcagaagaagatcagaaggtcagagggggtaaccagaaaaagaagttagtgggcatggtcagaggcagatggtcagagggaggagatccaaaayggctgtagtcaaaaggaagaggttgtgggtgatggtggtcaaaggaggaggttagagagagggaggaggtgggggaagaaaacacactggaagcccctcc

SEQ ID NO: 531857 - DNA, 201 bp, Homo sapiens
tgggggaagaaaacacactggaagcccctcctctccacgtgggtttcccctggcaagggggctccaggcctgggatatagccctagggagcctgcgcgggrgagcagggagagggggaccgttccactctggggcttaggccaggaagttttgattcatcccagaactaggtcaactttttttctcaccaaaaaccaaggg

SEQ ID NO: 531858 - DNA, 201 bp, Homo sapiens
gaaaacagagggtgtggtgctgaggcgggggttggggagctaatgagtgagtgaattgggggggcaggggagtgggctagtggggtacccaaggcccctgsagatgctcccgcttcacctctctggggacccccaggaatgtgagcagcttgagggagtaggtgggaggtgggagtacccggtgctggggtgaggcttggg

SEQ ID NO: 531859 - DNA, 201 bp, Homo sapiens
cctggtgagcgcggtcctttgggcccagcaggaggcattggacttcctggccaaagtggcagcgaaggccccgttggccctgcaggcaagaaggggtcccsggtaagtgacttgcccatcccattcctagggcctcctcagggtctggccctgccacatcccaggacatggctcctgcaggacattcctgccctgacatcc

SEQ ID NO: 531860 - DNA, 201 bp, Homo sapiens
ccaaaaaccaaggggaaaaaaaaaaacagagtcaacaagctgctgaggtcggaacatctgtggggtggtgaggaggcggggggtgctgggggcccaggccrgctccttcttcctgagccacaaacatggtgggagggagggagaggctgagccccctaaaaaaaccctgagcctctatcctggagtcctgggcttattcta

SEQ ID NO: 531861 - DNA, 201 bp, Homo sapiens
cctgttctcccagggcccacctggacaaccagggatacggggtcctgcaggacacccaggtcccccggtgagtgcccccatcttttcagtccttctctggrtccttgaagggagggatagtgggagcaaacgacagtggaagcacactgacttaatccaaacctcaaacccaaccctgatcttccctcagtactgacaccc

SEQ ID NO: 531862 - DNA, 201 bp, Homo sapiens
tcaacaagctgctgaggtcggaacatctgtggggtggtgaggaggcggggggtgctgggggcccaggccggctccttcttcctgagccacaaacatggtgkgagggagggagaggctgagccccctaaaaaaaccctgagcctctatcctggagtcctgggcttattctagctgttccccacctctgcctgacacccccgg

SEQ ID NO: 531863 - DNA, 201 bp, Homo sapiens
ccccagaatctgattcaatcccaacccaaccatgtcttcccctcaataccgacacccaatatgaactcacccccagaatctgattcaatcccgacccaacygtgtcttcccctcaatgccaacacccaatgggaactcaaccccagaatctggcccaatcccaacccaaccatgtatttccctcaataccgacacccaata

SEQ ID NO: 531864 - DNA, 201 bp, Homo sapiens
ttcagaattggccaggccagcacgctcggcatccccacgtgggaactctttccaggtgagttggagtaggaggcctgggtacctccccggagggaggcacygctgggccctctgagctgccttgttccctctgcccacccagaaggccactttcctgagaacttctccttgctgatcaccttgcggggacagccagccaat

SEQ ID NO: 531865 - DNA, 201 bp, Homo sapiens
aatccaaccatgtcttcccctcaatgctgacacccaatgtgaactcaaccccagaatctgattcaatcccaacccaaccatgtgttccccctcaataccarcacccaatgtgaactcaactccagaatcctgcccagtcccaacccaaccatgtctttccctcaataccaaaatccaatatgaactcacccccagaatttg

SEQ ID NO: 531866 - DNA, 201 bp, Homo sapiens
gcaggtgagcatggggagagtgggcgggggtccgtggataaggggtggggtgagaagcacccgcactgaggccgtccccttgcaggtggcaccgtgtggcmgtcagcatagatggtgagatggtgaccctggtagctgactgtgaagctcagccccctgttttgggccatggcccccgcttcatcagcatagctggactca

SEQ ID NO: 531867 - DNA, 201 bp, Homo sapiens
taaatctagtcctattgggcagggacattctggggagcccctccctgtctgctaggatgggacctctccccactctcactttgcctcctgcagggtgagcsaggggacgctggagacccagggcctccaggagccccaggcatcccggtgagtgactgtgtgatgtggtccctgcacccaactcagggaacccctgacccc

SEQ ID NO: 531868 - DNA, 201 bp, Homo sapiens
agatagggctgctatgtacagttctgcaggttgcacactacacaagactacatgacccaggggataggtgagggctcaaatctgagtcatgagtcctgacytgaggatgagttgcccagatggggcccctcttctaattcactcaagggcagcacatgggctaggccaaccttgcacatgaccaatgggcacctagaccat

SEQ ID NO: 531869 - DNA, 201 bp, Homo sapiens
acatgacccaggggataggtgagggctcaaatctgagtcatgagtcctgacctgaggatgagttgcccagatggggcccctcttctaattcactcaagggyagcacatgggctaggccaaccttgcacatgaccaatgggcacctagaccatccagacctttcactgtcttaagtcctagctccttctgacctttgaccct

SEQ ID NO: 531870 - DNA, 201 bp, Homo sapiens
ttgcccagatggggcccctcttctaattcactcaagggcagcacatgggctaggccaaccttgcacatgaccaatgggcacctagaccatccagacctttmactgtcttaagtcctagctccttctgacctttgacccttggacaacctaggctactctgaaccctgaccccagaaaagtcccagaccaccccaatgcctg

SEQ ID NO: 531871 - DNA, 201 bp, Homo sapiens
ccccagaatggggtgcatttggtgctgaggctttgaagccaccgtatttttcgttacctgtgactatggagccaatgggatgtgacttcgctcatcacggwcagtcattccttctcctttccagggtgctgggggctggggttccctggcccaagggtccagcctcctctcaccccattccaggtggcatactgcagtctg

SEQ ID NO: 531872 - DNA, 201 bp, Homo sapiens
tgaaccctgcccaagaactgaacctcaactgcaaatccgactcactgtttaacactttgactcaacccttgacttcattcccaagccctgttccttaaccyagaccccaactccaactcaacactgaccctctctaaacttaatctgaaccctgactccaacccttaacctcagtcttgacccttgagcctcactctgccc

SEQ ID NO: 531873 - DNA, 201 bp, Homo sapiens
tccatgggaagacagacaaggaaaactccaaaagaaatcaataggctggatgtggtagctcacgcctgtaatcccagcactttgggaggccaagcgggggyagatcacctgaggtcaggagttcgagacaaggctgaccaacatggtgaaaccccgtctctactaaaaataaaaaaatcagctgagcgtgatggcgggcgc

SEQ ID NO: 531874 - DNA, 201 bp, Homo sapiens
ccttttctcttccaggtgaaattggcctcctggtccaaggaaaagcctggaggctggtatagcacattccgtcgagggaagaaggtgagtcaccgaggccragatggggagtgacatgaaaattgatgggaaccagcaggggggtttgaggggtgggttctgagaggtgagatgaagaggataggctttcctctaccttcc

SEQ ID NO: 531875 - DNA, 201 bp, Homo sapiens
gcacaggcacctgagagttatcccccttggaggtgagggagctggggtatttatccaccaactcccattagtcattgggtgagggctgcctcaggggcatraacctccttcccccattgtgcactggcagagctcgtccatcccagaagccagagaacatcctgacatagtcacaacagcctactgtgtgaggagggaaat

SEQ ID NO: 531876 - DNA, 201 bp, Homo sapiens
ctcctggtccaaggaaaagcctggaggctggtatagcacattccgtcgagggaagaaggtgagtcaccgaggccgagatggggagtgacatgaaaattgaygggaaccagcaggggggtttgaggggtgggttctgagaggtgagatgaagaggataggctttcctctaccttcctagggatcgcaagctggaggtggggt

SEQ ID NO: 531877 - DNA, 201 bp, Homo sapiens
attgggtgagggctgcctcaggggcatgaacctccttcccccattgtgcactggcagagctcgtccatcccagaagccagagaacatcctgacatagtcamaacagcctactgtgtgaggagggaaatgcagatgagatctagatggcaccaagggcgtcagctacagtgaccctcccttttctcttccaggtgaaattgg

SEQ ID NO: 531878 - DNA, 201 bp, Homo sapiens
tccacagtcccactcttaccccttgctgtctctccagggcactccagggctgcctggaggagttggtcagccaggcgccgtgggtgagaaggtgagtgagrgaaggcaggggctgcacggggggaagagataaatctagtcctattgggcagggacattctggggagcccctccctgtctgctaggatgggacctctcccc

SEQ ID NO: 531879 - DNA, 201 bp, Homo sapiens
tgggtgagggctgcctcaggggcatgaacctccttcccccattgtgcactggcagagctcgtccatcccagaagccagagaacatcctgacatagtcacarcagcctactgtgtgaggagggaaatgcagatgagatctagatggcaccaagggcgtcagctacagtgaccctcccttttctcttccaggtgaaattggcc

SEQ ID NO: 531880 - DNA, 201 bp, Homo sapiens
ctcctcccctctttccctccctccctggctggggggctgggagattggtgcatcctctgctcccaaactcatcaccctaaggctctaggagaaaaacctcyctgaatcctcccacgtcctcccctgtctgtgcctcttttgtccttcagggccacattggattgatcggtctcattggccccccgggagaagctggtgaga

SEQ ID NO: 531881 - DNA, 201 bp, Homo sapiens
attggccccccgggagaagctggtgagaaaggagatcaggggttgccaggcgtgcagggaccccctggtcccaagggagaccctgtgagtgtcctgacctragcgggaagaatgcatttgaaggagggggtcggttgagagactgtgggtgtggggtctgggaaacgtgggtctggattaatgagggtgtgtgtggggaaa

SEQ ID NO: 531882 - DNA, 201 bp, Homo sapiens
agagaggaagatctggaggtctcagtggccagcttgagagctagggacaaattgtggggtgaggaggtgagacttgcaggtctaggattggagtcaggggyctgaatggaatcccatgaacttagtctgcaggttcccagggatcctggtctaattccgagaccccctggaaggggctgcccagatgaggggaggtggctc

SEQ ID NO: 531883 - DNA, 201 bp, Homo sapiens
ccgttggccctgcaggcaagaaggggtcccgggtaagtgacttgcccatcccattcctagggcctcctcagggtctggccctgccacatcccaggacatgsctcctgcaggacattcctgccctgacatccccctttccattccccacaacagggagaacgtggcccccctggccccactggcaaagatgggatcccaggg

SEQ ID NO: 531884 - DNA, 201 bp, Homo sapiens
gccccgttggccctgcaggcaagaaggggtcccgggtaagtgacttgcccatcccattcctagggcctcctcagggtctggccctgccacatcccaggacrtggctcctgcaggacattcctgccctgacatccccctttccattccccacaacagggagaacgtggcccccctggccccactggcaaagatgggatccca

SEQ ID NO: 531885 - DNA, 201 bp, Homo sapiens
gaaggggaagggaaaagggaggaagaaagggcgaggtcgcaaggggaagggcaggaaaaagaacaaggaaatttggacctcaagtccacctcctgactccbcagagaaccaggtaagggccctgagacctctcacttccggttttgaccacctgacttccggtcttgactgtctgacttctggtcttggtgcttgacttct

SEQ ID NO: 531886 - DNA, 201 bp, Homo sapiens
ccctctgcctgtgactctgcgtggcaggcactgaagcatctgatacccaacttccccccaccccgaatgtcagctccagtggcttgcatcattgagccagmttcgtccctgggtcttggtggaacttgtggccagggctgggcttaggacagacgtctgtctgatcccatctgttggtggctgagaagacaggatttgggg

SEQ ID NO: 531887 - DNA, 201 bp, Homo sapiens
acacacacacacacacacacacacacaccacagcacacttcttactttggagtccaggaaggtgcctgtccatatggttaatccctgattggactatgcckcattcccacgctcacacatccacatggtcatggaatcttaggcatccactctgaatataagtcccctgggactccaggaatgtgaaacaccgtgtccagg

SEQ ID NO: 531888 - DNA, 201 bp, Homo sapiens
atctctggtccctcatctatgatctttttctctggtctcggatccatgagctctgacttctctcagctgactgatgactgtcagggtgactgataacaggstgggggtgggtcccatcttatgatctctcccatctctgaccccctcaatctccagtcctggggcactagagggaggggacagacccagataagttcctga

SEQ ID NO: 531889 - DNA, 201 bp, Homo sapiens
gatattaattgaggtcagtgtttgggctgcacctagctggggatcacagtggaaggtcatggatagaaaccattattggtgttactgatgtccctagtttrgggtcaatgactggggggttgttggtgggtggtcactgactggaagtcatagtggggtcactcattggggccacaagttggaagagtgattttcaggggg

SEQ ID NO: 531890 - DNA, 201 bp, Homo sapiens
ctagctggggatcacagtggaaggtcatggatagaaaccattattggtgttactgatgtccctagtttggggtcaatgactggggggttgttggtgggtgktcactgactggaagtcatagtggggtcactcattggggccacaagttggaagagtgattttcagggggtcgcagatggggtaattggtttgggagtccct

SEQ ID NO: 531891 - DNA, 201 bp, Homo sapiens
cttccgggcagcagaatatccatctcggactcagttccagatctttcctgtgagtttctaggtggctggggttaggtgcaagagagtgggattcctattawaatttttttaaaatttatttatttaggcagggcgcagtggctcccgcctgtaatccgaacactttgggagacctaggtgggcagatcatttgaggtcagg

SEQ ID NO: 531892 - DNA, 201 bp, Homo sapiens
tgactctgtgactagagagaggcgcttggcttttactccaagcaccaggagatgccacttgagcacttgtgaaggaacatgatctgacttggagctttaaragctccccctgggccgggggcagtggctcacggctgtaatcccaatgctttgggcggctgaggcgggaggatcgcttgaggccaggagtttgaggccagc

SEQ ID NO: 531893 - DNA, 201 bp, Homo sapiens
cctcatgtcttctttctaattctctccactcagggatctattggatttcccggtcccctgggacccataggagagaaagggaagtcggtgagtcatgacckggggtaagggagaggggagaacttgtctgaggggaacagcatgtgtggttgtgtctgatgatgggtggaccctgggtgtttgtgtctatgcctggaacat

SEQ ID NO: 531894 - DNA, 201 bp, Homo sapiens
ggggtcagtattgcattaggggagttggagtggctctgtagtggggtagggaggtcagcctgaggttagagtcagtggtaggttgaaagtcagcctagctsaaactttgcacttcctgtgactcctgtttctctgtccccaacagggggtggttggcccctcaggccctcccggccccccaggattccctggcgaccctgg

SEQ ID NO: 531895 - DNA, 201 bp, Homo sapiens
ggagcgatgggtccacagaacccaactgcagacaggatagggacagctggggctcccaaagaactggaaaggcactggggtgcgggtaaccttctccattsttagtgacacatccttccctctgcctgtgactctgcgtggcaggcactgaagcatctgatacccaacttccccccaccccgaatgtcagctccagtggct

SEQ ID NO: 531896 - DNA, 201 bp, Homo sapiens
tgccttctcgggtaccatcttgacaattacatgcaacagaaggtacttgagctgcctggagcgatgggtccacagaacccaactgcagacaggatagggayagctggggctcccaaagaactggaaaggcactggggtgcgggtaaccttctccattgttagtgacacatccttccctctgcctgtgactctgcgtggcag

SEQ ID NO: 531897 - DNA, 201 bp, Homo sapiens
gagatcaggggttgccaggcgtgcagggaccccctggtcccaagggagaccctgtgagtgtcctgacctgagcgggaagaatgcatttgaaggagggggtsggttgagagactgtgggtgtggggtctgggaaacgtgggtctggattaatgagggtgtgtgtggggaaaatagggggatgtatctgggaactggcaagtt

SEQ ID NO: 531898 - DNA, 201 bp, Homo sapiens
ggtcggttgagagactgtgggtgtggggtctgggaaacgtgggtctggattaatgagggtgtgtgtggggaaaatagggggatgtatctgggaactggcargttggaggctgcgtctggggtttggggtctctctgtgggggaactggaggcttgtctagggttcggggtcttcctttggtaggattgaaggcttgtctgg

SEQ ID NO: 531899 - DNA, 201 bp, Homo sapiens
gggaaaatagggggatgtatctgggaactggcaagttggaggctgcgtctggggtttggggtctctctgtgggggaactggaggcttgtctagggttcggsgtcttcctttggtaggattgaaggcttgtctgggggatgtgtcagggcaatagggtgtaccccaccaatactgacccgatgtccttttcctagggtcccc

SEQ ID NO: 531900 - DNA, 201 bp, Homo sapiens
ttccatttcagggcctccctggtctgcaaggccctccaggattccctgggccaaagggcccccctgtgagtgaggtcaccctcattgggggttgggtgggyggaggatgtgggaagggaggaagccctgtatctgtgccccaactttttcccacctcatcccccagggtcaccaaggtaaagatgggcgaccagggcaccc

SEQ ID NO: 531901 - DNA, 201 bp, Homo sapiens
gaatggtggctcacatctggaatcccagaactttgggaggccgaggtgggaggattgcttgaggccaggagttcaagaccagtctgggcaacatagggagrccctgtctatacaataaataaatatgtccttccaagctgggtacagtggcacacacttgtctcagctacttgggaggctgaggagggagtattgcttgag

SEQ ID NO: 531902 - DNA, 201 bp, Homo sapiens
cgactcactgtttaacactttgactcaacccttgacttcattcccaagccctgttccttaacctagaccccaactccaactcaacactgaccctctctaarcttaatctgaaccctgactccaacccttaacctcagtcttgacccttgagcctcactctgccctaatcactgacccagaccttaaatgtgcccctgtttg

SEQ ID NO: 531903 - DNA, 201 bp, Homo sapiens
ccatgggaagacagacaaggaaaactccaaaagaaatcaataggctggatgtggtagctcacgcctgtaatcccagcactttgggaggccaagcgggggcrgatcacctgaggtcaggagttcgagacaaggctgaccaacatggtgaaaccccgtctctactaaaaataaaaaaatcagctgagcgtgatggcgggcgcc

SEQ ID NO: 531904 - DNA, 201 bp, Homo sapiens
acccttgagcctcactctgccctaatcactgacccagaccttaaatgtgcccctgtttgtgttcttccagggagcagacggggctcaggggcgccggggayccccaggcctctttgggcagaaaggagatgacggagtcagaggctttgtgggggtgattggccctcctggactgcaggtgggtgtctgggtttgggggtg

SEQ ID NO: 531905 - DNA, 201 bp, Homo sapiens
tgtgggggcggttatgactttgggagccagcaggcagctgtgttgtgtggttgtgtgatatgtgttctgggtgtggagacctttgttagctgtgtgtgacygtgatgtgtgtcacctctgggaggccagggacctgatctatctcatgttcctccttatccccagtaccagctcttcccacaacaagccaagtaggcatcg

SEQ ID NO: 531906 - DNA, 201 bp, Homo sapiens
ctacacccccaacccccagggagacattcaggagctgctgataagcccagatcctcaggctgccttccaggcttgtgagcggtacctccccgactgtgacwacctggcaccggcagccacagtggtgagtgagggactccatgactcctaatctcaggacacaggctgggtccttcctggctccagatccctagaaagagt

SEQ ID NO: 531907 - DNA, 201 bp, Homo sapiens
tatgtgcttgcgtgtggaggttgatggtgatagtgtgactgtgagtgacagggcagtgctgggacggtgtgtattgcgacaggtgagtatgcacttgtgckcttgtctatgtgctgattttcgagggtaaccgtgtgagtggttatgcgtgtgattgtgtgtctctgagtgccgctatgaggggtgtagttatgatttttg

SEQ ID NO: 531908 - DNA, 201 bp, Homo sapiens
ctccatgactcctaatctcaggacacaggctgggtccttcctggctccagatccctagaaagagtgaattctcatcccccagacatggggttaagtgaccygtgacctccaacacatcccaggcatgaatgactttgacctcaagtcatattcctgagccacccttgaccccaggttacatgaataacgttgactccaggt

SEQ ID NO: 531909 - DNA, 201 bp, Homo sapiens
aacatctgaggacctcctcttcactcacctgcttagcctaaagggagaggctgaggctgggcacagtggctcatacctgtaatcccagcactttgggaggstgaggctgaggtgggaggatcgcttgagcccaggagttcaagaccagcctgggcaacatagaaagaccccctccacccgcccccccccccaaaaaaaaca

SEQ ID NO: 531910 - DNA, 201 bp, Homo sapiens
ctggaggcttgtctagggttcggggtcttcctttggtaggattgaaggcttgtctgggggatgtgtcagggcaatagggtgtaccccaccaatactgaccygatgtccttttcctagggtccccctggtcccattggctctctgggccaccctgggcccccaggtgtggcggtgagtatgcagggaatcttttgtgggatg

SEQ ID NO: 531911 - DNA, 201 bp, Homo sapiens
tacttaggaggctgaggtcagaggattgcttgaactttggaagtcgaggctgcagtgagccagtgatcacaccactgcactccaagaccctgtgacagaamaagactctgtctcaaaaaataaaaatttaaaaaagctgggcatgggggtacatgcctgtagttctagctacttgggaggctgcagtgggaggattgcttg

SEQ ID NO: 531912 - DNA, 201 bp, Homo sapiens
aaggcgtcctaaaacagtcaggctcaaacaatgttagctgagaccacagctggtgtccttgtctcctccagggtccgcctggagcttctggggagcccggygcccccgggccccccggcaagagggtaagtgataagccacctcctgggtcctcagcttatctacagcccccactcaccttacagacctcactcatcccac

SEQ ID NO: 531913 - DNA, 201 bp, Homo sapiens
tctggggtttggggtctctctgtgggggaactggaggcttgtctagggttcggggtcttcctttggtaggattgaaggcttgtctgggggatgtgtcaggrcaatagggtgtaccccaccaatactgacccgatgtccttttcctagggtccccctggtcccattggctctctgggccaccctgggcccccaggtgtggcg

SEQ ID NO: 531914 - DNA, 201 bp, Homo sapiens
ggaatcttttgtgggatgaggtcactgtggtggtccaggccaggacctcagctctccctgtctgtaccctacagggccctctaggacagaaaggctcaaargggtctccggtgagtacaccctgcttccgtgggcttacacatcccagctccccacccccttcactgcaccagaaccctccacgtctctgccttcatttat

SEQ ID NO: 531915 - DNA, 201 bp, Homo sapiens
gatgggggctgagataagacttggtgggagctgtcaggcttatggggtcaaggctcactggtgtctctggacagggtgatcgtggcttcgatggcctccckgggctgcctggtgagaagggccaaagggtgagtgtgtgaggtccctcccccaagtctaagccctcctcccaatattcaagcccccccaacttctccctca

SEQ ID NO: 531916 - DNA, 201 bp, Homo sapiens
taactaacttgcccttgctaccttgttacctggagtgcttgttgtgtgccaagcattgttttaattcattcatctttgcatgatatatacacaggcgtcaytcatccactgactttacaggttgaccggttacctgtaagtggccataggggttgactaagtttcccaacttagttagatcactcagttagtaagaggcag

SEQ ID NO: 531917 - DNA, 201 bp, Homo sapiens
gacagaaaggctcaaaagggtctccggtgagtacaccctgcttccgtgggcttacacatcccagctccccacccccttcactgcaccagaaccctccacgyctctgccttcatttatttatttattcatgcaatcgtgcgttcgacaaatatttattcaacacctacggttgtatttcatcagatccaaaatgccatcaat

SEQ ID NO: 531918 - DNA, 201 bp, Homo sapiens
atatacacaggcgtcattcatccactgactttacaggttgaccggttacctgtaagtggccataggggttgactaagtttcccaacttagttagatcactyagttagtaagaggcagatgcaggatcagtattgggcagcagtctctggatttcacgctcttcattcaccttggcatggcattgcccggtggatgcggggg

SEQ ID NO: 531919 - DNA, 201 bp, Homo sapiens
gggcctcccaggggacactggacctaaggtaggtgatgggggctgagataagacttggtgggagctgtcaggcttatggggtcaaggctcactggtgtctytggacagggtgatcgtggcttcgatggcctccctgggctgcctggtgagaagggccaaagggtgagtgtgtgaggtccctcccccaagtctaagccctcc

SEQ ID NO: 531920 - DNA, 201 bp, Homo sapiens
ggccccccggtgagttccccggggggcgggggaatggacaccaaaacctggggggagagcaaggactatgtctgggtgtccccagagggtccttccgtgcscagcactgggccaggcacacactaggtgttcagaggatgtaggtgaagagggtagttccctgtaaaaccccaaggaaggtctggcctgggaggggggact

SEQ ID NO: 531921 - DNA, 201 bp, Homo sapiens
tctaagccctcctcccaatattcaagcccccccaacttctccctcagtatcagagtcatgatccctgtgtccctcctcacaccccatctgccttcccaggrggctggtctctccgcccacacccttccactctgaactcccctctgttccctctccagggtgactttggccatgtggggcaacccggtcccccaggagagg

SEQ ID NO: 531922 - DNA, 201 bp, Homo sapiens
gtgaagagggtagttccctgtaaaaccccaaggaaggtctggcctgggaggggggacttggggggacacccatgggggctctgacctgggtcttgtctctyggaccccatctctccctccctgtctctgtccatctcccttatctgtctctgtctatactggcgccactatttcatcttctgtctctctccctgctctctc

SEQ ID NO: 531923 - DNA, 201 bp, Homo sapiens
aggagaaggggctctgagggtggactccgtgtgtgtgtgtgtgtgtgtgtgtgcaagtgtgtgtgatcagataactgaagggcttatgtccaagttcacayctcttttctctccatctcccctgaccccaccccagggtgctggagagaaaggagcaaaaggagagcccgcagtgattgaaaaggtgaggggtctggattg

SEQ ID NO: 531924 - DNA, 201 bp, Homo sapiens
tgtctgtctgcctcttcatctctgcctgtctctctttctccctctctctccctcccccatctcccctctcttctccgtccccatcccctacgcccagggtscccctgccgagctgcatgggctgcgcaggcgccggcgcttcgtcccagtcccgcttccagtcgtggagggcggcctggaggaggtgctggcctcgctcac

SEQ ID NO: 531925 - DNA, 201 bp, Homo sapiens
tcggctcctggatgactgacacgatggcccccagtgcggatagccgggtgagtgactgcgcccacccctggggtcagggcctgggagggacagagcctttractgcccataggtgcctagggagtccacactggtgactgtcttgtagcccaaagtgtcctggatcccccagggccattggacctccctgtccagtaaccc

SEQ ID NO: 531926 - DNA, 201 bp, Homo sapiens
aggatcacggatgaattgtttgcacagcaaacaaaactccccgctcccctgtggtttcctttcccagggtagaggcaggcctggagccagcattcccaccmgtgaggccctcctaatggcgactgtgatcagggcttggaggaggacaggagaggtgccgcaagccagtgtagactgtgtaaccagatggcctgtgttcga

SEQ ID NO: 531927 - DNA, 201 bp, Homo sapiens
tcgcctattttaccaacacgtccagttacgagtacacggacgtgcccttccacaaccagtattcccacatctcgatgctggattacaacccccgggagcgygccctctatacctggaacaacggccaccaggtgctctacaatgtcaccctgtttcacgtcatcagcacctctggggacccctgagccaatgctgtggctc

SEQ ID NO: 531928 - DNA, 201 bp, Homo sapiens
tgagtcttccctcatccctggtcccagctttcccaacttgatcacagcacttcatctttgcctggcctctcttgggctgttcatttccccatcctcattcmccctgttcctgcctcccaggctgtgggaagctgaccggggtcagtaaccccatcaccgttcgggccatggggtcccgcttcggctcctggatgactgaca

SEQ ID NO: 531929 - DNA, 201 bp, Homo sapiens
ccggattcattaactgccggagactcagccctctgcctcccagtctgggaattgcagtctgggaatgggtcagaatcactcactcaacagtaaggcactamtatcactcccattttgcaggtggggaaagtgaggcacagagaggttaagtcactttcccatggtcacacagctagaaagagaagccgggttttgaagttc

SEQ ID NO: 531930 - DNA, 201 bp, Homo sapiens
actgtagcctcaacctccttggcccaagtgatcctcctaccttagcctctcaaatagttaggactacaggtgtgtaccactacatccagctaatttttctmtttctttttcttttttttggtagagatgggggtctcactatgttgcccaggctggtcttgaactcttggccttaagtgatcctcttgcctcagcctccca

SEQ ID NO: 531931 - DNA, 201 bp, Homo sapiens
atcgagaccatcctggctaacacagtgaaaccccatctccactaaaaatataaaaaattctccgggcgtggtggtaggcgcctgtagccccagctactccrgaggctgaggcaggagaatggcatgagcctgggaagcggaacttgcagtgagccgagatcatcccattgcactccagcctgggtgacagagcgagactcc

SEQ ID NO: 531932 - DNA, 201 bp, Homo sapiens
agttatgagtcagaggttggagtcatgtctgggtcaaaggccaggggtcaggcttggccatggttccatcttgatgcacaggagctgaaggacaggatgayggaactgttgcccctgagctcggtcctggagcagtacaaggcagacacgcggaccattgtacgcttgcgggaggaggtgaggaatctctccggcagtctg

SEQ ID NO: 531933 - DNA, 201 bp, Homo sapiens
aaaagagagagaaatgaggtctcactgcgttgcccaggctggtctcaaactcctggcttcaagcaattctcccgcttcagcttcccaaggtgctgggattrcaggcgtgagccaccgtgcctggtggatcttcccttttcagcagttttatggaggtataatttacagagcataaaattcacctgtgtaagcgtgcaattg

SEQ ID NO: 531934 - DNA, 201 bp, Homo sapiens
caagaaggtgatggtgagtggggactgactgactgtgagaatgatctaatgaggactggcatgagggtgtggacctggcaaattggcacctttggtgagargagttttggaaacgttggggaggtgggaggcaaggagttaaatgcaagcaagtgcaaactcgagcacagaccactccttggagaagcctggatgcgctga

SEQ ID NO: 531935 - DNA, 201 bp, Homo sapiens
cactccaggtagagagaccagcaagtgcaaagaccctgcagaaggaaggagcttagagtctgtgagaacaaagagagaggaagtgggttgggcggggggggtgggcaggaccagccagcacaggatctgtggaggaggaaggtgatctaatctctgttttgaaagttccttctgtctgctgtgtagagaattgactacagg

SEQ ID NO: 531936 - DNA, 201 bp, Homo sapiens
ctcacttcaggtctctgcttaaacgtccctttctcgccaggcgcggtggttcacgcctctaattccagcactttgggaggccgaggtgggcagatcacgargtcaggagattgagaccatcctggctaacacggtgaaaccccgtctctactaaaaaatacaaaaaattagccgggcgtggtggtgggtgcctgtagtccc

SEQ ID NO: 531937 - DNA, 201 bp, Homo sapiens
ctatttaagcccaggaggttgaggctgccaaaagccctgatagtaccactgcacaccagcctgggtgaccaagtgagactccatctccaaaaaaaaaaaaagaggagaagaagaagaagggaggtgggagagtagttctggatcctcccagaaccaaaggggcaggctttcttggggtattcctcttgtactgggccatcc

SEQ ID NO: 531938 - DNA, 201 bp, Homo sapiens
gcggcggccgcgggctgagggcgacggcggcggcggagcgaggtgatgcggggacgccaggagggggcgtgagtgcaggcaaaacagaggaaattaaaacyagcccggcgctcctctccgcggcccagcggctgccgccgccggctgatgcgtgggcggacgggtgggcggcgagggcactgcgcttcccgctcccccgag

SEQ ID NO: 531939 - DNA, 201 bp, Homo sapiens
tttttaagggatgagtttttcttagcctcgtttctggctctgttttatgtccctgcttttgtttttcttctttttctcccttgccaaaaaaaaaaaaaaaatttaagggacttttaaaaatcttttttttttcttttgagatagggtctcactttgtcacgcaggctggagtgtagtggcgccttcatagctcactgcagc

SEQ ID NO: 531940 - DNA, 201 bp, Homo sapiens
gcggagcgaggtgatgcggggacgccaggagggggcgtgagtgcaggcaaaacagaggaaattaaaactagcccggcgctcctctccgcggcccagcggcygccgccgccggctgatgcgtgggcggacgggtgggcggcgagggcactgcgcttcccgctcccccgagggagcgggccgggagcggggtccccggggccg

SEQ ID NO: 531941 - DNA, 201 bp, Homo sapiens
caggcgcgccgagccgcagcccgcgtccccgagccccccctcaccccgtcccggaccccctgccccgcagctcgcgctcgtgccccctcccccacgccccyccggggcgcctgggtgtcgagggaccgagcgccccgcggcgggccagagaagggacgcgcggcgggcggccgcggggcatgaggcggaggcgcgatgtcg

SEQ ID NO: 531942 - DNA, 201 bp, Homo sapiens
tcccggattcaagcgattctcctgcctcagcctcccaagtagctaggattacaggcatgcaccaccaggcctggctaattttttgtattttcagtagagayggggttttgctatgttggccaggctggtctccaactcccgacctcaagtgatccactcacctcggcctcccaaagtgttgggattacaggcataagccac

SEQ ID NO: 531943 - DNA, 201 bp, Homo sapiens
tttatgaaccaggattcgtctataaataacaggcctgtggctggtggggttcttccctcacccacaacattgcttcaactgcagctccagccccatccaargctcacagagcctccccttcacacacatacacacagcttcactgtggatgcacaatttcccatccgccagtgcattggcgcacacacacgcattcatacc

SEQ ID NO: 531944 - DNA, 201 bp, Homo sapiens
tgccccagccgtgggcgggcacgggccacgtggtgtacaacggctccctgttctataacaagtaccagagcaacgtggtggtcaaataccacttccgctcrcgctctgtgctggtgcagaggagcctcccgggcgccggttacaacaacaccttcccctactcctggggcggcttctccgacatggacttcatggtggacg

SEQ ID NO: 531945 - DNA, 201 bp, Homo sapiens
acctcatgtaatccacccaccttggcctcccaaagtggggggattacaggtgtgagccactgcgcctggcttttttttaaattttttttaatagatagggycttgctctgttccccaggctggaatgcagtggcacaatcatagctcactcctgagctcaaacaatcctcccacctcagcctcccgaggtgctgaggctat

SEQ ID NO: 531946 - DNA, 201 bp, Homo sapiens
ctgaaggaggtggaaggacatttcaggcagaggggatagccagtgcaaagaggtgatatagaagaaatatgtttggggttttgcaggaacagtgtggctgraacagagtgagtgagagggagagtggaaggaagtgagggcagggaggtgatgggacagattgtgaaggagttacgtgccttggggagaactctactttga

SEQ ID NO: 531947 - DNA, 201 bp, Homo sapiens
gcagctcgcgctcgtgccccctcccccacgcccccccggggcgcctgggtgtcgagggaccgagcgccccgcggcgggccagagaagggacgcgcggcggrcggccgcggggcatgaggcggaggcgcgatgtcggtgccgctgctcaagatcggggccgtgctgagcaccatggccatggtcaccaactggatgtcgcag

SEQ ID NO: 531948 - DNA, 201 bp, Homo sapiens
tcttcacgtggtcttttcctatgtgtgtgtcttcatctcctcttttatttatttgtattatttatttatttttagagatggggtctcgctctcttgctcargttggagtgcagtggtgtgatcacagctcactgcaacctcaaacacctggtcacaagtgatcctcccaccttagcctcctaaagtgctgggattacaggt

SEQ ID NO: 531949 - DNA, 201 bp, Homo sapiens
tacaggtgtaatcacgcttggctgaggatttgggcttttaactcaggggagatgggagccatggagggttctcagcacgggagagactcagtgtgattcakgtgttcacaggtgctctctggctgctgtgggggaagcagactgtgggggcaagtagggggaactgggagaccatggaagggatgaactctgctggttcag

SEQ ID NO: 531950 - DNA, 201 bp, Homo sapiens
agcctgggctaccgagtctcaaacaagcaaacaaaaaattcaggctctggagcccagagatagagcccaggtcttccagtgttctgtgcttccctgcatcrtggcacttatcacaccctgttataattgcctcttcctttttctttcttccttgcttatctgtgaatgtggggaagctgtggagggtgctgtcctatctgg

SEQ ID NO: 531951 - DNA, 201 bp, Homo sapiens
gcctgcatggctaaagggattcccacttctgaccagctaatgttagaaaagggacatgctctgtgtacccaaggcaggcttttggtccccgtggtagctaytgagctattcagagggacaggaaataaaactgctaattcaggccaggtgcagtggctcatacctgtaatcccagcaccttggggaggccgaggtgggagg

SEQ ID NO: 531952 - DNA, 201 bp, Homo sapiens
taagccccaacttccttattgttattattattaatattattatttttagagaaagagtctcactctgtcacccaggctggagtgtagtgatgccatcatarctcactaacatctggaactcctaggctcaagtcattctcctgtcttagcctcctaagaagctgggattcgatttccttattagtcagggggaatttagag

SEQ ID NO: 531953 - DNA, 201 bp, Homo sapiens
atggatagatggatggatgtatataaatggatggttggatgaatgaatacgagtgaatggatgaatgaatgaatgggtaaacagataaatggatgagcagrtgaatgaatggatggatagatggatagatggttggttttatgaatgaatggatagatggatgaatgggtggaaaggtgaatgaatggatggatgaatgaa

SEQ ID NO: 531954 - DNA, 201 bp, Homo sapiens
gagaggtacacaggagctctctgtattattgttgtaacttttctgtaaacctaaaataattccaaaagtaaaagttgattaggtaggcatggtggcccacmcctgtaatttcagcgctttgggagaccaagatgggaagatcgcttgaggtcaggagttcgagactagcttgggaaacatagtgagatcctgtctctacaa

SEQ ID NO: 531955 - DNA, 201 bp, Homo sapiens
tttttaggctctaagagagtcctggtgaatcccaggaagaatacatgatgagcacatggtgagccgggttctttttaaattttattttgttttttttttttaagacgcagggtcttgctctgttgaccaggctagagtggagtggtgtgaccacagcccactgtagcctcaacctccttggcccaagtgatcctcctacct

SEQ ID NO: 531956 - DNA, 201 bp, Homo sapiens
cccaactcagcctgctgagtagttgggactacaggcatgcatcaccatgctcagctaatctttaatttttttgtagagacagggttttacaatgttgtccragcgggtctcaaactcctaggttcaagcgaccctcctgcctcagccacccgaagcgcttcaccagccttttttagctgggatttctctccccacccccat

SEQ ID NO: 531957 - DNA, 201 bp, Homo sapiens
tttggggagtgtacatatgagagcgacagacaagaaataatatgaggccaggcacggtggctcacacctgtaatcccaacactgggaggccgaggcaggcrgatcacctgaggtcaggagtttgagaccagcctggccaacatggtgaaaccttgtctccactaaaaatacaaaattagccaggcgtggtggcacatgcct

SEQ ID NO: 531958 - DNA, 201 bp, Homo sapiens
gccaccaggtgctctacaatgtcaccctgtttcacgtcatcagcacctctggggacccctgagccaatgctgtggctcgggctgctgcctggggggcctcygggggctgggggcccttttcattctgcctgtgtccctcaagggtgatctctctgtctctgtcacgccctttctccccgcctttttgctgggcttttgttc

SEQ ID NO: 531959 - DNA, 201 bp, Homo sapiens
cacggatgttgatttcttagttgtgacaagtgtatcatggttatgtaagatgtaataacagggaaggcaggatgagaggtacacaggagctctctgtattmttgttgtaacttttctgtaaacctaaaataattccaaaagtaaaagttgattaggtaggcatggtggcccacacctgtaatttcagcgctttgggagacc

SEQ ID NO: 531960 - DNA, 201 bp, Homo sapiens
acctgtaatcccagcaccttggggaggccgaggtgggaggattgcttgagctcaggagttcgagacagggcgataccctgtctctgtgagaaaaaacaaamaaaaaacaaaagaaaaacaacaacaacaacaaacaaccagatgtgctggtaagtgcctgtggtcccagctacccgggaggctgaggtgggaggatcacct

SEQ ID NO: 531961 - DNA, 201 bp, Homo sapiens
taactaacccacttccctgataatggcattaattcacctaacctcatctttaaaggtgctacctctcaacactgttactttttttatttttattttattgkatttatttatttatttatttatttatttatttttgagacagagtttctctcttgttgcccaggctggagtgcaatggcacaatcttggctcaccgcaacc

SEQ ID NO: 531962 - DNA, 201 bp, Homo sapiens
gccaggctggtctcgacctcctaacctcatgtaatccacccaccttggcctcccaaagtggggggattacaggtgtgagccactgcgcctggctttttttwaaattttttttaatagatagggtcttgctctgttccccaggctggaatgcagtggcacaatcatagctcactcctgagctcaaacaatcctcccacctca

SEQ ID NO: 531963 - DNA, 201 bp, Homo sapiens
gcctctgagaaaatcgtgagtggccgccgcgcggggggcgctcccggggggcgtggtacccgcgccacagccgctgccgccgccgcagcccccggggcccycacctgtccccctctacccctgtgcttcccacgaccctgcccggcacgcctgggtaggggacgccctctcggggttccagggtcggacgtggaggcagaa

SEQ ID NO: 531964 - DNA, 201 bp, Homo sapiens
ttttttgttttttttttttgaggtaaggtctcactgtcgcccagactggagtgtagtcgcatgatctcagctcaccgcaacctccgcccccccaggctcawgcgattctcctgcctcagcctcccgagtagctgggattacaggcacgcaccaccacacccggctaatttttgtatttttagtagagacgggggtttcacc

SEQ ID NO: 531965 - DNA, 201 bp, Homo sapiens
tgagacggtgtgtttctgtgtgtctgtcacattaagtgtttattatttgggtatgtcctggtgtgtctatatgtgtgtgtttcggtgtgtatatgggggartgggagtggagaaagtttatgtgcactgccggcatggggtccgatgtgccttcctgtgtgtgagggtgcatcccagaatgagtgtgggtgtgtccctgag

SEQ ID NO: 531966 - DNA, 201 bp, Homo sapiens
gtgttagccaggatggtctcgatctcctgaccttgtgatccgcccgcctcggcctcccaaagtgctgggattacaggcgtgagccaccgtgcccggcagarttttaaaaataacaaatggataccaggtgcctgttgtgtgcaagatgatctattttaagtgctggcaacacagcagtgaacaaaaacaggtaaaaactcc

SEQ ID NO: 531967 - DNA, 201 bp, Homo sapiens
ctgaaagacctatgttggaatctagattttgtccccaacttgctctatgactctggccagtgcctttgtcactctgagctattgttttctcatctataaartgggaatgatgtcttacctcacagaattgttgtgggtaacagagatctgctgttcaaattcccatccttccacgcttccatatatctcttcatccatcca

SEQ ID NO: 531968 - DNA, 201 bp, Homo sapiens
actgtgcctagccccagcatgcactttttttttttttttccgagatggagtctcgctctgttgcccaggctgtagtgcagtggcacgatctcggctcactscaacctctgcctccaggttcaagtgattctcctgcctcagcctcctaagtagctgggattacaggcacccaccaccaggcctggctaatttttgtatttt

SEQ ID NO: 531969 - DNA, 201 bp, Homo sapiens
tcagcctcccaaagtgctgggattacaggcgtgagccactgcacctggctttattttatttatttattattattattattattattattattattattathgagagagagtctcactctgttgcccaggctggagtgcagtgacaccatcccggtttcactgcagccgtgacttacctgggctcaggtgacagcaggtttt

SEQ ID NO: 531970 - DNA, 201 bp, Homo sapiens
ctcagcctcccaaagtgctgggattacaggcgtgagccactgcacctggctttattttatttatttattattattattattattattattattattattaytgagagagagtctcactctgttgcccaggctggagtgcagtgacaccatcccggtttcactgcagccgtgacttacctgggctcaggtgacagcaggttt

SEQ ID NO: 531971 - DNA, 201 bp, Homo sapiens
gaccagcctggacaacatagcaaaaccccaaaagaaaatacatttttagccaggcacggtggctcacacctgtaatcccagcactttgggaggccaaggcrggtggatcacctgaggtcaggagttcaagaccagcctggccaacatggtgaaacccggtggctcacacctgtaatcccagtgctttgggaggctgatgcg

SEQ ID NO: 531972 - DNA, 201 bp, Homo sapiens
ggtctcgaactcctgacttcaggtgatctgcccgcctcagcctcccaaagtgctgggattacaggcgtgagccactgcacctggctttattttatttatttattattattattattattattattattattattattgagagagagtctcactctgttgcccaggctggagtgcagtgacaccatcccggtttcactgcag

SEQ ID NO: 531973 - DNA, 201 bp, Homo sapiens
gtaatcccagtgctttgggaggctgatgcgggcagatcacgaggtcaggagatcgagaccatcctggctaacatggtgaaaccccgtctctactaaaaatrcaataattagctgggcacggtggcgggtgcctgcagtcccagctactcgggaagctgaggcaggagaatggcgtgaacccaggaggtggagctcgcagtg

SEQ ID NO: 531974 - DNA, 201 bp, Homo sapiens
tctgaatctctgagccttcccgcttgtccctcagtgctgctgtcgtgatcagaaacacagctaaggtttgagcagctcttgggcgcgctctttcttgtctkgtcatttctgcgatactcaggggccagagacacatagaggcaacaaattcccaggaaacggatggaatggtgtccttcgataaagggatatttgcaaaga

SEQ ID NO: 531975 - DNA, 201 bp, Homo sapiens
gtcagagagaagccacagcctctgcctagcctactgggcacctgtctgcagcctaatctcaggtgatccttccctaggacgaacaacagaagcaagctccrtggcagaaaggagaaattcacggtagacctgtgaaggtgtttgctctctgtcccactggttcatcagcatcctcattcaacaaacataccttgtgccagg

SEQ ID NO: 531976 - DNA, 201 bp, Homo sapiens
tgctgctgtcgtgatcagaaacacagctaaggtttgagcagctcttgggcgcgctctttcttgtcttgtcatttctgcgatactcaggggccagagacacrtagaggcaacaaattcccaggaaacggatggaatggtgtccttcgataaagggatatttgcaaagatatctcaatgaggactaattaattaagcgagcca

SEQ ID NO: 531977 - DNA, 201 bp, Homo sapiens
agactgcttttggaagagacctgaacgcttgagccccggggatggggaagagttagcctggccctaagaaggggagagtgcggggattggcagcaggcccrgcccgtgcaaaggcctggagatgagaataagcatcctgtgacctgggaagggaaagacaattagagaggatgggccagagagaacacagcagtgtgcgcc

SEQ ID NO: 531978 - DNA, 201 bp, Homo sapiens
ggagaatggcatgagcctgggaagcggaacttgcagtgagccgagatcatcccattgcactccagcctgggtgacagagcgagactccatctcaaaaaaaagagagagaaatgaggtctcactgcgttgcccaggctggtctcaaactcctggcttcaagcaattctcccgcttcagcttcccaaggtgctgggattacag

SEQ ID NO: 531979 - DNA, 201 bp, Homo sapiens
agaggatcgcttgaggtcaggagttcgaggctgaagtgagccatgattgtgccactgcactccagcctggacgatagagtgacaccctgtctcttaaaaamtaaaaataatagtattagcagacacttgtgtagctcttactacatgctgatgactgttctaattgctcttatatatattatgaactcatttgatcctcct

SEQ ID NO: 531980 - DNA, 201 bp, Homo sapiens
aatctctgcctcccgggttcaagcgattctcctgctcagcctctcgagtagctgggattataggcgcacagcaccacagccggctaaatttttttttttttgtatttttaatagagacagggtttcaccacgttgcccactctggtctcgaactccagacctcagatgatctgcccgccttggcctcccaaagtgctggga

SEQ ID NO: 531981 - DNA, 201 bp, Homo sapiens
tctgcctgtgtccctcaagggtgatctctctgtctctgtcacgccctttctccccgcctttttgctgggcttttgttctctgcctatgtatttctgtctawtttttcaatttcccctcttctcctttattgatctctgcttttaatacaccacttctttctttctgcctttttatggatgtctttttctttttatggctct

SEQ ID NO: 531982 - DNA, 201 bp, Homo sapiens
tgcccaatacctcaaggtttgacaagagcaggctgctattatctcaagctttccaaagggacgtggccccctgtcacggctcagacatagcagacaggcayattctccatcattcatcacggccctcctgccattctcgcagtcagagagaagccacagcctctgcctagcctactgggcacctgtctgcagcctaatctc

SEQ ID NO: 531983 - DNA, 201 bp, Homo sapiens
ggtgggctaatagttggagtccccgggatcgctcataattcacagcttggtttatctgtgctgcagctcacggcaccgattctgctgggagatctagtaayggctgtgcaaatgatcaatgattgtggtgctttgtttctctgtaaaacactggggtttttttaatcagaatttcttccatgcctgtcagaatgcatcctg

SEQ ID NO: 531984 - DNA, 201 bp, Homo sapiens
cagagctatttgtgagtatgggtatgtgcacttctgtccatggctgcagaattatccaggataaaagcaatggccaggtgcagtggcttatacctattatstcagcgctttgagaggccaaagtgggaggatcacttgaacccaggagttcaagaccaacctgggcaacattgtgagatcctgtctctacaacaaaatatg

SEQ ID NO: 531985 - DNA, 201 bp, Homo sapiens
cggctcactgcaacctctgcctcctgggttcaagcaattcttctgcctcagcctcctgagtagctgggcttacaggtgcctgccaccacgtctggctaatytttgtatttttagtagagatggggtttcaccatgttggccagactggtctggaactcctgacctcaggtgatccgcccaccttcacctcccaaagtgctg

SEQ ID NO: 531986 - DNA, 201 bp, Homo sapiens
gagaagtaagtaaagtgcagagccacaggctcttgtggcgacattaaggagttttatctctatcctaagaataaaaggaatccaccaatatggttttggcygggaggataatatgatcacacgtgcgttgtaaagtttcccagctttcagaggccaaggcgggtgaatcacttgaggtcaggagtttgagaccagcctggc

SEQ ID NO: 531987 - DNA, 201 bp, Homo sapiens
tcatgtctgggtcaaaggccaggggtcaggcttggccatggttccatcttgatgcacaggagctgaaggacaggatgacggaactgttgcccctgagctcrgtcctggagcagtacaaggcagacacgcggaccattgtacgcttgcgggaggaggtgaggaatctctccggcagtctggcggccattcaggaggagatgg

SEQ ID NO: 531988 - DNA, 201 bp, Homo sapiens
ataatgacaaatctggtgatgcagctcccagtgtagtgcccatcagagtaatgcaaccttcagtagaataacaagtagatgtagcctttagtgtgatgccaggatagtattgaggccaaaaatgtatcttaaatatgactttggttctgcagatagatgctggctggggcacttggtgcagtgagaaggaaaggaaatttg

SEQ ID NO: 531989 - DNA, 201 bp, Homo sapiens
cagagaaccaccccctgtggcttctcctccactccctgctaggggggcactagattttctggcttctcaccaagattggctaggatgccagagtttgctgmcagaattgcaattggagggtgactcctacagcccccagggctgggagggagttgctttgggggcgggactaacgaggtcagtggaggcggggctaaagga

SEQ ID NO: 531990 - DNA, 201 bp, Homo sapiens
ttagtagagacagggtttcaacatattggccaagctggtcttgaactcctgagctcaggcagtccacccgccttggcctcccaaagtgctgggattacagycatgagctactgtgcctggcctcaacttttttttttcctcccaagacagggtctcactctgtcacccagactgtagtgcaatggcatgatcatagctcac

SEQ ID NO: 531991 - DNA, 201 bp, Homo sapiens
attagctgggtgtggtggcaggcgcctgtaatcccagctactagggaggctgaggcaggagaattgcttgaacctgggaggcagaggttgcggtgagctgmgatcgccattgcactccagcctggacaacaagagtgaaactctgtctcaaaaaaaaaaaaaaaaaaaaaagattagagtgatagcagtcgggcatggagg

SEQ ID NO: 531992 - DNA, 201 bp, Homo sapiens
caccgtgttagccatgatggtctcaatctcctgacctcatgatctgcccgcctcggcctcccaaagtgctgggattacaggtgtgagccaccgcacccggycttttttttgtatttttagtagagacagggtttcaacatattggccaagctggtcttgaactcctgagctcaggcagtccacccgccttggcctcccaaa

SEQ ID NO: 531993 - DNA, 201 bp, Homo sapiens
tccacaatcacaccttcataaggatttgtggattcctccttcaaacaaaaacaaataaataacgggcacatagtagtgtttagtaaggaggggttgttttrtttacccctctagccaagcctggaataaacatttctcaagtgtctaaatccatttcaccttcctcaggactggggagaacaaatggaaagtgaccaggca

SEQ ID NO: 531994 - DNA, 201 bp, Homo sapiens
gcagtgagccgagatcacgccactgcactccagcctgggcgacagagcaagactccgtctcaaataaataaataaataaataaataaataaataaataaawaagtccctttctccaatcactctgtttaaagtttacttccccttcctcctaatatcttatgtactttacttttttcccgtatttcttgactgtctcaccc

SEQ ID NO: 531995 - DNA, 201 bp, Homo sapiens
ggattcagtgttagtgcctgagagacagtaatgtgctgttttcatttgttcctacatgcatgtattcatttattttattttattttattttattttatttwgagacggggtctcactctgtcgcccaggctggcgtgaagtggtgcaatctcggctcactgcaacctccacctcccgagttcaagctcttctcccgcctca

SEQ ID NO: 531996 - DNA, 201 bp, Homo sapiens
gatcccatctctacaataactttttctttttatttctttttttttttttatttttgagatggagtcttgttctgtcacccatgctggagtacagtacagtattgtgatgatctcagctcactgcaacctctgcctcccgggctcaagagattctagtgcctcagcctcccgagtagctgggactacaggggcgtgccacca

SEQ ID NO: 531997 - DNA, 201 bp, Homo sapiens
agatcccatctctacaataactttttctttttatttctttttttttttttatttttgagatggagtcttgttctgtcacccatgctggagtacagtacagtattgtgatgatctcagctcactgcaacctctgcctcccgggctcaagagattctagtgcctcagcctcccgagtagctgggactacaggggcgtgccacc

SEQ ID NO: 531998 - DNA, 201 bp, Homo sapiens
tcttgaactcctgacctcaggtgatctgcgtgcctcagcctaccaaagtgctgggattacaagtgtgagccactgcacccagcccaacatgcccttctgcrgttgctgagggaagactgtggcactgcacactggcttgcctctttttttcttcgttgtttcagagacagggttttgctctgtgcccaggctggagtgcag

SEQ ID NO: 531999 - DNA, 201 bp, Homo sapiens
aagatcccatctctacaataactttttctttttatttctttttttttttttatttttgagatggagtcttgttctgtcacccatgctggagtacagtacagtattgtgatgatctcagctcactgcaacctctgcctcccgggctcaagagattctagtgcctcagcctcccgagtagctgggactacaggggcgtgccac

SEQ ID NO: 532000 - DNA, 201 bp, Homo sapiens
agacagggttttgccatgttggccaggctggtctcgaactcctggcctcaagtgatccacccaccttggcctcccaaagtgctgggattacaggcgtgagscaccgcacacagccagaattttatttcccaatgccaggtcatcctaggatccaaggttgagccaggtcaggcccatgagccaacagcactagggatgccc

SEQ ID NO: 532001 - DNA, 201 bp, Homo sapiens
attacaggcatgagccactgcatccagcctggaaaaggttgttcttgttgctcctggggacccagtagactctcggtcccagtttactcttactttacacatagttccaacaatcctgggcagctagtaactagccttgcttaatagatgagaagacaggtgtcattgcacaagaagaaagaaacaaaaaggcaaagccag

SEQ ID NO: 532002 - DNA, 201 bp, Homo sapiens
gatgcccccactccatataggctgtcacacccagggtatcacatatccacacagcagcagatacacacatgcacacacacagtcacaccaacccatgcacrtgcctcagatacacagcaacacgtggcacagacatgcacattgacaccccaaaccctggcacacacacatacagaccacatcacagtcttacaaacacag

SEQ ID NO: 532003 - DNA, 201 bp, Homo sapiens
ctggagtgcagtggtgccatctcagctcacctctgcctcccggttcaagcaattctcctgcctcagcctcccaagtagctgggactacaggcacgtgccascacacctggctaatttttatatttttagtagagacagggtttcaccatgttggccaggctggtctcgaactcctgacctcaagtgattcacctacctcgg

SEQ ID NO: 532004 - DNA, 201 bp, Homo sapiens
ataagtgtgcacctccatgcccgataaatttttaaaatattttgtagaataggggtcttgctatgttgcccaggctgttctcaaactcctggcctcaagcrgttctcctgccttggcctcccaaagtgctgggattacaggtgtgagccaccacacctggtccacaccggctcttaaagtattcacctggaagtcactgcc

SEQ ID NO: 532005 - DNA, 201 bp, Homo sapiens
tattttattttattttattttattttgagacggggtctcactctgtcgcccaggctggcgtgaagtggtgcaatctcggctcactgcaacctccacctccygagttcaagctcttctcccgcctcagcctcccaagtagctgggactacaggcacacaccaccacacccacctaatgtttacatttttagtagagacaggg

SEQ ID NO: 532006 - DNA, 201 bp, Homo sapiens
ggctctcatgctggcacatgtggcagagctatttgtgagtatgggtatgtgcacttctgtccatggctgcagaattatccaggataaaagcaatggccagktgcagtggcttatacctattatctcagcgctttgagaggccaaagtgggaggatcacttgaacccaggagttcaagaccaacctgggcaacattgtgaga

SEQ ID NO: 532007 - DNA, 201 bp, Homo sapiens
aactcctgggctcaatgatcctcctgcctcggcctcccaaagtactgggattacaggcatgagccaccgtgcctgactgtggagcacataattgaaagtcmgggcaggggtgaggggagcaggacctggaagagaatagattgagcaaagatgagatcctaggtaaagtcccggtttggcttgctccacaagggtgggggg

SEQ ID NO: 532008 - DNA, 201 bp, Homo sapiens
ttgtatttttagtagagacagggtttcaccatgttggccaggctggtcttgaactcctgacctcaggtgatctgccgcccaaagtgctgggattataggcwtgagccaccacgcccggccatatttttctttatagccctcgtttccacatttctatgattcttctattcattcattctctgtttccccactagagcggca

SEQ ID NO: 532009 - DNA, 201 bp, Homo sapiens
ttccccactagagcggcagtttatcagggttcagctagctttgttgtttctccagtgtctagagcagagcctgacacacagtaggtgctcaagaaatatckgctgaatggatgaatggatggatggatggaccccctcacacacacagagtgtctttctttctcaaaccacaggattcttttatcaagagagtgtcagggg

SEQ ID NO: 532010 - DNA, 201 bp, Homo sapiens
tccagcttgggcgacagactgagaccctgtctccacaaaaaagaaagaaagaaaacccatcttctttacctgtgcctgacattccaccgatagggcactgytgtttaggggtaagacgatgttctcctggggctcctttagagcatgtaaatgtcccagtggagggaagtaaaaggaaatttaaagactccgagttagtgt

SEQ ID NO: 532011 - DNA, 201 bp, Homo sapiens
gtaggccaaccatatggtatgtgtggatttctttctttctttctttctttttttgagatggagtttcgctcttgttgcccaggctggaggtcagtggcgcratctcggctcaccgcaacctctgcctcctgggttcaagtgattctcctgcctcaacctcccgagtagctgggattacgggcatgcaccaccacatccagc

SEQ ID NO: 532012 - DNA, 201 bp, Homo sapiens
caagatcccatctctacaataactttttctttttatttctttttttttttttatttttgagatggagtcttgttctgtcacccatgctggagtacagtacagtattgtgatgatctcagctcactgcaacctctgcctcccgggctcaagagattctagtgcctcagcctcccgagtagctgggactacaggggcgtgcca

SEQ ID NO: 532013 - DNA, 201 bp, Homo sapiens
gcaagatcccatctctacaataactttttctttttatttctttttttttttttatttttgagatggagtcttgttctgtcacccatgctggagtacagtacagtattgtgatgatctcagctcactgcaacctctgcctcccgggctcaagagattctagtgcctcagcctcccgagtagctgggactacaggggcgtgcc

SEQ ID NO: 532014 - DNA, 201 bp, Homo sapiens
tctcactctgtcgcccagtctggagtgcagtggcacgatctcatctcactgcaacctctgcctcctgggttcaagcaattctcatgcctcagccacccaartagctgggactacaggcgtgcaccaccatgcctggctagtttttgtatttttaatagagacggggttttgccatgttgcccaggctggtcttgaactcct

SEQ ID NO: 532015 - DNA, 201 bp, Homo sapiens
acacacctgggagacgagagaccaaaagaggcacacacttgagaaaccagtggaaaaaaaatgagccaggaatcaagttgaattatccttgacctagcagaggagacagagaaccaccccctgtggcttctcctccactccctgctaggggggcactagattttctggcttctcaccaagattggctaggatgccagagtt

SEQ ID NO: 532016 - DNA, 201 bp, Homo sapiens
cccagagggaagagaaggcaaaaccagagagacccctgtcctcccgacccgtgtgagctcccagcgccactggggacccttcgttgtcccctctcctccckgctcctccttctgactactcaaatattccaaggcaggaaactcatgaatatttataggggcctggcagtgaggcagatataaaaaaaaaaaaattggaat

SEQ ID NO: 532017 - DNA, 201 bp, Homo sapiens
gacacacctgggagacgagagaccaaaagaggcacacacttgagaaaccagtggaaaaaaaatgagccaggaatcaagttgaattatccttgacctagcagaggagacagagaaccaccccctgtggcttctcctccactccctgctaggggggcactagattttctggcttctcaccaagattggctaggatgccagagt

SEQ ID NO: 532018 - DNA, 201 bp, Homo sapiens
ataaagtctagagtttagttaatagtaatggatgcacggatgttgatttcttagttgtgacaagtgtatcatggttatgtaagatgtaataacagggaagkcaggatgagaggtacacaggagctctctgtattattgttgtaacttttctgtaaacctaaaataattccaaaagtaaaagttgattaggtaggcatggtg

SEQ ID NO: 532019 - DNA, 201 bp, Homo sapiens
cagtgcattggcgcacacacacgcattcatacccagccgaacacacagacacgtgttcacacctgcctgggtctggcccactgcctcccttccactcacasacaccccgatgcaaagtgagcctgaatgcatcctcctctgtccacattcgggctgatgcagccactcacactgcatctgcacaaaacacacagttgggct

SEQ ID NO: 532020 - DNA, 201 bp, Homo sapiens
tgaatgcatcctcctctgtccacattcgggctgatgcagccactcacactgcatctgcacaaaacacacagttgggctgggtgtggtggcttatgtctgtratcccaatactttgagaggctgaggcaggaggattgcttgagcccaggagtttgagaccagcctgggcaacatagtgagaccctatctctacaaaagaag

SEQ ID NO: 532021 - DNA, 201 bp, Homo sapiens
catgccaccacttccggcttattttttaattttttgtagagatggggtctcactatgttgcctaggctggtctcaaactcctgggctcaagtgatcctctsgcctcaaaatactgggattacaggtgtaatcacgcttggctgaggatttgggcttttaactcaggggagatgggagccatggagggttctcagcacggga

SEQ ID NO: 532022 - DNA, 201 bp, Homo sapiens
cagaacgtctcccagtccatggaggtccttgagttgcggacgtatcgcgacctccagtatgtacgcggcatggagaccctcatgcggagcctggatgcgcrgctccgggcagctgatgggtccctctcggccaagagcttccaggtgggtcctcctgtgtccagaccagaggtcaaacaaatgactgggatttggtatcca

SEQ ID NO: 532023 - DNA, 201 bp, Homo sapiens
gggcccagtgcggtaataccaacatgttgggaggccaaggtgggcagatcacctgaggtcaggagttcgagaccagcctggccaacatggtgaaaccccayttctactaaaaatacaaaaaattagctgggcatggtggtgtgtgcctgtaatcccagctactcgggaggatggggcaggagaatcacttgaacctggaag

SEQ ID NO: 532024 - DNA, 201 bp, Homo sapiens
tcagccctctgcctcccagtctgggaattgcagtctgggaatgggtcagaatcactcactcaacagtaaggcactactatcactcccattttgcaggtggrgaaagtgaggcacagagaggttaagtcactttcccatggtcacacagctagaaagagaagccgggttttgaagttcaagttgtcggcctccagggtccat

SEQ ID NO: 532025 - DNA, 201 bp, Homo sapiens
tgagatggagtcttgttctgtcacccatgctggagtacagtacagtattgtgatgatctcagctcactgcaacctctgcctcccgggctcaagagattctwgtgcctcagcctcccgagtagctgggactacaggggcgtgccaccacacccagctaatttttgtatttttagtagagatggggtttcaccattttggcca

SEQ ID NO: 532026 - DNA, 201 bp, Homo sapiens
gggcttgtggagcacatatgaggatatggcacatgttggggctgctcagggtatagcgcctgtgccaggctgccaaggcctgtacttgcaggtaaagcttytcttctcaagggcatggcaaggtaggtttttggcaggggctcctggtaagaacagcagagacaggacaaggatccacagcttccaagaggagccaatctg

SEQ ID NO: 532027 - DNA, 201 bp, Homo sapiens
cagtaaggcactactatcactcccattttgcaggtggggaaagtgaggcacagagaggttaagtcactttcccatggtcacacagctagaaagagaagccrggttttgaagttcaagttgtcggcctccagggtccatgtgcttcacagctacactcaactacctttgactccatgaccgcttcaaaacccagagcccctg

SEQ ID NO: 532028 - DNA, 201 bp, Homo sapiens
agcctgggcaatacagcaagatcccatctctacaataactttttctttttatttctttttttttttttatttttgagatggagtcttgttctgtcacccakgctggagtacagtacagtattgtgatgatctcagctcactgcaacctctgcctcccgggctcaagagattctagtgcctcagcctcccgagtagctggga

SEQ ID NO: 532029 - DNA, 201 bp, Homo sapiens
ctgctggtgttgggaccatagcatggaagaagacagactcagccctgcccttttggagctcacatcctaatggggcatgcagacacccaccatgcaaggaraagaataaaatataagaactttgtggagggaaggggcagggagctgtggagatgtgcacaggaaggaacacagacctatcttagatgatggagaaggctt

SEQ ID NO: 532030 - DNA, 201 bp, Homo sapiens
cacgggcctctctccggcagctttgactgggagcagctgctcagtgcttagccaggattgatttccctttaagcagcccattctcgctaacaaaggtctcsggtgacccaggtggccgccactaccccctcccctccaagcagaggacgtgcctgcctctaggctggagctgttttctgcctctgagattgattcatctga

SEQ ID NO: 532031 - DNA, 201 bp, Homo sapiens
aacctgggaggcagaggttgcggtgagctgcgatcgccattgcactccagcctggacaacaagagtgaaactctgtctcaaaaaaaaaaaaaaaaaaaaaagattagagtgatagcagtcgggcatggaggctcacgcctgtaatcccagcactttgggaggccagggtgagtggatcacttgaggtcaggagtttgagac

SEQ ID NO: 532032 - DNA, 201 bp, Homo sapiens
atagcctgtattgtggaaaaatactgaagcctgttaaaaatgtagatcagtttcccataatcatcagtgtttcagaaggtaatttttcctaggtaaactcrttaaacttacattgtaatgaatgatttgatagattataaaaattgtttaactcatatgcataattttaaatgtctgaattttttttttttttttttggtt

SEQ ID NO: 532033 - DNA, 201 bp, Homo sapiens
cctcctttctgacctttgcttgtttcctctggtttttagaaaacagatttttggttcaaaatattgtaacacattttttccttcaaataaaatattgatasacttggtaagaaattcttcctcctctgattcctagttctgaatgttttacttagcttattggtgcagcaagaacgaaaacatatgtgcaagaacattctg

SEQ ID NO: 532034 - DNA, 201 bp, Homo sapiens
taatacataaattaaatgctgagattgaagaactgacagcctcagcaagaggaaccataaggactccaatggcagcagcagcgtttgcagagaagtgatcktgacagttggtagacaacatcgggtactccaggtctctccaaactgactatatatttatttgttattttaaaaatacaactatattttgggtagtttttt

SEQ ID NO: 532035 - DNA, 201 bp, Homo sapiens
ctgatagaattggggtcagaaaaaataataaatggcataatgatacttttggctatttgtttcagtagaacataatttttaaatacattttcatgaatcaytggttcttcctagaaacaatttacatgtgaaagtggataaggataagtaggaaagatggtgtagactgctttgatctttatagatatgagtttttttaca

SEQ ID NO: 532036 - DNA, 201 bp, Homo sapiens
tttctaaaccgcattatactttcaaataggttgtgggagccgattctgaatgtcattttttgcatccgttcaagttgtattataataaacttgaattatgrgtgtataatgaattggaaatattattacagtcttcatgaaggcacccaataaaattttcttaaggaagccagctaatgccgtgtgatctgaaaggagttc

SEQ ID NO: 532037 - DNA, 201 bp, Homo sapiens
tgtacacttcagcagcttgcacaagggagctcacttaaaaggagaaattgtgtagttttaaaatatattttgtgtaaaataccttactatgctataaaccmccattaaaaaccagtgttttgatttggtacttaaatatttttggagtgaaaattatcactaaagtaacatgactccaacaaaagtatggtttcattataa

SEQ ID NO: 532038 - DNA, 201 bp, Homo sapiens
acatcttttttacatgaaggagctgtgtatcatttgaaattactcaaatgatgtcttgctctgaggcataaatcccaggtacttagtgtttttaataatayggtgccactgcaggatttgggggcggtggggaagaacaagcataatggtagggggaggcttggcctgaaactaaccactgagtgaattgcactgcaggtt

SEQ ID NO: 532039 - DNA, 201 bp, Homo sapiens
cctatagacgcccattgccctgctgctgtacacttcagcagcttgcacaagggagctcacttaaaaggagaaattgtgtagttttaaaatatattttgtgyaaaataccttactatgctataaaccaccattaaaaaccagtgttttgatttggtacttaaatatttttggagtgaaaattatcactaaagtaacatgact

SEQ ID NO: 532040 - DNA, 201 bp, Homo sapiens
ttctgaaaaaggtgtaatgccctaatatttttaaatccttatcctttgattttttaaaaactgacctattgataaaactataaattttcattttccagtgyagttagttacctttttaaacataaatgcacaacaagcaaatgaatttaagagaactaaactggaataagtgttcataaatgaaacccttggactatttaa

SEQ ID NO: 532041 - DNA, 201 bp, Homo sapiens
caggcacgccggccctggagtagaggcgaggcagaggcggcccgcaggaggcttctaggcgtcgggcctagcgaggggagcgaactctgaagcctgcgggycccggcgacacggagggcagaccaaggtcacgaccccgaggcgccctagccgaggggacggctccgacctccagacccaggcggccttgcgaccggcagg

SEQ ID NO: 532042 - DNA, 201 bp, Homo sapiens
tggcgtgttcttggctcactgcaacctccgtctcccgtgttcaaacgattctcctgccttggcctcccaagtagctgggattacaggcgcccaccaccgcrcccggctaatttttgtatttttagtagagacggagtttcaccatgttggtcaggttggtctcaaagtgattcgccctggtcaggtcgcacctgacctcag

SEQ ID NO: 532043 - DNA, 201 bp, Homo sapiens
ccagtatcacaaagttctattttgataaaacattaacttttagaaaaacaagtaggctgactttttcctatttttctacacaggtaggaaatatgtgcccmgagcagtcttggtggacctagaacctgggacgatggacagcattcgatctagcaaattaggagctctctttcaacccgacagttttgtccatggtatgtt

SEQ ID NO: 532044 - DNA, 201 bp, Homo sapiens
acaacgaagcctacggtaggactggcggggctctgggagcagtggtcccgcaactgggaacacaagcagaggaagggcagaggcccaggagatggaaatgkcaaagcagtgatgtctatgctcagggaggcgacaggcagggcagcaggatcctagagtggtgggtccccaagccctggtcaagacgcaggaatggggaag

SEQ ID NO: 532045 - DNA, 201 bp, Homo sapiens
acaaaaatacctggtccaaacaagaaaaacaaaaagacaagcaaaactaaagaactgcagtcttctgatctttatttctgaagagctagcctttaacatayatgtttatatagtttaaatttcttactactgttagatcccaggaattcattaataatcatccttggctttccttttaaaggctattttgaaatggtcttt

SEQ ID NO: 532046 - DNA, 201 bp, Homo sapiens
gaatgctaactttctctgtggttaacacagcctttttcggggtccgtttactctgaccttcctcctgctttcagttctgggagatgattggtgaggaacaygggatcgacttggctgggagcgaccgcggggcctcggccttgcagctggagagaatcagcgtgtactacaacgaagcctacggtaggactggcggggctc

SEQ ID NO: 532047 - DNA, 201 bp, Homo sapiens
ggcctcggccttgcagctggagagaatcagcgtgtactacaacgaagcctacggtaggactggcggggctctgggagcagtggtcccgcaactgggaacasaagcagaggaagggcagaggcccaggagatggaaatgtcaaagcagtgatgtctatgctcagggaggcgacaggcagggcagcaggatcctagagtggtg

SEQ ID NO: 532048 - DNA, 201 bp, Homo sapiens
gaaattgtccatattcagattggccagtgtggcaaccagatcggagccaaggtaagtaatgtctggttactaatcctagctttaccacagtccatagaggyggacaaccaaaaaaataccctaagttagcagggaagacaataagtctagcagatttaatgtacttgctaaatatcagacaatgcctttgggctttaattc

SEQ ID NO: 532049 - DNA, 201 bp, Homo sapiens
ttgcttgaacccaggaggtggaagttgcagtgagccaagattgtgctacggcactccagcctaggtgacaagagtgaaactctgtctcaaaataaataaayaaacaaacaaacaaacaaacataaaaaaataaaaaaaagaaagaaaggccgggtgctgtggctcatgcctgtaattccagtactttggaaggccaaggag

SEQ ID NO: 532050 - DNA, 201 bp, Homo sapiens
gtttactctgaccttcctcctgctttcagttctgggagatgattggtgaggaacacgggatcgacttggctgggagcgaccgcggggcctcggccttgcasctggagagaatcagcgtgtactacaacgaagcctacggtaggactggcggggctctgggagcagtggtcccgcaactgggaacacaagcagaggaagggc

SEQ ID NO: 532051 - DNA, 201 bp, Homo sapiens
cgtttactctgaccttcctcctgctttcagttctgggagatgattggtgaggaacacgggatcgacttggctgggagcgaccgcggggcctcggccttgcmgctggagagaatcagcgtgtactacaacgaagcctacggtaggactggcggggctctgggagcagtggtcccgcaactgggaacacaagcagaggaaggg

SEQ ID NO: 532052 - DNA, 201 bp, Homo sapiens
cacggcccagggcagccagcagtaccgagccctctccgtggccgagctcacccagcagatgttcgatgcccgcaataccatggctgcctgtgacctccgcygtggccgctacctcacagtggcctgcattttccggggcaagatgtccaccaaggaagtggaccagcaactgctctccgtgcagaccaggaacagcagctg

SEQ ID NO: 532053 - DNA, 201 bp, Homo sapiens
aagagctagcctttaacatatatgtttatatagtttaaatttcttactactgttagatcccaggaattcattaataatcatccttggctttccttttaaasgctattttgaaatggtcttttcactttcattcagtcatcaccccccaaaatgctctgcagcctctctgctctttgagaaagggcacaccatgcgctcggc

SEQ ID NO: 532054 - DNA, 201 bp, Homo sapiens
acggcccagggcagccagcagtaccgagccctctccgtggccgagctcacccagcagatgttcgatgcccgcaataccatggctgcctgtgacctccgccrtggccgctacctcacagtggcctgcattttccggggcaagatgtccaccaaggaagtggaccagcaactgctctccgtgcagaccaggaacagcagctgc

SEQ ID NO: 532055 - DNA, 201 bp, Homo sapiens
ggatggacataaacgaatttggggaagctgaaaataacatccatgatttggtatccgagtaccaacaatttcaagatgccaaagcagttctagaggaagaygaagaggtcacggaggaggcagaaatggagccagaagataagggacattaactgtgagagaagctgtgccgcggagtcgcttacagaacagtttctcatt

SEQ ID NO: 532056 - DNA, 201 bp, Homo sapiens
ccgggatgggcactctgctcatgaacaagattagagaggagtacccggaccggatcatgaattccttcagcgtcatgccttctcccaaggtgtcggacackgtggtggagccctacaacgcggttctgtctatccaccagctgattgagaatgcagatgcctgtttctgcattgacaatgaggccctctatgacatctgct

SEQ ID NO: 532057 - DNA, 201 bp, Homo sapiens
gtggagccctacaacgcggttctgtctatccaccagctgattgagaatgcagatgcctgtttctgcattgacaatgaggccctctatgacatctgcttccrtaccctgaagctgacgacacccacctatggggatctcaaccacctagtgtccttgaccatgagcggcataaccacctccctccggttcccgggtcagctc

SEQ ID NO: 532058 - DNA, 201 bp, Homo sapiens
ttttggccacaggtaactctggggctggcaacaactgggccaaaggccactacacggagggagccgagctgatcgagaatgtcctagaggtggtgaggcaygagagtgagagctgtgactgcctgcagggcttccagatcgtccactccctgggcgggggcacaggctccgggatgggcactctgctcatgaacaagatta

SEQ ID NO: 532059 - DNA, 201 bp, Homo sapiens
caaaggccactacacggagggagccgagctgatcgagaatgtcctagaggtggtgaggcacgagagtgagagctgtgactgcctgcagggcttccagatcrtccactccctgggcgggggcacaggctccgggatgggcactctgctcatgaacaagattagagaggagtacccggaccggatcatgaattccttcagcgt

SEQ ID NO: 532060 - DNA, 201 bp, Homo sapiens
cggttcccgggtcagctcaacgcagacctgcgcaagctggcggtgaacatggtccccttcccccgcctgcacttctttatgcccggctttgccccactcayggcccagggcagccagcagtaccgagccctctccgtggccgagctcacccagcagatgttcgatgcccgcaataccatggctgcctgtgacctccgccgt

SEQ ID NO: 532061 - DNA, 201 bp, Homo sapiens; identical to SEQ ID NO: 335811

SEQ ID NO: 532062 - DNA, 201 bp, Homo sapiens
acctgtggccacctgggctgagccctgggtcgggcaggagggtaaccagaaaggtaaccacctgtggttttccattgttctagcccctgatggtaagattycaggctgccctgaagaactacctgaaccgacagatcgaaaagttgaagctggacctccaagagctggtgtgtatccgtccagtctcccaccctggtcgga

SEQ ID NO: 532063 - DNA, 201 bp, Homo sapiens
tggctccttgtctccaggaacaaatgatactcacggaggagttgcaggccatccgccaagccatccagggcgagctggagctcaggaggaagacggatgckgccatccgggagaagctgcaggagcacatgacctccaacaagaccaccaaatacttcaaccagctcatcctgaggctgcagaaggagaagaccaacatgg

SEQ ID NO: 532064 - DNA, 201 bp, Homo sapiens
tcacgaccgccacgcaatggcctcgagcgagcgcaggcagaaggaggaggagctgcaggccgcccgcgctctctacaccaagacctgcgcagccgccaacraggagcgcaaaaagtgtaaggcaacccggcagccccacacgccatccggtcctggagggtttcccaggggtgtctccatgtaccatggccaggcatctag

SEQ ID NO: 532065 - DNA, 201 bp, Homo sapiens
gtggctccttgtctccaggaacaaatgatactcacggaggagttgcaggccatccgccaagccatccagggcgagctggagctcaggaggaagacggatgytgccatccgggagaagctgcaggagcacatgacctccaacaagaccaccaaatacttcaaccagctcatcctgaggctgcagaaggagaagaccaacatg

SEQ ID NO: 532066 - DNA, 201 bp, Homo sapiens
catgatccacccgcctcagcctcccaaagtgctgggattacaggaatcgcattttttacaaattgaaggttgacggcagctccgtgtggagcaagtccacyggcaccatctctccagcggtgcgtgctcacttcctgcctctgcaccacatgttggtcgttctcataatatttcaaactttttcattgtcatcgtccgtta

SEQ ID NO: 532067 - DNA, 201 bp, Homo sapiens
tgccagaggttggcaaacgtttgcataaggagcccagtagtgaacacttcaggctttgagagcctcacgctttctgtcgcagctgcttggctctgccattrcagcttgagagccttgtaaagccttagagtgtgagctcaccgaagcatcagaagaaaactcctaatttcttacactgcctctcctacctctaaagacacc

SEQ ID NO: 532068 - DNA, 201 bp, Homo sapiens
ccccagccccagcccctctgtcctgtctcccaggtcaggctcgggcagctgctgaagcagcaggagaagatgatccgtgccatggagttggcggttgccckcagagagaccgtcaccacccaggccgaggggcagcgcaagatggacaggaaggcgctcacccgcaccgacttccaccacaagcagcttgagctgcgccgg

SEQ ID NO: 532069 - DNA, 201 bp, Homo sapiens
aaagagatgcgttcctcagtggattccgagatcggccagacggagatccgggccatgaagggcgagatccacaggatgaaggtgaggggaggagagcggcrtggcagggcctgctgggtgccagcccttgggctctggagacctggccacaccaaggcctcggctctcccggggctcctgtgggaaccacactggccacat

SEQ ID NO: 532070 - DNA, 201 bp, Homo sapiens
actggggcatacggtctgacctcccagagccttggtttactgacctgtgaaatgggtgcccacctctcagagtcacccagagggttccctggagagtgctraagtcatccctgtagggaaaggctagccaaaaatggcagacatgcatgggctgctcatttggaagtaactggaagtttctggagagaggcggcagagtgg

SEQ ID NO: 532071 - DNA, 201 bp, Homo sapiens
atcaccagaccgtggagcttcaaaaaggggctcagctttgcctcctgcgtgaaggcttccggccggaggggtggcggccggcctgggtggcgtcaacttgyatcaagggttggtggagaacaggccctcagccacgggcacctcctgacggggctgcttctcatcctgtttcccaggacctgtatgtggaccagctcacca

SEQ ID NO: 532072 - DNA, 201 bp, Homo sapiens
aactaacaggatagatatatagagaaaggagagtttattcagtattgacacaggatcacaaggtcccacaataggccgtctgcaggctgaggagcaaggasagccggtctgagttccaaaaatgaagaacctggagtccagtgttcaagggcaggaagcatccagcacaggagaaagatgtaggctgggaggctacaccag

SEQ ID NO: 532073 - DNA, 201 bp, Homo sapiens
gagaggagactgagccggacagacaggcaaacccagccctgattctaaaaacagagcatgcggaggcaccaactggtagtctcatgagattttagaggacrttgtatccgtaaagagaacaaagtgttaggaagaggggtacgtgaaatttaaaaatataatcatcatcccagagtgtgcagaggcgccaactggtagtct

SEQ ID NO: 532074 - DNA, 201 bp, Homo sapiens
ttcctctttgggagcctccctggatggagtgtgtggaaggtgcctggcaggtcctcccagcctgactcttccctgtccgccaagtagccgggctgcagggrcccagcatggtcctgtgattctcctaggccaccgatgagtgcaccaaaaccgtcctggaactggaagaaacacaaagaaatgtgagcagctccctcctag

SEQ ID NO: 532075 - DNA, 201 bp, Homo sapiens
cttgatccccgggtccgggcttccgtccggaaagctccctcattgtttggtaagatttcagcgattcttaaatcctttccaacactgcggcgctgggaggrgagaggcttttctgctcagatttcctggcaggattaagtagaaacagagcagggtaaagagaaagctatctttgggaggtaaaggtgtccctttgatttg

SEQ ID NO: 532076 - DNA, 201 bp, Homo sapiens
cttctacatgcagaacatcgaccaggacatgcgtgacgacatccgcgtgatgacacaagtggtaaagaaggccgagacggagaggatccgggcagaaatcragaagaaaaagcaggtattctgcaaactcgacacatgtttaatgatcaccagaccgtggagcttcaaaaaggggctcagctttgcctcctgcgtgaaggc

SEQ ID NO: 532077 - DNA, 201 bp, Homo sapiens
tgcctgagggctgcattccaaccgaaatcctattttaatctccaaaggaaggggaggaagaggcctcctctgggcatcccctcacttctggggatggatgygtggctcagggcagggcgttggagacacaggtgctgccttcattcctaaaaccacccagggtgaccaggtctcgggacgcggaaagaaaaagccgggcac

SEQ ID NO: 532078 - DNA, 201 bp, Homo sapiens
gtaggctcatgggagtgtcctgagcacgtttgagggaggctgggctgagccggggtgcctggcaggaaatctgcaggaagtgcattttgggtttttcagcttttttttttttttttttttttgagatgaagtttcactcttgtcgcccaggctggagtgcaatggtgcgatctcagctcactgcaacctccacctcctggg

SEQ ID NO: 532079 - DNA, 201 bp, Homo sapiens; identical to SEQ ID NO: 335827

SEQ ID NO: 532080 - DNA, 201 bp, Homo sapiens
tctgttgcacagtttgtaactgtatctttttaaattgggcatcttatttttattgtcaaatttagacatttataaggctgctccttcctaaaaaaagaaartgagtaacttatttacttgaagtcaggatgactggggataatttatgtacaaaattgcatacctccagccctggcaaccgctgtgccgccttctgtgcct

SEQ ID NO: 532081 - DNA, 201 bp, Homo sapiens
ctccgaggctcatggcctgtgaaccctgcagcgtccccaagggaagacgtcacctccgagatggtcctgttgtccagctctcccctgcatcccagactaamcagtgtcctctctgcaaaccgtcctcattgccctcagagacatggcttccttttggttgcaaacattgtaaaaatcgtattcgatcaggtctcctcctcc

SEQ ID NO: 532082 - DNA, 201 bp, Homo sapiens
acctggacaacgacctgaagaagctcaacatgttgatgaataaaaaccggtgcagctcggaggagctggagcagaacaaccgggtgacagagaatgagttygtgcgctcgctgaaggtccggccgtgtccacgcagtcccggggctcaggacgatggagggcgggggtacggtccttgcggtgggcgttctgcaccaggat

SEQ ID NO: 532083 - DNA, 201 bp, Homo sapiens
gttggaggaccaggctttgggagcttagcagccaaaaagagaccccctgtcctctcctctcctctgtcctggcagggacgagattcaggcaggagcgccasgaacgacaagagggaggggatgaagggagctacagggagagacaaaccctggctcacctctcggacactgctgcctgcgggcaaggacccgtaccctcct

SEQ ID NO: 532084 - DNA, 201 bp, Homo sapiens
cacccagtgtgtagggtgtgatcctatttttattttggagaattatatagaaaagactgggaggaaaaatggattcagatgggaatggtagctaacttgtrtcagaattgcaggcaattgaatgtgttctctgtcctggcctgtattttcacatttcctcacaatgtgtgtgctacgatttaagaagtgtgttagtctgat

SEQ ID NO: 532085 - DNA, 201 bp, Homo sapiens
gaagacgtcacctccgagatggtcctgttgtccagctctcccctgcatcccagactaaccagtgtcctctctgcaaaccgtcctcattgccctcagagacrtggcttccttttggttgcaaacattgtaaaaatcgtattcgatcaggtctcctcctcctcggcccgcagtcactagaaccccctcccaagacaagcaaag

SEQ ID NO: 532086 - DNA, 201 bp, Homo sapiens
gctgcatgaggcatgacagcagctgtgccattgatgccccagaatagaatcactgaggcttctctccagcagctcctcaatggtgtcgctgtctctccccscagtgatccccccaggggtgcccgatgcccaccccagggaaggagacctgccagtgttccaggaccagatccagcagcccagcaccgaggagggggccat

SEQ ID NO: 532087 - DNA, 201 bp, Homo sapiens
ctcctgcctgggcctcccaaagtgctgggattacgggcgcacaccacggcacccacccctcagtctgttctttcatggatcgtttcagtagcttatctgargagcctctgcctagctgaaggtcacgaagagcttctcttctgttttcttctagaagcttcctgcttttaggttttacatttaggtccataatgtattttg

SEQ ID NO: 532088 - DNA, 201 bp, Homo sapiens
aatttacacccacctgaaggaggacgcgtgcccctaactgctccccacacctgcagtgaggctggagccgtggagctggtgtggagcgccctccggctccsctctgctagggcttaaagagtgggtgggattccaaaaagatccaaacactctggtggactctgcttcctggagattaggagagggccagagccgaggctc

SEQ ID NO: 532089 - DNA, 201 bp, Homo sapiens
tcctaaaaaccacatgtaccctcagaagggcatcgtttaagagaaataagccagccccacccataggaatctttttagccactcagcaatttaataaaccmggtaaaatcctagcgtttcccatggcatcccatcgcaaagacagagcctgtgactgcagacccacacacccacactcccacactgggcttactcgtccag

SEQ ID NO: 532090 - DNA, 201 bp, Homo sapiens
agctggacctccaagagctggtgtgtatccgtccagtctcccaccctggtcggatgcctgcgtcctggtgaccctgtttctctctttggtccaggttgtgrctaccaagcagagccgagcccagcggcaggagctgggggtgaatctctatgaggtgcagcagcacctggtacacctgcagaagctgctggagaagagtca

SEQ ID NO: 532091 - DNA, 201 bp, Homo sapiens
accagcctgggcaacacggtgaaaccccatctctacaaatagagtttaaaaattagccgggcatggtggcgcacacctgtaatcccagccactcaagaggytgaggcatgagactcgcttgaacccggcaggcggaggttgcagtgaaccgagatcgcaccactgtatttcagcctgggttacagagtgagactctgtctc

SEQ ID NO: 532092 - DNA, 201 bp, Homo sapiens
agccacagcccctgcagggcagttggggaggggggaggcagggagtccttggggggcccagatctcagggtgaacttggcagaggaggaggctgcgagctsacattgccacacaactccagatgccggaagcttccactccaggtgggcagggtctgggttccaccacctggggacattgggtctcctgggaagccgcccg

SEQ ID NO: 532093 - DNA, 201 bp, Homo sapiens
agtggcctaatgcgtttgaggcctgatgccatatacgtcatccaggtccctgtactctcaaagcccctttgggttccagaggccccacccaccctgccagygcacccaccatggggaagctagagggggctccagagccccttagccatatttcctccagcggggtctgtggcttgcggccctgctgagagctaacttgag

SEQ ID NO: 532094 - DNA, 201 bp, Homo sapiens
ttctgggatcccctgcctaacttgtgtgcaattgcaagaaagcatatgcgttcacccggagtcttccttccctctcttgctccgtgggagcacaccacacwcactgttctgcacctctttgctttttccatttaacagcgtgtccctagagcgcttcccaagtcaaaatataaacaccgctcgttcccgcctttctaccac

SEQ ID NO: 532095 - DNA, 201 bp, Homo sapiens
tctttctaacaattctcacccccgtgggcagccggccttccgggtagctcctacatctctgcacctcgtggagtagggagtggaggggacgaagggggtgraagctgctccctcttggccccagattcaggtctgtagtggtagcaccagaaaccaaagttactgcaacttaaaaaaaaaaaaaaaaaaactatgagtcac

SEQ ID NO: 532096 - DNA, 201 bp, Homo sapiens
gacaaaacccatgacagagtttatttacatttccacaaacaagcctgaaaacagacattctattcgagaagctaaaaagagggaaataaactgaaagaagyagaaaaataaaccaataaagatcaaaagcagaagctgatgaaataaataaaaaatgaattgacttgataaataaactgctttttttttaaatgaccaata

SEQ ID NO: 532097 - DNA, 201 bp, Homo sapiens
ctcactgttctgcacctctttgctttttccatttaacagcgtgtccctagagcgcttcccaagtcaaaatataaacaccgctcgttcccgcctttctaccrcatggcattccgctgggatacttctacggggaagcttcctgcccggggcatcgagggcgttcgcgtccgtctgttatggcggtgctgctgtagataaccg

SEQ ID NO: 532098 - DNA, 201 bp, Homo sapiens
gctggagtgcagtggtgcaatcatggctcactgcagccttgaccttgtgggctcaaaggatcctcctgcctgggcctcccaaagtgctgggattacgggcrcacaccacggcacccacccctcagtctgttctttcatggatcgtttcagtagcttatctgaggagcctctgcctagctgaaggtcacgaagagcttctct

SEQ ID NO: 532099 - DNA, 201 bp, Homo sapiens
gagtgcagtggcgtgatctcagctcactgcaacctccacctcccgggttcaagcgattctcctgcttcagcctcccaagtagctgggactacaggggcccrccaccatgcctggctaatttttgtatttttgtagataacggggtttcaccatgttggtcaggctggtcttgaacccctgacctcgtgatccgcccacctt

SEQ ID NO: 532100 - DNA, 201 bp, Homo sapiens
aattcagatccacagcttgcaggagaaagtcagtggccccagacacacgtaacagggtgagcactgaaataagagcacgctggggcgtccacaccaagggmctacgccccagtctgcccacctatcttttctccatcattaacccagcgctctttctccctggacttccaagtaccaatgaccttggggcttctttgcagt

SEQ ID NO: 532101 - DNA, 201 bp, Homo sapiens
ttttcatggccatctttccgtgtcacacacgtgggcccatatctccctgtggaaagggtgcggagcaggcgtggtgtggaggcaccgtcctttcttcagcrtgctccggaagggatgaatagcgcagggatcgcctgttccttgcggtttgatagaatctaggcaaaaaattatctgggaccaatgctttggggggcttgt

SEQ ID NO: 532102 - DNA, 201 bp, Homo sapiens
tcagatgagaccatgaggtgcctttaatttgtggcttccagagtaagaatcccaagcagaagcagggagcactccacacggaagtcgtctctggcccaccrgagggagacctgtggccacctgggctgagccctgggtcgggcaggagggtaaccagaaaggtaaccacctgtggttttccattgttctagcccctgatgg

SEQ ID NO: 532103 - DNA, 201 bp, Homo sapiens
aagcagagccgagcccagcggcaggagctgggggtgaatctctatgaggtgcagcagcacctggtacacctgcagaagctgctggagaagagtcacgaccrccacgcaatggcctcgagcgagcgcaggcagaaggaggaggagctgcaggccgcccgcgctctctacaccaagacctgcgcagccgccaacgaggagcgc

SEQ ID NO: 532104 - DNA, 201 bp, Homo sapiens
atatccggtctagggggaagaagtggggcccctggagcttgaaatcaaaaggctgagcaagctgatcgacgagcacgatggcaaggcggtccaggcccagrtgacctggctgcgcctgcagcaggagatggtcaaggtgacacaggagcaggaggagcagctggcctccctggacgcatccaagaaggagctccacatcat

SEQ ID NO: 532105 - DNA, 201 bp, Homo sapiens
atggcattccgctgggatacttctacggggaagcttcctgcccggggcatcgagggcgttcgcgtccgtctgttatggcggtgctgctgtagataaccggrtccgcgaatgctaacgctcaccaggatgctatatagccttttttatattgcctatcaagcccggaatgtctgggtctagcgggtattgctaagtaggatt

SEQ ID NO: 532106 - DNA, 201 bp, Homo sapiens
cattccgctgggatacttctacggggaagcttcctgcccggggcatcgagggcgttcgcgtccgtctgttatggcggtgctgctgtagataaccggatccrcgaatgctaacgctcaccaggatgctatatagccttttttatattgcctatcaagcccggaatgtctgggtctagcgggtattgctaagtaggattgtga

SEQ ID NO: 532107 - DNA, 201 bp, Homo sapiens
caggagaatcccttgagcctggtaggtggaggttgcagtgagccgagattgcgccattgcactccagcctgggtgacagagcgagactccgtctcaaaaayaaacaataaaacagctgctgcggtgttttcccaagtgactggttccaatttgcattttctccagcaatttatgagagtcccagttgttccacatcctcgc

SEQ ID NO: 532108 - DNA, 201 bp, Homo sapiens
catacggtctgacctcccagagccttggtttactgacctgtgaaatgggtgcccacctctcagagtcacccagagggttccctggagagtgctgaagtcayccctgtagggaaaggctagccaaaaatggcagacatgcatgggctgctcatttggaagtaactggaagtttctggagagaggcggcagagtggcctcttc

SEQ ID NO: 532109 - DNA, 201 bp, Homo sapiens
cacacgccctgcccacacctgctggcggtccccacaggcaggtcctctcagttccgttggaggaccaggctttgggagcttagcagccaaaaagagaccccctgtcctctcctctcctctgtcctggcagggacgagattcaggcaggagcgccaggaacgacaagagggaggggatgaagggagctacagggagagacaa

SEQ ID NO: 532110 - DNA, 201 bp, Homo sapiens
acacgccctgcccacacctgctggcggtccccacaggcaggtcctctcagttccgttggaggaccaggctttgggagcttagcagccaaaaagagaccccctgtcctctcctctcctctgtcctggcagggacgagattcaggcaggagcgccaggaacgacaagagggaggggatgaagggagctacagggagagacaaa

SEQ ID NO: 532111 - DNA, 201 bp, Homo sapiens
cacgccctgcccacacctgctggcggtccccacaggcaggtcctctcagttccgttggaggaccaggctttgggagcttagcagccaaaaagagaccccctgtcctctcctctcctctgtcctggcagggacgagattcaggcaggagcgccaggaacgacaagagggaggggatgaagggagctacagggagagacaaac

SEQ ID NO: 532112 - DNA, 201 bp, Homo sapiens
attgtgtttgtcatgagggacttggaatcttttgtgttcctaaaaaccacatgtaccctcagaagggcatcgtttaagagaaataagccagccccacccayaggaatctttttagccactcagcaatttaataaaccaggtaaaatcctagcgtttcccatggcatcccatcgcaaagacagagcctgtgactgcagaccc

SEQ ID NO: 532113 - DNA, 201 bp, Homo sapiens
acgccctgcccacacctgctggcggtccccacaggcaggtcctctcagttccgttggaggaccaggctttgggagcttagcagccaaaaagagaccccctgtcctctcctctcctctgtcctggcagggacgagattcaggcaggagcgccaggaacgacaagagggaggggatgaagggagctacagggagagacaaacc

SEQ ID NO: 532114 - DNA, 201 bp, Homo sapiens; identical to SEQ ID NO: 335916

SEQ ID NO: 532115 - DNA, 201 bp, Homo sapiens
gggacgagtacccccagttccaggaggccctgcacaaggtcagccagatgatcgccaacaagctcgagtcaccagggccctcctagggagcagcctggacyccgccttgcaaggcctccaggaagagatccggaattgtgtttgtcatgagggacttggaatcttttgtgttcctaaaaaccacatgtaccctcagaaggg

SEQ ID NO: 532116 - DNA, 201 bp, Homo sapiens
agtagagacgggttttcaccatgttagctaggctggtctcgaactcctgacctcaggtgatctgcctgcctcggcctcccaaagtgctgagattacaggcstgagccactgcgcccggccccaaaatatcacctttaatggcaaaactgcaattacttttgcaccaacctaatatcaacattaacagaagttgattgtaac

SEQ ID NO: 532117 - DNA, 201 bp, Homo sapiens
cgccctgcccacacctgctggcggtccccacaggcaggtcctctcagttccgttggaggaccaggctttgggagcttagcagccaaaaagagaccccctgtcctctcctctcctctgtcctggcagggacgagattcaggcaggagcgccaggaacgacaagagggaggggatgaagggagctacagggagagacaaaccc

SEQ ID NO: 532118 - DNA, 201 bp, Homo sapiens
cgccggaaaatcagggacgttcgcaaggtagggagcagcggaaaggaaacagggcgcctgctcctctctctgggattcaaggaacactccaggaaggcgtmttgctgggtccggggtgaggatgcagaggctgcagtgggggcgtgctcagcactgctaacctgctgctgggtgctgggtctggggtgaggatgcagagag

SEQ ID NO: 532119 - DNA, 201 bp, Homo sapiens
tcgagggcgttcgcgtccgtctgttatggcggtgctgctgtagataaccggatccgcgaatgctaacgctcaccaggatgctatatagccttttttatatkgcctatcaagcccggaatgtctgggtctagcgggtattgctaagtaggattgtgacagtcacgcccccggcagcggtgtttcaaagtcccctgacagctc

SEQ ID NO: 532120 - DNA, 201 bp, Homo sapiens; identical to SEQ ID NO: 335917

SEQ ID NO: 532121 - DNA, 201 bp, Homo sapiens
tccaccttgcactgtctgcctgtggattccgggttcccacccagggctgctgcctccatgtcccttgttcctcctggcggcacaggcctcactgtttcccygccgatccccatgcgtgtcaccggaggatgagcgaggccagcgccccggccactctctctgcagctgcagctcaggcctgccccagccccagcccctctg

SEQ ID NO: 532122 - DNA, 201 bp, Homo sapiens
gtctcctgggaagccgcccgtggtggccagtgagagacatggagcccacaggcgtggcgggaggagaagctcagatggccctgaggaggctggggtaggcrggagccacagtcgtgagagagccaaggccttgtgtggcaggagccgacgggcaggggtgctcagggcagacacagggcccgaggccacctgttagaacca

SEQ ID NO: 532123 - DNA, 201 bp, Homo sapiens
tgttgttggtgttattgttttgtcctagacacaatgtgtgttagggttctccaaagaaacagaaccagtagactacacacacacacacacacacacacacagagagagagagagagagagagagagagagaaagaaagagagatttactatgagaattggctcttatgattatgagggccgagaagtcctagtatccggca

SEQ ID NO: 532124 - DNA, 201 bp, Homo sapiens; identical to SEQ ID NO: 335918

SEQ ID NO: 532125 - DNA, 201 bp, Homo sapiens
gttgttggtgttattgttttgtcctagacacaatgtgtgttagggttctccaaagaaacagaaccagtagactacacacacacacacacacacacacacagagagagagagagagagagagagagagagaaagaaagagagatttactatgagaattggctcttatgattatgagggccgagaagtcctagtatccggcat

SEQ ID NO: 532126 - DNA, 201 bp, Homo sapiens
ttgttggtgttattgttttgtcctagacacaatgtgtgttagggttctccaaagaaacagaaccagtagactacacacacacacacacacacacacacagagagagagagagagagagagagagagagaaagaaagagagatttactatgagaattggctcttatgattatgagggccgagaagtcctagtatccggcatc

SEQ ID NO: 532127 - DNA, 201 bp, Homo sapiens; identical to SEQ ID NO: 335920

SEQ ID NO: 532128 - DNA, 201 bp, Homo sapiens
tgttggtgttattgttttgtcctagacacaatgtgtgttagggttctccaaagaaacagaaccagtagactacacacacacacacacacacacacacagagagagagagagagagagagagagagagaaagaaagagagatttactatgagaattggctcttatgattatgagggccgagaagtcctagtatccggcatct

SEQ ID NO: 532129 - DNA, 201 bp, Homo sapiens
gccactctctctgcagctgcagctcaggcctgccccagccccagcccctctgtcctgtctcccaggtcaggctcgggcagctgctgaagcagcaggagaaratgatccgtgccatggagttggcggttgcccgcagagagaccgtcaccacccaggccgaggggcagcgcaagatggacaggaaggcgctcacccgcaccg

SEQ ID NO: 532130 - DNA, 201 bp, Homo sapiens
ctccagtgagtgtccacgcacagggtgctggtgggtctactagactgcacctgcccgtctgctggatgagtgactgcagccagcttacatctgcaaacatygggccctccccatggtggggccacagtagatactgacaggtggacagcccggattcctattccttccctggctagtgggtgacagaaggcctcgcagggt

SEQ ID NO: 532131 - DNA, 201 bp, Homo sapiens
atgccattgcatttcagcctgggcgacagagccagaatccatctcaaaaaacaaaacaaaacaaaagactaggaggacaatcacaccctcaataaaacctktgtagattaaggacgccacaaaccagatgaaggcggggagacaggcaggagaagacaactcgcagccattagtaaatccggggttgtgaagagaggctga

SEQ ID NO: 532132 - DNA, 201 bp, Homo sapiens
tcgttcccgcctttctaccacatggcattccgctgggatacttctacggggaagcttcctgcccggggcatcgagggcgttcgcgtccgtctgttatggcrgtgctgctgtagataaccggatccgcgaatgctaacgctcaccaggatgctatatagccttttttatattgcctatcaagcccggaatgtctgggtctag

SEQ ID NO: 532133 - DNA, 201 bp, Homo sapiens
gtagaaagtaagagccgccgtgcccggccctgcagtgatgctgagacgagctctgggacgtgggcacctcccaggggaggggcactcagtggggcacgtcrctggatttgcacgcagccttaaaagcaaataacaaacgcgcatgctccctgtattttgtaaatgtgaaccactgcctgcccagctgcccagttcgcagtc

SEQ ID NO: 532134 - DNA, 201 bp, Homo sapiens
attccgctgggatacttctacggggaagcttcctgcccggggcatcgagggcgttcgcgtccgtctgttatggcggtgctgctgtagataaccggatccgygaatgctaacgctcaccaggatgctatatagccttttttatattgcctatcaagcccggaatgtctgggtctagcgggtattgctaagtaggattgtgac

SEQ ID NO: 532135 - DNA, 201 bp, Homo sapiens
actgaagaatttgggcaacggtcccggccctgaccggggggcagccaccactgcacagtcccttaggtgagacgtgggtcctggcccctggagaaagcccmcggtcacctgcctcatctgggagggagactgtattagggttgtctagagggacagaactaacaggatagatatatagagaaaggagagtttattcagtat

SEQ ID NO: 532136 - DNA, 201 bp, Homo sapiens
cagtgtctgagcatcaaccaggtcccggtgctccacagatttgcaagtgtctgggggagggagcctggccctcccacacgccctgcccacacctgctggckgtccccacaggcaggtcctctcagttccgttggaggaccaggctttgggagcttagcagccaaaaagagaccccctgtcctctcctctcctctgtcctgg

SEQ ID NO: 532137 - DNA, 201 bp, Homo sapiens
cagcaatttaataaaccaggtaaaatcctagcgtttcccatggcatcccatcgcaaagacagagcctgtgactgcagacccacacacccacactcccacamtgggcttactcgtccaggtaacactttggtttgcagcactcccaaatctgcacgtgcctctcacaacacaacgctgccacaggtccacaagctggtgggc

SEQ ID NO: 532138 - DNA, 201 bp, Homo sapiens
tcttgtgccctccacccatcttaacatcaagaagagctgttgttttctgcccctacccctgagcttggctggggcagggcaggggtctaagggcctccctytcctggagactcacagtgtctgagcatcaaccaggtcccggtgctccacagatttgcaagtgtctgggggagggagcctggccctcccacacgccctgcc

SEQ ID NO: 532139 - DNA, 201 bp, Homo sapiens
ggtcctgctgcctctcgccctgcccttcttgggttgcccaaacccgtctgttggtgagtagcaagtcccaaaagaccctatggagctgtcagctgagtatyggtgtcccaaggcaagagctgccgaaataccatgctgtgagatggggaggatcacccatggagagggcagagagaggggctcacatgcccatgtcctggg

SEQ ID NO: 532140 - DNA, 201 bp, Homo sapiens
ctgccgagacatcccgggtcctgcccggtcttgggtcggggatccatgctggtcaggcctgcagcagagcccccatgggaaatgctgcccagacacatcawgtgcccttctcggaggtcctgctgcctctcgccctgcccttcttgggttgcccaaacccgtctgttggtgagtagcaagtcccaaaagaccctatggagc

SEQ ID NO: 532141 - DNA, 201 bp, Homo sapiens
caagaaggctaattttgcttttttttttttttttttctgagacggagtcttgctctattgcccaggctggagtgcagtggtgccatcttgctcactgcacrtctgcctcctgagttcaagcgattctcctgcctcagccttccaagtagctgggaccacaggtgtgcaccagcacacctggctaatttttgtattttgggt

SEQ ID NO: 532142 - DNA, 201 bp, Homo sapiens
ggctctggtgttcttgggctttgctcgcaaatgaaatgagacagccattcctgccccctcccctgttggctgcaggcctgcaccgagatcgacgccatcakcgtggagaagaggcgcatcatgcagcaatgggccagcagcctggtgggcatgaagcaccgcgacgaggcgcacagggcggtgctggaggcgctcaggtac

SEQ ID NO: 532143 - DNA, 201 bp, Homo sapiens
ggacatttgaaaaacagagaaaaggatttaaaaataccatcgactttctctttttgtgacaagaagactcattagcatgtcagcacactctcaggcacacrtttccccgagtgttaggagttctgttgcacagtttgtaactgtatctttttaaattgggcatcttatttttattgtcaaatttagacatttataaggctg

SEQ ID NO: 532144 - DNA, 201 bp, Homo sapiens
aatttccttcctgcctacctttaaaacgggacgctttctctgggatgcattgagtcagggaatagaagatggggtgaatgatgtttctgacccacagaccrttgggatgcttttgctgtcactttcccatcatgctgcatgaggcatgacagcagctgtgccattgatgccccagaatagaatcactgaggcttctctcca

SEQ ID NO: 532145 - DNA, 201 bp, Homo sapiens
ccttgagagaggagcatggaaggttatcatccccgccaagccagggcactcaggtggaaacactggcacgggaaaagccagggtcctgccaggcaggctcytggtgctgtccccacatcacctccagttgggcttagaaaaccattccaccggggctccccaacccttctgaggcccaaggggctgccaaagcaccagggt

SEQ ID NO: 532146 - DNA, 201 bp, Homo sapiens
tccccataatcacagtacaaaagagttgtcaacttgggctttcaatagataatagttctcttgatctatttgaaaataatagtcaagatttggctattggstgcaaaaatacagtgagggagaaggaacaaggcccagtgttcaatagcatgtcacagtgactacagttcacggtaagttagtgtatatttctgaatagct

SEQ ID NO: 532147 - DNA, 201 bp, Homo sapiens
gagaattgcttgagcccaggagacagaggttgcagtgagccgagactgtgccactgcactccatcctggccaacagagtgagacactgtctcaaaaaaaawaaataaataaatcaaataaaacaaaatacaaggataaaaaaaaaaggcttcctgggtgggtgccaaatgggtatttaataaaactcatcatccatcccaa

SEQ ID NO: 532148 - DNA, 201 bp, Homo sapiens
cagacttcgacacactcgaggccgacctcacccggcttggggccctcaaacgacaggtaaacgtgtcccaggaggtccctggggatgacggccatggaacrtgccactcacacagaggtcctgcgtcccctctgtgcgagtcacggcctctcctgatcaggtcacggcctctcctgatcccaggccagtaatagcaccacc

SEQ ID NO: 532149 - DNA, 201 bp, Homo sapiens
cagggctgagaatcacagatcttaaatttaaatagcaggatgtcaatgcatacagaattcagaattctcttttttgtgttttttgtttgtttgtttgtttkttgagatggagtctctctctgtcgcccaggctggagtgcagtggcgtgatctcagctcactgcaacctccacctcccgggttcaagcgattctcctgctt

SEQ ID NO: 532150 - DNA, 201 bp, Homo sapiens
gcggtgttttcccaagtgactggttccaatttgcattttctccagcaatttatgagagtcccagttgttccacatcctcgccaacatttggtattatcagycatctaattttagccatcaaatatagccattagcaaatgtgtggtgcatcgccttgcggtctgagcctgcgtgtccctaatgactagcgatggtgagcat

SEQ ID NO: 532151 - DNA, 201 bp, Homo sapiens
gaagctaaaaagagggaaataaactgaaagaagcagaaaaataaaccaataaagatcaaaagcagaagctgatgaaataaataaaaaatgaattgacttgataaataaactgctttttttttaaatgaccaataaaccttacacactgctggcttatctggcaataaaaaggagatcatgcaagtaacagtgttgggaatg

SEQ ID NO: 532152 - DNA, 201 bp, Homo sapiens
cttgtatcaagggttggtggagaacaggccctcagccacgggcacctcctgacggggctgcttctcatcctgtttcccaggacctgtatgtggaccagctyaccactcgagcccagcaactggaagaagacattgccctgtttgaggctcagtacttggcccaagctgaggacacccggattttaaggaaagcagtgagtg

SEQ ID NO: 532153 - DNA, 201 bp, Homo sapiens
aagctaaaaagagggaaataaactgaaagaagcagaaaaataaaccaataaagatcaaaagcagaagctgatgaaataaataaaaaatgaattgacttgataaataaactgctttttttttaaatgaccaataaaccttacacactgctggcttatctggcaataaaaaggagatcatgcaagtaacagtgttgggaatga

SEQ ID NO: 532154 - DNA, 201 bp, Homo sapiens
agctaaaaagagggaaataaactgaaagaagcagaaaaataaaccaataaagatcaaaagcagaagctgatgaaataaataaaaaatgaattgacttgataaataaactgctttttttttaaatgaccaataaaccttacacactgctggcttatctggcaataaaaaggagatcatgcaagtaacagtgttgggaatgag

SEQ ID NO: 532155 - DNA, 201 bp, Homo sapiens
ttggtgttattgttttgtcctagacacaatgtgtgttagggttctccaaagaaacagaaccagtagactacacacacacacacacacacacacacagagasagagagagagagagagagagagagaaagaaagagagatttactatgagaattggctcttatgattatgagggccgagaagtcctagtatccggcatctaa

SEQ ID NO: 532156 - DNA, 201 bp, Homo sapiens
ttgttttttgttttgtctttgagacagactctctgtcattcaggctggagtgaagtggtgggatctcggctcgctgcaacctccgcctcccaagttcaagygattctcctgcttcagcttcccaagtagctgggattacaggtgtgtgccaccatgcctggctaatttttttgtattttcagtagagacggggtttcgcca

SEQ ID NO: 532157 - DNA, 201 bp, Homo sapiens
gctaaaaagagggaaataaactgaaagaagcagaaaaataaaccaataaagatcaaaagcagaagctgatgaaataaataaaaaatgaattgacttgataaataaactgctttttttttaaatgaccaataaaccttacacactgctggcttatctggcaataaaaaggagatcatgcaagtaacagtgttgggaatgagg

SEQ ID NO: 532158 - DNA, 201 bp, Homo sapiens
tagctgggattacaggtgtgtgccaccatgcctggctaatttttttgtattttcagtagagacggggtttcgccattttgcctaggctggtctcaaacttytgagctcaggcaattcgcccacctcagcctcccaaagtgctgggattacaggtgtgagccactgtgcccagccagccctacaagttttgatagagacgta

SEQ ID NO: 532159 - DNA, 201 bp, Homo sapiens
gcagaagctgctggagaagagtcacgaccgccacgcaatggcctcgagcgagcgcaggcagaaggaggaggagctgcaggccgcccgcgctctctacaccmagacctgcgcagccgccaacgaggagcgcaaaaagtgtaaggcaacccggcagccccacacgccatccggtcctggagggtttcccaggggtgtctccat

SEQ ID NO: 532160 - DNA, 201 bp, Homo sapiens
agtaccggtgatagaaggaaaagaggaagatttgggaatgtgaggctctggtgttcttgggctttgctcgcaaatgaaatgagacagccattcctgccccstcccctgttggctgcaggcctgcaccgagatcgacgccatcagcgtggagaagaggcgcatcatgcagcaatgggccagcagcctggtgggcatgaagca

SEQ ID NO: 532161 - DNA, 201 bp, Homo sapiens
gaatcacttgaacccgggaggcgaaggttgcagtgagcctagatggctccactgcactccagcctggtgacagagcaagactccgtctcaaaaaatttttwaaaaagcacagtttggtgggttctaacacgcgcacacatctacgtagccactgacgccatcaagacatagaacctttctatgactccagaaagttcctgt

SEQ ID NO: 532162 - DNA, 201 bp, Homo sapiens
aaatggcagacatgcatgggctgctcatttggaagtaactggaagtttctggagagaggcggcagagtggcctcttctcagtccttttccactacattgghtactcctgatgtccatccctccctcagcttcctagcccggcccctgaccactccttgctgccctgggcaccccctgagtcccctgccaggaccccatgcc

SEQ ID NO: 532163 - DNA, 201 bp, Homo sapiens
ttggctgcaggcctgcaccgagatcgacgccatcagcgtggagaagaggcgcatcatgcagcaatgggccagcagcctggtgggcatgaagcaccgcgacraggcgcacagggcggtgctggaggcgctcaggtactgcagggccacaggcagcgaggatgtgcgggaaccccaggggtccgtggcaggcccgccccacac

SEQ ID NO: 532164 - DNA, 201 bp, Homo sapiens
ctggtgctgtccggtgcttaccacctcaacggttgccagccaggggccctgcactcacacttcccaggttggccccacagccccgctgacccgctgtgtgrcctcggagtatgtgggccttgccagacctgcagggcctcgtctgctggggggtggaggggcagagttaaatgtgacagcaaccacagccgtgggtgggga

SEQ ID NO: 532165 - DNA, 201 bp, Homo sapiens
ctgagcaaaggctcaaagcgggtacgggttatcttgaaagctacattcaggctcgtgtttacccctctgcagatgcatgatcaaggaaagtaccggtgatrgaaggaaaagaggaagatttgggaatgtgaggctctggtgttcttgggctttgctcgcaaatgaaatgagacagccattcctgccccctcccctgttggc

SEQ ID NO: 532166 - DNA, 201 bp, Homo sapiens
ggcctgcactgggagggcccagctggtgctgtccggtgcttaccacctcaacggttgccagccaggggccctgcactcacacttcccaggttggccccacrgccccgctgacccgctgtgtgacctcggagtatgtgggccttgccagacctgcagggcctcgtctgctggggggtggaggggcagagttaaatgtgacag

SEQ ID NO: 532167 - DNA, 201 bp, Homo sapiens
caggagaatcgcttaaacccaagaggcggaggttgcatgcagacagccaagatggcaccagtgcactccagcctgggcaataagagcgaaactctgtctcaaaaaaaaaaaaaaaaaaatgtctccagtcattgccaaatgttggcggtgtggggcccatcttcgcagccactgccttgagggcaccaattggatcgcagc

SEQ ID NO: 532168 - DNA, 201 bp, Homo sapiens
ttctggggaagaggccagctcatgctggggagcccgagtgggcaccggggaccagctgatgggagcggggtgggcgcctcgagagcctgcatccgcatacmccaggccatgtccactgggcctgcactgggagggcccagctggtgctgtccggtgcttaccacctcaacggttgccagccaggggccctgcactcacact

SEQ ID NO: 532169 - DNA, 201 bp, Homo sapiens
actttgggaggccgaggcgggcggatcacgaggtcaggagatcgagaccatcccggctaaaacggtgaaaccccgtctctactaaaaatacaaaaaattarccgggcgtagtggcgggcgcctgtagtcccagctacttgggaggctgaggcaggagaatggcgtgaacccgggagtcggagcttgcagtgagccgagatc

SEQ ID NO: 532170 - DNA, 201 bp, Homo sapiens
agatagctagaagagagggttttgaatgttcccaactcaaagaaataacaattgctggaggtgactgatacgctaattaccttgattcaagcagtacacaytgtacatgtgtcgaaatatcactctgtaccccagagatatacagctgtaacatgtcagctaaaataaaaggaaatactacagacaaaagggaagtcagtc

SEQ ID NO: 532171 - DNA, 201 bp, Homo sapiens
ccccgtctctactaaaaatacaaaaaattagccgggcgtagtggcgggcgcctgtagtcccagctacttgggaggctgaggcaggagaatggcgtgaaccygggagtcggagcttgcagtgagccgagatcccgccactgcactccagcctgggcgacagagcgagactccgtctcaaaaaaaaaaaaaaaaaaaaagaaa

SEQ ID NO: 532172 - DNA, 201 bp, Homo sapiens
ggctcccccgtgatgttctagcgcactgtggttcagtcactgtctaccaagcttgcctgggtgtcacggcgtgcaggcacttctgggacttggcgttctamaggacgccccagttggctgactcgggccgccagcttgctcaagtcacagtgcttgcattggggatgactcatcaagaatcccaaacaccactcaaaacaa

SEQ ID NO: 532173 - DNA, 201 bp, Homo sapiens
tgggccagcagcctggtgggcatgaagcaccgcgacgaggcgcacagggcggtgctggaggcgctcaggtactgcagggccacaggcagcgaggatgtgcrggaaccccaggggtccgtggcaggcccgccccacaccccctctctctgggtccaccggatctctgggacagagggtgcaccttgatccccgggtccgggc

SEQ ID NO: 532174 - DNA, 201 bp, Homo sapiens
aaggaactcccctttcccttggagtaaattcctgaaccacccccctagttttcaagcccctcccctgcatgggccaagcccttactgcaggtggcccctcmctgccccccacgatgcccctagacttccagcctccgctcagcctgcctgacctgcccacccctggctgtccagttgtgcctcctcattcccagtctaggc

SEQ ID NO: 532175 - DNA, 201 bp, Homo sapiens
ttcaggcaggagcgccaggaacgacaagagggaggggatgaagggagctacagggagagacaaaccctggctcacctctcggacactgctgcctgcgggcraggacccgtaccctcctggggtctctccctgagtctctgttttctgccataggcaagattgagcaggagaagaaggagcagaaggagatcgagcaccaca

SEQ ID NO: 532176 - DNA, 201 bp, Homo sapiens
gtgacgaggaagcagaagacgaagggtcccagctggtggttttggacccagaccacgtaaggaagccttcccaggttttgcttttgcctacatggatggcraatgactcaggcccctttctctgcctgcactgtctcccactcctgaccctaaatgctgtacttgtatctcgcctgttcactgcaccgtttattggcactg

SEQ ID NO: 532177 - DNA, 201 bp, Homo sapiens
tgtcctctcctctcctctgtcctggcagggacgagattcaggcaggagcgccaggaacgacaagagggaggggatgaagggagctacagggagagacaaamcctggctcacctctcggacactgctgcctgcgggcaaggacccgtaccctcctggggtctctccctgagtctctgttttctgccataggcaagattgagc

SEQ ID NO: 532178 - DNA, 201 bp, Homo sapiens
gaggaccaggctttgggagcttagcagccaaaaagagaccccctgtcctctcctctcctctgtcctggcagggacgagattcaggcaggagcgccaggaaygacaagagggaggggatgaagggagctacagggagagacaaaccctggctcacctctcggacactgctgcctgcgggcaaggacccgtaccctcctgggg

SEQ ID NO: 532179 - DNA, 201 bp, Homo sapiens; identical to SEQ ID NO: 335944

SEQ ID NO: 532180 - DNA, 201 bp, Homo sapiens
ggacaacgacctgaagaagctcaacatgttgatgaataaaaaccggtgcagctcggaggagctggagcagaacaaccgggtgacagagaatgagttcgtgygctcgctgaaggtccggccgtgtccacgcagtcccggggctcaggacgatggagggcgggggtacggtccttgcggtgggcgttctgcaccaggatgtaa

SEQ ID NO: 532181 - DNA, 201 bp, Homo sapiens
gtgggtgggattccaaaaagatccaaacactctggtggactctgcttcctggagattaggagagggccagagccgaggctcttcaacccagcaaggcctgygtcaaacagcaccgtctctgccttctcagaactgaagaatttgggcaacggtcccggccctgaccggggggcagccaccactgcacagtcccttaggtga

SEQ ID NO: 532182 - DNA, 201 bp, Homo sapiens
cgagcgcaggcagaaggaggaggagctgcaggccgcccgcgctctctacaccaagacctgcgcagccgccaacgaggagcgcaaaaagtgtaaggcaaccyggcagccccacacgccatccggtcctggagggtttcccaggggtgtctccatgtaccatggccaggcatctagaaaagtaagatgtgtgtgcatcctgga

SEQ ID NO: 532183 - DNA, 201 bp, Homo sapiens
ttctgtaaaaagccaacatctgggttccaacaagtaggtcccttgctgggtcctggagacagtgggaaatccagcctcctgcactcgtgactgtgcgtttrgaatatctccagaggaacatcccgaccgtcagggaacggtggatcagcaaactcgtcccgggccttgggtgggggcaatattcacaggtatttcttttca

SEQ ID NO: 532184 - DNA, 201 bp, Homo sapiens
gcacgtcgctggatttgcacgcagccttaaaagcaaataacaaacgcgcatgctccctgtattttgtaaatgtgaaccactgcctgcccagctgcccagtkcgcagtcacagcgggagggttgagaaatgtcacgaaatggctccaagctcacggacttcagagctctccttgagagaggagcatggaaggttatcatccc

SEQ ID NO: 532185 - DNA, 201 bp, Homo sapiens
ggggtggaggaagagaaagttcagcctcagcacaaaggatggaacaggcagtggggcctgaggctgagggagaaggggctgaggttacaggaggttacagracgccccatcagcagtggggtgaccaagatctgtgaagaaggggctgaggttacaggaggttacaggacgccccatcagcagtggggtgaccaagatctg

SEQ ID NO: 532186 - DNA, 201 bp, Homo sapiens
ccccccaactctggcctgtgcaggaagggcctacagcggttgggcacctcagaggagcagctcctggaggctgcgaggcaggaggagggagacctggaccrggcgccctgtctatacagcagcctggctcctgacggctggagcgacctggacggcctgctcagctgtgtccgccaggccatcgccgacgagcagaagaag

SEQ ID NO: 532187 - DNA, 201 bp, Homo sapiens
ctgtcccccgggctcctcatggggacagtggcagcgggtggggtgacccaggcagacttcacctcccccagacgatgcagatccactctgggctgggcctmtgctctttcctgggctgacgtaaagcgttctgctcatttatagatgagagtcgtgccgtgcagaacccagcatgtcacccgtggtgctgctgccatgcgg

SEQ ID NO: 532188 - DNA, 201 bp, Homo sapiens
cttagtggtgccaggctgaggcgaggcacagcgtgacatctacctgcggggagcatctctcctctcaggcgctggccctgaggcctcgcgcttctcctgtrgctcatttctgtttgtgattggaccggccctctctgcttcccaagtccatgggcccgtcatgggtgggtgccttaatcctttccacctcggcgcgaccgg

SEQ ID NO: 532189 - DNA, 201 bp, Homo sapiens
tccagggaaagggcagatagaagcagagctcaacttctgccctgggccttgaccttggcctcgaccttgcactttgggaaagtcccgcctgccagccagcrtaagccaaaggccggctgcgctctgtctgctggtgtccttgtgtttttccctagagccaggggagttgtgtctgatccacgccctgctcagcacccagcc

SEQ ID NO: 532190 - DNA, 201 bp, Homo sapiens
gccagcaggacctggtgggatagtccctggaaggccagggccctgcacacagactgcaagtcaacacaggagctttgctgtctgaacagccccggtcccgygttcccaggcacgtctacccctccgacctgactttcctctctcttacttcttactgatttccatgactccaaattccctttcttgatgtatttagcagaa

SEQ ID NO: 532191 - DNA, 201 bp, Homo sapiens
gaggctctggtgtgtggctttgttttgaccaaggcgtgcaggcagtggtcctacggcagggctggcccgcgcctcgcctcagtgccctcagcgccttctgycttctggctggattcagagtcccgggggaaagagactgaccttctcgacttgccctcaggttgattacgaagcctcagagcccttgttcaaggcagtcct

SEQ ID NO: 532192 - DNA, 201 bp, Homo sapiens
gtcagggcctctgctggtctctgcagggctcagcagcagctcatagccctcatccaggacatgactcagcagtgcaccgtgacccgcaaggtgaggctccmgggaggggcctggaccccactggggtgggctggaagaggggctcggtgctggcagggtggcaggaggcactgtgtggagagtgggctgctgattggaggg

SEQ ID NO: 532193 - DNA, 201 bp, Homo sapiens
ccagacatgagtttccaggggacccaattcgacctggcacagacagtccccagacatgagtttccaggggacccgattcgacctggcacagacagtccccrgacatgagtttccaggggacccgattcaacctggcacacatggtccctgggatgccggcctcactgtggtttctggagcctcaggaccctggcatctgtc

SEQ ID NO: 532194 - DNA, 201 bp, Homo sapiens
tgctgcacggagctcctgcaaaagcaaacctgagaaccttggtgagtacttccggagacccggctcctgggacggcttctggcgctgctcctgcacacacractctccaacgatcattttccatgttttatttttatcttttaatttttgagatggagtctcactctgtcacccaggctggagtgcaatgatgcaatctca

SEQ ID NO: 532195 - DNA, 201 bp, Homo sapiens
gcactggggtccttcctggcaactcaccagagacaccaacctagacctcagggcatctgggtattgcaggcagcagctcctgccctcgaagccccagagcyggcaggtgctgggggccagtgcttggggcgtggggactcagagggagcaggtgatgcagtttgagcctgctgctgcttatgctttgcagcagctgcctgg

SEQ ID NO: 532196 - DNA, 201 bp, Homo sapiens
ctcctgccttgggggcttggccctcaggctgtggggtttctgacaggtggtttagttaaggtgaggctaagaacaagagatgaaatttagtgactcatctsacccactttctctttacctccttccttcctgctgttccccagaccccaaaattggcagaattaaaagctgctggaacagaattaaaagctggaactgggc

SEQ ID NO: 532197 - DNA, 201 bp, Homo sapiens
ggtgagtgtcctattaccaatgggaggcaacagcctttccaagcacatggggccatggagggggaggagaattccagaacactggggccagagggaagcartggggaggtggccttgccggctctcctgctctgggcagtgcacaagccggtcgtctcccggcctgcagcggcgtcctcatgcggcggaggccagcccgca

SEQ ID NO: 532198 - DNA, 201 bp, Homo sapiens
gccaggtgtggcggcgggcgcctgtaatcccagctactcgggaggctgagacatgataattacttgaactgggaggtggagttgcggtgagccaagatcgygccactgcactccagcctgggtgacagagcgagactctgtctcaacaaaacaaaacaacaacaacaacaactgctctgatttcacgcttaccaaacaaac

SEQ ID NO: 532199 - DNA, 201 bp, Homo sapiens
gacagagcgagactctgtctcaacaaaacaaaacaacaacaacaacaactgctctgatttcacgcttaccaaacaaacttgatttcaaatctggcctctcyagaatcttgataccaggatgacggtgccttttacagtgggcaaaagtagcctagtcactggaaaatgacattttataattgaaatttaaagttgtaaatt

SEQ ID NO: 532200 - DNA, 201 bp, Homo sapiens
gccgcatgaagcgtgaggttagcgcacacttccatgaggtgctgaggctgaaggacgagatgctcagcctctcgctgcactatagcaatgcgctgcaggaraaggagctggccgcctcacgctgccgcagcctgcaggaggaggtagggggacaccctgcaccccggcgcgaccctgctgtcgtctgcccccaggcctttg

SEQ ID NO: 532201 - DNA, 201 bp, Homo sapiens
tgagtgcacacacggggaagatttcacagtcggtgctgggcctccctgggccaggacagtccaaaccttcaactgaatcgactctcgcatctgccttaacrccctctgtgcccccattccccacaggacagaggccagccgtgtttcccttccccaggggtggattgggtcagggagggaagggacctcaggtgctcagaa

SEQ ID NO: 532202 - DNA, 201 bp, Homo sapiens
ggagagccagggacttaggtgaggagggaacggggaggaaaggagacggtagaagagaagaggacagggagggaaaattgtttttctgggacattaaaaamgcaaaacacaactatgcatgcaacatcccctcattgttttaattcagacgtaatcagcctaagcaactttctagatgcacctcgaaatctagcacttaag

SEQ ID NO: 532203 - DNA, 201 bp, Homo sapiens
gttcccaggcacgtctacccctccgacctgactttcctctctcttacttcttactgatttccatgactccaaattccctttcttgatgtatttagcagaayatggacaagcagggaagccagggagcatgctggccatcactgccggctgctcagctgtagagatccaggagttggttatcaaggcctcttggtctattcc

SEQ ID NO: 532204 - DNA, 201 bp, Homo sapiens
tactctgcaggggtctgacctctcactgtccttaatgattttggtctcaaatggacccagatgtgaccaatggaacccttcaaccagctccgtgtcctaaracgggtcccttgtttttggagaaccaactgcttttctggcctcacaagatattccagggtcatcttgtacccggcctaccccaaatccaggctcagccca

SEQ ID NO: 532205 - DNA, 201 bp, Homo sapiens
ataatacccacctacccttgctttatcatttgtacttttactctctcgtggccctttatgtctacttcctgaaaatcagcacctgcccctatatagccacmgtgcagttctcaacttcagtctttttggtatggacgccctgtttttatccaatccgcctgtgttctggttttctcatctgtcccagtgactccttcacag

SEQ ID NO: 532206 - DNA, 201 bp, Homo sapiens
ttcccacatgtatacagaaattatgttctttggccgggaccctgcacagggggtgctggcctgactcagggcatctcctcgagggctctcgaggtcctgtygcccctcacaggggacgtcacaccgtccaccatttgtcaaggtgcaggccaattgctctactgcagaatggctctttcttttcttccctgcaactgataa

SEQ ID NO: 532207 - DNA, 201 bp, Homo sapiens
tttgggaaagtcccgcctgccagccagcgtaagccaaaggccggctgcgctctgtctgctggtgtccttgtgtttttccctagagccaggggagttgtgtytgatccacgccctgctcagcacccagccccctgctctgatctgtaacgcttgggcttcccagtggtttcagaaggcagcaggcagggtggcttagtggtg

SEQ ID NO: 532208 - DNA, 201 bp, Homo sapiens
ctcaaagcgaggccacctgtgtttaggggtgtttgggtgcatgtcatcactaccctagccagggctcctgggcccttgctctcccctgagcccgccccccmcaactctggcctgtgcaggaagggcctacagcggttgggcacctcagaggagcagctcctggaggctgcgaggcaggaggagggagacctggaccgggcg

SEQ ID NO: 532209 - DNA, 201 bp, Homo sapiens
gggctgcggctgctggcatgcccaccgcgtgaactcttacaccatgaaggatactgccgcgcacggcaccatccccaactactccaggtgagcagctgccwcgagctcggtgcgtccccagagaggcccacagggaaatggcacccagcctgcctcggcttcctcctcctgcccagcaatagagggtgggcgtggtgagac

SEQ ID NO: 532210 - DNA, 201 bp, Homo sapiens
ctggggttgcagtagttgctcgatacatgccagctttgcccttctcgagtctgactgaggtcatgggggtaaagggagcctgtgagagcagtgagggcgcrtcccacccagcagaacccagaaaaccgctttcacctcccgattcttacatgtgcggggggtttcccagccccaggcctctcccccgtggggaagccagcc

SEQ ID NO: 532211 - DNA, 201 bp, Homo sapiens
agatgttgtttctttgtgatggatgctttatatattgcaaatgaaatgttcattctagaacattctagatctgggtttcttagctctgggtttcttagctytggtaccatggacgtttggggctggatccccgtctgtggtggggccgtcctgggcactgcaggatatagagcagcatccctggccgccctacccaggatg

SEQ ID NO: 532212 - DNA, 201 bp, Homo sapiens
ctttatatattgcaaatgaaatgttcattctagaacattctagatctgggtttcttagctctgggtttcttagctttggtaccatggacgtttggggctgsatccccgtctgtggtggggccgtcctgggcactgcaggatatagagcagcatccctggccgccctacccaggatgccgggactactcccatgccccagct

SEQ ID NO: 532213 - DNA, 201 bp, Homo sapiens
ggggccgtggcactcaaccttacacagagggagaaaccagaatggcaaatggccactggaatgcttcctctgccgtaaacatctcaagactgtgggttctractggcaaagagtgcgccttgctaattttacgatggagttgattttaaaacggtgtcaccctggctatcctggggtcctgcttacctgacaactccaccc

SEQ ID NO: 532214 - DNA, 201 bp, Homo sapiens
taggtgctttgctccccatttggaattcaccccatggccaccagggggcgcaagtgccctgcgctgcccctgtgccttctgtgggtcgcagaatcagaaaycttcatctttggggactcatacacgtttttatttataatcgtgataaatcgagagagaccacccaaggcatatctaaattagatgtgagatgagaagggg

SEQ ID NO: 532215 - DNA, 201 bp, Homo sapiens
agcagccagggacccccagagccaagagaggatcagccaggctgtgccccaggtccccaggaggcccccaagccagctggaaacctcccacccactgactmcagtgccagagcagcttctgagactgggagggtccttccttctctcctactttaattttctgcaaccttcctcgcagaggctcgtatctgtggctcatct

SEQ ID NO: 532216 - DNA, 201 bp, Homo sapiens
gggaaccgattcaacctggcacagacagtccccagacatgagtttccaggggattcaacctggcacagacagtccccagacatgagtttccaggggacccrattcgacctggcacagacagtccccagacatgagtttccaggggacccgattcgacctggcacagacagtccccagacatgagtttccaggggacccgat

SEQ ID NO: 532217 - DNA, 201 bp, Homo sapiens
ctgcagcggcgtcctcatgcggcggaggccagcccgcaggatcctgagccaggtcaccatgctggcgttccagggggatgcattgctggagcagatcagcrtcatcggcgggaacctcacgggcatcttcatccaccgggtcaccccgggctcggcggcggaccagatggccttgcgcccgggcacccagattgtgatggt

SEQ ID NO: 532218 - DNA, 201 bp, Homo sapiens
cccaggcccctctgtgtagcctgcatggcgacgaggtgtgccttgtccagtagctgcccgtggcctggctggcttgtctgtgaactgcccatcctgctgaygcctgggcaggtctggacacactctgggctgcatatttgtagggccgcctacgtcccactgcccagctgcggcagtgacatgggatagtcggcctctgtc

SEQ ID NO: 532219 - DNA, 201 bp, Homo sapiens
tctgacttgattttactttttgaatctgtggacggtgacatgcccagcccagctggaccattgcaggagctgggaacttgcgaattgacaatgtgctaacygggtgtcgggaggggagagtccaggtggaaaggtccttcttggccacagcccaggggtgagcaccggcacccaccccgacgtgcagacttcccgggcttg

SEQ ID NO: 532220 - DNA, 201 bp, Homo sapiens
gagagccttggctgagacccctctgggaagctgatccttcccctccccaggaggccacccaggcccctctgtgtagcctgcatggcgacgaggtgtgcctygtccagtagctgcccgtggcctggctggcttgtctgtgaactgcccatcctgctgacgcctgggcaggtctggacacactctgggctgcatatttgtagg

SEQ ID NO: 532221 - DNA, 201 bp, Homo sapiens
gtgcagtggcgccatctcagcccactgcaatctccatctcccgggttcaagcaattctcctgcctcagcctcccgagcagctgggattataggcgcgcacyaccacacctggctaatttttcgtatttttagtagagacggggttttgccatgttggccaggctggtctcaaactcctgacctcaggtgatccgcccacct

SEQ ID NO: 532222 - DNA, 201 bp, Homo sapiens
agtagctgggattgcaggtgcataccaccatgcctgactaatttttgtatttttagtagagacagggtttcaccatatttgccaggctggtctcgaactcytaggcttgagcaatccttcccccttcgcctctcaaagtgctgggattataggcgtgagccaatacgcctagcctactaccattattttagatgaatttct

SEQ ID NO: 532223 - DNA, 201 bp, Homo sapiens
cctgctcacctggcaggaggcagctgggtcagggcctctgctggtctctgcagggctcagcagcagctcatagccctcatccaggacatgactcagcagtrcaccgtgacccgcaaggtgaggctccagggaggggcctggaccccactggggtgggctggaagaggggctcggtgctggcagggtggcaggaggcactgt

SEQ ID NO: 532224 - DNA, 201 bp, Homo sapiens
cgcttacttgccgatttgccctactcccccttccctccaggctgcagttcctgtcccagccccagcactctgagggtgaggaaccccctcactgtattggkgttggataggataaggagcccctgggccttgactctgaagggtcggtccttagttacccagtgccaaaaggagacccctgagcggtagggtggggagaat

SEQ ID NO: 532225 - DNA, 201 bp, Homo sapiens
tgaggcagaagaattgcttgaacccgggaggcggaggttgcagtgagctgagatcacggcactgtactccagcctgggcgacagagtgagactctgtctcaaaaaaaaaaaaaagaaagaaagaaagaaagaaagacaggccagtgcagtgcaggcccacgcagacatggaggtcaatgcagtaatgcaggccagtcctga

SEQ ID NO: 532226 - DNA, 201 bp, Homo sapiens
ttttttgtttgttgttttgaaacagggtctcactctgtcacccaggctagagtgctgcggtgcgatcacagctcactgcagcctcgacctccccaggctcrattgatcctcccacctcagcctcttaagtagctgggaccagaccacaagcatgcgctaccgtgcccggctaatttggggacattttctaaaacttttttt

SEQ ID NO: 532227 - DNA, 201 bp, Homo sapiens
agcagaagaaggtggtgtggacggagcagagcccccgatgatgcaccgtgccccttcccgggactgtgggggcttctgtgtgcctgttaatgcagtcctgytcctcagcccaggccctcttggcacagctgtgggctccttggcacatgaggccggctctccccactggctggggtctaaccttgaaccctcaccacgtgc

SEQ ID NO: 532228 - DNA, 201 bp, Homo sapiens
cccagggcggttgggaagatcctgagcgagaaactgtgcctcctccaagggtttaagaagtgcctggcaggtatgctgttgcctgggaatccctctacccyttccaccttccctccctccctcctccccttcctccctccttcctccccttcctccctcctccttccctcccccaccacgcacattcccacactcacctgc

SEQ ID NO: 532229 - DNA, 201 bp, Homo sapiens
tggcctgtctttggcagctcaagcaggaagccaggaccagggagccctgtccacgggagaagcagcggctggtgcggatgcatgccatctgccccagagaygacagcgactgcagcctcgtcagctccacagaggtacggccgctcctcccgcctccctcactgccttgaccctctgggccagcccaggggcctctctgtc

SEQ ID NO: 532230 - DNA, 201 bp, Homo sapiens
attgcaacgaggtcctgcacgtcaccgacaccatgttccagggctgcggctgctggcatgcccaccgcgtgaactcttacaccatgaaggatactgccgcrcacggcaccatccccaactactccaggtgagcagctgcctcgagctcggtgcgtccccagagaggcccacagggaaatggcacccagcctgcctcggctt

SEQ ID NO: 532231 - DNA, 201 bp, Homo sapiens
tgagtgctaaaagcatcattaggaggaagggtgagaaatgcccccagctcctgatcaggggagaagctgtttccatcgcccttcctgtcgcctccccaccrcacagctgtatctactgaagcaggagctgcagcgagccaacatggtttcctcctgtgagctggaattgcaagagcagtccctgaggacagccagcgacca

SEQ ID NO: 532232 - DNA, 201 bp, Homo sapiens
catggacgtttggggctggatccccgtctgtggtggggccgtcctgggcactgcaggatatagagcagcatccctggccgccctacccaggatgccgggastactcccatgccccagctgtgacaaccagaaatgtctctataggttgccaagggtcccctggttctcctaggactgtcttggtcttagcactgaaagccc

SEQ ID NO: 532233 - DNA, 201 bp, Homo sapiens
tttcctgcaactagacggtcccatctgggggtgatgggagacggtaacagatcatcaggaattagattctcataaggagcgtgaaacctagatccctcacktgcacagttcacgatagggctcatgctcctctgagaatctactgctgtgctgagctgacaggaggtggagctgaggccgtaatgctcacttgcccaccac

SEQ ID NO: 532234 - DNA, 201 bp, Homo sapiens
atggacgtttggggctggatccccgtctgtggtggggccgtcctgggcactgcaggatatagagcagcatccctggccgccctacccaggatgccgggacyactcccatgccccagctgtgacaaccagaaatgtctctataggttgccaagggtcccctggttctcctaggactgtcttggtcttagcactgaaagcccc

SEQ ID NO: 532235 - DNA, 201 bp, Homo sapiens
ccccgtccaatgtcacctgtagagtacttgagccaggaggagtatgaggcctggagccagagaggggacatcatccaggagggagaggtgtccgggggccrctgctgggtgacccgccatgctgtggagtccctcatggaaaaggtgaggtcaagggcggggtgggcaggggagctgtcctgggaagggtttcaggaatgc

SEQ ID NO: 532236 - DNA, 201 bp, Homo sapiens
ctggaccccactggggtgggctggaagaggggctcggtgctggcagggtggcaggaggcactgtgtggagagtgggctgctgattggagggtaaccccacstgtctctcctctgcaccccttcaaaccagggcagggtctgcagcccctgcccagcctgcaggctcttgcacaagtgcagacacacctcaggctgttctca

SEQ ID NO: 532237 - DNA, 201 bp, Homo sapiens
ggacaaagccaaggccagccctctgcgtttgtcctttgacaggggccagttggaccccagcaggatggagggtgaggcctggtgagctggcacaggggccrctggctccaagtgggtgaggggctttgggagctgctgctagttggtcagctggggcagggggatgccactcatttaggccaggatctggtcttcaagaat

SEQ ID NO: 532238 - DNA, 201 bp, Homo sapiens
ggccagccctctgcgtttgtcctttgacaggggccagttggaccccagcaggatggagggtgaggcctggtgagctggcacaggggccactggctccaagygggtgaggggctttgggagctgctgctagttggtcagctggggcagggggatgccactcatttaggccaggatctggtcttcaagaatcatggggctggg

SEQ ID NO: 532239 - DNA, 201 bp, Homo sapiens
aatcttcatctttggggactcatacacgtttttatttataatcgtgataaatcgagagagaccacccaaggcatatctaaattagatgtgagatgagaagrggggcttattcctctttatttttcctctgtgaggattctgcgtaatgccctggttgcatatacttttagtggaattgacctcaaatacatccagagtaca

SEQ ID NO: 532240 - DNA, 201 bp, Homo sapiens
cttaatcctttccacctcggcgcgaccggctcccagccttgggccttgcacacagtaggtgctttgctccccatttggaattcaccccatggccaccaggrggcgcaagtgccctgcgctgcccctgtgccttctgtgggtcgcagaatcagaaatcttcatctttggggactcatacacgtttttatttataatcgtgat

SEQ ID NO: 532241 - DNA, 201 bp, Homo sapiens
cgccccatcagcagtggggtgaccaagatctgtgagctcttggcttcctcccagaccttccgcagctggaaagcagcctgcagccagtctcccctggaagscttgatgtctcggagaggtaagcagcaggtgggaatcctccgaggctggctggggaaccagggccagggagtggcagagcagagggtgagtgtcctatta

SEQ ID NO: 532242 - DNA, 201 bp, Homo sapiens
ctcctgtagctcatttctgtttgtgattggaccggccctctctgcttcccaagtccatgggcccgtcatgggtgggtgccttaatcctttccacctcggcrcgaccggctcccagccttgggccttgcacacagtaggtgctttgctccccatttggaattcaccccatggccaccagggggcgcaagtgccctgcgctgc

SEQ ID NO: 532243 - DNA, 201 bp, Homo sapiens
agtcttgctctgttgcccaggctggagtgcagtggcacgatctcggctctagagaagccgacagtcttgcttctaatgaaaattacctttcataaagaacwtataaagcagcatttccaaagtgcagcacccctactgttatttgtttgtttgtttgtttgtttgtgtgtttgtttaccgggacagggtctccctctgtca

SEQ ID NO: 532244 - DNA, 201 bp, Homo sapiens
gtgtcactccccagcacatttccctcatgtggagtcctctgcgcagtcctctgtgtcactgtcctgggccgctgcaaacaagggaccacctgctgcgtagytgaaaacaatgggaacttttttttttgtttttttagacagagtcttgctctgttgcccaggctggagtgcagtggcacgatctcggctctagagaagccg

SEQ ID NO: 532245 - DNA, 201 bp, Homo sapiens
caagactgtgggttctgactggcaaagagtgcgccttgctaattttacgatggagttgattttaaaacggtgtcaccctggctatcctggggtcctgcttmcctgacaactccacccccatggccacccctcctagggtcctcccagcgcccagccatgggggaactgtgccgcagggactccgcactcacggcactggac

SEQ ID NO: 532246 - DNA, 201 bp, Homo sapiens
aaaggcggtggctgcagctctgtgagcagtggagaaaaattaggcacaacctgatatcctcccacaggagcgtaagtccactgtggttattcatatcattraatccagtgcacagtttaaaggaccatgcatgtatcaagctgcatgtatcagtatgagaaacctcagaagccgtacagccttgcacagaacgatagtttc

SEQ ID NO: 532247 - DNA, 201 bp, Homo sapiens
tgtgtcaaaggcttttggagtgaccaaaagcacagaggcagcgggtggggcgcctgggtggtccccaaggtcgctgccacccttgcccggggcagaggcakaagcccacatatgctgtgacgctggccaccttttctcagcttctgaggctgcgatgcctcaggaactccagtttacagagaccagtgtgtttacttgtaa

SEQ ID NO: 532248 - DNA, 201 bp, Homo sapiens
ctctcgctgcactatagcaatgcgctgcaggagaaggagctggccgcctcacgctgccgcagcctgcaggaggaggtagggggacaccctgcaccccggcrcgaccctgctgtcgtctgcccccaggcctttgtactagctggtccatctccctggaactcctttcccctcttccttgtctaacacttccctgccccgaga

SEQ ID NO: 532249 - DNA, 201 bp, Homo sapiens
ccagactccatgacccttaagtccctggtggttcttctgcacgcccagcagccagggacccccagagccaagagaggatcagccaggctgtgccccaggtccccaggaggcccccaagccagctggaaacctcccacccactgactccagtgccagagcagcttctgagactgggagggtccttccttctctcctacttta

SEQ ID NO: 532250 - DNA, 201 bp, Homo sapiens
tggaaactcttaatactgcatagcacacagcctcatttagaaagtggcaaactcagctgggcctggggctcacgcctgtcatcccagcactttgggaaccsgaggtgggaggatcgcttgagcccaggagttcaagaccagcctgagcaacacagtgagacccgtctctaaaaaaaattaaaaaataaaaagagaagaaag

SEQ ID NO: 532251 - DNA, 201 bp, Homo sapiens
tggggctcacgcctgtcatcccagcactttgggaacccgaggtgggaggatcgcttgagcccaggagttcaagaccagcctgagcaacacagtgagacccrtctctaaaaaaaattaaaaaataaaaagagaagaaagtagccgggcacagtggctcgcgcctgtaatccccacactttgggaggcctaggcgggaagatt

SEQ ID NO: 532252 - DNA, 201 bp, Homo sapiens
gcttgagcccaggaatttgagaccagcctgagcaacacagtgagacacccgtctctacaaaacatttaaaagctaaaaaaattaaaagtgggccgggtgcrgtggctcacgcctctaatcccagcactttgggaggccgaggcgggcagatcacctgaggtcaggagatcaagaccatcctggctaacacggtgaaaccct

SEQ ID NO: 532253 - DNA, 201 bp, Homo sapiens
cctctgcgtttgtcctttgacaggggccagttggaccccagcaggatggagggtgaggcctggtgagctggcacaggggccactggctccaagtgggtgargggctttgggagctgctgctagttggtcagctggggcagggggatgccactcatttaggccaggatctggtcttcaagaatcatggggctgggtgtggtg

SEQ ID NO: 532254 - DNA, 201 bp, Homo sapiens
atccctcacttgcacagttcacgatagggctcatgctcctctgagaatctactgctgtgctgagctgacaggaggtggagctgaggccgtaatgctcactygcccaccacgcccctcctgctgtgtgacccgggtcctgatggaccatggaccagtaccagtatgtggcccaggggttggggaaccctgctcttaaggttc

SEQ ID NO: 532255 - DNA, 201 bp, Homo sapiens
gcccaggggttggggaaccctgctcttaaggttcccaattatcagctctgaggtagttcaagcaacagagccccttgacgatgttcagggagatagtcccratatcctaagggggccaattagattctaatggtgttaaaacacatcttaatttttattgtaaaaatatctactctcctaagcttagaacaatattgagaa

SEQ ID NO: 532256 - DNA, 201 bp, Homo sapiens
tatttatttactttaattttttagaaaaagctgtaactgacacaacaaagtgtgatttagtgactttattgcttaggattggggtagagcaggtggggccrtggcactcaaccttacacagagggagaaaccagaatggcaaatggccactggaatgcttcctctgccgtaaacatctcaagactgtgggttctgactggc

SEQ ID NO: 532257 - DNA, 201 bp, Homo sapiens
gggctgctgcagtgagcaaagcagacccagtccctcccggggcagggtaggctggctgggggctgccgcagcctcacccaccctcaggatcctctcctccrcaggctccagcacgtgcttctgggccgagagctgcctcaccctggtgccctataccctggtgcggccccatcgacccgcccggccccggcctgtgctcct

SEQ ID NO: 532258 - DNA, 201 bp, Homo sapiens
tgccgcagcctcacccaccctcaggatcctctcctccacaggctccagcacgtgcttctgggccgagagctgcctcaccctggtgccctataccctggtgyggccccatcgacccgcccggccccggcctgtgctcctcgtgcccagggcggttgggaagatcctgagcgagaaactgtgcctcctccaagggtttaagaa

SEQ ID NO: 532259 - DNA, 201 bp, Homo sapiens
ggccccgctgattgctcatgagattcccctgattttggccgggcgtggtggctcacgcctgtaatcccagcactttgggaggccagggtgggcagattgcytgaggtcagcagttcgagaccagcctggccaacatggagaaaccctgtctctattaaaaatacaaaaactagccaggtgtggcggcgggcgcctgtaatc

SEQ ID NO: 532260 - DNA, 201 bp, Homo sapiens
gcaacagaagttggaactggacacaagatcatgccacaaaagaccacatttcttagctccccatgcagctctgggtaccttgtgagtagattctggtcaaygggaggtgattacaagtgaaaggaatgtgcaaagccttttccttcccatttttctattggctgaaacaaggatactttcttctgagccacttttgaccat

SEQ ID NO: 532261 - DNA, 201 bp, Homo sapiens
caaacctttggctttatcctaactcaaaacaacactttaaccctttaatctaggcaaaaaaaatccacatttccttgactgtttatatatatatatatatattttttttttaccaaaaacacatttcactttccttacatgccttacacatagaactgtttctttagtagtcttaactatatgttacaatgttaactctta

SEQ ID NO: 532262 - DNA, 201 bp, Homo sapiens
aaagcttaggcaaatttctctcattggaaaattgagctcaacctgtaaaaggcaggagattccaggaaaggaagattcagtgagaagcagatgaaagtgakgaaaagctgacaactaacaacgtagcacaacctgaaagcacctaaattcctacatttacctcctcattatgtaaccgcccagtggattcaccttgtccgc

SEQ ID NO: 532263 - DNA, 201 bp, Homo sapiens
gtagacaaggtgtgaggccagttttcccaaggggcttttattggatctataagtcaagtttaattccttaaaggaaaacacaccattccagtcaaagcctwggtaaaaataaccagtttttccaattgtgtcctattgcaaaagaaacagattcttattgcactatgttgccttaagatactcacaaatagtttccaaatt

SEQ ID NO: 532264 - DNA, 201 bp, Homo sapiens
ggtgttaaggcaaagccaagttcattacataccccagtaaaggggattctgagactgaggagtgcctcagaaaagagggcaaatgtggtggtcattgaatrtgttgaaccctgagtgagtgagtttttgatgtgggggtggattagaattgggaaagtttgggacatattagggtcaggggacacagggaggtgaggattt

SEQ ID NO: 532265 - DNA, 201 bp, Homo sapiens
agcaagttttatgagagctgggccacagccttgctcacagctatattcccggtgcttggcatcttggtgcttgttgaatctttgctgatgaatgacccaaygcgtgaatgcatcctcagcacctctggcttctcagggcctcgcgccaggctcctgggggtcctggccctgggcgggttaccctcctggtgtcactttttc

SEQ ID NO: 532266 - DNA, 201 bp, Homo sapiens
ccacaaccttgccaacaccgatcgtctttgttttttcttttctttttttctttttttttgataaaagccatcctgagagatgtgaggtggtatctcattcctggttttgatttgtatttttctgatgatgagtgacatcttttcagatacccattggtcatatgcatgtcttcttttgactaatgtctatccaggttcttt

SEQ ID NO: 532267 - DNA, 201 bp, Homo sapiens
gctggcttatttattaaagattttacttaagttacataaacttgaaaaagcatttgactaatcttttctttcttattatctaatttaagtggtttttttttgagatggagtctaactctgtcacccaggctggagtgcagtggtgggatctcggttcactgcaacctctgccccccaggttcaagcgattctcctgcctca

SEQ ID NO: 532268 - DNA, 201 bp, Homo sapiens
ttagaaaaagacataattcataatttgattttggaaagttggtcaaatataaaaggtttaaaacacttgatattacaaaataggattacaggtcattgtamagtcatttatttaaccaaagtgataattcaaggatttcaaaaaagcgaaaaccttcattctttgagagaggagacttcattttctaaacaaggggcccta

SEQ ID NO: 532269 - DNA, 201 bp, Homo sapiens
gatattttatttactccaaccccaaaagtaccatcagtctcagccttctaccttgggtttggaaattcacactcaatttttctgttgattgtcatgtaaaygtttgataaggaagcataagcattcatgagaagactatatcttttttctaaaagttccaataaaatgctgcagtatatcactttaaaatgattaaagata

SEQ ID NO: 532270 - DNA, 201 bp, Homo sapiens
caccttatagtatttggcagggataagtatgaaattgcctgattaataaatgcaaacaaaaatgtatgctggcaattcttaagacatttctaatataactytaccaataattttaaagctggcttatttattaaagattttacttaagttacataaacttgaaaaagcatttgactaatcttttctttcttattatctaat

SEQ ID NO: 532271 - DNA, 201 bp, Homo sapiens
taacctttattaaggagttggttaatgctttaagaaaaccttgttaatctgacacagggctccatatactggttttgcatcaatgtgcctttgacattaayaattaatttgtagagaaactgaacttattttatctttcaaaatgggcccttacaatcttatgcgcccacctcttcccccatagtccctcagtcttgagga

SEQ ID NO: 532272 - DNA, 201 bp, Homo sapiens; identical to SEQ ID NO: 332115

SEQ ID NO: 532273 - DNA, 201 bp, Homo sapiens
tgctacagagaacatctctggaattctaatagattcctacagccctcttgaaaaaacagtttatgtctgatgttaactagtctaagttaaaaatgtgctcrggctaaagaaagtgtctgccccacaaatgtggccacccttcagctcactgatgcttttgtgcaaaaagtcgtggtccggatatctgaatcctcctcctgc

SEQ ID NO: 532274 - DNA, 201 bp, Homo sapiens
tttctttacatatttttttagttcctggttccttttaccttgttttatacataactctgaaataagctttaaattaggcaaaacttgttcactttttttttataaaaaaggacacacttctttttcttctttctttttttttttttaagcagaaatgttttcccacaatatatatttattggaaaacacccaaatactgaa

SEQ ID NO: 532275 - DNA, 201 bp, Homo sapiens
gggcctgtcaagcctcatcagctgtcttcctttgcttctacaaaagccactaaaccctgttggatttaggggctttctagatagcatttcccttccacagkaacagaccatgcactggacatattaaaatcacaacccagccctcaccacccgtccttccccttcaaggccaggccaaggtccagctgaggtccacccatg

SEQ ID NO: 532276 - DNA, 201 bp, Homo sapiens
taccagatagaaacttagatccacacaaagaggtgaggaggactgggaaaaggtaaaaatacaatttgtgggtttaaaacattttaaaattctctaaattrtaactaattgtctaaagcaaagagggtagcaatatattgtgtgtttacaacataattaaaagtgaaatgtattgtagcaataatacaaagtgtgggaaga

SEQ ID NO: 532277 - DNA, 201 bp, Homo sapiens
tgtcccactttcttcatccagctggggccttccacgggagagcactgaaggtatttgcacccaatgcttcataaagccagccagggcactcatttttaagytcacagtgcgccaccttctatcttcgggttgtttatggcctcttggttataggatgtaaacatcccccatgggagatgtgcaggttacccacctgatcaa

SEQ ID NO: 532278 - DNA, 201 bp, Homo sapiens; identical to SEQ ID NO: 332119

SEQ ID NO: 532279 - DNA, 201 bp, Homo sapiens
caaggaattcagtttacctcagcaagtgctaatgcagctctagttttagttttcattctgggatggaacaacatagccccagttgttgagggtctctctgygagtatctttctggtggcacaagcagtgacccctaggcaaattgatgggctcatctggattagtccactgcattttttaggatggccaaagctgctttct

SEQ ID NO: 532280 - DNA, 201 bp, Homo sapiens
tgctgattgattaaaaggataagcctaggtgctgtagatgttgattcgtagacactggggggtggagcttggtgctggcatccacagtgacctgagtgatkcttcacaagcactgagaatcatgctgagtcttgaatttttttaatattcactttcagcaattgattaatccacccagcactgttagagaggtgtgtggct

SEQ ID NO: 532281 - DNA, 201 bp, Homo sapiens
gaaagataatctggaaaatccccccatcttaacctgattagcagccttaattccctttaccatgtggtgtaacatattcgcatatgtaacattaccatgtrgtgtgacatattcacaggttgcagggattcatgtgtagacgtctttaggggctgttattctgtctactacaatgtttgactagtgtctatagagtgaatt

SEQ ID NO: 532282 - DNA, 201 bp, Homo sapiens
gcgaaaattttcaagaaactctggaaaacctcctaccaaacctggtgcttgataagaagcctagatgccactgtgaaccttgtgtctgctgtggcccccawgacctgaggaggattgcctctcttcactgtcttccaaagcttaggcaaatttctctcattggaaaattgagctcaacctgtaaaaggcaggagattccag

SEQ ID NO: 532283 - DNA, 201 bp, Homo sapiens
tatactaaaaatatttgtgtatttaaatattctttttctacatgacttcaaaacaacacatttgtgtacttaatacatgaaatatttattatacagacacrtaaaagggaatgtattgtatatactgttttacattggactttttccgcttattacattgtgaatatctttttacattattaattattgctctaagacatc

SEQ ID NO: 532284 - DNA, 201 bp, Homo sapiens
aggaaattctgacacatgctactcacgaagaaccccaaggacattatgctgagtgaaataagccagtcacaaaaacacaaaagctgtatgattcacttgtrtgacgtaccggagttgtcaaattcatagagataggaagtagaatggtggttgtcaggggctgggggtaggggaaaatggggagtaatgggtatcacattt

SEQ ID NO: 532285 - DNA, 201 bp, Homo sapiens
aatgtgtgttcaaaaagcaggagtccctatgactcagcaattccacttccaaacatacccaacagaatcgaaagcagggactcaaagagatagttgcatamcgtgttcatggcagcattacttacaatagccaaaaggtggaacttaaatgtccatctacagatgaatggataaacaaaatgtgacatagacacacaatgg

SEQ ID NO: 532286 - DNA, 201 bp, Homo sapiens
tgcacctgcctcagcctcccaaagtgctgggattacaggtgtgagccacctcacctatgacgggcattttactgaagaagaaaccaaaggctttcccaaartcacacagcaatgactgacagaaccgaaaatagaacccaggtcttctaactccacatctggtgccttttcaggacctctgaagttagagacaaataaaga

SEQ ID NO: 532287 - DNA, 201 bp, Homo sapiens
gctgcttctgactggtggggacacttgagggtgagcactcttgctcagtctcttacttttctcgcttgctccactctggtggtgacactatcaggtcaaayatggaaagtctttagtccttagttccattggctgaagcagaacagtcctccgacactgtgattcatacgcaccctaactgggcatgtgcagagccagctg

SEQ ID NO: 532288 - DNA, 201 bp, Homo sapiens
caggagatagttaagaattgagggtttgaggtattagatatatatttctaaacatacgttaaactgaatatgtacctattaaaaagaaaagataaaacgtwctacctaagatcatctcacgtaccactttggaaactcctgtcctaccttaccggccccttaaaagcaggacagtgactcatgcacagcctgctttctacc

SEQ ID NO: 532289 - DNA, 201 bp, Homo sapiens
ttggcagaacattctctttaacgagcagattcattcattttctgggaaacatactagcgttttgcctctatcacactaaaagaactggctggtgcaatcarttccacagaacacccatcaattcagttaaacaaccagtggggtggaaaacccccagaaatcaatagtagttgtttcactgaattgatgggttactgcgag

SEQ ID NO: 532290 - DNA, 201 bp, Homo sapiens
cagcttatcagcatattgacatgcaatgaaagccccttaaatgcttcccaatccctatgcagaagaagcggagaaggaaaaccactgtcattggaaaaaawtatttggcagaacattctctttaacgagcagattcattcattttctgggaaacatactagcgttttgcctctatcacactaaaagaactggctggtgcaa

SEQ ID NO: 532291 - DNA, 201 bp, Homo sapiens
gtttccctagccatgtggaactgtaagtccaattaaacctctttttgttcccagtttcagtatgtctttatcagcagcgtcaaaatgaactaatacactgwcttacatatgagttgccagaaacgagacacttcatgctgtataaaatgcataaaaatgcaaaatatacattgcatattcggagtcagctgacttaatgga

SEQ ID NO: 532292 - DNA, 201 bp, Homo sapiens
actggatcaagacatatggctttcatgctctggaatgaggctttctaacaggtcccattgacatgtgaatggcatccaaggccagggtaccaaatggtctsttaccccagccccctggagatacccagagcctagaagaccacccatgtgggtcgatgggaggaggaagtcaggacacactagaagcgaggtgagcctcgg

SEQ ID NO: 532293 - DNA, 201 bp, Homo sapiens
catgctattctcgagatagtgagtaagtctcacaagatctgatgggtttatcaggggtttctgcttttgctccttctctcattctctcttgctgctgccaygtaagaagtatctttcaccctccgccatgattgtgagagtttccctagccatgtggaactgtaagtccaattaaacctctttttgttcccagtttcagta

SEQ ID NO: 532294 - DNA, 201 bp, Homo sapiens
actgggctaaaaatcaaggtgtccgcagggttcagttccttctagaggctctagggaagaatctgagtttttgtttgtttgtttgtttgttttttcttttytttttccttttccagcttttggggctacctgcatttcttggcttctggccccttcctctgtcttgaaagtcagcaatggtgtgctgagtctctctcacat

SEQ ID NO: 532295 - DNA, 201 bp, Homo sapiens
tgacttctggcatctcagaagacattggtagccttttgattctagtcatccatacacaggcaagatctgcatagaaccaaggaattcagtttacctcagcragtgctaatgcagctctagttttagttttcattctgggatggaacaacatagccccagttgttgagggtctctctgcgagtatctttctggtggcacaag

SEQ ID NO: 532296 - DNA, 201 bp, Homo sapiens
gtataaacagcatgaagccaattacattagttttttaaaattttgtaaacaatcttcattatataatataacttccataagtcttttataacctttattaaggagttggttaatgctttaagaaaaccttgttaatctgacacagggctccatatactggttttgcatcaatgtgcctttgacattaataattaatttgta

SEQ ID NO: 532297 - DNA, 201 bp, Homo sapiens
accacaggtcacaaaccctgtatagggactgtgtacacaaaatatgaggccagtttttccaagggctttattggctccataaatcaagtttgattccttaraggaaagcacatcattccagtcaaagccttggtaaaataaccagtttctccagttgggtcctgttacaaatgaaaacagattcttattgcacttatgcaa

SEQ ID NO: 532298 - DNA, 201 bp, Homo sapiens
attctccagcctcagcctcccgagtagctgggattacaggcacccgccatcatgcccggctaatttttgtgtttttgtagagatggggttccactatgttrgccaggctcgtctcgaactcctgacctcaggtgatccacccacctcggcctcccaaagtactgggattacaggcatgagccaccatacctggcctcaccc

SEQ ID NO: 532299 - DNA, 201 bp, Homo sapiens
agtttatgtctgatgttaactagtctaagttaaaaatgtgctcaggctaaagaaagtgtctgccccacaaatgtggccacccttcagctcactgatgcttytgtgcaaaaagtcgtggtccggatatctgaatcctcctcctgcctccacaatgggctgctatccggtaacggctgtgaggtcccattaccgcagggcgag

SEQ ID NO: 532300 - DNA, 201 bp, Homo sapiens
aggtttcctttgcaaacattttcacttattaccctttatcacctttgctaattaaggaagatacagaaaccagatttttagggttttttttttttttttttcaatttcagcctttggccacttcctataaaagatttccctctgctttgaataaaatttctaagcagccttcagagccaaattaaatgatttggaattctc

SEQ ID NO: 532301 - DNA, 201 bp, Homo sapiens
aaagtgaaaaggaaagaaaataactgagcaggcaaagctctgtcccactttcttcatccagctggggccttccacgggagagcactgaaggtatttgcacycaatgcttcataaagccagccagggcactcatttttaagctcacagtgcgccaccttctatcttcgggttgtttatggcctcttggttataggatgtaaa

SEQ ID NO: 532302 - DNA, 201 bp, Homo sapiens
ttagcagccttaattccctttaccatgtggtgtaacatattcgcatatgtaacattaccatgtggtgtgacatattcacaggttgcagggattcatgtgtrgacgtctttaggggctgttattctgtctactacaatgtttgactagtgtctatagagtgaatttgtgcctgtgattggccttatgcacacagctcaggcc

SEQ ID NO: 532303 - DNA, 201 bp, Homo sapiens; identical to SEQ ID NO: 332050

SEQ ID NO: 532304 - DNA, 201 bp, Homo sapiens
gctaaaaatcaaggtgtccgcagggttcagttccttctagaggctctagggaagaatctgagtttttgtttgtttgtttgtttgttttttcttttttttttccttttccagcttttggggctacctgcatttcttggcttctggccccttcctctgtcttgaaagtcagcaatggtgtgctgagtctctctcacatttcat

SEQ ID NO: 532305 - DNA, 201 bp, Homo sapiens
agtttccctagccatgtggaactgtaagtccaattaaacctctttttgttcccagtttcagtatgtctttatcagcagcgtcaaaatgaactaatacactrtcttacatatgagttgccagaaacgagacacttcatgctgtataaaatgcataaaaatgcaaaatatacattgcatattcggagtcagctgacttaatgg

SEQ ID NO: 532306 - DNA, 201 bp, Homo sapiens
tagggtaaacagacttaactggggaagcctctattgtccctagtatttaccctatgacctaatgctccaaagtaagaactggctgccttcagtctcttcarttattacaagctatgtaacctttcggccttccaaaaggtttgtgactatttcctataacattccctaatatttccctttaatatttcttccaccatcctg

SEQ ID NO: 532307 - DNA, 201 bp, Homo sapiens
cgatcttttataacgagttttataatgaccatgtattgactgggccagcagagcccgggaagtgggacctggaagaacaggctcttcagtgtcagccaagragctcacttgtcagtgtttcagagtgatcctgggatggtaattgctgctgagctttgcagaaatggcaaggtgtgggaaagtgacacaagtcttgaatcc

SEQ ID NO: 532308 - DNA, 201 bp, Homo sapiens
ccattagggggcagtatgcctggtcgacatccacctgagagggtcatctagctcaaaggttagttaatggaggtagggtaaacagacttaactggggaagmctctattgtccctagtatttaccctatgacctaatgctccaaagtaagaactggctgccttcagtctcttcaattattacaagctatgtaacctttcggc

SEQ ID NO: 532309 - DNA, 201 bp, Homo sapiens
tggcttaattaatctgacacattctgagccgcggcgcaatagtcctcagatgctttatgcggccatatccccagcctggggaagggtggctaagcccatgyttattactcatttatttattattaactttattttaggttcaggggtacacatgcaggtttgttatataggtaaactgtgtgtcacaagggtttggtgtac

SEQ ID NO: 532310 - DNA, 201 bp, Homo sapiens
ttgacgtgtctcagactgggtccctgagaagctgtccgctttcagcgcagcatgaggtatttggtagagttgaaaatgccaattgtaacccagtcaacccrctcagcacactgcctgctggtgccgtgccagtgccaaacagacctgtggcttcccaggggacaggtctcaggacactctcagagcttgagtttctctgcg

SEQ ID NO: 532311 - DNA, 201 bp, Homo sapiens
gggatcttttccagccatcccatcagctctcaagtttcctttttcagggaggaaaaagccccctaagtcccatgatcctgtacatgcctaattctgtcacyggcagctgccagcatgaggtattgctcctcatacttgagggcattagctgcgggggtctgcctgcagaccctgacccaaatgacagatgaataaaacgta

SEQ ID NO: 532312 - DNA, 201 bp, Homo sapiens
ttacaggcacccgccatcatgcccggctaatttttgtgtttttgtagagatggggttccactatgttggccaggctcgtctcgaactcctgacctcaggtratccacccacctcggcctcccaaagtactgggattacaggcatgagccaccatacctggcctcaccccttgcgtttaaaatgagtcccacagagccctgg

SEQ ID NO: 532313 - DNA, 201 bp, Homo sapiens; identical to SEQ ID NO: 332054

SEQ ID NO: 532314 - DNA, 201 bp, Homo sapiens
cacttctaaatgtccccatctctgtggtggggacaataatcatacctgataggtaaagttataggattcagtgagatgacacatgtaaaagcccagcataygtagtcagtgcttgcaaatattaaccatgattattactgtaattctcaagtggaacctctacagatgaaaccatttacattattagtaacaatggcaact

SEQ ID NO: 532315 - DNA, 201 bp, Homo sapiens
tttatgaccttaaagcatttagcaaacttaatatctgactgcataatttagaccaaatgtctttgttttaccaataatctttaaggctgtttttatttccsaaagattactaaagtcatgtgaactaaaaggcattacactttttacttttctgaaaaaatattttatttaagcacttatttttaaaccaattaatcaaag

SEQ ID NO: 532316 - DNA, 201 bp, Homo sapiens
ctcagttaatttagaaagtttattttgccaaggttgagaacttgctcgtgacacagcctcaggaagtcctgagacatgtgcccaaggtggtcagagcacarcttggttttatacattgaaggagacatgagacgtcaatcaatatatgttagaagtacattggttcggtctggaaaggtgggataacttgaagcaaaggca

SEQ ID NO: 532317 - DNA, 201 bp, Homo sapiens
gctcgtctcgaactcctgacctcaggtgatccacccacctcggcctcccaaagtactgggattacaggcatgagccaccatacctggcctcaccccttgcrtttaaaatgagtcccacagagccctggaggatcacagcagccactgtcccatggtcagcagagccatgactgggacccaggcccctgccccttctctcac

SEQ ID NO: 532318 - DNA, 201 bp, Homo sapiens
caaatccttctctgccacgactaaaagactcagaatctgatttgctccatagccatttgttgagccttacggttctgtcttgacaaagacgagtcagagtyactggggttctctggaggactcagccagcctaggttttagattcaagttgacctgggttcaccttgcttcttattttgggggtgggttgggggttatctg

SEQ ID NO: 532319 - DNA, 201 bp, Homo sapiens
ctagtagtcagtgctgagctgtggacatgggtctgttccgcagggtggggtttgttaaagttgtcaagtataaggcctactgtaagagataccaagtgacwtttagaagacagtgtgagggtaaaactgattactatgcttggaaacacttagtggtacaggataaaaataagtctaacacacacaaatacagaatgatta

SEQ ID NO: 532320 - DNA, 201 bp, Homo sapiens
aatcaagatgaaaaatccatgaacccactgtgggatgatgtgatttttagttttctggctttcctaaaacttccagagtttttacaatggatacatactasttttgtaatcagataaaagtgtgttattttaaaatgctaatatgaaagaaagaggaaaggaggaggaaggaaaaaggggaggaaagagaaagggaagggc

SEQ ID NO: 532321 - DNA, 201 bp, Homo sapiens
acaagctcaccttcccaagggagtttctgggagcagtggtgttggtggatggtgggtggaaggaacatggtgtgagcgtgcacaggatgctgcaggtgtgyggatgcctgctctcctgagggctggtgtagaggaccccaggaaggcttccctggcttttgtcccctgtcctcaagatagcttctgtcgtttgtaaaactc

SEQ ID NO: 532322 - DNA, 201 bp, Homo sapiens
catccatggcacatttgtaagtaacagaagccagtttcaaaaccaaaccctgtgcattgtgggtctttttggagaaggcatatatacatatgccagaacaygaaatcaagatgaaaaatccatgaacccactgtgggatgatgtgatttttagttttctggctttcctaaaacttccagagtttttacaatggatacatac

SEQ ID NO: 532323 - DNA, 201 bp, Homo sapiens
atacaccagggcatgccatacacctgggcacaccatacaccagggcatgccatatgcctgagcacactgtagacctgggcatactgtactcttgggcatgmcgtacacctgggcacactgtacaccagggcatgctgtatgcctgggcacaccatacaccagagcatgccatacacttgggcacacagtacacctgggcat

SEQ ID NO: 532324 - DNA, 201 bp, Homo sapiens
gggcatactgtactcttgggcatgccgtacacctgggcacactgtacaccagggcatgctgtatgcctgggcacaccatacaccagagcatgccatacacytgggcacacagtacacctgggcatactgtacccttgggcatgccacacacctaggcatgctgtattcctgggcatactatacccctgggcatactgtatg

SEQ ID NO: 532325 - DNA, 201 bp, Homo sapiens
aagactcactgaggctaatccaacagcaaatgcctggtggcccaacacttggagccccacaaagcaatcagtgtccttccatcgattgaggaggtgaagaygtgaggaagcgtgaggtaggaggcctgtcgtgcccctctccaggtgtcttctggaggactgttgtggaggaggcagtcagaccagttccctgtcagggga

SEQ ID NO: 532326 - DNA, 201 bp, Homo sapiens
tgttacacaggctagtcttgaactccttggctcaaagaatccacctgccttggcatcccagagtgctgggattataagcgtgagccactgcaccaggcccktctctcatcttttaaaattcctcagacacctggcccttgaccactattgaattcttcatttgtcagaaataatcaggtgtggcattggccttggtccatc

SEQ ID NO: 532327 - DNA, 201 bp, Homo sapiens
cccagagctgctatagcaacagaagttggaactggacacaagatcatgccacaaaagaccacatttcttagctccccatgcagctctgggtaccttgtgartagattctggtcaacgggaggtgattacaagtgaaaggaatgtgcaaagccttttccttcccatttttctattggctgaaacaaggatactttcttctga

SEQ ID NO: 532328 - DNA, 201 bp, Homo sapiens
tgggactctagatgaagtacagttgcaggctggtgggattaaaggaaccatgaccttgagaggtgtgtgccacagactatccccggttacaccatgatacraggcaacgtccccaactgtagggaggaaaatgatggggtgctcacctgaatccatgcctgaaagggacagggtgcctggtcaaatgccccgtaagcaggt

SEQ ID NO: 532329 - DNA, 201 bp, Homo sapiens
atttttgttgttttttaattgtatttatttaaggtatatgacatgatcttttgatatacaaagtgatatggttactacagtgaagcaaatgaacatatctrtcatcccacatggttatccatctccctccttttttgacaagaacacctaaaacctattcttttggcagaaatctcaaatacaacacattattatttgatg

SEQ ID NO: 532330 - DNA, 201 bp, Homo sapiens
cagagttcagaggtttaaataactttcttaagctggtaggtagttgacctgtgattcaaactctgagtaaggcccatactctcattctcatcctggcctgmccttccagtcatgagcaacaccacaagaccaggctcatctaggagcaggcagaggctcagtcagctcttctacacctgctgcctgtggctgccccagccc

SEQ ID NO: 532331 - DNA, 201 bp, Homo sapiens
atctggattccttgacgtgtctcagactgggtccctgagaagctgtccgctttcagcgcagcatgaggtatttggtagagttgaaaatgccaattgtaacmcagtcaacccactcagcacactgcctgctggtgccgtgccagtgccaaacagacctgtggcttcccaggggacaggtctcaggacactctcagagcttga

SEQ ID NO: 532332 - DNA, 201 bp, Homo sapiens
cagaccaaaggatatttttttcagcttgaatgtccagggtcaatgcttctggctgtctcaaagggaagaagcagttacagcattgttcaaaatggctcttyagagaaatcatttctagctcactccatttgcatctgtatttcagatttgctaggtttcctttgcaaacattttcacttattaccctttatcacctttgct

SEQ ID NO: 532333 - DNA, 201 bp, Homo sapiens
atgttctcgtggcctccagacgcttggggtgatccttaaggtgcctccagccccatcttacatgccaaatattattcatatatatatatatatatatatatttgttgttgctggtggtggtgaggtcttagtttcaacatttttttttggtagtctgcactctagcctggtgcactgctcctaacttgcttcttcctgggt

SEQ ID NO: 532334 - DNA, 201 bp, Homo sapiens
acaggacctgggaacccacagacagatgcagactgtgacttgggagtgactgctgggcatcccagggttgcacagaccccacatctccgaggctgtgcagrgttcaactccctcgctgatgatctccatctttggttattagttatgaagcattgtctagaaatgtgtcatagtgtgcaattttggttaatctatataaac

SEQ ID NO: 532335 - DNA, 201 bp, Homo sapiens
ttccttgtggttcacacacagagaagcagggtagtagagaggataaaaagggaccctgagctgcctgcctgaactcaaatccagcttccctactagctgtrtggctatggacaagttacacaatctttctgtgaatccatttcccttctgaaaaatgggaatggtcatactaatatctacctcctcgttgctatcatcagg

SEQ ID NO: 532336 - DNA, 201 bp, Homo sapiens
gatgttctcgtggcctccagacgcttggggtgatccttaaggtgcctccagccccatcttacatgccaaatattattcatatatatatatatatatatatatttgttgttgctggtggtggtgaggtcttagtttcaacatttttttttggtagtctgcactctagcctggtgcactgctcctaacttgcttcttcctggg

SEQ ID NO: 532337 - DNA, 201 bp, Homo sapiens
agatgttctcgtggcctccagacgcttggggtgatccttaaggtgcctccagccccatcttacatgccaaatattattcatatatatatatatatatatatatttgttgttgctggtggtggtgaggtcttagtttcaacatttttttttggtagtctgcactctagcctggtgcactgctcctaacttgcttcttcctgg

SEQ ID NO: 532338 - DNA, 201 bp, Homo sapiens
aagatgttctcgtggcctccagacgcttggggtgatccttaaggtgcctccagccccatcttacatgccaaatattattcatatatatatatatatatatatatttgttgttgctggtggtggtgaggtcttagtttcaacatttttttttggtagtctgcactctagcctggtgcactgctcctaacttgcttcttcctg

SEQ ID NO: 532339 - DNA, 201 bp, Homo sapiens
tccattgacctacagcaattatggacctggagtatctaccttccttccacagggcacttattcatagttacctttgaaacctcacaaatccctaaccccaygcgcatttcgttttagcaacatttcacccttttctgagtctctggcttactggctcaggcaactctctcttctccccttcacctcttgcagaaagcaacc

SEQ ID NO: 532340 - DNA, 201 bp, Homo sapiens
aaatatgacctgcaaaactgccacccagagataatcatcaccggtaacatttggggatatgtctttttgagtgtggttttaacacacacacacacactctstctctcacacacacactctcttacacacacacactctcacatacacacacacaaactcacaaactcattttaatttttttgccataaaactaggatgtcc

SEQ ID NO: 532341 - DNA, 201 bp, Homo sapiens
acacttaataaacatcttgtacacatagagatgctgttttctttcctgacacaccagtctataaatcatattcacttttaataccatcctattttcaaaaygcccatataaaataaaataactctacattgaatcaaaatgcccatgttaacacatctgtcccttttttcctctcctcaagtcttcttatttcctaaattc

SEQ ID NO: 532342 - DNA, 201 bp, Homo sapiens
gccctcagctcatggacattctagaagaatgggggacagaaagtagcatggaaaggagggccctggaagtgctagggtgctgaggacagcactgatgacasaaaccctcctgcctctacaccatagaacaccatgtagccacttagagagaagctgaagaatggtagacagtaatctgaaataaagcacatccatggcaca

SEQ ID NO: 532343 - DNA, 201 bp, Homo sapiens
gtatacggggttccaatttctccacaaccttgccaacaccgatcgtctttgttttttcttttctttttttctttttttttgataaaagccatcctgagagrtgtgaggtggtatctcattcctggttttgatttgtatttttctgatgatgagtgacatcttttcagatacccattggtcatatgcatgtcttcttttgac

SEQ ID NO: 532344 - DNA, 201 bp, Homo sapiens
attgctggattgtatggttgtcctatttttaattttttgaggaatctccatactttttccatagaagctataccattttgcatttccatcaacagtatacrgggttccaatttctccacaaccttgccaacaccgatcgtctttgttttttcttttctttttttctttttttttgataaaagccatcctgagagatgtgag

SEQ ID NO: 532345 - DNA, 201 bp, Homo sapiens
gaagagtaggcttatgggttctaaggccatgttctatcctaaggtacccctctttatgacagaacaatacagaaagacacacaaagcacaccagattcacyacagcttaagactaggctcacaaatccttttttctattaaccaaaactttatagaggagataaacaatgatttttgtcgtgcgttcaactggtttgcaca

SEQ ID NO: 532346 - DNA, 201 bp, Homo sapiens
ctcttagcataatgtttttcaggttcatccacattgttgcatgttgcatgatttccttatgtatatatatttgacatatatatgtgtatatatattcattatccatttatctgccaatggacatttaggttgtttccacattttggctgttgtgaatagtgctgcagggaacatgggagtgtggaaatctcttcaggattc

SEQ ID NO: 532347 - DNA, 201 bp, Homo sapiens
tttgaatagaatgggaggcaagtttgccctaagcagttcccagcttgagttttctttagtgattttgggggcccaagatattctcctttaacatttccccscttttttaaaaaaatcttttggagaaagcattttacaagaaaatgaatctctggtctcaggtttcatctgatctctcatggctaggatggtttatttcta

SEQ ID NO: 532348 - DNA, 201 bp, Homo sapiens
tcaatgtgcctttgacattaataattaatttgtagagaaactgaacttattttatctttcaaaatgggcccttacaatcttatgcgcccacctcttccccmatagtccctcagtcttgaggagttgaatagctttcatttcttgccctgtgtctcaggaatgcagcttattttgattagcatcttctatggggcctgaaga

SEQ ID NO: 532349 - DNA, 201 bp, Homo sapiens
agaatgggaggcaagtttgccctaagcagttcccagcttgagttttctttagtgattttgggggcccaagatattctcctttaacatttcccccctttttwaaaaaaatcttttggagaaagcattttacaagaaaatgaatctctggtctcaggtttcatctgatctctcatggctaggatggtttatttctagatgggt

SEQ ID NO: 532350 - DNA, 201 bp, Homo sapiens
aagctttaaattaggcaaaacttgttcactttttttttataaaaaaggacacacttctttttcttctttctttttttttttttaagcagaaatgttttccyacaatatatatttattggaaaacacccaaatactgaaatatctattaatttaatttaactttctattctaaattatgaccagtttgtctacaagtattta

SEQ ID NO: 532351 - DNA, 201 bp, Homo sapiens
taatccaggcacttttggaggccgaggcaggaggattgctgaggccaggagttcaagaccagcctgggcaacatagcaagaccctgtctctacttgaaacrcaaacacacgtacacacacacacacacacacacaaaatacactttggaaaaccacaaggtgatttcacacccgtttcttatagctgaggctgtgagaaaa

SEQ ID NO: 532352 - DNA, 201 bp, Homo sapiens; identical to SEQ ID NO: 332079

SEQ ID NO: 532353 - DNA, 201 bp, Homo sapiens
gcatactactagatatccttcaaaatgttaatagccagataataaccagggtctttcacactagtctcccatgagcttttccaaattatcatttatataartgtataataattcatccaaaggattattaagccctaattaatgtatttttaggacactttattaaagtattgttagtagtaccctagaatacgaattcct

SEQ ID NO: 532354 - DNA, 201 bp, Homo sapiens
actcctcatttccccctttccccagtccatggtagtctctgttctactttctgtctctgtgaatttgcccattttagtacctgacataagtggaatcataytcattcttctgtgtctggcttatggcacttagcacaacgtcttcaaggcttgtctgggttgttgcttgtgtcagagcttcctttctttcttttttttgag

SEQ ID NO: 532355 - DNA, 201 bp, Homo sapiens
gcctgaatgaactagttgcaaaatatacacccctccctgatcctcatctaatgaaagtcacctgttacaagaatggtttaaaaagaacccattgaattccraagaatacctgtcaaaagtgattgatttttagtgaaaatagttttattctgaaaatagttagctttcagaataattttctattaaggccactcagccttg

SEQ ID NO: 532356 - DNA, 201 bp, Homo sapiens
agccttctcctgctatgacgagcccttgggttattttacttctctcttttctcacctactcataaacatcacttttcttagcttggcttttttttttttttaatataatagctttaattcacatacataaaactcactctttcacagtgtacaagtcagtggtttttagtcgattcagtattgtgtaatcttcaccaccat

SEQ ID NO: 532357 - DNA, 201 bp, Homo sapiens
gattgctgaggccaggagttcaagaccagcctgggcaacatagcaagaccctgtctctacttgaaacacaaacacacgtacacacacacacacacacacamaaaatacactttggaaaaccacaaggtgatttcacacccgtttcttatagctgaggctgtgagaaaatctaagtaagatacgttaaaggcagtcactatt

SEQ ID NO: 532358 - DNA, 201 bp, Homo sapiens
ccaagatacggaaacaaccaaagtgttcactgatggatgaatggatcaagaagctgtctgtctgtctgtctgtctgtctgtctatctctatctatctatcyatctatctatctatctatctatctatctatcatctatctgtagtagaatattatttagctttaaaaaagaagattctgccactcaccacaagtgaacctg

SEQ ID NO: 532359 - DNA, 201 bp, Homo sapiens
gtgagatggcttatgcccatatagaatgggacatgatagtctgtgcagcttatgcacacgaacttccaaaatacggtgtaaaggttggcctgacaaatgaygctgcagcatgttgtactggcctgctgctggcatgcaggcttctcagtaggtttggcatggacaagatctataaaggccaagtggaggtaaccagagatg

SEQ ID NO: 532360 - DNA, 201 bp, Homo sapiens
acaatagccaagatacggaaacaaccaaagtgttcactgatggatgaatggatcaagaagctgtctgtctgtctgtctgtctgtctgtctatctctatctrtctatctatctatctatctatctatctatctatctatcatctatctgtagtagaatattatttagctttaaaaaagaagattctgccactcaccacaagt

SEQ ID NO: 532361 - DNA, 201 bp, Homo sapiens
actcacaatagccaagatacggaaacaaccaaagtgttcactgatggatgaatggatcaagaagctgtctgtctgtctgtctgtctgtctgtctatctctrtctatctatctatctatctatctatctatctatctatctatcatctatctgtagtagaatattatttagctttaaaaaagaagattctgccactcaccac

SEQ ID NO: 532362 - DNA, 201 bp, Homo sapiens
attactcacaatagccaagatacggaaacaaccaaagtgttcactgatggatgaatggatcaagaagctgtctgtctgtctgtctgtctgtctgtctatckctatctatctatctatctatctatctatctatctatctatctatcatctatctgtagtagaatattatttagctttaaaaaagaagattctgccactcac

SEQ ID NO: 532363 - DNA, 201 bp, Homo sapiens
agcattactcacaatagccaagatacggaaacaaccaaagtgttcactgatggatgaatggatcaagaagctgtctgtctgtctgtctgtctgtctgtctrtctctatctatctatctatctatctatctatctatctatctatctatcatctatctgtagtagaatattatttagctttaaaaaagaagattctgccact

SEQ ID NO: 532364 - DNA, 201 bp, Homo sapiens
ccatgatacgaggcaacgtccccaactgtagggaggaaaatgatggggtgctcacctgaatccatgcctgaaagggacagggtgcctggtcaaatgccccrtaagcaggtgtgctagtcacgatagggggcaccaatgaacatcttagggaaacttagcactcttcaggatagtgggtaaaactagcagtttctagctgaa

SEQ ID NO: 532365 - DNA, 201 bp, Homo sapiens
tgccaccttcacccttcccttccaactttctccaacccagcctctcattactcatctccaagcttggcttagctgggttaccctacctcccattgtcagaygtgccccttctgcctgatgggcagcaatgtacacgatgctcccaaattagggccacgccttctaaaggaggatatagtcccgccaccagccctttgtgta

SEQ ID NO: 532366 - DNA, 201 bp, Homo sapiens
gagcccagtgagaagcacataggcagtggggctgatgtggaggggctaggctgggggagaggatgcaggcccttctctctccctgcttagatgtttgtccrcattccacaatgtgtaaaaagagtcaagcctggggggcctgatttggggtttgatgggcacttgtagtttctttgtgatacactttgtggctaggtatgg

SEQ ID NO: 532367 - DNA, 201 bp, Homo sapiens
ggaggggctaggctgggggagaggatgcaggcccttctctctccctgcttagatgtttgtccacattccacaatgtgtaaaaagagtcaagcctggggggmctgatttggggtttgatgggcacttgtagtttctttgtgatacactttgtggctaggtatggttgctcactcctgtaatccaggcacttttggaggccga

SEQ ID NO: 532368 - DNA, 201 bp, Homo sapiens
gaaaggcctggaacagacccttcaccagcaccttcagagggagcatggccctgcggacagcttctggcctccagaactgtgagatctatagctctaagctmcagaagctacccagtttgtggtgctttgttacagtggccctaggaaatgaatatacccctctatagaattagcctcttctcttctccggcattggtctga

SEQ ID NO: 532369 - DNA, 201 bp, Homo sapiens
caacaattgtccattgatgaaaaaaaagttttaagggagccatagttaaaagacacaattgacaaggaaattagttacctccatggcacacaattttaatrtaacaattatgattattactgataatgtacactaagttatatcagaattacaggagtttcccataattttggaacacataccaataatatatttatacaa

SEQ ID NO: 532370 - DNA, 201 bp, Homo sapiens
agttttgcaaaggtggtttccattatgtgggacaaattattcattcatgcgctcaataaatagtaagtacttgaggtgtgtcaggaattgggttaggtgakagaggcagattgaactatgtagaagaatttattcctgccccatgtgagctgacattgaactaaaagggagaaatggtttgaatacacaaaccgtgatgat

SEQ ID NO: 532371 - DNA, 201 bp, Homo sapiens
gcttgcataatgacctttgcaaagggtcattgaagaatgaccttttttatcgtcataaaaatgcatacttcttatttagtggattgttcattcatgtcttyatacattttcttttggctgtattaaagttttgttatttatttatagggacacttcttcttatattttgttacttacagggatttttgaggatattagcgc

SEQ ID NO: 532372 - DNA, 201 bp, Homo sapiens
aaacattttcacttattaccctttatcacctttgctaattaaggaagatacagaaaccagatttttagggttttttttttttttttttcaatttcagcctytggccacttcctataaaagatttccctctgctttgaataaaatttctaagcagccttcagagccaaattaaatgatttggaattctctctagctagctga

SEQ ID NO: 532373 - DNA, 201 bp, Homo sapiens
tccgttgctttcatgcttagaaagtccttccatgttccaaggtcaattgcatatttgccatattatcctttttttaatagttccgtttttctttttttttwaaaaaaaccaatccctttgtctatcagcaatttatttggatatgtagtaggaactgagaacacaacttgaattttcccgaatagcaaagttttccaacac

SEQ ID NO: 532374 - DNA, 201 bp, Homo sapiens
ggggtttcaccatgctggtcagactagtctcaaactcctgacctcaagcgacccacccacctcggcttcccaaagtgtcaggattacaggtgtgaactackgcacccggccggagtttgactattttagccacctcatagaagggaaatcatacagtatttgtccttctgtgactgccttatttctcttagcataatgttt

SEQ ID NO: 532375 - DNA, 201 bp, Homo sapiens
gctttctggaaagaaagaggttctgttatacagccagtcttcttgaaaaatgtttgtagaactgctgaaagtatatataatttacgcagaatttatgccaratttgggctgaatatatatgttttggttgtgaccaggacggaggagtgtgttaacagaagcaactttcttaaagcctcccttcccgtgtgattgaagttc

SEQ ID NO: 532376 - DNA, 201 bp, Homo sapiens
ccataggaaggacacaaagacatgaggagtctgggccccttaacccagagttttgttctcgtccctcaatgacctgtatcctgtccccttgtgtcatgtcscctgtgttcttgtcatcatggagacactcctgtctgctcttgcaaacccagggagtataaccaggatttgaggttttccactctaaaccagtcattgagg

SEQ ID NO: 532377 - DNA, 201 bp, Homo sapiens
catagccccagttgttgagggtctctctgcgagtatctttctggtggcacaagcagtgacccctaggcaaattgatgggctcatctggattagtccactgyattttttaggatggccaaagctgctttctggaaagaaagaggttctgttatacagccagtcttcttgaaaaatgtttgtagaactgctgaaagtatatat

SEQ ID NO: 532378 - DNA, 201 bp, Homo sapiens
agcaacacatgatttttgggtaagggctgtccctgctaagtagaatttcattttggattcagagaattcagaaccggagtcagctcagcccaggtggaaakgtaaaaattcacaccaagatcaactcaaactgagtgagaccatggccagcgatggaaagtgaaaaggaaagaaaataactgagcaggcaaagctctgtcc

SEQ ID NO: 532379 - DNA, 201 bp, Homo sapiens
taatctgacacagggctccatatactggttttgcatcaatgtgcctttgacattaataattaatttgtagagaaactgaacttattttatctttcaaaatkggcccttacaatcttatgcgcccacctcttcccccatagtccctcagtcttgaggagttgaatagctttcatttcttgccctgtgtctcaggaatgcagc

SEQ ID NO: 532380 - DNA, 201 bp, Homo sapiens
tgctgagggcaggggccgtgcgtgtgtgctatgttgctgacgtagtccttcctgctgcagtgcctggcacagggcaggcgctcccttgtctctgtaaagaratgaagaggcttggctgagcccaaggactgggaggcaggctgctggcaaggcctggggagacctctccctggctggcccttgtttcttttccttcctctc

SEQ ID NO: 532381 - DNA, 201 bp, Homo sapiens
ttgactcttattattatgaaatgattttatccctgggaaattctgtgctttgaagtctgctttgatattagcatagccactttggcgttttttttgttttsttttgttttttctctcctagagacaacatcttgctctgttgcccaggctggagtacagtggtacattcacggctcagtgcagcctcaacaccttgggctc

SEQ ID NO: 532382 - DNA, 201 bp, Homo sapiens
ctctgtctcaaaacaaaacaaaacgaaactatatatagtttttatttatttatttaatttttatttttatttaatttttacttttttaatttacttttttwatttaattttttatatttttagtagagacaggattttgccatgttggccaggctggtctcgaactcctgccctcaagtgatctgcctgcctcagcctccc

SEQ ID NO: 532383 - DNA, 201 bp, Homo sapiens
tttaatggaaaagtcttaaactgtaagttcagtttctttaatagagagatacagggttattcaagcacccttcttgagtagactttggtagattatgtgcytcaaggaatttaatttcatttaagttcttgaatttattagtctatagaaatataaatattctaaacaccccaattattagaaattatcagatggatttaa

SEQ ID NO: 532384 - DNA, 201 bp, Homo sapiens
tcttaaattttctgcagcagtttatgtagacttggtacttcttccttagatgttcagttgaattcaccagtgaagtcatctgggcctgattttttttttttaatggaaaagtcttaaactgtaagttcagtttctttaatagagagatacagggttattcaagcacccttcttgagtagactttggtagattatgtgcttc

SEQ ID NO: 532385 - DNA, 201 bp, Homo sapiens
tgtgccactgcgctccagcctgggtgacagagtgagactctctctctcaaaaaaaaaaataagaattatcttagcttgctaattttctctttttatttttwaaaatcttttttctggaaaactttaaacatctacaaacatagacagaatacacagtagtctgatgaatccccatatagcccatcattcagctccaaattg

SEQ ID NO: 532386 - DNA, 201 bp, Homo sapiens
gtgatccacctgcctcagcctcccaaagtgctgggattacaggcgtgagccaccgtggccggccgtccatattcttttttcttctggtatgtggtatgctygttcagtctgccgattcagttcttttcaacgaagtttttctgtgtgttattccttaatgttgttttctatttcacttattgagttccagttttttacata

SEQ ID NO: 532387 - DNA, 201 bp, Homo sapiens
ctatttagtagtttatagacaaggtctttctttactttttccctccaaatttttgttggctgttcttttttttttttttgagacggagtctcgctctgtckctcaggctggagtgcagtggtgcgatctcggctcactgcaagctccgcctcccgggttcacgccattctcctgcctcagcctccccagtagctgggacta

SEQ ID NO: 532388 - DNA, 201 bp, Homo sapiens
ctactcaggaggctgaggcaggagaatcgcttgaacccaagaggcggaggttgcagtgagccgagactccagcctcggttacagagcaagaccccatctccaaaaaaaaaaagcgtatctctgaatagacaaatccatagaaacaaattcaatgactggttctcaggggtggtagagtgtggagtgactgtcattgtacac

SEQ ID NO: 532389 - DNA, 201 bp, Homo sapiens
gcttttttcagggatacagttaacttggagacagtttgatcttttggtgtgttgcttttaagatttattagagaatcagagagctgcatttagtctaggtktagttattcccaatactgaatcgagacctgacagactgttctacctcgtgccccatgaatatgaatttttcccatctgactggtagaaacaggtactatt

SEQ ID NO: 532390 - DNA, 201 bp, Homo sapiens
tgattccctgtgatcatgtgtaatcttgaggatgtagaaacacttaccacctaaacgtaagggcaggctttgagctgcctctcggtccgatcctgggcggrctcgcgactccgtgcctcatgctgttcttttctcccgaagccggactactttagttctgtggccacagtggtgtatcttcgcaaagagaactgcatgtac

SEQ ID NO: 532391 - DNA, 201 bp, Homo sapiens
tctgacacaattttttttaatttaaatattataaaaaatatataattacgaagataccagcttcagccgacatgaccgtgacctgtgtgaaagctgggcgsgtggtgggaaacctgtgtctgtcgcgtagcagcaagttgcatgtggagaagcagaagcatgtcacatcaagcgctcgtcatcgttattcgttcacgtttt

SEQ ID NO: 532392 - DNA, 201 bp, Homo sapiens
aatttaaatattataaaaaatatataattacgaagataccagcttcagccgacatgaccgtgacctgtgtgaaagctgggcgggtggtgggaaacctgtgyctgtcgcgtagcagcaagttgcatgtggagaagcagaagcatgtcacatcaagcgctcgtcatcgttattcgttcacgttttcaggtttgacgcagaagg

SEQ ID NO: 532393 - DNA, 201 bp, Homo sapiens
tcggagttctaccttttggattcagtttgacttgttagtgttaataaaatgatagtgattctgaggtctaggaaccaggctattctgtcaggctttttcarttctaaagaaatgatgtatgaagaaagggcacaattagaaagcaatggacaaacgggttgggtgcacggtggctcacacctgtaatcccagcactttggg

SEQ ID NO: 532394 - DNA, 201 bp, Homo sapiens
ctccttatccgttcaagtttgatcgtgagattacagcagttcaggcccattttcaggctccatttgtaattctagttctctcgttattttcgtcacatctrcagatccctcctccaccaaagtcttgaagcctcagtgtctaccttgagggttggaatcaacttgttccaaactcccgttgatgttgggattttgatctcc

SEQ ID NO: 532395 - DNA, 201 bp, Homo sapiens
cagcttccgtgtttcttgaaggcattatgccttctgtgaggagggctttaaagcccttaaacggacaaacctgtaatcccaggacaaacctagagagtcgsaggaggcaattagcatgtaagtgctgcctgctgacctcgatcctgccaaaggaggggacggccaggcttcagcagcggtgtgctgaaggcgcctttcttt

SEQ ID NO: 532396 - DNA, 201 bp, Homo sapiens
agacgcattgagatctgggagttgtctggggatttggaggcgatctatttgtgataggtcccttacatcctgtctttcttcatgtgactagtgccttgccrtcagttttaccagttacaaaagttgattttctttttctcacccattatcttgcccgttgaggcaagagaagtgtttaagagggcggccttcagaaacagc

SEQ ID NO: 532397 - DNA, 201 bp, Homo sapiens
cagaatggattgtaccgctgtgagaagtgcgacaccgaatttcccaatttcaagtaccgcatgatcctgtcagtaagtagcctcggtagatgagaaccacrgttgtgttcacggaggccctcccgtgtgccaggcactgtggtcacaacagtagagacaaagcattcctggtaggaagcccgcagatgagtaggtgtggaa

SEQ ID NO: 532398 - DNA, 201 bp, Homo sapiens
gttaaatatctgccactaagtatcagatagttattacagggaatctagataccattttcaggaacagataatttcaggcttatcttattgaaactctgatgtgaaacctgataagggtagcacacactgattgattgtatgtaaaaatccaaattatagcagtcagaccatttaaaacaaacgattgattgtatgtaaaaa

SEQ ID NO: 532399 - DNA, 201 bp, Homo sapiens
accatgcctggctaatttttttgtatttttagtagagacggggtttcaccatcttggccaggctggccttaaactcctgaccttgtgatccacccacctcrgcctcccaaagtcctaggattacaggtgtgagccaccgcacccagcctgttcctttttatggcagaataatactctgttgtctagatacatcacattttg

SEQ ID NO: 532400 - DNA, 201 bp, Homo sapiens
gctgaggcaggagaatcgcttgaacccaagaggcggaggttgcagtgagccgagactccagcctcggttacagagcaagaccccatctccaaaaaaaaaaagcgtatctctgaatagacaaatccatagaaacaaattcaatgactggttctcaggggtggtagagtgtggagtgactgtcattgtacacatggtttcttt

SEQ ID NO: 532401 - DNA, 201 bp, Homo sapiens
gggctcaggtgattctcccacctcagcctcccgagtagctgggactacaggcgcccaccaccacgcctggctaattttgttttgtatttttagtagagacrgggtttcaccatgttagccaggatggtctcgatctcctgacctcgtgatccacctgcctcagcctcccaaagtgctgggattacaggcgtgagccaccgt

SEQ ID NO: 532402 - DNA, 201 bp, Homo sapiens
agccgggatggtctcaatctcctgacctcgtgatcctcccaccttggcctcccaaagtgctaggattacaggcgtgagccaccacctggctaattttttayagagacaggtctccttctgttgccccgactggtctcgaactcctgagctcaagcgatcctcctgcttccgtctccgaaatgctgggattataggcaagag

SEQ ID NO: 532403 - DNA, 201 bp, Homo sapiens
tgacttgctgtcccctaaggaaatccgagcggctacaaagcgtttctttacttttcacttcaattaatgctgcgcttcgcttggtgagtgcgtactttttytacctgtacacattcctgcattcatgtattttgttttttttgactaaagctatgttacatggaaaggattttgaagccttttgtttcccttgctttgttt

SEQ ID NO: 532404 - DNA, 201 bp, Homo sapiens
cactgcaacctccgcctcccaggttcaagcaattctcctgcctcagcctcccaaatagctgggactacaggcacgtcccaccacgcccggttaattttttrtatttttagcagagacagggtttcaccgtgttagccgggatggtctcaatctcctgacctcgtgatcctcccaccttggcctcccaaagtgctaggatta

SEQ ID NO: 532405 - DNA, 201 bp, Homo sapiens
tggctaattttttttgagatggattctttctgtgctgcccaggttggagtgcagtggcgcgatctcagctcactgcaacctccgcctcccaggttcaagcrattctcctgcctcagcctcccaaatagctgggactacaggcacgtcccaccacgcccggttaattttttatatttttagcagagacagggtttcaccgtg

SEQ ID NO: 532406 - DNA, 201 bp, Homo sapiens
agctgggactacaggtgtgcaccacatacctggctaattttttttgagatggattctttctgtgctgcccaggttggagtgcagtggcgcgatctcagctyactgcaacctccgcctcccaggttcaagcaattctcctgcctcagcctcccaaatagctgggactacaggcacgtcccaccacgcccggttaatttttta

SEQ ID NO: 532407 - DNA, 201 bp, Homo sapiens
attacatatattttttcccaatctgtgacttgccttttcttttttgaaattttgttttttttgaagtgcacttttaaattttcatgaagtccaagttatcmggttgtgtttttttgtttgtttttgttttgttttttgcagagttgtgtttgtgtgtcctaagaaatctttgctaggctggatgtggtggctcatgcctgt

SEQ ID NO: 532408 - DNA, 201 bp, Homo sapiens
agccttgacctcctgaactcaagagatcctcgcacctcagcctcctgagtagctgggactacaagtgcatgccaccactcttggctaattaaaaaaaaatwtttttttttttttttgagacacagtcttgctctgttgccagactggagtgcagtggcgcaatctcagctcactgcaacctctgcctcctgggttgaagcg

SEQ ID NO: 532409 - DNA, 201 bp, Homo sapiens
atcttacttctgtgagatttgctgtgattcaagctttacgcggggaaatgctctttcccctaactctaggaaagcagtgatagttttgatgtgtctctgaktagattctcatgtgtgaggtctgtcttgtatggattccatgtacgctgattacattcactctactattgaatgtttgccttgttttctataaaaatcttc

SEQ ID NO: 532410 - DNA, 201 bp, Homo sapiens
cagccttgacctcctgaactcaagagatcctcgcacctcagcctcctgagtagctgggactacaagtgcatgccaccactcttggctaattaaaaaaaaatttttttttttttttttgagacacagtcttgctctgttgccagactggagtgcagtggcgcaatctcagctcactgcaacctctgcctcctgggttgaagc

SEQ ID NO: 532411 - DNA, 201 bp, Homo sapiens
ccagccttgacctcctgaactcaagagatcctcgcacctcagcctcctgagtagctgggactacaagtgcatgccaccactcttggctaattaaaaaaaaatttttttttttttttttgagacacagtcttgctctgttgccagactggagtgcagtggcgcaatctcagctcactgcaacctctgcctcctgggttgaag

SEQ ID NO: 532412 - DNA, 201 bp, Homo sapiens
ctgttagatggtctctgtttaaggaacctgttctttgtgtggttacccaccttgggatggtatttggcctttcatctccggccagctcctctccgccaccmctgtgttcccgagccactttctccttggccccttttccttcatatcaattgatgtgtgatcaagaagtacaatcagttttcataataatttaatacaaat

SEQ ID NO: 532413 - DNA, 201 bp, Homo sapiens
ggggcgtggtcttgtcctataggatggggccttcagcacacacaggaggagctcctggagttgggggagggagtggtcttatcctataggatggggccttyagcacacacaggaggagctccaggagttggcggagggggcatcttgtcctataggatggggccttcagcacacacaggaggagctcctggagttgaggga

SEQ ID NO: 532414 - DNA, 201 bp, Homo sapiens
tcatcgggatctgcaagagctatgaagacgccactaaaatcacagtgaggtctaacaacagagaagttgccaagaggaatatctacttgatggacacatcygggaaggtggtgactgctacactgtggggggaagatgtaagtgctgggatggggtcttcaacacgcacaggacctcctggggttggggcgtggtcttgtc

SEQ ID NO: 532415 - DNA, 201 bp, Homo sapiens
agccggtgaatcaccccgtggcagcaccttcctcgtgggctctgggcgtgtccctcagtattcaactttttttgtttttattgtcagaataaattaaactygtcattgccgttttgttctgttctgtttctcagttgaggctaatgcagcatgattatgggatcggctagctgaaattctcattcttcagcggggccagtg

SEQ ID NO: 532416 - DNA, 201 bp, Homo sapiens
aaatcagatcacaagcaacttgcaaacatgacttactctgacatttttggcaatggctccgaatgtgaagtggtttgtcactgagagggcactgtggaggragccggtgaatcaccccgtggcagcaccttcctcgtgggctctgggcgtgtccctcagtattcaactttttttgtttttattgtcagaataaattaaact

SEQ ID NO: 532417 - DNA, 201 bp, Homo sapiens
gtggctcacacctgtagtctcagctacttgggaggatgaggtggggggattacttgagcctgggaggttgaggctgcagtcagctgtgatggcaccactgmcctccagcctggggacacagcaagtgtccgctattccccactgcaaaaaattaaaagtgtgtaaactaggataaaatatttgcaactcataggattgaca

SEQ ID NO: 532418 - DNA, 201 bp, Homo sapiens
catcaaatccagttttcttttacttggatttaagtgtcaagagaatgggcaaacagtttgtgttgaactaatggcaaacccactctcctgccacttcggtktacgtatccctggggacggggcagacaacctggctaatgaatcaagttttctgtcctagaacatccgtcccattactacggggaatagtccgccgcgtta

SEQ ID NO: 532419 - DNA, 201 bp, Homo sapiens
cggaacagaaaggtgttcatggccgggcatggtggctcacatgtgtactctcagcacttggggaggctaatgcaggaggatcccttgaggccaagaaagagtttgataccaggctgggcaacatagcaagatcctgtctctatttcatttagaaagaagaaagaaagaggtgtttaatgtaattactgacctcctgcctta

SEQ ID NO: 532420 - DNA, 201 bp, Homo sapiens
acggaacagaaaggtgttcatggccgggcatggtggctcacatgtgtactctcagcacttggggaggctaatgcaggaggatcccttgaggccaagaaagagtttgataccaggctgggcaacatagcaagatcctgtctctatttcatttagaaagaagaaagaaagaggtgtttaatgtaattactgacctcctgcctt

SEQ ID NO: 532421 - DNA, 201 bp, Homo sapiens
tgcagaagcacaatctcagctcactgcaaccttcacctcccaggttcaagtgattcttttgcctctgtctctcgattacagacgtgcgccaccacgcccasctaatttttgtatttttagtagagatgaggtttcgtcatgttgtccaggctggtcttgaacccctggcctcaagtgatctgccgcctcggcttccccaag

SEQ ID NO: 532422 - DNA, 201 bp, Homo sapiens
agtgagccgagattgcaccagtgcattccagactgggcgacagagtgagactgtctcaaaaaaaaataaagaatgatcatggagatatttaaataatttgwtaagtttttttattttttagagatggggtctcactctgttgcccatgctagtctcaaactcctgggcttaagcgatcctctcgcctcagcttcccaaagt

SEQ ID NO: 532423 - DNA, 201 bp, Homo sapiens
cttttaaaaagactgatcatgggccaggcgcagtggctcatgcctgtaatctaagcactttaggaggccaaggcaggtggatcacttgaggtcaggagttmgagatcagcctggccaacatggggaaaccctggtctactaaaaatacaaaattagctgggtgtgttggcgtgtgcctgtaatccctgctgcttgagagcc

SEQ ID NO: 532424 - DNA, 201 bp, Homo sapiens
tcactgcaacctccgcctcctgggttcaagcaattctcctccctcagcctcccaggtagctgagaatacaggagactgccatgatgcccggctaatttttrtatttttagtagagatggggtttcaccatgttggccaggctggtctcgaactcctgacctcaagcaatccacctgcttcggcctcccagagtgctgggat

SEQ ID NO: 532425 - DNA, 201 bp, Homo sapiens
tccagagtagctgggattacaggcatgtaccaccacacctgcgtaattttttgtatttttagtagacacgggggtttcaccatgttgcccaggctggtctygaactcccaaccttaggtgatccaccctcctcggcctcccaaagtgctgggattacagaagtgagccaccgcacccggccctgaacatttttttccctct

SEQ ID NO: 532426 - DNA, 201 bp, Homo sapiens
cgtttctaagtcagtcagtcagtatatgaaacaaaggccacgtgtggttaaaactaccttgaaaattcctgaaattgcccataataccatatagtattatttatttatttatttatttatttatttatttatttatttatttatttatttgagacagagtctctgtcacccaggctggagtgcagtgggacgatcttggct

SEQ ID NO: 532427 - DNA, 201 bp, Homo sapiens
ctaactgcagaccatgaagtaaattatgtaactaggtttttgcttctccagtggtgaccacccccccccatccccgctcacaacttgggttcttctcagcrgggcgagctgagaagcggtcatgagcacctggggattttagtaagtgtgtcttcctagaattcgaaggctctctctttctagaggtgctacatagttggt

SEQ ID NO: 532428 - DNA, 201 bp, Homo sapiens
taagattctgagaaaagcaaggttaagatgtcactgatgtttctgtgaaactctcaggactttccccattgccctttgttgtttttaatctaccttgcackatccgtctacctctctcgctcttgcacgttctctctcttgctctgtctctccttttataagaggatctatttatacacaactcaaaaattacatgctgtt

SEQ ID NO: 532429 - DNA, 201 bp, Homo sapiens
ccgtttctaagtcagtcagtcagtatatgaaacaaaggccacgtgtggttaaaactaccttgaaaattcctgaaattgcccataataccatatagtattatttatttatttatttatttatttatttatttatttatttatttatttatttgagacagagtctctgtcacccaggctggagtgcagtgggacgatcttggc

SEQ ID NO: 532430 - DNA, 201 bp, Homo sapiens
tatcatcaagcaggaattatgtcgtaagtcactgaccctaactgcagaccatgaagtaaattatgtaactaggtttttgcttctccagtggtgaccacccscccccatccccgctcacaacttgggttcttctcagcggggcgagctgagaagcggtcatgagcacctggggattttagtaagtgtgtcttcctagaattc

SEQ ID NO: 532431 - DNA, 201 bp, Homo sapiens
tcccctcaactattagtttctatttttcagtgctaagattctgagaaaagcaaggttaagatgtcactgatgtttctgtgaaactctcaggactttccccmttgccctttgttgtttttaatctaccttgcactatccgtctacctctctcgctcttgcacgttctctctcttgctctgtctctccttttataagaggatc

SEQ ID NO: 532432 - DNA, 201 bp, Homo sapiens
cccgtttctaagtcagtcagtcagtatatgaaacaaaggccacgtgtggttaaaactaccttgaaaattcctgaaattgcccataataccatatagtattatttatttatttatttatttatttatttatttatttatttatttatttatttgagacagagtctctgtcacccaggctggagtgcagtgggacgatcttgg

SEQ ID NO: 532433 - DNA, 201 bp, Homo sapiens
agtttgaaagtttagctttcagaactagctgtgtggctttgtgcaagtcacatgtcctctctgggctgtatcccctgcagtagggagaataaatgaaactrgagaaaccctctaaagtccatctcactaggattctaggcttctgggtgtttgggagcttgggtaaagaatcagaagggcctgtgctggagaaaggacctg

SEQ ID NO: 532434 - DNA, 201 bp, Homo sapiens
gtattatttatttatttatttatttatttatttatttatttatttatttatttatttgagacagagtctctgtcacccaggctggagtgcagtgggacgakcttggctcaccacaacctccgcctcccgggttcaagtgattctcctgccttagcccctcgagtagctgggattacaggcgcccgccaccatgcccggcta

SEQ ID NO: 532435 - DNA, 201 bp, Homo sapiens
accttggaaaacgcagcaggaatgcgaactcagcagttggagaaggcagagacagggtggcaggtgggaagccctcccagccgtgggtaccatttttgttytcagggcactctaggaaagttttttgagttgcctttgtgtgctgcaagtacccttggtgagctgcccacatgaggttgacttctgccttttagagccaat

SEQ ID NO: 532436 - DNA, 201 bp, Homo sapiens
tgagcagttttaagcatacagttcagtgacattaagtccattaacgttggcgtaagccatcatcaccatccatcttcagaactttttcatcatcccaaacygaaactcttgagcctattaaacactactccattccccactcccgccattctctggtgacccctcttctactttctgtccctgggaatttgtctgttaggt

SEQ ID NO: 532437 - DNA, 201 bp, Homo sapiens
tggtataatatcacctgctttcgggtccacgtttctttcctgtgatccttcctgcaaatttaagcgcccacatatcaaaaagatgttttttgagatgagcrttagtccgcctcagtgtcagacatgaggcagtttcacgggtgctgttcctggctgtagaatagtgtattaacctcataggctgagagctgccggcattcc

SEQ ID NO: 532438 - DNA, 201 bp, Homo sapiens
gtactgctaaaaggaagtgatggtaagacattaatttacatgttaaaatgtgaaaaaaatgtggatcttagaataggtaaactaaggtaagtcacattttwaaaaattgtggtaaaatactacctaacatgaaatttacatttgagcagttttaagcatacagttcagtgacattaagtccattaacgttggcgtaagcca

SEQ ID NO: 532439 - DNA, 201 bp, Homo sapiens
ccccccatccccgctcacaacttgggttcttctcagcggggcgagctgagaagcggtcatgagcacctggggattttagtaagtgtgtcttcctagaattsgaaggctctctctttctagaggtgctacatagttggtaatgcttggaatggcaatagggtagaatgattaatcaaaggcatatcttctatatctgaagag

SEQ ID NO: 532440 - DNA, 201 bp, Homo sapiens
gccagaattggtcgttcacagttaacaattacctagatgatgatgaagtacatggatctagtcataaaagcctcggttcaagcagatgtcctgcttcccasctgtgtgatttgagccagttacgtggttcctctaacccagcgttctcacctgttaaagggtatgataatagtgtctacatcctagggctggcaggcactg

SEQ ID NO: 532441 - DNA, 201 bp, Homo sapiens
gaggcggaagggtcttagtggtcacccacttaacatatcttgaccaaaaactgattcctgccctttgcacccgacgaaactcattcttacagacttcattytagacttgctagtccttcagacgcattgagatctgggagttgtctggggatttggaggcgatctatttgtgataggtcccttacatcctgtctttcttca

SEQ ID NO: 532442 - DNA, 201 bp, Homo sapiens
ggaaaggaaagttggagaatctcaggtctggaccttagcagtgaattcagcacaatcgcagaatgttgaggtagaggaaactgttgtagagatcagttgakcagtttttaatcattaaataaaaacgtgaatgaggcagtgaagtaacttccccaaggtcacacaatgggttgctacaagaaatgagaatgagcatttgtc

SEQ ID NO: 532443 - DNA, 201 bp, Homo sapiens
tttcctttctccagtgtctgttaaagctcagggggataagattgctgttcaggattacttactctcgaatttcgttgtaaccagatcagtgagccagtgcrgaaatagctttcttatagtgacttctacctcacggggcatttcaccgcagtgctttctcctctgttgggaaaggacgcacactctgtgctagcgggtgga

SEQ ID NO: 532444 - DNA, 201 bp, Homo sapiens
ggtaggttttgtggggctaaacaaagggttacttgaggctgggctttgagaaaagctggttacaatcagcatgggagctttctgccaagcagaagccttcrtccctgagtggtgcagcttccgtgtttcttgaaggcattatgccttctgtgaggagggctttaaagcccttaaacggacaaacctgtaatcccaggacaa

SEQ ID NO: 532445 - DNA, 201 bp, Homo sapiens
tgctttcgggtccacgtttctttcctgtgatccttcctgcaaatttaagcgcccacatatcaaaaagatgttttttgagatgagcattagtccgcctcagtgtcagacatgaggcagtttcacgggtgctgttcctggctgtagaatagtgtattaacctcataggctgagagctgccggcattcccggacaaggattggc

SEQ ID NO: 532446 - DNA, 201 bp, Homo sapiens
ttgggtaaagaatcagaagggcctgtgctggagaaaggacctgttcactcgcccagccccagacattcaggacgaggctgtcactcactggaatgactgarctctgaacccgtgcgtctgttccctcccgctgggctcactgaaaccactgaagcaaaaggggtttcactgctccacaccacactttcactgctcacaaac

SEQ ID NO: 532447 - DNA, 201 bp, Homo sapiens
ctcgggccaataactgcgcagcgcgcgggacccgggtggggaagctggagctgttgcggggtccgcggggaagtcttggcggtggagccatggtcggccarctgagcgagggggccattgcggtgaggaggtgccgggggctgggccggcggtccggggtggctgcggccccgagcctcgcggagtagagagggggagggg

SEQ ID NO: 532448 - DNA, 201 bp, Homo sapiens
tgtatggattccatgtacgctgattacattcactctactattgaatgtttgccttgttttctataaaaatcttctgtgttcttcctgctagtgacacttgyatatgtctggtgtttcttttacaggctgataaatttgatggttctagacagcccgtgttggctatcaaaggagcccgagtctctgatttcggtggacgga

SEQ ID NO: 532449 - DNA, 201 bp, Homo sapiens
aaatgctctttcccctaactctaggaaagcagtgatagttttgatgtgtctctgagtagattctcatgtgtgaggtctgtcttgtatggattccatgtacrctgattacattcactctactattgaatgtttgccttgttttctataaaaatcttctgtgttcttcctgctagtgacacttgtatatgtctggtgtttctt

SEQ ID NO: 532450 - DNA, 201 bp, Homo sapiens
aggagagagagcttaagtgtcttgtcgaaacaatggcgggggggtggggaatacaatatggatttttttgtttgtttattttttttatttttattttttttcagttaaatcctaggattttttcgtctgtgttctgacaaaaaaattataacgcatgcagtagagtcatatctttgacaaatttagattgtagaaaagtat

SEQ ID NO: 532451 - DNA, 201 bp, Homo sapiens
gatgaggaaggagagagagcttaagtgtcttgtcgaaacaatggcgggggggtggggaatacaatatggatttttttgtttgtttattttttttatttttwttttttttcagttaaatcctaggattttttcgtctgtgttctgacaaaaaaattataacgcatgcagtagagtcatatctttgacaaatttagattgtag

SEQ ID NO: 532452 - DNA, 201 bp, Homo sapiens
attttcagatgaggaaggagagagagcttaagtgtcttgtcgaaacaatggcgggggggtggggaatacaatatggatttttttgtttgtttattttttttatttttattttttttcagttaaatcctaggattttttcgtctgtgttctgacaaaaaaattataacgcatgcagtagagtcatatctttgacaaatttag

SEQ ID NO: 532453 - DNA, 201 bp, Homo sapiens
ttttaattttttgtgtctagtaaagcatacataaccaaatttgcctttgtaaccatttttacgtgtacagtttagtggcgttaggtacattcacattactrtgcccctgtcaccaccatccttttccagtacttttttaaataggcaaattcatagagacagacgacagccttgtgttttccaaggatggagggaagggga

SEQ ID NO: 532454 - DNA, 201 bp, Homo sapiens
aaactcttgggctcagacagtcctgccacctcagtctcctgagtagctgggactactggtacacgccaccatacctggcttaagttttttttttttttttttggtagagatggggttttgctatgttccccaggctattcttgaactcctggcctcaagcagtcctcccacctcggtctcccaaaacattgggattatagt

SEQ ID NO: 532455 - DNA, 201 bp, Homo sapiens
tgatgggcctctctctgtcacccaggctggagtgcagtggctcgatctcagctcgctgcaacctccgcctcccgggttcaagtgattctcccgcctcagcstcctgagtagctgggattacaggcacccgccaccatgcctggctaatttttgtatttttcgtagagacggagtttcaccatgttggccaggctggtttca

SEQ ID NO: 532456 - DNA, 201 bp, Homo sapiens
aacactgaccccacacatttttttttttttgagatggagtcttgccctgtttcctaggctggagtgcagtggcgcgatctcagctcaccgcagtctccgcytcccgggttcaagtgattctcctgccccagcctcctgagtagctgggatgacaggcacccgccacgatgcccggctagtttttgtatttttagtagagac

SEQ ID NO: 532457 - DNA, 201 bp, Homo sapiens
tctgatgggcctctctctgtcacccaggctggagtgcagtggctcgatctcagctcgctgcaacctccgcctcccgggttcaagtgattctcccgcctcadcctcctgagtagctgggattacaggcacccgccaccatgcctggctaatttttgtatttttcgtagagacggagtttcaccatgttggccaggctggttt

SEQ ID NO: 532458 - DNA, 201 bp, Homo sapiens
gagtttgagaccagcctggccaacatggtgaaaccctgtctctactaaaaatacaaaaattagccgggcgtggtggcgggtgcctgtagtcccagctactygggaggctgaggcaggagaatcgcttgaacccgggaggcagaggttgcagtgagccgagatcacaccactgcactccagcccgggcgacaagagcaaaac

SEQ ID NO: 532459 - DNA, 201 bp, Homo sapiens
gagaggtgattgtgcccagctttatcacctctggccaggtttctagtgtttgtgtgtgtgtgtgtgttgtatttaattgaatgattgctttggacattttmtgttttgggggcaaaagtgtttatagtgaagatgggctgggctcagtggctcataccttcagtcccaacactttgggaggctgaggcaggaggatcgctg

SEQ ID NO: 532460 - DNA, 201 bp, Homo sapiens
gttttgccgtgttagccaggctggtgtcaaactcctgacctcggatgatctgcctgccttggcctcccaaagtgctgggattacaggagtgacccaccttscccagccttgagtcttattttatgtccagattatggtctctcttggtaaattctgtgtgtacttgaaaagaatgtgtattctgttgttgggcagagtctt

SEQ ID NO: 532461 - DNA, 201 bp, Homo sapiens
tcccagcactttgggaggccgagggaggaggattgtctgagtccaggagtttgagatcagcctggccaacagagcaagaccccatctcttaaaaaaatttktttttcgagacggagtttcggtcttgttgcccaggctggagtgcaatggcgccatctcggctcactgcaacctccgcctcctgagaattgcctacaagtg

SEQ ID NO: 532462 - DNA, 201 bp, Homo sapiens
ggccaggcacggtggctcataccttaattccagcactttgggaggccgaggtggacaattgcttgaggccaggagttcaagaccagcctggccaacatggygaaacctcgtctctacaaaaaatacaaaaatcagccgggcctgtagtcccagctactcggtgcgtgcctgtagtcccagctactcgggaggctgaggcac

SEQ ID NO: 532463 - DNA, 201 bp, Homo sapiens
gaagcagttggagtgaagattggcaatccagtgccctataatgaaggtaaaatgctttggcgtaggttgtagcactcaaatgaatacctctttatatattyggagttctaccttttggattcagtttgacttgttagtgttaataaaatgatagtgattctgaggtctaggaaccaggctattctgtcaggctttttcaat

SEQ ID NO: 532464 - DNA, 201 bp, Homo sapiens
gcaagtggattctttgagatctgctttcttccttgactttgccctgtttaatgttacaccacagcccagtgggagacatttgattgctcatttcctttgcyaggtcaatttggtgactgacagaggctcacgggcaggctcttcagttgtctgggtgcccagcagtgacagagccgtctcatggaactcctcctaggaact

SEQ ID NO: 532465 - DNA, 201 bp, Homo sapiens
tatactgttgtgggttcttgatttatggtgtttcgggcttcattttcacacaacttggaatgtgcgggttttctctgttccctggtttcactgaagatgtmgtttctaatgagagatgtgtatacgtctgtgtgcacgtgcatgtatgtgtatgcagttggcattcattcctgttgctctgtattggtttttagagtggga

SEQ ID NO: 532466 - DNA, 201 bp, Homo sapiens
ctgcattttaattaaggaactagttgggaactgaaaaccctgcaatcacttgataatgatgcggcgaaagatgaagagaaatatttatgtaaacagatgasaaatggaaaatagttcatcacaatgatcatcggggaaagcattttgagtagcttatcatttgaacggaatttgtttttctaacctgtttctgtttgtctg

SEQ ID NO: 532467 - DNA, 201 bp, Homo sapiens
agtagagatggggttttaccatgttggccaggctggtctcgaactcctgacttcaagtgatctgcccacctctgcctcccgaagtgctgggattataggcstgggccactgcgcccggccaccggctaatttttttatatttttaatagatatggggttttaccatgttggccaggctggtctcaaactcctgacttcagg

SEQ ID NO: 532468 - DNA, 201 bp, Homo sapiens
gcaatctcggctcagtgcaacctctgcctcttgggttcaagcagttctcctgtctcagcttgcctagtagctgggaccacaggagcccaccaccacgcccrgctaaattttttatatttttagtagagatggggttttaccatgttggccaggctggtctcgaactcctgacttcaagtgatctgcccacctctgcctccc

SEQ ID NO: 532469 - DNA, 201 bp, Homo sapiens
ccactgctgccctctagaggtaaagttttcgtggtttctttttatccttcaggcgtttcttcatgagaatgtaaccaaatacaaatatatattctcgttcygtactccactttgcctacacaaaaggcagcatactgtgtacactatcttgtctttttctcctgcttttacttatttattattattttaatagagatgaga

SEQ ID NO: 532470 - DNA, 201 bp, Homo sapiens
gttcagtatacgtatcccaaagcaaattctttatctttctaagtctgggcctcttgatccctatctccacggatggcaccattatctattcagttcagtgstaaccagaaattgagaaatcattcctcctatattgtccattacctgggcatccagtccctcacgaagtgaagtgtattttgcctctgcgtagatctatca

SEQ ID NO: 532471 - DNA, 201 bp, Homo sapiens
gtttctttttaaaattttaaaattattgtgtttgtttgtttgtttgttttgagacagagtcttgctctgttgcccatgctggagtgcagtggcacattctyggctcactgcaacctctgcctcccgggttcaagcgattctcctgtcttagcctccctagaagctgggattacaggtgcccaccaccacaccctgctaatt

SEQ ID NO: 532472 - DNA, 201 bp, Homo sapiens
tttatattcaaaattttataaacctatttccagcgtaggtgaagtattttgttcataaatgaagaatgaaagtttcacatgtgtttgtggtgatggaatgrgttggagaacctttgctgactttcattatcagctaaagcaggtatcattttcgttcaaaagacacaggccacaaagggtacgcaaataccacacacatgt

SEQ ID NO: 532473 - DNA, 201 bp, Homo sapiens
ccaggttcaagtgattcttttgcctctgtctctcgattacagacgtgcgccaccacgcccagctaatttttgtatttttagtagagatgaggtttcgtcawgttgtccaggctggtcttgaacccctggcctcaagtgatctgccgcctcggcttccccaagtcctgggattacagacttgagccattgcacctggccgta

SEQ ID NO: 532474 - DNA, 201 bp, Homo sapiens
aactcttgggctcagacagtcctgccacctcagtctcctgagtagctgggactactggtacacgccaccatacctggcttaagttttttttttttttttttggtagagatggggttttgctatgttccccaggctattcttgaactcctggcctcaagcagtcctcccacctcggtctcccaaaacattgggattatagtc

SEQ ID NO: 532475 - DNA, 201 bp, Homo sapiens
cccttgaatttgttgtttgttgttgtttccattttagcagaattcatgttgctctgataggggctcttttcaaactgatgtcttatccttcttagtacctyaaactaggtcttgttcagacatgttataacaagttagtatgagtttattttagtgcaaaaaaaatttttgaaatgcatgcatagttttttcataatgcac

SEQ ID NO: 532476 - DNA, 201 bp, Homo sapiens
aaaggaaaagctttgcctctcatgttatatgatttcactagtggcacctccaaaatttagagttattgtaaagcttactataaaaaagctaagtagaatagtaataactccttttcgtttgcgtttgtttttaaaggttctactgtttctaaggcttatggtgcttcaaagacatttggaaaagctgcaggtcccagcctg

SEQ ID NO: 532477 - DNA, 201 bp, Homo sapiens
aaaaggaaaagctttgcctctcatgttatatgatttcactagtggcacctccaaaatttagagttattgtaaagcttactataaaaaagctaagtagaatagtaataactccttttcgtttgcgtttgtttttaaaggttctactgtttctaaggcttatggtgcttcaaagacatttggaaaagctgcaggtcccagcct

SEQ ID NO: 532478 - DNA, 201 bp, Homo sapiens
aaaaaggaaaagctttgcctctcatgttatatgatttcactagtggcacctccaaaatttagagttattgtaaagcttactataaaaaagctaagtagaatagtaataactccttttcgtttgcgtttgtttttaaaggttctactgtttctaaggcttatggtgcttcaaagacatttggaaaagctgcaggtcccagcc

SEQ ID NO: 532479 - DNA, 201 bp, Homo sapiens
gaagagtatccttccttcagggtttaatagactgagtcagatgggtctgatattaatcaaaattgtctcttctgaggaccgctgataagcattgacttgcygtcccctaaggaaatccgagcggctacaaagcgtttctttacttttcacttcaattaatgctgcgcttcgcttggtgagtgcgtactttttctacctgta

SEQ ID NO: 532480 - DNA, 201 bp, Homo sapiens
cctttctgttaaactccacagcgcaatctcccgcacacttgtttgatttgatatttatcacacgtgtgcgtcattgtagttcttgccctgtgtgatgagaygctctttgcttcttagaaggatagcgtgggttaaaggaagtgtgagcccagggtgtgataccgttgctgtgtattgagagcgcttttcacttttaactgg

SEQ ID NO: 532481 - DNA, 201 bp, Homo sapiens
taaaaaggaaaagctttgcctctcatgttatatgatttcactagtggcacctccaaaatttagagttattgtaaagcttactataaaaaagctaagtagaatagtaataactccttttcgtttgcgtttgtttttaaaggttctactgtttctaaggcttatggtgcttcaaagacatttggaaaagctgcaggtcccagc

SEQ ID NO: 532482 - DNA, 201 bp, Homo sapiens
ggggtttcaccatgttggccaggctggtctcgaactcctgacctcaagcaatccacctgcttcggcctcccagagtgctgggattacaggcgtgagccacygcgcacgaccccattcacttattagatgcatgacttgaggcaagatactaaactgtttcttttctgtaaaatgagagcaatgatatctattgcataaggt

SEQ ID NO: 532483 - DNA, 201 bp, Homo sapiens
gggcttaagcagtccttccaccttggcctcccaagtagctgcaactacagctgtgcaccaccacacccagctaatttttaaaattattttattgtagagayagggtctcgctctgctgttcaggttggtctcaagttcctggcctcatgtcatcctcccacctcagccttccaaagtgctggcattacaagcctgagccac

SEQ ID NO: 532484 - DNA, 201 bp, Homo sapiens
ataaaaaggaaaagctttgcctctcatgttatatgatttcactagtggcacctccaaaatttagagttattgtaaagcttactataaaaaagctaagtagaatagtaataactccttttcgtttgcgtttgtttttaaaggttctactgtttctaaggcttatggtgcttcaaagacatttggaaaagctgcaggtcccag

SEQ ID NO: 532485 - DNA, 201 bp, Homo sapiens
ctctccagtcacccccacatttttttttaaatttagatttctggtatattccatactcctaccttcttccatggggcctttgaacttttttttttttttttgagctggaatcttgctctgttgcccaggctggagggcagtggcgcgatctcggctcactgcaagctctgcctcctgggttcacgccattctcctgtctca

SEQ ID NO: 532486 - DNA, 201 bp, Homo sapiens
aagaactcacctgattccctgttctttcccagcgcagggcagctgcttaggtttggattaaggaggcggaagggtcttagtggtcacccacttaacatatyttgaccaaaaactgattcctgccctttgcacccgacgaaactcattcttacagacttcattctagacttgctagtccttcagacgcattgagatctggga

SEQ ID NO: 532487 - DNA, 201 bp, Homo sapiens
ttttgcagatacatggtgcgtataaaagaactcacctgattccctgttctttcccagcgcagggcagctgcttaggtttggattaaggaggcggaagggtyttagtggtcacccacttaacatatcttgaccaaaaactgattcctgccctttgcacccgacgaaactcattcttacagacttcattctagacttgctagt

SEQ ID NO: 532488 - DNA, 201 bp, Homo sapiens
tagccaaattctattctgaagaaatgttttgatgtagagggtatgaaatcactgaactaaattatattttctgaatttggacgttgagttttgcagatacrtggtgcgtataaaagaactcacctgattccctgttctttcccagcgcagggcagctgcttaggtttggattaaggaggcggaagggtcttagtggtcacc

SEQ ID NO: 532489 - DNA, 201 bp, Homo sapiens
aggcagtgaagtaacttccccaaggtcacacaatgggttgctacaagaaatgagaatgagcatttgtcatttcccagtgagaacagtttccattgtgcccrgaccttcaaagattaaccttcataccaaagtttttgcctacttgaaaattgtatttaagtacatagatcgtgtgagtgagtctactgcgggaatgttata

SEQ ID NO: 532490 - DNA, 201 bp, Homo sapiens
aatactggatagatggtgtattgatatttttagccaaattctattctgaagaaatgttttgatgtagagggtatgaaatcactgaactaaattatattttytgaatttggacgttgagttttgcagatacatggtgcgtataaaagaactcacctgattccctgttctttcccagcgcagggcagctgcttaggtttggat

SEQ ID NO: 532491 - DNA, 201 bp, Homo sapiens
tagagacggcgtttcaccacgttggccaggctggtctcgaactcctgacctcaggtgatccacccaccttggcctcccaaagtgttgggattacaggtgtragccaccgtgcctggccccaactactttttatatttttttgtagaaacagagttttgccatgttgtccaggctggtcttgagctcctgagttcaggtaat

SEQ ID NO: 532492 - DNA, 201 bp, Homo sapiens
cagtgagccaagtttgcgccagtgccctctagcctggacaacaaagtgagactctgtctcaaaaaaaaaaaaaaaaaaaaaatatatatatatatatatayacacacacacacacacacacacacacacttttgaagagagtggtgaaatagactctctaaagtggtaaataatcatttccttaggcttatatacaagtag

SEQ ID NO: 532493 - DNA, 201 bp, Homo sapiens
agtcccagttacttagcagggcaaaggtgggaggatcactgagctcagggggtcaaagctgccttgagccatgattgcatcattgcactccagcctgggtracagagtgaaactctgacacaattttttttaatttaaatattataaaaaatatataattacgaagataccagcttcagccgacatgaccgtgacctgtgt

SEQ ID NO: 532494 - DNA, 201 bp, Homo sapiens
tttcaccatgttggccaggctagtctcgaactgctgacctcaggtgatctgcctgcctcagcctcccaaagtgttgggattacaggcgtgagccaccgtgsccggccaagatttatttatttacttatttggagacaggttcttgctttgccatccaggctggagtgcagtggctcaaaaagggcttactgtagcctcaac

SEQ ID NO: 532495 - DNA, 201 bp, Homo sapiens
tttgtatttttagtagagacggggtttcaccatgttggccaggatagtcttgatctcttgacctcgtgatccgcccgcctcatcctcccaaaatgctgggrttacaggcatgagccactgcgcccagcctaaaaaaaatttttttaatgggcctgggcatggaagtcccagttacttagcagggcaaaggtgggaggatca

SEQ ID NO: 532496 - DNA, 201 bp, Homo sapiens
ctccgctcactgcaacctcccccgggttcaagtgattctcctgcctcaggctcccaagtagctgggattacaagtgcccgccaccacgcccagctaatttytgtatttttagtagagacgaagtttcaccatgttggccaggctagtctcgaactgctgacctcaggtgatctgcctgcctcagcctcccaaagtgttggg

SEQ ID NO: 532497 - DNA, 201 bp, Homo sapiens
aactgtgtatgccagattcacagatttattgtgaacactctgaaagacggaaggtatgtgctgtgtttttttctgtcttattgtatcgtagaatgggaacraatttaggaataaaaaaggcaatagtgagttttcagctaagaatctgcagcttttcagttaagaactcaggtagctaacacatggcacccaaggaggaga

SEQ ID NO: 532498 - DNA, 201 bp, Homo sapiens
gagtctgactagttttaatttcaggagcatatgtaaggcatttttctttgctagcacaggtatgagtagctctcagaggcttaagactgcaggattttggwggctaaagaaatctctgtggttttcagctttcatgttggcgacacagttgaaccctctcgtggaggaagaacaattgtccagcaactgtgtatgccagat

SEQ ID NO: 532499 - DNA, 201 bp, Homo sapiens
tttttcactctgcagagtctgactagttttaatttcaggagcatatgtaaggcatttttctttgctagcacaggtatgagtagctctcagaggcttaagaytgcaggattttggaggctaaagaaatctctgtggttttcagctttcatgttggcgacacagttgaaccctctcgtggaggaagaacaattgtccagcaac

SEQ ID NO: 532500 - DNA, 201 bp, Homo sapiens
gcctccagcaatcctcctgcctcagcctcccaagtagttgggactgcaggctgcacctgtagtctgggaggtggagtgccgggcctgcctgtggactgccyggactggggctgggacggcagtgccaccacgcccggctcatttcttttctttttatttgtaggggcggggtctcactttgttgcccaggctggtctcaaa

SEQ ID NO: 532501 - DNA, 201 bp, Homo sapiens
tggacatcgccatgggaagagaccaatttctgatacagagctgagggctaaagtgggctcggaggcaatgacgaccaacgtgtctcagcaacagcgcagcyatcttgggttctggtctctctttttctttttttttttgagacagagtcttgctctgtcacccaggctagagtgcagtggcacaatctcggctcactgcag

SEQ ID NO: 532502 - DNA, 201 bp, Homo sapiens
tccagtggtgaccacccccccccatccccgctcacaacttgggttcttctcagcggggcgagctgagaagcggtcatgagcacctggggattttagtaagygtgtcttcctagaattcgaaggctctctctttctagaggtgctacatagttggtaatgcttggaatggcaatagggtagaatgattaatcaaaggcatat

SEQ ID NO: 532503 - DNA, 201 bp, Homo sapiens
tcgtcaaaatgatgccttaaagaaaaaccactcgtgtttctacaaaggcttttacttcagcaagtggattctttgagatctgctttcttccttgactttgscctgtttaatgttacaccacagcccagtgggagacatttgattgctcatttcctttgccaggtcaatttggtgactgacagaggctcacgggcaggctct

SEQ ID NO: 532504 - DNA, 201 bp, Homo sapiens
attgttgcttttttgcattttaagaattgtttctttctgttttaaaaacctttttaaaaaagttgtaaagttgggtttaaaaaaattttttttttttttttaagaaacaggggtctcactctgttgcccagaatagagtgcaatggtatcatcacagctcatggtggccccaacctcccgggcttaagcagtccttccacc

SEQ ID NO: 532505 - DNA, 201 bp, Homo sapiens
ccatccgctttttcatgccagaaagtggtgttgagataccccagctgattcagtctttcatgcacgtcatacagccatagcgtcagtgacacttgcctgcdaactgctatgaagataaattaatttgaaaacggcatttatagacagcactaattgtacttacacagccaatgcccgtatttagtcactttcatgtggata

SEQ ID NO: 532506 - DNA, 201 bp, Homo sapiens
tgcagtgagccaagtttgcgccagtgccctctagcctggacaacaaagtgagactctgtctcaaaaaaaaaaaaaaaaaaaaaatatatatatatatatayatacacacacacacacacacacacacacacttttgaagagagtggtgaaatagactctctaaagtggtaaataatcatttccttaggcttatatacaagt

SEQ ID NO: 532507 - DNA, 201 bp, Homo sapiens
taagatttagctacatttttatagaaattgaatctatgtgatcagcaagatcagatgaccacatccttttcaacaaagttcttaagcagatatgatctcakcaggggattttctagtttagtggttttggagatgatagaagagagggaggaagtcggagggagtgtagcaggggcttatgtatttttatggtactcttct

SEQ ID NO: 532508 - DNA, 201 bp, Homo sapiens
gttgcagtgagccaagtttgcgccagtgccctctagcctggacaacaaagtgagactctgtctcaaaaaaaaaaaaaaaaaaaaaatatatatatatatayatatacacacacacacacacacacacacacacttttgaagagagtggtgaaatagactctctaaagtggtaaataatcatttccttaggcttatatacaa

SEQ ID NO: 532509 - DNA, 201 bp, Homo sapiens
ctagaggtgctacatagttggtaatgcttggaatggcaatagggtagaatgattaatcaaaggcatatcttctatatctgaagagtatccttccttcaggstttaatagactgagtcagatgggtctgatattaatcaaaattgtctcttctgaggaccgctgataagcattgacttgctgtcccctaaggaaatccgagc

SEQ ID NO: 532510 - DNA, 201 bp, Homo sapiens
attacagggttgtgtcttggaaagaataattctgattcatattttagagtatgtgattgaaaaaataattaaagattgtctttttttttttttttttttttggaagtagggtcttgctctgtcagcggggctggagtgcagtggaagcatcacagctcgttgcagccttaacctcccaagtagctggtactatgggcgcat

SEQ ID NO: 532511 - DNA, 201 bp, Homo sapiens
tatatctgaagagtatccttccttcagggtttaatagactgagtcagatgggtctgatattaatcaaaattgtctcttctgaggaccgctgataagcattkacttgctgtcccctaaggaaatccgagcggctacaaagcgtttctttacttttcacttcaattaatgctgcgcttcgcttggtgagtgcgtactttttct

SEQ ID NO: 532512 - DNA, 201 bp, Homo sapiens
tctgatattaatcaaaattgtctcttctgaggaccgctgataagcattgacttgctgtcccctaaggaaatccgagcggctacaaagcgtttctttacttytcacttcaattaatgctgcgcttcgcttggtgagtgcgtactttttctacctgtacacattcctgcattcatgtattttgttttttttgactaaagctat

SEQ ID NO: 532513 - DNA, 201 bp, Homo sapiens
ttaatgtaattactgacctcctgccttaccttgtccagtactgttccccagaataactgctttttagaaaaatcactgtcattgacattttgcttacgtayagtaaattgcaccttttttatttatttatttatttatttgagacagagtttcctcctgtcaccctggagtgcagtggcgtgatctcagctcactgcaacc

SEQ ID NO: 532514 - DNA, 201 bp, Homo sapiens
cattacagggttgtgtcttggaaagaataattctgattcatattttagagtatgtgattgaaaaaataattaaagattgtctttttttttttttttttttttggaagtagggtcttgctctgtcagcggggctggagtgcagtggaagcatcacagctcgttgcagccttaacctcccaagtagctggtactatgggcgca

SEQ ID NO: 532515 - DNA, 201 bp, Homo sapiens
atatctgaagagtatccttccttcagggtttaatagactgagtcagatgggtctgatattaatcaaaattgtctcttctgaggaccgctgataagcattgwcttgctgtcccctaaggaaatccgagcggctacaaagcgtttctttacttttcacttcaattaatgctgcgcttcgcttggtgagtgcgtactttttcta

SEQ ID NO: 532516 - DNA, 201 bp, Homo sapiens
agcggctacaaagcgtttctttacttttcacttcaattaatgctgcgcttcgcttggtgagtgcgtactttttctacctgtacacattcctgcattcatgyattttgttttttttgactaaagctatgttacatggaaaggattttgaagccttttgtttcccttgctttgttttaataaacagtatattctttggttgtg

SEQ ID NO: 532517 - DNA, 201 bp, Homo sapiens
ctctttttctatgtaaataaggtctctcaatttttctctccataggaagaactaaacagttctatttaacctttttaattttatgctaaatttattttackctaatggcacaaccacctctcatttagttgtgccagttaagagtaatattggcagaagtaaattaaatcagtgtgtaatgtgcccgtttgagttaggacc

SEQ ID NO: 532518 - DNA, 201 bp, Homo sapiens
atccttcttcctagtgtttgcagccctgaaatgcatctttcaaagcatgaaaacactaaaaacaaaaagccattttgcctgaggatgctgatgatctggcrcttgggattttattgatgtttacgcagcagtctaacaccaaccacgctttgaaatgtgtacagacagtgagctggtaagaaaacagtaattatgctagtg

SEQ ID NO: 532519 - DNA, 201 bp, Homo sapiens
attagaatggtttgatttgcaggtgacacaaagcagaagatgtgtcagaagttaagtctctgcattactgctttggggtgtaatttaatttttagaaggawttttacttagctgtagactgatttttctggggtctcgtggccccttgccattcacaacatgcactgcaacatgttgctatgtagaatgcaccggattctt

SEQ ID NO: 532520 - DNA, 201 bp, Homo sapiens
agcatagagcaaaagagtctgagaaccatgatgttgacctgtcttattagaatggtttgatttgcaggtgacacaaagcagaagatgtgtcagaagttaastctctgcattactgctttggggtgtaatttaatttttagaaggatttttacttagctgtagactgatttttctggggtctcgtggccccttgccattcac

SEQ ID NO: 532521 - DNA, 201 bp, Homo sapiens
gacgagtgcaaacttagctgtgtggatcagtgctggccccagacacagggacttcacaagttccaaataagactcaaagttcccagggagtaacacggccracatgccaaaaagagagacccctgcactcaaagcaataccagtgccacggtggcagatggacatcgccatgggaagagaccaatttctgatacagagctg

SEQ ID NO: 532522 - DNA, 201 bp, Homo sapiens
cctagctactcgggaggctgaggcaggagaatctcttgaaatcgggaggcggaggttgcagtgagccgagatggcgccgttgcactccagcctgggtaacragagcgagactacgtctcaaaaaaaaaaaaaatcctattttccccctaggtcaaagccagtgatatgtaaagctagcatagagcaaaagagtctgagaac

SEQ ID NO: 532523 - DNA, 201 bp, Homo sapiens
agccccatagaggacaacacagtaagaaccaggacaaccactccagactggtatagctggggaatcttcaggccttttcctaggtcccacatcaagtgtcrgatcccattccaggtatgatacatgagagggaagacgagtgcaaacttagctgtgtggatcagtgctggccccagacacagggacttcacaagttccaaa

SEQ ID NO: 532524 - DNA, 201 bp, Homo sapiens
caaattgtaatttgatgctttaaattggagagggaatcgggtaaattattcggctaaattattaaattgacacatcacttttttttgcagtagtaataaaatgagcgaatttgttatcacattctcagctttcaggaaggtgagctgagacaaagcaatgcttagcatttttctgaaacctttggatgcagtcaggacaag

SEQ ID NO: 532525 - DNA, 201 bp, Homo sapiens
ctcgatctcttgacctcgtgatccacccgcctcagcctcccaaagtgctgggattacaggtgtgagccaccacgcccggcctaaaaatattttttgtagcratggagtcttggtgtgttgtccaggatgatcttgaactcctgggctcaagtgatcctcccaccttggcctcccaaagtgttggggttacaggcacaagcc

SEQ ID NO: 532526 - DNA, 201 bp, Homo sapiens
acaaattgtaatttgatgctttaaattggagagggaatcgggtaaattattcggctaaattattaaattgacacatcacttttttttgcagtagtaataaaatgagcgaatttgttatcacattctcagctttcaggaaggtgagctgagacaaagcaatgcttagcatttttctgaaacctttggatgcagtcaggacaa

SEQ ID NO: 532527 - DNA, 201 bp, Homo sapiens
gactataacaaaatttgtttatttacttattattgcacatttgggttattttcatcttttggctattataaatgaagatgctatgaccatttaagtacaaytctttttgtggaaatatgttttcgtttctctgggataaatatctaggaatgtaattgctgggtcacaggtaactgaatgtgtaaaagaaatcgccaacct

SEQ ID NO: 532528 - DNA, 201 bp, Homo sapiens
acttacttcgggttttgtatatttttttctcgtttcttaaggtggaagctgagttcattgacttgagatctttttttctaacataggcatgtagcattatraatctgcccttagctactgctttaaaagtatccagcaaatttggatatgttatattctcattcatattcaattcataatactttcttatttccctttcaa

SEQ ID NO: 532529 - DNA, 201 bp, Homo sapiens
tagtaagtatttgttgaaacaagttgaatatataacgttgttttactgtgattatctcttgatggtgaaattactaatgatttaattttctcatgaaaatstatagaaaagcacattgaaataaaaaaagtccattttttctttgcatcctaaaagaagctgaaaaaaaagtcattacttcagacaattctagagaaaggc

SEQ ID NO: 532530 - DNA, 201 bp, Homo sapiens
aaagatgaagagaaatatttatgtaaacagatgacaaatggaaaatagttcatcacaatgatcatcggggaaagcattttgagtagcttatcatttgaacrgaatttgtttttctaacctgtttctgtttgtctgcttttgcaggagagtagttatcttgatggaattagaagttttgaagtcagctgaagcagttggagt

SEQ ID NO: 532531 - DNA, 201 bp, Homo sapiens
attcttgtgtttagtaatctaaattcttaccatgtcggttggctccttgaagatacggtgcgtagcgagaacactgcattttaattaaggaactagttggraactgaaaaccctgcaatcacttgataatgatgcggcgaaagatgaagagaaatatttatgtaaacagatgacaaatggaaaatagttcatcacaatgat

SEQ ID NO: 532532 - DNA, 201 bp, Homo sapiens
gaaaaagtcattgttgagataagtatgtgtttctgaaaacagttcatctctttttatgccatatattcttgtgtttagtaatctaaattcttaccatgtcsgttggctccttgaagatacggtgcgtagcgagaacactgcattttaattaaggaactagttgggaactgaaaaccctgcaatcacttgataatgatgcgg

SEQ ID NO: 532533 - DNA, 201 bp, Homo sapiens
gacatcccagaggcctataagcttcgtggatggtaggttttgtggggctaaacaaagggttacttgaggctgggctttgagaaaagctggttacaatcagyatgggagctttctgccaagcagaagccttcgtccctgagtggtgcagcttccgtgtttcttgaaggcattatgccttctgtgaggagggctttaaagccc

SEQ ID NO: 532534 - DNA, 201 bp, Homo sapiens
gcagcaaatgtttaacaggcagcaaaatacacagtttttcactctgcagagtctgactagttttaatttcaggagcatatgtaaggcatttttctttgctmgcacaggtatgagtagctctcagaggcttaagactgcaggattttggaggctaaagaaatctctgtggttttcagctttcatgttggcgacacagttgaa

SEQ ID NO: 532535 - DNA, 201 bp, Homo sapiens
tggtcctttggttgccataatttgggggcattcgtgaagtccgtacttgcttggctacgtacttcattcagacagaattgcagctgtcagagagcattctracaatagactggaggtagtggaaagctgccacttggcttaattaattttccctaactggtgttctgtgttttctctgattaatttccctaaggatgatat

SEQ ID NO: 532536 - DNA, 201 bp, Homo sapiens
cagctttcaatgagcaagtggacaagttctttcctcttattgaagtgaacaaggtatggccgtgctgactttagaactgacaccgcctgggggtggagtgyggatgaaaagacgctggcccaggggaggggtgtgtggtggcagactaggggtttctgtccgatttgatggtagtctcaggttctgtggcttggcctcctt

SEQ ID NO: 532537 - DNA, 201 bp, Homo sapiens
acttcggtttacgtatccctggggacggggcagacaacctggctaatgaatcaagttttctgtcctagaacatccgtcccattactacggggaatagtccrccgcgttatcgactgctcatgagtgatggattgaacactctatcctgtgagtatggtgtatccatctagaaatgtgtgagtatttaaatagtagaagcac

SEQ ID NO: 532538 - DNA, 201 bp, Homo sapiens
tgccagatttgcacatctggtccagagcaggagttaaggattgctctagtaagtggattagtagcttttcctaattaccagatctcacaactagagttgcrgctgccagaattggtcgttcacagttaacaattacctagatgatgatgaagtacatggatctagtcataaaagcctcggttcaagcagatgtcctgcttc

SEQ ID NO: 532539 - DNA, 201 bp, Homo sapiens
aagttgttcctaatactcccttattatctctttaatgtatataggatttatttatctaattccctgttaatgagcactagagggaaatgaatggctgttargaataacgagtacatatgggataccggtgctagagatgtgctaagtgtttccttgtaaaacacgtatctccctcttatcattttatgatttgtccagagt

SEQ ID NO: 532540 - DNA, 201 bp, Homo sapiens
cacaaattgtaatttgatgctttaaattggagagggaatcgggtaaattattcggctaaattattaaattgacacatcacttttttttgcagtagtaataaaatgagcgaatttgttatcacattctcagctttcaggaaggtgagctgagacaaagcaatgcttagcatttttctgaaacctttggatgcagtcaggaca

SEQ ID NO: 532541 - DNA, 201 bp, Homo sapiens
acacaaattgtaatttgatgctttaaattggagagggaatcgggtaaattattcggctaaattattaaattgacacatcacttttttttgcagtagtaataaaatgagcgaatttgttatcacattctcagctttcaggaaggtgagctgagacaaagcaatgcttagcatttttctgaaacctttggatgcagtcaggac

SEQ ID NO: 532542 - DNA, 201 bp, Homo sapiens
tacacaaattgtaatttgatgctttaaattggagagggaatcgggtaaattattcggctaaattattaaattgacacatcacttttttttgcagtagtaataaaatgagcgaatttgttatcacattctcagctttcaggaaggtgagctgagacaaagcaatgcttagcatttttctgaaacctttggatgcagtcagga

SEQ ID NO: 532543 - DNA, 201 bp, Homo sapiens
tatggggttttaccatgttggccaggctggtctcaaactcctgacttcaggtgatctgcccacctctgcctcccgaagtgctgggattacaggcggggacygctgtgcccggccaccgttttagtttttacactgaaattattcatgctgcttctgtcttatactgttgtgggttcttgatttatggtgtttcgggcttca

SEQ ID NO: 532544 - DNA, 201 bp, Homo sapiens
attctcctgcctcagcctcccgagtagctgggattacaggtgcccgccaccacactcggctaattttttttatttttagtagagacggcgtttcaccacgytggccaggctggtctcgaactcctgacctcaggtgatccacccaccttggcctcccaaagtgttgggattacaggtgtgagccaccgtgcctggccccaa

SEQ ID NO: 532545 - DNA, 201 bp, Homo sapiens
cgggctcaagcgattctcctgcctcagcctcccgagtagctgggattacaggtgcccgccaccacactcggctaattttttttatttttagtagagacggsgtttcaccacgttggccaggctggtctcgaactcctgacctcaggtgatccacccaccttggcctcccaaagtgttgggattacaggtgtgagccaccgt

SEQ ID NO: 532546 - DNA, 201 bp, Homo sapiens
tttttttgagacgagtctcactctgtcacccaggctggagtgcaatggcacaatctcggctcactgcaacctccacctcccgggctcaagcgattctcctrcctcagcctcccgagtagctgggattacaggtgcccgccaccacactcggctaattttttttatttttagtagagacggcgtttcaccacgttggccagg

SEQ ID NO: 532547 - DNA, 201 bp, Homo sapiens
cccacctcagctttcccagtagctgggagcgtgaaccaccacgcccaactaatttattttattttattttattttattttattttattttattttattttwtttttttgagacgagtctcactctgtcacccaggctggagtgcaatggcacaatctcggctcactgcaacctccacctcccgggctcaagcgattctcct

SEQ ID NO: 532548 - DNA, 201 bp, Homo sapiens
tagacagaatacacagtagtctgatgaatccccatatagcccatcattcagctccaaattgtcatctgttgtccagttttgctctagctccatcctttcawcgtccactatcctctgtaattttgaggtaaatctcagacatcatattatttcatccataaatattttagtatgtatttttgaaagataaaaactcttaaa

SEQ ID NO: 532549 - DNA, 201 bp, Homo sapiens
tgggattacaggcacacaccaccatgcccagctaatttttgtatttttagtagagatggggtttcaccatgttggccaggttggtctcgatcccctgacckcaagtgatccgcccaccttgacctcctaaagtgctaagattattggcgtgagtcactgtgcccagctttttttttttttttttttttttgagatgaagtt

SEQ ID NO: 532550 - DNA, 201 bp, Homo sapiens
ctcttgaaatcgggaggcggaggttgcagtgagccgagatggcgccgttgcactccagcctgggtaacaagagcgagactacgtctcaaaaaaaaaaaaaatcctattttccccctaggtcaaagccagtgatatgtaaagctagcatagagcaaaagagtctgagaaccatgatgttgacctgtcttattagaatggttt

SEQ ID NO: 532551 - DNA, 201 bp, Homo sapiens
gagccaccgcccccaaccgtatttttttttttttttttttttttgtagcgatggagtctatgttgtccaggctggtcttgaactcctgggctcaagcaatscgcccacctgagcctcccaaagtgccaggattacaggtgtgagccacagcgcccagcttagaatgtagctctcttatacctctcttgtccctgctgtcca

SEQ ID NO: 532552 - DNA, 201 bp, Homo sapiens
gtcaaaactttgttggacgatggtaatgtcagcagttgcctgattttcatggaaatgcttttggtttcactgttcaatgcagtgttgatcgtggaaaaackcgcagtttaccaggtgcaggttttattttttaagtcctcaggatttcatcagaaatggctcgtaaattctttcaaagcttttactacatcttgatatgat

SEQ ID NO: 532553 - DNA, 201 bp, Homo sapiens
gtatctctgaatagacaaatccatagaaacaaattcaatgactggttctcaggggtggtagagtgtggagtgactgtcattgtacacatggtttcttttgytgatgacaacagtgttctaaagtgaggtagtggtgatgcttgcataactgcaaaatgcaaaacccataggattatccactctggaagggtgagttcatta

SEQ ID NO: 532554 - DNA, 201 bp, Homo sapiens
tactcataaatgttatataagagtatctattggccaggcacagtggctcaggcctgtaatcccagcactttgagaggctgaggcggggcagatcacaaggwcaggagatcgaaaccagcctggccaacatggtgaaaccccatctctactaaaaatacacaaattagctgggcgtggtggcgggtgcggcctgtaatctca

SEQ ID NO: 532555 - DNA, 201 bp, Homo sapiens
ttttaacaatcttatctatatattccaaataccaactataaaaacatgtcattttcatcatgatttgagtgcgtatctcacacaaacctgtttttactccmtcaggccatcatgcagaagggggatacaaacataaagcccatcctccaagtcatcgtaagtacctgcgtatgttatgttccatgtcaacttctttggagt

SEQ ID NO: 532556 - DNA, 201 bp, Homo sapiens
gaggctgtcactcactggaatgactgaactctgaacccgtgcgtctgttccctcccgctgggctcactgaaaccactgaagcaaaaggggtttcactgctycacaccacactttcactgctcacaaactacttctccctttttgaaggacgagtctcgaattaaggccactgtgatggacgtgaagcccgtggactacaga

SEQ ID NO: 532557 - DNA, 201 bp, Homo sapiens
gattctaggcttctgggtgtttgggagcttgggtaaagaatcagaagggcctgtgctggagaaaggacctgttcactcgcccagccccagacattcaggasgaggctgtcactcactggaatgactgaactctgaacccgtgcgtctgttccctcccgctgggctcactgaaaccactgaagcaaaaggggtttcactgct

SEQ ID NO: 532558 - DNA, 201 bp, Homo sapiens
gggtgattttttttgtattttcagtagagacggggtttcactgtgttagccaggatggtctccatctcctgacctcgtgatctgcccgcctcagcctcccraagtgctgggattacaggcgtgagccaccgcccccaaccgtatttttttttttttttttttttttgtagcgatggagtctatgttgtccaggctggtctt

SEQ ID NO: 532559 - DNA, 201 bp, Homo sapiens
ttttgagacggagtctcactgtgtcgcccaggctggagtgcagtggcgcggtctcggttgactgcaagctccacctcccggattcacgccattctcctgcytgagtagctgggactacaggcacccaccaccatgcccgggtgattttttttgtattttcagtagagacggggtttcactgtgttagccaggatggtctcc

SEQ ID NO: 532560 - DNA, 201 bp, Homo sapiens
ggcatgtgccaccacgcccagctaattttattttgttttttatttatttatttatttttgagacgaagtctcactctgttgccaggctggagtgcagtggygtgatctcggctcactgcaacctccgcctcccaggttcaagcgattctcctgcctcagcctcctgagtagctagggctacaggcacgcatcaccatgctc

SEQ ID NO: 532561 - DNA, 201 bp, Homo sapiens
ctgtaaccccagcactttgggaggcggagacgggcagataacctgaggtcaggatttcgagaccaacctgacctacatggagaaactccgcctctagtaaraatacaaaattagccgggcatggtggtgcacgcctctaatcccagctactcgggaggctgaggcaggagaatcacttgaacccgggaagtggaggttgca

SEQ ID NO: 532562 - DNA, 201 bp, Homo sapiens
gctccttctccagggagtccacccctccctatcagctccagccccacgcccagctccagggagtccttctccagagagtccaatggccgacttggagcccytccccaccagctccagccccacgcccaccatcccacccgccgccccccttttccgggcagtccccacattcattcttcttcaccactctcctcctgctcg

SEQ ID NO: 532563 - DNA, 201 bp, Homo sapiens
cccccagcatcacgtttgcagggggccccggcagggatggcaccattgacttcacacccggctcggagctgctcatcaccaaggccaagaacgggcacctkgctgtggtgagtggggcctgctttcccgcttatggcctggctgtgatagccaagccttccttggctgtgcttggcagagcccgggcacctcaccatgggc

SEQ ID NO: 532564 - DNA, 201 bp, Homo sapiens
acctgacctacatggagaaactccgcctctagtaaaaatacaaaattagccgggcatggtggtgcacgcctctaatcccagctactcgggaggctgaggcrggagaatcacttgaacccgggaagtggaggttgcagtgagccaagagtacaccactgcactccagcctgggcaacagagcgagactccgtcttaaaaaaa

SEQ ID NO: 532565 - DNA, 201 bp, Homo sapiens
gtggccacatcctcagttacctcctggaaaagtcacgagtggtgcaccagaatcatggggagcggaacttccacatcttctaccagctgctggaggggggygaggaggagactcttcgcaggctgggcttggaacggaacccccagagctacctgtacctggtgaaggtgagtggctggcagggagggcaggtgccaccca

SEQ ID NO: 532566 - DNA, 201 bp, Homo sapiens
cggggaggctctgtctcacctcacgtcggttctcccctcccagggtttctggacaaaaacaatgaccttctcttccggaaccttaaggaggtgaggaggaygtggggaggccggggtgggggtggggatagcccacagctctgcacctgtgtccaggagcctgtcctgcctgtccctgtgccccaccctgaccccggctct

SEQ ID NO: 532567 - DNA, 201 bp, Homo sapiens
gccaagaacgggcacctggctgtggtgagtggggcctgctttcccgcttatggcctggctgtgatagccaagccttccttggctgtgcttggcagagcccrggcacctcaccatgggccttcatccagaggccatcataccacctcttccatcccttggcccacccatgagggccagagagagcccctcagtgcagaaagt

SEQ ID NO: 532568 - DNA, 201 bp, Homo sapiens
aggcgtgagccaccgcgccctgccgagtaaggtctcttgaccggaagcgtctccagatggagggggtgttacttatccaaaggctgcagtagcatatgttygatgtcttcagagggaagggcccagggtgtccaggacctctgacctcactcctccccttaggcctcagagcttctgcgggagttgtgcataaagaacatg

SEQ ID NO: 532569 - DNA, 201 bp, Homo sapiens
gccccgcccccgatgactctgaccctcttctgtggcccattctctgcaggccctgggcagtgacggggttcgggtgaccatggagagtgcgctcaccgccygtgaccgggtgggggtgcaggatttcgtgctgctggagaacttcaccagcgaggccgccttcatcgagaacctgcggcggcgatttcgggagaatctcat

SEQ ID NO: 532570 - DNA, 201 bp, Homo sapiens
taccccggtctaccgtatttaccgcgttctaccgtatttaccccgatctaccgtatttaccctggtctactctatttaccccagtctaccgtatttacccygcctaccgtatttatctcggtctactgtatttaccccacctaccgtatttaccccagtctactctatttaccgcaatctactgtatttaccccgtctata

SEQ ID NO: 532571 - DNA, 201 bp, Homo sapiens
gaccccaagctggagctgagtctcagggccaccagggcctgatggggtggggaagcattaccaaggccagtttcaaaaccccgcagtgccttcatgacccygctggggagtgcttggtggcggcagagggtcaggaagtggagggttgatgggcgtgtggggggcagggctcagcctcctggtgctgagccagagagggac

SEQ ID NO: 532572 - DNA, 201 bp, Homo sapiens
tgtgtagctcaaagaatcccattatgagccagtgctttgaccggagcgagctcagtgacaagaagcggccagagacggtgaggaggtggcgggaccgggcrcgggggtgcatgcgcctgagtgtgcatgagggcctgtgtgagcctgggagctggcagcgtgcgtgtgaacgcgtgtgagcccgtgcacatctgcaggtgt

SEQ ID NO: 532573 - DNA, 201 bp, Homo sapiens
agttgcaggtacagatgagatcagcccccgagtgctgcaggccttgggctctgagcccattcaggtaagagcctgcctgcagccctgagtccagcagcacrgtgctactgcctgagagctgaaggcaggtcagggcacgggcggagccttgggagcctctccccagccccttcagcctggcctctgtccccagtatgcggt

SEQ ID NO: 532574 - DNA, 201 bp, Homo sapiens
gccctcagtgccaaccgcgtgaacagcatcaacatcaaccagggcaggtgaggcgcgggcggcccccggggacagggcgggggtggcgagggggctgtgtrggcacccagggacagggtgggggtccaccttagggttgggggtctgcctccatggaaaaaccctcacccaccccgttcccccagcatcacgtttgcaggg

SEQ ID NO: 532575 - DNA, 201 bp, Homo sapiens
gaggccgaggtgtgtggatcacccgagatcaggagttcgagaccagcctggccaacatcgtgaaaccccatctctactaataatacaaaaattagccgggygtggtggtgcacgcctgtaataccagctactagtgggggctgaggcgggagaattgcttgaacccaggaggtggagattgcagtgagctgatatcatgcc

SEQ ID NO: 532576 - DNA, 201 bp, Homo sapiens
aaaaaaaaaaaaaaaaaaaggcagcacggcaatgcagggaagatacataggctgattgggggtgccaggagggaggacaggctcacaggctcacgctggcyagggcggtgggcattcctatgggagtcaggtctgagtctccaggatggagaccactaggcccccaccactcctgcctgcatcgaacccatgaatctgagc

SEQ ID NO: 532577 - DNA, 201 bp, Homo sapiens
gcactgaagcttggactggctggcgacggtgcgaaggcccccctcctggggggaggggtggggggagaggggactggagcgggccatctggcacatcggartgcaggagcagtggggtaaactggggacagcaggggggtctcgggagttcataggcagggtcctggtaagcagcagtgagtgtgaatcatgggcctggca

SEQ ID NO: 532578 - DNA, 201 bp, Homo sapiens
ctgacagtcattgatttcaccgaggatgaagtggaggtgaggcctcttccgggaccctcgctttcctcctgtcacacccccaaaatctccttttttttttkttttttattttttgagacggagtttcattcttgttgcccaggctggagtgcagtggtgcaatctcagctcactgcaacctccgcctcctgggttcaagca

SEQ ID NO: 532579 - DNA, 201 bp, Homo sapiens
ccaggagcctgtcctgcctgtccctgtgccccaccctgaccccggctctgcccacacagaccatgtgtagctcaaagaatcccattatgagccagtgcttygaccggagcgagctcagtgacaagaagcggccagagacggtgaggaggtggcgggaccgggcgcgggggtgcatgcgcctgagtgtgcatgagggcctgt

SEQ ID NO: 532580 - DNA, 201 bp, Homo sapiens
aaatctccttttttttttgttttttattttttgagacggagtttcattcttgttgcccaggctggagtgcagtggtgcaatctcagctcactgcaacctcygcctcctgggttcaagcaattctcctgcctcagcctcccgagtagctgggattacaggcgcccgccaccacgcccagctaattttttgtagttttagtag

SEQ ID NO: 532581 - DNA, 201 bp, Homo sapiens
accatgtgtagctcaaagaatcccattatgagccagtgctttgaccggagcgagctcagtgacaagaagcggccagagacggtgaggaggtggcgggaccrggcgcgggggtgcatgcgcctgagtgtgcatgagggcctgtgtgagcctgggagctggcagcgtgcgtgtgaacgcgtgtgagcccgtgcacatctgcag

SEQ ID NO: 532582 - DNA, 201 bp, Homo sapiens
gaatgtgcgcaaaagccacctgtgatcccgtcgcccaaaggccatggctgttaactgtgtgaggcatttccctcctgcctttttctatgcattttttttcrtagtcgagaacttgtgtataaggctcagggtaaatatcctgcacattttcccgtatcatcaaacaacattttcctcagaacacttcctggagcggttctg

SEQ ID NO: 532583 - DNA, 201 bp, Homo sapiens
tgaccatggagagtgcgctcaccgcccgtgaccgggtgggggtgcaggatttcgtgctgctggagaacttcaccagcgaggccgccttcatcgagaacctrcggcggcgatttcgggagaatctcatctacgtgaggcccttgtggggagatggcaggggtgctggggtcacagacacaggcaagcggaggggaaagagac

SEQ ID NO: 532584 - DNA, 201 bp, Homo sapiens
acgtgggcaggacggccgcaggatggggtggctgtgctggtccgacacctgggctacaagccagaagagtacaagatgggcaggtgggtagtgtccgtgcygggtgcctgcggggaatgggagtggcaaccccgggctgatcactactgctctcccaggaccaagatcttcatccgcttccccaagaccctgtttgccaca

SEQ ID NO: 532585 - DNA, 201 bp, Homo sapiens
cttcatcgagaacctgcggcggcgatttcgggagaatctcatctacgtgaggcccttgtggggagatggcaggggtgctggggtcacagacacaggcaagyggaggggaaagagacaccaagggtcaccgggataaactttttttttttttttgagacagtttcactcttgttgcccaggctggagtgcagtggcgcgatc

SEQ ID NO: 532586 - DNA, 201 bp, Homo sapiens
ttccgcacccggcccaccacacccaggccctcagcacccaggccccccgcacccgtcatgctcatgtcccgtgtctagcccggagtccacaagcccctacrttccctctcagtcccacaggcgcagggaagtggccttgccccgcccccgatgactctgaccctcttctgtggcccattctctgcaggccctgggcagtga

SEQ ID NO: 532587 - DNA, 201 bp, Homo sapiens
agtggcgcgatctcagctcactgtaacctcctccccccgggttcaagcgattctcctgcctcagcctcccgagtagctgggattacaggcacccgccaccrcgcccggctaattttgtatttttagtagagacggatttctccatgttggtcaggttggtcttgaactcccgacctcaggtgatccgcccaccttggcctc

SEQ ID NO: 532588 - DNA, 201 bp, Homo sapiens
gaatgtccttttaggctgggcatggtggctcacgcctgtaaccccagcactttgggaggcggagacgggcagataacctgaggtcaggatttcgagaccarcctgacctacatggagaaactccgcctctagtaaaaatacaaaattagccgggcatggtggtgcacgcctctaatcccagctactcgggaggctgaggca

SEQ ID NO: 532589 - DNA, 201 bp, Homo sapiens
aaccccagcactttgggaggcggagacgggcagataacctgaggtcaggatttcgagaccaacctgacctacatggagaaactccgcctctagtaaaaatrcaaaattagccgggcatggtggtgcacgcctctaatcccagctactcgggaggctgaggcaggagaatcacttgaacccgggaagtggaggttgcagtga

SEQ ID NO: 532590 - DNA, 201 bp, Homo sapiens
cctgtgactccccagccagccggggactgtctctgtgtttctcacctcctgtgctcaggggcgtcgtccagcttttcccctctcctggtcctgtgtccccrctgagccactgtgggctcttctccttccttacagctttgagcagttctgcatcaattactgcaacgagaagctgcagcagctcttcatcgagctcacgct

SEQ ID NO: 532591 - DNA, 201 bp, Homo sapiens
catgctcatgtcccgtgtctagcccggagtccacaagcccctacgttccctctcagtcccacaggcgcagggaagtggccttgccccgcccccgatgactytgaccctcttctgtggcccattctctgcaggccctgggcagtgacggggttcgggtgaccatggagagtgcgctcaccgcccgtgaccgggtgggggtgc

SEQ ID NO: 532592 - DNA, 201 bp, Homo sapiens
gccccagaagagtgaggtcagtgagtccatagggaggtggaagccagactgcctggcagggagggcatgcaggcgacatgctgcccagggtgtggctcactgtgcccctgcccgctgctgccgtccaccccaccctctcccgaagcaccacatcctcccggccctagcgtctccctgctgaggatgcctacacaccctccc

SEQ ID NO: 532593 - DNA, 201 bp, Homo sapiens
cctgtaaccccagcactttgggaggcggagacgggcagataacctgaggtcaggatttcgagaccaacctgacctacatggagaaactccgcctctagtaraaatacaaaattagccgggcatggtggtgcacgcctctaatcccagctactcgggaggctgaggcaggagaatcacttgaacccgggaagtggaggttgc

SEQ ID NO: 532594 - DNA, 201 bp, Homo sapiens
ccccagaagagtgaggtcagtgagtccatagggaggtggaagccagactgcctggcagggagggcatgcaggcgacatgctgcccagggtgtggctcactgtgcccctgcccgctgctgccgtccaccccaccctctcccgaagcaccacatcctcccggccctagcgtctccctgctgaggatgcctacacaccctcccg

SEQ ID NO: 532595 - DNA, 201 bp, Homo sapiens
tcggagcaggaggagtacgaggcagagggcatcgcggtgtgtgctagcctgggggcactctccgtgggccacggggagcctgggtatcggggcccctgggrgagggtgccaggaccccacggtgatcccttccttcccttctgcccctcagtgggagcccgtccagtatttcaacaacaaaatcatctgtgatctggtgga

SEQ ID NO: 532596 - DNA, 201 bp, Homo sapiens
tgtagctcaaagaatcccattatgagccagtgctttgaccggagcgagctcagtgacaagaagcggccagagacggtgaggaggtggcgggaccgggcgcrggggtgcatgcgcctgagtgtgcatgagggcctgtgtgagcctgggagctggcagcgtgcgtgtgaacgcgtgtgagcccgtgcacatctgcaggtgtct

SEQ ID NO: 532597 - DNA, 201 bp, Homo sapiens
acacagaccatgtgtagctcaaagaatcccattatgagccagtgctttgaccggagcgagctcagtgacaagaagcggccagagacggtgaggaggtggcrggaccgggcgcgggggtgcatgcgcctgagtgtgcatgagggcctgtgtgagcctgggagctggcagcgtgcgtgtgaacgcgtgtgagcccgtgcacat

SEQ ID NO: 532598 - DNA, 201 bp, Homo sapiens
tgctggagtggggaaggccgtcttagaccatagaggttggaagacgctgagagatcatccagcccagccccttgatgttacagagcagaagacagatgccyaaacaggagaaggcacttgcccacggtcatacggcaggttgccacaaaaccaagatggcagcccttcctcagcgtgcctcactgccactcccagagccag

SEQ ID NO: 532599 - DNA, 201 bp, Homo sapiens
ctcagggccaccagggcctgatggggtggggaagcattaccaaggccagtttcaaaaccccgcagtgccttcatgaccctgctggggagtgcttggtggcrgcagagggtcaggaagtggagggttgatgggcgtgtggggggcagggctcagcctcctggtgctgagccagagagggaccagcaagcgggtgagggaggc

SEQ ID NO: 532600 - DNA, 201 bp, Homo sapiens
ccaggacagcacggaggccacagcggccagagaagagagcaggggcccgcgaacagagagaggccaaacggtgcaggcccttttgggttgttgcaagaactttttttttttttttttaactctgagtagaaggggagtcatcgggctgggtgaggtggctcatgcctgtaatctgagcactttgggaggttggggcaggtg

SEQ ID NO: 532601 - DNA, 201 bp, Homo sapiens
gaatcagaggctgctgcgcgcgtcaccagccaggggagtggggtactcgctgctggggtcagcagctttagcccagctccggccaacctcccatgcctctyggctcgccaggtcgccacccagttcaagatgagcctcctgcagctggtggagatcctgcagtctaaggagcccgcctacgtccgctgcatcaaacccaat

SEQ ID NO: 532602 - DNA, 201 bp, Homo sapiens
tagtagagacggatttctccatgttggtcaggttggtcttgaactcccgacctcaggtgatccgcccaccttggcctcccaaagtgctgggattacaggcrtgagccatcgcacctggcccgggataaactttggaccctcttcccccgatcccagacctacattggccccgtcctggtctctgtcaatccctaccgggac

SEQ ID NO: 532603 - DNA, 201 bp, Homo sapiens
aatggcgctgcaagtggagctggtacccaccggggagatcatccgcgtggttcatccccacaggccctgcaagcttgtaagctgggatgctctgggctggraggagggtgggagcgtctccccaaggccgggcagcccctctcaggcgagccctcgggcaagagctgagcagcggggaggggttccgatccttggcggggc

SEQ ID NO: 532604 - DNA, 201 bp, Homo sapiens
tacggagtgagaccctgtctctaaaaaaaatagaaaataatggcttgatggagataggagcaggctgtgcaggtgcctgtccaggcagcgggaacggaacrgccaggacaaaggcctgagatacgagggtgctggaagtgttccaggacagcacggaggccacagcggccagagaagagagcaggggcccgcgaacagaga

SEQ ID NO: 532605 - DNA, 201 bp, Homo sapiens
tcaccagcgaggccgccttcatcgagaacctgcggcggcgatttcgggagaatctcatctacgtgaggcccttgtggggagatggcaggggtgctggggtyacagacacaggcaagcggaggggaaagagacaccaagggtcaccgggataaactttttttttttttttgagacagtttcactcttgttgcccaggctgga

SEQ ID NO: 532606 - DNA, 201 bp, Homo sapiens
ggctggcagggagggcaggtgccacccagggatctggtgccagggctggcaacccagctgtgcccttcctccagggccagtgtgccaaagtctcctccatyaacgacaagagtgactggaaggtcgtcaggaaggctctgacagtcattgatttcaccgaggatgaagtggaggtgaggcctcttccgggaccctcgcttt

SEQ ID NO: 532607 - DNA, 201 bp, Homo sapiens
ctgggcgggctggaggctgggtcgcctccttgctccctctagattttccttgttctgttttgtttggagacggagcttcgctctgtcgcccaggctggagygcagtggcacaatctcggctcactgcaacctccgtctcccgggttcaagcgattctcgtgcctcagcctcccgagcagctgggattacacaggcgcccac

SEQ ID NO: 532608 - DNA, 201 bp, Homo sapiens
gggttcaagcaattctcctgcctcagcctcccgagtagctgggattacaggcgcccgccaccacgcccagctaattttttgtagttttagtagagacggartttcaccatgttggccagcctggtctcgaactcccgacctcaggtgatccgcctgcctcagcctctcaaagtgctgggattacaggcgtgggccagtaat

SEQ ID NO: 532609 - DNA, 201 bp, Homo sapiens
acccctcacatgtgtccagaaactaagaagcttagccaggcatgctgacacgcctggagtcccatctatgcagaaggctggggcaagagcatcacttgagycctggagttttgaggttgcagtgagctaggatcaacccactgcactccagcctgggtgacaagagcgagactccgtctcaaaaaaaaaaaaaaagggaaa

SEQ ID NO: 532610 - DNA, 201 bp, Homo sapiens
acccactgcactccagcctgggtgacaagagcgagactccgtctcaaaaaaaaaaaaaaagggaaaaaaataaataatgaattttttaaaaaagagaaagraggccaggtgcagtggctcacgcctgtaatcctagcactttgggaggctgaggcgggtggatcaccttaggttaggagttcaaaacgagcctgggcaaca

SEQ ID NO: 532611 - DNA, 201 bp, Homo sapiens
cggggggtgctgcagggtggggctggcacgcgcagggggcccacgccttcggttgaatgactgccctaggacgtggagagccccagctggcggagcaccayggttctcgggctcctggatatttatggctttgaagtgtttcagcataacaggtcggtgccatctttcccccgtctctcctcccggtctcctgtcctgctc

SEQ ID NO: 532612 - DNA, 201 bp, Homo sapiens
taccgtatttaccccggtctactctgtttaccccggtctgctctatttaccccggtctgctctatttaccctagtctaccgtatttaccccggtctaccgrtgacctcagttggatgccaggccctgctgggcctcgtgtaggaagtggacactggagtacagctggggtggccagtagggttcatatcgtgggccaactg

SEQ ID NO: 532613 - DNA, 201 bp, Homo sapiens
gccgagatcgcaccactgccctccagcctgagcgacagagtgagacttcaaccccaaaaaaaaaaacaaaaaacaagacactagtagcctggcttcctccytcttcttgtttgagaatgaaacttgctaagatttttcatcttccttgtttggaaattgatttttattgaaggaatcctctgaagtggggagaggtagaaa

SEQ ID NO: 532614 - DNA, 201 bp, Homo sapiens
acattggccccgtcctggtctctgtcaatccctaccgggacctgcagatctacagccggcagcatatggagcgttaccgtggcgtcagcttctatgaagtsccccctcacctgtgagtgaccccagcccctccgggagcgacccctctgtctccatctgaggtgaccccgcccaacccttaccttactctgaaatgatcct

SEQ ID NO: 532615 - DNA, 201 bp, Homo sapiens
tgaggcaggagaatcacttgaacccgggaagtggaggttgcagtgagccaagagtacaccactgcactccagcctgggcaacagagcgagactccgtcttaaaaaaaaaaaaaaaaagaacgcccttttactgtcctcatcatcccagtttgaggcagtgctggagtggggaaggccgtcttagaccatagaggttggaag

SEQ ID NO: 532616 - DNA, 201 bp, Homo sapiens
ccaggacctctgacctcactcctccccttaggcctcagagcttctgcgggagttgtgcataaagaacatggtgtggaaatactgccggagtatcagccctragtggaagcagcaggtacggagagcggggctgggtgaggatgaggaagtggagtcagggagtcgcaagcattgctcaaagggtgtccgcctggaggggca

SEQ ID NO: 532617 - DNA, 201 bp, Homo sapiens
gaggcaggagaatcacttgaacccgggaagtggaggttgcagtgagccaagagtacaccactgcactccagcctgggcaacagagcgagactccgtcttaaaaaaaaaaaaaaaaagaacgcccttttactgtcctcatcatcccagtttgaggcagtgctggagtggggaaggccgtcttagaccatagaggttggaaga

SEQ ID NO: 532618 - DNA, 201 bp, Homo sapiens
cctacatggagaaactccgcctctagtaaaaatacaaaattagccgggcatggtggtgcacgcctctaatcccagctactcgggaggctgaggcaggagartcacttgaacccgggaagtggaggttgcagtgagccaagagtacaccactgcactccagcctgggcaacagagcgagactccgtcttaaaaaaaaaaaaa

SEQ ID NO: 532619 - DNA, 201 bp, Homo sapiens
ctgcactatgcgggggaggtgacctacagcgtgaccggtgaggattcctggggctgtgtccccacaggggcctgcggggaggctctgtctcacctcacgtyggttctcccctcccagggtttctggacaaaaacaatgaccttctcttccggaaccttaaggaggtgaggaggacgtggggaggccggggtgggggtgggg

SEQ ID NO: 532620 - DNA, 201 bp, Homo sapiens
tgcactatgcgggggaggtgacctacagcgtgaccggtgaggattcctggggctgtgtccccacaggggcctgcggggaggctctgtctcacctcacgtcrgttctcccctcccagggtttctggacaaaaacaatgaccttctcttccggaaccttaaggaggtgaggaggacgtggggaggccggggtgggggtgggga

SEQ ID NO: 532621 - DNA, 201 bp, Homo sapiens
gggccctccacacccggctttccgcacccggcccaccacacccaggccctcagcacccaggccccccgcacccgtcatgctcatgtcccgtgtctagcccrgagtccacaagcccctacgttccctctcagtcccacaggcgcagggaagtggccttgccccgcccccgatgactctgaccctcttctgtggcccattctc

SEQ ID NO: 532622 - DNA, 201 bp, Homo sapiens
tctgctcactgcaacctccacctgccgggttcaagctattctcctgcctcagcctcctgagtagctgggattacaggtgtgtgccaccgcgcccagctaatttttttttttttttagtagagacggggtttcaccgtgttagccaggatggtctcaatctcctgaccttgtgatccacctgcctaggcctaccaaagtgct

SEQ ID NO: 532623 - DNA, 201 bp, Homo sapiens; identical to SEQ ID NO: 146271

SEQ ID NO: 532624 - DNA, 201 bp, Homo sapiens
ggaggcaggggtctcaccactatgtggcccaggctggtcttgaactcctggcctcaagcgatcctcccacctcggcctctcaaagttctggggttacaggygtgagccactcactgcaccttgcctctgttcacgtttgctggaccccccaggcagaggtgtctggcagccaaagatccatggttgtgtagctagaatgga

SEQ ID NO: 532625 - DNA, 201 bp, Homo sapiens
tctgcccccccaagatggtgctccccaccatgacactctcctcaccccccttgtctcctcagctgcagcagaaggccgtggctagtgagatcttcaagggmaagaaggataattaccctcagagtgtacccaggctcttcatcagcactcggcttggtgagcccctgactttccagcactcagacctttcgtcaccatcct

SEQ ID NO: 532626 - DNA, 201 bp, Homo sapiens
acgagacgccctcgccaaggctgtgtacagccgcacttttacctggctcgtcgggaagatcaacaggtcgctggcctccaaggtgagggctcggtccacastgctcccaaggcagaagggagggccgtcggcgaggcggggggtgctgcagggtggggctggcacgcgcagggggcccacgccttcggttgaatgactgcc

SEQ ID NO: 532627 - DNA, 201 bp, Homo sapiens
tgaggtcagtgagtccatagggaggtggaagccagactgcctggcagggagggcatgcaggcgacatgctgcccagggtgtggctcactgtgcccctgccygctgctgccgtccaccccaccctctcccgaagcaccacatcctcccggccctagcgtctccctgctgaggatgcctacacaccctcccgcccaggcctct

SEQ ID NO: 532628 - DNA, 201 bp, Homo sapiens
tggcccacggcctggctctcagtaggcctctgcccgcaagcaagtgaggaatgagcgtccggccgagggaaggcggcgggtgggggcagcgaggtctatarggggtctggaggtgccttcacgctctatctcaggccacccaacggcccttctaggcctgtgttagcctcatgttagggatgaagaacagaagccgaaacg

SEQ ID NO: 532629 - DNA, 201 bp, Homo sapiens
agcccgcctacgtccgctgcatcaaacccaatgatgccaaacagcccggtaggcccctcccacgggggacttcggggccgggcctcccctgcaggagacaggccgtcagcgccagcccgctgaccacggcgctccccctaccccaggccgctttgacgaggtgctgatccgccaccaggtgaagtacctggggctgttgga

SEQ ID NO: 532630 - DNA, 201 bp, Homo sapiens
gaggcaggtgcctgcagacgcgcctgaggctctccccaccggatcggaagcgtggcccacggcctggctctcagtaggcctctgcccgcaagcaagtgagraatgagcgtccggccgagggaaggcggcgggtgggggcagcgaggtctatagggggtctggaggtgccttcacgctctatctcaggccacccaacggccc

SEQ ID NO: 532631 - DNA, 201 bp, Homo sapiens
cgtccgctgcatcaaacccaatgatgccaaacagcccggtaggcccctcccacgggggacttcggggccgggcctcccctgcaggagacaggccgtcagcrccagcccgctgaccacggcgctccccctaccccaggccgctttgacgaggtgctgatccgccaccaggtgaagtacctggggctgttggaaaacctgcgc

SEQ ID NO: 532632 - DNA, 201 bp, Homo sapiens
aatgactgccctaggacgtggagagccccagctggcggagcaccacggttctcgggctcctggatatttatggctttgaagtgtttcagcataacaggtcrgtgccatctttcccccgtctctcctcccggtctcctgtcctgctccctctcttctgtcctccagcctctcattcctgccctgtgactccccagccagccg

SEQ ID NO: 532633 - DNA, 201 bp, Homo sapiens
ggagtgcagtggcgcgatctcagctcactgtaacctcctccccccgggttcaagcgattctcctgcctcagcctcccgagtagctgggattacaggcaccygccaccacgcccggctaattttgtatttttagtagagacggatttctccatgttggtcaggttggtcttgaactcccgacctcaggtgatccgcccacct

SEQ ID NO: 532634 - DNA, 201 bp, Homo sapiens
tataaggctcagggtaaatatcctgcacattttcccgtatcatcaaacaacattttcctcagaacacttcctggagcggttctgacccacagatactcccytctctcacccagcccttcggggcccctggccagcctcccaggtttctgctggaatcacaaggctgccacaaacatctccgtgccttcaatctttgtccgt

SEQ ID NO: 532635 - DNA, 201 bp, Homo sapiens
aggaggtgacacctgagccgagtctcagtgaggtgggcagggagagtgccccgggctggggaagccgcaggtgcaggcactgaagcttggactggctggcracggtgcgaaggcccccctcctggggggaggggtggggggagaggggactggagcgggccatctggcacatcggaatgcaggagcagtggggtaaactgg

SEQ ID NO: 532636 - DNA, 201 bp, Homo sapiens
cgggcaccagaggcagacagcaagccttgtagggcagcttccaaggggctccgaaagggtggagcagctttgtggttcttctgagtcgggggcctgggggktcaaactgaatttcatctctgccactttctagttacttggccttaggtagataagaacggtttcttcatctttaaaatgggggcagtgaccgagtgagcc

SEQ ID NO: 532637 - DNA, 201 bp, Homo sapiens
tgtaaccccagcactttgggaggcggagacgggcagataacctgaggtcaggatttcgagaccaacctgacctacatggagaaactccgcctctagtaaaratacaaaattagccgggcatggtggtgcacgcctctaatcccagctactcgggaggctgaggcaggagaatcacttgaacccgggaagtggaggttgcag

SEQ ID NO: 532638 - DNA, 201 bp, Homo sapiens
cacgcctgtaaccccagcactttgggaggcggagacgggcagataacctgaggtcaggatttcgagaccaacctgacctacatggagaaactccgcctctrgtaaaaatacaaaattagccgggcatggtggtgcacgcctctaatcccagctactcgggaggctgaggcaggagaatcacttgaacccgggaagtggagg

SEQ ID NO: 532639 - DNA, 201 bp, Homo sapiens
gcccacgtgggcaggacggccgcaggatggggtggctgtgctggtccgacacctgggctacaagccagaagagtacaagatgggcaggtgggtagtgtccrtgccgggtgcctgcggggaatgggagtggcaaccccgggctgatcactactgctctcccaggaccaagatcttcatccgcttccccaagaccctgtttgc

SEQ ID NO: 532640 - DNA, 201 bp, Homo sapiens
caaagtgctgggattccaggcgtgagccaccgcgccctgccgagtaaggtctcttgaccggaagcgtctccagatggagggggtgttacttatccaaaggmtgcagtagcatatgttcgatgtcttcagagggaagggcccagggtgtccaggacctctgacctcactcctccccttaggcctcagagcttctgcgggagt

SEQ ID NO: 532641 - DNA, 201 bp, Homo sapiens
cagagggaagggcccagggtgtccaggacctctgacctcactcctccccttaggcctcagagcttctgcgggagttgtgcataaagaacatggtgtggaamtactgccggagtatcagccctgagtggaagcagcaggtacggagagcggggctgggtgaggatgaggaagtggagtcagggagtcgcaagcattgctcaa

SEQ ID NO: 532642 - DNA, 201 bp, Homo sapiens
gttccagtcccactcctcctgagaccttgcacaagtcacctgcccagcctcaagttcttctgcattggagtgatgatacggacctcacggcttggctggcrtcactgaaaggagtaacccaagaaagcgcggagaacgcaggaggcgcctggcgctgcagcctcagccgcggcgtctttcccacccaggttccccgcttcc

SEQ ID NO: 532643 - DNA, 201 bp, Homo sapiens
gaatggaggatggagggaggtgccgccccagttggaagctctctgtggaggctccctgtgatctgcccctcccctgtgtctgtgcctcccagcacggtgamcccaatcctctgtgcgctctgacctgtcccccatacgtccttccccctgtgccacaccccccaggatgaggagtgtctgcgccccggggaggccacagac

SEQ ID NO: 532644 - DNA, 201 bp, Homo sapiens
ctgcccctcagtgggagcccgtccagtatttcaacaacaaaatcatctgtgatctggtggaggagaagtttaagggcatcatctcgattttggtgagtcckctgcgcctccaaggcctggtgctggaggctgggtgggaggatgtcccccttctccgttctctccaggctggtccacggagggccagagtttggggctgag

SEQ ID NO: 532645 - DNA, 201 bp, Homo sapiens
gtccacggagggccagagtttggggctgagtagagacagggcagagctgtgaatggaggatggagggaggtgccgccccagttggaagctctctgtggagrctccctgtgatctgcccctcccctgtgtctgtgcctcccagcacggtgaccccaatcctctgtgcgctctgacctgtcccccatacgtccttccccctgt

SEQ ID NO: 532646 - DNA, 201 bp, Homo sapiens
ctggacaaaaacaatgaccttctcttccggaaccttaaggaggtgaggaggacgtggggaggccggggtgggggtggggatagcccacagctctgcacctstgtccaggagcctgtcctgcctgtccctgtgccccaccctgaccccggctctgcccacacagaccatgtgtagctcaaagaatcccattatgagccagtg

SEQ ID NO: 532647 - DNA, 201 bp, Homo sapiens
cctcctgctagctgtgaacgagtcagtgggagcacccagcaggtgcccagagaaagctgattggggtccccagggcaggctgctgactggggtgggagccscgtgcattcctgtccccaggtacaagtcactgtgcccagagacgtggcccacgtgggcaggacggccgcaggatggggtggctgtgctggtccgacacct

SEQ ID NO: 532648 - DNA, 201 bp, Homo sapiens
gccagagagggaccagcaagcgggtgagggaggctgtctcaggtcctaaggctggctctgcccccccaagatggtgctccccaccatgacactctcctcamcccccttgtctcctcagctgcagcagaaggccgtggctagtgagatcttcaagggcaagaaggataattaccctcagagtgtacccaggctcttcatcag

SEQ ID NO: 532649 - DNA, 201 bp, Homo sapiens
aaaatacaaaattagccgagtgtggtggcgcatgcctgtaatcccagctactcgggaggctgaggcaggagaatcgcttaaacccgggaggtggaggttgyggtgagccgagattgcgccattacactctaccctgggcaacaagagcaaaattccatctcagaatttgtatacaaaaaagttagcctggtgtggtggcgt

SEQ ID NO: 532650 - DNA, 201 bp, Homo sapiens
tcaaagcagggagggagatgggccgggcgcgatggctcacgcctggaatcccagcactttgggaggccgaggcgggtggatcacctgaggtcaggagttcsagaccagcttggccaacatggtaaaaccccgtctctactaaaaatacaaaaattagccgagtgtggtggcgcacgcctgtaatcccagctactcgggagg

SEQ ID NO: 532651 - DNA, 201 bp, Homo sapiens
actaaatactttggggaatacaaaggtgagcaaagttaactctgatggagtagatgagctgtatttatgctatagtttgaatatttgtcccctccaaatcycgcgttgaaatttgatccccagtggttggaagaggggcctaatgggaggtgtttgggtcatgggagcagatctctcatgaatggcttggtgccagaggta

SEQ ID NO: 532652 - DNA, 201 bp, Homo sapiens
acacaaaagattagttttacctgttcttgaagtttttataaatagaattttttttttgctgtctacaagagaaacacttcattttgtatatgcatagaaatatatatatatatatatatatatattcattttagtagcttttatagtgcaagtggtttttggttacatggatgaattgtgtagtggtgaagtctaagattt

SEQ ID NO: 532653 - DNA, 201 bp, Homo sapiens
cacaaaagattagttttacctgttcttgaagtttttataaatagaattttttttttgctgtctacaagagaaacacttcattttgtatatgcatagaaatatatatatatatatatatatatattcattttagtagcttttatagtgcaagtggtttttggttacatggatgaattgtgtagtggtgaagtctaagatttt

SEQ ID NO: 532654 - DNA, 201 bp, Homo sapiens
acaaaagattagttttacctgttcttgaagtttttataaatagaattttttttttgctgtctacaagagaaacacttcattttgtatatgcatagaaatatatatatatatatatatatatattcattttagtagcttttatagtgcaagtggtttttggttacatggatgaattgtgtagtggtgaagtctaagatttta

SEQ ID NO: 532655 - DNA, 201 bp, Homo sapiens
ccacctcccaggttcaagcgattctcatgcttcagcctcccaagtagctgggattacaggcatgcgccaccaggcccaactaatttttgtatttttagtaragacggggtttcaccatgttgaccaggctggtctcgaactcctgacctcaagtgatccacccgcctcgatctcccaaagtgccgggattacaggcatgag

SEQ ID NO: 532656 - DNA, 201 bp, Homo sapiens
aaatacagataccaaaaactctgatgataaagatgtggacaggcagattctttttttttgagacagtctctcgctgtcactcaggctggagtacagtggcrtgatcgccactcactgcagcctccacctcctgggttcaagcgattcttatgactcagcctcccaagtagctgagattacaggcttgtgccaccacaccca

SEQ ID NO: 532657 - DNA, 201 bp, Homo sapiens
gagaacagcagaagagattttaaagcaacttcaacaagttcaagatgatcattttcaacttttatctgaaataaagtgtgaacattgtcaaaatcaaaatrgagttgtttctgtttaaaacaacaacaacaaaacctgacagagccagggaaggccatgaagagaggattcttgtgcttgtaagcctgattaaaaaaaaaa

SEQ ID NO: 532658 - DNA, 201 bp, Homo sapiens
gccaccacacccgggtaatttttgtatttttagtagagatggggtttcaccatgttggctaggctggtcttgaactcctgacctcaaatgatccacccacytcatcctcccaaagtgctgggattacaggcataagccaccgcacccagctttccttcacccatttcttaacacatctgtactaaataaagtaatttactc

SEQ ID NO: 532659 - DNA, 201 bp, Homo sapiens
gatgtggacaggcagattctttttttttgagacagtctctcgctgtcactcaggctggagtacagtggcgtgatcgccactcactgcagcctccacctccygggttcaagcgattcttatgactcagcctcccaagtagctgagattacaggcttgtgccaccacacccagctaatttttgtacttttagtagagatgagg

SEQ ID NO: 532660 - DNA, 201 bp, Homo sapiens
attcaaatctagtcctgtcggccgggcgcattggctcatgcctgtaatcccagcactttgggaggccgaggcaagtggatcagctgagttcaggggttcamgactggcctggccaacatagtgaaacctcatctctactaaaactacaaaaattagccgggcatgttggcatgcgcttgtaatcccagctactcgggaagc

SEQ ID NO: 532661 - DNA, 201 bp, Homo sapiens
cctagaataagctgtaaagaaataactgctcctcttacccttcctctctttccaaaagaaacatgccaatatctagcctactttcactagaccagtctaastctggttttaatttgattaaagcaaacaacttggtttttttttccactcagttcttttttttttttctgagatggagtctcacttgccgcccaggctgga

SEQ ID NO: 532662 - DNA, 201 bp, Homo sapiens
gcaagcagttagttctcattcgtccttctgcacctcactgtcactctagtaaccttgccttacagcagggatgtccaatcttttggcttccctgggccacwctggaagaagaagaattgtcttcggccatacataaaatagcactaacaataactgatgagcaaaaaaaacaaaacaaaaaaaaacacgcaaaaaaatctc

SEQ ID NO: 532663 - DNA, 201 bp, Homo sapiens
aattgatttgaaactattcttctattctaattaaaagcattcattactatatatttccttctaagcttccctcatgtgtggtgcaagaaccttacaacaayatgtttttattcatttaattatgctttttaatttcccttgagattttctctttaacccatggattatcttaaatattttgttatttcttgttattattct

SEQ ID NO: 532664 - DNA, 201 bp, Homo sapiens
acattctcttcattactgtgggtttacaatatgccttgatatcatacaatgtgagttcttcaactttgttctttttttcaaaacctttttattcttctacktcttttgccttttcataacaattttaaaactgcacattcatttctacaaagattgctctgggaagtttttaacaaattattcttagtagtaccttatagt

SEQ ID NO: 532665 - DNA, 201 bp, Homo sapiens
actgtgcaatagaacaccaaaacttattccttatatctaactgtacccattgacatttctagcattctattttccaaagaaaacactttcattttgtctaytcacttcctccattagcacagttcaggccaagataccttggaagtaactggcttccctcttgttcaacccagatgtaattaccctcagctagtaagagat

SEQ ID NO: 532666 - DNA, 201 bp, Homo sapiens
acaaaggaaaccagttatattgaaatatcaaatatttttaagttgagacataacaatattctgccataattttttatgaatgtattaaatagcaaggtgtwggggcaagtcttacagctatgataattttgaaatagcagtgagtgaaaatgatattttaacatacctgcacaaattataagttatagaaatattttataa

SEQ ID NO: 532667 - DNA, 201 bp, Homo sapiens
cttggctaagccatttaatttttaagcctcagtttcctcatccgtaaactatagattataatatttcacttgtgtgagagttaaatgaaataatgacagtraaatatctagcatggtacttgacacatagtagacaataagttaatatcctattactgttattgttatgtcagcttagactaaaataatcaagtttttcat

SEQ ID NO: 532668 - DNA, 201 bp, Homo sapiens
ttaatgttttaccataacttactgcttctagattcagatgtattagggcttacttctgagccttaaaatataaacatacatagtaaaatctgaatatgctrtggttctcatttatagatatttagctttttctcttaacaccaaactcaaataatttgaatgaatactagaaatgtaattgagaacagaatttagtagatt

SEQ ID NO: 532669 - DNA, 201 bp, Homo sapiens
attgcaatcccaactctagatggaccaaacctatcttcctggcaactactaagcagttgaacccagctgtgtaatagtacacagttatgtgggcagtctargttagatagatatctccatttcacaaaaccatttaggtatactgccaggccttggttcttccattctcaacatgatgcttctatttctgggtcaaaggca

SEQ ID NO: 532670 - DNA, 201 bp, Homo sapiens
ggagttctgttttttacttcataagcattaactgtcagtaatcatgggctcaaatttacaaatctcacaatattttcactacctttttagatggggcaggraattatttggcacatgggaaagaagagaagtgatcatgtctttccaataggcccctatttgtttgccagggagtaaaactcaggaactgacatggttagc

SEQ ID NO: 532671 - DNA, 201 bp, Homo sapiens
tgtatttatcaaaacagtgatgtatatacactgtacaaaatttaaaaggatgttcactgaagactcaatgttcctcctacccctgcctctgagacagctasttttcctcccccagaggcatcactgttagcagtttcttggaaaacttctgaaaatacatttttcatagataaacatacagggatatattttttatacaaa

SEQ ID NO: 532672 - DNA, 201 bp, Homo sapiens
atacttgcactctttgaccaaaagtatctcatatgcaccatggttgaagttcagacataaattcttctcagattcattaatttgctggtttctttcttcartggggattttattatgtcagagatgccttcctgacatttcttttctgtgaaagtgagttcctctccgtcatccctctacagggtttttttttttccttcc

SEQ ID NO: 532673 - DNA, 201 bp, Homo sapiens
gaaaaaagattcagtagtaataatcacaatgtgttttatgatcacacttgttttaaatactgggtatagacttcaatcttaaaatgatgctagatatttgkattgtgtctctgaataaaaaattgagaatcctaatttgaataaaccaattacaaaaatatattttttgagaaaattgggtaaatttgattatgaagtggt

SEQ ID NO: 532674 - DNA, 201 bp, Homo sapiens
atggactcatcccccaagaagtagaacatttcagtaccactatttaagaccacatagaggtttcctatgtcccagtttttaaacgcattcattccccctaygccgtgctcattcctgtaccccagcaactacttccctgaatcctgaatttatatttatttccttactttgtttcatacttgtttttattaaacagtgaat

SEQ ID NO: 532675 - DNA, 201 bp, Homo sapiens
ccgtgtggtcagacacctctgaaacgtgggtgagtaatcaggcagtcgtccccacgtgattaaacaccaagggaagactgtcttccctagtctgtgaccakcgccggagttttgggtccacggataaaacgcgtctcctgtctctaccagaaaaggaaaggaactgaacttaagagaagggagagattgaagggtggtacc

SEQ ID NO: 532676 - DNA, 201 bp, Homo sapiens
cattctttctattagttggtggaaaactttattgagaagggacttctctacgtccatctcagaggaaacatgttcctgttttctagaaccaacccctttascacttctttcagaaacttccctcattagagggagagctgaagatgtctccctttgaaactctaaaaaaaaaaaaaaaaaaaaaaaagaaagtttaagaat

SEQ ID NO: 532677 - DNA, 201 bp, Homo sapiens
caggttcctctgctgtgacgtcactattttttccattgtaactataaataataagtatcttgtgggagctaatttgaaactatataaatatcctggaaccstccaacccactctattgttagcatcgtttgaccactcacacctgagttggttgttatgatgatggctgccacatgaaagagttatttatttattcattca

SEQ ID NO: 532678 - DNA, 201 bp, Homo sapiens
atttagcatgtataagcattctagaagctctgagaagttgcacagtgaagaaacccattaattttttaagtccaaaatttctcataatcatttgatcccartgctttttttttccagcataaactaacagcatttaaggaaacagtgatctgtaaaacactttggtaaataaaatactagtttataacttaaatgaatttc

SEQ ID NO: 532679 - DNA, 201 bp, Homo sapiens
gcatgatctaggctcactgtaaactctgcctccccagttcaagcgattctcctgcctcagccttccaagtagctgggattacaggcatgcgccaccatgcrtggctaatttttgtatttttagtagagacaggtttttaccatgttggccagattggtctcgaactcctgacctcaggtgatccgcccgcctcagcctccc

SEQ ID NO: 532680 - DNA, 201 bp, Homo sapiens
tgggatctcactgtgttgcccaggctggtctcaaactcctgggctcaagcgatcctcccacctcagcttcccaaagtgctgagaatatcataaggcagatraaagcatcatataatatctgtgatatttcagtgatttcacatttgaagagcataagaacccttttcccccaaatgaaaaggggggaacccttttccccca

SEQ ID NO: 532681 - DNA, 201 bp, Homo sapiens
gttacttcagcatttttaaaaattctatcttgattgatttatggttttttgttttcttttcttttttagagtgaagtgtgaaaacctcacttccattcacyttgtccacttttacgtttcattgcttaggtatcggatggtgttataaattttgtttcaatcatgaaatacaatttataaaactcacaaaggaaataacat

SEQ ID NO: 532682 - DNA, 201 bp, Homo sapiens
gcttctcatattcagaggcgggtacagtcattagggggtgcttttatagaacatttcagtttccattattcttctgactgggtgttgaaaagcagttattrcaatagttttttttttttttattttgacttcctgatgcatctgcagatgtgcactgaacttaatactgtagtcacaatggtgactttacatcattcaggg

SEQ ID NO: 532683 - DNA, 201 bp, Homo sapiens
tcctgggttcaagtgattctcctgcttcatcctcctgagtagctgggactacaggcacatgccaccacgcacagctaatttttatatttttagtagagacrgggtttcaccatgttggccagactggttttgaactcttggcctcaagtgatccacctacgtcagcctcccaaagtgctgggattacaggcatgagccacc

SEQ ID NO: 532684 - DNA, 201 bp, Homo sapiens
ctttcagtgttttcttttttagctttggttttcaatagtttccctatcatgtgcatagaggtagttttctttatattaaccatgctttggattcactgagkttcttggatataaaagttgatatttttaccaaatttaaatcatttctcaaatactgttatctgttccattctctcttcttctgtgacaccaattacacat

SEQ ID NO: 532685 - DNA, 201 bp, Homo sapiens
ctcagttggaaatgcagaaatcactcaccttctgcattggtctcactgggagctgcagaccagagctgttcctatttggccatcttgctgagttgtcctcytgactccctttagtatagatctttcggtggtcaactctctctggttttttgtttgtttggttttagtttttttgggacagagccttgggctgtctcccag

SEQ ID NO: 532686 - DNA, 201 bp, Homo sapiens
cgggcatgcaccaccacgcctagctaatttttgtatttttaatagagacagggtttcaccatgttggccaggatggtctcaatctcctgaactcatgatcygcctgcctcagcctcccaaagtgctgggattacaggtgtgagccaccatgcctggccctggctacatattttatataatgtccctcaatttgggtttgtt

SEQ ID NO: 532687 - DNA, 201 bp, Homo sapiens
gtcttctcagggacattgcttctttttttccccctctgattactatatcttcaacctttcttctatgctaaattctttccatcaacacttaaacatgcttmattgtttccattatttaaaaatcccatctctgtttcttcatctccctttaggtattgccattttcaactttccctcacgactgcattagcgcacaggcta

SEQ ID NO: 532688 - DNA, 201 bp, Homo sapiens
cctcctttcattctctttaatgcagtaggcttactagaggaaatgaagacattaagtaggaactccctcatctttcagtatggtatctacaaatctacctygatctgtacccatcttctctcttcatcttcctgctaaaacagagcaaagatccatctttctgttaaaggccagttcttccacacatgctctgtgttccat

SEQ ID NO: 532689 - DNA, 201 bp, Homo sapiens
ctgcctcagcctcccgtgtagctgggactacgggcatgcaccaccacgcctagctaatttttgtatttttaatagagacagggtttcaccatgttggccasgatggtctcaatctcctgaactcatgatccgcctgcctcagcctcccaaagtgctgggattacaggtgtgagccaccatgcctggccctggctacatatt

SEQ ID NO: 532690 - DNA, 201 bp, Homo sapiens
ttttagtttctaagggcctgccttggggagaaaaaggatcaggtgaaaggaaagcagaaggtcagagagagagattgttttctgaggcctgtttctgaggsctaaagcacccaacattttaacaaaagactgtaactaggtctgtgggagttaagagccagaaaccgtggacaaaaatctatgtctatatctatatcactg

SEQ ID NO: 532691 - DNA, 201 bp, Homo sapiens
ctggtgggagtttctgataaacaactcaagaacatatgttaagatgttatcttttagtttccatgggacatcagaataccttgtgactctggcttgcttcrgaaactgtttttactaccttcttgcttatcaggttgctcatttacttttcaaggctagctgggtgcctggactttcccttgaagggactcaaaatggttc

SEQ ID NO: 532692 - DNA, 201 bp, Homo sapiens
tttgtttcaagatttagagctccttttagtatttcttgtagagctggtctagtagtgacaaattctctcagtatttgctcatccgaaaaaaaacttttttyctccttcatttatgaaacttagttttgctggatacaaaattcttggctgacaattattctgttgaaggaggctaaagataggaccctaatcctttctggc

SEQ ID NO: 532693 - DNA, 201 bp, Homo sapiens
tagcattaggagaaatacctaatgtagatgacaggttgatgggtgcaacaaaccaccatggcacgtgtatacctatgtaaccaacctgcacgttctgcacrtgtatctcaaaatttaaagtataattaaaaaaagaaaagacatgatccaatatagtaaagcatgaatacaggtgacaacatactcttcagtatcaatagg

SEQ ID NO: 532694 - DNA, 201 bp, Homo sapiens
gactattttaaagattgaaacaggatcctggacaagctgagcaggaaaggtgctgctgggcccactgagggctgacaccattaacagcttcagccactacstgggcttccccccaagttctgtgcccacaagagcagaaggtatggaagacagcatttcaaacaggagaaactgaattatagcgcggtagtgccatacttt

SEQ ID NO: 532695 - DNA, 201 bp, Homo sapiens
acaaggaacttaaacttacaagaaaaaaacaaccccatcaaaaagtgggcgaagtatataaacagacacgtctcaaaaaacagacactgtcttcaaaagaygacattattgcggccaacaaacacatgaaaaaaagctcatcatcactagtcattagagaaatgcaaattaaaaccacaacgagataccaccatctcatgc

SEQ ID NO: 532696 - DNA, 201 bp, Homo sapiens
agaagcaaatgcagagagattttgtcaccaccaggcctggcttacaagagttcctgaaggaggcactaactatggaaaggaaaaactggttgcagccactrcaaaaacataccaaattgtaaagaccatcgacactgtgaagaaactgcatcaacgaataggcaaaataaccaggtagcatcacaatgacaggatcaaatt

SEQ ID NO: 532697 - DNA, 201 bp, Homo sapiens
aagaatgcaaagaaattaattggaaaacatgtaggtcccaaagtattggttttgggaaaacatctggcctcttcagtactccagtggggagaagggccacygtaggcagttttagtcaagtcttgggcattgaagtctgttaaagtaatcgtctcagctgaagaggaagcaaatagcaaaggccccagggagacagatata

SEQ ID NO: 532698 - DNA, 201 bp, Homo sapiens
attacttaaaaaatgaaaaatccaaagcaaaatatcaaagtatttttctcaaaatctccatatcattgttattaccattaaatagctatgtgctttttttwtaaaaaaaggagttcatcttaagagaactggacagacacaaatataaagttaaaaatcacattttgacctaatttgtttcccagattcctttcaagtgct

SEQ ID NO: 532699 - DNA, 201 bp, Homo sapiens
ttacttaaaaaatgaaaaatccaaagcaaaatatcaaagtatttttctcaaaatctccatatcattgttattaccattaaatagctatgtgcttttttttwaaaaaaaggagttcatcttaagagaactggacagacacaaatataaagttaaaaatcacattttgacctaatttgtttcccagattcctttcaagtgctg

SEQ ID NO: 532700 - DNA, 201 bp, Homo sapiens
actactgcttttgctgtatctcggaggctttaataactgtgtcactattattcatttcaaagaattttttaatttccatcttgatttcattgttaactcaraaataattcaggagaaaattgtttaattttcattacttgtataattctgagaggtccttttggagttgatttctagtttttctccactatggtctgaaaa

SEQ ID NO: 532701 - DNA, 201 bp, Homo sapiens
ggcaatttttaaaattactgagtcaatctcattgcttgttattggtttgttcaggatttctgtttcttcctaattgaagatggggggctgtgtatttccargaatttatccatttcctctagatttcctactttgtgtgcatagaggtgttcacagtagtctcaaatgatcttttgtatatctgtgatgtctttttgtatt

SEQ ID NO: 532702 - DNA, 201 bp, Homo sapiens
ctttatcaaagtggttttgacttttttctataaaaaatgatttattttcttaaaggggcaaaaaatacattttttcttaagaaaaaaaaagagccctgcayaatggctttctcagggtgacaaaattagacagtgatagagccaatactcttaccaaggcggcctaactcctagactagtgctcctatctcttgtccacgc

SEQ ID NO: 532703 - DNA, 201 bp, Homo sapiens
cattcagactcattaacagagagaatactggggtcactcgccccttaaccttgcccaccacctgggcatgatctcagggggtcttctcacccttgaacctraggatacctgagaatgggcctctagggttcttgtccttactcttcaagaaaaccatgtctctccagctgggtgcagtggctcatgcctgtaatcccagaa

SEQ ID NO: 532704 - DNA, 201 bp, Homo sapiens
ttttaggcaagttttaagtttaaatactctggacttctgtttcctattttttaaatttgtggcaatacttaggttcttacaggagttaaataaattaatakatttgaaaggactctgtaaaacctttgattatgttaagggacacatagtctaaagagtcctgacttagatcacaaaatgataaggcccttgagcatgtaa

SEQ ID NO: 532705 - DNA, 201 bp, Homo sapiens
cttttgtcacttgccaacactttagatcattggacgtttccatttgcatgtcctgttttcactataacttcagactctgcaacacaccgacatgcaaatgsaagcagcccatcaccacagtctgtctctcttctggcctttttatgtgcttgctagtgctgctaccattgattgtatgcattccccctttgatagcctttt

SEQ ID NO: 532706 - DNA, 201 bp, Homo sapiens
cctgggtgacagaacaagaccctgtctctaaaaaagaaagaaagaaaaaaatacttacaccaaatgtaatttattgaggattccatgtatgtctgaagtcyctggttccttcaaatcaggatgctgctccaacagagtctttactgaactggcaagactacgagggtcgaactcctcttcactttgcagttgctgatggga

SEQ ID NO: 532707 - DNA, 201 bp, Homo sapiens
caaatgaaatgacaagtccagataaatgatgtacactattaatgaagctcagaaaaatgaaacattaaaaagtaagaataaccaaataccaggtatttgasaattaagattcttaactgttatgatctaatatagcaactgtaaataagaatttttatcatttatttatttatttatttttaatttttttttttgagacag

SEQ ID NO: 532708 - DNA, 201 bp, Homo sapiens
tgtgaataaaactgaccatagccagagaacagccctccatcttgcagcccagaaggtgagaagtaaaatttccttgaagagtaaatgttttgtgtgatgtytgctagttgattagtggaactatgcaatggacagataataaagaagtctcaaatgcatgactcataggttttatatattttctctaaaagctgtctttaa

SEQ ID NO: 532709 - DNA, 201 bp, Homo sapiens
gccaggctgggcacagtgactcacaccataatcccagcattttgggaggctgaggtaggagaattgcttgagcctaggaattcaagaccagcctgagaaayatggcaataccccatctctacaaaaaacacaaaaattagccaggtgtggtgggatgtgcctgtagtcccagctactgggaagctgaggcaggattgcttg

SEQ ID NO: 532710 - DNA, 201 bp, Homo sapiens
atgtattttgcagatgagaaaattttagtcctgcttctgacttctggctaacataacgtcagtgaaatcctgattgactgggcccaggagtacatttaggscagcggaatgtgttatatattccagagatttctcttgatgaagaggatattatcagtcagtagacaaagagatgccaccatgtagcatgaaaacataagg

SEQ ID NO: 532711 - DNA, 201 bp, Homo sapiens
tccccattcctcacccactctaaacccacctccaacagacttatcttagtaagatgcagctcatacctttaccactctaaagccccctttcgtcaccaaakacacagtgcttccacattgtgttactgactttctggcacaaatgcctctatctatctctgctgatgccagttctgctacgtagaatgcccttctctgcct

SEQ ID NO: 532712 - DNA, 201 bp, Homo sapiens
ccaacagagtctttactgaactggcaagactacgagggtcgaactcctcttcactttgcagttgctgatgggaatgtgaccgtggttgatgtcttgacctyatatgaaagctgcaatataacgtcttatgataacttatttcgaaccccactgcactgggcagctttattaggtacgtgactcaaaggatcaacagtaaaa

SEQ ID NO: 532713 - DNA, 201 bp, Homo sapiens
gctactaccaggtttattcattttttaatattttctacagctcttcacttgtggagatcacatcctccagaatgcactacattgtcttcatcgctgccttrtcatgcctgcccacttgttttctgagatttgaaatcactgcctagatgttataaaatataaatataataaaagattgtggaaaggagaatatagggatgg

SEQ ID NO: 532714 - DNA, 201 bp, Homo sapiens
ctgtgcagtttgctaaactgtattaccttacacaagtttcttaatcttagtttcttcatatgtaagatgaggataattataccttttcttccaggattgtkgtaaagattagagaaaatttatgacaagtgcctgctgtataccttagcatagagcaggtactcaagaaatagaatgtgctctcattactactagtgttga

SEQ ID NO: 532715 - DNA, 201 bp, Homo sapiens
tcaagctcctggtctcaagtgatcctcctgactcagcctcctaaagtgctgggattgcaggcatgaacaaggtaaaagtttcaagtttacaggcgtaagcmacagcacctagccttggatacactacagattgtttaaccatttgcctgttggtgaacatttgggttgttttctgttttgggctattactaatgaagatgg

SEQ ID NO: 532716 - DNA, 201 bp, Homo sapiens
cttctacatgggtatgcatagtgaaacccttcgtttcatcaaattataataatactatcaggccggacacagtagctcacacctgtaatcccagcactttrggaggcagagatgggcggatcacctaaggtctggagttcgagaacagcctggccaacatggtggaaaccccgtttctactaaaaatacaaaaattagccg

SEQ ID NO: 532717 - DNA, 201 bp, Homo sapiens
aagtgaaatcatataaaactattctttttgcctagcttctttcactcagtataattattttgaaattcattcatgttattattgcatataccaatgatttrtatattatcattgttcagtattattctattgtatggatatattacaaattgttctcaagctcctggtctcaagtgatcctcctgactcagcctcctaaag

SEQ ID NO: 532718 - DNA, 201 bp, Homo sapiens
tagctcacacctgtaatcccagcactttgggaggcagagatgggcggatcacctaaggtctggagttcgagaacagcctggccaacatggtggaaaccccrtttctactaaaaatacaaaaattagccgggcgaggtggctggcgcctgtagtctcagctacttgggaagctgaggcagaagaatcacttgaacctaggag

SEQ ID NO: 532719 - DNA, 201 bp, Homo sapiens
agccctgtaaacattcatcattaagtaaaaacatactcagcaaagaaatgtttgcaaattagtaaaagaaaacaaagcaaaaaatcacaaacttttacctmagtaactcaacaaatagtcttaaaagtagaaagcagtgtgtgatgctgtggaaggagtgctgtgatttaaccctggattcttcctttatctgccaccaat

SEQ ID NO: 532720 - DNA, 201 bp, Homo sapiens
cttctttctataaaatactgagaatcaacattttatacatttttgatcagatcacagcctccagcactttttgtctgaaactcttttacctccattcaatyaaaagtttctatgatctttctaaagtttatgtgagtctgagttcagaataaagaggcaatttaaaatgctggaatattaacccccaataaaattgtcagg

SEQ ID NO: 532721 - DNA, 201 bp, Homo sapiens
atacttctgagttttctaactctcactcaaacgatgacctataaagtttccaagcttgattgaagatgattattttccattttgaggatgttgaatgggaragttaggttatgtttatgaagtgttatggacactacaactaatttgtaaggacagaggattgttatcttcgatggaaattgtagttctgtcattaataaa

SEQ ID NO: 532722 - DNA, 201 bp, Homo sapiens
ggtttgccaggatgtcactccaaaggttttatttcttccaagtattatggcaaagattagcatgtttctaccaaatgaatggttgcatttggtttaaaacyctggttgctccttagacatgattatggggactcttctgatcatttatctttttgtaaaaaaaaaaaaacctacactttaaaactatccatatttagtagt

SEQ ID NO: 532723 - DNA, 201 bp, Homo sapiens
caagatttttttttcctcttttctgttaatatggcaaattacattgactgattttttttttagatgttaaacaacccttgcatttctggagtaagccccayatatattatgtacttttatatactgatgtattttacctgctaatattttaagatttttgcgtctatgtttatgagagagattggcctataattttccttt

SEQ ID NO: 532724 - DNA, 201 bp, Homo sapiens
agcagattttaaaatctggattatttccaaaaggtatatcccttcaagagtgctggcttcatgtagagtcttggttccagttaactttcttcctgcaaggmctcattttctgttcttatgtagatgttaaagcacagccagatatttaataagaccatctgttgcccactccaccaccattacctgcctagacagtcactg

SEQ ID NO: 532725 - DNA, 201 bp, Homo sapiens
cgagttcaagcgattctcctgcctcagcctcccaagtagctgggactacacgcgtgcgccaccatgcccagctaattttcgtatttttagtagagacgagrtttcaccatggtggtcaggctggtctcaaactcctgacctcatgattcctgcctcggcctcccaaagtgctgggattacaggcatgagccaccgtgcctg

SEQ ID NO: 532726 - DNA, 201 bp, Homo sapiens
gcatctaccaagctcaaaatacatagtaggcactgggagtgagggtgaaggctgtcctaaaagcctgaaacagactcccaatatagtagagacaaatgcckctaggggatgattatgggaggacttgaggggtcttattgctacaaatgttcacgtctcataatctctttcatcctgaaagcctcactagagcctaaatct

SEQ ID NO: 532727 - DNA, 201 bp, Homo sapiens
caagggccttacacccaagataaggagaatgggcgcatatacttaaagagggcataatcttacaagccagtgttagtatgctgagtgtcccatacaagcargtctggccatagtgcttctcatattcagaggcgggtacagtcattagggggtgcttttatagaacatttcagtttccattattcttctgactgggtgttg

SEQ ID NO: 532728 - DNA, 201 bp, Homo sapiens
tgagcaaacctgcctatcctttgccaccaaatgaaacattatctttattatcctggttagcaaacaaatctgtcctctaacctgaagggaggtaccatttytagcttccaaagcaactagttatgcagacgtctttgaaaagatagtccaaattaccagatatgcagaaacatgatggacaattgcttccaaacaagtaca

SEQ ID NO: 532729 - DNA, 201 bp, Homo sapiens
atgatattttttggtcattacctacttagctatgtcatattttaatatcaccaaagaaaatatcttaaaatgaaattcttgaattgcgcttgacctttccrgttgacagtcagcttaaattatatagtatctcccattatctcacaacagatgtcatctcttaggaatgcttcctttcattgaagacactgtgacaatagg

SEQ ID NO: 532730 - DNA, 201 bp, Homo sapiens
taaactgcgattacctcaggtttaagaggtgcaggctgatcactgttttcttctttatactttatttttgacattcctttaatggacatgttattactttyataacaaaaattttaagttttttttctttttttctaactttatgttttgatataatctcaaatttacagaaaagtttcaagaacagtacaaataattttc

SEQ ID NO: 532731 - DNA, 201 bp, Homo sapiens
agacaattcaattttacaataaagactttaactttcaaaagtatttctctatgaaagccttacagcagatcttaaatttctttttttttctttttgagacrgagtctcactctgtcacccaggctggagtgcagtggcatgatcttggctcactgcaacctctgcctcccaggttcaagcaagtctcctgcctcagcctcc

SEQ ID NO: 532732 - DNA, 201 bp, Homo sapiens
ggaaaactatttataataataaaaacatctactgagcatttgctttgttcactgttctaagaacttttacaaatatcatttgtctcatttcatatgcatartaacttcaggtaccattattacccctgttttatatatgagaaaatagaggcacaggaggataatttatttaatctgtgaaaatgtttgatgatacttctg

SEQ ID NO: 532733 - DNA, 201 bp, Homo sapiens
gcaacatagggagaccttgtctctacaaaaattttttttaaaaattagcctaaaagttcaaggttacaatgagctatgattgcaccactgcattccagccyaggtgacagagtgagaccctgtttctaaaaataaaaacaaaaaagaaagctcatttttaaatgctgctaatggttagtttgaagtggcatccccagcttc

SEQ ID NO: 532734 - DNA, 201 bp, Homo sapiens
taaaaattagcctaaaagttcaaggttacaatgagctatgattgcaccactgcattccagcccaggtgacagagtgagaccctgtttctaaaaataaaaayaaaaaagaaagctcatttttaaatgctgctaatggttagtttgaagtggcatccccagcttctttgtatgacccaattaattttttaaataatggaagaa

SEQ ID NO: 532735 - DNA, 201 bp, Homo sapiens
tatttttggttagtttcctatatataaaaggctctccaatgaaggcattaattttcataataatctaaataaaataggctatattagtcaggaagagcacmtgaaaaatctggcattggataaggaagcctcagagtcaagaatacctttccataatttcctctcatagagaaaagcctttttttgacagtaacattttct

SEQ ID NO: 532736 - DNA, 201 bp, Homo sapiens
acagtgaagaaacccattaattttttaagtccaaaatttctcataatcatttgatcccagtgctttttttttccagcataaactaacagcatttaaggaavcagtgatctgtaaaacactttggtaaataaaatactagtttataacttaaatgaatttcctcatttcacaattgaggaaactgaggcccagaaagttgtt

SEQ ID NO: 532737 - DNA, 201 bp, Homo sapiens
gaaaaaaaaacaaatagccaagttcagaaatgagttacaacacaagaaggctatttacaaaagaaacaaatatccagcaaacatataaaaacattccaccycaattcgggaaatgcacattaaaacacagctgtaggccaggcacagtggtgcacgcctgtagccccaactacttgagaggctgaggtggtaggatcactt

SEQ ID NO: 532738 - DNA, 201 bp, Homo sapiens
ctgcctcccaaagtgctgggattacaggtgtgagcactgcacccagcctaagtttcattatccatcttattattctattgtaaaagtttttatttattctsgaataaaaggccttatcaaatatgtgttttgcaaatatttcctcccaatttgtggctttttaaaaatttttcttaattgtgttttcaaacacaatttctt

SEQ ID NO: 532739 - DNA, 201 bp, Homo sapiens
tggggggtcttagtcataaatttttgcctagactattgtctggaagagttttccctaggttttcttcaagaatttttatggtttcaggtcttagatttcartcattcatccatcttgagttgatttttgtatatggtgagagatagggatccagtttcttttttctacatgtgcgtatccagttttcccagcatcttttat

SEQ ID NO: 532740 - DNA, 201 bp, Homo sapiens
gaattatctttttgatatgctgttggattcagtttgctggtattttgctgagggtttttgcatccatgttcatcagggctattggtctgtagtttctttcttttttttttttttttgtccgttagatcctttcctggtcttggtatcagggtgatactggctttgtagaatgagatagggaggattacctctttctcaatc

SEQ ID NO: 532741 - DNA, 201 bp, Homo sapiens
atattcagaggcgggtacagtcattagggggtgcttttatagaacatttcagtttccattattcttctgactgggtgttgaaaagcagttattacaatagttttttttttttttattttgacttcctgatgcatctgcagatgtgcactgaacttaatactgtagtcacaatggtgactttacatcattcagggagtcatt

SEQ ID NO: 532742 - DNA, 201 bp, Homo sapiens
tttcttataaaaagaaatacaaattataaaagctaaaatgaaccttgaaaaacatttactgcagcatttcccaaagcttcctttttttttttttttttttkaaacagagtctcactctatcatctaggctggagtgcagtggcatgatctaggctcactgtaaactctgcctccccagttcaagcgattctcctgcctcag

SEQ ID NO: 532743 - DNA, 201 bp, Homo sapiens
gccaggttcctctgctgtgacgtcactattttttccattgtaactataaataataagtatcttgtgggagctaatttgaaactatataaatatcctggaaccgtccaacccactctattgttagcatcgtttgaccactcacacctgagttggttgttatgatgatggctgccacatgaaagagttatttatttattcatt

SEQ ID NO: 532744 - DNA, 201 bp, Homo sapiens
taatcccatttatgagctccaccctcgtgatgtaatcatcttccaaatgtcccatatcctaataccaagacattggcgttagaatttcaacacatgaattgggggggtttgggggttggggggacatatattcagtctgtagcactcctttttaccaatatgatcaactttaggctccttatcataacatattagactatc

SEQ ID NO: 532745 - DNA, 201 bp, Homo sapiens
cttatcataacatattagactatccattttataacccctgctcacctctctgatcttacttttcacttcctcttacagtgcatttcttttcttttttcttyttttttaattagagaaagggtctcactatgtggctcaggctggtttctaactcctgggctcgagtgatctgcccaccttggcctcccaaagtgctgggat

SEQ ID NO: 532746 - DNA, 201 bp, Homo sapiens
tttccttcctaggggctgaagttgttgctttccttctttggccacatagttaatgtgtcccattccagtagatataacttcgccttttctccaatcatccyctacttgtgcctgtagcttatagaagggtaagtacatatgggacaaatttagaaacctattatgtcttccattttggcctatatggaccactatagaatg

SEQ ID NO: 532747 - DNA, 201 bp, Homo sapiens
ctctgttccattgatactagaaatattctcctgattttagcacttaaagttctctgtcccttctgctcattcccaaagattgaatttgcatacaggacaattttttttttttttttgagacagggtcttctctgatacccaggccggggtgcaggggcacaatcatggcttactgcagttttgacctcctgggctgaagtg

SEQ ID NO: 532748 - DNA, 201 bp, Homo sapiens
gtgtaaatatgccaagcactgtgtctatagctcagtagttacccccaccaacatatactagtttccttcttctccttcccttttcctctaatttccaatcraaatgactgtctgattgaatatctttaaaggtcatgatgaattactctgtaatatttgaagtgttatgttcagaaaggtcaaactttatttttcggtatg

SEQ ID NO: 532749 - DNA, 201 bp, Homo sapiens
ttcttaaacactcttgtgatagggatctcactatcttcctatgcggctgatacttattttttattttattttattttttttgagacagggtctccctctgtgcccaggctggagtgcagtggcatgatcttggctcactgcaacctccatccacctcccaaattcaagcaattctcccacctcagcctcctgagtagctag

SEQ ID NO: 532750 - DNA, 201 bp, Homo sapiens
ataatcctggatatgacagtagttcttctgacatgactgttagactcagacatgactgaagtgtctcacaacaccctcttcctccatattttctgccagtmcttaactcaaattgtcagcaaaataaagacgtaaggagctgtgctttaccataattaagaaagtattaatatgttctctcaagggcagaatttgaaccaa

SEQ ID NO: 532751 - DNA, 201 bp, Homo sapiens
agtccactacaggtaggcagtggtcaacttgaaattctgtccaagagtaggagggttccaatcaccagcaagaatagagcttaagattgagtggctattcsacccagtgagtcagattattagttcaatagagtgaattggctgcatgggggaaaatatgaaagcccagtgataatcactagatttgaaatcactagatac

SEQ ID NO: 532752 - DNA, 201 bp, Homo sapiens
taattatatttattccttttcactatccactccctgcccttacaattttgcaatcaggattttttaagattttctgtgagcttaatttcttaataaacaaygctcttgtatgcctcaatttcttcatctataaaatggaataatacatcctatcttctatgtagggatgatgagtccttagatataaagcattctgtttgt

SEQ ID NO: 532753 - DNA, 201 bp, Homo sapiens
ctcctgagtagttgggactacagctccgcaccaccacacctggctaatttttgtatttttagtagatacagcattccaccatgttggccaggctagtctcraactcctaacctcaagtgatctgccctccttggcctcccaaaatgctgggattacaggcgtgagccaccacacctggccacatcaattgattttaaaatg

SEQ ID NO: 532754 - DNA, 201 bp, Homo sapiens
ttgacacctttttaatctagataatcagtatgtaatggttatattattttctgtactttttataattaaatatgaaaataattttttaaagatttagactktgtaccttttccatgatttatcacttgtgctgagagataatgtagaggtcttatttcgaaaattcctcagttaattcctgtgccaggctgggcacagtga

SEQ ID NO: 532755 - DNA, 201 bp, Homo sapiens
actaaagctactttggaagagaaagagtggagatacatagattgctattatagttcaggccaatagagaggaattgggtttaagagatacattatggaggyagaagtgttcattcaacaagcgtttgttaaatatctactatgtaatcatgattatacaactagagagaatatgaaaaaaatgaattacgtatgttagctt

SEQ ID NO: 532756 - DNA, 201 bp, Homo sapiens
ctacagctccgcaccaccacacctggctaatttttgtatttttagtagatacagcattccaccatgttggccaggctagtctcaaactcctaacctcaagwgatctgccctccttggcctcccaaaatgctgggattacaggcgtgagccaccacacctggccacatcaattgattttaaaatgtgaaaccaaccttgcac

SEQ ID NO: 532757 - DNA, 201 bp, Homo sapiens
aaccagggtctggatataacagattgagtgactaaactgtattatgtaaacctgtctgagcatctaccaagctcaaaatacatagtaggcactgggagtgrgggtgaaggctgtcctaaaagcctgaaacagactcccaatatagtagagacaaatgcctctaggggatgattatgggaggacttgaggggtcttattgct

SEQ ID NO: 532758 - DNA, 201 bp, Homo sapiens
cagaataaccacagtagacaaaagagggtggaataggaggcgtatagcagccattagtccgtagcaattctgaaaaccagctggtcacattttaccagggyccctactctgaggtaaatattccttgattagggtctcatattactcctggtggcttcctattccattgttctccatgtctcttggctctgctacctgaat

SEQ ID NO: 532759 - DNA, 201 bp, Homo sapiens
gttgtgcttcctgttaggcctgtggaactgtgagtcgattaaacctcttttctttataaattacccagtctcaggtagttctttatagcagtgtaggaacrgactaatacatccctatctcagtaccccaaaatctcatcctgattatctcatcacacttgaagtctaggattttaagacatgaactagatgtggttcagg

SEQ ID NO: 532760 - DNA, 201 bp, Homo sapiens
tctcctatacttccctcttataaagatcatcactttttactgttattactggtttacttgtcattttttccaccaaactgcaagatctgtaagagtagggytgcttccattatctactgctgtataacaaaccacacaaaaacaaagtgactttgaacaatgacaatttaatttttatgattctattttggttgggaagtt

SEQ ID NO: 532761 - DNA, 201 bp, Homo sapiens
tataatcccaacactttgggaggctggggcaggtggattacttgaggccaggagttcaagaccagcctggccaacttggcgaaactccatctctactaaamatatacaaattagccaggcatcgtggtgcatgcaactcaggaggctgaatcacaagaattgcttgaacttgagaggcggaagttgcagtgaaccgagatt

SEQ ID NO: 532762 - DNA, 201 bp, Homo sapiens
cacaacgtgctagaatctctgggacacagctaaagcagtgtttagagggaaatttatagcactaaatgcccacaggagaaagtgggaaagatctaaaatcracaccctaacatcacaattaaaagaactagagaagcaagagcaaacaaattcagaagacaagaaataactaagatcagagcagaactaaaggagatagag

SEQ ID NO: 532763 - DNA, 201 bp, Homo sapiens
tgtcttcgtattattatgaaaatagccctgaccttatggactttctcagaaaggggctctggaacttcatgattactgaattcagggcttggacagttcartctgtttctttgaaccttaacttccttagctataaagtgagggtatactttctacaccacaaggtagctatggatagaaataattcatgtagtgtacttg

SEQ ID NO: 532764 - DNA, 201 bp, Homo sapiens
ccaatatcattctcttaaaacagccctgctcatcggtgctgataaaaagctcagcacttcctctgccttcctggagcaaggctattaaatctattagcagmacttcagccacccagatgcttccaccttcttctgaaaagcagccttgtcccagagagatcacactgaaatggcacctgcttgcatccgtatgaatctcag

SEQ ID NO: 532765 - DNA, 201 bp, Homo sapiens
cttccatggtttcagatgagaaatccactgtcattcaaattggtgtttctcagtaacagtcctaggtaatatgtcatttctctctggctgctttcaagatsttaaaatttatcattagctttcagaagtttaatatgatgtgtcttggcatggctttttgcagtttatcctatttagagtttacttgtgtgtcagggatcc

SEQ ID NO: 532766 - DNA, 201 bp, Homo sapiens
aaaccgtgaggcactgtgccatgagcaacggtgcattccggtccagatactacgcttttcccacaatctttgcaacccacagatcaggagattcccttggrtgcctacaccaccagggccctgggtttcaagcaaaaaaccgggcggccatttgggcagacaccaagctacctgtgggagtttttcttcataccccagtgg

SEQ ID NO: 532767 - DNA, 201 bp, Homo sapiens
ataaccttggctgctaaggacaacatgatagaagctgtctctggctatagataagtagatataatactagtttgaatatctttaggatttagaacctagcstcaagaataggaagtaaaagtacaaattgatgtggtgaaggtatagtcccattttctgggattgggggtctttgcttatttttatttttatttatttatt

SEQ ID NO: 532768 - DNA, 201 bp, Homo sapiens
tttttcctcccctttttcaataataacatgagtgtgcatccagcttgtccccaaaacctgccttgctctgaagcatccaactgtaaagactctttgccaaygtctgtgatttgtgggcccaaaacaaactatccatccttgcatatatcttctgctgagatgcctcacacagagtctggacagctctaattctttcacgag

SEQ ID NO: 532769 - DNA, 201 bp, Homo sapiens
ggcatggtggtgcatgcctataatcccagctactcaggaggctgagacaggagaatcgcttgaacccgggaggcagaggttgcggtgagccaagatcatgyccttgcactccagcctgggagacagagtgagacttcatctcaaaaaagaagaaaaatgaaaaacagaagagattttccagaacagagaaattcatataag

SEQ ID NO: 532770 - DNA, 201 bp, Homo sapiens
aaaggaatgcacaaagactccaagaaatataggactatgtgaaaagaccaaatctatgtttgattggtgtacctgaaagtgacggggagaatggaaccaarttggaaaacactcttcaggatattatccgggagaactttccccacctagcaagagaccaacattcaaattcaggaaatactgagaacaccactaggatac

SEQ ID NO: 532771 - DNA, 201 bp, Homo sapiens
aatcaaaatggagttgtttctgtttaaaacaacaacaacaaaacctgacagagccagggaaggccatgaagagaggattcttgtgcttgtaagcctgattaaaaaaaaaaaaaatcacagactgtgcaaaaaccacagccttgcacaaaggccatcataaccttacacaaaaattacttcttcaaagacatttgcccagca

SEQ ID NO: 532772 - DNA, 201 bp, Homo sapiens
aggttagaggaattgctaactagaataaccagtttagagaagaacataaataacctgatggagctaaaaaaacacagcaggagaactttgtgaagcacacrcaagtatcaatagctgaatcaatcaaatcgaagaaagaatatcagagactgaagatcaacttaatgaaataaagtgtgaagacaagattagagaaaaaaa

SEQ ID NO: 532773 - DNA, 201 bp, Homo sapiens
agtaaaatacatgtaaagtataaataataatgaaacaacaaatactcatatactcaatatcaagtttaagaaaaagtatattaccattacctttgaagtcctctgagtggagtacctctcagtctcattctattctctcctttcacagaggcaacaactgtcttcaatcttgtgttatcattcccctgatttccattacca

SEQ ID NO: 532774 - DNA, 201 bp, Homo sapiens
gtaaaatacatgtaaagtataaataataatgaaacaacaaatactcatatactcaatatcaagtttaagaaaaagtatattaccattacctttgaagtcctctgagtggagtacctctcagtctcattctattctctcctttcacagaggcaacaactgtcttcaatcttgtgttatcattcccctgatttccattaccac

SEQ ID NO: 532775 - DNA, 201 bp, Homo sapiens
aggaattatattgcatgtttttgtttttgttttgttttgtttttttgcagtgccctattctttctcgctcaaccttatgctgtttattttattttattttwttttgagacagagtcttgctctgtcacccaggctgtagtacagtggcatgatctcggcttactgcagcctccacctcccaggtttaagcaattctcctgc

SEQ ID NO: 532776 - DNA, 201 bp, Homo sapiens
gtattattttgtatatgcaatgcttagctctgcattttttttgtatctcaaattttccttctaaagttattattttacatcctgaaatatagttcttagattttttttattattatactgtaagttctgggatacaggtgcaaaacgttcaggtttgttacataggtatacatgtgccatggtggtttgctgcacccatca

SEQ ID NO: 532777 - DNA, 201 bp, Homo sapiens
agattttttttattattatactgtaagttctgggatacaggtgcaaaacgttcaggtttgttacataggtatacatgtgccatggtggtttgctgcacccrtcaacctgtcatctacattaggtatttctcctaatgctatccctccccttgccccccaccccccaacaggccccactgtgtgatgttcccctccctgtgt

SEQ ID NO: 532778 - DNA, 201 bp, Homo sapiens
agctccatcaggtcatttatgttcttctataaactggttattctagttagcagttcctgtaatcttttatcaaggttcttagcttccttgcattgggttakaacatgctcctttagcttggaggattttattacccaccttctgaagtcttcttctgtcaattcatcaaactcattctctgtccatttttgttcccttgct

SEQ ID NO: 532779 - DNA, 201 bp, Homo sapiens
gccatttgcatctactgttatcctgaataagatttttcttggccaccaaaactactgatgcaacagtagggagagagaagggaggggagttgctttacttaaaaatctccctccctataccgagacaaccacagcctcaaaaaaaaatattttaagaagacaattcaattttacaataaagactttaactttcaaaagtat

SEQ ID NO: 532780 - DNA, 201 bp, Homo sapiens
ctcatatttatacatggtgtcaacacttaaaatctactctcttagcaattttcaagcacataatacattgttattaactctagtcaccgtgttgtagccartattaaatatatcttgaattttctgcaaattatagatgtgaaaggaagagtcaatgactttgacactaagttttttttttaagcctcattttttaaaatg

SEQ ID NO: 532781 - DNA, 201 bp, Homo sapiens
agagccgagatagtgccattgcactccagcctgggcaacagagtgagactccatctcaaaaaaaaaaaaaagaaaatgagcagtccttaaagattgatagmcaaataaaacaaagacacctgtgtattaagttggtagcttaactgcagagagaattattcaagtgaatttattattttttatttttattttttatatttt

SEQ ID NO: 532782 - DNA, 201 bp, Homo sapiens
catctgctttccatgaatagatcagagatctcacaagcctagattcccatggaaaccaatcaaaaactaaaaggaaaagaaagagtatatattgaatttcratgaaacctacagcttgtttttcattagactcatgctggtttcttttaaactctgggcacagggccagcaaatatttttatggctggtaaaaagggactt

SEQ ID NO: 532783 - DNA, 201 bp, Homo sapiens
tactctagtgcaaagaaaagtaattaaactgtgcagcaacatttaaacagctgaagcataagtaaaatattagcacaggagaagaggcagtagaagaattmgattttatgtttaacacattaaaatgaaaagattttaattaaagctgttatttaaagctacaaaaacattttaaatgaagaatatatattgtaaatcaca

SEQ ID NO: 532784 - DNA, 201 bp, Homo sapiens
gcttctgtctctgtggagtggggtgcaccaccctcccagcatatggatgaatttcttgttcaccttcctataagcctccacatattcagctatcctgtacsccatccttttgggccttttatggagacttcattggataggcatgattaacaaccatgtagaaatgtgattgggccaaaaaggtgtgatctaattgtaata

SEQ ID NO: 532785 - DNA, 201 bp, Homo sapiens
agactcaacaaagagtgaatatagctgaaggagccagggagcagagagtatatgcatcaggtatgaggaagaaaatagattttggaagttatgagaactgyagagagtcagttgagcatactttgtgatttttagggcctttaaaagtattaaggcagcggcagccgctgcatgcagacatgagggttgggttaaaacagt

SEQ ID NO: 532786 - DNA, 201 bp, Homo sapiens
tcaaggtacgctgtttccatgttactgatttacaaaaaggagaaagaatacctctgaaacttttcaggaacacttataccaggtaacactattaggttttyttattttgcagatgcacacacaaacacaacaaacaatccacgccccagtccccttcagctctgtattccccctcagtacatatatagctctaccataact

SEQ ID NO: 532787 - DNA, 201 bp, Homo sapiens
gctacttatgtgtgactttttgaaaatcaccctaccttctgggtctcatctgtaaaatgagtggatctgactcattagctagagctgtcaacggcagcatytgcaactcacaggtgtgttttaatcactggcaaggtactttgcaagtgactttttatatgatcattaaggtttgatgggcttttttaaatgaatagagca

SEQ ID NO: 532788 - DNA, 201 bp, Homo sapiens
aagaggttaaaaacagtctattatgtttctcacatatttacattctgcttctcttttttcattcctgatgttctatttgtttcatgagtgttcatagttgrttgttggagcacttttttgagagttgttttaaaattcttgtcatataattctaatatatctgtgtcatcacagtgtcagtgcctgttgattatcttttct

SEQ ID NO: 532789 - DNA, 201 bp, Homo sapiens
gccagtagttcaaaaccagcctgggcaacaaagtgagaccccccctccccatctctacaaaaaatttaaaaattatccaggtgtggtggggcatgctactygggaggctgaggtgggaggatcgcttgagcctgggagttcaaggctgcggtgagctaagaaggtaccactgcacagtgcactctagcctaggtaaaagac

SEQ ID NO: 532790 - DNA, 201 bp, Homo sapiens
aattaggtccctttacccttctttttgatatagttatcttaaaaatcacctctacataaactgagaaccacatcatacagcaaggttatctttgctttcartcatcgaaacataactctaaaaattaaagaggataagccaggcatgcactgtagccccagctactcaggaggctgaggcagggaggattgctttagccca

SEQ ID NO: 532791 - DNA, 201 bp, Homo sapiens
aagattgatacagcagtactcaaccatctagaaagccttttaaagtagcaatggcttttgaaaatggtgtagtagctcctattggatcagccctccagtarataacatttataaactctgaacaaaatataaaaacaactatctggaggaattgaagagtgaccaagtaggcagaaattgcattgtaatcagcccttggaa

SEQ ID NO: 532792 - DNA, 201 bp, Homo sapiens
ttcctacttcctcatacctcttgacaaaattggtacattttaccttctttatgattttctccatgcatctctttcttttctctgatgtatatcaagtatawcattggcaaaagcattggactgatataaatcagaagacctagattcatgacttaggctctgcttctttctaacggtgattttaggcaagttttaagttta

SEQ ID NO: 532793 - DNA, 201 bp, Homo sapiens
taagtaaagtgggatcagaccatgaagtgtctgtcctacatggaggacaataaataaatttgaatatttactgaagagttagatttaaaacttgaatattrtttaaattggactaaatgaaagggatttgcaactaactcaccactgcccttctgatcaccaaattcatatacctttcctacttcctcatacctcttgaca

SEQ ID NO: 532794 - DNA, 201 bp, Homo sapiens
aatgacattttgtttaacttcagaccacatatacaatggtggtcccatgagccgtcacacccagcctgttttttatctttcatagaatatttttactgtaytttttctatgtttagatacgtttagacacatgaatacttaccattgtgttatatttacctagagtattcaatatagtaatatactgtacaggtttgtagt

SEQ ID NO: 532795 - DNA, 201 bp, Homo sapiens
aaatgtgtgtacaaaagacactagatggatgaacctggttatctcattgggcccttcaaaccctgaggtccatactatttattaccattacaaatgtttcwttaagttcttcctgatcagtgctggtttgaaaattctatgattttactcacttgtgtaatccacagtgaaggtcagcaaaattctcaatactactgacta

SEQ ID NO: 532796 - DNA, 201 bp, Homo sapiens
ttcttccttagcaagtgacaggattgcatttaagtgatatcaatggtatcatgtccaactcagtcccaaaatgtttttgtatatccctacatacttacgcygtactcctttacatttatggtataatgccatcatttggagtatgaatggagaaggtatttgagaaaaatgagttagctcgttctctaatctatggagctc

SEQ ID NO: 532797 - DNA, 201 bp, Homo sapiens
tcacctcacacattgtattctccctactctgctttatgtcttttcttagcacttaacactatctaaaatactatatattttacttatttatcttgcttatygtcttttgccccactataatataaactccctgaagttggggttttatttttggtctgtttattcactaatttatccccattgcctagaactagtagttgg

SEQ ID NO: 532798 - DNA, 201 bp, Homo sapiens
ccacctcacctcacacattgtattctccctactctgctttatgtcttttcttagcacttaacactatctaaaatactatatattttacttatttatcttgyttattgtcttttgccccactataatataaactccctgaagttggggttttatttttggtctgtttattcactaatttatccccattgcctagaactagta

SEQ ID NO: 532799 - DNA, 201 bp, Homo sapiens
atacaaaatttacccagatacggtggtgtgtgcctgtagtcccagctacaccagaggctggggtacaagaatcacttgaacctgggagttggagtttgcaktgagccaagatcactgcactccagcctgggtggcagagggagactctatctcaaaaaaaaaaaaagattttccatctcagagtaaaagactaagtatttc

SEQ ID NO: 532800 - DNA, 201 bp, Homo sapiens
gttactcacgcctgtctgaatcttgtctaggtcaaactaacattcagtcatttaggtcagtggttcccaaattcaagaatggcataagaattactagaggtgtttgtttaaattcagattcccaggctatatggacaaagattctatgtcaaatcccgtagcaagtcctgttgactccacctccaaaatgtgttctaaatc

SEQ ID NO: 532801 - DNA, 201 bp, Homo sapiens
ttactcacgcctgtctgaatcttgtctaggtcaaactaacattcagtcatttaggtcagtggttcccaaattcaagaatggcataagaattactagaggtgtttgtttaaattcagattcccaggctatatggacaaagattctatgtcaaatcccgtagcaagtcctgttgactccacctccaaaatgtgttctaaatca

SEQ ID NO: 532802 - DNA, 201 bp, Homo sapiens
tactcacgcctgtctgaatcttgtctaggtcaaactaacattcagtcatttaggtcagtggttcccaaattcaagaatggcataagaattactagaggtgtttgtttaaattcagattcccaggctatatggacaaagattctatgtcaaatcccgtagcaagtcctgttgactccacctccaaaatgtgttctaaatcat

SEQ ID NO: 532803 - DNA, 201 bp, Homo sapiens
actcacgcctgtctgaatcttgtctaggtcaaactaacattcagtcatttaggtcagtggttcccaaattcaagaatggcataagaattactagaggtgtttgtttaaattcagattcccaggctatatggacaaagattctatgtcaaatcccgtagcaagtcctgttgactccacctccaaaatgtgttctaaatcatt

SEQ ID NO: 532804 - DNA, 201 bp, Homo sapiens
aacatagttataatataggctgggaataattttataacttttataaaagattacatggcatacacatgtatgcatctataaacataaatatatgattttcttttttttttaattatactttaagttctagggtacatgtgcacaacgtgcaagtttgttacatatgtatatatgtgccatgttggtgtgctgcacccatta

SEQ ID NO: 532805 - DNA, 201 bp, Homo sapiens
ggaacacatttctgttcatatcttctacccacaaatttagtactttttccgtcttaactaagcacttatcaggcactatggccataatttttgcagtttgktatgcaacagcaaaaccagcatgagtttcttcttccttctttacagtttcacagatagatttgttcttacggtagagcttagcaaactcaacaaacaatt

SEQ ID NO: 532806 - DNA, 201 bp, Homo sapiens
attgcttttggtgttttaatcatgaagtccttgcccatgcctatgtcctgaatggtattgcctaggttttcttctagggtttttatggttttaggtctaayatttaagtctttaatccatcttgaattaatttttatataaggtataaggaagggatccagtttcagctttctacatgtggctagccagttttcccagcac

SEQ ID NO: 532807 - DNA, 201 bp, Homo sapiens
agacatatggactcatcccccaagaagtagaacatttcagtaccactatttaagaccacatagaggtttcctatgtcccagtttttaaacgcattcattcyccctatgccgtgctcattcctgtaccccagcaactacttccctgaatcctgaatttatatttatttccttactttgtttcatacttgtttttattaaaca

SEQ ID NO: 532808 - DNA, 201 bp, Homo sapiens
acttccaacactgtgttgaataggagtggtgagagagggcatccctgtcttgtgccagttttcaaagggaatgcttccagtttttgcccattcagtatgayattggctgtgggtttgtcataaatagctcttattattttgagatacgtcccatcaatacctagtttattgagagtttttagcaggaagggctgttggatt

SEQ ID NO: 532809 - DNA, 201 bp, Homo sapiens
tatgtcccagtttttaaacgcattcattccccctatgccgtgctcattcctgtaccccagcaactacttccctgaatcctgaatttatatttatttccttrctttgtttcatacttgtttttattaaacagtgaatagatataagtatcagtaaaatacatgtaaagtataaataataatgaaacaacaaatactcatata

SEQ ID NO: 532810 - DNA, 201 bp, Homo sapiens
aggtcatttaaggtcgtttctatgctttttattctagttagccattcgtctaatctttttccaaagtttttatcttctttgcaatgggttcgaacatgctyctttagctcggagaagtttgtaattaccgatcgtctgaagcctacttctgtcgactcgtcaaagtcattctccatccagctttgttgtgttgctagcgag

SEQ ID NO: 532811 - DNA, 201 bp, Homo sapiens
cctgatccttcctctggaagcttcgtctcagaggggcaactggctgtatgaggtgtcagtcggcccctactgggagatgtctccccgttaggctattgggsgtcagggacccacttgaggaggtagtctgtccattctcagatctcaaactccatgctgggagaaccactactctcttcaaagctgtcagacagggtcgtt

SEQ ID NO: 532812 - DNA, 201 bp, Homo sapiens
ttgcagttcgatctcagactgctgtgctagcagtgagtgagtctccgtgggcgtgggaccctctgagccaggtgtgggatataatctcctggtgtgccgtytgctaaaaccattggaaaaagcgcagtattagggtgggagtgtcccgattttccaggtaccatctgtcacggctttccttggctagaaaaagggaattcc

SEQ ID NO: 532813 - DNA, 201 bp, Homo sapiens
ttatttccaccttttggctctcatgaataatactgcaatggatatttgtgtaccagtttttgtgtggacatatgtcttcgtttctcttgggtacatacttrggattggaattgctgggtcaaatggttacttaatgttttgaggaacttccagaatattttccaaagtgactctaccattttagattcccaccagtagtat

SEQ ID NO: 532814 - DNA, 201 bp, Homo sapiens
tacaaacaacaaacatttattacttcacagtttctgtatgtcaggaatctagacactgctcaagctgaggcttttgctcgtggtgtcacaagactgcagtsaaggcgtcagccagggctaaggtctcatctgagatttaggattctctccccactgcacattggcagaattcttttttttgagacagagtctcactctgtc

SEQ ID NO: 532815 - DNA, 201 bp, Homo sapiens
ttggtctataagtctatttctttgccactaccacattctcttcattactgtgggtttacaatatgccttgatatcatacaatgtgagttcttcaactttgwtctttttttcaaaacctttttattcttctacttcttttgccttttcataacaattttaaaactgcacattcatttctacaaagattgctctgggaagttt

SEQ ID NO: 532816 - DNA, 201 bp, Homo sapiens
tgacatttcatcataacttaagaaaaaaacatttaaatttcaggacaattattgaatctaagagctaaggactaaacactacgtcgaaagctagttatggstgagtgtggtggctcacacctgtaatcccagccctttgagaggctgaggtgggaggatcacttgaggccaggagttgaagacaagcctgggcaacatagg

SEQ ID NO: 532817 - DNA, 201 bp, Homo sapiens
gaaaccatgattctgtaaacttcttagactcaaactgtttacaagtcttatccctgccagatttagagaatattgggaagaacaaatgcaggtaaataccrtttcttgcttagaagatataaggaagtttagccaaatagttgacgttaatttgtctctaggaaccaaaaacatacccgtaagaaatggaagccggattga

SEQ ID NO: 532818 - DNA, 201 bp, Homo sapiens
cagacactgtcttcaaaagatgacattattgcggccaacaaacacatgaaaaaaagctcatcatcactagtcattagagaaatgcaaattaaaaccacaaygagataccaccatctcatgccagttagaatggcgatcattaaaaagtcaggaaacaacaggtgctggagaggatgtggagaaataggaatgcttttacac

SEQ ID NO: 532819 - DNA, 201 bp, Homo sapiens
gccttgctcaaggcagcaaacacattatataccactcatcctcacaatgctctttgacacttacatattcattttgttttccaactccctgaatattggtsatgagaaaattatcatttgacagattataacagtctgtgttctgattttaaaaagaaagagcaaaggggctcaccgctgtccatacttgaacatgaaacc

SEQ ID NO: 532820 - DNA, 201 bp, Homo sapiens
tctccgtaagtgtagaactttaacttgtttgccttgctcaaggcagcaaacacattatataccactcatcctcacaatgctctttgacacttacatattcmttttgttttccaactccctgaatattggtcatgagaaaattatcatttgacagattataacagtctgtgttctgattttaaaaagaaagagcaaaggggc

SEQ ID NO: 532821 - DNA, 201 bp, Homo sapiens
aaattatcctactctgcaagttttggacaatattttttctttgtttcctcaagaaacagccagagaacattctaaaggccaatctgcttgtgtccacttcrgacccaatgaaggcagtgatggaagcaggcatccaggagttccctctgttgagaagtccagaggtgagacagctggcgatgagcggtgtgcaaaggggaa

SEQ ID NO: 532822 - DNA, 201 bp, Homo sapiens
ctcttcttacatctctactccttttgctcacccagtcaagaatgatagaatatcacattgtctagatgaaaaacctgagatgcaagagcttgagtaatttrtcattaaatggcagaaccagggttcaaatatgtatctgtttgactctaaagtctgtgcttaaagtcatctttagaaaatttgtgtttagccagagctcct

SEQ ID NO: 532823 - DNA, 201 bp, Homo sapiens
tcattatgaacaaggcctagaattttttagtatcattttaacatatttactatatcaatccattgaagttattatccttaattagtattcaaattactctrtttttggcctgtgggaggcctgtcaagtagacttcttgatccatttgacatgagcctagtatttgatagcttacttgctatctgctatgtccaaatattc

SEQ ID NO: 532824 - DNA, 201 bp, Homo sapiens
ttaattctaccatctatcctacagttattagctggaataattcattaaagagaaacttccccatatctactattagattactcaatggtacagttcatatrggaaaggaaggatgaatgcttgattctccctctttatttaccaatttttaaaataatgaattggtttcctggcatcctcctaggataatcaattaatttt

SEQ ID NO: 532825 - DNA, 201 bp, Homo sapiens
catgtaatgttttgatacaggcatacaatgtgtcatagtcatatcagggtaagtggggtatttatcacctcaagcatttatcattttttgttagaattacwgttcaatttttggcaaactgttttattattatggtacattcattcttaggagggacataatgtttcactgtgtctgtttttatgatgttaacaattagtg

SEQ ID NO: 532826 - DNA, 201 bp, Homo sapiens
aaaaaaaaaaaacctcataaattgagtgttgtgctccaaaagaatttgaatatgatctactttaattttgtcagtctgccagaagtgggccttataattcrttccttaggagaactcacgaaaggtaggaaattgaggaaatttgggtgttaggaaggttttgaagttagtttacaaagaacataattggagccccagtga

SEQ ID NO: 532827 - DNA, 201 bp, Homo sapiens
aaaatattaccctaatctttgactccttctgtcttcctcagtcccaagacacatcaaaggctgatcaaagttagccgggcatggtggtgggcacctgtaaycccagctactcaggaggctgaggcaggagactcacttgaacccgggaggcggaggttgcagtgagctgagatcacaccactacactccagcctgggtgac

SEQ ID NO: 532828 - DNA, 201 bp, Homo sapiens
gaagtcctctgagtggagtacctctcagtctcattctattctctcctttcacagaggcaacaactgtcttcaatcttgtgttatcattcccctgatttccrttaccacatttatttgtatccttaaacaatatattgctcagtatttaaaggttttgaatttgatatacaaggaattatattgcatgtttttgtttttgtt

SEQ ID NO: 532829 - DNA, 201 bp, Homo sapiens
tattgattctagtccctgctcatttatttattagctctgtgacatttatctctttaattctgagtttcctcatctgaaaatgagaataataatgatacctrtattaccacattcctatgagaatgaaatgaactggtgcccacaaacttcttacttagctcagttcctggcaccaaaatagtgcccagtgaatattaacta

SEQ ID NO: 532830 - DNA, 201 bp, Homo sapiens
tcctttcacagaggcaacaactgtcttcaatcttgtgttatcattcccctgatttccattaccacatttatttgtatccttaaacaatatattgctcagtwtttaaaggttttgaatttgatatacaaggaattatattgcatgtttttgtttttgttttgttttgtttttttgcagtgccctattctttctcgctcaacc

SEQ ID NO: 532831 - DNA, 201 bp, Homo sapiens
gtctcaaattcctgaccttgtgatctgcctacctcagcctcccaaagtgctaggattacagatgtgagccaccatgtccgacctattacattttcttttcttttttttttttttttttttgagacaagagtctcattctttcacccaggctggagtgcagtggcacaacctcggcttactgcaacctccacctcccaggtt

SEQ ID NO: 532832 - DNA, 201 bp, Homo sapiens
atcattcccctgatttccattaccacatttatttgtatccttaaacaatatattgctcagtatttaaaggttttgaatttgatatacaaggaattatattrcatgtttttgtttttgttttgttttgtttttttgcagtgccctattctttctcgctcaaccttatgctgtttattttattttattttattttgagacaga

SEQ ID NO: 532833 - DNA, 201 bp, Homo sapiens
aattcctgaccttgtgatctgcctacctcagcctcccaaagtgctaggattacagatgtgagccaccatgtccgacctattacattttcttttcttttttytttttttttttttgagacaagagtctcattctttcacccaggctggagtgcagtggcacaacctcggcttactgcaacctccacctcccaggttcaagcg

SEQ ID NO: 532834 - DNA, 201 bp, Homo sapiens
ctgaccttgtgatctgcctacctcagcctcccaaagtgctaggattacagatgtgagccaccatgtccgacctattacattttcttttctttttttttttyttttttttgagacaagagtctcattctttcacccaggctggagtgcagtggcacaacctcggcttactgcaacctccacctcccaggttcaagcgattct

SEQ ID NO: 532835 - DNA, 201 bp, Homo sapiens
agtggcatgatctcggcttactgcagcctccacctcccaggtttaagcaattctcctgcctcagcgtcccgggtagctgggactgcaggcgtgcgccaccrtgcctggctaatttccgtatttttagtagagaccgggtttcaccatgttggcaaggatggtctcgacctcttgacctcgtgatctacctgcctcagcctc

SEQ ID NO: 532836 - DNA, 201 bp, Homo sapiens
tttaaatcatagttgggtttttgtcaaatactatttatgcatttatcaacaagatttttttttcctcttttctgttaatatggcaaattacattgactgattttttttttagatgttaaacaacccttgcatttctggagtaagccccacatatattatgtacttttatatactgatgtattttacctgctaatattttaa

SEQ ID NO: 532837 - DNA, 201 bp, Homo sapiens
taggacctgtagtgagttcctcttgtttatttcatatattggtaatgtgtgttttctctttcttttttaaaaattttctttattccttacctggagcactaaaaaaaaaaaaaaaaaaaaaacttgatattcatctcctcaaaggacttatttctgtctttgtggattttctatattttgagattttgggtttttttgttt

SEQ ID NO: 532838 - DNA, 201 bp, Homo sapiens
aggacctgtagtgagttcctcttgtttatttcatatattggtaatgtgtgttttctctttcttttttaaaaattttctttattccttacctggagcactaaaaaaaaaaaaaaaaaaaaaacttgatattcatctcctcaaaggacttatttctgtctttgtggattttctatattttgagattttgggtttttttgtttg

SEQ ID NO: 532839 - DNA, 201 bp, Homo sapiens
ccccattcctccatcttcaaagccacattggctggttgagcctttctctgtatcacttatctgtataattcttacactcaccctcctgactccctgtttcycttataaggacccttgtgattagatcaggcctacccagataatccaggataatcttcccatctcaagttcagctgattagcaatcttaattccatctaca

SEQ ID NO: 532840 - DNA, 201 bp, Homo sapiens
gaggcaggagaattgcttgcacctgggaggtggaggttgcagtgagctgagatctcaccattgcactccagcctgagcgacgagagcgaaactccgtctcaaaaaaaaaaaaaaaatagtgttaattatgagctcttggatcaaatatcatttgctttctccactgtatatttaatattttccctttttgtaaataagcaa

SEQ ID NO: 532841 - DNA, 201 bp, Homo sapiens
ggaaacatgttcctgttttctagaaccaacccctttaccacttctttcagaaacttccctcattagagggagagctgaagatgtctccctttgaaactctaaaaaaaaaaaaaaaaaaaaaaaagaaagtttaagaatccttagacttagtgatgacttgttttgtttctataaaaatttattctgtgtaacagcatttac

SEQ ID NO: 532842 - DNA, 201 bp, Homo sapiens
ttagaccacaaagccacacctagaacaaaagaagctgaaaaaaaaagtcttgccctggatggtatcatgcccagctaaaactcacggtgctcaattgttgaaaagaagaatgaaagaatgaatggggggcaaatattgctgtctgtcaccaaaaccaagattcttgggccagctgtacccattgtccacacttatttacct

SEQ ID NO: 532843 - DNA, 201 bp, Homo sapiens
tcaatttagctctactattgcatggtttaatgactctatgataattttttccattagagaaagtacagtcaagaaaggcattttagaacttgtagcaaaattttttttaattctcctgaatttaaaaaatgttatccacttataaataatgttttaaagtttatgtagatgcctctcagatggtccctgaacagtaagtgg

SEQ ID NO: 532844 - DNA, 201 bp, Homo sapiens
tagaccacaaagccacacctagaacaaaagaagctgaaaaaaaaagtcttgccctggatggtatcatgcccagctaaaactcacggtgctcaattgttgaaaagaagaatgaaagaatgaatggggggcaaatattgctgtctgtcaccaaaaccaagattcttgggccagctgtacccattgtccacacttatttacctt

SEQ ID NO: 532845 - DNA, 201 bp, Homo sapiens
accacaaagccacacctagaacaaaagaagctgaaaaaaaaagtcttgccctggatggtatcatgcccagctaaaactcacggtgctcaattgttgaaaagaagaatgaaagaatgaatggggggcaaatattgctgtctgtcaccaaaaccaagattcttgggccagctgtacccattgtccacacttatttaccttaat

SEQ ID NO: 532846 - DNA, 201 bp, Homo sapiens
aaaccttttggccaccgtttaatttctctttttttattttatttttattttatatatatatatttttattatactttaagttctagggtacatgtgcacarcgtgcaggtttgttacatatgtatacatgtgccatcttggtgtgctgcacccattaactcgtcatttacattaggtatatctcctaatgctatgcctccc

SEQ ID NO: 532847 - DNA, 201 bp, Homo sapiens
gttgctccttagacatgattatggggactcttctgatcatttatctttttgtaaaaaaaaaaaaacctacactttaaaactatccatatttagtagtcatkaattatattttcaaaaatttagaattttatttaaggaatgcacacatctaagtgtattctcaccagtctcctttactgtgctcttttctcagttttgaat

SEQ ID NO: 532848 - DNA, 201 bp, Homo sapiens
gaaactcttttacctccattcaatcaaaagtttctatgatctttctaaagtttatgtgagtctgagttcagaataaagaggcaatttaaaatgctggaatwttaacccccaataaaattgtcaggcactaatagaattgtcaagggtcctaattttttttgttgtttttgttttgtttttgtttttgtttgagatggagtc

SEQ ID NO: 532849 - DNA, 201 bp, Homo sapiens
cgggctgaggtgtagcagtcatcgataccagccatcatgagcagcttcttgggcacaggcgccgagacaatgccagtgcccctgggtgcagggatgaggcrcaccagcacagagccgcagcggcctgtcaccttgcaagggacggtgtggggcttgccgatcttgttcccccagtagcctctgtgcacggggacaatggag

SEQ ID NO: 532850 - DNA, 201 bp, Homo sapiens
cagactttttaaaaattctaaattttattttgagccagactttcctgccacccttcaatggtgacaattccttgcaattcctgcagttccttacatgtttyattttctttgaaatttaactgagtttcagatctttggcttcaaagaggagactaaatcctgttttccttcatttcccaaatcatttttcattatctccta

SEQ ID NO: 532851 - DNA, 201 bp, Homo sapiens
taaaagcatgagtcactgcacctggctattttttttgtatttttggtagagatggggttttgccatgttgcccaaagtggtctctaattcctgacctcaartgatctgcctgcctcagcctcccaaggtgctagtgtatttaaaatacagttgtttttatgtgtttcagtttaacttcccctccttcccatccttattgat

SEQ ID NO: 532852 - DNA, 201 bp, Homo sapiens
tcatagcactagctactgaaaaagcctagaagtaatgactaaccccatgaaggatcacctccatcacccagattgtgtctctcaataccactaaaaggaaycagaactccttagagaagtggctgcttagaaattgggacaagtaatatatgaaatgagcctggctcatctggtcatgctggatggcaagatatctaacaa

SEQ ID NO: 532853 - DNA, 201 bp, Homo sapiens
taaactacgtcctatattaatatggccgtggttgttggacccaaaggcagcatcttattgtatccatattttgaactttcccagacatacttaggtaaaaytgaccattgtatcctttgttcctccagtaccttgtgtactcaaccactgttataccaccttttacactgaaatatatttatttgtttacatgttttattt

SEQ ID NO: 532854 - DNA, 201 bp, Homo sapiens
tgaagtactatttcagtcatcattgttgactgttaacctactttgttttcttcatgtgttattgttttataggctctgagttttatgctttcaagatgttmtattctggtgcatattgaccttttgtttcaagatttagagctccttttagtatttcttgtagagctggtctagtagtgacaaattctctcagtatttgct

SEQ ID NO: 532855 - DNA, 201 bp, Homo sapiens
aactgttgacattttagcaacaaaatacagctgattcatatttaagatttttcaaataaaaactctaaatctgctttatacttacaactgcctaaactacrtcctatattaatatggccgtggttgttggacccaaaggcagcatcttattgtatccatattttgaactttcccagacatacttaggtaaaattgaccatt

SEQ ID NO: 532856 - DNA, 201 bp, Homo sapiens
gcctgatcctgtagggccttataggccattgtcaagaatatgttttcactctgaatgagatgaggagggtttgaggaaagacgtgacatggtctgacttaygtatttataaaagaatcattctggccaagtgaagacattttcctccagttttagtactatctattccttcacccattcctcatataatatgctttcaagt

SEQ ID NO: 532857 - DNA, 201 bp, Homo sapiens
aagaaagagaaagaatggtggcctgatcctgtagggccttataggccattgtcaagaatatgttttcactctgaatgagatgaggagggtttgaggaaagrcgtgacatggtctgacttatgtatttataaaagaatcattctggccaagtgaagacattttcctccagttttagtactatctattccttcacccattcct

SEQ ID NO: 532858 - DNA, 201 bp, Homo sapiens
tgtagggaaatcttagtatttgaaactcttatgtcctagaatcttaagaaacctctggattgagatggtgatgttaggcagctcttgcagttgacttcaaygctagctaggctactttctccaagcagtgagaaagtcctaaagagtcttgcttcattttattccaacttctggagtttttaaaccagcattgtttgtgtt

SEQ ID NO: 532859 - DNA, 201 bp, Homo sapiens
ctctgtaaaattttgttatttttatgtagtcagatttgtcaatcttcttttatggtttccgaaattttttttttttttggagacggtgtctcactctgtcrcccagtctggagtgcagtggcatgatctcagctcactgctgcctccacctcctgggttcaagcaattctcctgccttagccttctgagtagctgggacta

SEQ ID NO: 532860 - DNA, 201 bp, Homo sapiens
gaatgaaagttcttattgctccacatccccaccagcatttggtcactgttttggatttttgccattctaataggtgtgtagtggtatcttgtagttttagttttttttttggcccggtggggtgggggttgcatatatgtgaaacattgtaacagctctaagagtcagagctatacaaaaaggtggagccagagaagtgtc

SEQ ID NO: 532861 - DNA, 201 bp, Homo sapiens
gaggagttgaggtcaggagctaggaggctggagacatctaccctgtccgaggactttcaggtatctaaggagactgatccagcacctggtcccctctctgsgcagagtgtgaatattgaccttctccccgtagagctccgactgcagataattcagagagaacgaaggaggaaggagctgtttcgcaaaaagaacaaggca

SEQ ID NO: 532862 - DNA, 201 bp, Homo sapiens
aggagttgaggtcaggagctaggaggctggagacatctaccctgtccgaggactttcaggtatctaaggagactgatccagcacctggtcccctctctggscagagtgtgaatattgaccttctccccgtagagctccgactgcagataattcagagagaacgaaggaggaaggagctgtttcgcaaaaagaacaaggcag

SEQ ID NO: 532863 - DNA, 201 bp, Homo sapiens
tctcattgtggttttgatttgcatttctctgatggccagtggtgatgagcattttttcatgtgtctgttggcttttaatttcttttctttcttttttttcttttttttttttttgagacagggtcatactctgtcacctaagctggagtgcagtggtgcaatctcggctccctgcaacctccgcctcccgggtttaagtga

SEQ ID NO: 532864 - DNA, 201 bp, Homo sapiens
tgaggtcaggagctaggaggctggagacatctaccctgtccgaggactttcaggtatctaaggagactgatccagcacctggtcccctctctgggcagagwgtgaatattgaccttctccccgtagagctccgactgcagataattcagagagaacgaaggaggaaggagctgtttcgcaaaaagaacaaggcagcagcag

SEQ ID NO: 532865 - DNA, 201 bp, Homo sapiens
gcttcttgggcacaggcgccgagacaatgccagtgcccctgggtgcagggatgaggcacaccagcacagagccgcagcggcctgtcaccttgcaagggacrgtgtggggcttgccgatcttgttcccccagtagcctctgtgcacggggacaatggagagcttggccaggatgatggccttacggatggtggtggccactt

SEQ ID NO: 532866 - DNA, 201 bp, Homo sapiens
aggtcaggagctaggaggctggagacatctaccctgtccgaggactttcaggtatctaaggagactgatccagcacctggtcccctctctgggcagagtgkgaatattgaccttctccccgtagagctccgactgcagataattcagagagaacgaaggaggaaggagctgtttcgcaaaaagaacaaggcagcagcagtc

SEQ ID NO: 532867 - DNA, 201 bp, Homo sapiens
tttttgttttttataagcctcccagtctatggtactttgttacagcagcttgaactgactaacatacaaaatataggttgaaagctttgggtttatttttgtttttgtatatgtttttgtttttgtatatgaatgccaaatttttccagcaccatttattattattattatattattcactcctgttgcccaggctggagt

SEQ ID NO: 532868 - DNA, 201 bp, Homo sapiens
gtcaggagctaggaggctggagacatctaccctgtccgaggactttcaggtatctaaggagactgatccagcacctggtcccctctctgggcagagtgtgratattgaccttctccccgtagagctccgactgcagataattcagagagaacgaaggaggaaggagctgtttcgcaaaaagaacaaggcagcagcagtcat

SEQ ID NO: 532869 - DNA, 201 bp, Homo sapiens
ttagtagagagggggtttcaccatgttagccaggatggtctcgatctcctgacctcatgattcgcccgccttggcctccaaaagtgctgggattacaggcrtgagccactgcgcccggcctaatcaagtcttcttttatatctcagcctttttattgatgtatttacatcatttacatttaatgtaattatgaatgttaag

SEQ ID NO: 532870 - DNA, 201 bp, Homo sapiens
ttcaccatgttagccaggatggtctcgatctcctgacctcatgattcgcccgccttggcctccaaaagtgctgggattacaggcgtgagccactgcgcccrgcctaatcaagtcttcttttatatctcagcctttttattgatgtatttacatcatttacatttaatgtaattatgaatgttaagatttaagatttccaat

SEQ ID NO: 532871 - DNA, 201 bp, Homo sapiens
cttttgccctggggattttagttgtaattagcaggaggatgaggatgctatgtacttgctctatcttgtcatcttgtctagaaagggaaatcaactgtgatttttttttttttttttttttgagatggagttttactctcgttgtccaggctggagtgcaatggcacaatcttagttcactacaacctccgcctcctgggt

SEQ ID NO: 532872 - DNA, 201 bp, Homo sapiens
atgtgccattgtgcaattctgaggcccaaaggacttctgggattgttgcacattgcagaaagccaagtctggtgacagtaaacacacttttattgattctrttatattttaactacattttctattgtaaatacaggagcctgaagcgctgtcctgcaagtgtatctgatagcaaacctaagcagtgagggctggggcagg

SEQ ID NO: 532873 - DNA, 201 bp, Homo sapiens
gaaaaataagtgcctctttctactagaagacatgtatgagaattacatgatagttttatttagaaaagcaaacattcctttttttaacttctatttttccrtaagttattgggggtaaaagtggtatttggttacatgagtaagttctctagtggagatttgtgagaacctggtacacccatcgcccgagcagtatatgcc

SEQ ID NO: 532874 - DNA, 201 bp, Homo sapiens
tttaccacgccagaccccacagctgctccctacctgaaatgtctccttctccgactgtctgactcctttgaagagtcagaagctgacaggtcctgtcagtwagtgaccagagtagcaaatgagccttcagtcattcccccaagaacagtgggcttatggtctaacatgcccacctgcgtaggtaactacacaggccccctc

SEQ ID NO: 532875 - DNA, 201 bp, Homo sapiens
attcctacaatggaacactgcatgaatgaactgctgacacgttcaaccacataagttaatttcatagacattatgttgagtggaacaagtcagacacttayaaaaaatttatttgctgttcatatcaacctcaggaacaagaaaaactaatctatggtgagtcaaatcagatttgtggttacctaaaagatgggtaatata

SEQ ID NO: 532876 - DNA, 201 bp, Homo sapiens
atcacctgaggtgaggagttcgagaccagcctggccaatgtggtgaaaccccatctctactaaaaatacaaaaattagctgggcgtggtggcacgtgcctrtaatcccagctactcgggaggctgaggcaggagaatcgcttgaacccagtgggtagaagttgcagtgagccgagatcgtgccattgcactccagctaggg

SEQ ID NO: 532877 - DNA, 201 bp, Homo sapiens
cgcttgaacccagtgggtagaagttgcagtgagccgagatcgtgccattgcactccagctagggtgacaagagcgaaattccgtctcaaaaaaaaattttwtatatatatatatccttatacatttaaccctcagagcaacatctttttattctttaattggaaacattagatttgagttgaagaaacattatcatatact

SEQ ID NO: 532878 - DNA, 201 bp, Homo sapiens
cttggctcaccgcaacctctgcctcccaggttcaagtgattctcctgcctcagcctccggagtagctgggattacaggcatgcaccaccatgtccagctamtttttttgtatttttagtagagacagggtttctccacatcggtcaggctggtctcgaactcccgacctcaggtgatctgcccacctcggcctcccaaagt

SEQ ID NO: 532879 - DNA, 201 bp, Homo sapiens
ggttcaagactggcctggccaacatagtgaaacctcatctctactaaaactacaaaaattagccgggcatgttggcatgcgcttgtaatcccagctactcrggaagctgaggcatgagaatcgcttgaaactgggaggcagaggtttcagtgagcccagatagtgccactgaactccagcctgggtgacagagtgagactg

SEQ ID NO: 532880 - DNA, 201 bp, Homo sapiens
cagagatgggcggatcacctaaggtctggagttcgagaacagcctggccaacatggtggaaaccccgtttctactaaaaatacaaaaattagccgggcgargtggctggcgcctgtagtctcagctacttgggaagctgaggcagaagaatcacttgaacctaggaggcggaggttgcaatgagccaggatagcgccacta

SEQ ID NO: 532881 - DNA, 201 bp, Homo sapiens
gacccatgcaagggagtttagactgacatgctaatctttggcctcgttgcagatagttacaggaggcgctagattacaggggccaaaaagcaacccccaarctcaaaggtggaatacaccatggcctactctttcctacatacaaacatgtagcctaaagaggctgaaataaagagtcactttatttcaggatttgtcatt

SEQ ID NO: 532882 - DNA, 201 bp, Homo sapiens
tttatttatcttaccaagagagactaggaccatcgctttaatttgtctcatacagcacttacttaacaagactccaagtagcaggataaaaacatcctgtwatattggtatcaactatgtccctcagtatcttggactaaatcaactgtgaataagccccagaggagaaagtagatcttactttatacagctaggatgtaa

SEQ ID NO: 532883 - DNA, 201 bp, Homo sapiens
cagaaaaacagctgcccaaagaatagcaatggtgtgactccaaaggcctgagcacctacctaccccagcctctattcttcctgcctccaaggatgcttggygaacatgtctgggaacctttcaatgcagagcaaccagacctgtagcagttcggcctggggcaaccagacctggaacatccagtcctagaacagccattcc

SEQ ID NO: 532884 - DNA, 201 bp, Homo sapiens
cattactactagtgttgataattatgtatattatacgtctgagaatgcaaaaacgaattatttccaaaaatactgaatagtattcatagttcttcccctcyactttctcatccattatgtccccagtccaccctgcaacatgatagtgtctaggctacttcagcttcctgagtatgaatgaccatcaagaaccagattcat

SEQ ID NO: 532885 - DNA, 201 bp, Homo sapiens
atgtgccatgttggtgtgctgcacccattaactcatcatttatattaggaatatctcctaatgctatccctccctgcttcccccatcccacaccagccccyggtgtgtgatgttccccaccctatgtccaagtgttctcattgttcaattctcacctatgagtgagaacatgcggtatttggttttctgtccttgcgatag

SEQ ID NO: 532886 - DNA, 201 bp, Homo sapiens
ttatgtcagaaaattaatgtcttctgagaaaacagttgagacaactattaatatagatgcctcataaatctatatcttgaatctagccatctcttctaatsttcaggtctatatgtatctgcccctccccaacaaccttttctttttgctagacctctctgcatagattcccttcaggtgcctcaaactccactttagaaa

SEQ ID NO: 532887 - DNA, 201 bp, Homo sapiens
tgggcttacttggcaaatttgtctccatgtaactaaattgactttttgttctataagttttgctttctttctgcctcctatatagattgtattttgggttmtatttttatttccttgtcttacctatatttctttttatctcatttcatttccttttaacttccttccattactttttcatttcactctgttttcttctta

SEQ ID NO: 532888 - DNA, 201 bp, Homo sapiens
tcattttaataaatgcatttaaggaacaattgttttttctactcctactcattttaataaaagctatttatattagacattctcattatatttgtgctttyccaggtggagcaagggtagatctagttgaccaagatggacattctcttctacattgggcagcactgggaggaaatgctgatgtttgccagatattaatag

SEQ ID NO: 532889 - DNA, 201 bp, Homo sapiens
gtttctccatgttggtcaggctggtctcgaactcccgacctcaagtgatccgcccgcctcggcctcccgaagtgctgggattacaagcctgagccactgcrcccggcctctacttgtttttaacatcttctgacacagtatttagatacggaagtgagcctcataaatgacagagtagaggtactatttcaggttacttct

SEQ ID NO: 532890 - DNA, 201 bp, Homo sapiens
aatttcacctgcctgatcttcacttttattttatataaagggggactgattcctagccagtccaatttacaagcttattgtaaaaatctgatgtagacaaygtatgtggaagcatttccataagaataaagcattaaaggaacaattgttattgtttttcttctattcattttaataaatgcatttaaggaacaattgttt

SEQ ID NO: 532891 - DNA, 201 bp, Homo sapiens
taaagctttccttagcagaaagctgcacaagtacaaggatgaagggatgatcacacaacatggcatgaggaacctcaagttctactcctagctccacttgytgggagttgcttgatacaggaaaagtaatttcacctgcctgatcttcacttttattttatataaagggggactgattcctagccagtccaatttacaagc

SEQ ID NO: 532892 - DNA, 201 bp, Homo sapiens
ccagactggtctagacctattgggttcaagcagtcctcctgcctcagcctcccaagtagctgggactatagacatgtgccacctcgctgtttcttaaattragccctggggaagtagctggcttgtagctgatattgtattaaaaatgcactcaatgcagcaagatgtgcgtgctttcagtaccactggggtacttcagcc

SEQ ID NO: 532893 - DNA, 201 bp, Homo sapiens
gaactcccataatcttgtctgaaggtaacagactgccatgtatcaaatattgtcattgtttttcttcaactctttttgttatataggtaagacatgttcaytgtagcaaaaaaaaaaaaaatgggttttgtgccattactcataccttttgctttagttagttaaacattttcagtggatactactaggcatctctgtggc

SEQ ID NO: 532894 - DNA, 201 bp, Homo sapiens
aaatgaccctcaagcatatgaaaatatgttcaaatatacgtataaaagtcatgcagattaaaactgtgctaaaatattttttctcacctattgcctcattrtgttggtgaggctgtggataaataagttttttcatactctgctcctgggatagttatctaaattgcaaatgcatataccctttgaccaggcaattccatt

SEQ ID NO: 532895 - DNA, 201 bp, Homo sapiens
cttcagactctgcaacacaccgacatgcaaatggaagcagcccatcaccacagtctgtctctcttctggcctttttatgtgcttgctagtgctgctaccaytgattgtatgcattccccctttgatagccttttgctttcattcttctgtgccaccaccactctatacaaaccctcgttcttcttttttttgagacagagt

SEQ ID NO: 532896 - DNA, 201 bp, Homo sapiens
ctgctcccgcctttgcttcagctttcctgctgcctggaatggccttacccgttctctctctggaatgctatcttaaatgtcaccatctctgagaacttccygaacaaccaaccctttagtcctaatcagaattactcttcctatgagtgtgactgcagtacctctagttttgtacggttataattattagagcatttatta

SEQ ID NO: 532897 - DNA, 201 bp, Homo sapiens
aaagcaggggagactggataggaaaggaaaccttaggaatataggggaccactgctgctcctctcacacctccccagaccctaacacccttggttccattraactcctaaacttgggcttcaggaacagaggaagtgagaaagctagtgtttaatgataacttgttttttcactgcataacaaggaccttgttattttctg

SEQ ID NO: 532898 - DNA, 201 bp, Homo sapiens
tttaggagaaagaatggattattgatggatcaaagtcgctggggagatgggaacagaaaggacagtcgggtctgggcacagtagctcacgcgtgtaatccsagtgctttgggaggctgaggtgggcagatcacctgaagtcagaagttcaagaccagcctggccaacatggtgaaaccccatctctaataaaaatacaaaa

SEQ ID NO: 532899 - DNA, 201 bp, Homo sapiens
caaaagagttgcatataggcacttttgataaagagtctttaaccttgaaattttattgatttcgacttttgtttttaaattatttttattgatggtttccttttttttttttttttttcctttcaagagagagtctcgctctgtcacccaggctggagtgcagcagcacgatctcggctcactgcaacgtctgcctcctgg

SEQ ID NO: 532900 - DNA, 201 bp, Homo sapiens
cctcagttaattcctgtgccaggctgggcacagtgactcacaccataatcccagcattttgggaggctgaggtaggagaattgcttgagcctaggaattcragaccagcctgagaaacatggcaataccccatctctacaaaaaacacaaaaattagccaggtgtggtgggatgtgcctgtagtcccagctactgggaagc

SEQ ID NO: 532901 - DNA, 201 bp, Homo sapiens
cttattgcctgggctggtctcaaactcctgagctcaagctatcagcccgccttggcccaccaaaatgttaggattacaggcatgagccaccgcacccagayaaaataaccactttaaagtgagcaattcagagaaattttgtacattcgttatgttgtgcaaccactacctctatctagttccaaagcatttccatcactc

SEQ ID NO: 532902 - DNA, 201 bp, Homo sapiens
tcttgtgtaagaattctgaccttactaaccatgcctaggaaggaaaggagttgttgttttgtagaagggattggggtttgggagattagccggagacgatmatcagggagagcacgtgtgtttttatgagaattatgctgagataggtaacagatgaggaagaaatttgggcttgactgaagtaatgggggctgtctgtga

SEQ ID NO: 532903 - DNA, 201 bp, Homo sapiens
gcagtacagcctaagtaatttgctgagcctgatgggtgtcagggtcagtacaagtgaaagcgaagagaggctgggatgaagggtgcaaaggaatagcaaasaaagcatgtttgagatctagaacagaataatgggttgtggagggaggtattgaggataggagagtatatgggtttggcaccacggggtagataggcaaaa

SEQ ID NO: 532904 - DNA, 201 bp, Homo sapiens
tgttccttgggctggtgggtctgaggacccgaggtcgtaggtggatctttttcacggagcaaagagcaggaggacaggggattgatctcccaagggaggtccccccgatccgagtcacagcaccaaatttcatgcgcatctgtgtaaagagaccaacaagcaggctttgtgtgagcagcaaggctgtttatttcacctggg

SEQ ID NO: 532905 - DNA, 201 bp, Homo sapiens
ggcggagccctccagaaggagcagcatgtttcctcagatttgcagggaacaaactccagaaggccaaatggtaggtgtattgcctttgtcatcttctgccrgcccatggactgtgggcttttttgattggtgtatttagaccaattacacttaagataattgttatattagcacctaggaccgccactttatgatttgtgt

SEQ ID NO: 532906 - DNA, 201 bp, Homo sapiens
ttgagccaggatgagccaggagaaggaatttcacaagataatgtcatcagttaaggcaagaacaggccattttcatttcttttgtggtggaatgtcatcarttaaggcaggaaccagccatctggatgtgtacgtgcaggtcacaggagatatgatggcttagcttgggctcagaggcctgacactttgtgtctggctttt

SEQ ID NO: 532907 - DNA, 201 bp, Homo sapiens
acattaattatatttgtaagaccaggggctaattattcattcagatgattgcattctgtctcctaattctgcttacgtagttctaccaaaatgaaaaatcmcccccctggtatcccccctccaaagcaatctccagaagccaaagccctcttgctttctggatgtcttgatcactttaaaaggctggatcccctgttcctc

SEQ ID NO: 532908 - DNA, 201 bp, Homo sapiens
acctaaagatccatgtcaaatagcaaaatcttcattgttctctccatttatttctgttttggagatttcttggccctgcagccgcaaccacatggtctttyagcttgctgcccccgtggtcatgtaccattccttcttttgcctgcccagaggaaggtgagcaaaaacaaaggcactatttgggtggcttgctttaatccc

SEQ ID NO: 532909 - DNA, 201 bp, Homo sapiens
tgtttccactattgtgaatagtgcttccgtcaacgtaggtgtacatatacttgtttgagtacctgttttcaattccttcatttgattgtccttcatcaacttatggtactgtattcttttagtcactggagtttaaaaactgcatggcatgtagtaggtgctaaatatatgttggttgaatggatttattaaattaatgtg

SEQ ID NO: 532910 - DNA, 201 bp, Homo sapiens
tagtcacctctttttcatcctccacacacaatgccgtcgcacattcagcttccttcctactttaagctggcttaattgcatatactttcaacatgcagctsaggcactgttttctccaataagcttctactgacccctcaaggctgggttaggtgcccctctacagagttcttactaccgtgtgtccttacctctatcata

SEQ ID NO: 532911 - DNA, 201 bp, Homo sapiens
cataatcttgtctgaaggtaacagactgccatgtatcaaatattgtcattgtttttcttcaactctttttgttatataggtaagacatgttcattgtagcaaaaaaaaaaaaaatgggttttgtgccattactcataccttttgctttagttagttaaacattttcagtggatactactaggcatctctgtggctgtatcc

SEQ ID NO: 532912 - DNA, 201 bp, Homo sapiens
cccaaagtgctgggattataggtgtgacccactgtgcacagctgcacaagttatttttaaaaccactgcttatttaagatatacagttagatgtatacttwgatgaaaactatgcaaatcctctctctttttaaacaaaaaaactaaaaaggattagaagagttttcacagaaatgctagcagagcttgtgttaggcttag

SEQ ID NO: 532913 - DNA, 201 bp, Homo sapiens
gccgtgttaaaggagcttccaaagatggacaatttgagtagcaaaaatacagttgcttcaatggaaacaaacatgttaaaactccatgagttaggaatactttttttttttttttttttttgagacagggtctcactctgtctctcagtctggagtgcagtggtgcggtctcggctcactgctacctctgtctcctgggtt

SEQ ID NO: 532914 - DNA, 201 bp, Homo sapiens
atctataagcccctgacaggaactgctgcctttctttcagagatgccctgcccagagaggaagaatctagaaaggcagtctggctatagcggctttgctgygctgtggtgggctccgctcagttcaaacttcttggaggctttgtttacactgtgaggggaaaaccgcctactcaagcctcagtaatggtgacacccctcc

SEQ ID NO: 532915 - DNA, 201 bp, Homo sapiens
aagaaaaaagcagtaaaagtttacatgttccttgactctagattctgtgactagaaatggaccttataaaccactcaaactaatatatatgtatatatacwtatatatatatacacacacacacatatatatatagggatattcattcatcattgtttataatggcaaaatacaggtaaattattcattgttaaatataat

SEQ ID NO: 532916 - DNA, 201 bp, Homo sapiens
tctttatagtagaatgatttataatcctctggatatatacccagtaagaggattcctgggtcaaatggtatttctggttctagatccttgaggagtcaccrcactgtcttccacaatggttgtactaatttacactccaccaacagtgtaaaagcattcctatttctccacatcttctccagcatctgttgtttcctgact

SEQ ID NO: 532917 - DNA, 201 bp, Homo sapiens
ggaccataggtgtgcgctaccatgcctggctaattttttgcatttcttttttgtagagatgagatttcatcatgttgcccaggctggtctcaaactcctgractcaagcaaaccacctgccttggcctcccaaagggctgggattttataagtgttagttattgtgtccgccctgatttgatctttatgctgaggcctatg

SEQ ID NO: 532918 - DNA, 201 bp, Homo sapiens
aaatgctatttaaggaatatctataatcaatttgaaagcactttataattcacactgcactgcctatgttgttgccaaaatgaacattactataatttacytgccaaagcacacggttgagtgtacactaaaataaaaccatatttatgttgatcacccttcttccctgaagctccctttttgccaggttcttatttcact

SEQ ID NO: 532919 - DNA, 201 bp, Homo sapiens
aggcgtgagccaacgtgtccgaccactggtgattttatctatgttgctgcatgtagccatgatatattaattcttactgctatataggattccatcttacraataagccacacagtattcattctgttattgacagatactttgtttccagttttttgttatttacaaacagtgctgcattgacatttttgaacatatcta

SEQ ID NO: 532920 - DNA, 201 bp, Homo sapiens
gcttcctgaggtccttattagaagcagatactggcaccatgcatttagtagagcctgcagaaccataagccaaataaacctgttttttaaataaattgccmagcctccggtattcctttataaaaatacaaatggactaagacaatctacaaagaattcaagtataaggtagaatgcatatgtgctagagaagaatacaaa

SEQ ID NO: 532921 - DNA, 201 bp, Homo sapiens
atatttgacagggagtcataatagttactataggtggttagactcatgatggccaaatgcccatggcaatgtcctaaatgcttagtggtttagtggcctaygctttggtatcagccttcctgggtttcaacccagaatccactacttaacttgttctgtgtccttgagcaaattgcttaactcctctgtgcctcaattttt

SEQ ID NO: 532922 - DNA, 201 bp, Homo sapiens
aactcaggtaaggcagccactgcaaagcagatggtggggaagaacatggggaagcattttcctttgtttcatccccaaagacagaagacattagaacagakatggccagggttttccaatggtcatttgatttcatgggattattactgtagccaacatctgtctccctaagaggcaaattattttcacaactaaaagcta

SEQ ID NO: 532923 - DNA, 201 bp, Homo sapiens
gactctgttatttaggttgactaaagcaagtgctgctgtattttcaaaatgtatcttttcatcaataactgggtctaataatttatcctctaaaattatakttaaattaaaatttgtctactgatacatggaatgggttccagatgcatgaatttcctatgcatgtatttttttatagatattaaaattcgaaacatcctg

SEQ ID NO: 532924 - DNA, 201 bp, Homo sapiens
taatagtgcagacaacccaaatacgtaccaacaggtgaatgagtagctaaattgtgatgtattcctacaatggaacactgcatgaatgaactgctgacacrttcaaccacataagttaatttcatagacattatgttgagtggaacaagtcagacacttataaaaaatttatttgctgttcatatcaacctcaggaacaag

SEQ ID NO: 532925 - DNA, 201 bp, Homo sapiens
tctcatccaggtcattgcaaatgctgttaattcattcctttttaaggctgagtagtattccattgtgtatatctatacaccagagtttctttatccactcrttgattgatgggcatttgggttggttccacaattttgctattgtgaattgtgctgctataaacatgtgtgagcaagtatctttttcgtatgatgacttct

SEQ ID NO: 532926 - DNA, 201 bp, Homo sapiens
aagcattttgctcacatctctattagagccccattaccttatattgtaattattgcttacttgtctcttttctactaggctggagctccaggcaagtagctctttttgtttgtttttgaatctctctgaatctagtaagttctgacatgtcttggttgaatgaattttattttacttttatagaaagtcattactaataca

SEQ ID NO: 532927 - DNA, 201 bp, Homo sapiens
tgtttagtgaaccttctgatatattggatatcaaatatcctttccaagtattgtctgtcccacttaattctggtatccatgaatgcagaagtgtgctattyatgtaatcatgaacactcatgtatatgtgtataccttcattcattcaacatgtgttaaaactattatgtaacaggcatcatgttaggccttggaacacaa

SEQ ID NO: 532928 - DNA, 201 bp, Homo sapiens
gcctcccagagtgctgggattacaggcgtgagccaccgcacccagcctgtaattcatttttgtatcactcataaaacataccacaatgcctagtgtacaaytggcattaattaaatatttgtttcaaaagacaagagtgagtgagggaggaacataagtagctctgtatctcaaaatgttagttcagcataatatgattga

SEQ ID NO: 532929 - DNA, 201 bp, Homo sapiens
agttgtgttctctttcctaaatttagttcagttatctccctccataatttacatttaaatatcccactgtaacctaaaacatagcttcctttgttaatttccccgttgttacgaagaaaagtattattcctcagtaatttgggctcaaaatattaccctaatctttgactccttctgtcttcctcagtcccaagacacatc

SEQ ID NO: 532930 - DNA, 201 bp, Homo sapiens
ctgaggcagagaattgcttgaacctgggaggcggaggttgcagtgagccgagatcatgccactgcactccagcctgggtgacagagcaagactccatctcaaaaaaaaaaaaagtcaccttctgagtttggcaaggacccagccttctctgaaggacatatctacttaaaaggagaccaaccaatatcagggttctgttgg

SEQ ID NO: 532931 - DNA, 201 bp, Homo sapiens
agagacagtggcaataactcagtctttgttaatgtttcatcagcaatgtaccttgatgtacaaatgtcagaacttggcactgccttttacgtttattgacrttccagtttaggcattctactcatcccatcagaccattcccacatggcaggtccaattgtatcttgtctgttgtctatatccacattgtttcttggttgg

SEQ ID NO: 532932 - DNA, 201 bp, Homo sapiens
attccaaataagagctatatattgtgattggctgatatgtcaagtcttttttaatctatagtttcaccctccatctctctttgtttcttttggctttttctttttttttttttttttacaactttttggctattgtggcttaacccctgccctaacttgatgtcttagtctagactgattgcctcagtaagatgattctcc

SEQ ID NO: 532933 - DNA, 201 bp, Homo sapiens
aaaattccaaaaaccagaacacctcttcttctgcaaaggatcacaactcctcaccagcaagggaacaaaactggacagagaatgagtttgatgaattgacmgaagtaggcttcagaaggtgggcaataataaactcctctgagctttttctgtaaaggagcatgttctaacccaatgcaagaaagctaagaaccttgaaaa

SEQ ID NO: 532934 - DNA, 201 bp, Homo sapiens
atctcttctgagtctctgctcatgcatacttctccctctgcctgaaataacctctcagtttattcctctctcattcttcatatgcagcctttttctccccrtttaattagtgagtgtctcccacatcctcccatagccctatatagttacttctcctttagcactcatcacatctagaactcactgttggcaggagtgtat

SEQ ID NO: 532935 - DNA, 201 bp, Homo sapiens
tgacttcgaactacactacaagcctacagtaaccaaaacagcatgattctggtaccaaaacagagatatagaccaatggaacagaatagaggcctcagaartaacccaacacatctacaaccatctaatctttgacaaacctgacaaaaacaagcaatggggaaaggattccctatttaataaatggtgttgggaaaatgg

SEQ ID NO: 532936 - DNA, 201 bp, Homo sapiens
cagagagtatatgttgctggaaaaccatgcagatcaccagagcactgttttacctcactgaaaagcattagttcctgtgaatccatagaccacttgcttcrtgttgatgacaaagtcctcaccattttgtaaaaaaatgaagaaaagatcattgtagtatttaacatatataggtttgtgtagtatttaacatataggttt

SEQ ID NO: 532937 - DNA, 201 bp, Homo sapiens
aacacaaaagattagttttacctgttcttgaagtttttataaatagaattttttttttgctgtctacaagagaaacacttcattttgtatatgcatagaaatatatatatatatatatatatatattcattttagtagcttttatagtgcaagtggtttttggttacatggatgaattgtgtagtggtgaagtctaagatt

SEQ ID NO: 532938 - DNA, 201 bp, Homo sapiens
taaataccagccatggtgctctgtaagatccttcaacatttctttcacttccacttacatttctaagtctcatttctctccactaccaccaccctctcacytgatgtctcagccatcctgaactttcttcacttcacttactgggagacctgagctccttcctggctagtatatgtgattatgtttctaagagtttcatcg

SEQ ID NO: 532939 - DNA, 201 bp, Homo sapiens
ttctcgctctattagttcatgtgatagctggttgtttagaagagcctggcatccttccccgttctctctctccctctctctctcttgcctgctgtctaccrtgtgacatagctgctgctccttcaccatcccccatgattagaagcttcctgaggtccttattagaagcagatactggcaccatgcatttagtagagcctg

SEQ ID NO: 532940 - DNA, 201 bp, Homo sapiens
atagccactggaagcccagcaggcggcatgacacagaacccaaggccaaatgtgccccccagaaaaggcgcactcaagagctcagaggaggaaggtgctcyccggctggttctagccgccctggcagtgcccggggggaggcggtccatgctgggcagaatcctccccaccatcgtacaccaagaaacaaagtgacacaag

SEQ ID NO: 532941 - DNA, 201 bp, Homo sapiens; identical to SEQ ID NO: 145872

SEQ ID NO: 532942 - DNA, 201 bp, Homo sapiens; identical to SEQ ID NO: 145874

SEQ ID NO: 532943 - DNA, 201 bp, Homo sapiens; identical to SEQ ID NO: 145905

SEQ ID NO: 532944 - DNA, 201 bp, Homo sapiens
agcaatgaggagaataagatgatctctgaagtctctccatgttagtattagatgaagcacagggagcaatccgagtaccctagcaagagaggaatctggtrggcagaccacttaaaacttgtgtgaatgacaggagtggggaccatggttagggcagtgacacttgtctttctttccaggtgtttgcacttgtgacagcag

SEQ ID NO: 532945 - DNA, 201 bp, Homo sapiens
gagcaatccgagtaccctagcaagagaggaatctggtgggcagaccacttaaaacttgtgtgaatgacaggagtggggaccatggttagggcagtgacacktgtctttctttccaggtgtttgcacttgtgacagcagtatgctgtcttgccgacggggcccttatttaccggaagcttctgttcaatcccagcggtcctt

SEQ ID NO: 532946 - DNA, 201 bp, Homo sapiens
tgtttgcacttgtgacagcagtatgctgtcttgccgacggggcccttatttaccggaagcttctgttcaatcccagcggtccttaccagaaaaagcctgtrcatgaaaaaaaagaagttttgtaattttatattactttttagtttgatactaagtattaaacatatttctgtattcttccacatattttctgcagttatt

SEQ ID NO: 532947 - DNA, 201 bp, Homo sapiens
gacctgggttagagacccagactcattgagtggaatgagaatgacagcattttacaggggagaataaaaggagaagaacccaccaagagagaacagtcgcrgaggtttaaaatctcggagaactgacacgggagccaaaagaaaacactagtaggggaaggacagccaatggcaataacgtcataggggtccactaggata

SEQ ID NO: 532948 - DNA, 201 bp, Homo sapiens
ggacacactcattcatgaaaaccagagagggcggggcgccgtggcgcacacctgtggtcccagcactttgggaggccgggacgggaggatcgcttgatccmaggagttcgaggctgcagtgaacgttgatcgcaccactgcacacaagcctaggcgacagagaggtcctgcctctttaaaaacaaaaacaaaaaaaaaccc

SEQ ID NO: 532949 - DNA, 201 bp, Homo sapiens
gaaaaggcaggagagcacccaagtgtgactggtgtcaccgaagccaagatgggaatacatttcaagaagaatggacacatttaaacagaaagataagtatacacacacacacacacacacacacacacacacacacacactttctctctctctctgccccctggtgaccttttccagaggagtttgcctccagtgggcaag

SEQ ID NO: 532950 - DNA, 201 bp, Homo sapiens
ttaaatgataatattttagacatactgagctaaatatattaaaatctatgacttatttttttcttttttttttttttctgagacagagtctgtctctgtcrcccaggctggtggagtgcagtggtgctatctcagctcactgcaagctctgcctcccgggttcacgccattctcctgcctcagcctcccaagtagctggga

SEQ ID NO: 532951 - DNA, 201 bp, Homo sapiens
aaaaggcaggagagcacccaagtgtgactggtgtcaccgaagccaagatgggaatacatttcaagaagaatggacacatttaaacagaaagataagtatacacacacacacacacacacacacacacacacacacacactttctctctctctctgccccctggtgaccttttccagaggagtttgcctccagtgggcaagt

SEQ ID NO: 532952 - DNA, 201 bp, Homo sapiens
ggagggcggtgctccgccgcggtggcggttgctatcgcttcgcagaacctactcaggcagccagctgagaagagttgagggaaagtgctgctgctgggtckgcagacgcgatggataacgtgcagccgaaaataaaacatcgccccttctgcttcagtgtgaaaggccacgtgaagatgctgcggctggtgaggccgggcc

SEQ ID NO: 532953 - DNA, 201 bp, Homo sapiens
tggggaccatggttagggcagtgacacttgtctttctttccaggtgtttgcacttgtgacagcagtatgctgtcttgccgacggggcccttatttaccggragcttctgttcaatcccagcggtccttaccagaaaaagcctgtgcatgaaaaaaaagaagttttgtaattttatattactttttagtttgatactaagta

SEQ ID NO: 532954 - DNA, 201 bp, Homo sapiens
aatgtttaggcattaagttagcaggacccgattattgatcagttggggaatgggtaggaacagtgatcttaggttcctggcatgggtgataaggtagattrtggtaccaccagttgaggttgtgaatccaggaggaaggggcgggatttcagttttagacatggtgaattgagattcctgtaggttatccagatagggatt

SEQ ID NO: 532955 - DNA, 201 bp, Homo sapiens
gggaaggcatcaagaaagagcaaggaaaccagcgtaactggactggggtgagtgagtgaagatgaggaaggttttaagtaaagtatatgatctaacttacrttttaaaagtatactaggccaggcccggtggctcaccctgtaatcccagcactttaggaggccaaggcaggcagatcatttgaagtcaggagttccagca

SEQ ID NO: 532956 - DNA, 201 bp, Homo sapiens
taaagaccctggagagccactgaagaattttaaatagatgaagaaatgcgtaaacaaatttgcatgttagaaatttcatcatgatagttcatggaaaagaygatgaaaggcagtagttgtaaggatgaagaggagggagtgcccaaaatgtttaggcattaagttagcaggacccgattattgatcagttggggaatgggt

SEQ ID NO: 532957 - DNA, 201 bp, Homo sapiens
aaaaggttacagaggatagggactgaaaaagtggcccttcatttcataatctgtgggctgaagaccttggtccaatagagtaattggagtagtttgagatkatgtgttgctaatagtaattatattaattataaagaatgaagttacttagtaactagttatttgtaatcaaactgatcagtttagaagtttaaaagaaag

SEQ ID NO: 532958 - DNA, 201 bp, Homo sapiens
gagtgcagtggtgctatctcagctcactgcaagctctgcctcccgggttcacgccattctcctgcctcagcctcccaagtagctgggactacaggcatccrccaccatgcctggctaattttttgtatttttagtagagacggagtttcaccgtgttaacaaggatggtctcgatcttccgacgtcgtgatccgcctgcct

SEQ ID NO: 532959 - DNA, 201 bp, Homo sapiens
gtaacaacagtattcatgctcatcgtatctgtgttggcactgataccagaaaccacaacattgacagttggtggaggggtaagtggaagtctttctgcttkctttcttcaggttttatcagaatgcaaatttacttggaaaacagatgtaagaatagaaagctatactatattcatccttgagattcctaggccaatatac

SEQ ID NO: 532960 - DNA, 201 bp, Homo sapiens
tgagaatacctggaagaagagtgtttgaagcagagaaaatccagtgcagtggccttatggcaggaatgtgtgggaaggcatcaagaaagagcaaggaaacyagcgtaactggactggggtgagtgagtgaagatgaggaaggttttaagtaaagtatatgatctaacttacattttaaaagtatactaggccaggcccggt

SEQ ID NO: 532961 - DNA, 201 bp, Homo sapiens
gcttcagtgtgaaaggccacgtgaagatgctgcggctggtgaggccgggccgcggagggcgggaggctgatgaagctgctggggggcgggagatgtgggtrtgaagtgcaaagctgaacgcctgtttgcttttcaacctcgctttgatcaagattgaaaggcaaggcatggcctccttggggaagaaggagagagatacgg

SEQ ID NO: 532962 - DNA, 201 bp, Homo sapiens
cctgcctcagcctcccaagtagctgggactacaggcatccgccaccatgcctggctaattttttgtatttttagtagagacggagtttcaccgtgttaacmaggatggtctcgatcttccgacgtcgtgatccgcctgcctcggtctcccaaagtgctgggattacaggcgtgagccaccgcgcccggccgacttttttct

SEQ ID NO: 532963 - DNA, 201 bp, Homo sapiens
gtagctgggactttaggcacacgccgccatgcctggctagtttttgtatttttagtagagatggagtttcaccatgttgcccaggctggtctcaaactccygggctcaagcgatctgcccacctcagcttcccaaagtgctgggttacaggtgtgaggcaccacacccagccttctaatcttttcatagaaaacattaata

SEQ ID NO: 532964 - DNA, 201 bp, Homo sapiens
agccgtctgggtaggcggccagcagggcagaggagggcgagaggtctcaggtcttcggcctccaccaagcgcgactcccactgctcgggaagaagaggggstctcgccgctctgaggccacgaacagatcccccaacccgcttcagcctcctgtggcctctgccctgagatgggaaaggggggcctggaagggtaggtact

SEQ ID NO: 532965 - DNA, 201 bp, Homo sapiens
ctctttctccccacctcacccttttcctacccacccttttcctataatcatgggctcaaggccctacctcctgccccatcagtcacactcctgtactctcmtcagggtttatatatggtgggctaagaggagtgttgagtgttagctatggggcaggacagatggggtggcccagctgccatctgtttacatgaggaacag

SEQ ID NO: 532966 - DNA, 201 bp, Homo sapiens
aacggggtgcccatgggtcccaggtacaagcccggccgaacgtatctgaagccccaggaaacacgtggcacaaattccgggagaaactgttagcccggaaratatgggaacattaactggcgagtagtgtgaagccttgtgtacacaaacctttaagaaccttaaaacaagattggcggccgggcgcggtggctcacgcct

SEQ ID NO: 532967 - DNA, 201 bp, Homo sapiens
aaggtgctgggattacaggcatgagccacagcatccagcctaaacaatttttattttctaagagaacttttgcaaagcattttttccatggtccagtggtrgtacattttaagcggggaatgtttggatttcacaaattcccaaggtgaatccatagaggaatttctcactgctgaagttgctggttgtaggcattagtag

SEQ ID NO: 532968 - DNA, 201 bp, Homo sapiens
tgcccactctagaggagctgaaagtagatgaggtgaggctatccggaggacaggcaagggagacatggggctgcggcttctcgggcctgggcctagccccscttgggctccgcggatcctgggacccgggcccccctccccagtcctccaacgcatatacaggtcgacccccggaggtcccctccgcagctttgggagtcg

SEQ ID NO: 532969 - DNA, 201 bp, Homo sapiens
ttctgctgtctctgtccctatgcaaagatatttttgtggttataatcatagtatgtatacattgagaaattcatttttcacttgatattattggaaacackcttcgaagttgctatatagtcttcatgatcatcttttttttttttttttttttttttgagacggagtctcactctgttgcccaggctggagtgcagtggt

SEQ ID NO: 532970 - DNA, 201 bp, Homo sapiens
ctttttcattaattacgaaacagactcaatgtcttcctttattttcctgtgacagggatggtgttttatatgctcagcaacatgtgtataccttcattttkataagatttccacatttgtagggaaataaataatgcgtcagtctttttgggccgtatagttttgggcctttgaataattgaatcagccagttaaagctct

SEQ ID NO: 532971 - DNA, 201 bp, Homo sapiens
tacaaccctaggggctcacagtcgagggagacggtcatctaccttaaagtggtatcaccggtgcagagtgcatagagtggggtgacgaagccgcgggaaartgagacaatattggagcgtgcatctactcacagccttgggaaggtgtttggtaacaggacccatttaaagcattcgtttattcaagagatatcatttcag

SEQ ID NO: 532972 - DNA, 201 bp, Homo sapiens
aaggacaagaatgacttgaatatgaataaatggagagaaatactgtgttgtggatgagaaggtgtgattgatgtattcatatctgttttctaattattgtrtccccattttctagcaaagagtgggtgctcaacagctacttgtgctagacactattttgggtgcttggtgtgtaccgtagtcaacattatatttaattac

SEQ ID NO: 532973 - DNA, 201 bp, Homo sapiens
ggacaggagttcttaacctggggtacatgaatttctgggagaggagggtggatcaatgtgggctttagatgaaattgaagaattgaggattaaattacacytccacaagaagagtgatctgtgtggaaaacaaatcttatgtcactgtgtttttaaaaactgtacggggactctccattgctggtgagataaagcatcttc

SEQ ID NO: 532974 - DNA, 201 bp, Homo sapiens
aatatgtactcacatacctttcaaaaagcaaggctatgtatttgagatctgtacctatttttttctcacttttctgtttttcattgttttgcaaagagatkcccctaacccagctttcttttccaggcagataaaacgtcactgtgcagagccttttacagaatattggacttgcattgattatactggccagcagttatt

SEQ ID NO: 532975 - DNA, 201 bp, Homo sapiens
cagaatgaattatatgctaccctgcttcttagcagagaataccaaatataatataactttgttcttgatagcaaggattaatatctatttttgttcaatgygtaaataaaatgaggaccttgagcttttgaggagtggagtacagtttgtctttatactgaatgatcccaggatcttctgcttgttagtttgtgtatttgc

SEQ ID NO: 532976 - DNA, 201 bp, Homo sapiens
tgttcttattatttttatatatattaactcatttaatcttcataacagttctattaagtactattctctgttttacataaatttaggaaaactcaaggcayggtataaataaagtactataaaaagaggtacagacgtagtttaaggagacaaggacaggactagaaggttgattggctctagatggtgactttgtctcag

SEQ ID NO: 532977 - DNA, 201 bp, Homo sapiens
tgatgatattttattcttgcttgaacatgcatactagtagggttgaatgataagataaggaggattttgcaaaaaactgaaacttattctttttatacacrgaagttaaattttctctagccatttttgatggccacagaatgaattatatgctaccctgcttcttagcagagaataccaaatataatataactttgttct

SEQ ID NO: 532978 - DNA, 201 bp, Homo sapiens
actcaatgtcttcctttattttcctgtgacagggatggtgttttatatgctcagcaacatgtgtataccttcattttgataagatttccacatttgtagggaaataaataatgcgtcagtctttttgggccgtatagttttgggcctttgaataattgaatcagccagttaaagctcttttaaggcatatgacaagtaaat

SEQ ID NO: 532979 - DNA, 201 bp, Homo sapiens
gtttgttcaatgattaaatacgtctgaatgtgatttgctgggaatttaagtcggggagcagttgtagcagcgggagcaatgaggagacaccaggaggcgcrttgatggttacagattcctccaccctagctttcaactttgcttttgccctcttcacccttcccaggtcaccaaagtgaaaacagatcgacctttaccgga

SEQ ID NO: 532980 - DNA, 201 bp, Homo sapiens
atacattttggacctcattggcttaggagttatgacacatccccattgaaaaagcagtcagaagctttggactggaaagtccttggacacatttgataatkttgagtaaaaataaaaatagctaatatttatggtgtgctttcgatgtgataggcactgttcttattatttttatatatattaactcatttaatcttcata

SEQ ID NO: 532981 - DNA, 201 bp, Homo sapiens
ctttaccggagaatccctatcactcaagaccaagaccggatcccagccctgagatcgagggagatctgcagcctgccacacatggcagccgcttttatttytggaccaagtaaagatgggtccgtggcccacactcggtcatgtgctcagacaacgactgatgaaaacgcccatgcggtttgcatcgactgatagtgtgtt

SEQ ID NO: 532982 - DNA, 201 bp, Homo sapiens
ttgttgtcattactacagaacacaggtatgatggaaagaaaactgtatgcggagttaggttttacgtaggtcattgtgcatgatacttaagtaaaaaaaaactaagctgtgtaattgtaggaaaatgttttaacaagcatattagcactctatttaaaaggagagaaagtcaactcaaaggaaattggctcttgtaactct

SEQ ID NO: 532983 - DNA, 201 bp, Homo sapiens
gttgttgtcattactacagaacacaggtatgatggaaagaaaactgtatgcggagttaggttttacgtaggtcattgtgcatgatacttaagtaaaaaaaaactaagctgtgtaattgtaggaaaatgttttaacaagcatattagcactctatttaaaaggagagaaagtcaactcaaaggaaattggctcttgtaactc

SEQ ID NO: 532984 - DNA, 201 bp, Homo sapiens
cacacatggcagccgcttttatttctggaccaagtaaagatgggtccgtggcccacactcggtcatgtgctcagacaacgactgatgaaaacgcccatgcrgtttgcatcgactgatagtgtgttctttccgggatcacaaacattaacaaaaaagttaacttatgtgacttggcagttattctataccatttcctgtcca

SEQ ID NO: 532985 - DNA, 201 bp, Homo sapiens
tagtttaaggagacaaggacaggactagaaggttgattggctctagatggtgactttgtctcagtttccacacctgcagactgtgtagccctgctgtgcartgaggctgttgtgagaataaatgagaaggatgttgaaattctgtgttgtttgagacaaagagatctgaatgaatttgagacggtattcatggtaaacagc

SEQ ID NO: 532986 - DNA, 201 bp, Homo sapiens
ggttgttgtcattactacagaacacaggtatgatggaaagaaaactgtatgcggagttaggttttacgtaggtcattgtgcatgatacttaagtaaaaaaaaactaagctgtgtaattgtaggaaaatgttttaacaagcatattagcactctatttaaaaggagagaaagtcaactcaaaggaaattggctcttgtaact

SEQ ID NO: 532987 - DNA, 201 bp, Homo sapiens
ttcactaggttgttgtcattactacagaacacaggtatgatggaaagaaaactgtatgcggagttaggttttacgtaggtcattgtgcatgatacttaagtaaaaaaaaactaagctgtgtaattgtaggaaaatgttttaacaagcatattagcactctatttaaaaggagagaaagtcaactcaaaggaaattggctct

SEQ ID NO: 532988 - DNA, 201 bp, Homo sapiens
ttcttactatataaagaaattaggttttctacctcagaaatcttttttgtttactaacttgttctcaacttgaggatcctgaagttgtcttgtaagtgagrtaagaatatgtactcacatacctttcaaaaagcaaggctatgtatttgagatctgtacctatttttttctcacttttctgtttttcattgttttgcaaag

SEQ ID NO: 532989 - DNA, 201 bp, Homo sapiens
attcactaggttgttgtcattactacagaacacaggtatgatggaaagaaaactgtatgcggagttaggttttacgtaggtcattgtgcatgatacttaagtaaaaaaaaactaagctgtgtaattgtaggaaaatgttttaacaagcatattagcactctatttaaaaggagagaaagtcaactcaaaggaaattggctc

SEQ ID NO: 532990 - DNA, 201 bp, Homo sapiens
ttgagcctcggaggccgaagttgcagtaagccgagatcgcgccactgcactccagcctggggaatgggagtgaaaccctgtctcaaaaaaaaaaaaaaaaattattattatgacagtgtttaattttcttggtaaagtcagaacagtgctacttttgtgttctctattctgacccgcatgaggtaaagctgagaaagtggt

SEQ ID NO: 532991 - DNA, 201 bp, Homo sapiens
atatccaaacaactatattccagataccaacagcaaatattataccaaacttgcttttaattttagaaaaagggaaggttgtctgctgtcattgctcttcrtctgtattgtcctgaaggggttggttaaagcaataaaataggaaatgagaataagaagaaaaaaataaagtagcagaagggaaagagacagtttttattt

SEQ ID NO: 532992 - DNA, 201 bp, Homo sapiens
tctttttgctgtgaaaaatttgaaaaggcacgtaaaacaacctatcacagtcctttttaagcaggcattcactaggttgttgtcattactacagaacacargtatgatggaaagaaaactgtatgcggagttaggttttacgtaggtcattgtgcatgatacttaagtaaaaaaaaactaagctgtgtaattgtaggaaaa

SEQ ID NO: 532993 - DNA, 201 bp, Homo sapiens
cagtaaacagtttgaaagtctaatagaaaaactatcctatttagatagtatcaaaagtgctaaaatactgaggaataaacaagaaatgttcaaggtccctrtaatgaaggaaactagttttaaccaaaggacaagaatgacttgaatatgaataaatggagagaaatactgtgttgtggatgagaaggtgtgattgatgta

SEQ ID NO: 532994 - DNA, 201 bp, Homo sapiens
attttggaaagactctcaccttgctgtaccaaaaatggccaccagccactcgagttgctgttctgttgatacttgcttagcaaacctagacaaagtgtgcyctttatccagaagtgagcagaagctcctggactgagtctaattgtcctggctggcggacttcgtatacatatcattgcatcacttgtgcttcaggagata

SEQ ID NO: 532995 - DNA, 201 bp, Homo sapiens
gaagtgagcagaagctcctggactgagtctaattgtcctggctggcggacttcgtatacatatcattgcatcacttgtgcttcaggagataaaaagctctrattgctcaggcctgagatggggagtggacttagcttcatccaaaccacattgctgagagacagggaggggttgttcccaaaggaaaattagaaggatgtt

SEQ ID NO: 532996 - DNA, 201 bp, Homo sapiens
cctttgtcccatctttcctttcctaggtgaaaattagttctgctgtgcttaaagctgcggcccatcactatggagctcaatgtgataagcccaacaaggartttatgctctgccgctgggaagagaaagatccgaggcggtgtttagaggaaggcaaactggtcaacaagtgtgctttggacttctttaggtaaaaatctt

SEQ ID NO: 532997 - DNA, 201 bp, Homo sapiens
cacccagctgggccctgggaagtgaggcggggtaagcggtcctcccagggagtcccaggctggggttgggaggaaggggcctccaatcccaagaggggccrtagcggggcggcgcgggcagggaggcgggagcgggagagaatccaccggggaggcatcctgaatggctcattagtgccgatgaaagccttttttcatttc

SEQ ID NO: 532998 - DNA, 201 bp, Homo sapiens
atcccagatagcacaatcagtgcaatcgacagtgatgggaggtgcccattagtgctgctccattgctcagcacccacctggcagccagcgggaagagctgygcctgccctggacacttcctgaattagagaatctctgtgcactccctctcccaggaagagtcacacaggtacctactctgagagccaagggccacatctc

SEQ ID NO: 532999 - DNA, 201 bp, Homo sapiens
cccccaccttgaagctgctcaaccaccacccgctgcttgaggaattcctacaagaggggctggaaaagggagatgaggagctgaggccagcactgcccttycagcctgacccacctgcacccttcaccccaagtccccttccccgcctggccaaccaggacagccgccctgtctttaccagccccactccagccatggctg

SEQ ID NO: 533000 - DNA, 201 bp, Homo sapiens
tggctggacacggtggctcatgcctgtaatcccagcactttgggaggccgaggcaggtggatcacctgacatcagaagttcaagattagtctggccaacayggtgaaaccccgtctctactaaaaatacaaaaaattggccgggcgcggtggctcatgcctgtaatcccagcactttgggaggctgaggcgtgtggaacga

SEQ ID NO: 533001 - DNA, 201 bp, Homo sapiens
tgacccccacgacccccagtggaatgagacagagccagcctgccgaggtcagtagacaccagtggatgggcctaccgggcaaaaggcagggtcataccagsagaatagcagcagagcccggggccacaggggccctgtgatatgcgtggttcaggcttcctccaaggaggaggtggggggtcccagcaatttgtgggcact

SEQ ID NO: 533002 - DNA, 201 bp, Homo sapiens
ggggtttcaccatgttagccaagatggtcttgatctcctgacctcgtgatccacccacctcagcctcccaaagtgctgggattacaggcgtgagccaccgygcctggccgggctttttctttttagtgggtatgggcttaggcttttgaatctttttttttttttttttttgagatggagtctccctctgtcacccaggct

SEQ ID NO: 533003 - DNA, 201 bp, Homo sapiens
ctgctgtaatatgaaaccaaaacacctaccccacaaagtcatggttaggattaagcaaaatggtacatgtcaagtgcttagcacatgcttcattaaggaamccagtattacatgactggcaggatgggagagggaggaaaaggggctcaggactttgccgctgtctcagctgtgtccctcctacccatccccctctctgag

SEQ ID NO: 533004 - DNA, 201 bp, Homo sapiens
caccactcccagctaattttttgtatttttagtagagatggggtttcaccatgttagccaagatggtcttgatctcctgacctcgtgatccacccacctcrgcctcccaaagtgctgggattacaggcgtgagccaccgtgcctggccgggctttttctttttagtgggtatgggcttaggcttttgaatctttttttttt

SEQ ID NO: 533005 - DNA, 201 bp, Homo sapiens
ccactggctaccagctgaagggcgccaggcatctcacctgtctcaatgccacccagcccttctgggattcaaaggagcccgtctgcatcggtgagtgccccaggggaaagggctcagtgctgagcagagaagtgaggtgggggctcatccctgctctctgttgctctctgccactttcatttgctcttcataaggaagcca

SEQ ID NO: 533006 - DNA, 201 bp, Homo sapiens
cctctgcctcccgagttcaagcgattctcctgcctcagcctcccaagtaactgggactacaggcgcgtgccaccatgcccagatcatttttttttttttttgtatttttagtagagatggggttttaccatgttagctggtctcgaactcctgattttgtgatccacctgcctcggcctcccaaagtgctgggattacagg

SEQ ID NO: 533007 - DNA, 201 bp, Homo sapiens
agtgtgagtgcctaccgggtcaggccgagccaactcctgaggtctggggatatcccttgtccagcccatcctcgggcccccaggccggctctgccctgacrctcctccttcacaggctgcgcataggccctggtgatgtgcttaccttctatgatggggatgacctgacggcccgggttctgggccagtactcagggcccc

SEQ ID NO: 533008 - DNA, 201 bp, Homo sapiens
gatcctggagatgtggagcacagccgacgcctcatatccagccccaagtttcccgtgggggccaccgtgcaatatatctgtgaccagggttttgtgctgaygggcagctccatcctcacctgccatgatcgccaggctggcagccccaagtggagtgaccgggcccctaaatgtctccgtaagtgtcaattgagtaggagg

SEQ ID NO: 533009 - DNA, 201 bp, Homo sapiens
tggaggacatccacttggaattctcccagttctggggagggcctggggttgccaggcacacaagacaggacactggaccaggaatcatgagtcctggcctmgagtcctggctttgtcttggactcactgtgtgaccaaagaggatctctcaacttccctgattacaaggttcccttatctataaagtgcaggaaaacagcc

SEQ ID NO: 533010 - DNA, 201 bp, Homo sapiens
taactctggtctgtgctgtaactctatccctgatgctgcctccggtgacccttggtccttccctaccctaagctgcacacacaggagactgaaagagacargggaggagggcttagccctgtcaactcaaggtgtccacacacccagctctgcagggtccttggaggtcaaaacaaggtggagacaagggacaggcctgag

SEQ ID NO: 533011 - DNA, 201 bp, Homo sapiens
tgttccacaagcaaacattgagaatttgctatgtgccatgctctgcgctgggcactggggacacagaccttcatgattagtagggaagacagaaatcatamacaatgaccacggaatgcccagtgctggcagggatggggatgggaagcacaggacgggcacactccaccagcctgggggtcagggaaggcttcctggagg

SEQ ID NO: 533012 - DNA, 201 bp, Homo sapiens
ggacctgaagaatttctgacactacccaacaatacccactggagagttggaaaaactgaggcccaggcaagaaaagggacttgccaaaagtcagtcagttaattactaattagttttgttgagtggatttgttccacaagcaaacattgagaatttgctatgtgccatgctctgcgctgggcactggggacacagaccttc

SEQ ID NO: 533013 - DNA, 201 bp, Homo sapiens
atgacaccctcactgcactctgcctgctttgtagtggaacagctcaagccatgccatggtctcagtgcccctgagaatggtgcccgaagtcctgagaagcrgctacacccagcaggggccaccatccacttctcgtgtgcccctggctatgtgctgaagggccaggccagcatcaagtgtgtgcctgggcacccctcgcat

SEQ ID NO: 533014 - DNA, 201 bp, Homo sapiens
caactctggagatgccaaagcccacagttacccctgtccccaaccaggatggctaaggaggcagtggggtctctgtccctggaggtatgcccacagataamagacagctccagactggagggttcactcttcccagtagttgggctagatgtcccagccccatcctgagtcccaaccctgccccaagtttgctgtgtgact

SEQ ID NO: 533015 - DNA, 201 bp, Homo sapiens
tttagaggccccaaccgtggggaaaggacaagccccaggcatcgaggagacagatggcgagctgacagcagcccccacacctgagcagccagaacgaggcrtccactttgtcacaacagcccccaccttgaagctgctcaaccaccacccgctgcttgaggaattcctacaagaggggctggaaaagggagatgaggagct

SEQ ID NO: 533016 - DNA, 201 bp, Homo sapiens
aacatcttcaccctaatagtccctcctccaattccagccacttgtcaggctctcctcttgaccactgtgttatgggataaggggagggggtgggcatattytggagaggagcagaggtccaaggacccaggaatttggcatggaacaggtggtaggagagccccagggagacgcccaggagctggctgaaagccactttgt

SEQ ID NO: 533017 - DNA, 201 bp, Homo sapiens
tgctccacaccaaagcaggacacgccattttccactgaccaccctataccctgaggaaagggagactttcctccgatgtttatttagctgttgcaaacatyttcaccctaatagtccctcctccaattccagccacttgtcaggctctcctcttgaccactgtgttatgggataaggggagggggtgggcatattctggag

SEQ ID NO: 533018 - DNA, 201 bp, Homo sapiens
agcccaggctggtctctctccctccctgcagcccactccagtctcttcctccccaatcttgggcttcactgacccctcaaggagactcatagctggagctkctgcagctatttttagcagctctgcacccctcccctcccccactcaggtttgctggggaagtgaagggccaggccagcctcatgggctggagtgctgggt

SEQ ID NO: 533019 - DNA, 201 bp, Homo sapiens
agcctcatgggctggagtgctgggtgggcggggccccttcccctcaggcaaaaggtgcctgggatagcccacaggctcagggcccacaccctggggcaggmgaagctcattcctcctgcatgccgatgggagaggtcccacgatgacctccctctgcctctacaacctcgccaagtccctaagggcagagcccaggcctcc

SEQ ID NO: 533020 - DNA, 201 bp, Homo sapiens
ctgggtgggcggggccccttcccctcaggcaaaaggtgcctgggatagcccacaggctcagggcccacaccctggggcaggcgaagctcattcctcctgcmtgccgatgggagaggtcccacgatgacctccctctgcctctacaacctcgccaagtccctaagggcagagcccaggcctccagtgactcctccctaagcc

SEQ ID NO: 533021 - DNA, 201 bp, Homo sapiens
tggagtgcagtagcgcaatctccactcactgcaacctctgcctcccgagttcaagcgattctcctgcctcagcctcccaagtaactgggactacaggcgcrtgccaccatgcccagatcatttttttttttttttgtatttttagtagagatggggttttaccatgttagctggtctcgaactcctgattttgtgatccac

SEQ ID NO: 533022 - DNA, 201 bp, Homo sapiens
tgcggggggagggcccaggcggcggcggggccatgccagggctgggggcggcaggcgctgggaagttcctgggcagtctccaccagggatggcccgcgggraagggaggggtgtttcccggacccagcccactcggagaatgcagcccccggccctgcgggaggggaggactgagcaactgcggagtgcatcctgtgttct

SEQ ID NO: 533023 - DNA, 201 bp, Homo sapiens
gcccacttcggcctcccaaagtgctgggattacaggcatgagccaccactcccggctgtttgtttgttttgagatggagttttgctctcgttgcccaagcwggaatgcaatggagtgatctcagctcaccacaacctccacctcccgggttcaagcgattctcctgcctcagcctcccccgtagctgggattacaggcatg

SEQ ID NO: 533024 - DNA, 201 bp, Homo sapiens
ggattacaggcatgcgccaccatgcccggctaattttgtatttttagtagagacggggtttatccatgttggtcaggcttgtctcgaactcccgacctcargtgatccgcccacctcggcctcccaaagtgctgggattacaggcatgagacaccggcccggccaccattctggttttaaaagaagtccatggccattggc

SEQ ID NO: 533025 - DNA, 201 bp, Homo sapiens
cagtggcattcatccaacctgcacttattgagcatctaccagatgaaggcaccacaggtacaaacagctgaattaaacagggactctgccctcaaagaacmcacatttccaggaaagggagaaaggagaaagcacagaggtcaccaatttccaggggaagaagtaaaaagcaccaatgaaaagacataaagtgacctggga

SEQ ID NO: 533026 - DNA, 201 bp, Homo sapiens
tcctccccaaagtcctttccttgtacacacacacacacacacacacacacacacacacacaccactgccccgagctctgcctccctcccggcctgccttcstgcccggccctggtccactccccacctgcaaggcagatttgtctctggaggacctgttccccacaccctgagaatccccgcgccccctctaggagtctgg

SEQ ID NO: 533027 - DNA, 201 bp, Homo sapiens
gggacctgaagaatttctgacactacccaacaatacccactggagagttggaaaaactgaggcccaggcaagaaaagggacttgccaaaagtcagtcagttaattactaattagttttgttgagtggatttgttccacaagcaaacattgagaatttgctatgtgccatgctctgcgctgggcactggggacacagacctt

SEQ ID NO: 533028 - DNA, 201 bp, Homo sapiens
tgggacctgaagaatttctgacactacccaacaatacccactggagagttggaaaaactgaggcccaggcaagaaaagggacttgccaaaagtcagtcagttaattactaattagttttgttgagtggatttgttccacaagcaaacattgagaatttgctatgtgccatgctctgcgctgggcactggggacacagacct

SEQ ID NO: 533029 - DNA, 201 bp, Homo sapiens
ttgggacctgaagaatttctgacactacccaacaatacccactggagagttggaaaaactgaggcccaggcaagaaaagggacttgccaaaagtcagtcagttaattactaattagttttgttgagtggatttgttccacaagcaaacattgagaatttgctatgtgccatgctctgcgctgggcactggggacacagacc

SEQ ID NO: 533030 - DNA, 201 bp, Homo sapiens
agtgcccccctacaggcctgggaggctctgtctgccccccccaagcctaccacccctactgaagcccactggacaaggctgagcccagccctggcaccctmcacaatggagcaagatgctggctctgcctgccccctctctggcccaggcacaagccccatgctggatgcccacccctcacataagccccgtgtctgttgt

SEQ ID NO: 533031 - DNA, 201 bp, Homo sapiens
gagatggggttttaccatgttagctggtctcgaactcctgattttgtgatccacctgcctcggcctcccaaagtgctgggattacaggtgtgagccaccgygcccagctggatcttcacttttattttattttattttattttatttatttattttattttttggaacatggagtctcactctgtcgcccaggctggagtg

SEQ ID NO: 533032 - DNA, 201 bp, Homo sapiens
gcttgaacccaggaggcagaggttgcagtgagctgagatcacgccattgcacttcagcctgagcaacaagagtaaaactccgtctcaaaaaaaaaaaaaaagaaagaaaacaaacctcattgagctactgtgaaaactgagataagattgcacatgttagggggccgggtgcagtggctcacgcctgtaatcccagcactt

SEQ ID NO: 533033 - DNA, 201 bp, Homo sapiens
aggcgcgtgccaccatgcccagatcatttttttttttttttgtatttttagtagagatggggttttaccatgttagctggtctcgaactcctgattttgtkatccacctgcctcggcctcccaaagtgctgggattacaggtgtgagccaccgcgcccagctggatcttcacttttattttattttattttattttattta

SEQ ID NO: 533034 - DNA, 201 bp, Homo sapiens
ggcgtgaacccgggagtcagagcttgcagtgagccaagatcatgtcactgcacgccagcctgggtgacagagcgagactctgtctcaaaaaaaaaaaaaaatagccaggcatggtggtgtacacctgtaatcctagctactcgggaagctgagcaggagaatagcttgaacccaggaggcagaggttgcagtgagctgaga

SEQ ID NO: 533035 - DNA, 201 bp, Homo sapiens
ttctatttaacatctcatctctgagcctcatctgtaaaatggcaataagaaaataaacttctggctggacacggtggctcatgcctgtaatcccagcactktgggaggccgaggcaggtggatcacctgacatcagaagttcaagattagtctggccaacatggtgaaaccccgtctctactaaaaatacaaaaaattggc

SEQ ID NO: 533036 - DNA, 201 bp, Homo sapiens
ttccagcctgacccacctgcacccttcaccccaagtccccttccccgcctggccaaccaggacagccgccctgtctttaccagccccactccagccatggstgcggtacccactcagccccagtccaaggagggaccctggagtccggagtcagagtcccctatgcttcgaatcacagctcccctacctccagggcccagc

SEQ ID NO: 533037 - DNA, 201 bp, Homo sapiens
ctgggaggtggcataagcagggtgaggtacagcagattgattatttatcagactggtgaggggtgatgccaagaagaccattccttccatcctaccccagrggctggggtcgattcctgcccctacctcaaggtcagtccctccctctcacctaacccccactccaggcccccagctccagtgccacctgcccagtctgag

SEQ ID NO: 533038 - DNA, 201 bp, Homo sapiens
gtaggagaaggggcctggggctagcagatggacagaaggagctgatggacagaaacgcctccagggagagaacgaagcccagtccccagctccagccctayctaggactctgccctggccacactcctgggaggtggcataagcagggtgaggtacagcagattgattatttatcagactggtgaggggtgatgccaagaa

SEQ ID NO: 533039 - DNA, 201 bp, Homo sapiens
agcctgacccacctgcacccttcaccccaagtccccttccccgcctggccaaccaggacagccgccctgtctttaccagccccactccagccatggctgcrgtacccactcagccccagtccaaggagggaccctggagtccggagtcagagtcccctatgcttcgaatcacagctcccctacctccagggcccagcatgg

SEQ ID NO: 533040 - DNA, 201 bp, Homo sapiens
gggccagtgggtagctcctcattctctgcctcctaacatagcaggtaggagaaggggcctggggctagcagatggacagaaggagctgatggacagaaacrcctccagggagagaacgaagcccagtccccagctccagccctacctaggactctgccctggccacactcctgggaggtggcataagcagggtgaggtaca

SEQ ID NO: 533041 - DNA, 201 bp, Homo sapiens
ggcagtaattctaggagatcctaaggggttcagggggaccctacccccacctcaggttgggcttccctgggcactcatgctccacaccaaagcaggacacrccattttccactgaccaccctataccctgaggaaagggagactttcctccgatgtttatttagctgttgcaaacatcttcaccctaatagtccctcctcc

SEQ ID NO: 533042 - DNA, 201 bp, Homo sapiens
atatgctcacacacctacatacatacacatgtgcacacacacagacacacaaacacatacacacagcctagccctgcagatgctcagcagagggagatgargtgacaggctccagcacactcaaaagaaaagtgacaagtcggccgggcgcggtggctcacgcctgtaatccaagcactttgggaggccaaggcgggtggg

SEQ ID NO: 533043 - DNA, 201 bp, Homo sapiens
ctgtgaccagggttttgtgctgacgggcagctccatcctcacctgccatgatcgccaggctggcagccccaagtggagtgaccgggcccctaaatgtctcygtaagtgtcaattgagtaggagggaaaacctctagctggagataaaagatgctgccctggaggccaagggcatgacaccctcactgcactctgcctgctt

SEQ ID NO: 533044 - DNA, 201 bp, Homo sapiens
tgatgttggcctggactgcttcttctacatctctgtctaccctggctatggcgtggaaatcaaggtgagtgatctggatctggcaagggcaaagctggggygggtgtattctctttcttcagagaggcacatgctatgagaggatgtggggatgattaggggcatcaattgtggggcatcgcctaaggccagggctgggag

SEQ ID NO: 533045 - DNA, 201 bp, Homo sapiens
ggaaatcaaggtgagtgatctggatctggcaagggcaaagctggggcgggtgtattctctttcttcagagaggcacatgctatgagaggatgtggggatgmttaggggcatcaattgtggggcatcgcctaaggccagggctgggagatgggcctaaatggttagattctgccccgtgtgtttggcaatggcctaagccaa

SEQ ID NO: 533046 - DNA, 201 bp, Homo sapiens
ctgggtagttgaaggtggaaccagcccagactcgctgccctccttgctggggaggggggtctctgtgcaattacatcctagagggaaggagcagagagggsctagtgacacatagcacaaatgtccagtgaagctctggacaattggaggtaagtatcgcgtatctgaaacctccaggatcttctctcttccacccaccac

SEQ ID NO: 533047 - DNA, 201 bp, Homo sapiens
tttaactctatcctgagggtaatggggagccactaagcaattttcagcaaaggatggggcatgatcagatttgaagggcagttccattctgagaccaagcygaggcaggtctgtcctttctgcagagaagaaacttgccccagccccccaggagctttactaggttacaatattctgctgccttgagcatttggagacaaa

SEQ ID NO: 533048 - DNA, 201 bp, Homo sapiens
tgaactaggaggattcactttgcctctcagccttagtttcttcataggccaagcataaactattgattccaagcacaaagggctgccactctaggtggaakacagctctttgtgaagtgcatggctagcccatagcaggtgctcagtaaatgtgagtgcctctcctgtgcccgaggccaggcagctgctctggggtagtag

SEQ ID NO: 533049 - DNA, 201 bp, Homo sapiens
atctcctgagctgccactttccccgtcgtccagcttatggagatgtgactgtcaccagcctccacccagggggtagtgcccgcttccattgtgccactggmtaccagctgaagggcgccaggcatctcacctgtctcaatgccacccagcccttctgggattcaaaggagcccgtctgcatcggtgagtgccccaggggaa

SEQ ID NO: 533050 - DNA, 201 bp, Homo sapiens
gcttgaggaattcctacaagaggggctggaaaagggagatgaggagctgaggccagcactgcccttccagcctgacccacctgcacccttcaccccaagtscccttccccgcctggccaaccaggacagccgccctgtctttaccagccccactccagccatggctgcggtacccactcagccccagtccaaggagggacc

SEQ ID NO: 533051 - DNA, 201 bp, Homo sapiens
aacagcccccaccttgaagctgctcaaccaccacccgctgcttgaggaattcctacaagaggggctggaaaagggagatgaggagctgaggccagcactgyccttccagcctgacccacctgcacccttcaccccaagtccccttccccgcctggccaaccaggacagccgccctgtctttaccagccccactccagccat

SEQ ID NO: 533052 - DNA, 201 bp, Homo sapiens
gcgctgggcactggggacacagaccttcatgattagtagggaagacagaaatcataaacaatgaccacggaatgcccagtgctggcagggatggggatggraagcacaggacgggcacactccaccagcctgggggtcagggaaggcttcctggaggtgatgacacctggcctgagacctgtaggatgagaagccagcagc

SEQ ID NO: 533053 - DNA, 201 bp, Homo sapiens
actcatattactgctctagaaggaccataaaaacagaaatgagtacaaaagaaatgatttcctgagaacggagagaaactactgggcccctaacaaagaagtcatgcacccatggtcgggtgcggtggctcatgctgtaatccctaggaggctgaggtgagaggattgcttgagcccaggagtttgagaccagcccagaca

SEQ ID NO: 533054 - DNA, 201 bp, Homo sapiens
tactcatattactgctctagaaggaccataaaaacagaaatgagtacaaaagaaatgatttcctgagaacggagagaaactactgggcccctaacaaagaagtcatgcacccatggtcgggtgcggtggctcatgctgtaatccctaggaggctgaggtgagaggattgcttgagcccaggagtttgagaccagcccagac

SEQ ID NO: 533055 - DNA, 201 bp, Homo sapiens
ctactcatattactgctctagaaggaccataaaaacagaaatgagtacaaaagaaatgatttcctgagaacggagagaaactactgggcccctaacaaagaagtcatgcacccatggtcgggtgcggtggctcatgctgtaatccctaggaggctgaggtgagaggattgcttgagcccaggagtttgagaccagcccaga

SEQ ID NO: 533056 - DNA, 201 bp, Homo sapiens
gatagccagcactacaccccccagcagagcctggacaccaacccaagagggtcctggagacatgggaaggccgtgggttgcagaggttgtgtcccagggcrcagggatcgggatccaggggaccatcacctcctccacagcttcaggagatgatgaggagaccaccactaccaccaccatcatcaccaccaccatcaccac

SEQ ID NO: 533057 - DNA, 201 bp, Homo sapiens
ccagcggccctatatagccctgccagcctctagctggggcctcacagtacagagggcagggctgggcccgtggaattgtcactgtaaggagggactctggmtctggggggcccaagcactctcagctccctcaggttctcggataataggggtctgcagggaccaggccctcactaatcccctattaaaacttgaaagggg

SEQ ID NO: 533058 - DNA, 201 bp, Homo sapiens
aggaaaattgcttgaacccaggaggcagaggttgcagtgagacgagatcatgccactgcactccagcctgagtgacagagtgagactgtctcaaaaaaaawtttttttaataaataaataaatgagagaccagagttttattactactcaaatcagcctccctgaatatttggaggctagggttttggtgtttttttggtt

SEQ ID NO: 533059 - DNA, 201 bp, Homo sapiens
tctcagaccctgtttctccacctgcgggatggagacgattaatcagatggtgtagatgatggggcagcatggagtctagcacacagcagctgcccagaaamcttagcgctctctccaggccctcttctcacacctccatccctgactcctattcctcacctaatgcacccccccccacatacatgcacacacacagagaca

SEQ ID NO: 533060 - DNA, 201 bp, Homo sapiens
cacccacctaccctgtgggtaccactgtggagttcagctgcgaccctggctacaccctggagcagggctccatcatcatcgagtgtgttgacccccacgayccccagtggaatgagacagagccagcctgccgaggtcagtagacaccagtggatgggcctaccgggcaaaaggcagggtcataccaggagaatagcagca

SEQ ID NO: 533061 - DNA, 201 bp, Homo sapiens
cgggcagggaggcgggagcgggagagaatccaccggggaggcatcctgaatggctcattagtgccgatgaaagccttttttcatttcgtctaaatactttmaacagggctccctccgatgtctatttgcacagcttaagagctaatgcggggggagggcccaggcggcggcggggccatgccagggctgggggcggcaggc

SEQ ID NO: 533062 - DNA, 201 bp, Homo sapiens
ccatcaactgccagttggggctgtgatggggcatggccaagggctggctgcccatcttctcctggcaggacccactcctgctcaccttgctggccaagggmtaggcactttggggagcaggttgccttctgagtgtgcagagaggcagaatcggggcttggaaacagtgtgccctgagcccagccttcactatgcctagca

SEQ ID NO: 533063 - DNA, 201 bp, Homo sapiens
ctttccccgtcgtccagcttatggagatgtgactgtcaccagcctccacccagggggtagtgcccgcttccattgtgccactggctaccagctgaagggcrccaggcatctcacctgtctcaatgccacccagcccttctgggattcaaaggagcccgtctgcatcggtgagtgccccaggggaaagggctcagtgctgag

SEQ ID NO: 533064 - DNA, 201 bp, Homo sapiens
gaaggcatgttaggctgcctgggttcaggcaggggcctagcctacgtcctgtcctggtcttaacagctgcttgcggcggagtgatccgcaatgccaccacyggccgcatcgtctctccaggcttcccgggcaactacagcaacaacctcacctgtcactggctgcttgaggctcctgagggccagcggctacacctgcact

SEQ ID NO: 533065 - DNA, 201 bp, Homo sapiens
gtggatttgttccacaagcaaacattgagaatttgctatgtgccatgctctgcgctgggcactggggacacagaccttcatgattagtagggaagacagawatcataaacaatgaccacggaatgcccagtgctggcagggatggggatgggaagcacaggacgggcacactccaccagcctgggggtcagggaaggcttc

SEQ ID NO: 533066 - DNA, 201 bp, Homo sapiens
caggtgtgggaaagggggtgggagggggcaggtgccaggctgagtgcccccctacaggcctgggaggctctgtctgccccccccaagcctaccacccctamtgaagcccactggacaaggctgagcccagccctggcaccctccacaatggagcaagatgctggctctgcctgccccctctctggcccaggcacaagcccc

SEQ ID NO: 533067 - DNA, 201 bp, Homo sapiens
tcctgcgggcagatggtaagcaacaccatggtaagcttgaaaagacccttctgggcctcctctgccttccagccgtgtgcagcggggagatcacagactcrgctggcgtggtactctctcccaactggccagagccctacggtcgtgggcaggattgtatctggggtgtgcatgtggaagaggacaagcgcatcatgctgg

SEQ ID NO: 533068 - DNA, 201 bp, Homo sapiens
ggctccctccgatgtctatttgcacagcttaagagctaatgcggggggagggcccaggcggcggcggggccatgccagggctgggggcggcaggcgctggraagttcctgggcagtctccaccagggatggcccgcggggaagggaggggtgtttcccggacccagcccactcggagaatgcagcccccggccctgcggga

SEQ ID NO: 533069 - DNA, 201 bp, Homo sapiens
gacccttctgggcctcctctgccttccagccgtgtgcagcggggagatcacagactcggctggcgtggtactctctcccaactggccagagccctacggtygtgggcaggattgtatctggggtgtgcatgtggaagaggacaagcgcatcatgctggacatccgagtgtgagtgcctaccgggtcaggccgagccaactc

SEQ ID NO: 533070 - DNA, 201 bp, Homo sapiens
ggacaagcgcatcatgctggacatccgagtgtgagtgcctaccgggtcaggccgagccaactcctgaggtctggggatatcccttgtccagcccatcctcrggcccccaggccggctctgccctgacgctcctccttcacaggctgcgcataggccctggtgatgtgcttaccttctatgatggggatgacctgacggccc

SEQ ID NO: 533071 - DNA, 201 bp, Homo sapiens
tttctgtgagcacagtttgctgctgatgcagctgcctggagccctggcatttattgagcgcaaagtaataatttattatcctttgtacgctcaaaagccaycttcattatcgtcccaagacggaactgccacaagggcacgcgggcctcaccagctgcctcactctcggatgtcttcccaggtcacccttgacgccctcag

SEQ ID NO: 533072 - DNA, 201 bp, Homo sapiens
cgaagctaagtgttcctggctgtcctccacccataaaatcctcctaaactggctctgagcttccagaattgcccatcatacatccaaccctcagagcaccwgtgcgcggccaagtttgggaagcaaacctcatcggtggatgacaagaatcctccctgaggaatgagtagctgctacgcccagttccccgaggcctttctg

SEQ ID NO: 533073 - DNA, 201 bp, Homo sapiens
accagtcaaggctgagctgggctgggacctgtggtttacagccttccagcagggccattgctatgagccctttgtcaaatacggtaacttcagcagcagcrcacccacctaccctgtgggtaccactgtggagttcagctgcgaccctggctacaccctggagcagggctccatcatcatcgagtgtgttgacccccacga

SEQ ID NO: 533074 - DNA, 201 bp, Homo sapiens
ttccgtgcctcggggaagagtcttgtctggacctgccgtcctggctcaaacaagctctcatggaagctactggcacccacgtccttctcccgctgcagtakgctggtagggtcggcagaaccgcacttggagttgagacctgccatcccttgccatatggtttgaagggcctgatgtgaagtgtgagggtgggagtttcta

SEQ ID NO: 533075 - DNA, 201 bp, Homo sapiens
tgtctggcctgggtcccaccagccagcaggtgcctaaggagtcccagagcctgggggtgggggcagggaggcatcaggcagtgtggggagccaagttgtgytcaaggaggaggggggagtcctaaaggaagaacataagaggaagaaggctggtcagggagtcaggacacccagtgatgggttttgctggctgtgtgacct

SEQ ID NO: 533076 - DNA, 201 bp, Homo sapiens
caagcactctcagctccctcaggttctcggataataggggtctgcagggaccaggccctcactaatcccctattaaaacttgaaaggggccagggaacctycagaataaactcattaacttttatgggataataaatggatcccattaaattctcattgtccccgtgctgggccagcttaacctctggaacccagaggagt

SEQ ID NO: 533077 - DNA, 201 bp, Homo sapiens
tgcaactattgatacagcatggtttttttaaaaaaagaacactacagacacagcatgctgccatgccgacgtagaccctgctctgcacgccagcccgcccrcacccaccatggccacagttcagcagctggaaggaagatggcgcctgctggacagcaaaggctttgatgaatacatgaaggagctaggagtgggaatagc

SEQ ID NO: 533078 - DNA, 201 bp, Homo sapiens
acaagaaaattgaaagatgggaaattagtggtggagtgtgtcatgaacaatgtcacctgtactcggatctatgaaaaagtagaataaaaattccatcatcmctttggacaggagttaactaagagaatgaccaagctcagttcaatgagcaaatctccatactgtttctttcttttttttttcattactgtgttcaattat

SEQ ID NO: 533079 - DNA, 201 bp, Homo sapiens
gtttgaagaaaccacagctgatggcagaaaaacacagactgtctgcaactttacagatggtgcattggttcagcatcaggagtgggatgggaaggaaagcmcaataacaagaaaattgaaagatgggaaattagtggtggagtgtgtcatgaacaatgtcacctgtactcggatctatgaaaaagtagaataaaaattcca

SEQ ID NO: 533080 - DNA, 201 bp, Homo sapiens
ccaaggcaggtggatcacttgaggtcaggagttccagaccagcctagccaatatagcgaaaccctgtgtctactaaaaatataaaaaatagctgggtgtgrtggctttcgcctgtagtcccagctacttgggaggctgaggcaggagaatcacttgaactcgagaggtggaggttgcagtgagccgagatcacgccaccac

SEQ ID NO: 533081 - DNA, 201 bp, Homo sapiens
caagtttgaatgttgttaattaataacatgatttccaaaaacaatgtgtaggccaaacagaatatacatacatacacacacacacacacacacccgcgcgracacacgcacacacgtacacatacacatatgggcacacacatgtatattgtgctgattgggcttgtgtcagtttaaaacctcagttttatgtaatcataa

SEQ ID NO: 533082 - DNA, 201 bp, Homo sapiens
ggactgactaggcaaacaacacaaaccagagaatgaagaaaagctggggctgctgacagcccacccaggagtggcacagagccaaaggaacccccaccccsagccaagggaaccagtgagtgattgtgcaaccccacctggaaaaccatgcttctcccatgggtctttgcaacccaaagatcaggagatccccttgtgagc

SEQ ID NO: 533083 - DNA, 201 bp, Homo sapiens
tgggagtgttcaggaatctcccagatttgacaccagaagaggcaaggtcaaagcaattaggctgcactggtatcttcagtgaagatgcccttactgccctrtgctgaccgtggtctccccaaggctgagtctagattgctgtcacactgtcaacttatttgtcattgtgaagccaacagggaagtggcaattagtttgggg

SEQ ID NO: 533084 - DNA, 201 bp, Homo sapiens
ctagactggttattctagttagcaattcatctaaccttttttcaaggtgcttagcttccttgcattgggttagaacatgctcctttagctcagaagagttkgttgttacccacgttttgaagcctacttctgtcaattcatcaaattcattctccatccagttttgctcccttgctggcaaggagttatgatcctttggag

SEQ ID NO: 533085 - DNA, 201 bp, Homo sapiens
tgttgaatgccactgggcagttggagggagagaaaggatcagtgaatttggcaacatggaagacgttgattctctttacaagaacactttaagtggagtcrtggagaccaatcctcattagccagagagagggaagttgacacccaagtgtagccacctcaggcttatgaaatataaggggcaaatagcaaaaatggccag

SEQ ID NO: 533086 - DNA, 201 bp, Homo sapiens
ttcataccagcaccatactgttttggtaactttagccttatggtatagtttgaagtcaggtaatgtgatgcctccagatttgttctttttgcttagccttwctttgggtatgtggattcttttttggttctatatgaattttagaattgttctagttctgtgaagaatgatggtggtatattgatggaaattgccttgaat

SEQ ID NO: 533087 - DNA, 201 bp, Homo sapiens
agccacaagaaggaagtgcctcaaagaagcaaaaaatggtcaataatgttgaatgccactgggcagttggagggagagaaaggatcagtgaatttggcaayatggaagacgttgattctctttacaagaacactttaagtggagtcgtggagaccaatcctcattagccagagagagggaagttgacacccaagtgtagcc

SEQ ID NO: 533088 - DNA, 201 bp, Homo sapiens
tatgaaacgcacttgatcatggaggattaccttttttgtatgctgtttgattccattagctagtattttgttgaggatttttgtatctacgttcatcaggragattggtctgtaatgtttcttttttgtgatgttctttcctggttttagtattagggtgatactggcttcatagaatgatttagggaggattccctcttt

SEQ ID NO: 533089 - DNA, 201 bp, Homo sapiens
gtgtaaccttgcagaaattatacaacttctctctcagtttcttcttctgtgaaatggaagttttacccatgctgcagggttatggtgaaagtgagtgatgwtgcatgtaaagcaccaacacatcagagctctcagtcttctatagctccagccttcgtgatagcagagaccatattttaaagataggacattctgatgcag

SEQ ID NO: 533090 - DNA, 201 bp, Homo sapiens
tctgatagcaggaactgtgcgtcattttttaaaattatttcataagagctgtcatggcacgcggtgtacgttcaatgattatttctcaaactcagctgaaytgagtgaaggcagaggatatgtcttcactgttctcttccttctcctacttcttcagctttactgtccctgaggtaattttcattttctaagcttctgtgc

SEQ ID NO: 533091 - DNA, 201 bp, Homo sapiens
ttccaaaaccccacaaaagttttaaacatcatctgatttatgtttttacaaagattatcctgggtagtctctgtagaataggagaggtaatggcagaagcrgagaggtcagttgtgagctgttagagtttacagatgagagttactgtcaggacagctgggaggatggaaggagaaaggggtgaaattattgggatacatt

SEQ ID NO: 533092 - DNA, 201 bp, Homo sapiens
ctgtcatttctctcgtttaatttctctttatttttgaaatattatttcagtagtttttgggggaaaggtgatgtttggttatatgtataagttctttagtkgtgatttctgaggtcttggtgcacccattattcaagcagtgtacactgcacctgatgtgtaatcttttatccctcactcacctcccacccattccccaag

SEQ ID NO: 533093 - DNA, 201 bp, Homo sapiens
acccttcaacagagttgaaagagccccagccctgggttacagggcttagaggttatttctagctctgagcctagttttctgtacagccttgagcaaaccayttacctctgtccatttctcttttcttgtctttaaaattgacagaacaatttcatggagactttaagtgaaaatcaaatgcctatcacaatatagcacccc

SEQ ID NO: 533094 - DNA, 201 bp, Homo sapiens
tgcttttagaaaatttgcattttttattacaagctggaagtaatttaaaacagaaaaattgaccctgaaatccaatattatttgtacactgtaaatataamgtctaaatttattctttaaataatgaaagataaaagaatatgcctcttttgtaatgcaaagactagtggacaataaaacataaatatttatgggtcatta

SEQ ID NO: 533095 - DNA, 201 bp, Homo sapiens
atattatttataaggaggtattcatttatttacttgcgtagtacctttttgctttgttgggacggggtctcacattcccagcatctagcacaacgccagcrcactatactgactctctcatccttctcaagtcacatctcctgggaagctttttcagagcggccgccctcccccaggtggaattgacatttcagtctctct

SEQ ID NO: 533096 - DNA, 201 bp, Homo sapiens
gcggccgccctcccccaggtggaattgacatttcagtctctcttcaaacccctgcctacccagtacagatttctcaaaaatcacatgctacatttgattgyatttgttctgtttaagtctttttgttcttgcaagttcatcaagggtttcttggacaagaaccccgtcttagtttatctctgtgtactgagcatctaggat

SEQ ID NO: 533097 - DNA, 201 bp, Homo sapiens
ttgctaacagaaacagacctttggccttatgtggatgtggccaacaaatgctgcctggaaatataagctctgttatttagggtctcaacaataggttttcttttttttttttctggaaactcacaacagaggtttgcttatatcctgttgtggctgctgagcatttatttaaatatcacacatattttaaatttataattt

SEQ ID NO: 533098 - DNA, 201 bp, Homo sapiens
tctttgttatttcttctcttctgctggatttcagtttggtttgttttgtttctctagtttctcgaggtatgaccttagattgtctgtttgtcctctttcakctttttgatgcaggcatttaatgctccaaactttctttccttgtagcactgcttttgttgtatcccaaaggttttaataagttgtatcactgttatcatt

SEQ ID NO: 533099 - DNA, 201 bp, Homo sapiens
aattcttttttctttgtctttgttggaatgggttaattcaaaagccttgccttcgagctctgaattcctttcttctgcttgtttgattctattggtgacartttccagtgtattttgcatttctctaagtgtgtccttcattttcagaagttgtgattgttttttatttatttatgctgtttctctggagattttttcatc

SEQ ID NO: 533100 - DNA, 201 bp, Homo sapiens
aactacaagtagtaggtgtgtatgtgacccacacgtctgtctgacttggctacaaattggaggttctcacaatctcctccataagttgaataatttattawaacagctcacagaactcagggaaacatcttacttacatttaccagtttattataaaagatatgataaaggatacagatgaacagctggatgaggaagtac

SEQ ID NO: 533101 - DNA, 201 bp, Homo sapiens
tccaagttggcattttttttctttaagtacttaaagatgctgttttagtgatttccagcttgaatggtttctagtggaaaatctgctgttattcttatctktgggtctttgtacataatgtgtcttttttctctggctgctttaaagatgttctctttatctttggttttgagcagtttgattacaatatgccttgatatt

SEQ ID NO: 533102 - DNA, 201 bp, Homo sapiens
taacataaaaaagtataggtgtttgcctatttttactctatataaatatcatgctgtaagcatcatcctacatacaaacttatatctttgaaatgtttctrggttgatacatttagatctgattcatctgttttctctgctgtatgtttcactgtatcaatatgccataatttagggatccagtgtttaattgaaagacat

SEQ ID NO: 533103 - DNA, 201 bp, Homo sapiens
acaatagtgagtattggtatatgtaacaatatctaaacatagaaaaagtgtagtaaagctatggtttaaaaactaaaaatgctgttcctgtatagggtacktaagcacgaatgaagcttgcaggagtggaaggtgctcttggtgagtcagagaatgagttgtgaatgaatatgaaggtctaggacatcattgtacactttt

SEQ ID NO: 533104 - DNA, 201 bp, Homo sapiens
atgccgagcatcttggattattagtccagtaccagaacaaagatgaggagatgcaaggaggtggaaaggaagaggaggaggaaacattttcatacattttrttgcttttatcttagcagaaactctaggtcagaggtcacattttgtcacaactctaatttcacttgagactatggcagagtgagaatatcaaaaagcaag

SEQ ID NO: 533105 - DNA, 201 bp, Homo sapiens
taaagctttgtataggagttgggactggggatgcttttctaagaccatagatgctgtctttatccccacttgtttattttacaagttcatactgttgatcwgaagactagttcatagaagatggaataaatcatccattgtgatcagagccatatccatcctcatatgtaagagcagcagagcagatgtaatttgacattt

SEQ ID NO: 533106 - DNA, 201 bp, Homo sapiens
tgtttcctgggagaattggacatttatgggcataggtggacatctgtctataccctcagataaatctatagcatgtgacaccgtgcttcattgattttctrttttcttcaagttaaggtttatccaaacttattgttttgctccaggtcacaggtcactggctaggctataaactggcttcacttgagtccagtggccacc

SEQ ID NO: 533107 - DNA, 201 bp, Homo sapiens
cctctgatgtcatctgtcttcaggtctgtcagccgtgagtacgagcacctcctccagtggagatagcaggggagtgaaatggactctgagagagtccttgkttgtagtttttagtgcactggattagtgttggttggcctccagccaggaggtgacgctttcaagagagtctcagccgcagtagtgtagggaggatacaag

SEQ ID NO: 533108 - DNA, 201 bp, Homo sapiens
tcttttactttgcatctccctgaccactagactagctggaacctcttgctctagcagcaccttgcagttccctttgttaagacttaaattggctcatttarttttgttcttcctcaggggaaggtaagcttctgggggtggtgactgtgtctgttttaacacagcatcctcattgcctgccacagtgactgactcacagta

SEQ ID NO: 533109 - DNA, 201 bp, Homo sapiens
ggaaaaacatctgagcctgattgtccagggtttttgttatggatcagtcacacatacacacagcatcttttctatgtgtaaactaggcaaattgatgcagyatggctcaggaccttgggcatgcaaaatgctcttgtgagttagaacatttaaaagcccagctctcaggagctggccagtggccagtcatgaaacaggctc

SEQ ID NO: 533110 - DNA, 201 bp, Homo sapiens
ggagaagagtgacatatttatttggcattgcagagccttcacatctttcatctttaacccaccagtcagcaaatttctgttgagaaccactttgggcccamactttgctaatccatagtcacccaaccagcctagctgatgtgagggatgaggggaaagccctccagcttgccccccaccccgaactgttggtggtagcct

SEQ ID NO: 533111 - DNA, 201 bp, Homo sapiens
catgagaagtttgaaatgtctttggtcatccggcaggatacagcatgggatttatgggactggagtttagaggacaggacctggctagagatgtaaaagcrttatctgtaggcagagagatgatattcaaagctgtgatgctgtccttcaccaagctaccattgctgtcccccaccactgcaccttcatcaggatgttata

SEQ ID NO: 533112 - DNA, 201 bp, Homo sapiens
atatttatttggcattgcagagccttcacatctttcatctttaacccaccagtcagcaaatttctgttgagaaccactttgggcccaaactttgctaatcmatagtcacccaaccagcctagctgatgtgagggatgaggggaaagccctccagcttgccccccaccccgaactgttggtggtagcctttcatctttcaaa

SEQ ID NO: 533113 - DNA, 201 bp, Homo sapiens
gtcaatttgaaggaggactttgtatctatttcaacattaaatgagtatcaatttaagggtttatctcttcaacagcttggatcaaagcttttatagccccyattaaagaatactgttaaatgcttatgattcctgagatataagtttgacacataaaatgtgctgtgatttagaacagagttaattaacagatgtatcttt

SEQ ID NO: 533114 - DNA, 201 bp, Homo sapiens
aaacgtgctatggtttgcatgtgtcccccaaaagttgatgtattggaaacttaattgccattgtaacagtattaggaggtagggcctttaagatgtgattyggctgggtgtggtggtgtgcatctgtagtcacagctactcaggaggctgaggcaggaggatcacttgagcccaggatgcaaggctatagtgctctatgat

SEQ ID NO: 533115 - DNA, 201 bp, Homo sapiens
gaggtgctgtcattcttcaaaaatgcaacaaagcaagcaattcggattcattttttcacccaccagcctttatcggcaaacattaactgagcatctgttaygtgcctagcaccagctggatgctgggagttcagcatgcagagccttggcctctgtcctccggagctcccagtctagcaggcagacacagacccctagagc

SEQ ID NO: 533116 - DNA, 201 bp, Homo sapiens
caatacctccaaagcgcataaatgggttatgaacacagacatatacacaatgttaatttcaattgccaaacacaagtatcataaagaaacaagcaaccctragataaagaaaagtagaatgtagggcaaagatagaagcaaattaaaagcaaattaataagttgtaaatcttacataggcaaatcttaagatgttaaggtc

SEQ ID NO: 533117 - DNA, 201 bp, Homo sapiens
acttgcaaacatcagggatgaagttggtaagtagggcattgacaatgaggagcataaagaatgtcttttcctgattcctgtgaatgtgtaccaaaagcaaktatgcctcctgtaataagccagtgcaaacctgcctagatgaatgaagtatctcacccagcacagtggtgggctgctgtagccttagcggggaaccataat

SEQ ID NO: 533118 - DNA, 201 bp, Homo sapiens
ttgtgttgggtactatgagagttatggtcttgattgccaaggattcatggtctagtgggacgggcagatggacagaactgtgatgtaatggaacatgcatrcacacatgtgtggggaagggcatatctgacaaataatctgaaatgagggagatgcaatagctgctttttctattttatgctgcccatttatgttgctttc

SEQ ID NO: 533119 - DNA, 201 bp, Homo sapiens
gcctgggagtctgagttgacagtgataccaataccatggctaatggttcagttctgggcctcagtttgtatataattataggaactatgcacaatatgtcktcttctattaatttgcttcaattaaattcagcaaatacttattgggaatgtattacagggcagttattgtgttgggtactatgagagttatggtcttgat

SEQ ID NO: 533120 - DNA, 201 bp, Homo sapiens
ctgagagccaatggtatagattccagtctgagtctgcagcctgagaaccaggaacatcaaaggcaggaaaagattgatgtcctagttcaatccgtcaggtygggcagagtgtgaatgtaaccttcgtctacctttttgctcttttcagattgtcaacaaattggatggtacccacccacattggggaaggccatctgcttt

SEQ ID NO: 533121 - DNA, 201 bp, Homo sapiens
gccagggtcttttaaagtcagtttgtttttcgcttgtaaattctctacctacagcgcatctccttactgcctacacatggaatggaacagctccaaccacyctgccctcggtgggccctgattgcattgggagatcagagtcctccattaaatgatgggatgtgggacactggcccaatggaagccctcgggtaggatagg

SEQ ID NO: 533122 - DNA, 201 bp, Homo sapiens
actatagttaacagtgccatattctacacttgaaacttgctgagagtcatccccaagtgttctcaccacagacacacaaaaaaggtagctgtgtgaggtgrtgaatgtattaattagcttgattattacattatttcataatgtatacatatattaaaacatcacatcacacagtaaatgtatacaatttttgtcaatgat

SEQ ID NO: 533123 - DNA, 201 bp, Homo sapiens
ccactgtgagctgctgaggagtttgccttttatcctaagagcaagatggtgccattgtagggtttaagcaagggattgatacgatcctccttcttttttaraaactttagttggactgaagtttggaagacaggagtggagtagggtagggtaggaaggattggacataaagagaccccttaggaggctgttgcagaatac

SEQ ID NO: 533124 - DNA, 201 bp, Homo sapiens
cctggagatttctctttcttgatttcagcacaactttataattgaaagttattttgctaaaatataggcaaatgacctgagtagacatttgtcaaaagaaracatacaaacggccaacaagtatatgaaagtgtgctcaacttcattaatcatcatggaaatgcacatcaaaaccagaatgagatagcacctcacacccat

SEQ ID NO: 533125 - DNA, 201 bp, Homo sapiens
gattcctgtgagaagaataaaaacaattaattgattggcatcacctcagtgccacttcactattttttaccactgttttacttaattttacaactatactwtctaccaaggaagtttaaatcaaatgggaaaatatccccataagacaaactagtgaattactgagatggtgtaaaagagaagatggtcttattataattc

SEQ ID NO: 533126 - DNA, 201 bp, Homo sapiens
tggacccagtgcccacaggactatcaagactccagacaataagggtatgtctgttgtcattttggcttcagcttctactctgggattacttctgtgacttygattctctcttgactttgtatacctggagatttctctttcttgatttcagcacaactttataattgaaagttattttgctaaaatataggcaaatgacct

SEQ ID NO: 533127 - DNA, 201 bp, Homo sapiens
ggtttcatatacagattattttgtcacccaggtactaagcctaataccctacccaatagatattttttctgctcctccccacccatccctcaccctcaggyaggctccagtgtctgcttctctctttatgtccatgagttctaatcacttagctgtcacttgtaagtgagaacatgcagtatttggtttctgttgctgtgt

SEQ ID NO: 533128 - DNA, 201 bp, Homo sapiens
ctgcttctccaggctgagggtggaattctccaggacctgcatgtcctgatttttggtgggtaagtctctccagctccctgtgatctgttatctggacccaktgcccacaggactatcaagactccagacaataagggtatgtctgttgtcattttggcttcagcttctactctgggattacttctgtgacttcgattctct

SEQ ID NO: 533129 - DNA, 201 bp, Homo sapiens
tatattgcttttgtgatcacaataaattttttaaacttttattttaggttcggggtacatgtgcaggttgttatataggttagcatgtgacaggggtttcwtatacagattattttgtcacccaggtactaagcctaataccctacccaatagatattttttctgctcctccccacccatccctcaccctcaggcaggctc

SEQ ID NO: 533130 - DNA, 201 bp, Homo sapiens
actcctgtgtgctctgggctagagaagtatcctttacagatgattttattttcctaccagagctccagggagctttccctagctgtgggtctggttttttkgggtcatttctcagcctagatttcctgagtcccaacatcctccttgtctcaggctaagagggctctagttttcttcagctgattccaccaccctgccccc

SEQ ID NO: 533131 - DNA, 201 bp, Homo sapiens
gcacagagcactgggatgtgttgtggaaaagtgttattaaagggggaagaatgttagcgggcagcttatcctgtattaacgagggcttcatagagtggtarcatgggaactgggcctggaataatttattagatggactaagtgaaacagcgaggtccatgcggaaggaacatggcagaggcatggagatttgcagcttct

SEQ ID NO: 533132 - DNA, 201 bp, Homo sapiens
gtaatattttttgataggagcagttgaagtgtcagaatagaagtttttaaaggaatagatgagagtactgcattctataaataaccagagaaattcaatcrtgtaagaaaagttgggacagttcttctcaacatacatccagttttgttatgaattctgcttattaaaataaattttattttagagtttgacatactgtgt

SEQ ID NO: 533133 - DNA, 201 bp, Homo sapiens
cctagtggtattcatggcttatctctgacaatggcaagggcctgaggacattcactataagaaatacattttacatcagaaacacacacacacacacacasacacacacacacacacacacacattgatacataatatatataaaataaaaatatctgaaatttgctacctacagtgcacatgggcattttctattctgtt

SEQ ID NO: 533134 - DNA, 201 bp, Homo sapiens
tgaccagggctcgaggcacactctcaaaatgtcctgagaacatgtgcccaaggtgattgggttacaacttgatttttatacattttagggggacaaaagtkacaggcagacatccatcaatacctgtaaggtgtacaggtaatcattggtttggtccagaaaggtgggacaactagaagcagaggggaggggaggcttcca

SEQ ID NO: 533135 - DNA, 201 bp, Homo sapiens
tactcactccagctcctgcaagttgtgttcagattgctctaggaatgcacacagctgcctgctgtgggactggggactgggggatgggtagctgctccttrgaggtgctaagaggggaaattgaccaaaattaactacaatttgctatcctcaccctccccaggaagttgtaagccttcaatagactccagagttccaaaa

SEQ ID NO: 533136 - DNA, 201 bp, Homo sapiens
aatgtgatgaaccgggtatttcagttggaaatgcagaaatcactggccttctaaattggtctcactgggagctgcagactggagcgttttctattcggccrtcttggaaaaacctcatggctgtacaatttacagctcaccagttttacaaattcccaccaacagtgcacaagagtttcagttttcccacaccctccctaa

SEQ ID NO: 533137 - DNA, 201 bp, Homo sapiens
agacaattatttttgtagctgcttctcaaaagagaagctacgtaggactaagcctacatttttaagaaaaaatgggaaaatcagcagttattcagtgaatwtcaggtcaagagtcagtcatgatttttgccctgcagtacataaattggcttttctggagggaaaatagcttccagtccctcttccattataatgataata

SEQ ID NO: 533138 - DNA, 201 bp, Homo sapiens
caaggttggttcaacatatgcaaatcaataaatgtgattcatcacatcaatggaactaaagacaaaaccctcatgattatctctaatagattcagaaaagrcctttaataaaattcaacattccttcatgttaaaaactctcgataaactaggtattgaaggaacatacctcagaataataagaaccatatatgacaaatg

SEQ ID NO: 533139 - DNA, 201 bp, Homo sapiens
cccctttctctccttacctacacacaactgctaggccccagattcaagagcctgggtccctaggaaacccaaaaagtgttttctttttctgtttctctccytttctcttatatacttttattaccataaaatgttagggaactagatacccaatcagttttacctgttatggtcaaaatgaagtacagagactggaactcc

SEQ ID NO: 533140 - DNA, 201 bp, Homo sapiens; identical to SEQ ID NO: 20616

SEQ ID NO: 533141 - DNA, 201 bp, Homo sapiens
agtacttccaagtcatggctcctagttagaccatgaaatactcgttcccgtggacttattatattttctggctgagtcattaaactaggccttattcacarataatataaccaaatgataataagatgtacccataacccttttggcctcatcctgatagttaaccttttctggagtaggtctaaatgcgtcctggccaca

SEQ ID NO: 533142 - DNA, 201 bp, Homo sapiens
gacatgttaagttattcctctagcttcttaaacatatgaaatataatacctgtttaactgtccctgtctagtaattctatcaactgtgtcatttcttggtyagtttcaattgattgcatcttctcattatgggttgtataaccctgcttgtttgcatcccagaggatgtttttttagatgacaggcattgtgaatttttcc

SEQ ID NO: 533143 - DNA, 201 bp, Homo sapiens
gccctgaaaccttcaacaatggagccctttgaagttaccaggtcaggagaacccaaggtaccccatgtcacccttgtgagaaacccatgcattattattgkgaatgagatcttgtctgagccaagcatgccagctttgaggaagcatgacctgtatagcctgaaaatgcatgatctctttgttctaccagttagaaggccc

SEQ ID NO: 533144 - DNA, 201 bp, Homo sapiens
aagggctaggccggcgcgtcacggaatcagggatgtcacagggcgcagctgcagcgggggagggcagcacccagaccatctgggggaccggggaagctcargcttctatccttcccactgatggtcccagtcacttggctctgggcagagggggcctagcagctgcctctacttttgtgcctgacctttaaaggtagaaga

SEQ ID NO: 533145 - DNA, 201 bp, Homo sapiens
tgatagttaaccttttctggagtaggtctaaatgcgtcctggccacagtgagtgaggcgttgctgcagggattgcatgtttagaaaatgtaggaggcaggrgaggacacatggttttaggtgctgccagaaaactccttccaacatctagaatttctcaccctaaagcagtgatatggtttggctgtgtcctcacccaaat

SEQ ID NO: 533146 - DNA, 201 bp, Homo sapiens
ggaatcaggacgccagaaactgtgcaaagcatcgcgcgccgggcaccctctggccatagggtcccgcaagggctaggccggcgcgtcacggaatcagggaygtcacagggcgcagctgcagcgggggagggcagcacccagaccatctgggggaccggggaagctcaagcttctatccttcccactgatggtcccagtcac

SEQ ID NO: 533147 - DNA, 201 bp, Homo sapiens
atttcttttctgtgttgttctgcttcctccaagaatagtttatatattacatgcatagttttccccaaactattttctctacttcattatctaggcaccaygtcaagactcaaggaaatgggattgtatggacattgtgtggctttggcggttctgaggggttcagagagaccccactggtgtggagagagcatcatggcc

SEQ ID NO: 533148 - DNA, 201 bp, Homo sapiens
gcgtcttataaggcaggccttgtggtgacaatatctctcagcatttgcttgtctgtaaaggattttatttctccttcacttatgaagcttagtttgcctgsatatgaaattctgagttgaaaattcttttctttaagaatgttgaatattggccaccactttcttctggcttgtagggtttctgcagagagatccactgtt

SEQ ID NO: 533149 - DNA, 201 bp, Homo sapiens
ataattcaaaaaacatgggaaaaatgtaaacaggatccaaaagatatttaatgtggtcatattaatgtcagacaaaatagactttaaggcaacaattatcrttagagatgagagataaaataataaaaggctgctctttcaagaatatataacaattatgaacattaatgcacttaacaactaagccccaaaatacatgaa

SEQ ID NO: 533150 - DNA, 201 bp, Homo sapiens
gattacatcattacacagtaggggtctcaaaatctgaaacatgaatgtaataaagaactgtttgcaaatgtgtaattcatgttttgagatatgcatgtgcmtattagcagtctgatgatttgaaaatacaggagcaactatttatcatcatttttattaataaaattcctgatgacgtgtttcttttttagagaaagtagt

SEQ ID NO: 533151 - DNA, 201 bp, Homo sapiens
agcacaattaggtcagggaaagggagaggccaagctggatctgaaatatgttcctcccaggagagttgaacaggagggaaaggcagcccaggaagggtatytgggatgccacaaggaagagaatctgtcagccttggagggaagggatccatgtggggaagcacacccggaagccaccgatgcacttggccatctgctgaa

SEQ ID NO: 533152 - DNA, 201 bp, Homo sapiens
gggcacatgtactgcaggtgtgcagtgagcacacatcacattccgcccatccagagcctgctctgaatttgactttggcatcgaaggaaatcccaagtaarctggaagcacaattaggtcagggaaagggagaggccaagctggatctgaaatatgttcctcccaggagagttgaacaggagggaaaggcagcccaggaag

SEQ ID NO: 533153 - DNA, 201 bp, Homo sapiens
gaagactgtttcatctacatttaaaatctgttgtttagtgtagccatcttcatcagttatcttagctaatcatctggataactttctgccgcttttccatmagtacttgctgcttcaccttttactttaatgttgtggaggaacccacctctgccaacttggaagttttcttctgaagcttctttacctctctcagccttc

SEQ ID NO: 533154 - DNA, 201 bp, Homo sapiens
tatattaaaacatcacatcacacagtaaatgtatacaatttttgtcaatgatgcctcagtaaagctgggaagaaagaacacatactctctaaagccaaacraaatttattttgttctattttatttagaatttgtacatttgagaaacaaaggggcggaggtgaggagagggtccctgtgttccaattccatttgcactgt

SEQ ID NO: 533155 - DNA, 201 bp, Homo sapiens
atcatagacatgcatcaggattagtgagataaggagaggtagatagatgttaagcaatgagactcaaagcaggggagaattttaccagaaggtggtagatrattcatggtttttgttggaatgaggaaagcagagatggtaaaactttcttctaactcaactccatagtatttaggccatggaacaggtggcattttccac

SEQ ID NO: 533156 - DNA, 201 bp, Homo sapiens
tgtggtgtcattggctctcgtctttctgctgtgaccagggcatgttcattcagtcatcaaaatcccgaggagctcagttgtatggtttggaacaagaacaygagtttcagtatcagcatgccatcttaatggcctcagaacagtgctatcgattatgaccattcagaaaaatatgattcttgcttacttgacaaatgaaga

SEQ ID NO: 533157 - DNA, 201 bp, Homo sapiens
acacacccaagggggccggccgggtggcccctccagcatcctccagtgtgacagcaccccgcaggagtttacttccagcgccaaaatccacttccacaccygctggtaagactttgtgccttggagaggctccatggtggagtgccctttctgcattaataaaaagtcttttgaaagcccctgtgtacatcagttatttag

SEQ ID NO: 533158 - DNA, 201 bp, Homo sapiens
tgcaagctttgccatttgaatgggatacaaatgaatgagtcagacttgactttgtaagtttttacatgcttatataatgtgaaaattatctccttaaggaytagacttataaatatttgcttaatacgattcattaattaatcatgtgaaagtgcttatctagcataaaactaggggactctcggtatccgtttttgtttt

SEQ ID NO: 533159 - DNA, 201 bp, Homo sapiens
cctgagaaagagaatgcgtccctaaggagagatctctaaaatggctgctttggagatgaccatatcttttacggtcgtagataagggatgaaataagcccyggtctcccatagtgctcccaggcttattaggacgaggaaattcctgcctaataaattttggtcagaccggttgtctgctctcaaaccctgtctcctgata

SEQ ID NO: 533160 - DNA, 201 bp, Homo sapiens
ctaggttgaaaagagttttcaactatagagacttccagtgttgttcaagagaaacggtaacgccagttgggtaaatattcttttgtaggtgatctgatttyttttttttcctccttgaaagctttagaatcttctctcatccctggtgttttaaaactttttagtggcatttgtgtgtggatgtgtgtatatgctcgtgag

SEQ ID NO: 533161 - DNA, 201 bp, Homo sapiens
gctctagagaagcaagctcggggtggtttacatacagtgatgtgaaagggatgagattcacaggagggtgtatgcagaggagggaagctgacctgggacakcatcttgggaaatgcctgtgcatccttcatggggccaggtaaggagcagtaggcctggcaaggagagagaggagctggtgagaggggttgcaggaaaggg

SEQ ID NO: 533162 - DNA, 201 bp, Homo sapiens
gtgtggtttgttcctcttatctgcagtcctgacaacagcttgggtacatgagacctgtctgcacagctgctgacatctccccagggtacacactgctgacrtccaatgctttaacgagacacaggctttcctgccagcctggatatccttcaaacatggcagcccccagcctgggactccagccaacagtgcccctagcct

SEQ ID NO: 533163 - DNA, 201 bp, Homo sapiens
ttgtcccccgtctcctccctaacctcatccctctccacagatacaattttaacattgttcttagagccacaggtggatttgtggcttattttcctcaaacygaggtcacctaactggtaaattcagtctcgtactcacacctcttcacttcagcgttcctgaactacctctagagcttaaacacaaagtataaacagaatg

SEQ ID NO: 533164 - DNA, 201 bp, Homo sapiens
gtctgctttgcaaggctgctctagcaaggaaaagtgaaaggcaatatccccgcgagtttgcaaaaagtcttagattgggagccatgtctaaaaagaagtgkaggcttcactgtagcagacttgcaggggtatgtttaaggcaagatgtacagggagtgagttggatgtttcataggagtagcttgtcttgcattccatctg

SEQ ID NO: 533165 - DNA, 201 bp, Homo sapiens
atacagtttcaaatagaaggaagatagtaaatgttcccaacacaaagaaatgataaatgtttgagatgatatatatgctaattaccctaatatgattactrtatatgtattgaaacaccactgtgtaccccataaatgtcattattacgtatcaattaaaaatatttcttaaagttaaaaaaacttatgattcgcctaaaa

SEQ ID NO: 533166 - DNA, 201 bp, Homo sapiens
ttgagcaagcagaagaatcacgtatattgaagacagatcaattgagattatccagttgaaaaaacgcaaagaagaatgaaaaaagatgaacagagcctcaraggtctatgggacaccatcaagcataccaacatatgcaaatgggcgtcccacaaggaaaggagaaaaagaaaggaacagaaagaatgcttgaagaaataa

SEQ ID NO: 533167 - DNA, 201 bp, Homo sapiens
acctttgcacgtgatcactgcccccacatccctccaaccccactgctctgcagcgcccttgccctcttgacaagtctcgcatacttcatgtctcagctcawacataaccttcttcactgaagccttacctggctcctcctccatgctcccagagagaaatctttgcccaaacctctgggctggtgcttgctacaatatctt

SEQ ID NO: 533168 - DNA, 201 bp, Homo sapiens
aagtgcctccaggcctcagggaccatctctctctggatacgggcatagtcccagttgggaggagcggtgaggaggggccgggtgcggacccagcgcttccsattgacgtagacgactttgcagccatccttgacctgggagcggagaaggggcctggaccgcaaggcccggtgtttctgggattggggcggcaccctggcc

SEQ ID NO: 533169 - DNA, 201 bp, Homo sapiens
tccaggcctcagggaccatctctctctggatacgggcatagtcccagttgggaggagcggtgaggaggggccgggtgcggacccagcgcttcccattgacrtagacgactttgcagccatccttgacctgggagcggagaaggggcctggaccgcaaggcccggtgtttctgggattggggcggcaccctggcccggggcg

SEQ ID NO: 533170 - DNA, 201 bp, Homo sapiens
gggcatagtcccagttgggaggagcggtgaggaggggccgggtgcggacccagcgcttcccattgacgtagacgactttgcagccatccttgacctgggarcggagaaggggcctggaccgcaaggcccggtgtttctgggattggggcggcaccctggcccggggcggcactatggtccggggccagcccaggtaccagc

SEQ ID NO: 533171 - DNA, 201 bp, Homo sapiens
ttgaataatttattaaaacagctcacagaactcagggaaacatcttacttacatttaccagtttattataaaagatatgataaaggatacagatgaacagytggatgaggaagtacacagagtcaggtccagagggatcccgagtgtgggagcttgtgtccccacagagagaggttgctccaccctattgatacctggatg

SEQ ID NO: 533172 - DNA, 201 bp, Homo sapiens
acagctcacagaactcagggaaacatcttacttacatttaccagtttattataaaagatatgataaaggatacagatgaacagctggatgaggaagtacayagagtcaggtccagagggatcccgagtgtgggagcttgtgtccccacagagagaggttgctccaccctattgatacctggatgcattcgccaacccagaa

SEQ ID NO: 533173 - DNA, 201 bp, Homo sapiens
gaggaagtacacagagtcaggtccagagggatcccgagtgtgggagcttgtgtccccacagagagaggttgctccaccctattgatacctggatgcattcrccaacccagaagccctctgaatcctatactttagggatttttataaggcttcatcacatagacatgactgattcttaactcaatctccagccccagagga

SEQ ID NO: 533174 - DNA, 201 bp, Homo sapiens
atctcagaccttggaaatttttctctacagttcttatttaggtcttttttgtcttccttgtcttacttgacatgttaaattattcctctagcttcttaaayatacgaaatacatttacaataactgtttaactgtccctgtctagtaattctgttatctgtgtcattttttgtcagtttcaattgattgcatcttctcatt

SEQ ID NO: 533175 - DNA, 201 bp, Homo sapiens
tcctctctccacaggcaggtatgcactgatcagaatctggctgaaaatttgaggtcactcttcagatcttcagaattctctctgtggagctcaatcctctstggtatcctaccttgtacgcactaactcctgacctccctgagcccctagatccactttctcaactcagagaaacctccaggctccacctgagtcccctga

SEQ ID NO: 533176 - DNA, 201 bp, Homo sapiens
actgggtttggttgccatggaaaatacattatcagctacaatttcacaaaactgctacactttgagaaaataattcattccagttggcagcaacatatttkttgatatttataaaattcttttacatctatatgcataacgctttctggttattttatgtggaggtgtttgttttgtaaccctttaaaatgtttactcttt

SEQ ID NO: 533177 - DNA, 201 bp, Homo sapiens
agagtcagaacaagcccttgataaaggtttcatatgatggacaaagcaatagatattgatataatatattgataatatgttccgtgttttagaagttggarcttttaggccccacttttgggatcatggcaggggagagagtaactgccaaaattaggggtcagttccctgtagttatgcacttccatgttccaggaaaat

SEQ ID NO: 533178 - DNA, 201 bp, Homo sapiens
atggcaggagttgattatggacttggtgattagaaggtttgttgatgtgggaggggtcccaagggagagaaagaagtcaaggagggtttgaagggatctgrattgagcttcctaaatgagaatacatctttgaaatacattcatcgcggtccttcccaaagccaggggctaggtgcctcctggacaagaggcacctctgag

SEQ ID NO: 533179 - DNA, 201 bp, Homo sapiens; identical to SEQ ID NO: 20617

SEQ ID NO: 533180 - DNA, 201 bp, Homo sapiens; identical to SEQ ID NO: 20614

SEQ ID NO: 533181 - DNA, 201 bp, Homo sapiens; identical to SEQ ID NO: 20615

SEQ ID NO: 533182 - DNA, 201 bp, Homo sapiens
ctcaaacataaccttcttcactgaagccttacctggctcctcctccatgctcccagagagaaatctttgcccaaacctctgggctggtgcttgctacaatrtcttgtcattacttatttacatgtcccactaattggtgaattcctagagctgaggattctgtcttttcactttgaaatctccaacagctaataccatatc

SEQ ID NO: 533183 - DNA, 201 bp, Homo sapiens
agaaagcaaatgccgctctcctccctttggctccctaaagtgtcaactacagtcctgcctattccacaaacccgattgaaacgaggtttgaaattaagaasacacagctcagctcctttcatttttcattttattcctgaccatcaaatcactaaaacagcaagaataagatttatgtggtacactgcaagcagtttgcct

SEQ ID NO: 533184 - DNA, 201 bp, Homo sapiens
agagtctgaagcaggtattagaaatgaagaatcagcaaatacacgagcaagaaaagaagattcttgagctggaaaagctggtgagttggtctgtttgctcrggagagtaacctccatgacattcctgctgtcatcactgatgtcatcgttgatggtgttcagccaggtgtgtcccttacctgcccattgcttacacccaag

SEQ ID NO: 533185 - DNA, 201 bp, Homo sapiens
aacccaaatgagacttgaagctgcctaggatcctttctgcagctgggaacctacagctgggctctcaggggcatgtatctgggcttctgcccagatacagrtgctggtattgaggaggagagaggaagctctgtgccaggaaaaaacttaggacagataaagtagactagatagagtgagaagaaagtttgcaactgtggc

SEQ ID NO: 533186 - DNA, 201 bp, Homo sapiens
gttcagaagaaaatagcctcagaagcaggactttacctggtgcacgcattcatgatctggatgctgtttcagcatgtagagaggaaacccaaacaggccawgagaggagctcaggccaagctggattctgaattcccatgtcctttagcaaagtctgggtctctcaagagctaaaggattaagataaaggcctctgctact

SEQ ID NO: 533187 - DNA, 201 bp, Homo sapiens
gtccagactttttagtggagttggggggtaactggaacaagggatttgtatcttttgattttttggtactcttttgtcttgcctacatttcctgacctgarctaaaactctgttgatcacctgacctccgtaagcccctgctctaactggtaaaccacagcaatgtttggggtctcgggcattagtgtcagtttagagcca

SEQ ID NO: 533188 - DNA, 201 bp, Homo sapiens
tcatattatactgctgttagaatgagtatgtaatccctgtgatcggtctgattagaacatgttccctgttctggcttctccaatctctgaaccacgtcaaraattaagcaaaatcagggcagaccaggaaggtgcttacaaaaacagagcataaggccaggcacggtggctcacacctgtaatcccagtactgtggcagcc

SEQ ID NO: 533189 - DNA, 201 bp, Homo sapiens
gaagataatctccaatagtttttaagtaggaatttcctggcaattgatttacaaataaaccttgaggacatgccctagtgagtgctgttttctgatgcccrgggtgtggagggtttctccatactgatggccaattcttcctcatcagctgagtgtccagtgattccattcagttctgacactaaggacccagtgttagta

SEQ ID NO: 533190 - DNA, 201 bp, Homo sapiens
cagatcaagttagattttaaagagtatatgatgcatacaaaagaatacgtcatgaaccgggagacctcaaaccaaaaaatgccactacggctcagttttayagcagttgcagcagtttctagagcataaagggggagtattttgacttttttcatgattggctgtcatatattcttttttaaggcaaatagagctatttga

SEQ ID NO: 533191 - DNA, 201 bp, Homo sapiens
ttagatttcaacatgtgaatttttgagtgacacaaacattcagaccacatagtaggttctaaataaatatttataataatattgctaagaaataccatttygcatgcttaataagggcccggcattatgctaagcacttatttttaatttttgtgtgtacatagtaggtgtatatatttatggggtacatgccatgttttg

SEQ ID NO: 533192 - DNA, 201 bp, Homo sapiens
ttttgagtgacacaaacattcagaccacatagtaggttctaaataaatatttataataatattgctaagaaataccattttgcatgcttaataagggcccrgcattatgctaagcacttatttttaatttttgtgtgtacatagtaggtgtatatatttatggggtacatgccatgttttgatacaggcatacaatgtgca

SEQ ID NO: 533193 - DNA, 201 bp, Homo sapiens
tggagcattttgatttgcttcttaattaaatcatttaccagaaactaaacagcattcttcaactttcaatcatattgacaacctgtttttgacttctttastatccaaatatgatggcttttagaaagttcataagcatcacaatttttaaataaaaagatgaagtccagtacagtttctcatttattgtaacggaaatcc

SEQ ID NO: 533194 - DNA, 201 bp, Homo sapiens
tatcatctgagggtaatttggttctgggtaatctcatatgattaaaatttctaaacagtggaaccctgattgtgggatgcatattcttagcaaacaaatgsagtttttacatttcttatgattttatttatgaagagtatttttaatgaactgcatttgattttttatctcaaatctacccctttatttttgacttgcttt

SEQ ID NO: 533195 - DNA, 201 bp, Homo sapiens
tctttttgttaaaagtcaatatgtgtaacagttttatgaaaaccttataaaattcaaccttataaaaaagaaaaattatatttcttttaaatgagaaaagrtgcctcatttctcctttctctgcccttatcagcttctttaatgacattgcatatttgtttttatgtttttaattattgacaaagaagagaggaaaaagta

SEQ ID NO: 533196 - DNA, 201 bp, Homo sapiens
gctgagctcacaggtgatcacctccatcagcctcggtcctgctgacctcatgagatggttgaggtcgtagggctcgctcgtttagaatatgtcttgtcctycttttttcattatcaggagactaagatccatgagggagaggccttcattttgtttcccagctcagataggaggccacacacattgcctaaaaacccacag

SEQ ID NO: 533197 - DNA, 201 bp, Homo sapiens
acactcaaatgcactcacacaggcactgcatgctcactcacacacacacttgcatattcccactcaggcacactctcatacacttacgcacacactcatayactcatacaatccctcacacctattcacatgccctgtttgcacactcacacgtgcatgcttttcttcacatgtacatgcttattctcacatgtacattct

SEQ ID NO: 533198 - DNA, 201 bp, Homo sapiens
gaggtgcctgggaaacctccatctagcaatgtccagtagacagctggaataagccaagagctctaaggaaagttttaagttggagatttccatgtggaatkcatgggcttatccttgtggctctgggaatggaggcaatggggatgtgagtttgcttgggaggacatggaaagtgcaaaggtaactgcgattgccaccttg

SEQ ID NO: 533199 - DNA, 201 bp, Homo sapiens
ttagggtgataatggcttcatagaatgatttagggaggattccctctttgtctgtcttttgaattagtgtcaataggattggtaccagttcttctttgaasgtctcatagaattcaactgggaactcatctggtcctagactttttcttgttggcaattttttattatcatttcaatcttgctgcttattactggtctgtt

SEQ ID NO: 533200 - DNA, 201 bp, Homo sapiens
ttattttgtctttcaattttatttagttctgctctgatctttgttatttcttctcttctgctggatttcagtttggtttgttttgtttctctagtttctcraggtatgaccttagattgtctgtttgtcctctttcatctttttgatgcaggcatttaatgctccaaactttctttccttgtagcactgcttttgttgtat

SEQ ID NO: 533201 - DNA, 201 bp, Homo sapiens
tctcttctgctggatttcagtttggtttgttttgtttctctagtttctcgaggtatgaccttagattgtctgtttgtcctctttcatctttttgatgcagrcatttaatgctccaaactttctttccttgtagcactgcttttgttgtatcccaaaggttttaataagttgtatcactgttatcatttggttcaaagaatt

SEQ ID NO: 533202 - DNA, 201 bp, Homo sapiens
acgagatgcccgctagccttagccgcacagagtctgcactgggggaaagagatcagggaaagctgaatagggtctaaggaaatactgctattcaagaaagstaaaaaaaaaataaggaaaaacttcataaataagtgtcagggactccagggactaatagagaccaagcagttagtgagtttttggtgagtaaaaagagtt

SEQ ID NO: 533203 - DNA, 201 bp, Homo sapiens
atcagggaaagctgaatagggtctaaggaaatactgctattcaagaaagctaaaaaaaaaataaggaaaaacttcataaataagtgtcagggactccaggractaatagagaccaagcagttagtgagtttttggtgagtaaaaagagtttcgtcattgagccattcagttagacagggaagctgcagtacgctgaatact

SEQ ID NO: 533204 - DNA, 201 bp, Homo sapiens
agagaccaagcagttagtgagtttttggtgagtaaaaagagtttcgtcattgagccattcagttagacagggaagctgcagtacgctgaatactggccccygaatatgtccatgtatgaatcaccagaacctatcaatgttaccttatagggcaaaagggactttgcatgaagttcaggatgttgagatggggagattatc

SEQ ID NO: 533205 - DNA, 201 bp, Homo sapiens
aagagtttcgtcattgagccattcagttagacagggaagctgcagtacgctgaatactggcccctgaatatgtccatgtatgaatcaccagaacctatcamtgttaccttatagggcaaaagggactttgcatgaagttcaggatgttgagatggggagattatcctggattacccagatagagacaatgtcatcataagc

SEQ ID NO: 533206 - DNA, 201 bp, Homo sapiens
ttatttctaagcataatacatatgacattttgtgttatgaaaatggggtaattccatgcatgctgttcaactagctttttaatttatcatgggcagctttycatgccagtacaatatagagctatgacatcctttttaatggctgcatagtactccctggtttgaatatgccacagttcatataacttatgttatatatgt

SEQ ID NO: 533207 - DNA, 201 bp, Homo sapiens
tgaatggaaaacactgaaaggctaaataaataattgtattttgttttcctttaagcacaaaacattaggtttagtgcagatttggggactttaacatttcycttctcagctttcaggagtcttagtgtctttccatatttgttgatacctaaaatcaaagccaagtgaaggaaaagaatggggagcttagccatatagtgg

SEQ ID NO: 533208 - DNA, 201 bp, Homo sapiens
agcagtatggctgtgaggtcatctagggctacactatctgatatggtggcacatatcaattaaatgattgcttaactaaatgaatcgattaaatgattgakacttcagtgtcagtagggcatggggcatgttggaagagctgttctcagacactgtttgttgggaatatgaattagtggatccttttgttgacaattggac

SEQ ID NO: 533209 - DNA, 201 bp, Homo sapiens
aattgacatttcagtctctcttcaaacccctgcctacccagtacagatttctcaaaaatcacatgctacatttgattgcatttgttctgtttaagtctttktgttcttgcaagttcatcaagggtttcttggacaagaaccccgtcttagtttatctctgtgtactgagcatctaggatagtgcactgtctacagtagata

SEQ ID NO: 533210 - DNA, 201 bp, Homo sapiens
tcgttcattccttttttattgtgagtagtattccaatttatggatatactaccttgtatctatccagctaatagaactatattataatttaaaaccaattrtttggtaataaatatttcaaaaacactgtataccttattattttggtgtcccctgtctcctctgaattatctgtttggatggtaccagcaccctggctac

SEQ ID NO: 533211 - DNA, 201 bp, Homo sapiens
ctagttccccaccccctgacaggccccggtgtgtgataggcatcagatttaaggaatgaatgagtagcaagaatgaggaagggacaataagctctttgaargtttttgtgaaatagaaaagagaatgttttttgagatggacagcggatttgaggaagaggccttttgagaaaatagataaaggatgctcagctcagtttt

SEQ ID NO: 533212 - DNA, 201 bp, Homo sapiens
gctttgtggcaatggcaagatctcaggtttactttaggcctttaatgtgagaaagaaaatatacacttcggttaaaatatgcagaatggggaaataaaacrttcagttgatactttaataattaaactaaatattatcaccaagtgataaatgctgctaagtcaatgaaatatgcatcagttagctaatcatgcagctgga

SEQ ID NO: 533213 - DNA, 201 bp, Homo sapiens
aagtttttctttccagtattctctgacttgaagtcagttcagcttgaaacctggaagtggtcacctggacctggacagaaagagctccaggagaaactttktaggtctgactcgagaagtgggaaagggaactcctagaactcagagacagctaatgaagtctcatttttcttcttcatttccccataccctaatctgtgt

SEQ ID NO: 533214 - DNA, 201 bp, Homo sapiens
tgaacatacaagtttttctttccagtattctctgacttgaagtcagttcagcttgaaacctggaagtggtcacctggacctggacagaaagagctccaggmgaaactttttaggtctgactcgagaagtgggaaagggaactcctagaactcagagacagctaatgaagtctcatttttcttcttcatttccccataccct

SEQ ID NO: 533215 - DNA, 201 bp, Homo sapiens
ccaaatgcatcaagcagctatttgagaacttaaaaggatatgcagtgggcagattagaaagaagagttgaattgaaagtatcataaaattagtggtgaacrtacaagtttttctttccagtattctctgacttgaagtcagttcagcttgaaacctggaagtggtcacctggacctggacagaaagagctccaggagaaac

SEQ ID NO: 533216 - DNA, 201 bp, Homo sapiens
actccacccttcttctcccactaaattcagctacaaacaactggaccaaatgcatcaagcagctatttgagaacttaaaaggatatgcagtgggcagattrgaaagaagagttgaattgaaagtatcataaaattagtggtgaacatacaagtttttctttccagtattctctgacttgaagtcagttcagcttgaaacct

SEQ ID NO: 533217 - DNA, 201 bp, Homo sapiens
tattaagtgacagccacaagctgctatgtttccctcaaaagtgaaggccaaagctaattttcatacctaagataacccaaatatttttcttccttatatgrtctggattttttttcttcttcagatccatatgtatgttatcatcaatagaagctcctcagaatgaccattacttatatgaagacccaacacacaaactaa

SEQ ID NO: 533218 - DNA, 201 bp, Homo sapiens
tacttatttatttatttatttatttatttatttatttatttatttattttgagatggagtttcgctcttgttgcccaggctggagtgcaatggcgcgatcwtggctcactgcagcctctgcctcccaggttcaagggattctcctgcctcagcctcctgggtagctgggataacaggcacccgccaccacacccagctaac

SEQ ID NO: 533219 - DNA, 201 bp, Homo sapiens
aggtggttattaagtgacagccacaagctgctatgtttccctcaaaagtgaaggccaaagctaattttcatacctaagataacccaaatatttttcttccktatatgatctggattttttttcttcttcagatccatatgtatgttatcatcaatagaagctcctcagaatgaccattacttatatgaagacccaacacac

SEQ ID NO: 533220 - DNA, 201 bp, Homo sapiens
accacattattctccagagtgattgtacttatttatttatttatttatttatttatttatttatttatttattttgagatggagtttcgctcttgttgccsaggctggagtgcaatggcgcgatcttggctcactgcagcctctgcctcccaggttcaagggattctcctgcctcagcctcctgggtagctgggataacag

SEQ ID NO: 533221 - DNA, 201 bp, Homo sapiens
agaccaaaatatcaatgcaaaatagcatcttgacctcatgctgagatgtctgacttgtgacaatgaagaacagcattcagtatctgcaatgataagccaakctccattgaacaatttgacaccatgagtgaaagggcatggactagtaccttgttgatttcttgctgccctaaattaccagatcctaggtaacaattatta

SEQ ID NO: 533222 - DNA, 201 bp, Homo sapiens
agcagcaccaacagaccaaaatatcaatgcaaaatagcatcttgacctcatgctgagatgtctgacttgtgacaatgaagaacagcattcagtatctgcartgataagccaagctccattgaacaatttgacaccatgagtgaaagggcatggactagtaccttgttgatttcttgctgccctaaattaccagatcctagg

SEQ ID NO: 533223 - DNA, 201 bp, Homo sapiens
ggtagataaaagacaaacggttgcattcttttaagtttctgattagcttttccaaaggaggcaatcagatatgcatgtatctcagtgagcagaggtatgaytttggacagaatgggaggcaggtttgccctaaacagttttcagcttgacttttccctttagcttagtgatttgggagccccaagatttattttcctttca

SEQ ID NO: 533224 - DNA, 201 bp, Homo sapiens
gctaccccataactttctgatgaataacacctggctggctgttctcttgtcagggaggttctgtgctcagaaccccagcaagatgctgagtccttcccttsccctgcagtcaggcagccaccaacgcagaagccacatggggaaaagatcacagttctcagtgacactgaagacaaaactcaggctgtgttctgtgaaccc

SEQ ID NO: 533225 - DNA, 201 bp, Homo sapiens
aggcagtggagactgtggcaaaggaatacatgccctgtctaaaggtgcaaagtctctacctcactgcagctaggtatcatttagtatttccagatcttctrcttttattaataaaagccagaaattcagatttttgtaggaaattcctcaagtttgaatgttgttaattaataacatgatttccaaaaacaatgtgtaggc

SEQ ID NO: 533226 - DNA, 201 bp, Homo sapiens
tgtgagaaagaaaatatacacttcggttaaaatatgcagaatggggaaataaaacattcagttgatactttaataattaaactaaatattatcaccaagtsataaatgctgctaagtcaatgaaatatgcatcagttagctaatcatgcagctggaacattatacaatttgattgcctaggattgttaaaaaaaatcagtg

SEQ ID NO: 533227 - DNA, 201 bp, Homo sapiens
attgtgattttcaacatttgtatgtttcagaaatctgcctactgtactataaatgcattcttatgcaaattgctaccatcatatggcccaatttcttagtrtgaggagcatgaaacttttaattacatgtcactgttttaaaactttccatttcttttcagacttatatattctactagctatattacattgaagaaatgc

SEQ ID NO: 533228 - DNA, 201 bp, Homo sapiens
tactgtagcatatgatatgcattcctttaatgtaaataactctaaaagcatgttattttccagtaatgaaagaatcatggtgcctcataagctcttgttcrcttgggagtgttcaggaatctcccagatttgacaccagaagaggcaaggtcaaagcaattaggctgcactggtatcttcagtgaagatgcccttactgcc

SEQ ID NO: 533229 - DNA, 201 bp, Homo sapiens
ataagtagcttgttaacatcatcaaaatgtgtttgttgagcactttgatgatgtgtacatgtgccagacagagctgttctaccatgttctccctgccttcstccagtcctctcaagtatcattttctctttctgtgcacatctttagtgaagaaaatgaggaagaccttgctaaaataaaatattcagtcttaggaaaaaa

SEQ ID NO: 533230 - DNA, 201 bp, Homo sapiens
attctgctttgagatttcaacacccctggctcagtagtaaacagaagttgtaggcagaaaattaccaaggatatggaagaactgagtaataccaacaggaycatcttgatgtttgtaaaatactctacccaacaacagcagaatacacattcctttcaagtgcacatggaacatttgccaagagagaccacattctgggtc

SEQ ID NO: 533231 - DNA, 201 bp, Homo sapiens
ccctttatagatcatatagagtaacttcctgacgttgtcacagcatttgtaaactgtcatggctctggtgagagtgtagcagcaaggacgaccaaaggacrctctcgtctctatcttggttttggtgggtcttgaccaggttctttactgcaacctgttttatcagcaaggtctttattacctgtatcttgtgccgacctc

SEQ ID NO: 533232 - DNA, 201 bp, Homo sapiens
atccagagggacagaactaataggatagatggatatataaaggggagtttattaaggagtattgactcacactgtcacaaggtgagctcccacaataggckgtctgcaagctgaggagcaaggaagccagtccatatctcaaagctgaagaacttggagtctgatgttcgagggcaggaagcatccagcacaaatgtaggc

SEQ ID NO: 533233 - DNA, 201 bp, Homo sapiens
tatctcaaagctgaagaacttggagtctgatgttcgagggcaggaagcatccagcacaaatgtaggcttggaggctaagccagtctggtcttttcttctgyctgcttttaatctggctgcactggcagctgatgagattgtgcccaccaagattgagggtgagtctgcctttcccagtccactgactcaaatgttaatctc

SEQ ID NO: 533234 - DNA, 201 bp, Homo sapiens
tcttcctctcaaaatttttatgaaaagtttttctgctgttcatatgtcaaatacaaaatctcttcagtgcattgatccatataattttacactaatagtgrggctgtacctgttgacttttctaactggcttgcactgttgtagcaaataggaaaatacttgcagctgcaaatattgatttgaagatgaattcttgtcaat

SEQ ID NO: 533235 - DNA, 201 bp, Homo sapiens
catctaggctttgtgatcagtccagatgtgggccataaggggaaatgagagcagtgaggctgaaaaagatgacagcttcaaacatcaaacacaggagtctkactattacaattcaccctgatgtctaactgacgactaaaacatactatatattattttattgaatttgagcttgtttagtaagcccttatggtgctctat

SEQ ID NO: 533236 - DNA, 201 bp, Homo sapiens
ccataaggggaaatgagagcagtgaggctgaaaaagatgacagcttcaaacatcaaacacaggagtctgactattacaattcaccctgatgtctaactgaygactaaaacatactatatattattttattgaatttgagcttgtttagtaagcccttatggtgctctatgaggcttatagcctgaggccaataaggaagac

SEQ ID NO: 533237 - DNA, 201 bp, Homo sapiens
acatgagtaaattgtatgtcactgaagtttgatgtacaaataattttgtcacccagctagtaagcatagtacccaataggtagtttttagaccctcattcwtttgtcaccctccctgcttaagtagaccccactgtctattgttcccacctttgtgtccatatgtactcaaagtttagttcccatttacagatgagaacat

SEQ ID NO: 533238 - DNA, 201 bp, Homo sapiens
ggccagaaagcagtgggatgacatattcatattcaaagtgctcaaagaataacctatcaatcaagaattctatatccagcaaagccatcctttaataatgraggagaaattaagtattttcacattaaaggaaatctgtcactatcagatatttcgtacaagaaatattaaaaataatcctttgaaaaatgacaaggaatt

SEQ ID NO: 533239 - DNA, 201 bp, Homo sapiens
attcccacctgcagagtataagcattccctttcatcttcagccttgccaaaatctgttatttactgatttttaaaaaagagccattctgactggtgtgagwtggtatgtcattgaggttttgatttgcatttctctgatgattagtgatgttgagcattttttcatatgcttgttggccgcatgtatgtcttcttttgaga

SEQ ID NO: 533240 - DNA, 201 bp, Homo sapiens
ttaagttccttatagattctggatattaggtctttgttgcatacataatttgctaacattttctcccattctgtaggttttctgtttatgctattgatagkttgttttgctgtgcagaagatctttaattagatcttacttatttatttcttctttttgttacaattgcttttggagactttatcatgaaatctttgccaa

SEQ ID NO: 533241 - DNA, 201 bp, Homo sapiens
agtatttaggtgtgttgcagcatcacacaagaatggcaagtctttaatccttttttcaccattggattttgcctgcattacgggaaaaaaggatttctttyagtactttagaaaatatctttaataccataatctgattttatatagcatagccaaataccatgttgtacatctgatccatccagccaagcattgaattgc

SEQ ID NO: 533242 - DNA, 201 bp, Homo sapiens
atggagtcggggaggttggctttgttgtcttcgtacttttttgtcgtttacctgattaattttgtgggtaaaatgagtcaacacttgatcgaatgtagcamcttgagtgttttaaacataggaatccagcaaagtagcatctagttgccctcatttgtaatcgacctagacagaatgattactgaggctaaacttccttct

SEQ ID NO: 533243 - DNA, 201 bp, Homo sapiens
gttgattttcagtttagcaccgtgacaggtaccatgaagttgctaatatcaccagtgggaaaataaagatggagtcggggaggttggctttgttgtcttcstacttttttgtcgtttacctgattaattttgtgggtaaaatgagtcaacacttgatcgaatgtagcaccttgagtgttttaaacataggaatccagcaaa

SEQ ID NO: 533244 - DNA, 201 bp, Homo sapiens
gagattgagaccatcctggctaacatggtgaaaccctgtcttttctaaaaacacaaaaaaattagccaggcgtggtggtgggtgcctgtagtcccagctamttgggaggctgagacaggagaatggcatgaacctgggaggcggagcttgcagtgggctgagatcatgccactgcactccagcctgggtgacagagcaaga

SEQ ID NO: 533245 - DNA, 201 bp, Homo sapiens
tgagacaggagaatggcatgaacctgggaggcggagcttgcagtgggctgagatcatgccactgcactccagcctgggtgacagagcaagactccgtctcaaaaaaaaaaaaaaaaaaaagaattttctaactttctggtgtaggtgtttagtcctataaactttccccttaatgctgctttagctgtgtcccagagattc

SEQ ID NO: 533246 - DNA, 201 bp, Homo sapiens
ggcatgaacctgggaggcggagcttgcagtgggctgagatcatgccactgcactccagcctgggtgacagagcaagactccgtctcaaaaaaaaaaaaaawaaaaagaattttctaactttctggtgtaggtgtttagtcctataaactttccccttaatgctgctttagctgtgtcccagagattctggtatgttgtatg

SEQ ID NO: 533247 - DNA, 201 bp, Homo sapiens
ctcaccctgcagcatggagttttatacacattacctgagggtacatggattttcatgttacttttaataagatttattatacttattcagtatttttcatrtctattcttgtcttctttgttaactttatgaatgtgattgtagatgatggttttgaatttttttacatgttattaaatagtttaggcataaaagacctca

SEQ ID NO: 533248 - DNA, 201 bp, Homo sapiens
atgaacctgggaggcggagcttgcagtgggctgagatcatgccactgcactccagcctgggtgacagagcaagactccgtctcaaaaaaaaaaaaaaaaawaagaattttctaactttctggtgtaggtgtttagtcctataaactttccccttaatgctgctttagctgtgtcccagagattctggtatgttgtatgttt

SEQ ID NO: 533249 - DNA, 201 bp, Homo sapiens
catggattttcatgttacttttaataagatttattatacttattcagtatttttcatgtctattcttgtcttctttgttaactttatgaatgtgattgtakatgatggttttgaatttttttacatgttattaaatagtttaggcataaaagacctcaaaatgaatatgtcaagcatttttggactttctaaacttactaa

SEQ ID NO: 533250 - DNA, 201 bp, Homo sapiens
agatatattttacatatcataaaattcaccagtttcagaagtacacttcagtgactttttgtcaatttactgagtggttcaaccataaccatatctagttkagaatattttcatcatctcagtaaaagccctcatgcccatttatggttaatccctatttctatccccagctagtaatctactgtctatcaatttgccttt

SEQ ID NO: 533251 - DNA, 201 bp, Homo sapiens
ccttttatcacaaaaaaaatttaatatagaatagtggaaagaataaaacccagataccccataatccatatttaacatttattaacattctgccatatttkctttatctgtgtcttgttgttgttagttaggggtatgtatattttttatatattttgtatatttgaacttcaacctttcaccttcagttcacatatatta

SEQ ID NO: 533252 - DNA, 201 bp, Homo sapiens
gacaggggcaggacaggagcagaacagtgtctcaggaacatgctcagtaactagtataataaaattaatgaatatagtcaggtcagaattaaatttgacaraatattagcttaacaactgacagtcattccccagtgcccatttgtccttaggtcagattcataactcaatctcttcctggagaagaatctgcctttccct

SEQ ID NO: 533253 - DNA, 201 bp, Homo sapiens
aacctgggaggcggagcttgcagtgggctgagatcatgccactgcactccagcctgggtgacagagcaagactccgtctcaaaaaaaaaaaaaaaaaaaakaattttctaactttctggtgtaggtgtttagtcctataaactttccccttaatgctgctttagctgtgtcccagagattctggtatgttgtatgtttgtt

SEQ ID NO: 533254 - DNA, 201 bp, Homo sapiens
tagttaggggtatgtatattttttatatattttgtatatttgaacttcaacctttcaccttcagttcacatatattagtagacaatctttagcaactctgyctctaccatatggggtgggtaggtagggaggattcaaaaaagtaagaggcagaactttaacaatagagctcttatttattgaccatctactatgtcctgg

SEQ ID NO: 533255 - DNA, 201 bp, Homo sapiens
gcttgcagtgggctgagatcatgccactgcactccagcctgggtgacagagcaagactccgtctcaaaaaaaaaaaaaaaaaaaagaattttctaactttytggtgtaggtgtttagtcctataaactttccccttaatgctgctttagctgtgtcccagagattctggtatgttgtatgtttgttttcattagtttcaaa

SEQ ID NO: 533256 - DNA, 201 bp, Homo sapiens
tcaaagacttttttatttgtgctttaatttttattttttacccaagtcattcaagagcaagttgtttaattttcatgtaattatatggtttagagtgatcttcttggtattgatttctaattttattgtgtgatctcagagtgtggttggttggtaggattttggtatttttgaatttgttgagaattgctttatgcctga

SEQ ID NO: 533257 - DNA, 201 bp, Homo sapiens
tgaaattcctgtagtgaatttttcatttctggaagttcagtttggttctttcttaaaatggatatgtcatctttcaactgttagattgttttactggttcyttgaattaggtttcagccttctcctgtatctcattgagcttccttgacatccatattctgattctatgttgttaatttcagccatttcaaactggttaag

SEQ ID NO: 533258 - DNA, 201 bp, Homo sapiens
catttgttatttctttttcttttttttttttgagatgacagcctcgtcctcagagtgagccgttattcttgtttatgttcagggactcaggggactaatgsagaccaagcagttagtgactttctggtgagtaaaaagagtttcctcattttttaaaatctataattgacacattgagccatcactcttgattgggcagct

SEQ ID NO: 533259 - DNA, 201 bp, Homo sapiens
ccaaacgaaatttattttgttctattttatttagaatttgtacatttgagaaacaaaggggcggaggtgaggagagggtccctgtgttccaattccatttrcactgttgcctgggagtctgagttgacagtgataccaataccatggctaatggttcagttctgggcctcagtttgtatataattataggaactatgcaca

SEQ ID NO: 533260 - DNA, 201 bp, Homo sapiens
atttctttttattaaaaaaagtatatagcattctcttaaatcttgttttcccattgagatgtgctcagtgaggatcctgaattagctattatcatttgttwtttctttttcttttttttttttgagatgacagcctcgtcctcagagtgagccgttattcttgtttatgttcagggactcaggggactaatggagaccaag

SEQ ID NO: 533261 - DNA, 201 bp, Homo sapiens
tttcacaactggggcatcaaaagtctcagtaatcaagataaataatattttaatgtcctatttttaaaagttaaaaataacattaaaattcacaacaaatyatcaaatttttaaatgaaaatgggctgctgtttattttatgacactgtattatagtcatcaggaacagccagtgggtcctggtccttgtggctgggctcc

SEQ ID NO: 533262 - DNA, 201 bp, Homo sapiens
gaggattcaaaaaagtaagaggcagaactttaacaatagagctcttatttattgaccatctactatgtcctgggcacttaacaggcattattttaaccctsacaacaaccatagctgttgtagatatcatcctcatgtgatgcctggggaaactgaggtttggggagattgcatagtcctctgaagacaacataattagaa

SEQ ID NO: 533263 - DNA, 201 bp, Homo sapiens
tcagccccagacccattatctgtctctgcctttctgaatcctctagtaattctcagcaatagatgttcaggatttaactggatacagttttgtttctaggkttagaacatacttaaatggatagatttttatttgccctgggaagtcagactagtagctgtttgcattggtagtttttatatgtatttacatttagacttt

SEQ ID NO: 533264 - DNA, 201 bp, Homo sapiens
aagctgttgccataaaaaaaatactatgtgctcaagtggaagcctcatccttgataatgggaaggagtcttggaagagcaggatggagagaggagcagaawgtggggtgagcaaagaggaaggaagagcgtattgggacgagaacacccgatgcctgctgtctgcagagtgcccccgctccctgcatatctttaagccctt

SEQ ID NO: 533265 - DNA, 201 bp, Homo sapiens
tttaaaataaaattcagctcaattgatcatgtttttaaagtaaatgtatttcggttgcttttcagtatgctcctactcattcagtttttccaataatgtastatctgtggctgtatgataggaagaacagaagtatctaccaagccatgtgttttacttagtgtcacaaataagttcttgtgttcttaagatataattctt

SEQ ID NO: 533266 - DNA, 201 bp, Homo sapiens
atgcacttccatgttccaggaaaattccttgttggcctgcagaccaggagttttacttctctgtagcatgcatgtggctctcaaaccagagaccaacagcrgctggcaggtgatttgcaggcatctccactggacctctctgctactacagctacacttggcatgacatttcagcaagatggatggtggacatgaatttca

SEQ ID NO: 533267 - DNA, 201 bp, Homo sapiens
taggcaacagcaactaagatatttaaggtcctgtggagttgtctgcttctaaggaatgccgatctcagtactccacattatggcctttgtttctttttcctttttttccattaatgaccactctttcatgagcttttgcccagtaggcttatatcttcacatgatccagtcttccccttagtgctctatagatctggagcc

SEQ ID NO: 533268 - DNA, 201 bp, Homo sapiens
tacaaacacgtcttcaaggagcccaagaggcctgactggccatggtcaagatgagcatttttgtaattagggaaggtgattcgtcgtatttcccactgackgtcaagttgtacctaaagaggaaaacagggctgttccttgaagttcagtgaccctgttttagtcacactgcctgctctgggactctgccttccagacatc

SEQ ID NO: 533269 - DNA, 201 bp, Homo sapiens
tcacagcaaaggacttcataaagtaatacaagttgagcatcccaagtttgaaaatttgtaatccaaaatgctccaaaatccaaaactctttgagcatcaayatgatgctcaaagcaaatgctcactgaagcatttggggtttttcagatttgggatgctcagtcagtaagtataatgcaaatattcccaaatcctccaaaa

SEQ ID NO: 533270 - DNA, 201 bp, Homo sapiens
gaacacccccccccccgtaagaattaaagttacaaacacgtcttcaaggagcccaagaggcctgactggccatggtcaagatgagcatttttgtaattagrgaaggtgattcgtcgtatttcccactgactgtcaagttgtacctaaagaggaaaacagggctgttccttgaagttcagtgaccctgttttagtcacactg

SEQ ID NO: 533271 - DNA, 201 bp, Homo sapiens
caaaggacttcataaagtaatacaagttgagcatcccaagtttgaaaatttgtaatccaaaatgctccaaaatccaaaactctttgagcatcaatatgatkctcaaagcaaatgctcactgaagcatttggggtttttcagatttgggatgctcagtcagtaagtataatgcaaatattcccaaatcctccaaaatctgaa

SEQ ID NO: 533272 - DNA, 201 bp, Homo sapiens
ttatatcctgttgtggctgctgagcatttatttaaatatcacacatattttaaatttataatttatttaaacattaaagtataactgtaacagagacaggytggccttagagtgagctcaacagccatatgtatttatatgttctctttatgtatttagtgggtttgaaatttacagtcccaacttggtcataaagaggat

SEQ ID NO: 533273 - DNA, 201 bp, Homo sapiens
ataatttctctctttattgttattttctatttgatgaaatattgtcgtcatagctcctttacttctttaagcatagtttccttagttattttattatattyataatagctcttttgaagtttttgactgctgggtcttttcataggcagtttctgttgcctgcttttttctagtatctgaatcacccttttctgtattttt

SEQ ID NO: 533274 - DNA, 201 bp, Homo sapiens
ggcagctcctttttggccttttatgacatccttcaccttcccctctactccagtatagaagcctgagctgctcttttttgttgttattatttttgtttgtktaaagctttcaacagaaagagccatttatcaatctgttgtggtattaaatgacaagttgagtagacagccctgaaatttccattttaccaatagtttcag

SEQ ID NO: 533275 - DNA, 201 bp, Homo sapiens
gtaccattagatttacaaaaattgtatgcgcagagagttggggcaaggtatacttttgcaagtcatctaaacacacacacacacacacatgtgcgtgcatkcacacacacacaaacacacagcccatgtgtgtctttattaaaataaagatctggactatgggaaagggaaacctagaaaacaatttagagactggcttcc

SEQ ID NO: 533276 - DNA, 201 bp, Homo sapiens
aatctcctgaggcatcccatcatctttggggagccacgtttatccttaggtgtgaaagaaatacgtctgggaaggatcattaataatcttcattccaaaakacgaaattatgtaaaaaatgaaaggaaaggatatacaggaacatttttgaaggtgggatctttgcaggaaatggagcgtgtggtagtttgcattttcgag

SEQ ID NO: 533277 - DNA, 201 bp, Homo sapiens
agtttctcctcttcttcctctcttttcaaatactgccatgttttctccatgggataacctaagaacagaaatcatggggcaaagaatttaaaaaacaagtaaaaaaaaaattagaagtttttctcctgtttttttttttttttcctggtgcacagaagtattcagatgatagggaagtagggatacagctggggaggtggg

SEQ ID NO: 533278 - DNA, 201 bp, Homo sapiens
ttttcactcacccacagacattttgtatttgtggtgatccaatctcagctttttaattctgtctaagaagttgctatttccagggaaacatttctgccatratttcgaaaagggagaggtaaatctaacatatcacctggagattgacaggaaaggaaggaaaacaactcttttgaatgcttttggaagaaaaaaacctga

SEQ ID NO: 533279 - DNA, 201 bp, Homo sapiens
tttaatatacaagtggaggtacagccatgaagacagaaacaaaggcataagggatgagtgctgagaaattttggacagagaagaaaagacttcaaggaggtcatatcaggtcgcctcatttgtcccaggtaattaagaagtagagtttttgcagagagtaaccatgatggaattggacatgggattgcataaagaggcagg

SEQ ID NO: 533280 - DNA, 201 bp, Homo sapiens
taatatacaagtggaggtacagccatgaagacagaaacaaaggcataagggatgagtgctgagaaattttggacagagaagaaaagacttcaaggaggtcatatcaggtcgcctcatttgtcccaggtaattaagaagtagagtttttgcagagagtaaccatgatggaattggacatgggattgcataaagaggcaggta

SEQ ID NO: 533281 - DNA, 201 bp, Homo sapiens
ctgatttctttttattaaaaaaagtatatagcattctcttaaatcttgttttcccattgagatgtgctcagtgaggatcctgaattagctattatcatttkttatttctttttcttttttttttttgagatgacagcctcgtcctcagagtgagccgttattcttgtttatgttcagggactcaggggactaatggagacc

SEQ ID NO: 533282 - DNA, 201 bp, Homo sapiens
aatatacaagtggaggtacagccatgaagacagaaacaaaggcataagggatgagtgctgagaaattttggacagagaagaaaagacttcaaggaggtcatatcaggtcgcctcatttgtcccaggtaattaagaagtagagtttttgcagagagtaaccatgatggaattggacatgggattgcataaagaggcaggtaa

SEQ ID NO: 533283 - DNA, 201 bp, Homo sapiens
catgctctctacccctctaccttcatcccaagcctcctcttctggaggtgaaatgagcgagatttcagggatctctgaataaaattcctgggctcatggtwcatgtgtatattcctattctcacttctcctgggtcactcacgctgtatttcaaaaataaaaggctcttcattctgagttatcaaataagtgtttattata

SEQ ID NO: 533284 - DNA, 201 bp, Homo sapiens
atatacaagtggaggtacagccatgaagacagaaacaaaggcataagggatgagtgctgagaaattttggacagagaagaaaagacttcaaggaggtcatatcaggtcgcctcatttgtcccaggtaattaagaagtagagtttttgcagagagtaaccatgatggaattggacatgggattgcataaagaggcaggtaat

SEQ ID NO: 533285 - DNA, 201 bp, Homo sapiens
ccaccctttccacaacttatgttgccatttcaattttaagtagcttactttctacctatttctcttttccaactatacacaggaacaaagaaagatgctcmgaaagatcaagatacgaataaacctgctgtttcatctcctaagagagtagcagcttcaaccaccaagcttcattcaccaggtatgtaagaaatatgatgt

SEQ ID NO: 533286 - DNA, 201 bp, Homo sapiens
gtgtggttgtgggggctctcctttggcacctctttcttcagccccaagggaaacactctgaggatgcccagggcacagtggtggcctgctgatcacagctkcccaggctgtggtggctgctgtctgtagtggccccagctggactccttgtatcattacttgcaggaccaggtggacacgctgaccttccagagccagtct

SEQ ID NO: 533287 - DNA, 201 bp, Homo sapiens
ctacctacagtgcacatgggcattttctattctgtttcatttaaagaagaaatgctggtcacattcctctgacctgattttaaaacccactaaagcattgygaactgatgtttgcaaaatgctgttcttgataatcctccaatgcccagagctgagggcaccggtttactcccgattttatggccttgctagaacctctta

SEQ ID NO: 533288 - DNA, 201 bp, Homo sapiens
ttgccatcttatatggatatggtttttgtgttgcctcaaaataattgctgcagtaatatcaaatgtcactgatcacagatcaccataacagatataataayaatgaaaaagtttgaaagattgtgaaaattaccagaatgtgacacagaaacaaagaatgaacatgtgttgttggaaaaatggcactgagaagtagattac

SEQ ID NO: 533289 - DNA, 201 bp, Homo sapiens
gagaatctgagggttttctggtgctacatgggttggcattctttccttttgtggaaaacaagggaagatgaaattataggcaggaatgctatctctctaayctctgagagggaagttactttatccttggaataaaactgttaggctttgctgttgcacactccaccaaacaagagagtcatgtgctactcctagaagtta

SEQ ID NO: 533290 - DNA, 201 bp, Homo sapiens
ggcaagtgacccgaggggctcgctgtcttaagctgcaccaagtgacctgagccctttggcttctcttcctgccagagaagaagccaagaattaaatcaagscaatctcttgaatttgcttctaagacagcttccataccatcataccaaggagaatctgagggttttctggtgctacatgggttggcattctttccttttg

SEQ ID NO: 533291 - DNA, 201 bp, Homo sapiens
tgacaaattgagagaggtttgcccctctttgggagtttcagctattgattaaatatctctttgccactatgaatgtgtctgtagcacccaggcaagtgacycgaggggctcgctgtcttaagctgcaccaagtgacctgagccctttggcttctcttcctgccagagaagaagccaagaattaaatcaaggcaatctcttg

SEQ ID NO: 533292 - DNA, 201 bp, Homo sapiens
tgaggccccatttcgtgaaggtccaagggcattttggttggaggagagtgtggtgatggtgacggttgtttgtgtatgttgctgttttgggtttgagtttygatcagagtggagtttggattttcaggagttcaggcagaatctcctgaggcatcccatcatctttggggagccacgtttatccttaggtgtgaaagaaat

SEQ ID NO: 533293 - DNA, 201 bp, Homo sapiens
cttccctccaccctccttaaaaaaaaaaacaaaacaactgttgttgttactgagcattctctctactttgcttagatttataagttccatcctccagagargttcaaatcagtattgtcagggttaggggctcctccatgcaatggtctctttctctttttcctttcccctcccctcccctctcccccccttcttttcttc

SEQ ID NO: 533294 - DNA, 201 bp, Homo sapiens
ccagaggaagacgcctgcccatgcacgggtcttggactgtggtggagtgctttcctctgtgctattttgggggaccttgccttttcttttttgagcttcarcctaaaaatcacctctccttaatgcccaaaaccctgtcctcaaccccaggcagagctccttgccccgtcttctgtggccccacagcccctcacattcacc

SEQ ID NO: 533295 - DNA, 201 bp, Homo sapiens
atagccaaatcttaaaggggtgacctcctccagcactgtggcatcaggcaaaggtctgaggaaaggggaggccctcctttcatcctcctacaacttggcaratagaatatgcgagagggcccacgtttggccctgtcctgtagcaaagaggcctcaatagctatgccaagcttgcagggtgccacttgtatgactcaaggc

SEQ ID NO: 533296 - DNA, 201 bp, Homo sapiens
gcgtgacagtgtgagcgcctgctaacgtccacaagctcagaggtgactctctgtaccataggttacaattagctctaattcactgagctggaaattgtttyattatttcctttagatttctaaaagaagtgccttctattgtaacagtgtcaggcacctggtacctcaacaaattaattaaagcactgaagtgttttataa

SEQ ID NO: 533297 - DNA, 201 bp, Homo sapiens
tacaagtggaggtacagccatgaagacagaaacaaaggcataagggatgagtgctgagaaattttggacagagaagaaaagacttcaaggaggtcatatcaggtcgcctcatttgtcccaggtaattaagaagtagagtttttgcagagagtaaccatgatggaattggacatgggattgcataaagaggcaggtaatggt

SEQ ID NO: 533298 - DNA, 201 bp, Homo sapiens
acaagtggaggtacagccatgaagacagaaacaaaggcataagggatgagtgctgagaaattttggacagagaagaaaagacttcaaggaggtcatatcaggtcgcctcatttgtcccaggtaattaagaagtagagtttttgcagagagtaaccatgatggaattggacatgggattgcataaagaggcaggtaatggtt

SEQ ID NO: 533299 - DNA, 201 bp, Homo sapiens
gctgatgtgagggatgaggggaaagccctccagcttgccccccaccccgaactgttggtggtagcctttcatctttcaaatgccagcctgggcctgttatyctcttgcctaggaccctgcagcagctctcattgcccttttgtgtaggcctggaatggggtgattctgatggtgatggccctctttacacagctgctgtgg

SEQ ID NO: 533300 - DNA, 201 bp, Homo sapiens
gttcttcatggggtgtagtaaaagacgcaagaataagaaggaaatgaatgcaacctaattcatccatggctggattcactagcacagagcttatcatccayaggctttatcttagtctattcaagccactataaaaaaattaagactgagcggcttataaacaacgaacatttatttttcacagttctggaggctggaaca

SEQ ID NO: 533301 - DNA, 201 bp, Homo sapiens
caagtggaggtacagccatgaagacagaaacaaaggcataagggatgagtgctgagaaattttggacagagaagaaaagacttcaaggaggtcatatcaggtcgcctcatttgtcccaggtaattaagaagtagagtttttgcagagagtaaccatgatggaattggacatgggattgcataaagaggcaggtaatggttc

SEQ ID NO: 533302 - DNA, 201 bp, Homo sapiens
ctggcttgcactgttgtagcaaataggaaaatacttgcagctgcaaatattgatttgaagatgaattcttgtcaatatgccctctgattctgtcatattgrtatgatgcgttgtagaaaataaaattcctttattcagactaaggtacagaaggatttctagtagttgtataaaaaatgagtaactgatacattattattt

SEQ ID NO: 533303 - DNA, 201 bp, Homo sapiens
aagtggaggtacagccatgaagacagaaacaaaggcataagggatgagtgctgagaaattttggacagagaagaaaagacttcaaggaggtcatatcaggtcgcctcatttgtcccaggtaattaagaagtagagtttttgcagagagtaaccatgatggaattggacatgggattgcataaagaggcaggtaatggttct

SEQ ID NO: 533304 - DNA, 201 bp, Homo sapiens
tggatgtgtgtccctacctaaatctcatattgaaatgtaatccccagtgttggaggtggggcctggtgtgaggtgattagataatgggggcggttttcttraatggcttcgcaccatcccctttggtatgtccttgtgatagcaagtgagttcccccgaggtctggtcatttcaaaatgtgtgacacctccccctgtctct

SEQ ID NO: 533305 - DNA, 201 bp, Homo sapiens
ttctttaaaaagaagtcttacacatgttaagctgaattacagaatgtgtgtgtttattctacttaagggtggtggggccataacagagcatgatatcaacyagaccaaccaggcattataggattgttgctgagtctttactgtgttggcatgtagatatctgtgaataatgtgctgttttaacctggagcataccgagac

SEQ ID NO: 533306 - DNA, 201 bp, Homo sapiens
atggatgatgaagatctgggcgttaaagagcttactttatattgcttaagaaaaaagactccttatttccctatatcaaattaattttatgtaatgaaatmcacacacacacacacacacacatgcaagagatagagtgagtgagcacaggcagtgtcatgtagatagatatggggaattttaaaaagatatataataatg

SEQ ID NO: 533307 - DNA, 201 bp, Homo sapiens
gtaaattattacaatatagtataatacttaaagaagtagagatatgaaaaaataaaacacataaaatctggttgccattaagttggctactattttttttwaaaagcccagaaaataacaagtgttggtgaggatgtgaagacattggaaccctcatgcattgccgattggactagaatggtgtacccactatagaaaaca

SEQ ID NO: 533308 - DNA, 201 bp, Homo sapiens
tacgaataaacctgctgtttcatctcctaagagagtagcagcttcaaccaccaagcttcattcaccaggtatgtaagaaatatgatgtgttccttgggggratgacttgaacttggaatttatcttattcagatgtcattaatggagcaatgccaacccatgtgatttactcaattgttccagagcttgacatacatatgc

SEQ ID NO: 533309 - DNA, 201 bp, Homo sapiens
  misc_feature (1)...(201): n = A,T,C or G
tcattgttgtttaaacaaagaggttcagcctatttagtaaagatgactgttttctttccattttcaaacttatttttactttgtagttttttttattgatntatttgttcatatttatggggtacgtgtgatgttttgttacatgcatagaatgtgtaatgataggaggaatcagttctaaagatgactttttattttagg

SEQ ID NO: 533310 - DNA, 201 bp, Homo sapiens
aacctgctgtttcatctcctaagagagtagcagcttcaaccaccaagcttcattcaccaggtatgtaagaaatatgatgtgttccttgggggaatgacttsaacttggaatttatcttattcagatgtcattaatggagcaatgccaacccatgtgatttactcaattgttccagagcttgacatacatatgctgatgttt

SEQ ID NO: 533311 - DNA, 201 bp, Homo sapiens
aaggacaacaaaatgagtcatggctggtgaggaactgcctgtgcccagcatgctggttctcaggggcagccttggtacttcagtatggtgtgcactgttgrgcttgggctgtcatcatgaagcagaaaatagtctctcttcaaaaaagaatggtgggggcagggtgaggtgagggttcttggtccattaaggtcagaacat

SEQ ID NO: 533312 - DNA, 201 bp, Homo sapiens
gaagtagatcagcggtgaccctggggaagctcctctgtgtccagcagggcagagctcaggaattagtgttcctagaattgccagagaccctcacagaagcytaagttacttgtctgttttgtaaaatatatgttgatctcatccctagaaggtgtggcacacaggaggagagggaagagaatattcaggactttcacaaac

SEQ ID NO: 533313 - DNA, 201 bp, Homo sapiens
gggggcgtttttcatcaaatcagagacagcagtgtccttacttctcccctgaccactcaaaactaaattccctttcctataaagaagtgtgtcattcatcwagcacagggggtggtgaccatagcaacaaatcacccaaatatttcttttgttgatatgtttgactttcttgaagccaccctttccacaacttatgttgcc

SEQ ID NO: 533314 - DNA, 201 bp, Homo sapiens
cctttgatcttctcagcactgccaaaagataggcaggagaactcttagtattcctgttttccaggtaaagaaacagaggaagagaagttgttccttgccakaggtctcatgatcaataagctgtagaatcaagactttgtgcagataatttctggaggcctaatgttcagcatggtgattacagttaataattctgtactg

SEQ ID NO: 533315 - DNA, 201 bp, Homo sapiens
tcttcacattaaccttttgatgaaggtattttgatacccatgttatagataactcaggttgccttgatcaaataatattttattattttattcataaaatrtttctgaaaaacctggtagttctccaaataatagaatggatatgacataggacttccctttaagaaaattccaatcaaatatcccacctaattgtttcaa

SEQ ID NO: 533316 - DNA, 201 bp, Homo sapiens
tacaggcgcccgccaccatgcccaactaatttttgtatttttagtagagatggggtttcaccatgttggccaggctggtctcaaactcctgacctcaggcratctgcttgcctcggccttccaaagtgctgggattacaggcgtgagccactgtgcccggcctcttcacattaaccttttgatgaaggtattttgataccc

SEQ ID NO: 533317 - DNA, 201 bp, Homo sapiens
cttcacattaaccaccccccccccttttttgagatggagtctcgctctcttgcccaggctggagtgcagtggtgtgatcctagcttactgcaacctctgcytcctgggttcaagtgattcttctgcctgagcctcctgagtagctgggattacaggcgcccgccaccatgcccaactaatttttgtatttttagtagagat

SEQ ID NO: 533318 - DNA, 201 bp, Homo sapiens
gcatattatttcatttaatatcttcacattaaccaccccccccccttttttgagatggagtctcgctctcttgcccaggctggagtgcagtggtgtgatcytagcttactgcaacctctgcttcctgggttcaagtgattcttctgcctgagcctcctgagtagctgggattacaggcgcccgccaccatgcccaactaat

SEQ ID NO: 533319 - DNA, 201 bp, Homo sapiens
gtagtcaaagaaaaataaaattatacttttgaagttatgaagttcatacatgtcacatgccttttagaaaaatgtaactgaaaatagaagaaactggtggygtgagtgttttttgactggtaatgtgttctggcctccagatgaggccccagggctgtaacaataactgtatgtgagacagtcttgcagatggaaattgga

SEQ ID NO: 533320 - DNA, 201 bp, Homo sapiens
tgaattgagaaattattgagaaattatggcattttactctttacctaaaagcaaaaagatcacgtttcccaatactgaggagaaacagacataagggtagrgattaaaggtagtcaaagaaaaataaaattatacttttgaagttatgaagttcatacatgtcacatgccttttagaaaaatgtaactgaaaatagaagaa

SEQ ID NO: 533321 - DNA, 201 bp, Homo sapiens
tgggtccctccagatgagcaaaatgcaaaggctggcagcctcaggagtggggtggaaagagtcccctaataccagaagggaacaagtgcctgttcttaccrtcatcatacatgtcctctcaagcaaggaatccactcagggtggagaaggagagaagaaaaaacccaggagagagctttcaaactgaaaagtggctggctt

SEQ ID NO: 533322 - DNA, 201 bp, Homo sapiens
ggggatggagagctatgctggtaccatcctcatgcctggagaaggggctgggggagccattagacctatagaagagtgggtcagaacaagatgggacaggrgacctacatggacctgaccaccaaaggccacctacaggacgctgcgagaacacagccaaggaccatgattcccacagcctggctgtgcactgtggccgtg

SEQ ID NO: 533323 - DNA, 201 bp, Homo sapiens
cccagtctcaggtattcacagcagcatgagaacagactaatacacttcacttggactgttggtgattatggacttcattgacttttggtcataagccacartgggagagtggcagagccaaggctgctggagtggagaggtagcatgagtctcctggaagactcagaggggatggagagctatgctggtaccatcctcatg

SEQ ID NO: 533324 - DNA, 201 bp, Homo sapiens
ccaagagctttgaaagagcaaggttagggtttgtcttggtcatatggaggacagaatggagtgagtccaagaagagagaggatttggtcatgccttggatrtccttactgaagggagcaagaatatgtgtagattttgagtatgtcattaattaacacgtttaactcagatcaaatttctctccactccaaaatctccagc

SEQ ID NO: 533325 - DNA, 201 bp, Homo sapiens
gctgagtcctggaggactcagtggaacccccataatttgggagatttcagagtggtggggacccatgccttgctcacttcatgctatggtctagctctgtktccccacccaaatctcatcttgaattgtaattggaattgtaatccccatgtgttgggggagggacctcattggaagtgattagatcatgggggtggtccc

SEQ ID NO: 533326 - DNA, 201 bp, Homo sapiens
tcaaggaagctgtagtttagagaaattaagtaacccccacacccctagtcatacaacttctttgtagcaggaatcaacctaagcctgttggcctttaaaayctatagacttaacttctgctatttaaatattcttacttcgatggaagccaattaattgcattttactgaagttaccttgattgaaaaatatgacttagag

SEQ ID NO: 533327 - DNA, 201 bp, Homo sapiens
tttgggtgttattggcttgaaatttacaggaacgttaaacatatttgtgctccgtgggatgagggtctcacttgtttgtgggaactgattgtgtctgtagygggctagtttgcagtgctgatttgaagtgaataactttcagagcactccctgccgtgctcgtgccccctctgacttggccagcaggcacacaggcacctc

SEQ ID NO: 533328 - DNA, 201 bp, Homo sapiens
taatgaaggttcttaatggagtcacaggaaaaaccacagacctaccaagttgaactcaaacagcaccttgctatggcttcttttctcccaagatgtagttmattaggaataagtttctgaatgtgtatagctgagggtacttgggttttaaagcaatggagtcaagcaaaggcaatagtgagaggtttttagccctccaca

SEQ ID NO: 533329 - DNA, 201 bp, Homo sapiens
ggtttcagcatgttggccaggatggtctcaatcttttgaccgcgtgatccgcctgcctcagccccccaaagtactgggattacaggcgtgaactactgcamccagcctatttatttttatgtgtattgatattgattatcattcatctccctctgctccaggaagggagagatcctcatcccttttattcactgatgtatc

SEQ ID NO: 533330 - DNA, 201 bp, Homo sapiens
ttaatttttataataaattaaaaaaagaaaaaagcgataattcatatggttgttttcttattgtcctttgggtgttattggcttgaaatttacaggaacgwtaaacatatttgtgctccgtgggatgagggtctcacttgtttgtgggaactgattgtgtctgtagcgggctagtttgcagtgctgatttgaagtgaataa

SEQ ID NO: 533331 - DNA, 201 bp, Homo sapiens
tcagtggcagtaagtacattcacattgttgtgcaaccatcaccaccacccatccacagaactgaaactctgtacccattaaacaacaactctgcatttccsccaaccctccagcccctggaaaccacaattctgctttctgtctcaatgaatgtgaccactctagatacctcatatagttggaatcatacagtatttgtgt

SEQ ID NO: 533332 - DNA, 201 bp, Homo sapiens
aaaagtcaattgcacacaaagcacaaagtcagtgttactgtatgttaatttttataataaattaaaaaaagaaaaaagcgataattcatatggttgttttyttattgtcctttgggtgttattggcttgaaatttacaggaacgttaaacatatttgtgctccgtgggatgagggtctcacttgtttgtgggaactgattg

SEQ ID NO: 533333 - DNA, 201 bp, Homo sapiens
gcatgttttcatatgattattgccatttgtattcttctttggagatccgtctcctccagtcctttgcctgtttttgaatggtattgtttgttttttgttaytgagtttcaggagttttctgtgtattctggatattaatcccttatcagatatgcaatttgcaaatattttctctcattctgtgggttgccttttaatctg

SEQ ID NO: 533334 - DNA, 201 bp, Homo sapiens
gggactacaggcacccaccaccacacccagctaatttttttgtatttttagtagatacggggtttcactgtgttagccaggatggtctcgatctcctgacytcatgatccgcccgcctcggcctcccaaagtgctatggggatctaatttttttaagtattattatttaggtaattatatgtgtatatatattttaactta

SEQ ID NO: 533335 - DNA, 201 bp, Homo sapiens
tttctccagacttaccaattcagtgatgaggttagcgggtattatgttgtgggataggatgttctggagatgtgcagatgagtgagacacgattcctgtcyccacagggttcacaggctgatggcggagaagcacagagaaacaattattaaaacgttgaccgatgtttaaatgagctgctatacagcctgacgtgtcagt

SEQ ID NO: 533336 - DNA, 201 bp, Homo sapiens
acacacagccattgcccccataactaagcccctagtgcaggcattttgttctcacctcagaggcacataggaaaggctgtgctgggggcagcaagctctcyttgctccggaagctgcaaaggtgcccttgtcagcagagcaagtgcagactttatccaacagaggtgatttttctggacttcagtctgtccagctttaaaa

SEQ ID NO: 533337 - DNA, 201 bp, Homo sapiens
tgtgtgctcaggtgatgttcaattattgcagttctgagagtcctgtttcttcaacctcaaaaatctgctgaaaagcttccaggatttagaggaaaaataaytgtaaacacctgatgtattctgagcactgatatgctttttattttttaatgcatattatttcatttaatatcttcacattaaccaccccccccccttttt

SEQ ID NO: 533338 - DNA, 201 bp, Homo sapiens
ttggctcctatcttgtccctccgtgtcatgcattcacttttgccttccatcctcccttctgccatggaataagctacaccagatgccagtgctatgctctkggacttcccagcctccagactgtgaacaaaataaacttccttcctttatgggttacccagtctgtggtattctgttatagaatcagaaaatggactaaga

SEQ ID NO: 533339 - DNA, 201 bp, Homo sapiens
gcaggaggatcacttgagcccaggatgcaaggctatagtgctctatgattgcacccgtgaatagcctctgcactccagcctgggcaacatagctggagacyctgtctcttgaaagaaagaaagaagtgattaggctacaccctcattaagggattaatggcattatcctggagtggactcttgatatatttggctcctatc

SEQ ID NO: 533340 - DNA, 201 bp, Homo sapiens
aggaagaaaaagaaaggaaaaaagaaacaaacaagtgcaataaatagaaaataattacaaagatggtcaatagtaattcaaagatatccataatcactttyaatgtgaatggtctaaacagccccagttaaaagatagagatctggctaggcatagtggctcatgcctataatcccagcactttgggaggctgaggtgggt

SEQ ID NO: 533341 - DNA, 201 bp, Homo sapiens
gagtaaaaacacatcacttctgccctcccaggagaagaaagaaaaacatttaaaatccaaaatagtgaaactctattacacgacagtattctcttgagaayaaagatttatcataagtattatgctgacaaaatagataggaggtgatattatttctcaaattcttcttcaataatatttccccaatttttgtttcaggtt

SEQ ID NO: 533342 - DNA, 201 bp, Homo sapiens
ttgattagagaggataaaaatacctgtattctgtctcatcttgtgctggcagtctcgccaaaatctagtcaacaaaacattgactagattctcttaaatcyagtcaatgttgttgaccagcatctctgagggtgctttgcagtattgtaaaatgagtgcatttcaactgtattgtaaaaacattatgaaaatgcgttttaa

SEQ ID NO: 533343 - DNA, 201 bp, Homo sapiens
gccaaaatctagtcaacaaaacattgactagattctcttaaatccagtcaatgttgttgaccagcatctctgagggtgctttgcagtattgtaaaatgagkgcatttcaactgtattgtaaaaacattatgaaaatgcgttttaagggcactccatagaaaagacttcttatgtcatcatattacaattttctgagttgtt

SEQ ID NO: 533344 - DNA, 201 bp, Homo sapiens
aagatttgaacctcaattaaaaacacactgcatgaataggtttatttggttttatagtttcttgctcagttagcctcgtgttttgtatttaccttcaaccratctcttcacaactccaaaaacattaacaaaatagaacaaaacaaacaactttgactagtttctctttctggcctggatattaaataatgccagggaacc

SEQ ID NO: 533345 - DNA, 201 bp, Homo sapiens
ctaaacaactactctctcagaagttatagcccaagtaagcgatgctgaaatgggtccagacgctggaaacagactaatgtgcaactcacaaaacaacaccmaggacacagacaggcagttcaggctgtggagtgggatgtgaatgcagccagggcattctttcattgagacagagtagtcaggagcggaccctgcctctct

SEQ ID NO: 533346 - DNA, 201 bp, Homo sapiens
tctaatacacggtatgactttgctcgtttttcatacaagtagacactgaaatgtattgaagagtattaaatgggaaggatactttgtttctgacaagcctrtatgaaatttcatttcacagcagaaaagcagatcattatacaaaaacacagaggccctagtgttaattatatgtggaagaaataatacttattgattaac

SEQ ID NO: 533347 - DNA, 201 bp, Homo sapiens
acagagaacagattagtagttgctggaggttagagatgggggagtgtgtgcaaagggaggttttagaatagtgaagctgttttgtattctgattttggtgktatttatatgcatctgtatatgtgtttacatttatagccctatacacaaaaaagtcaattgcacacaaagcacaaagtcagtgttactgtatgttaattt

SEQ ID NO: 533348 - DNA, 201 bp, Homo sapiens
gggagggttattagaggaagatagaatccagaaggatcaagaaacttcttaagtgatacacaaatggattaaaacgcaggcaactggctaattctcccttytcctgcacttactctgagaccagaatttcccagcatgacttctttggatcagcatttcttctccttggccccattaatctctgtcctttgccattgttca

SEQ ID NO: 533349 - DNA, 201 bp, Homo sapiens
tttgggagggttattagaggaagatagaatccagaaggatcaagaaacttcttaagtgatacacaaatggattaaaacgcaggcaactggctaattctccyttctcctgcacttactctgagaccagaatttcccagcatgacttctttggatcagcatttcttctccttggccccattaatctctgtcctttgccattgt

SEQ ID NO: 533350 - DNA, 201 bp, Homo sapiens
ccagctttttcattatgttcacacctacatttcttgtcttttctttgctatatttcagaatagtattcccatttgaagttttatacatatattttcacagrtgctcttttaatgaattgaggactttctttttaaattaaaaaacacattgttttatgtagttgcctactttgcagaataacttcacaggcagtatgccaa

SEQ ID NO: 533351 - DNA, 201 bp, Homo sapiens
aattaatttacattcccaccaacagtgtataagctgttcccttttctccacagcctcaccaccatctgttgttttgttactttttaatagccattctgaaygttgtgagatggtatcgtattgtggttttgatttttttttctgatgattagtgatgttgagctttttttttttttcatttccaacttttattttaagtgc

SEQ ID NO: 533352 - DNA, 201 bp, Homo sapiens
tgatgaaaactttaaaacttacactgcttttaccagctttttcattatgttcacacctacatttcttgtcttttctttgctatatttcagaatagtattcmcatttgaagttttatacatatattttcacaggtgctcttttaatgaattgaggactttctttttaaattaaaaaacacattgttttatgtagttgcctac

SEQ ID NO: 533353 - DNA, 201 bp, Homo sapiens
ctcctgcctcagcctcccaagtagctgggactacaggcgcccgccaccacgcccggctaattttttgtatttttagtagagacggggtttcaccgttttasccgggatggtctcgatctcctgacctcgtgatccgcccgcctcggcctcccaaagtgctgggattacaggcgtgagccaccgcgcccggccctgtgtttg

SEQ ID NO: 533354 - DNA, 201 bp, Homo sapiens
ttagtttgctgaggataatggcttctagctccacccatgtccctgcaaaggacatgatcttattcctttttatggctgcatagtattccatggtgtatatrtaccacattttctttatctagtctgtcattgataagcatttaggttgattccatgtctttgctattttgaataatgctgtagtaaacatatgtgtgcatg

SEQ ID NO: 533355 - DNA, 201 bp, Homo sapiens
ctatgggtttgccatagatagctcttattattttgaggtatgtttcttcaatgcctagtttgctaagggttttatcataaaggaattttggattttatcaraagttttaatgcatgtattgagatgatcatatggtttttgtttttaattctgtttatgtgatgaatcacatttattgatttgcatatgttgaaccaccct

SEQ ID NO: 533356 - DNA, 201 bp, Homo sapiens
aatgtatcacctataaaaatagctttatctatattggttttccagcctgccaagtgaaaatcgtgcccatagttgacaaaaggctcccaaggttgtgcaayaaaaagccctgacatgttcattacaagcaaagatgtctggaaagatgttggatgatgaggggaagcagtgccaaatctggagtctgggtctgaatcctgg

SEQ ID NO: 533357 - DNA, 201 bp, Homo sapiens
tatgtggccactaagtcagaatcaccaaagctagcgccaagaatctgcatttccaacacactctgtagcaaatctttatacctaggttaggatatatatakatagatagatagatatagatacagatatagatgtagatatagatatagatatagatatagatcgatcatgattcatcaaacaaggtagaaaagctcaaca

SEQ ID NO: 533358 - DNA, 201 bp, Homo sapiens
ccaccttgtagaggtagagacccttggagatggcccctgatgacactgtgggggcagctcagaggcctagggtagaggttccaaaattctcaattcacagygaccacagtgtctcagtaattttttttcacagtatcaaggccaaataaatacctcccagctctatttagaaaggaggtaagtctaagccacttaagtgtg

SEQ ID NO: 533359 - DNA, 201 bp, Homo sapiens
gtgacttggagagaggaatctggtggccagggtggggcatctcatcctgggctggcttatcagggaagcgcagtggtcaggactgagacactgaagggggycaggtgccaagccctgtaagacgaggtctgtgagatgaagctcagagccagaggggccacagagaggggcgtgggctgagcccagagtgggcaaggaggg

SEQ ID NO: 533360 - DNA, 201 bp, Homo sapiens
attgttgtgcggtatttccccttttccacaccataaaacctacccaaacctgcttatgggcagttaggctagatgactagaaaataaaacagtgtgcacayagtgctctgtaacccctcaccaggagcggccctgtgcccgcaacaggctggagggctcccttctcgctctgcctttccaggctccagtcagcatcatttg

SEQ ID NO: 533361 - DNA, 201 bp, Homo sapiens
tttacatgtataatatttacttctggattggaaacacaagttacgggatctttgaaacatagttttactgatccgtagacttgaggacgaaaaacaggccaacatggagaactgacagaaggttggagtagaattccagatatgaaccctctgaccaaaagaacccttcaacacaccttcttgaacaggccagctcttagt

SEQ ID NO: 533362 - DNA, 201 bp, Homo sapiens
cttagtgctatttattgaaggttttggtttttgcattttttaagaaaaaaaaaaaaagtttggggtaatgtagaaacaccctgagcctagcacagttggasataggtgaccaaaaagtggacttggcttagacaatcggtgagaacagacttgtgatatcaccaggggggatgatcacactgaccccacaggcatcttggg

SEQ ID NO: 533363 - DNA, 201 bp, Homo sapiens
aacaggccccttcccagacttgctagtgtgtgatccggagcagcaggaccctgctactgctgcagggacacctacacccggacaccccttctcccccaccrggagaagcccaggggttgacgccagatgtaggcttcttccaacagtcggctaggaaaggcagggtgtgaggaaccctggaaagctgaggtccatgggagc

SEQ ID NO: 533364 - DNA, 201 bp, Homo sapiens
aatatttacttctggattggaaacacaagttacgggatctttgaaacatagttttactgatccgtagacttgaggacgaaaaacaggccaacatggagaamtgacagaaggttggagtagaattccagatatgaaccctctgaccaaaagaacccttcaacacaccttcttgaacaggccagctcttagtcactggaacat

SEQ ID NO: 533365 - DNA, 201 bp, Homo sapiens
ttctcttcccaaacatttcaggtaaaggatacgcagatattgtatgtattattcatgtatgcataatactgaaataaataggagtacatgacaggcaagargaaagcaaaaccaatgtttttacgtccttttaactaaaatacaaaaggaacaatgtataattttgttgaactgacatcattttaaattatatcagctgac

SEQ ID NO: 533366 - DNA, 201 bp, Homo sapiens
aaaattttgaatgtgatgaccatggcttttttaggatccaagggtcttggcaacacataaaatgtcaagtcctagagctgcattgttgtctgcagtgcccyggtggttggctgcagtccttcatgggagctctttctactcccttggtttgcttagatgggctcatatttgtagaatttacagcgaactaccgggcatttg

SEQ ID NO: 533367 - DNA, 201 bp, Homo sapiens
ccaccatgcccggttaattttgtatttttagtagagatggggtttctccatgttggtcaggctggtctctaacaccctacctcaggtgatccgcatgcctyagcctcccaaagtgctgggattacaggcttgagccaccgcagccggccttgagtgagtttcataatcctgagttctaatttgattgcactgtggtctgag

SEQ ID NO: 533368 - DNA, 201 bp, Homo sapiens
tgttgtggctgctgagcatttatttaaatatcacacatattttaaatttataatttatttaaacattaaagtataactgtaacagagacaggttggccttrgagtgagctcaacagccatatgtatttatatgttctctttatgtatttagtgggtttgaaatttacagtcccaacttggtcataaagaggattttttttt

SEQ ID NO: 533369 - DNA, 201 bp, Homo sapiens
cagaccttggaaatttttctctacagttcttatttaggtcttttttgtcttccttgtcttacttgacatgttaaattattcctctagcttcttaaacataygaaatacatttacaataactgtttaactgtccctgtctagtaattctgttatctgtgtcattttttgtcagtttcaattgattgcatcttctcattatgg

SEQ ID NO: 533370 - DNA, 201 bp, Homo sapiens
actcacaacagaggtttgcttatatcctgttgtggctgctgagcatttatttaaatatcacacatattttaaatttataatttatttaaacattaaagtayaactgtaacagagacaggttggccttagagtgagctcaacagccatatgtatttatatgttctctttatgtatttagtgggtttgaaatttacagtccca

SEQ ID NO: 533371 - DNA, 201 bp, Homo sapiens
gccccatattccccagtctgaagtctctaatgcaagtttgcctgttgctgctgctgctgagcccttccttcctggttgttgtctgtcctttttccccagcytggggacaaatgattgtctgggtagagctgcagtgttctgagccaatcagggatagaaccacccgcacccagaattctcatcatctcttccaagcatgag

SEQ ID NO: 533372 - DNA, 201 bp, Homo sapiens
ttgagcaagacaatagggtgttgctaacagaaacagacctttggccttatgtggatgtggccaacaaatgctgcctggaaatataagctctgttatttagrgtctcaacaataggttttcttttttttttttctggaaactcacaacagaggtttgcttatatcctgttgtggctgctgagcatttatttaaatatcacac

SEQ ID NO: 533373 - DNA, 201 bp, Homo sapiens
atcagtgactttgggaagcattgtggcatttgagggctacagtatttccagtgttttgttagattgctgaacatattgatctcactaatgattgcttttgrgcaagacaatagggtgttgctaacagaaacagacctttggccttatgtggatgtggccaacaaatgctgcctggaaatataagctctgttatttagggtc

SEQ ID NO: 533374 - DNA, 201 bp, Homo sapiens
tatttactcccaggggaaggagatttgctgtccgtcccttcataatcacagtcatttccatctgaagcgttcataggcagtaacagagaaaaaaataacartactccattgcaatagccattagacaacgggtgttctccacttatacgtgggctaaaaattgctttaggatggtaacaaagaaagcagcctgtgtagata

SEQ ID NO: 533375 - DNA, 201 bp, Homo sapiens
atgcaaagactagtggacaataaaacataaatatttatgggtcattataaaggaatgggatttcattctatttactcccaggggaaggagatttgctgtcygtcccttcataatcacagtcatttccatctgaagcgttcataggcagtaacagagaaaaaaataacagtactccattgcaatagccattagacaacgggt

SEQ ID NO: 533376 - DNA, 201 bp, Homo sapiens
catctttccagtctagaaattgaagcagttcgctattccttcactgacaaccattcagcctcttcatgcctcaattatattttcagccaataacatgttcrtaaatcaaatgaatagcttgaatctaaggggaatatttaagtcttatacataaccaggatctgagaatcttattctcgaggctcttaacatattgtttaa

SEQ ID NO: 533377 - DNA, 201 bp, Homo sapiens
taaattccttgagacttacattttataaagtttaactatttgcagagtaaatgtaaaatgcctgtgcctggccaacatctttccagtctagaaattgaagsagttcgctattccttcactgacaaccattcagcctcttcatgcctcaattatattttcagccaataacatgttcgtaaatcaaatgaatagcttgaatct

SEQ ID NO: 533378 - DNA, 201 bp, Homo sapiens
tattataaatttcatatttctaaatcctaatgcaaaagttttagaaatagaggctgtaatatggaggacttttggtttgagaaagtatgtttcgaaaggartctgtttccctattttgttttacattgtttccctattttgttttaaatcaagttcttgaaaatgattatccctatgtcattcttgaattcagagattttg

SEQ ID NO: 533379 - DNA, 201 bp, Homo sapiens
tgctctcaaaccctgtctcctgataagatgttatcagtgacaatgtgtgcccgaaacttcattagcaattttaattttaccctggtcctgtgatcttgccytgcctccatttgccttgtggtattttattaccttgtgaagcatgtgatctctgtgacccacaccctattcgtacactccttccccttttgaaaatcacta

SEQ ID NO: 533380 - DNA, 201 bp, Homo sapiens
taagatgttatcagtgacaatgtgtgcccgaaacttcattagcaattttaattttaccctggtcctgtgatcttgccctgcctccatttgccttgtggtaytttattaccttgtgaagcatgtgatctctgtgacccacaccctattcgtacactccttccccttttgaaaatcactaataaaaacttgctggttttgcgg

SEQ ID NO: 533381 - DNA, 201 bp, Homo sapiens
cctggtcctgtgatcttgccctgcctccatttgccttgtggtattttattaccttgtgaagcatgtgatctctgtgacccacaccctattcgtacactccytccccttttgaaaatcactaataaaaacttgctggttttgcggcttggggggcatcatggaacctgccaacatgtgatatctcccccagacacccagctt

SEQ ID NO: 533382 - DNA, 201 bp, Homo sapiens
gtgatatctcccccagacacccagctttaaaatttctctttttgtactctttccctttatttctcagaccggccaacacttagggaaaatagaaaagaacmtatgtgaattatcgggggcgggttcccccaatcggcctgtcttgctaggttgaggaagttctgctagataatatcctgaagagtgttttccaacttggtt

SEQ ID NO: 533383 - DNA, 201 bp, Homo sapiens
cagacacccagctttaaaatttctctttttgtactctttccctttatttctcagaccggccaacacttagggaaaatagaaaagaacatatgtgaattatygggggcgggttcccccaatcggcctgtcttgctaggttgaggaagttctgctagataatatcctgaagagtgttttccaacttggttcctttctcaccat

SEQ ID NO: 533384 - DNA, 201 bp, Homo sapiens
ttctctttttgtactctttccctttatttctcagaccggccaacacttagggaaaatagaaaagaacatatgtgaattatcgggggcgggttcccccaatmggcctgtcttgctaggttgaggaagttctgctagataatatcctgaagagtgttttccaacttggttcctttctcaccatcactttcaggtacagtcaaa

SEQ ID NO: 533385 - DNA, 201 bp, Homo sapiens
ccaatcggcctgtcttgctaggttgaggaagttctgctagataatatcctgaagagtgttttccaacttggttcctttctcaccatcactttcaggtacastcaaacataggtttggtcttttcatgtagtcccatatttcttggcagctttgttcattccttttcattcttttttctctaatcttttcttcaccctctac

SEQ ID NO: 533386 - DNA, 201 bp, Homo sapiens
tgtttcagatttccgctgagctccacctgcttagaaaagcaccttgttccatagcccctaactatttattaatgttccatctaacattaataaataatgtkaggtgatggctctgtacttacaaaaatctttggattttacaacctagcagtcagtgttcttttgtgaattatctcttcatattctcacaaggaagagaac

SEQ ID NO: 533387 - DNA, 201 bp, Homo sapiens
cttggcagctttgttcattccttttcattcttttttctctaatcttttcttcaccctctacttcattaagttgatcttcaatctctgatatcctttttccygcttgatggatttggctattgaaacttgtgtgtttcacgaagttcttgtgctgtatttttcagctccgtcaggtcatttatgttcttctctaaactggtt

SEQ ID NO: 533388 - DNA, 201 bp, Homo sapiens
gtgttaactgaggatcattgtgcatattcttacaaagataacctggaaacacaggatctcatttagcaggaaggcttggtgagtgagtgagagagagagaktgtgtgtgtgtgtgtgtatgtgtgtgtgttgggtgggtaattgtagcgaattaaattttctggttaatgtagggctaacaagaaccattttttgttcagg

SEQ ID NO: 533389 - DNA, 201 bp, Homo sapiens
ttggcagctttgttcattccttttcattcttttttctctaatcttttcttcaccctctacttcattaagttgatcttcaatctctgatatcctttttcccrcttgatggatttggctattgaaacttgtgtgtttcacgaagttcttgtgctgtatttttcagctccgtcaggtcatttatgttcttctctaaactggtta

SEQ ID NO: 533390 - DNA, 201 bp, Homo sapiens
tgttaactgaggatcattgtgcatattcttacaaagataacctggaaacacaggatctcatttagcaggaaggcttggtgagtgagtgagagagagagagwgtgtgtgtgtgtgtgtatgtgtgtgtgttgggtgggtaattgtagcgaattaaattttctggttaatgtagggctaacaagaaccattttttgttcaggt

SEQ ID NO: 533391 - DNA, 201 bp, Homo sapiens
ctaatcttttcttcaccctctacttcattaagttgatcttcaatctctgatatcctttttcccgcttgatggatttggctattgaaacttgtgtgtttcaygaagttcttgtgctgtatttttcagctccgtcaggtcatttatgttcttctctaaactggttattctagttagcaattcctctaacctttgttcaaggtt

SEQ ID NO: 533392 - DNA, 201 bp, Homo sapiens
tggttttcaaataaagatgttctttaagaaaagtgatttttaatgactttgaatatttccctgtaaaaccctcttctaaggggttgaataatttatgcatytttaatgttagagagggaaggtattccttgaaggccagctttttataagcactttgtcatggctgattgatctctccactcagaactacaatcttccatg

SEQ ID NO: 533393 - DNA, 201 bp, Homo sapiens
acacagagccacttggcagactgggacacgtattagttccaggtatttaaggcaatctctgtccaatcattagctgtcctgtaagctaattgggcacagaygttagtggcacacgtgacaaaaaatatagactttacagagttaatttagaaaagtcactgaacaaacagacgacaaacagcaacaacaaaccttggggaa

SEQ ID NO: 533394 - DNA, 201 bp, Homo sapiens
ttttaaggatgggttataaataaactctttaagaactagtaacagttgttgtgttcttaggcaccaattctgtgtacgcatttgaggtggacaaaacttayccagaaatcagaacataaactgtgttaggtgaagcgaaagctttctcactgctaaatttggttaactactttgtctttggctggttttcaaataaagatg

SEQ ID NO: 533395 - DNA, 201 bp, Homo sapiens
taggctgtctgccagcatgagggccctcactagaattcaagtctgccagcaccttgatcttggacttcccagcctccagaactgtgagaaataaatgtctrttgtttaaacaactcagtctatggtatttcgttatagcagcctaagcagaccgagatacccatgtactctagtaaaaataaaaataacatagctaatacc

SEQ ID NO: 533396 - DNA, 201 bp, Homo sapiens
ggtgatttttatttttatttgaaaaatctgaaaatacatttggtgtgcaacattattctggtaggtacactgttgcctaaaattgtacttatactttgtascagctcatatatgttttcagattttctggttatctcacttggtctataaaaacagctgaactctttcattttaaaatatctgaaggaattttttccttag

SEQ ID NO: 533397 - DNA, 201 bp, Homo sapiens
ttcaaactatactacaaggctacaataaccaaaacagcatggtactggtacaaaaacagagatacagatcaatggaacagaacagagccctcagaaataaygccgcatatctacaaatatctgatctttgacaaacctgagaaaaacaagcaatggggaaaggattccctatttaataaatggtgctgggaaaactggcta

SEQ ID NO: 533398 - DNA, 201 bp, Homo sapiens
aaaatattaaaatatcaaagcttttcagatgaagaattcagagagctaggcaccttccctcagtcagaggccaccatcacttgatacttcaaggaaacttyatttgcactcccaaaacaggacctgtatttgttgttttgatattttaaaattttaaatattagataaatattaatttttttctccaaagcttttaagact

SEQ ID NO: 533399 - DNA, 201 bp, Homo sapiens
atgtgtttttgtagactagtttgaaatttaacacatttaatgttaaaataattcaagcttatatatgtgcattccatcacagattaaaacttaattctgaraaaaaaaaaaaaaaaaaaagagctacagtagtcagtacatcacagtccttccggctcatgttgaaagatgcagagagtgtcaagcaccaaaagaaaggaa

SEQ ID NO: 533400 - DNA, 201 bp, Homo sapiens
agtgagaacatgcggtggttggttttctgttcctgtgttagtttgctgagaatgatggtttccagcttcatccatgtccctgcaaaggacataaacacatmtttttatggctgcatagtattccatggtgtatatgtgccacattttctttatccagtctatcattggtgggcatttgggttggttccaagtctttgctat

SEQ ID NO: 533401 - DNA, 201 bp, Homo sapiens
ctgcttacggtagtggttgcggttttcttataataccaacatagtccataccatgtggacaagaatttcccctctgcgtagtattataacacttgggtggrataaatggaagggtttgtccctttatcccagcagggcacatggtgattatttatggccagtatttcatgaaaaattaaattccttgagacttacatttta

SEQ ID NO: 533402 - DNA, 201 bp, Homo sapiens
gtgcttcatttatcccagatggttccatgctacctagaaatacaatgatatgcctacaccatttattttgcgtaaggtggcatattgcatgtttgggtgcrctcttcatgtattctctttacctctgagatgatcaagaaaccaatttcctgaccacaaaagaaggagggtcccctggcagtttgagcatttctatttact

SEQ ID NO: 533403 - DNA, 201 bp, Homo sapiens
ttaacagttgttccttcgtgtttcctccttaaatcagcctttctttattggaaagtgtgcttcatttatcccagatggttccatgctacctagaaatacartgatatgcctacaccatttattttgcgtaaggtggcatattgcatgtttgggtgcactcttcatgtattctctttacctctgagatgatcaagaaaccaa

SEQ ID NO: 533404 - DNA, 201 bp, Homo sapiens
cctacaccctgtagaaggcatattgtgacattgtgcttgcaaagggagtctgatttcatttgattttatattaattattaaaaaacacacctataagttarcagttgttccttcgtgtttcctccttaaatcagcctttctttattggaaagtgtgcttcatttatcccagatggttccatgctacctagaaatacaatga

SEQ ID NO: 533405 - DNA, 201 bp, Homo sapiens
tatgaatatttagatgtttaggtggcattttcctgttctattctattcaggaaatacggactcctacaccctgtagaaggcatattgtgacattgtgcttrcaaagggagtctgatttcatttgattttatattaattattaaaaaacacacctataagttaacagttgttccttcgtgtttcctccttaaatcagccttt

SEQ ID NO: 533406 - DNA, 201 bp, Homo sapiens
ttaaattcaaattttaattgagattttaaaatctctcctccctatatgaatatttagatgtttaggtggcattttcctgttctattctattcaggaaatayggactcctacaccctgtagaaggcatattgtgacattgtgcttgcaaagggagtctgatttcatttgattttatattaattattaaaaaacacacctata

SEQ ID NO: 533407 - DNA, 201 bp, Homo sapiens
ccccaaacatcaaaatattcccaatatcaagggacagaatcctccagatatgccaagcagctctttgaagtaataagaacccttggcctgtggtgtcagtygtgcaaaacatcatggtcagtggaaaatgaaactcagaatagcgaagtcttctcaacattcatggaagatccttgatactgaagcctgataaaacccacc

SEQ ID NO: 533408 - DNA, 201 bp, Homo sapiens
tcacccatctgtaattttcgtatgtcagtggaagggtttactaattcaagatattcgtacctttagtactgtgttaaacatctttcatttctttaggaaaraattatagttcaggatgaatgattagggtggaaatagcatattgattctctcctggagatggctaagatgatgaattatttgaacccttctgagaagact

SEQ ID NO: 533409 - DNA, 201 bp, Homo sapiens
tgtaaaataattgcacctgctttttttattgtaaactgttctataataacttatttttcttttcttattgatatttggtatgttaaaatcaatatctctgkgtcctcaatatttccttttttgagtcatctgttctactctaagggtttgtttatgttcacaaagagaaattgagaagggatgctgttatttggcaatttc

SEQ ID NO: 533410 - DNA, 201 bp, Homo sapiens
tcaggacagggtgtctgttaaagggcaggagagaagagacagcagtagaacccctttggaaaataaaggcttgctagctttatctgtttaatgcattcagwttttaaattcagggattcatcagaatgaatgttgcccttgagctaaagcagtagagaagctattacgtccaccagccaaaggacttcacatttcagagat

SEQ ID NO: 533411 - DNA, 201 bp, Homo sapiens
aaattagcattataatttattataataaaattgaattgcacactcaagcttgaaacccttcaagaagataaaattacaaagagagacccagacatggggaytgtttatctcaattaaaaattgagtatctaccaaaggccaggaactagattagggacaaggagacattaccaggctactgtggagtcacagacaagtaca

SEQ ID NO: 533412 - DNA, 201 bp, Homo sapiens
gaacttgacaatgtccaagataacttccccctcaaacatgctggcttctattctcctgaaagtgggttgtcaaaacaagactaaagtgattcatgattttmgttatttggggtttaggtacatcaaggactgactcttgttcaagtgagtgcagtttggcctctgagaagaaaactttcccagcaaattgaagcatttaat

SEQ ID NO: 533413 - DNA, 201 bp, Homo sapiens
tcttctctaaactggttattctagttagcaattcctctaacctttgttcaaggttcttagattccttaccttgccttctgaagcctacttctgtcagttcrtcgaactcattctccatccagtttggttcccttgctggccaggagttgtaatcctttggaggagaaaaggcattctggtttttggaattttcagcctttt

SEQ ID NO: 533414 - DNA, 201 bp, Homo sapiens
tggaggtccactccagaccctgcttgcctgggtatcacgagcggaggctgcagaacagcaaaaattgctgcctgttccttcctctggaagctttgtcccgraagggcacccgccagacgccagctggagctttcctgtatgagatgtttattgacccctgctgggaggtatctcccagtacaggaggcatgggggtcaggg

SEQ ID NO: 533415 - DNA, 201 bp, Homo sapiens
agaccctgcttgcctgggtatcacgagcggaggctgcagaacagcaaaaattgctgcctgttccttcctctggaagctttgtcccggaagggcacccgccrgacgccagctggagctttcctgtatgagatgtttattgacccctgctgggaggtatctcccagtacaggaggcatgggggtcagggacccacttgaggca

SEQ ID NO: 533416 - DNA, 201 bp, Homo sapiens
gagatgtttattgacccctgctgggaggtatctcccagtacaggaggcatgggggtcagggacccacttgaggcagtctgttccttagctgagctccagcrctgtgctgggaaatccactgctctcttcagagctggcaggaaggaacaacatttaagtctgctgaagctgcacccacacctgcccctttccccagatgct

SEQ ID NO: 533417 - DNA, 201 bp, Homo sapiens
tcggctcactgcaacttctgcctcccaggttcaagcaattctcctgcctcagcctcccaagtagctgggactacaggtgtgtgtcactatgccctgctaattttttttttttttagtagagacagggtttcaccatgttggttggccaggatggtctcgatctcttgacctcgtgatttgcccacctcagcctcccaaagt

SEQ ID NO: 533418 - DNA, 201 bp, Homo sapiens
tattatctaaaaaatatttgcagccagaggcggtggctcacacctgtaatcccagcactttgggaggcccaggcagatggattgcctgagctcaggaattsaagaccagcctgggcaacatggtgaaacccagtctctattaaaatacaaaaaaaaattagctgggcgtggcggcgtgagcctgtaatcccagttaattgg

SEQ ID NO: 533419 - DNA, 201 bp, Homo sapiens
cagccagaggcggtggctcacacctgtaatcccagcactttgggaggcccaggcagatggattgcctgagctcaggaattgaagaccagcctgggcaacayggtgaaacccagtctctattaaaatacaaaaaaaaattagctgggcgtggcggcgtgagcctgtaatcccagttaattgggaggctgaggcaggagaatc

SEQ ID NO: 533420 - DNA, 201 bp, Homo sapiens
atagtgcagcaataaacatacgtgtgcatgtatctttatagtagaatgattctttgggtatatactcagtaatgggatcgctgggtcaaatggtatttctsgttctgaatccttgaggaatcaccacactgttccacaatagttgaactaattcacactcccaccgacagtgtaaaagcgttcctacttctccacatcctc

SEQ ID NO: 533421 - DNA, 201 bp, Homo sapiens
aattgaagaccagcctgggcaacatggtgaaacccagtctctattaaaatacaaaaaaaaattagctgggcgtggcggcgtgagcctgtaatcccagttamttgggaggctgaggcaggagaatcgcttgaaccggggaggcggaggttgcagtgagctgagataatgccattgcactccagcctgggcgacagagcaaga

SEQ ID NO: 533422 - DNA, 201 bp, Homo sapiens
ggatgtctattaggtctgcttggtccagagctgagttcaagtcctgaatattcttgttaattttctttctcattgatctgtctaatattgacagtggggtrtcaaagtctcccactattattgtgtgggagtctaagtttctttgtaggtcactaagaacttgctttatgaatctgggtgctcctgtattgggtgcatata

SEQ ID NO: 533423 - DNA, 201 bp, Homo sapiens
cgtgagcctgtaatcccagttaattgggaggctgaggcaggagaatcgcttgaaccggggaggcggaggttgcagtgagctgagataatgccattgcactmcagcctgggcgacagagcaagactccatctcagaaaacaaaaaaaaacaaagttgcataacccaaagtcacaaaaatgtaggttttacatttaagtctat

SEQ ID NO: 533424 - DNA, 201 bp, Homo sapiens
tgcattgatccctttatcactatgtaatgcccttctttgccttttttgatctttgttggtttaaagtctgttttgtcataggctaggaatgcaacccctgtttttttttttctttccatttgcttggtaaaaattcctcaatttttttgttttgagcctgtgtgtgtctttgcacacaagatgggtctgaatacagcacac

SEQ ID NO: 533425 - DNA, 201 bp, Homo sapiens
ggagaatcgcttgaaccggggaggcggaggttgcagtgagctgagataatgccattgcactccagcctgggcgacagagcaagactccatctcagaaaacaaaaaaaaacaaagttgcataacccaaagtcacaaaaatgtaggttttacatttaagtctatgatccacttgagttagtttttgtatatagtgtgaggtgt

SEQ ID NO: 533426 - DNA, 201 bp, Homo sapiens
ttcaggagctcttgtaaggcaggcctggtgatgataaaatctctcagcatttgctcgtctgtaaaggattttatttctccttcacttttgaagcttagttyggctggatatgaaattctgggttgaaaattcctttctttaggaatgttgaatattggcccccactctcttctggcttgtatggtttctgcggagagatct

SEQ ID NO: 533427 - DNA, 201 bp, Homo sapiens
atgctattcctttctgtttgttagttttccttctaacagtcaggcccctctactgcaggtctgctagagtttgctggagatccactccagaccctgtttgyctgggtatcaccagcggaggctgcagaacagcaaagattgctgcctgttccttcctctggaaggtttgtcccagaagggcacctgccagatgccagccgg

SEQ ID NO: 533428 - DNA, 201 bp, Homo sapiens
ccacttggctccctggcttcagccccctttccaggggagtgaatggttttgtctcgctgatgttccaattaccactggggtatgaaaaaaaaaaaaaaaamaaactcctgcagctagctcagtgtctaccaaatggctgcacaattttgtgcttcaaatccagggccctggtggcataggcacccaagggaatctcctggt

SEQ ID NO: 533429 - DNA, 201 bp, Homo sapiens
atttgacttaaaatattaaaatatcaaagcttttcacttaaaatattaaaatatcaaagcttttcagatgaagaattcagagagctaggcaccttccctcrgtcagaggccaccatcacttgatacttcaaggaaacttcatttgcactcccaaaacaggacctgtatttgttgttttgatattttaaaattttaaatatt

SEQ ID NO: 533430 - DNA, 201 bp, Homo sapiens
tctcctggtctgtgggttgtgaagaccatgggaaaagcatagtatctgggctggaatgcactgttactcacggtacagtccctcatggcttcccttggctaggggaggtagttcttagacccactagcacttctcaggtgaggcagcaccccaccctgcttcatctcaccccccatgggctgcatccagtgtctaaccagt

SEQ ID NO: 533431 - DNA, 201 bp, Homo sapiens
tttcaaccccctgcttctgtctctctttacacaatcatagaattgagggtgacattcttttggtaaatcatatcatgatccaccagctgaaagattaattyaagaaagatgattagaaagagacatctgaatagtttatctgagccataagcatggacatcagtgacaggatttaaatagctgaaatgaattctctttagt

SEQ ID NO: 533432 - DNA, 201 bp, Homo sapiens
ctcctggtctgtgggttgtgaagaccatgggaaaagcatagtatctgggctggaatgcactgttactcacggtacagtccctcatggcttcccttggctaggggaggtagttcttagacccactagcacttctcaggtgaggcagcaccccaccctgcttcatctcaccccccatgggctgcatccagtgtctaaccagtc

SEQ ID NO: 533433 - DNA, 201 bp, Homo sapiens
ccctctgaagcccataaaatccctggactcaaccagactggggcaggtgacaggatgacctgcctgtggagtggagctacccactgtgggcctcctctttkctgagaactgaacagatgatggatgccctgcctgtggagagctacatactgtgggtctcccctctgctgagagctgagtagacttcaggacaacctgccc

SEQ ID NO: 533434 - DNA, 201 bp, Homo sapiens
tcctggtctgtgggttgtgaagaccatgggaaaagcatagtatctgggctggaatgcactgttactcacggtacagtccctcatggcttcccttggctaggggaggtagttcttagacccactagcacttctcaggtgaggcagcaccccaccctgcttcatctcaccccccatgggctgcatccagtgtctaaccagtcc

SEQ ID NO: 533435 - DNA, 201 bp, Homo sapiens
cctggtctgtgggttgtgaagaccatgggaaaagcatagtatctgggctggaatgcactgttactcacggtacagtccctcatggcttcccttggctaggggaggtagttcttagacccactagcacttctcaggtgaggcagcaccccaccctgcttcatctcaccccccatgggctgcatccagtgtctaaccagtccc

SEQ ID NO: 533436 - DNA, 201 bp, Homo sapiens
ccatgtgacattggacaggtctcttcagtttactgagcctcaatcccatcatttttaaagcatggatgcagaacttgacaatgtccaagataacttccccstcaaacatgctggcttctattctcctgaaagtgggttgtcaaaacaagactaaagtgattcatgattttcgttatttggggtttaggtacatcaaggact

SEQ ID NO: 533437 - DNA, 201 bp, Homo sapiens
tcaattgcctcaacacttagatggggatagtagtcctgtcgtatgtaagtatgaggtaggtgagggcaaaggatctagcagaatgtttggaagaatagtgrgtgctcagtgtgtgttaattcccttaaatttcagattagattctgctgtttcctctctcgcccagctttaaagaagctgactcaaaattaagaaaccaag

SEQ ID NO: 533438 - DNA, 201 bp, Homo sapiens
tggcatggtgttagggacccaagctccttctattatatttctctaccaactgtagttcaatgcttctacctcatagtccaaaatggctgcttgaaatccastcattatgtcagcattccagtcagtagaaaggaaaagtagccaaagaagagctagttcctttttcaaatagcagtttccaaagtatgcacactatagttc

SEQ ID NO: 533439 - DNA, 201 bp, Homo sapiens
gccatgtttgccaggctggtcttgaactcctgacctcaagtgatccgcccacctcggcctcccaaagtgttgggattacaggcatgagccactgtgcctgkcctaaagcactctttctagcagagtttctcaggtattgtacagaaatccaaatagttaaatccatgttttgattaaggtcagtttattgaactatagcaa

SEQ ID NO: 533440 - DNA, 201 bp, Homo sapiens
gtttcgccatgtttgccaggctggtcttgaactcctgacctcaagtgatccgcccacctcggcctcccaaagtgttgggattacaggcatgagccactgtrcctggcctaaagcactctttctagcagagtttctcaggtattgtacagaaatccaaatagttaaatccatgttttgattaaggtcagtttattgaactat

SEQ ID NO: 533441 - DNA, 201 bp, Homo sapiens
gtgacctcggctcactgccacctccgtctcccgagttcaagcgattctcctgcctcaggttccctagtagctaggattacagacacgggccaccacgcccrgctagtttttgtatttttagtagagttggggtttcgccatgtttgccaggctggtcttgaactcctgacctcaagtgatccgcccacctcggcctcccaa

SEQ ID NO: 533442 - DNA, 201 bp, Homo sapiens
gcccttaaaatagaaactgcactacacagcaggagctatggaactgtgggctcttcctcctccctgctctctggtgtcatcacacatcagtaatccctcaytctcttcactgaaatggccctgaccagttttcaggtacttgtgtctgaacttctgtcctgccactgggcctttgcatattctattctcaccccagggcca

SEQ ID NO: 533443 - DNA, 201 bp, Homo sapiens
aaactggagtgcagtggtgtgacctcggctcactgccacctccgtctcccgagttcaagcgattctcctgcctcaggttccctagtagctaggattacagrcacgggccaccacgcccggctagtttttgtatttttagtagagttggggtttcgccatgtttgccaggctggtcttgaactcctgacctcaagtgatccg

SEQ ID NO: 533444 - DNA, 201 bp, Homo sapiens
ccaatttctcttcttccattctctctttaattcactttaattaggattcatctccacagtcttaccaaaaggtatcaacatcaccagtactaactgcggcrccagttctcagcccctgctccctgacctagcagcatcctctgtcatggctggcagcgtccctcttgctgtgttttctgtgtgtggcctcctggttcccac

SEQ ID NO: 533445 - DNA, 201 bp, Homo sapiens
tgcctgtacccctttcagagcttgtgacagcctctgttctcggtgtccccacccaagccaggccactggttttcatcttccttctgagttcagatttaagrtggactttacttttttatgttttctgaacactttaaaaatacttaaaatgaaatacagttgaaaaacagagtgctcttttttttttttttttttttaaga

SEQ ID NO: 533446 - DNA, 201 bp, Homo sapiens
gatcatgaggtcaggagatcgagaccatcctggctaacatggcaaaaccctgtctttactaaaaatacaaaaaattagctgggcatggtggtggatgcctrtagtcccagctacttgggaggctgaggcaggagaatggtgtgaacccaggaggcagagcttgcagtgagctgagactgggccactgtactccagcctggg

SEQ ID NO: 533447 - DNA, 201 bp, Homo sapiens
cacaaaaatgtaggttttacatttaagtctatgatccacttgagttagtttttgtatatagtgtgaggtgtggcttgaatttttcttttcttgcttaaggrtttgcaactgatttctataatttttttaataaagacactattatttaaaagaacaaatatttaactatgcaaactgtgaaagtggaggatatgcctgcct

SEQ ID NO: 533448 - DNA, 201 bp, Homo sapiens
gtgtttcattcttctaggatggatgttaatgtcactttttgcaattttgctcttaagaaaatggagtcatcaggttttgttttagcacaggcaatgttgattttttgtggatttcctgtgatttccagccttcgtacattcatgaatagattgtctgtctctgaacactaatgtcatctctctttttttgcttttattttt

SEQ ID NO: 533449 - DNA, 201 bp, Homo sapiens
ttaagaaaatggagtcatcaggttttgttttagcacaggcaatgttgattttttgtggatttcctgtgatttccagccttcgtacattcatgaatagattrtctgtctctgaacactaatgtcatctctctttttttgcttttattttttaaaattatttcagtagtttttgggggaaaggtgatgtttggttatatgtat

SEQ ID NO: 533450 - DNA, 201 bp, Homo sapiens
tcacttcccactcattcccccaagtccccaaagtgcattgaatcattcttatgcctttgcatcctcatagcttagctcccacttatgagtgagaacatacratgtttagttttccattcctaagttacttcacttagaataatggtctccaccttcatctaggttgctgtgaatgccattatttcttttcttttttaaggc

SEQ ID NO: 533451 - DNA, 201 bp, Homo sapiens
atacaagtgttcccttttcacaacatccccaccaacatctattgtttttagatttttttgattatggccattcttgcaggagtaaggtggttatcgcattrtggctttgatttgcatctccctgatgattaatgatgatgagcattttttcatgtttgttggcaatttgtataattgagaattgtctattcatgtctttag

SEQ ID NO: 533452 - DNA, 201 bp, Homo sapiens
tttttgatgggattatttttttcttgctgatttgtttgagtttctcatagattctggatgttagtcctttgtcagatgcatagtttgcaaagattttctcycactctgagggatgtctgttcactctgctgattattgcatttactgtgcagaagctttttagttgaattaagtcccagctatttatctctctttttattg

SEQ ID NO: 533453 - DNA, 201 bp, Homo sapiens
gttcactctgctgattattgcatttactgtgcagaagctttttagttgaattaagtcccagctatttatctctctttttattgcatttgcttttgggttcrtggtcataaaatccttgccaaagccagtgtctacaagggtttttctgatgttatcttctagaatttttatggtttctttaatttttgtagatttaaatct

SEQ ID NO: 533454 - DNA, 201 bp, Homo sapiens
ctggtctgtgggttgtgaagaccatgggaaaagcatagtatctgggctggaatgcactgttactcacggtacagtccctcatggcttcccttggctaggggaggtagttcttagacccactagcacttctcaggtgaggcagcaccccaccctgcttcatctcaccccccatgggctgcatccagtgtctaaccagtccca

SEQ ID NO: 533455 - DNA, 201 bp, Homo sapiens
ctgtttcatttatcttttgtattattttgtctttcaattttatttagttctgctctgatctttgttatttcttctcttctgctggatttcagtttggtttgttttgtttctctagtttctcgaggtatgaccttagattgtctgtttgtcctctttcatctttttgatgcaggcatttaatgctccaaactttctttcctt

SEQ ID NO: 533456 - DNA, 201 bp, Homo sapiens
ggtctgtgggttgtgaagaccatgggaaaagcatagtatctgggctggaatgcactgttactcacggtacagtccctcatggcttcccttggctaggggaggtagttcttagacccactagcacttctcaggtgaggcagcaccccaccctgcttcatctcaccccccatgggctgcatccagtgtctaaccagtcccagt

SEQ ID NO: 533457 - DNA, 201 bp, Homo sapiens
tgtttcatttatcttttgtattattttgtctttcaattttatttagttctgctctgatctttgttatttcttctcttctgctggatttcagtttggtttgttttgtttctctagtttctcgaggtatgaccttagattgtctgtttgtcctctttcatctttttgatgcaggcatttaatgctccaaactttctttccttg

SEQ ID NO: 533458 - DNA, 201 bp, Homo sapiens
ctgtgggttgtgaagaccatgggaaaagcatagtatctgggctggaatgcactgttactcacggtacagtccctcatggcttcccttggctaggggaggtrgttcttagacccactagcacttctcaggtgaggcagcaccccaccctgcttcatctcaccccccatgggctgcatccagtgtctaaccagtcccagtgag

SEQ ID NO: 533459 - DNA, 201 bp, Homo sapiens
tgtaagtccattgtgcctttgttgactttctgtcttgatgacctgtctagtgctgtcagtgggtactgaagtctcccgctgttattgtgctgccatcttayctcatttttttaggtctaatagtaaatgttttataaatttgggagctccagtgttaggtgtatatacatttagggttgtgatattttcctgttggactag

SEQ ID NO: 533460 - DNA, 201 bp, Homo sapiens
gtgggttgtgaagaccatgggaaaagcatagtatctgggctggaatgcactgttactcacggtacagtccctcatggcttcccttggctaggggaggtagttcttagacccactagcacttctcaggtgaggcagcaccccaccctgcttcatctcaccccccatgggctgcatccagtgtctaaccagtcccagtgagat

SEQ ID NO: 533461 - DNA, 201 bp, Homo sapiens
tgggttgtgaagaccatgggaaaagcatagtatctgggctggaatgcactgttactcacggtacagtccctcatggcttcccttggctaggggaggtagttcttagacccactagcacttctcaggtgaggcagcaccccaccctgcttcatctcaccccccatgggctgcatccagtgtctaaccagtcccagtgagatg

SEQ ID NO: 533462 - DNA, 201 bp, Homo sapiens
ggttgtgaagaccatgggaaaagcatagtatctgggctggaatgcactgttactcacggtacagtccctcatggcttcccttggctaggggaggtagttcttagacccactagcacttctcaggtgaggcagcaccccaccctgcttcatctcaccccccatgggctgcatccagtgtctaaccagtcccagtgagatgag

SEQ ID NO: 533463 - DNA, 201 bp, Homo sapiens
ctaaccagtcccagtgagatgagccttgtacctaagttggaaatggcagaaatcacccaccctctgcattgatcttgctgggagttaccgaagctgttactttttttttttttgtctgacacggggtctcgctcggtcacccaggctggagtgcagtggcatgatcttggctcattgcaacctccacctcccagtttcagg

SEQ ID NO: 533464 - DNA, 201 bp, Homo sapiens
gcttcgtgaccattggcctcagaacactaaaagcgcgcaaagcatcgctcgctgggcacctgctggccatagggtccctcatgggccaggccagtgcctcrccaaatcggggacatcatggggtgcagctgcagtgggggcactacccagatgatctgggggaccagggaagctcaagcctccctccttcccactgatggt

SEQ ID NO: 533465 - DNA, 201 bp, Homo sapiens
gtgacacaatctctcagcatttgcttgtctgtcaaggattttatttctccttcgcttatgaagtttagtttggctggatatgaaattctgggttgaaaatycttttctttaagaatgttgaatattggctcccactctcttctggcttgtagagtttctgctgagagatccactgttaagctgatggacttccctttgtgg

SEQ ID NO: 533466 - DNA, 201 bp, Homo sapiens
ttcccactgatggtcccagtcagagggaccatcagaggggcctagcagctgcctttaattttgtgattgacctttaaaggtagaagacagaatttctgccyggtcctgaaaactgaaggtacctgttaacagaagggtgttctctttgatcagtgtgaaaatgaacacaataaacttggatgctctttcaaagaaaaacaa

SEQ ID NO: 533467 - DNA, 201 bp, Homo sapiens
atctcagcaccatttgttgaatagggtgtcctttctccactttatatttttgtttccgttgttgaagatcagttgactgtaggtagtaggctttatttctrggttctctattctgttccattggtctgtgaacctattttcatatcagtaccatgctgttttggtgactgtatccttatagtatagtttgaagtcaggtaa

SEQ ID NO: 533468 - DNA, 201 bp, Homo sapiens
aatattggctcccactctcttctggcttgtagagtttctgctgagagatccactgttaagctgatggacttccctttgtggctaacccaacctttctctctgtctgcccttaacattttttccttcatttcaaccttggtgaatcatataattatgtgtcttggggttgctcttcttgaggagtatctttgtgatgttctg

SEQ ID NO: 533469 - DNA, 201 bp, Homo sapiens
agtggtagggaccttcccttagaaattcggcttccagaagtttccgaagtctgcggctggggccaagtgtgcagagcttggtgaccattggaatcaggacrccagaaactgtgcaaagcatcgcgcgccgggcaccctctggccatagggtcccgcaagggctaggccggcgcgtcacggaatcagggatgtcacagggcg

SEQ ID NO: 533470 - DNA, 201 bp, Homo sapiens
gatttatacctcttgaaattatttcatatggctaagctagattggatttcatgtgttagctatgacacagggaaacattcagttgtcctggtggatttgcytcacaattcataacctcattagttttgcttatattttgagtctataattttttaagaaaccagttacttcaaaaaaagagagtaaagtagctattggcac

SEQ ID NO: 533471 - DNA, 201 bp, Homo sapiens
gtgcaaagcatcgcgcgccgggcaccctctggccatagggtcccgcaagggctaggccggcgcgtcacggaatcagggatgtcacagggcgcagctgcagygggggagggcagcacccagaccatctgggggaccggggaagctcaagcttctatccttcccactgatggtcccagtcacttggctctgggcagagggggc

SEQ ID NO: 533472 - DNA, 201 bp, Homo sapiens
gggaatcaatttcataaataatagacttttgcaatgatagtgcaaaatgggatttcggcacagctaacactggaatgccagacaaaaagccaaagtgttgrgacattacttgatccttctgccaggagaatcaatgcaggaaaagaacccaaattacctgtcatcatacaatgtgctgcatcttttgcttacataattgtt

SEQ ID NO: 533473 - DNA, 201 bp, Homo sapiens
ggtgacactgtattttttaacattttaaagtcttcacgttttatttggtgggaaggataatagaagtatgcagctgttatatgtacctctgtactccctgytgctcagtaaggaagttttgagagtcgaaagggtattgaggtggctcagagaaaaaacagtcaggggcatccaaaagaatctacttgtccctgttcagaa

SEQ ID NO: 533474 - DNA, 201 bp, Homo sapiens
gttattagcatcagatagtttttgttgtagctgaaagaaacttaacttttgtgtttatacttttagttccaggctattttttatgattgttttactttgtyactgtttgaagaatgctttattttttgagatagggtctccttctgttgcttagacttgagtgcaatgatacgatcttggctcacgctaacccctgcctcc

SEQ ID NO: 533475 - DNA, 201 bp, Homo sapiens
ttcagtagttcttggagccagagttcacagtgtgtctccacaagctgctctgtccatctgaatgggagcctcaagttagtcctgcctcctgtctgccattytccctcactttctgatttctattctttttactcttcttctgcttatactgggtttgattagttgatgtcattggttggaggtctttctttcattgtgtat

SEQ ID NO: 533476 - DNA, 201 bp, Homo sapiens
ctggtatcatttttcttctgcctgaaggacttcctttaacatttattgtagtggagatttgctcgtggtgaattcttttggtttttgttcacctatacttktgataaatatttttgctttgttcagaatccaagttggcattttttttctttaagtacttaaagatgctgttttagtgatttccagcttgaatggtttcta

SEQ ID NO: 533477 - DNA, 201 bp, Homo sapiens
ttcttttggtttttgttcacctatacttttgataaatatttttgctttgttcagaatccaagttggcattttttttctttaagtacttaaagatgctgttktagtgatttccagcttgaatggtttctagtggaaaatctgctgttattcttatctttgggtctttgtacataatgtgtcttttttctctggctgctttaa

SEQ ID NO: 533478 - DNA, 201 bp, Homo sapiens
ttttatacagttttcatcaaataatagggtgttttgtccattgtttcttcaaatattttcagtcctaattcttcgtcttcagggactctaattacacattyattaggcctcttcaagttgccccagagctcctgttcaaagtgatattctgttcatttctttgagtatttcttctctctgtgtttcattctagatagtttc

SEQ ID NO: 533479 - DNA, 201 bp, Homo sapiens
ggctcatttaaggagagtttctctcccctcctgggctgtaaattgaatcgtggcaggaactatattttctgtcatctctcccatccccaaaacaaaacaarccataacaacaaacatcccctgaccctcatgtttctgacacatctttctccccctctggacatccaggcttgagaaagaattgtttatgttccccatccc

SEQ ID NO: 533480 - DNA, 201 bp, Homo sapiens
actaattcttcaataccctgaacaacagtgtttcaggctacacttatatttacaaaaggttatttctgtgtgttcaggatacacgattacagctacattcmataaacacttttaaaaactcatcacccctaaaaggcttcatgttcagcagttcacttaactcattatttcacagttgcaacagctatttgttcacattcg

SEQ ID NO: 533481 - DNA, 201 bp, Homo sapiens
cggttcccgtgcttacaaataactctacctgctgccatctagacactccactattctactacaaaggccactactgatttcttggttagtaagtttttttktttgtttttttgagacagggtctccctctgtcacccaggctggagtgcagtgcatgatgtcagctcacttcagccttgacctccaaggctcgagcaatca

SEQ ID NO: 533482 - DNA, 201 bp, Homo sapiens
cataaacacttttaaaaactcatcacccctaaaaggcttcatgttcagcagttcacttaactcattatttcacagttgcaacagctatttgttcacattcrgaaacaaatcttactgaagttgtagttcttttttctcatgttattaagttttcatcataaatcttgccctatgccagcatttattgtggtttatttcaaa

SEQ ID NO: 533483 - DNA, 201 bp, Homo sapiens
tgtagactcaccttgtttgttttctgactctcagggatcactgtgcttcaatatctatagtttaatgtcttgaaaaccattgtcttgtatattttgggcatttttttttttttttttttgctggtttcaaatgagagggtaagtctaatcccacttacttcatcttggccagaagtagccatatttgaatgtaaatatttg

SEQ ID NO: 533484 - DNA, 201 bp, Homo sapiens
gatttgttctttttgcttagccttgctttggctatatggactcttttttggttctatatgaattttagaattgtttttctagttctttgaagaatgatggyggtattttgatgggaattgcattaaatttgtagattgcttttggcagtgtggtcattttcacaatattgattctacccattcatgagcatggcatgtatt

SEQ ID NO: 533485 - DNA, 201 bp, Homo sapiens
gcccaattaaaaggttgctagacgattataagtctgacttctatctggattgattgattaatttcccattagacattgtcaaagagtaatctcctttaagaaaaaaaaaaaaaaaaagcttctctctctccaagcaagcctagaagaagtgtcggaagctggaaggaatttggcaattttgtctgttatcctttttccaag

SEQ ID NO: 533486 - DNA, 201 bp, Homo sapiens
ctctttcaactttttgatgcaggtatttagtgctccgaactttctttcctcttaatgctggttttgttgtatccgaaaggttttaataggtcgtatcactrtaatcatttggttcaaagaatttttaaatttccatcttgatttcattgttgacccaatgatcattcaagagcaggttatttaatttccatgtatttgcat

SEQ ID NO: 533487 - DNA, 201 bp, Homo sapiens
accccagcagaaaatggccaatgtgaatttcataccttcctttctggtctagtcacgatgcatgacgtgatctggtaagcttgcataaagtagccgaacacccccccccccgtaagaattaaagttacaaacacgtcttcaaggagcccaagaggcctgactggccatggtcaagatgagcatttttgtaattagggaagg

SEQ ID NO: 533488 - DNA, 201 bp, Homo sapiens
gtattcctctataagttacttgttactttttcctcacagcttttaagattctttccttgtcttcactttagataacctgatgactaggtgcctaggcaatkatctttttgcaataaatttcgcgggtgttctttgaggttcttgtatttggctatctagatctctagcaaggccagggaagttttccttgattattccctc

SEQ ID NO: 533489 - DNA, 201 bp, Homo sapiens
aaaatggccaatgtgaatttcataccttcctttctggtctagtcacgatgcatgacgtgatctggtaagcttgcataaagtagccgaacaccccccccccmgtaagaattaaagttacaaacacgtcttcaaggagcccaagaggcctgactggccatggtcaagatgagcatttttgtaattagggaaggtgattcgtcg

SEQ ID NO: 533490 - DNA, 201 bp, Homo sapiens
tctgggtctagccacctagctgagctaccaggctccaggctggtactagggagtttctgcaaagagtcctctgatgtcatctgtcttcaggtctgtcagcygtgagtacgagcacctcctccagtggagatagcaggggagtgaaatggactctgagagagtccttggttgtagtttttagtgcactggattagtgttggt

SEQ ID NO: 533491 - DNA, 201 bp, Homo sapiens
agagtgcccacggaactcttcccactgcttcccctacccctatattttgctcagctctctaaatttgtcttagctccctataaggtcaaatccttctcccrtgatctggttcttcaggctccccagtgaggatgtgtgtttgggggcagtcgttcccctttcacactttagacactcatagtttgtcagtgtgtcatggag

SEQ ID NO: 533492 - DNA, 201 bp, Homo sapiens
aaagggtctgtggattctctcagctttcctggtgtgttcttcagtagttcttggagccaaagttcacagtgtgtctccacaagctgctctgtccatctgartgggagcctcaagttagtcctgcctcctgtctgccatttcccctcactttctaatttctattcttttgactcttcttctgcttatactgggtttgattag

SEQ ID NO: 533493 - DNA, 201 bp, Homo sapiens
agtgtgggagcttgtgtccccacagagagaggttgctccaccctattgatacctggatgcattcaccaacccagaagccctctgaatcctatactttaggratttttataaggctccgtcacataggcatgactgactattaactcaatctccagcgccagaggaaggggagagagggagctgaaagttccaagcttctaa

SEQ ID NO: 533494 - DNA, 201 bp, Homo sapiens
ccctattgatacctggatgcattcaccaacccagaagccctctgaatcctatactttagggatttttataaggctccgtcacataggcatgactgactatyaactcaatctccagcgccagaggaaggggagagagggagctgaaagttccaagcttctaatcatgacttggtcttcctagtgaccagcgcctatcccaaa

SEQ ID NO: 533495 - DNA, 201 bp, Homo sapiens
atgcattcaccaacccagaagccctctgaatcctatactttagggatttttataaggctccgtcacataggcatgactgactattaactcaatctccagcrccagaggaaggggagagagggagctgaaagttccaagcttctaatcatgacttggtcttcctagtgaccagcgcctatcccaaaactatccaggaaccac

SEQ ID NO: 533496 - DNA, 201 bp, Homo sapiens
tacattaatggaacattaatctgatgcaaattattcccacaaaagacagctttgcagggtcattttagtctgatgatcctgtggcagccgtttcaaaacaygttaaagaaatatactgtgggataaaatcttttttacttctttcagcatctgctatctgtcatgttatgctgtgtaccagagtcaggttggaaagcaagc

SEQ ID NO: 533497 - DNA, 201 bp, Homo sapiens
gttccaagcttctaatcatgacttggtcttcctagtgaccagcgcctatcccaaaactatccaggaaccaccaagagagtctgtcattagagtaaatgatrcttctgttacccaggaaattccaagggatttaggagctttgtgacaggaactgggatcaaaaccaaatgttagaacaaaagattcttctagcatccatat

SEQ ID NO: 533498 - DNA, 201 bp, Homo sapiens
agatgccagaggagctgcctggtgtcctgcaggcctctaaggagagaatgcaggtgtcccagatcacctgtgtctccttcctgccttacagagaccgaggyagctgcctctgtgaaaagacattgacaacccccagccccatggaagagctgcctgggaagccagggggacgctaggggccctgcttccatttccaagtgt

SEQ ID NO: 533499 - DNA, 201 bp, Homo sapiens
gcggagttgcaggggtgggaagcaaggaacacctgttgctggaggaggatgacctcagcagggcccctgcttgaatcattcatattattaagttgccagarctattttgtctccttataatattccagttctccatgaggttggtctgcagtactgttttttcacttccctgtatttccttccaatacatacttaagatct

SEQ ID NO: 533500 - DNA, 201 bp, Homo sapiens
agccaagaggcagtaaaattcatggtaagcataaaacacgagagataaaagactacagagataatagtgggcagcagccacagaaaaacaaacagaagatacaggaagaagctgaatcatgccgatggcggagttgcaggggtgggaagcaaggaacacctgttgctggaggaggatgacctcagcagggcccctgcttga

SEQ ID NO: 533501 - DNA, 201 bp, Homo sapiens
ccacacaatgtatttttttctctgtctttctgatctctacgctatctttctctccagataaatgccagaagaaaaaacagaagataaaatgtttttttttwaaaaagttaaagtcctaattgaacataatcagtggcttttatgcaggccgtcatgcatgccatgtagtttaaggtgatggatttgagaatttgctagtaa

SEQ ID NO: 533502 - DNA, 201 bp, Homo sapiens
ctgaatcatctccaattccaaagatagggaatggtccatcctaatcattctgtctatggtccatccgcttggtaaatggatgacttgaaaaccacatctcrgcccctgagttccagttctgggaagagatgctcactgaaatcatggacaacagagtggactgtgaagcctgtcaagcaggcagggtacctggggtagggg

SEQ ID NO: 533503 - DNA, 201 bp, Homo sapiens
taaaaccatcagatcttgtgagacttactatcacaagaatggcatgggaaagacccacccccatgattcagttacctcccaccaggtccctcccataacaygtgggaattgtggaagctacaattcaagatgagatttgggtggggacacagccaaaccatatcaagcgttatcatttaaataccagaaaatcatcgcccg

SEQ ID NO: 533504 - DNA, 201 bp, Homo sapiens
ccagaaaatcatcgcccgctagctcagttggtagagcatgacacttaagcaccagaaagtgctctgcccttcctcagggggtagagtatgcctattgatcyctgcggcccactctaagcatacctggtatgggaccatcacggttttgaaaatataagttagattattctctttgggaaaaatcatttaaataacaaacct

SEQ ID NO: 533505 - DNA, 201 bp, Homo sapiens
ctgcggcccactctaagcatacctggtatgggaccatcacggttttgaaaatataagttagattattctctttgggaaaaatcatttaaataacaaacctytgtggagcatctgaatcatgagtctgtttctagcatattattccttggggacaccaccaagtgcaaagagagacggggagagagatagccctccagtagt

SEQ ID NO: 533506 - DNA, 201 bp, Homo sapiens
taggcacctgctgggactcgagtctcattacaggtctagaagcaaagaggagtggcagggtggatcctggggagagtcaacgtagtcttgcacagcatctrcctcaggagagaccattacagtttcctcaggtagtgtggggttaatcccctcagaacagaggtggaaagactggaggtggagaggttgataccattgata

SEQ ID NO: 533507 - DNA, 201 bp, Homo sapiens
ctctccttggttcctttggcgtctggtttctagcaggagttaagagacctggtggctcttggagtaccttcttatgtgggcctaaaaccagcacctcatckcctgtagcagtttgtgatgtgagcctccctccctgtgtctgcatccctctgcctcctccttaatacacacacactctgaatcatctccaattccaaagat

SEQ ID NO: 533508 - DNA, 201 bp, Homo sapiens
agaaagggggcaagagagagaagagtgaggtgcaggcttattaaatgaccagctctcatgcaaactccttaccatggggagggcttcaagccatttatgasagattcttccccatgacccatacaccttccaccaggtcccaccttcaacactggggaccacatttcaacaggagatttagagagggtgaaatccaaacta

SEQ ID NO: 533509 - DNA, 201 bp, Homo sapiens
gtctggtttctagcaggagttaagagacctggtggctcttggagtaccttcttatgtgggcctaaaaccagcacctcatctcctgtagcagtttgtgatgygagcctccctccctgtgtctgcatccctctgcctcctccttaatacacacacactctgaatcatctccaattccaaagatagggaatggtccatcctaat

SEQ ID NO: 533510 - DNA, 201 bp, Homo sapiens
ctgcctcccatcaagtgattctcctgcctcagcctcccgagtagctgggattacaggcactcaccgccacaccccactaatttttttttttttttttttgkatttttagtatggacagggtgtcaccatgttggccaggctggtcttgaactcttgacctcaggtgatccacccgccttggcctcctaaagtgctgtaatt

SEQ ID NO: 533511 - DNA, 201 bp, Homo sapiens
ttgtccttctgctggacccacaaagcagacctccagtcataggtggaccctgcagtgtgggtacccacaattgccagccattcccaacctgtgcctcctaytgcagttgatctctcagagctctttatcaacccttttgtcatttccttccagtttctctccacaagtattccaaatgcttaccttttcctgtacaccctg

SEQ ID NO: 533512 - DNA, 201 bp, Homo sapiens
tctattttcttctactgtgccaagacccttcttatctcattccccccataaccagtaccacttggctactccagggggagtctccagaccagcagcattgrcgatgtctgggaacgttttggaaatgcatggtctcaggccccatcctaggcccagtcagtcagaatctgcattctagcaagagccccaggtgatttgtgt

SEQ ID NO: 533513 - DNA, 201 bp, Homo sapiens
tctgctgaaaagcttccaggatttagaggaaaaataattgtaaacacctgatgtattctgagcactgatatgctttttattttttaatgcatattatttcrtttaatatcttcacattaaccaccccccccccttttttgagatggagtctcgctctcttgcccaggctggagtgcagtggtgtgatcctagcttactgca

SEQ ID NO: 533514 - DNA, 201 bp, Homo sapiens
tttcttttatctgctttactcttcaattatgaaaaatgaaatttaagaagtttgttgttgttgttctagtggttatatttgcacctttttgaatgtccatwgtcccgttttcttagttaacctttgagcacctagcttgccagattttattttattttattttactttaagatggagtttcactcttgtcacccaggctgg

SEQ ID NO: 533515 - DNA, 201 bp, Homo sapiens
atttagaggaaaaataattgtaaacacctgatgtattctgagcactgatatgctttttattttttaatgcatattatttcatttaatatcttcacattaaccaccccccccccttttttgagatggagtctcgctctcttgcccaggctggagtgcagtggtgtgatcctagcttactgcaacctctgcttcctgggttca

SEQ ID NO: 533516 - DNA, 201 bp, Homo sapiens
ggcatttgaaaaacaggtatagtcactattatcaaagtataaagttcaatatatagctataagatttacataatggattatgttgagggtttcttaatccrctttatccattttgaatcaagagtagaaaaactccttcataaagttggctactgtgttttttggagcataaatatttataagtgttacatcttcatcacg

SEQ ID NO: 533517 - DNA, 201 bp, Homo sapiens
tttagaggaaaaataattgtaaacacctgatgtattctgagcactgatatgctttttattttttaatgcatattatttcatttaatatcttcacattaaccaccccccccccttttttgagatggagtctcgctctcttgcccaggctggagtgcagtggtgtgatcctagcttactgcaacctctgcttcctgggttcaa

SEQ ID NO: 533518 - DNA, 201 bp, Homo sapiens
ttagaggaaaaataattgtaaacacctgatgtattctgagcactgatatgctttttattttttaatgcatattatttcatttaatatcttcacattaaccaccccccccccttttttgagatggagtctcgctctcttgcccaggctggagtgcagtggtgtgatcctagcttactgcaacctctgcttcctgggttcaag

SEQ ID NO: 533519 - DNA, 201 bp, Homo sapiens
tagaggaaaaataattgtaaacacctgatgtattctgagcactgatatgctttttattttttaatgcatattatttcatttaatatcttcacattaaccaccccccccccttttttgagatggagtctcgctctcttgcccaggctggagtgcagtggtgtgatcctagcttactgcaacctctgcttcctgggttcaagt

SEQ ID NO: 533520 - DNA, 201 bp, Homo sapiens
aaataattgtaaacacctgatgtattctgagcactgatatgctttttattttttaatgcatattatttcatttaatatcttcacattaaccaccccccccscttttttgagatggagtctcgctctcttgcccaggctggagtgcagtggtgtgatcctagcttactgcaacctctgcttcctgggttcaagtgattcttc

SEQ ID NO: 533521 - DNA, 201 bp, Homo sapiens
ggtgtgatcctagcttactgcaacctctgcttcctgggttcaagtgattcttctgcctgagcctcctgagtagctgggattacaggcgcccgccaccatgcccaactaatttttgtatttttagtagagatggggtttcaccatgttggccaggctggtctcaaactcctgacctcaggcgatctgcttgcctcggccttc

SEQ ID NO: 533522 - DNA, 201 bp, Homo sapiens
gtgaaaggatggaaaacgatgtaacatgaaaccacaaatgaaaaataaactggagtagctatattcatagaagaagaagtatgatagaagaagtatcatasaagaagaagaatgatgaaagggtccactcaccaagcagatgtaacaatcctaaatgtgtttgcatctaactacagacctttaaagcacatcaagcaaaaa

SEQ ID NO: 533523 - DNA, 201 bp, Homo sapiens
agctgatgagtggcagcaccaggactggaaggtggctgactgtcaccctgtgctccttgtccctctgttccacactgcttctcacaccaagaaggaataaygagggtggtccagtcactcagttctcaaggcacccctgctccatggcaggcaggtagagacaccttccattggggaacactggctcagaacagccaacac

SEQ ID NO: 533524 - DNA, 201 bp, Homo sapiens
tttctctggtgcctccatgtgtggcttcatactcaaacttctgaattatttttctggcaattcagagatttcttcttggtttggctcaattgctagtgagmtagtgtgatctcttggggatgttaaagaatcttgttttgtcatattactggaattgtttttctggttctttctcatttgggtagcctatgtcagagggaa

SEQ ID NO: 533525 - DNA, 201 bp, Homo sapiens
gtggtctatcttgtagaatgttccatgtgctgatgaatgtacattctgcagttgttgggtagaatgttctgtaaatatctgttaagtacattttttctagkgtatagtgtaagtccattgtgcctttgttgactttctgtcttgatgacctgtctagtgctgtcagtgggtactgaagtctcccgctgttattgtgctgcc

SEQ ID NO: 533526 - DNA, 201 bp, Homo sapiens
acacacatgtctctgattgttaattataatatcattaacttctgcttgttcctgcttaatgttctatcattacgaggataatcttaaaaatatttaacaastagtatagcacagatattgacataggaggcagggcagtaaatagttggtctgaatggacactaaccataaacagccgtttgcccatacccatgcacactg

SEQ ID NO: 533527 - DNA, 201 bp, Homo sapiens
aatggaaaaacattccaggctcatggatagaaagaatcaatatcatgaaaatggtcggctccctgcttctcctgttcgacagacagccacattttctcttkcattgccagccgcatccctgagacatcatggtgaaggtgaaggccagagtcgacagatttggtcatgttaggtgtctggtcaccagggctgcttttaact

SEQ ID NO: 533528 - DNA, 201 bp, Homo sapiens
ataccacaatttgcttatcctttcatctgtggacacttgagttgctttcacatcttggctatttcgaataaggctgctattaacatgagtctacaaatatstgtttcagttcctgcttgtattaatagctctttggggcatatacccagaagtgggattactggactatatggtagttctgtttttaattttttgagcaat

SEQ ID NO: 533529 - DNA, 201 bp, Homo sapiens
agttagtgactttctggtgagtaaaaagagtttcctcattttttaaaatctataattgacacattgagccatcactcttgattgggcagctttagggcccrcaagtcatgttttcatggctcctttgcaattggtctttgttttaagcatttgtaataaacaagttgtaagtcacttttatgatgtccggttcaggaataa

SEQ ID NO: 533530 - DNA, 201 bp, Homo sapiens
tatgtgtttttgtagactagtttgaaatttaacacatttaatgttaaaataattcaagcttatatatgtgcattccatcacagattaaaacttaattctgaaaaaaaaaaaaaaaaaaaaagagctacagtagtcagtacatcacagtccttccggctcatgttgaaagatgcagagagtgtcaagcaccaaaagaaagga

SEQ ID NO: 533531 - DNA, 201 bp, Homo sapiens
acggggtttcaccatgttagccaggatggtctcgatctcctgacctcgtgatctgcccacctcgacctcccaaagtgctggtattatgggcgtgagccacygcacccagccccagaatctgcttctaacccatgtatcacctgtcccaccccctgggacagcaggtgggacacagtaccctgtgtcccacccatcctctcc

SEQ ID NO: 533532 - DNA, 201 bp, Homo sapiens
tttagtggagacggggtttcaccatgttagccaggatggtctcgatctcctgacctcgtgatctgcccacctcgacctcccaaagtgctggtattatgggygtgagccactgcacccagccccagaatctgcttctaacccatgtatcacctgtcccaccccctgggacagcaggtgggacacagtaccctgtgtcccacc

SEQ ID NO: 533533 - DNA, 201 bp, Homo sapiens
cctccaactaaacacaagtcaaaggaaagacaatattcaaaaatcatgactctctaacaagaggagatatggttttctcagccccagaacctcttccctgygagagatgagtttattcactttcctagacctcagtttttctataaaatggagttactaagggtccagtttcaaggacaagactataatgaaggggctgtc

SEQ ID NO: 533534 - DNA, 201 bp, Homo sapiens
gacccttatgccagacagccgtgaatctcagtgacattacagaatagtttcagactgtaaactcccttgtgctactgtgaattttgttatttgaagcaacwtatgtaaacacttgcttcatctttaaagacaaatagtttgaagtggggagttcccaagaagaagaggattcctctgccctactcatttctctgggggttt

SEQ ID NO: 533535 - DNA, 201 bp, Homo sapiens
aagcacagaaacttgtctcagctctgaccctcatctgcacagaccctttctctgtttcatggagcctggaaaaatgtacagaacctctccctattttgatyacctcatgagtaaagtgagaatataatgagggtgacgtgagataacagacatgaaagttggaaatactctatcacgttgtgctgatgtccatcattcaag

SEQ ID NO: 533536 - DNA, 201 bp, Homo sapiens
caacatttgctttaagaagtcactgagcacctgctgtgagccttcatatgctgggtccgaaaagattctgccttcgtgtaagacacagcactttcccttayggaattggcctcgtttgtgagattaaatgaacacatgacacaatgggaagatttaagtcagtgtgtgattaattaccaaagatcacagtgctctggaaat

SEQ ID NO: 533537 - DNA, 201 bp, Homo sapiens
tactctatttctgtgaatatatctggagaaaggtagacaataaggggaaatattacagccaaaagaatagtcttctatgggaagaaactttcgtagtgcarcaaagtaatgatgagttccatttacttatccaagcccaggggaaatcccgtgtccattagatttctgatatcatctgaactttctgttagaattataatt

SEQ ID NO: 533538 - DNA, 201 bp, Homo sapiens
tccaagcatgagccaaagtgagacattttcttgtttgccaaaatggaaggactcctacccactgggagaaagatatgactcatttttctgataaaaccttkcctagcactgtcccacatgggatgaagtgaactgtctctctgtctcaaacagggaatctcatttcagtccatgtagcacattttataatgaagcctataa

SEQ ID NO: 533539 - DNA, 201 bp, Homo sapiens
ttgccaaaatggaaggactcctacccactgggagaaagatatgactcatttttctgataaaacctttcctagcactgtcccacatgggatgaagtgaactrtctctctgtctcaaacagggaatctcatttcagtccatgtagcacattttataatgaagcctataatagcacaggggccctcagcttcttggaccctcag

SEQ ID NO: 533540 - DNA, 201 bp, Homo sapiens
aaaaaaaaagaaagaaagaaaatatgtattagggtccccgttggggtaaaatcggtgttggtttaggaacagaacaactgcagatagtcccaccaaatggtgatgatgatgatgatgatgatgatgatgatgatgatgatgattgagatgtagtgtcgctctgtcacccaggctggagtgcagtggcacgaccttggctca

SEQ ID NO: 533541 - DNA, 201 bp, Homo sapiens
aaaaaaaagaaagaaagaaaatatgtattagggtccccgttggggtaaaatcggtgttggtttaggaacagaacaactgcagatagtcccaccaaatggtgatgatgatgatgatgatgatgatgatgatgatgatgatgattgagatgtagtgtcgctctgtcacccaggctggagtgcagtggcacgaccttggctcac

SEQ ID NO: 533542 - DNA, 201 bp, Homo sapiens
aaaaaaagaaagaaagaaaatatgtattagggtccccgttggggtaaaatcggtgttggtttaggaacagaacaactgcagatagtcccaccaaatggtgatgatgatgatgatgatgatgatgatgatgatgatgatgattgagatgtagtgtcgctctgtcacccaggctggagtgcagtggcacgaccttggctcact

SEQ ID NO: 533543 - DNA, 201 bp, Homo sapiens
aatgtttgagagtgtttgccactttgcaaaaacaaacagcatctctaacaagtagtttctaattgctgtggtttgctcttcattgatcctacaccagcttsctctgctttaaatgaactttcttcatacctcattcaggaccctccatgacttggagttcctcctccaaatcggggctcattagcatatctcaaccgttaa

SEQ ID NO: 533544 - DNA, 201 bp, Homo sapiens
aacgtgaaggagggagtggccttatttgatcttaaaaggagtttggattttattttataagagatggggaatcattgaaaggtcgtcaactggaaataatktatatcttagaaagaggaggttggcaaagagactgaaggaaggaaggtaacgttcactgaatacctactgacatgtcagggactctgctggatattttag

SEQ ID NO: 533545 - DNA, 201 bp, Homo sapiens
ttgcagtggtggtagcaccaacctgccagagggaaactgtaagggaaggaaactttcccatttgcttgcaggagctgtggtccctgtttttattatctccrtgtacacataccatctgtccacaaacaggagtgcagttgtgaaaagtgcatagagcagggtaactaaaggcccagctttttggctcgaggactaacaagg

SEQ ID NO: 533546 - DNA, 201 bp, Homo sapiens
aaaaaagaaagaaagaaaatatgtattagggtccccgttggggtaaaatcggtgttggtttaggaacagaacaactgcagatagtcccaccaaatggtgadgatgatgatgatgatgatgatgatgatgatgatgatgattgagatgtagtgtcgctctgtcacccaggctggagtgcagtggcacgaccttggctcactg

SEQ ID NO: 533547 - DNA, 201 bp, Homo sapiens
gggcaatatctcagaatggtgatgctcttgagagatttagggaatcttcctttctcacactcttgatctttctttggtctttgtttgcttttttaaaatgtttttttttttcagttttaattgtggcaaaatataaatatagtaaataaatgataaaataagtaaataaaaactaaacataaatacacaacaaaagctacg

SEQ ID NO: 533548 - DNA, 201 bp, Homo sapiens
gtggaggttgcagtaagcagagatcacaccactgtactccagcctgggcaacagagtgagactctgtctcaaaattaaaaaaaaaaaaagaaagaaaaagaaaaaaaaaagagcgaaaaattaagagtttcccctgataatctgtgtccactgcccagcccagatgtctctcattctactatttacctggtctgaaaaact

SEQ ID NO: 533549 - DNA, 201 bp, Homo sapiens
aaggaataaaaggaaaagctcctagaggaatggattctcaaaccagacctcaaaggtttcccacacataaagtgctgaaaagagaagcacacaattttttwaaaaaatcacaaaacacacacacaacccacacataaacagcccaacattagggtcagtagagacaacaacagaaccacatgcagaagacttctgaaatta

SEQ ID NO: 533550 - DNA, 201 bp, Homo sapiens
agagaaagaactgcctaaaacaccgatctgaccatgtccctcccctattaaaaatcttccagcaaccagcctggcctgcatggtaaaactccatctctacaaaaaaaaaaaaaaaaagtacaaaaattagccgagtgtggtggtgtgtgcctgtagtcccagctactcgggaggctgaggtgggaggatcacctgagcctg

SEQ ID NO: 533551 - DNA, 201 bp, Homo sapiens
actgcatctcaaaaataataagtaaaagatatttagattgtttgggttttcactattaaaaatgagctgaacatttttaaacatgtcaagttgtgcacctstgcaaaagtttctctctaaagtatatatttagacgtggaattactgattcaaagtgtgcatatagcttccattttcttatattaccacattattctccag

SEQ ID NO: 533552 - DNA, 201 bp, Homo sapiens
agtgactataccataagttgttggaccattctcctaggaaggggcatttaggttggattttaatattttgcaattacaaatgctataatgaatgaccttgkgtattgttaaagatatatcctcagggtaaaatcctagatgtacaatttctagattaaaaagaaagtacatgtatagttttattagattttgccaaattcg

SEQ ID NO: 533553 - DNA, 201 bp, Homo sapiens
ttatgctaccagtctcgttttacactgagacaagtaaggactgtattttggataaatctttcagtcctttattcagctagagcagtggttcttaatcgggrcagtattccccttggaggacatttgacaaagtctagagacattttttaattgttacaacttgggtatggagagaaagggagattgctactggcatctagt

SEQ ID NO: 533554 - DNA, 201 bp, Homo sapiens
ctatggtaattttcctcatccaaacttataaaaaaattatatagtcacatttattagttttttattgcatagtttttttagtcatagttataaagtcattyccacactattggttttgtttgtttgtttgtttgtttgtttgttttgagacagagtctcaccctgttgcccaggctggagtgcagtggcacgatctcggct

SEQ ID NO: 533555 - DNA, 201 bp, Homo sapiens
atccaaacttataaaaaaattatatagtcacatttattagttttttattgcatagtttttttagtcatagttataaagtcattcccacactattggttttktttgtttgtttgtttgtttgtttgttttgagacagagtctcaccctgttgcccaggctggagtgcagtggcacgatctcggctcactgcagcctctgcct

SEQ ID NO: 533556 - DNA, 201 bp, Homo sapiens
tcctgttctttcactcttggtccatgaactttctgttgtttttctttttgagatgaagtcttgctctgtcacccaggctggagtgcagtggcatgatctcsgctcactgtaacctctgcctcccgagttcaagcgattctcctgcctcagcctcccaagtatctgggattacaggcacgtgccaccaagcctggttaatgt

SEQ ID NO: 533557 - DNA, 201 bp, Homo sapiens
ataatggctgccaatattaggactggatttgttggttctcccccaacccccaatcccgcccattactcccagagacactgtcctaaagcgcaggcatcagyaacttgttcttgtttttcagctctctcctcctgacaggctgggcattcaatgtttaggtccaagtttactttccttcacttttttcttcccatcagagct

SEQ ID NO: 533558 - DNA, 201 bp, Homo sapiens
cagctcctgccctgactgagtttacatataacctgaaagatatgcgtaaattcagaactttacagacgtgtcataagtggctcaggagagaggcccactgsacagtggctgcacatggaaggcagagctgaccttgaagagatgaaggaaacagttctaaagaagtgaccactgagctgagagctgaacaatccgttgggc

SEQ ID NO: 533559 - DNA, 201 bp, Homo sapiens
cacttaaaatggaatactaaaaaatgtgcaaataacccaaaggaaggtaggaaaggggagacagaggaacataaacacagagaatagaaaataataaaatrgtaggtctgagttcaaacatatcaataattacattaaatgtaatgtaatgatttcaaccaggggtgacacatatttcaataaaaatataaatttattttt

SEQ ID NO: 533560 - DNA, 201 bp, Homo sapiens
ccagccatcccattactgggtatatacccaaatgactataaatcatgctgctataaagacacatgcacacgtatgtttattgtggcactattcacaatagsaaagacttggaaccaacccaaatgtccaacaatgatagactggattaagaaaatgtggcacatatacaccatggaatactatgcagccataaaaaatgat

SEQ ID NO: 533561 - DNA, 201 bp, Homo sapiens
gccataaaaaatgatgagttcatgtcctttgtagggacatggatgaaattggaaaccatcattctcagtaaactatcgcaagaacaaaaaaccaaacaccrcatattctcactcataggtgggaattgaacaatgagatcacatggacacaggaaggggaatatcacactctggggactgtggtggggtcgggggaggggg

SEQ ID NO: 533562 - DNA, 201 bp, Homo sapiens
gatgacacgttagtgggtgcagcgcaccagcatggcacatgtatacatatgtaactaacctgcacaatgtgcacatgtaccctaaaacttagagtataataaaaaaaaaaattaaaaaaaaaaaaaaaaaagaagactgtagtgaaaatatttggccctgatgttttttgtatgcaatagttgtttaataattgtttttgt

SEQ ID NO: 533563 - DNA, 201 bp, Homo sapiens
tgggtgcagcgcaccagcatggcacatgtatacatatgtaactaacctgcacaatgtgcacatgtaccctaaaacttagagtataataaaaaaaaaaattaaaaaaaaaaaaaaaaaagaagactgtagtgaaaatatttggccctgatgttttttgtatgcaatagttgtttaataattgtttttgtatattatgggaaa

SEQ ID NO: 533564 - DNA, 201 bp, Homo sapiens
tctcagcttactgcaacctctgcctcccatcaagtgattctcctgcctcagcctcccgagtagctgggattacaggcactcaccgccacaccccactaatttttttttttttttttttgtatttttagtatggacagggtgtcaccatgttggccaggctggtcttgaactcttgacctcaggtgatccacccgccttggc

SEQ ID NO: 533565 - DNA, 201 bp, Homo sapiens
ttgtctgtttgtttttaaaatactgctctatttgttgtcttgctctgaatatcgaatacttttgcccttataattaagtgacctttttgcctagaggtttkgttttgttttgttttgttttgttttcagtctctgaattctaacaggtttaataagtcttagagttgctatctctgggttaactttcccaagtacccagtg

SEQ ID NO: 533566 - DNA, 201 bp, Homo sapiens
aactagggctcctagcaaggatagatgactgcacaactggaggaggaaatacataagatgagcctaggatttcttgtgtcaggaagcaaggaaggtagackagtgagttgtgctaaaaggacagagggaccaaaaagaagggctgcaggccaaaaaggggatacactgagcatcaaaaaacagtaattagtgcaatggact

SEQ ID NO: 533567 - DNA, 201 bp, Homo sapiens
gtgggactgattccttgaagatgggctgggattctctatgaccatgtgggaatcacatgggttcatggttgatatcacgagatctaagggatgaagccccyaaaggagagggtgtaggaaaagaaaagaaagtctgtggaccagcagggaggcctgcatccgagggttgtggggagaaaggacatccagtgaatgagaaag

SEQ ID NO: 533568 - DNA, 201 bp, Homo sapiens
aaggagtttgagaccagcctggccaacatggtgaaaccccatctctactaaaatacaagaattacctgggcgtgatggcacgcacctgtaatcccagctayttgggaggctgagaattgcttaaacctgggaggcggagtttgcattaagctgagatggcaccactgcactccagcctgggtgacagagtgagactctgtc

SEQ ID NO: 533569 - DNA, 201 bp, Homo sapiens
agtcaggtcagaattaaatttgacaaaatattagcttaacaactgacagtcattccccagtgcccatttgtccttaggtcagattcataactcaatctctkcctggagaagaatctgcctttccctactggagagtggataaaagtctgctaatttgtcttaagccatcattgctctttcctaaaaggcaactgagatttg

SEQ ID NO: 533570 - DNA, 201 bp, Homo sapiens
cactgcatgcatacaccacattttgtttatccattcttctgttggtggatgttctggttgcttccacgttttggctattgtgaataatgctgctatgagcstgggggtatactaagccaccactttttgcaacataaagtttttctcacagatttcaaaagccctaggaacagctttcagcccaggtttgagctcaaggta

SEQ ID NO: 533571 - DNA, 201 bp, Homo sapiens
gctctcctcctcctctcattcctctgcctcctggattcctgaagtttaggagaaataaggtagccaagggaaccacatggaagttgtgacagctcccagcggcgcgcccctttcgtgtgtgccggtacctcggcttaggagttgcccgctgacaccttgaatgaaggaggtccccttgccagccagcctgccgggatgggc

SEQ ID NO: 533572 - DNA, 201 bp, Homo sapiens
gccatgatttattcaatcattccttcactagtgggtattcattttgcaaccagtatttgccacaacaaacaatgctgcaataaacagccttgagtgggtgscattgtttctatgggattagttccctggagtggtgttgctttgtttgatgcattaatagatatggatagattgcctttcagagaggctccacccatatcc

SEQ ID NO: 533573 - DNA, 201 bp, Homo sapiens
ctgaatgtgttacgccatcgtaaagtggaacagtcataaatggaaccatcataagtggggaacagtctgtatattcgcattgtagtgcgaatccagaattyttcatcttctaagactaaaactctgtattcattcaacaattccctacttctccctgtccccagcccttggcagccaccattccactttctgtctctgtga

SEQ ID NO: 533574 - DNA, 201 bp, Homo sapiens
taagtggaatcgtacagtatttgtccttttgtgactggcttatttcacttaacatgatatcctcaagtttcattcatcctaagacgaatttagatgagttwggcttgttttgtagcacgtgtcagattagttaggcatgttttgtagcacctgtcagaatttccttcctttttaaggctgactaatgttccactgcatgca

SEQ ID NO: 533575 - DNA, 201 bp, Homo sapiens
tctgaatagcgcagtgaaatctcacactgtcccactttgttccacccacgtcagaaccatccctttgtccagcatatctatactgtgtgcactacccactyattagtcacttagtagccatctcagttatcacgttgcaaaaacagtggtttcaggcattcactgggaatataggaatgtattccccacaaataagggggg

SEQ ID NO: 533576 - DNA, 201 bp, Homo sapiens
aactcccagactcaaacaatcttcccacctcagcttcccaagtagctgggaccacaagtgtgcactaccacgctcagctattttttttttttttttttttytggcagagctggggtctcgctatattgcccaagtttgtctcaaactttttggctcaagtgatccacccacctcggccacccaaaatgttgggataatagg

SEQ ID NO: 533577 - DNA, 201 bp, Homo sapiens
attgttgagttattaagaggaataaactagatgtataaactataatacgagcttcctttttaacaatacgaaatataactgacaagcaaacaataacaagcctgataaacatgttatttctttttagagtcaaaagtctagctcataagaagccttgatgcgaatggaatctgagccagtgagttgctctataagaatctg

SEQ ID NO: 533578 - DNA, 201 bp, Homo sapiens
ttagccatccctctagatggctttaaacaatgtttagttgtcttatttcatcacaaaagcaacacatgctcactgtggagagtttggaaaacaccagtttkttcccagtatcaaatgaaagtcatccctaattctaccatccagagacgttgatgatgacatgattttgattgaatccttacgtgttgtggtgctgcacta

SEQ ID NO: 533579 - DNA, 201 bp, Homo sapiens
cggatttcagagcaggctaaaaatataggaaagattatttggaagtctttgggcttacatgtgtatttttaaatttacatatatatgtattttcttttttwaaaaaaatcaggtggggaagaaggagctgatgaaaatgctcaaatctgcagtgagtttgatgaaattgtcctcagtaccccatgtagccaaccaagaatt

SEQ ID NO: 533580 - DNA, 201 bp, Homo sapiens
atctggtcatattatactgctgttagaatgagtatgtaatccctgtgatcggtctgattagaacatgttccctgttctggcttctccaatctctgaaccaygtcaagaattaagcaaaatcagggcagaccaggaaggtgcttacaaaaacagagcataaggccaggcacggtggctcacacctgtaatcccagtactgtg

SEQ ID NO: 533581 - DNA, 201 bp, Homo sapiens
tcaaaaaaaaaaaaaagtataagactgatatgcaaattctaaatgcatttagataattaatatggaaaagcacctattatatatagggtgttatccagttrcaaatgaaataaaaggaaacagaaatataataacaacttacacttgtatgagcttgctaaatgctggacactaactacatcacatacattaatttaatcc

SEQ ID NO: 533582 - DNA, 201 bp, Homo sapiens
ataataacaacttacacttgtatgagcttgctaaatgctggacactaactacatcacatacattaatttaatcctcatgacaaccctgcacagtgggtgtrgcattagagtaggaatattgagatacagagtaggattatgcaataaaatacatgctctcagatgtagttgttaactctgaaattcagggaaaacaaggat

SEQ ID NO: 533583 - DNA, 201 bp, Homo sapiens
ttaaatattgttgttggtggtattacaaagagaaatgtttcatgctaagccttctgccctgatctttattattgattaagtagctaatcatgtatggacaraagggtaagtttaaaaaacagttggtaaaacaagcatttggccctcagagaaatatggcacagacatttttaatggtcggaaatctcatagtagtgataa

SEQ ID NO: 533584 - DNA, 201 bp, Homo sapiens
actgttgtctccattttttttttttttttttaatgctggtcataaagtatctcatcctcaactcaccctccatgggtgatggctcttgtctgtggggtttwcgggaattgggtgtgtccctggaaaaggcttccccaggtggtggtggttgtggggattaaagggcattttggatccccaggaaaccagaatccagcacca

SEQ ID NO: 533585 - DNA, 201 bp, Homo sapiens
gataaaatcacaaaggaagtgtatatagatgaaaactaaggagataaaatgggttcataaaaaatactgaaaagaagctactggacataataataataatwatttaaagaaaattatcataggccctaaggctagatgggacattcaagttttacctgtgaaagttgtaaggaatagatccaaatgggcagacatttctcc

SEQ ID NO: 533586 - DNA, 201 bp, Homo sapiens
ctctaaactctaatttagaataaaactgtttcctaaagggaactatctgcaggaagacgactgagctggaagaaagcattctttaaatcaatgtagggagyttagttagctttgcaggccttcccaccccacctggctctgtccacaatagggctttgctctgtcttgatttaatccatacctgcagctcaggagctgttt

SEQ ID NO: 533587 - DNA, 201 bp, Homo sapiens
tgcaagctaccacttctcttttagaaaaactgtgataaaatataacaaaagattcgccatcttaactatttttgagtgtacagtttattgttaagtacacrtgatcctcaacttacaacagggttatgacaatgcactttcaacttaacggtattttcagtttacgagggatttatcctgctttagccccattgtaagtca

SEQ ID NO: 533588 - DNA, 201 bp, Homo sapiens
tcttaactatttttgagtgtacagtttattgttaagtacacatgatcctcaacttacaacagggttatgacaatgcactttcaacttaacggtattttcartttacgagggatttatcctgctttagccccattgtaagtcaaggagttttctgaatgtgttacgccatcgtaaagtggaacagtcataaatggaaccatc

SEQ ID NO: 533589 - DNA, 201 bp, Homo sapiens
atagtgtttcttcccagcattgctaggtagggttacttcttccaagaagttctgaaagattaactcaggcccttctccttctttgggagtatttctttacygtgttcatgatactttctctagtttgagtacttggttctctctttgtgtgctgaggttctgtgagcaaagaatgagctattttacaatcctttcctttct

SEQ ID NO: 533590 - DNA, 201 bp, Homo sapiens
tacccccatgaatttgccatgcagatgatagagctattaaattactgtaggcacctgcattgcatattcttgagccagagccacctgaatagaaagtaatrcaagatgtgagagaaatgtacaggataaatgaaatgaaatgtagattttttttatctgctggcaggtactattaaaatgaaatattacagacattgtgat

SEQ ID NO: 533591 - DNA, 201 bp, Homo sapiens
tgcaagaaagtgtaaagagcccacctctttttttagatatgggatctcactctgttgcccaggctgaagtacagtgacgtgaccatagctcactgcagccrcaacctcctgggcttaagtgtgcctcccatctcagcctcctaagtagctggaacatcaggagtgtgccaccacacctggctattttttttgtttaatttt

SEQ ID NO: 533592 - DNA, 201 bp, Homo sapiens
gaatcccacctctcagaagccaaacggagggggcatctctgacaggtgagagtgatttacaataccaggaaccagacagcagaagaaaaggttacagataycaggtaccaggcagcgggaaaaaaaaggttacagaatgaggaagtaccctagactttggcagtttggcaagagtatctgtaaagaggtaaggacaaccag

SEQ ID NO: 533593 - DNA, 201 bp, Homo sapiens
cacctctttttttagatatgggatctcactctgttgcccaggctgaagtacagtgacgtgaccatagctcactgcagccacaacctcctgggcttaagtgygcctcccatctcagcctcctaagtagctggaacatcaggagtgtgccaccacacctggctattttttttgtttaatttttgttagagcctcactatgttg

SEQ ID NO: 533594 - DNA, 201 bp, Homo sapiens
gtgagaggggttgcaggaaaggggagaatcccacctctcagaagccaaacggagggggcatctctgacaggtgagagtgatttacaataccaggaaccagrcagcagaagaaaaggttacagatatcaggtaccaggcagcgggaaaaaaaaggttacagaatgaggaagtaccctagactttggcagtttggcaagagta

SEQ ID NO: 533595 - DNA, 201 bp, Homo sapiens
ctgctgattttttggagacggagtcttgctctgttacctggagtgcagtggcatgatctcgtctcactgcagcctctgtctcttgggcttaagcaattctstgcctcagcctcctgagtagttggaaatacaggcatgtgctaccacacctagctagtttttgtatttttagtagatggggtttcaccatcttggccaggc

SEQ ID NO: 533596 - DNA, 201 bp, Homo sapiens
tatgggatctcactctgttgcccaggctgaagtacagtgacgtgaccatagctcactgcagccacaacctcctgggcttaagtgtgcctcccatctcagcytcctaagtagctggaacatcaggagtgtgccaccacacctggctattttttttgtttaatttttgttagagcctcactatgttgcccaggctggtcccaa

SEQ ID NO: 533597 - DNA, 201 bp, Homo sapiens
tatgttgcccaggctggtcccaaactcctgggctcaagcagtcctcctgcctcagcctcccaaattgttgggattgcaggcatgagacactaggcctggcyctgtgtgtgtacatatatgctttgtaactaatattagcatgaggaactaagtaactcaccaggttgtctgaggtggaaggggtgcagggagagtagagga

SEQ ID NO: 533598 - DNA, 201 bp, Homo sapiens
ccatgttttctccatgggataacctaagaacagaaatcatggggcaaagaatttaaaaaacaagtaaaaaaaaaattagaagtttttctcctgtttttttytttttttcctggtgcacagaagtattcagatgatagggaagtagggatacagctggggaggtgggcagagaggctgacgttcgcataaataatcctggca

SEQ ID NO: 533599 - DNA, 201 bp, Homo sapiens
gagcggggatggaaccagggtctggtcttcggaatgtccagctgcctccagagaagcccaccagcgggagactggcataaaccagcagagcccaggaacgsgagggctcaacttgatggagcagtaacttggaaacagcttaaatgacctctaagagcagatttcctaaacagattggagttagttgtgcaatggaatact

SEQ ID NO: 533600 - DNA, 201 bp, Homo sapiens
cacagattaaaacttaattctgaaaaaaaaaaaaaaaaaaaaagagctacagtagtcagtacatcacagtccttccggctcatgttgaaagatgcagagastgtcaagcaccaaaagaaaggaaagccagacgccctgtggaggccaagggaagggcgccccacccagcctgggccagtcagggagtcatagtggtgaagc

SEQ ID NO: 533601 - DNA, 201 bp, Homo sapiens
gaaatacatgatgaagacacagttagcaatggtttatgtcatcttcagaatggatactgcctcttcttttcccttggggcattgggatcctttgaaaacgmcctgaaatctgtcactagaggaagctggtctcacaagaaagaacgtgagtggaaatggtgcagtgagccatggtgttgccttttctttctggattttcac

SEQ ID NO: 533602 - DNA, 201 bp, Homo sapiens
actgtaacactaatcatttagtcagaggcaggcagaccggaaaggccatatggttctctatcaatgaaatcaacacaaacatttcttttccaaatgtaaaygtcagctataacaactggatttcttagtgacccttaccaccattagttaaaagatttgggtcaatgaaaaccacaaagtttttcctaattgcagcacacg

SEQ ID NO: 533603 - DNA, 201 bp, Homo sapiens
tcacaggagggtgtatgcagaggagggaagctgacctgggacagcatcttgggaaatgcctgtgcatccttcatggggccaggtaaggagcagtaggcctrgcaaggagagagaggagctggtgagaggggttgcaggaaaggggagaatcccacctctcagaagccaaacggagggggcatctctgacaggtgagagtga

SEQ ID NO: 533604 - DNA, 201 bp, Homo sapiens
acagtcatagagatatgtatatatacatgtatactcatctagattatatacatgtacatacacacatgtctctgattgttaattataatatcattaacttstgcttgttcctgcttaatgttctatcattacgaggataatcttaaaaatatttaacaactagtatagcacagatattgacataggaggcagggcagtaaa

SEQ ID NO: 533605 - DNA, 201 bp, Homo sapiens
ttctagattactggtgtacctgctgacaaaaatcggtgtcgatgtgcactagatattaggaggggtaaagaaatagccttaggggtcccctgaccccttcmaccatcagagacaaatttacattcttattctgaactaaatttgtcattagcataaaatatattaatgtttggttatttgaggaaattgaaagatagaaaa

SEQ ID NO: 533606 - DNA, 201 bp, Homo sapiens
atgacggcagtaggattggttggcaagtgcaaatggtgagggctccatccatttttcatgaagttataattaacacgctgtctgcctcccacaggttcaayctttgggaatgaagaacagccagttctgaaggcatctctgccttctaaggacacacccaagggggccggccgggtggcccctccagcatcctccagtgtg

SEQ ID NO: 533607 - DNA, 201 bp, Homo sapiens
tttgagacaaagaattttgtacccttttactatctcgttatcttcactctacggtttggtctttgtgatttcagatctaggtaattattgcattgtcttayattataaggaaatggcactgttttgcaaaaatatacaatgattatttagagtcatatttgttttaactggttttaacacttaccactcatccttttgtgc

SEQ ID NO: 533608 - DNA, 201 bp, Homo sapiens
cattctctcttgtctaccaccatgtaagacctgcctttcgccttttgccatgattgtgaggcctccccagccacatggaactgtgagtccattaagcttcttttttttttataaattaccttgtctccggtatgtctttatcagcagcatgaaaatggactaatagaagtagggagaacattcttccagtgggtaacctag

SEQ ID NO: 533609 - DNA, 201 bp, Homo sapiens
aagagctgctgctgtttgaagcaggtgctattagttttgtgtgcaccagtggctttgaaggtgcatgaaaaatagaccacgtctccctggtttttattacrattaaggaaaagatgtgttctctgcctggagcctggtttctcacccaggaaatgtacgttgccttgagagagtcctgtgtatctcttgggctgtcttcat

SEQ ID NO: 533610 - DNA, 201 bp, Homo sapiens
tccagatggtttcactggagaaatgcgctaattaggctggaggtcaaagagctgctgctgtttgaagcaggtgctattagttttgtgtgcaccagtggctytgaaggtgcatgaaaaatagaccacgtctccctggtttttattacaattaaggaaaagatgtgttctctgcctggagcctggtttctcacccaggaaatg

SEQ ID NO: 533611 - DNA, 201 bp, Homo sapiens
aaaaccggcgcgcctgtgtaactgtgtgtcattttctttgcatgattatttaagaatttgcatcacctcccttagcttcccattgttgtgttattcatctrctgaagaaaaatagcccatttgacaccatcagttatggggagttagtgtgccaggaaaaaaagattgtaaccacctcttaggatgtagaaaatgacttat

SEQ ID NO: 533612 - DNA, 201 bp, Homo sapiens
gaacctctgaatgcgggtacgagctgggccaggggcacacctggcccagttgtaggctgagcatgggatccaggctggtgcacaagccaggcatggccccrccagacgagtggatggggcaccttctgcaacaggcccagggccaagtgaggccctgggcagagacatcattggccatggaggtctctggcctggcaaagt

SEQ ID NO: 533613 - DNA, 201 bp, Homo sapiens
taacaaaccaatcagcatgtactcacccattctaagcccatacaagtcccagacccagccacgctgggtgggtgaccacttgactttgggtagggaccacyctcgcatcccctctctgctgagagctattctttcactcaataaaattcttcttcacccacctcacccttcgattgtcagagtaaccttattcatcttgga

SEQ ID NO: 533614 - DNA, 201 bp, Homo sapiens
acaaataaaaccatgtgtgacagaatcaaaggaatccagtaagttaactgcctgccagaacaacacactcaatgcccattaaaggaagacagtgtcatacmaactccctgcaatacatcatccacaatgttgagcatgcataaacaaaaatagacatacaaagaagcaaggctataatcaaggaaaaaagtagtcagtaga

SEQ ID NO: 533615 - DNA, 201 bp, Homo sapiens
gacgtcaatctgttgaacaagatgataacttgaccaattctgcattgcaactaatcatgtaaagacctaagtaggtgactactactgaagcctaagtttcrgtatgaatctgatgaagagccagggctcttcaatacagctgttttctttttacaaaggtcctgatgaagaacatggtcagagtttagccagtcagaaaga

SEQ ID NO: 533616 - DNA, 201 bp, Homo sapiens
gggttcccagtgaaaccacaccttcaagccaaagccaatttaaagcctgaaagccaagctacaagtcaaacccatggaatggactgagaacctctctttcygtttggtgtgcgttcctctgattgattctaacccttcacccattttacatattcctactcttccctaattgtttttttacactgtcatgcccacctttac

SEQ ID NO: 533617 - DNA, 201 bp, Homo sapiens
gttgccacttgggacccacagtgacttctggtactcagcaactttgtgcagggttccaacctcctcctcatcagccccagggtctgtatccttcctctatygattctggatgccttctttctgaagatctgcttggaatatggcagtctactcaataggttctgtctctctaggtgggagaagctcccccagctgcatcta

SEQ ID NO: 533618 - DNA, 201 bp, Homo sapiens
acctttattttacatggtcactcaaagatctaagtaccatcacactggcaaataagagctggagacagaaacagcccgtgatgctgtgccctgaaatttascatttacatatttccaacctcaagtgattttctttgttctgaaacctaagacctggtttgatatgtaaattacactccatttttttttcagttctcagat

SEQ ID NO: 533619 - DNA, 201 bp, Homo sapiens
ctgggaattgtttatcttacagctgcctcatagctgttctttcctcaaaagttgttcttactcagtctttggggttttgttaaattacgcatgcagattgrtattcatccaaagggttaatgggactcttatgcaggtttttggatattttgtgggcatgtctccctcctctctgtcccatacattctagctgccttgacc

SEQ ID NO: 533620 - DNA, 201 bp, Homo sapiens
gcctgtgtgagttctgggaattgtttatcttacagctgcctcatagctgttctttcctcaaaagttgttcttactcagtctttggggttttgttaaattaygcatgcagattggtattcatccaaagggttaatgggactcttatgcaggtttttggatattttgtgggcatgtctccctcctctctgtcccatacattct

SEQ ID NO: 533621 - DNA, 201 bp, Homo sapiens
caactatgagtgagaacatgcggtgtttggttttttgtccttacgatagtttgcgttgattctgctgttaatacttctggttatattatgaaattcttgawgtgaatttttcagctttatcagttcactttggttctttcttaaaatggccatttcatcttttatttcctatattgatttattgtattctttagagtcctg

SEQ ID NO: 533622 - DNA, 201 bp, Homo sapiens
caggctggtctcaaactcctgacctcaggcgatctgcttgcctcggccttccaaagtgctgggattacaggcgtgagccactgtgcccggcctcttcacaktaaccttttgatgaaggtattttgatacccatgttatagataactcaggttgccttgatcaaataatattttattattttattcataaaatgtttctgaa

SEQ ID NO: 533623 - DNA, 201 bp, Homo sapiens
ttttaacatgtgatttttttgtgtcatgtctaagccattaagaattagcctgattcactcaaagaaccactgataccaccagggccatggttaggtattamatgtactatcagtctatttgcttaatttggcagatgatttgaacaaatatataaactgcagtgtatgtttatatagtagtcaagtctctttttgataaga

SEQ ID NO: 533624 - DNA, 201 bp, Homo sapiens
tttcagcagctgtcttagttttctttgtgctgctataacaaaataccatagactgggtaattaatacagaacagaaacttactttctcacagttctggagrctgtgaagtccaagatcaaggggctgacagatttggttgtctattgagggctgcaccctctgaggggaagaactttgtgtcctcatatggcagaaggaat

SEQ ID NO: 533625 - DNA, 201 bp, Homo sapiens
ttttacaagagagttttcttcccttggcacaggcttctctggcctgaatttgcatgtgtcttcctttttcagcagctgtcttagttttctttgtgctgctrtaacaaaataccatagactgggtaattaatacagaacagaaacttactttctcacagttctggagactgtgaagtccaagatcaaggggctgacagattt

SEQ ID NO: 533626 - DNA, 201 bp, Homo sapiens
taggaatcactcattactttgtagggggatatcaagtgacctataaaactaccttcctccccacagtcccaaaaattttacaagagagttttcttcccttrgcacaggcttctctggcctgaatttgcatgtgtcttcctttttcagcagctgtcttagttttctttgtgctgctataacaaaataccatagactgggtaa

SEQ ID NO: 533627 - DNA, 201 bp, Homo sapiens
tcgatggtggtgctggtaactgagataggaaactcagaaaataataatagttcttaaaatgcaggaatggaaaaggtacaaagagagtttgagacagatcraatctgagatactatgggacgcttgaggagaaattttcaacgggtatttgcatctactcatttaaagctggggcacgaaatcaaagctagaaatataaat

SEQ ID NO: 533628 - DNA, 201 bp, Homo sapiens
ggaaaggaaatgaagataggaggagaaattaatgaaatggaaaacataaagatcatggagaaaatcaatgaaactaaaagctggttctttgaagtggtcartgaaactgataaacctgtagtaagactgacaaagaaagaaaaagacaaaattgtcagcatcggcaatggaagagaggctatccctgcagattaacaaaga

SEQ ID NO: 533629 - DNA, 201 bp, Homo sapiens
aactgataaacctgtagtaagactgacaaagaaagaaaaagacaaaattgtcagcatcggcaatggaagagaggctatccctgcagattaacaaagaatgrgctgttggtatacagaacaacttggatgattctcagaacatgctgagtgaaagaagctggtctcgaaaggttacgcactgtctggtttcatttatataag

SEQ ID NO: 533630 - DNA, 201 bp, Homo sapiens
aaaatatttactcctattatgtaactgcatgtctgcaattccttacatcaaatacttctagggtgctaataagccagtaacaagggagcaaaacaaggttytcatccttgttcagcccactgtgagccaggatcatgggggcaacctcactgttgcttttaagatcacacagtcactgtgtaggacccacatccagttagg

SEQ ID NO: 533631 - DNA, 201 bp, Homo sapiens
aacattagcacaagactggagtataattaagtgaaagttatgcggtactgaccatacctgtttctggaatttagtgaaaggagaagtcaggctagaaccayaggcaaggtttcttggcaaaagtggaacatgaattaccctttgaagaatgggtggaattttattaaactaaagagaaggaatgtattccaagcaaggagc

SEQ ID NO: 533632 - DNA, 201 bp, Homo sapiens
  misc_feature (1)...(201): n = A,T,C or G
agtgaagtattatcccaaagttcttttactttgcatctccctgaccactagactagctggaacctcttgctctagcagcaccttgcagttccctttgttangacttaaattggctcatttagttttgttcttcctcaggggaaggtaagcttctgggggtggtgactgtgtctgttttaacacagcatcctcattgcctgc

SEQ ID NO: 533633 - DNA, 201 bp, Homo sapiens
ttttttctatgcttgtatcaatgtatcatcatatcaatgtatatatatatgtaaacatacgggttttataggtatttttaaatgagactgcattatatcartttttctacatgttgctttccttactcaatgtaggtcatagaaatacccttggcaatggtagggctcattcttttcagtggctgcatgctgtggatatgc

SEQ ID NO: 533634 - DNA, 201 bp, Homo sapiens
agaatcaggtcaagttctaaagcagatgacggcagtaggattggttggcaagtgcaaatggtgagggctccatccatttttcatgaagttataattaacaygctgtctgcctcccacaggttcaacctttgggaatgaagaacagccagttctgaaggcatctctgccttctaaggacacacccaagggggccggccgggt

SEQ ID NO: 533635 - DNA, 201 bp, Homo sapiens
tgactaaagggagttcttttccacatagggttccagaaaaatacttttcaaggtcactcactaagaatcaggtcaagttctaaagcagatgacggcagtargattggttggcaagtgcaaatggtgagggctccatccatttttcatgaagttataattaacacgctgtctgcctcccacaggttcaacctttgggaatga

SEQ ID NO: 533636 - DNA, 201 bp, Homo sapiens
gtgcttcacctctttttaaagccgggacacggcggccttttagagatttcaaactggagcgatgaaaggaaagaagcccttgacttttccacacgaaaatracttacataagctacctgggcataattcaaacacgctctgttgtatgagagccctgcgctctgttcatgatcctttatgatagcaaaagccatttattta

SEQ ID NO: 533637 - DNA, 201 bp, Homo sapiens
gtatgtctgtgtgtgtgtgtgtgtgtgtgtgtgtgtgcatgcaggctgctcctggcttttgtggagccccgtttagtgcacgggatttgtgtgacagatayttatgcagtgactaaagggagttcttttccacatagggttccagaaaaatacttttcaaggtcactcactaagaatcaggtcaagttctaaagcagatga

SEQ ID NO: 533638 - DNA, 201 bp, Homo sapiens
ttatttttccaacagattgaaaggttttggacaaagattccatgaaaacctcctataaacaggaattggacaattaaatactgttgtaatcagcctttctsctggtgggttcatagctctgagcttcaagtaaatacggtttgatcaagaatggcctttaaatgggagtgagccattgtgcaccacgtccgttctcacact

SEQ ID NO: 533639 - DNA, 201 bp, Homo sapiens
tgcattctttgatttcttcctaaatatgcttttctttagaaacaacagaaatctccacaattttaaacagaatttcaggtgttaagagaaagaaaaagaayaatctcttactctaaatggttgaataaaatgcctggatgttaggaacactaaagccattttaataatattatcatttttatgcaggccttatctaaatac

SEQ ID NO: 533640 - DNA, 201 bp, Homo sapiens
gtttagagaatggcaggacccttttcaacttaaagcaatagagaactctacaaccaactttgtttctcagctttttcttcctaaagtcttagcactggtgycggagccttgatctgtgctctgacagtgattgagtgccaccagtcctgaaccaggattggtttcacaaggtagtttggtgtcacagagcggctaaacttt

SEQ ID NO: 533641 - DNA, 201 bp, Homo sapiens
agatatgctcactttcttcctgtttattggagtttgtgtttctgtcttgttcctttgctggaccaagcagctcgtgtgttcatcagtgatttgccaagtgygggtttataacaataacatcagccagcatttgctcgatgcttactgtatctttcctgaatttctgcaaatagacacagtcacatgaaatatgaacttctg

SEQ ID NO: 533642 - DNA, 201 bp, Homo sapiens
attctaacaagtctttggggatgggcacctatggctgtgctccactgcagccattcccatgccaaaccctttgggacccatgcagactggagttctgtctytgtcacctctccaggcagttctccccatgaattcaaatatatctgtgggtttcgtggagtatcctgcagctaggatcctggaggtctgtggagagagtag

SEQ ID NO: 533643 - DNA, 201 bp, Homo sapiens
ggtttatgcctcgagttaacaaagcaggattgcacacttgccatttaagagggcaggtctgttattaagtgcttttaccaccattttaaaaatgcctaccwcagggacctgctagaggcagccaaatcaaagagcaaaaaaccatgtgttgaaagattcatggtgcccctgaggtaaagcacccccctcaggaggagtctg

SEQ ID NO: 533644 - DNA, 201 bp, Homo sapiens
ctgccatttttgacaacatagatgaattttgaggacattatcctaagtgaaataagccagtcacagaagcacagatactgtgtgatctcaactacatgggrtatctaaaaaggtcaaactcatagaagcagagagtggaatggtggttgccaggggctacaggaaggggaggtgggggtgctgccgttcgttgggtataaa

SEQ ID NO: 533645 - DNA, 201 bp, Homo sapiens
gattgtctttaaatgtggtatctacgtaaagcagaataccatagggcctttgaaaaagaagagaaatctgccatttttgacaacatagatgaattttgagracattatcctaagtgaaataagccagtcacagaagcacagatactgtgtgatctcaactacatggggtatctaaaaaggtcaaactcatagaagcagaga

SEQ ID NO: 533646 - DNA, 201 bp, Homo sapiens
ctttaaagcctgcatggtggctcttcctgagaaatatgatgggaaagaggtcaggagtgggtcaccaccacaccaacaccacttctcatcccagacccacsatgtgccctgtgagctgtctgtgaccaccaccctccagaagttggccatctaattatccgatacaaacctggtacttcctaagcagatgtgcattctagc

SEQ ID NO: 533647 - DNA, 201 bp, Homo sapiens
tggatatgtcatctttcaactgttagattgttttactggttccttgaattaggtttcagccttctcctgtatctcattgagcttccttgacatccatattytgattctatgttgttaatttcagccatttcaaactggttaagaaacattgctggggagctagtgtggtcatttggatgtcttaagacactctggctttta

SEQ ID NO: 533648 - DNA, 201 bp, Homo sapiens
gttcagtttggttctttcttaaaatggatatgtcatctttcaactgttagattgttttactggttccttgaattaggtttcagccttctcctgtatctcaytgagcttccttgacatccatattctgattctatgttgttaatttcagccatttcaaactggttaagaaacattgctggggagctagtgtggtcatttgga

SEQ ID NO: 533649 - DNA, 201 bp, Homo sapiens
caaatctttatacctaggttaggatatatatatatagatagatagatatagatacagatatagatgtagatatagatatagatatagatatagatcgatcrtgattcatcaaacaaggtagaaaagctcaacactgggcatagtgtcagtcaagagtaatgcaaaaagttggttaagtgggtctacgtgacaaaatagaaa

SEQ ID NO: 533650 - DNA, 201 bp, Homo sapiens
aattctttgttggaacttcttttctttaaggatgctaaatatagggccccgatctcttttggcttgtagggtttctgctgaaaggtccactgttaagctgrtggagtttcctttgtatgtgacctgccccttatttctagctaactttaaggtcttttctttcatattgaccttggagaatctgatgactatgtgctttga

SEQ ID NO: 533651 - DNA, 201 bp, Homo sapiens
acgcagctcttattcattcatttttattgctgcccaaactccattacatgcattctctgccatgctcgtgggtatctcggtttgtttccaatgtggaactrttgcaaactaagctgtgaggagcatatctgcacatatcttttgtgcacctgtctaatgtttctctagggctagaagtggaattgttgggtcatgtgcaca

SEQ ID NO: 533652 - DNA, 201 bp, Homo sapiens
gtcccacttctgggtatatactcaaaagcattgaaatcggggtctcaaagagatatttacactctcatgttcattgtggcactattcataatagtcacgaygtggaaacgaatatcaacagatgaatggattgtctttaaatgtggtatctacgtaaagcagaataccatagggcctttgaaaaagaagagaaatctgcca

SEQ ID NO: 533653 - DNA, 201 bp, Homo sapiens
ttgtctttagagtctttaaatattagataaagataccaaaactctctgtattctcctgtaactcgttcaacatttataagattcatccatgttcatatacrcagctcttattcattcatttttattgctgcccaaactccattacatgcattctctgccatgctcgtgggtatctcggtttgtttccaatgtggaactatt

SEQ ID NO: 533654 - DNA, 201 bp, Homo sapiens
gtggagaaataggaacctttgtatactgtcggtgagcgtgtaaaatggtgcagccattatggaaaacagttcactggttccttgaaaaattaacactagarctaccatatgacccagcagtcccacttctgggtatatactcaaaagcattgaaatcggggtctcaaagagatatttacactctcatgttcattgtggcac

SEQ ID NO: 533655 - DNA, 201 bp, Homo sapiens
tgaactgaaaaaggcatatctatattttatgtctcattgtacgtatatagcttgccccaggctgttgtcttgcccccagcagtatttcctaatggaactgycattatatgggcccacccacatccatccacccccttctttcctcatagcagtgataatctgtaaactccgctaattaacatttcataaagaatgttacat

SEQ ID NO: 533656 - DNA, 201 bp, Homo sapiens
agaatcatatcatcagtgaagtgggataatttgacttcctctcttcctatttggatgcctttatttatttctcttgcctgattactctggctaggacttcyagcactatgttgaataggaatggtgagagtggacatccttatcttgttccagttcttaatgagaatgctttcagcttttgcccattcagtatgatgttgg

SEQ ID NO: 533657 - DNA, 201 bp, Homo sapiens
agatacctatattgatatcttttaaaattattctgaagttttccaaatattctgatactcaacactcaaaatgaatatgaatttttcccgctttgttaccytcccagtccactccccgaccccgcctcagagccatgtgcaagtggtatacatacgcattctgtgcctgctgtgaaacttttaccatggagaagataatgt

SEQ ID NO: 533658 - DNA, 201 bp, Homo sapiens
agtaaaatttaaaaaaatagataaggaaatcatgggaagaaataacaaaggtaagaaaatgatacgaagccagagttaacatcagcacatccaaaatgaayaccacaccacaaagataacatttaacacctgttaggatggctcttattaaaaggacaaaagataacacatgttggtgaagatgtggagaaataggaacct

SEQ ID NO: 533659 - DNA, 201 bp, Homo sapiens
aggctcgtgttctgtcagtgacttatattggattatcgcctcttagtagaatttgagtttggctcccttggtacatgatttttgatgggcccattctcaayttttgtgtccatttgaactgaaaaaggcatatctatattttatgtctcattgtacgtatatagcttgccccaggctgttgtcttgcccccagcagtattt

SEQ ID NO: 533660 - DNA, 201 bp, Homo sapiens
tattctttttgtggctatcatgttcttgatttggttcttagctcaaatgttattggtgtatatggtactgggttttatatattaattttgtattctgaaamtttactgaggacgtttatcatttctaggagccttctgaaggagtctttagggttttctaggtatagaatcatatcatcagtgaagtgggataatttgact

SEQ ID NO: 533661 - DNA, 201 bp, Homo sapiens
gtctccctatgtttcccaggctggtctcaaactcctggctccaagcaatcctcctgccttgtcctctctttatgctattttatatttattgtctatccccractacaagaatatgagctccagaattggacaggggcaggacaggagcagaacagtgtctcaggaacatgctcagtaactagtataataaaattaatgaat

SEQ ID NO: 533662 - DNA, 201 bp, Homo sapiens
aaattaagccaacttacaaagcaggcattgtaagttgggctaaaaaattagagaaatatcttaaggctcgtgttctgtcagtgacttatattggattatcrcctcttagtagaatttgagtttggctcccttggtacatgatttttgatgggcccattctcaacttttgtgtccatttgaactgaaaaaggcatatctata

SEQ ID NO: 533663 - DNA, 201 bp, Homo sapiens
gggcactatggccattttaacaatgttgattgtttctatccaagagcatggaattttttccatttctttgtgtcatctattatttctttcagcaatgtttygcagtttttgtagagatttttcacctccctggttagctgtattcctaggtattttattctttttgtggctatcatgttcttgatttggttcttagctcaa

SEQ ID NO: 533664 - DNA, 201 bp, Homo sapiens
gaggccttccccaggtcacaacatctaccccacactctgctttgttttttttcatggcattttgcactgtatagcatactgtggaattctattccgtaatkattctatttctttcttggaggcagggtctctctgtgttgtccaggatcccaggcaacagtccagttgtgcgatcatagctcactgcagcctcaaactcct

SEQ ID NO: 533665 - DNA, 201 bp, Homo sapiens
gattactgaggctaaacttccttctctaggggcccaagtctggcctccatctacatacaaggaacttggattcatttattgttttcttttggctcccaacytaacaaacagctgaaagttaacattgtttataattgtcaaagtcaatttagactttcctgctgggaatcattttattttaaaaataaaaaaataattaag

SEQ ID NO: 533666 - DNA, 201 bp, Homo sapiens
agtatagtttgaagttgaatagtgttatgcctccagctttgttctttttgcttaggattgctttggctattggggctcttttttggttccatatgaatttkagaatacgtttttctagttctgtgaaaaatggcattgatagtttgataggaataacattgaatctgtaattgctttgggcactatggccattttaacaat

SEQ ID NO: 533667 - DNA, 201 bp, Homo sapiens
agacaggcccacattttccctgtgtcccctacctagggcagggcctgacccagagctatcagcagttgtttattgaataaatgcatgaattgaataagtaracatgtagagtttgaaagttcaccaggttgttccagcgggcacattacaatgtgggactgattccttgaagatgggctgggattctctatgaccatgtgg

SEQ ID NO: 533668 - DNA, 201 bp, Homo sapiens
aatgaggtttgtttcttgcttgttgatttgtttaagttccttatagattctggatattaggtctttgttgcatacataatttgctaacattttctcccatyctgtaggttttctgtttatgctattgataggttgttttgctgtgcagaagatctttaattagatcttacttatttatttcttctttttgttacaattgct

SEQ ID NO: 533669 - DNA, 201 bp, Homo sapiens
aggggggatttatatgtgaagtccatgagggaaacaagcatactgacttgcattggtatatacaaagggaagatatgttcaagaatgattctgatgctttrtttctaggtttctataacgatatcaataatgcataaaggaggtgggcgcagctgagaggaatgtttgttgtaaatgccaactcctccaagaggtcctccc

SEQ ID NO: 533670 - DNA, 201 bp, Homo sapiens
atatagattgggaaaacagccatagctctgtcttaatgtaagcctattcctgagctgaagaacttttatttaccataacagctttgttgagatataattcrtgtactatatgcaattcacaatttaaaggatacaatttagtggtttttagtatattcacagaattatgcaaatatcactgcaattttataacattttcac

SEQ ID NO: 533671 - DNA, 201 bp, Homo sapiens
actcacagttctgcaggctttacaggaagcatgacactggtatcagctcagcttctggggaggcctcagggagtttttactcacggcagaagacaaagtargagcaggcacatcacatggcagaaacaggagcaagagagagaatcgaggggtaggggtaggtgccacacacttttacaaaacaagatctcatgagaactc

SEQ ID NO: 533672 - DNA, 201 bp, Homo sapiens
ctggagttctgtgttgagaaagacccaaggccaccttctggcttagttagaagttaatattttctctggatgaatggggagtagtgaaatgcgtctctgtyaggctgttcttgcattgccataaataaatacctgagactaagaaactaataaagaaagggggtttaattgactcacagttctgcaggctttacaggaagc

SEQ ID NO: 533673 - DNA, 201 bp, Homo sapiens
atatgcactttctcatttaattctcagataagtctaatgacggaaggtaaacaagccatttaacaaaagaggattaatttgttttcttagaagaatgttaytagtatgtttcaaagcaggaatgggacttgggcagagcctatggtgtttgactgtactatatggcactcttattactgttaaagactttgctttcaaagc

SEQ ID NO: 533674 - DNA, 201 bp, Homo sapiens
agactttattcaggactattgtgatcaacatcaagacttttgcaataggagagggagatgggactcaactgtgaatactacaaagacagccagtgacttayagcccatgggcacggcgaagggtcaggggatggaacatttctaagaggagacatcaagggtaagggatttgcactaatctgacttgacaggtttcttgct

SEQ ID NO: 533675 - DNA, 201 bp, Homo sapiens
accacaaacaggataagcccaaggaaattcatatctagatatattctaattaaactgctaaaaactaaagacaaaaaatactgtaagcagtcaaagaaaawttacacattacctatcggggaacaacaattcaaatgactgcagatttctcatcataaattatgaaggcctgaagacagtggcacattttcaaagtagtga

SEQ ID NO: 533676 - DNA, 201 bp, Homo sapiens
gagcattttgatttgcttcttaattaaatcatttaccagaaactaaacagcattcttcaactttcaatcatattgacaacctgtttttgacttctttactrtccaaatatgatggcttttagaaagttcataagcatcacaatttttaaataaaaagatgaagtccagtacagtttctcatttattgtaacggaaatccaa

SEQ ID NO: 533677 - DNA, 201 bp, Homo sapiens
atacatttactttcttaacttctttactggttgcctggaatgtcaagaacgtttgacaatgttggatggatctttatcaatataatagtaaaacttaaaaygctatgattttagttgattgagatatttttgtaacattacagagtcattaaaaggagaatcaatacaaaaagggaaaatggcaaaacaaacttaattctt

SEQ ID NO: 533678 - DNA, 201 bp, Homo sapiens
actgcaatactgacactacgagtgcttctattttagtcacctatctcctgggttgagaggggctgatcttgttcccaattttctgtatctttgatcttacytctttattttcctttcccggaactagttaactagctagctagctctagggctctctcagtgtctgtctctgactttctgtctctcttaaaccacagtttt

SEQ ID NO: 533679 - DNA, 201 bp, Homo sapiens
tcaaacagtgtctatttataagcagatctgtccagcaacaaagcctgacatttgcagcatttatatatgacttgtaccttaccttttgctaatttccttcygttggtagcactttgtcatgttcattccacaatccttcactttccatttcccttctatgacattgggttaactctctctggtggtcgttttattctaatc

SEQ ID NO: 533680 - DNA, 201 bp, Homo sapiens
aacagttgagtagcattagtagatttagaatcagttaaaaatcattgaccaactcttctaattctgaaagatattagtacaaggtcactcagtatttgacrtatcttttcaaacagtgtctatttataagcagatctgtccagcaacaaagcctgacatttgcagcatttatatatgacttgtaccttaccttttgctaat

SEQ ID NO: 533681 - DNA, 201 bp, Homo sapiens
tttttttttttttttttgagccaaagtcttgctgtgttgcccaggctggagtgcagtgatgtgatctcggctcactgcaagctccgcttcctgggttcagrtgattctcctgcctcagcctcctgagtagctgggactacatgtgcccgccaccacgcctggctaatttttgtatttttagtagagacagggtttcactat

SEQ ID NO: 533682 - DNA, 201 bp, Homo sapiens
ggcagacaggccatatccttaccaaatcagccctaatctactctctgagtgcttcctggtagaatgtaaggttgcatctgcccacagagttcaggcagaastaggactgcttggctggaagctctagcaggtgtggcccatctggctgtgagaggcgagggtgggtgaagttgcctgccatgccatccaggtgtttccaag

SEQ ID NO: 533683 - DNA, 201 bp, Homo sapiens
ttcgatgcctttgggtgtttgattatggcataaggtggatttagtcaactggcttcaaagctagtttgctcctacgtcttgcaggagccccttccaattaytgtctccatgaccacatttctggtccacaaggctccctgatgcaggagtcgcagttggcagacaggccatatccttaccaaatcagccctaatctactct

SEQ ID NO: 533684 - DNA, 201 bp, Homo sapiens
cctgtgttttctttgcttggtagatttttcttcctctctttactttgagcctgtggatttcattacatctgaaatgggtctcttgtagacagcatacagtmaggttttagtcctttatctagcttgccattctgtgtattttaattgaggcttttagcccatttaccttcaaaattaatattgttatgtacaggtttgatc

SEQ ID NO: 533685 - DNA, 201 bp, Homo sapiens
tgtatgttgtgtttttagttagagagtttggtagatatatgttaggcccattcagtcaaataattgagttcaggttctgaaaatctttgttagttttctgyctcaatgatctgtctaatactattagtggggtatttaagtctcccactattatcctgtggttacctaagtctcttcataggtctctaaaaacttgctctg

SEQ ID NO: 533686 - DNA, 201 bp, Homo sapiens
actactgaacagtcatgaacccgtttatgcctagtgttccattactggaacgctaagcttgtgggagttatttatatcctatcgctcaatgtcattgccartgtctgatttttcacacaaaagaatttacagcctctggcataaatgggttaaaacatggttgaatattgaaaacacatacctatatagtccccatgtagc

SEQ ID NO: 533687 - DNA, 201 bp, Homo sapiens
gttcttggtcactgggtcaccctggtccctgttctccctgcggtcatcatggcctcctccctttgccctgcaccattgtcctgacctcaggttcagtgtcyactagcatgattgctacttatttgtcattgtgcccatgcagacagctgtcggaggaaaatgctaacctccaggaatatgttgagaaggaaacccaggaga

SEQ ID NO: 533688 - DNA, 201 bp, Homo sapiens
tctagtaattttagcacttttaaaactgtttatttctctatgccataggatgctttcagtgaatgaaatcttctccactaaaccatgatgatttaagttgyttgaaaggcagcaccatctgttttccactgggcttcccaatagaacacaacacaatttcagttgaaatcagttgctatttatgttttcaagatatttttt

SEQ ID NO: 533689 - DNA, 201 bp, Homo sapiens
tccgggcagcatacccactccagctctccgcttccctcctttcagtcgctggcctttgctctgtccagtggacagccagtgcctcccctgaccgggcagarggcctgtgggatgatgggtattggccagagaggctctgggaacagatgtgtcattgggccaaatggaaatcatgattcaaccaaagttcttggtcactgg

SEQ ID NO: 533690 - DNA, 201 bp, Homo sapiens
ccaggaggaaaaaaaaatgctgtgcttttcaaggactcatgtgcttaggtcatctcccattcttaaaggcaactgtgccacagaacataacctaatcccaygagtcaaattcatcatatccacagtcttggattctgcagggtgtgtccaccaggggacatggctgtttgggagacatcctagcatacaacctacaacacg

SEQ ID NO: 533691 - DNA, 201 bp, Homo sapiens
tttacagttactcaaaggaagactagacactctgttagcctttcacaactagatatccagcacatatacacaattgggccatcgcttcactctgaacatgkgtttaccagagcacaaaactttgtgttgcaataagtgcctgtttaccgcacacctatggctctgaggacccagcatggcccctacccccagagcccaaga

SEQ ID NO: 533692 - DNA, 201 bp, Homo sapiens
actcaggactctaaagaggtacctcaggcagtgatcccctgcctggagttggacccccctacaaagagccaggttgtggcagtgacctccccgtgattccragggctgccacatcaccaccaaagtccagctctcctgcttcggcacaaggctgtgacttgtcattgatgttttgggtcacggaccttttccactcacgga

SEQ ID NO: 533693 - DNA, 201 bp, Homo sapiens
actctcaaaatgtcctgagaacatgtgcccaaggtgattgggttacaacttgatttttatacattttagggggacaaaagttacaggcagacatccatcartacctgtaaggtgtacaggtaatcattggtttggtccagaaaggtgggacaactagaagcagaggggaggggaggcttccaggtcttaggtggacgattg

SEQ ID NO: 533694 - DNA, 201 bp, Homo sapiens
ttacaggtatgagccactgcacccagcctccgttctttctttatagcaagagtcacattgtttgttgactgatattcagcttatggttcactgggatcatyctttctatctaacgtatgtcaaatagacagatgcacttggggtctctgccagctgcttcccatccctctatctgattttacctatcagttgtccaatatt

SEQ ID NO: 533695 - DNA, 201 bp, Homo sapiens
ttctgaatttgaatgttggcctgtgttgtgggaagtcagggaccccgaacggagggactggctgaagccacggcagaagaacataaattgtgaagatttcrtggatatttatcacttccccaatcaatactcttgtgatttcctatgcctgtctttactttaatctcttaatcctgtcatcttcgtaagctcaggagggtg

SEQ ID NO: 533696 - DNA, 201 bp, Homo sapiens
ttggaagccattatcctcagaaaactaatacaagaacagaaaaccaaacaccacatgttctcacttataagtaggtgctgaataatgagaacacatggatrcatgatggggtcaacacacactggggcctgtggggtggaggatggggggagggaaagcatcaggaagaatagctaatggatgccgggcttaatacctagg

SEQ ID NO: 533697 - DNA, 201 bp, Homo sapiens
accttgtggagtagctactgttgtcacctattttacacaggaggaaacaaatgctcagagagttcaagtaacctgcctcaggtcacacagctaaggacacrgtaaagctgaatgtctgggcccttaatcatatgctgaacaacctcttcattgtgtcttttacctaattccacctccaacttgaaaataattgatattcgt

SEQ ID NO: 533698 - DNA, 201 bp, Homo sapiens
ggtgtttgggcagatgaccaggatggggaggttgtaaccattccaggtctctttgacccaatccccatgtatttaccagagttgattttcagtttagcacygtgacaggtaccatgaagttgctaatatcaccagtgggaaaataaagatggagtcggggaggttggctttgttgtcttcgtacttttttgtcgtttacct

SEQ ID NO: 533699 - DNA, 201 bp, Homo sapiens
gcataacaggtgggcaggtgaatgaaggctcttcccctaagaacaagagaaagccagttaagctgtggggcagacatgtgacaatctaggtcatgagcccmtgaagatcactcttgtacagaacaaacaaaggaggggagaggctctggccagagtgaagtgagggagacccgcgaggggctgttaaaggaacaaggcgag

SEQ ID NO: 533700 - DNA, 201 bp, Homo sapiens
gagggagacccgcgaggggctgttaaaggaacaaggcgagagatgatggcgtcctggacaaaagtaagcaggagcgaggcgggtgacgttaggagacacgygtgtgggaaaaaccagtaggccttggtgaaagattagttatgggggatgtttggggaaggtgtttagggagaccttggcttcagattgcttaatgctcgc

SEQ ID NO: 533701 - DNA, 201 bp, Homo sapiens
tgagccactgcacccagcctccgttctttctttatagcaagagtcacattgtttgttgactgatattcagcttatggttcactgggatcatcctttctatytaacgtatgtcaaatagacagatgcacttggggtctctgccagctgcttcccatccctctatctgattttacctatcagttgtccaatattgtccaacct

SEQ ID NO: 533702 - DNA, 201 bp, Homo sapiens
ttatttcttttcttttttaaggctgattagtatttcatagtacgtttgtaccacattttctttatccactcgttaattgatgggcatttgggctgattccrtatttttgcaattgtgaattctgctgctctacacatgtgtgtgcaagtatcttttctgtaaaatgaattcttttcctctgggtagatacccagtagtggg

SEQ ID NO: 533703 - DNA, 201 bp, Homo sapiens
cctgaccaggacatagttggatgtggaggaaaagcaccagtggcaaccatttgagaaaactgctctgagagagattgaggacaaaggtaggggatggagattttttttaccaaaggaagaaggagttccacatagtatggaggaagcatcagaggtagaaaggttggggccagggatggaaagaatgttgggatttgctgg

SEQ ID NO: 533704 - DNA, 201 bp, Homo sapiens
cagactaatacaagtagagtctgaattaacctcttcagtgtgccacaagggtgccatgggtgtttttctctataagcttgagggtcaggatttttgtggcyacagaggtctaggcaacagcaactaagatatttaaggtcctgtggagttgtctgcttctaaggaatgccgatctcagtactccacattatggcctttgtt

SEQ ID NO: 533705 - DNA, 201 bp, Homo sapiens
cctttctgtttcttatcttttcttacttatattgagatttacttgcaggaatttgcagcctattgtatgtgagattaagagcctataaaaatgttttaggttttttttttttttgatgtgctgatttctttttattaaaaaaagtatatagcattctcttaaatcttgttttcccattgagatgtgctcagtgaggatcct

SEQ ID NO: 533706 - DNA, 201 bp, Homo sapiens
cacacccaggtaatttttgtatttttagtagaggtggggtttcaccatgttggccaggctggtcttgaactcctgacctcaggtgatccaccccccccccycaccgttggccttccaaagtgctgggattacaggcatgagctactgtgcctgacctcagaggttactttatagggtttaagaacactgggtttaactagt

SEQ ID NO: 533707 - DNA, 201 bp, Homo sapiens
acaccacacccaggtaatttttgtatttttagtagaggtggggtttcaccatgttggccaggctggtcttgaactcctgacctcaggtgatccaccccccscccccaccgttggccttccaaagtgctgggattacaggcatgagctactgtgcctgacctcagaggttactttatagggtttaagaacactgggtttaac

SEQ ID NO: 533708 - DNA, 201 bp, Homo sapiens
cctggttcttacaaagcaagtgaccccatcctcaccactccaaactctcactttccttttgtctcctcatatctcctatcctgtatattttctggagcctrtctctttctccctgattctcaaatatgccccaggggtgctctccctctcccttggcatccacctcggtcacaaccatcagcgtcatcttacccccctctt

SEQ ID NO: 533709 - DNA, 201 bp, Homo sapiens
actgtgggtctcccctctgctgagagctgagtagacttcaggacaacctgcccgtggacatgagctactcactgcaggtctcccctctgctgagagctgawcagatgttgggacaacctgtctgcagagagtagctacccactgcaagtctcctctgagatgttctgacactcaataaagcacctctttgtctggctcacc

SEQ ID NO: 533710 - DNA, 201 bp, Homo sapiens
ttaaaaaaagtatatagcattctcttaaatcttgttttcccattgagatgtgctcagtgaggatcctgaattagctattatcatttgttatttctttttcttttttttttttgagatgacagcctcgtcctcagagtgagccgttattcttgtttatgttcagggactcaggggactaatggagaccaagcagttagtgac

SEQ ID NO: 533711 - DNA, 201 bp, Homo sapiens
acatgggacagaggccaagtcaggactaagggtggctcagtgtaggcccacagacaccccttggcacaaacagtctggacactgtgggcaccatggatggmaggttaatggcagcaggaggcagatgggctcctgggcagaaaggggtgggtccctagtgaaaccccaccctcatgtcagggatagcccaaggcctggggg

SEQ ID NO: 533712 - DNA, 201 bp, Homo sapiens
ctgcactctcaggcccaggaagactccctttcctacaggctcagaagtgcctgctgtcactgcctgacctctcccctctcctggcatctgctccaattgckgagcaaagttgtggccaatccccagtgctgtcacaacccagctaggtgtgcacacactcaggacatcaccaacatgccagctctgagctgtctcggcccc

SEQ ID NO: 533713 - DNA, 201 bp, Homo sapiens
ggataactgatatttatgatcttttctttttcaagtgaatatgctatatctttgtgatggaggtggtggcctgtctggagcagacgctgccatgatgccasctgcagtgggagaggcgtagctggggctgcatgctccacagagccagcaggagccaggaacgggtgagaaccccaccccttccaagttggaggggtggga

SEQ ID NO: 533714 - DNA, 201 bp, Homo sapiens
ttgttcattcttctttattgttttctttttatttttgtctgacagttattttggagaactggtctttgaactctgagattcttttctcagccaggttgatkcttttttttttttttattattatttttttatttttttattatacttttaagttttagggtacatgtgcatgtgccatgttggtgtgctgcacccagtaac

SEQ ID NO: 533715 - DNA, 201 bp, Homo sapiens
ccagccgctggatgaccttgggcaagtctccagacctccatgaggctgcagcttctcaacatccagggtctgttgtgaggatctaatgggtggaaaggaargcactttacaaactgtgtagccctgcagaagtcagaggacctcgccctgtttattacgccagccttgatgatctgaccatggaggctgagtccttcccat

SEQ ID NO: 533716 - DNA, 201 bp, Homo sapiens
cccacatccagggcacactagtgcatggggtgagctcccaaggccttaggtagctcccccactgtggctttgcagggtttagtctccaaggctgctctcaygggctggagttgagtgcctgtggcttttccttgctgagaggtgcaggctgccaatggatctaccattctggggtctggaggatggcggcccccttcccat

SEQ ID NO: 533717 - DNA, 201 bp, Homo sapiens
gtggtgcgtgcctgtagtcccagctacttgggaagctgaggcaggagtatcatttgaacctgggaggcagaggttgcagtgagccaaggtcacgccactayactccagcctcggcaacagactgagattccttctcaaaaaagaaataaaataaaataaaaatttaaaaaataaattactagactgtgttcccttattaaa

SEQ ID NO: 533718 - DNA, 201 bp, Homo sapiens
gctttagatcgtttccaaagtacactcctaaaatataaaaatattaaaaatgtataagtaaaaggatggaaaattaatatttataccaaaaaaactaaacygaagaaagtttgtggcattatagttgtaaaacatatctattgtggaataatgaacaaatactaaactaccctatgcttaaagtatagaacttggtaagtt

SEQ ID NO: 533719 - DNA, 201 bp, Homo sapiens
cccctgaaagaaacccagattctttatctcccacccataatgctgccattcctgtcatttcaattttgaaagatatcttttccctccaaggcagctggatyagttatatttcacctggagtccatcgagtgacagtttccttatactcttcctgtattatcagaacatttcatctttatcagccttgcaggtgaaaaatga

SEQ ID NO: 533720 - DNA, 201 bp, Homo sapiens
acattttcatcacccctgaaagaaacccagattctttatctcccacccataatgctgccattcctgtcatttcaattttgaaagatatcttttccctccawggcagctggatcagttatatttcacctggagtccatcgagtgacagtttccttatactcttcctgtattatcagaacatttcatctttatcagccttgca

SEQ ID NO: 533721 - DNA, 201 bp, Homo sapiens
gttttcccccttttaaagaatttgcgatctcaccagaaacaaattacccaacaaaatgacaggcattgaagttactgaaatccttaagatcattgttgagwgagaatgtggtgaattttaatccctaaaaacaactcagtttcaaggcactgagtaactactaagatcagcatattgcaatcctaaaacctgacagatgta

SEQ ID NO: 533722 - DNA, 201 bp, Homo sapiens
gcttttccttgctgagaggtgcaggctgccaatggatctaccattctggggtctggaggatggcggcccccttcccatagctcccccaggcagtgccccaytggggactctgtgtggatgctccaaccccacatttcccattggctctgccctagtagaggttcttcgtgagggctctgcccttgcagcaggctcccgcct

SEQ ID NO: 533723 - DNA, 201 bp, Homo sapiens
tctgcccttgcagcaggctcccgcctggatatccaggcttttccatgcatcctctgaaacctaggcagaggctcccaagcctcaactcttgcactcttctrtatacctgaaggcttaacaccacatggaacctgccaaggcttacagcttgcaccctctgaagcagcagcctgagctgtacctgggaccctttgagccaag

SEQ ID NO: 533724 - DNA, 201 bp, Homo sapiens
atccaggcttttccatgcatcctctgaaacctaggcagaggctcccaagcctcaactcttgcactcttctatatacctgaaggcttaacaccacatggaasctgccaaggcttacagcttgcaccctctgaagcagcagcctgagctgtacctgggaccctttgagccaaggttggagccacagtgattgggatgcaggga

SEQ ID NO: 533725 - DNA, 201 bp, Homo sapiens
tcactccaaacttccacacatccctagggcatgaacagaatgcagccaagctctttacaaagttgtaacatggatgacctttgctccagattccaatacattcctcatttccatctgggagtttgtcagcctagatttcactgtccatatcactatcagcattttgggcacagctatttcaacggtctctaagaaattaca

SEQ ID NO: 533726 - DNA, 201 bp, Homo sapiens
cacacaagagatgacataaagtcaacgccagtttattgactgttggcctgcctatctgaacacagatacaaaaatgaggatagcaactgtccttgcccacygctgcgggagacagacaggtaaagagatgtgttgcagtttacaacagtggttgtttttaggaagctatggtgaggcattgtcctccctcccactattacc

SEQ ID NO: 533727 - DNA, 201 bp, Homo sapiens
cttccttcctttatgggttacccagtctgtggtattctgttatagaatcagaaaatggactaagataacacccaattatatattgtccaccaaaataaaamccaatttgaatatatagctcaaattagaagtaaagggatggagaaacatacaccatgctaacactaatcaaaggaaaattggaatagctccattaatttc

SEQ ID NO: 533728 - DNA, 201 bp, Homo sapiens
agcttctgtgctcctctcaagtgactgcaatactgacactacgagtgcttctattttagtcacctatctcctgggttgagaggggctgatcttgttcccarttttctgtatctttgatcttacctctttattttcctttcccggaactagttaactagctagctagctctagggctctctcagtgtctgtctctgactttc

SEQ ID NO: 533729 - DNA, 201 bp, Homo sapiens
gccaaaattataacattgtctgatggaggttgcacgtagatatgattcagaagataatgactacatgtggagaggctagagggatccagatggttccaagktttctacatccacttgtggtggttagatattgactctaactagactgtgagaagtttgcctatcataattcccagaccaacaactaaaacgttatttgag

SEQ ID NO: 533730 - DNA, 201 bp, Homo sapiens
ttaactagctagctagctctagggctctctcagtgtctgtctctgactttctgtctctcttaaaccacagttttattgagatataattcacatatttcacyatatatttccaccatttaaagcataaattcaaatattttaatcctatccacagagttgtgcaaccatcactacagtaatttgagaacatttcatcaccct

SEQ ID NO: 533731 - DNA, 201 bp, Homo sapiens
aggaggagaaattaatgaaatggaaaacataaagatcatggagaaaatcaatgaaactaaaagctggttctttgaagtggtcaatgaaactgataaacctrtagtaagactgacaaagaaagaaaaagacaaaattgtcagcatcggcaatggaagagaggctatccctgcagattaacaaagaatgagctgttggtatac

SEQ ID NO: 533732 - DNA, 201 bp, Homo sapiens
ttacaccatatatcagcatttcattcctgtgttaatctactcaggctgccccctcccatttgtaaaagagacacaacgggaggcacacagggttcactatyccagagcagctctgaaatgcatcaggacacacgttggtacggctaagttgttccactgtctaagtgatttttcatggctctggactctaccatctggact

SEQ ID NO: 533733 - DNA, 201 bp, Homo sapiens
cttacatttaccagtttattataaaagatatgataaaggatacagatgaacagctggatgaggaagtacacagagtcaggtccagagggatcccgagtgtrggagcttgtgtccccacagagagaggttgctccaccctattgatacctggatgcattcgccaacccagaagccctctgaatcctatactttagggatttt

SEQ ID NO: 533734 - DNA, 201 bp, Homo sapiens
tgtctcttatttttgtgttctcagtggttgttttagggttcataatatatgtcattagttttaacattctagcttcaagtgacattatatcactttgtacrtggtgtaggaatcttacaacagcatatttccatctctcttctggcatttgtgctattgtgattatatattttgcttctacatatattatgaacctataat

SEQ ID NO: 533735 - DNA, 201 bp, Homo sapiens
tgttggctgtgggtttgtcatagatggttcttattagtttgagatatgttccttaaatgccttgtttgttagaggtttttaacatgaaaggatgttgaatwttattgaaagcttttgctgtgtctatgagattattatgtggtttgtagtgttagttctgtttatgtggtcgatcacaattactgttttgcatatgttgaa

SEQ ID NO: 533736 - DNA, 201 bp, Homo sapiens
cagtatgatgttggctgtgggtttgtcatagatggttcttattagtttgagatatgttccttaaatgccttgtttgttagaggtttttaacatgaaaggaygttgaattttattgaaagcttttgctgtgtctatgagattattatgtggtttgtagtgttagttctgtttatgtggtcgatcacaattactgttttgcat

SEQ ID NO: 533737 - DNA, 201 bp, Homo sapiens
ctctcacggtgactggccaaggaggcacccctctgcgcagaagtaaaattgctttgttaagaatcctttgtttgagtgttcaatttccttaggattttgascatcattcgtaacagactgaactgagttaaatcctgatttggtgaatgttgtgtaaccttgcagaaattatacaacttctctctcagtttcttcttctgt

SEQ ID NO: 533738 - DNA, 201 bp, Homo sapiens
tctgaattatttttctggccattcagagatttctccttggtttggctccattgttggtgagctagtgtgatcttttgggagtgttaaaaaatcttgttttrtcatattaccagaattgtttttctggttccttctcatttgggtaccctatgtcagagggaagatctagggctcaagggctgttgttcagattcgtttgtc

SEQ ID NO: 533739 - DNA, 201 bp, Homo sapiens
aaggggaagggaaggagaataggatggtagcttaaaggggaagtgggcaaaggaaattcttgctttttagaatgagtgacacttgcctctgtgtatagaartgtcaagaaaaggagggagtaaaggtgagaaaagtaaagaattactggagccaggcctgttaggtggtgggggtggcactagggcaggaagccaggccct

SEQ ID NO: 533740 - DNA, 201 bp, Homo sapiens
cagccgctggatgaccttgggcaagtctccagacctccatgaggctgcagcttctcaacatccagggtctgttgtgaggatctaatgggtggaaaggaaarcactttacaaactgtgtagccctgcagaagtcagaggacctcgccctgtttattacgccagccttgatgatctgaccatggaggctgagtccttcccatg

SEQ ID NO: 533741 - DNA, 201 bp, Homo sapiens
tggatcatgtgggtggatccctcatgtatggcttagtgccatccccttggtgatgagtgaattcttgctcagttcgttcatgcaaggagatgcagttgttyaaaagaatctgggacctctcccttctttctctctttctccctttcttgccatgtgacatgcaggcttccctttaccttccaccatgagtggaagcttcct

SEQ ID NO: 533742 - DNA, 201 bp, Homo sapiens
catgttaatgtgatccctaatgttggaggtggggctaatggtgttggatcatgtgggtggatccctcatgtatggcttagtgccatccccttggtgatgartgaattcttgctcagttcgttcatgcaaggagatgcagttgtttaaaagaatctgggacctctcccttctttctctctttctccctttcttgccatgtga

SEQ ID NO: 533743 - DNA, 201 bp, Homo sapiens
aaaatgaaattttgcttcctacattttttgctcatttgtttgcccgccatgacagcatctgttctccactatgccaagaactatgcttgtcacacaagagrtgacataaagtcaacgccagtttattgactgttggcctgcctatctgaacacagatacaaaaatgaggatagcaactgtccttgcccactgctgcgggag

SEQ ID NO: 533744 - DNA, 201 bp, Homo sapiens
acagccttctttatccaccccagctgaacttgccttcccctttccccggtctttccctagccttgcttctatttcactttctttactgcacttatctaaartttttactatctgaaattttgcttcctggcggggcggggtggctcacacctgtgatcataacactttgggaggctgaggcgggcagctcacttgaggtca

SEQ ID NO: 533745 - DNA, 201 bp, Homo sapiens
ctccattcaaaaaaaaaaaaaaaagactattctttttgttgttttgaatttgtttatttttaaatgttcagtttgagaagtttgggctatgaatacatctrtgtaatcaccacccaaaacaagatataggatatttacattgcaccagaaagttccctcatgcctctttccagccaagccccccttcttctaaagcaactc

SEQ ID NO: 533746 - DNA, 201 bp, Homo sapiens
agattgtctgtttgtcctttttccaattttttgatgcaggcactgcttttgctgtatcccaaagcttttcataggttgtgtcactgttattcagttgaaayaattttttaatttctatcttgatttcattattgatgcaacaatctttcaagagcaggttgtttaatttccatgtatttgcctgcttttgagggttccttt

SEQ ID NO: 533747 - DNA, 201 bp, Homo sapiens
caaaagtggggaacaggctggtccttggccacctgctacagctatgacatgatgtaacccagcgagtccccctcttgtgtttgagctcagtgcagggagawaaaacagccgacttcttctgccagtgtgccccaagctcatcatggggtggctgcagtctggtctctaggaaaagaacacatttttgataatgtgttgcaa

SEQ ID NO: 533748 - DNA, 201 bp, Homo sapiens
tctcaagatctcctttcagttagtattatctctgactgttttagtctaagctgactgtttctgctaatataattatcttaaaaagtttgtgagtctgctaygaatattactggattcactccattagataaaagccacatcaaaaaaatcacttcaaaataaagcctttctctaccttgggcttccactgaggttactgag

SEQ ID NO: 533749 - DNA, 201 bp, Homo sapiens
aaaatcacttcaaaataaagcctttctctaccttgggcttccactgaggttactgagggacaacaactttatgtttcctagaatcctattgattaccagtmatttaagacactgccttagatttttctggtcttaacccaaggattttagtcacacctttagcttcaccattagaccatattttcctgttagtgtctgaac

SEQ ID NO: 533750 - DNA, 201 bp, Homo sapiens
ttgcctggcttcaaagccactcttacaggataagttttttattatggtattaatagcaccctcttccaagtaccaaaatctgcattagttatatgttgctraataacaaatcactctaacgcttagatgctgaaaactacaacaattatttatgatctaatggtttctgtgggtcagaaatttgagaacagcttggctgag

SEQ ID NO: 533751 - DNA, 201 bp, Homo sapiens
ttcagatttccgctgagctccacctgcttagaaaagcaccttgttccatagcccctaactatttattaatgttccatctaacattaataaataatgtgagrtgatggctctgtacttacaaaaatctttggattttacaacctagcagtcagtgttcttttgtgaattatctcttcatattctcacaaggaagagaactgc

SEQ ID NO: 533752 - DNA, 201 bp, Homo sapiens
cttgtgaacaaatttgccccttctttattccacccgaagcccttagtaccagtattccaggatcactatgtaagttctaaggaggagggatttaaacctgmaatttaagcctggccccagggggagaatgctactgttttgcagacaccacaacacacatttgtctcctttcactttatgaatctgtgtgtgtgtgtgtgt

SEQ ID NO: 533753 - DNA, 201 bp, Homo sapiens
tctgtgtgtgtgtgtgtgtgtgtgtgtgtgtgtgtgtgtgtgaagaatatgttataatgccagtatcatttctaggtcatgtacaggtcaactctgccctkatattcacagctgaatcagatgtttggagtgaccaccaatgagatgacttttctttttaggttgtgacctgcccaaaaacttttgataggacagctgcct

SEQ ID NO: 533754 - DNA, 201 bp, Homo sapiens
ttagtagagatggggtttcaccgtggtcttgatctcctgacctcgtgatccgcctacctcggcctcccaaagtgctgggattacaggcgtgagccaccgcrcccagccggtattgcagtttttatcaccgtatagatacagagacagacagagagctttaagtcacccaccacaaaggaaggagagctctgagagtctcac

SEQ ID NO: 533755 - DNA, 201 bp, Homo sapiens
gggggaagaagaaggggaaccacgtgtgcattgatcacgtggtgagagatgagcaagaggggagtggaggaggtgccaggcctctctttaaggaccagctstcatgggaactaatagagcaagaacttgctcattaccaaaaggagggcaccaagccattcatgaggcatctgcccccatggcccacacacctcccactag

SEQ ID NO: 533756 - DNA, 201 bp, Homo sapiens
tgacagatgtagtttggaaatgatattaatttcttcataagagcacctgctcaaagcaatgtgcaatgggacccaaaatttagaaactaaaattaaaaaarggtatatatgagaaaaaccagagattgatagtgagagtaagtagagaatggtaaaaaatttatcagagtgcagatgtagaatgttctttcataggaatat

SEQ ID NO: 533757 - DNA, 201 bp, Homo sapiens
ttagcccaaatctcaaaggtaaacaaggacagatttgtttacatctaacctccttacaattatgtggtcaattttagagtaagtgtgacatggtgctgagragaatgtatattctatcagattggggtggagagttctgtagatgtctattaagttggcttggtccagagctgagttcaaatcctgaatatccttgttaat

SEQ ID NO: 533758 - DNA, 201 bp, Homo sapiens
cttgttaacaaagccttcacctgtaccctctgtctccacggcacactatcccattgaggacagtgcagggcaaataggaagagggacagcctggtaagaaygtatttgttcatatgccttgacttaacgagtttgtttgaaatcatagggttcttttgtttgctttcaaagtgagttctctaaaaaccctccattgggatg

SEQ ID NO: 533759 - DNA, 201 bp, Homo sapiens
ctttacaaagttgtaacatggatgacctttgctccagattccaatacattcctcatttccatctgggagtttgtcagcctagatttcactgtccatatcaytatcagcattttgggcacagctatttcaacggtctctaagaaattacaaactttccctcgtcttccagtcttcttctgagccttccaaactctttcaacc

SEQ ID NO: 533760 - DNA, 201 bp, Homo sapiens
ttattatggtattaatagcaccctcttccaagtaccaaaatctgcattagttatatgttgctgaataacaaatcactctaacgcttagatgctgaaaactrcaacaattatttatgatctaatggtttctgtgggtcagaaatttgagaacagcttggctgagtgatccagtcttggagcctctcatgagtttgcagtcag

SEQ ID NO: 533761 - DNA, 201 bp, Homo sapiens
tttgtaacattacagagtcattaaaaggagaatcaatacaaaaagggaaaatggcaaaacaaacttaattcttcaagtttcatcaaaatgagaatatctgkttttttcaaaggatttatcttttaaaagaaaaatgatattattttgaaagaacaacacatcttttaaaagttcagcagcagcacaatcttttttgttgtt

SEQ ID NO: 533762 - DNA, 201 bp, Homo sapiens
cccaaaaagaaagaaatcttgtatccattagcagccactccctcaagccccagttctgggaaaccattaagccattttgtctctattttgggcatttcgtrtaatggaatcatataatatgtggcctttcaaacttcatccacatttcagcatgtatcagtacttcactcctttttatagctgaaaaatattccagtgtat

SEQ ID NO: 533763 - DNA, 201 bp, Homo sapiens
ataccaactccctgcaatacatcatccacaatgttgagcatgcataaacaaaaatagacatacaaagaagcaaggctataatcaaggaaaaaagtagtcartagaaatgggtattgagggtcaggtatgttagctcacacctgaaatcccagcacttttgggggccaaggcaggtgaattgcttgagttcaggagttcgaa

SEQ ID NO: 533764 - DNA, 201 bp, Homo sapiens
ctctaagaacttgctttatgaatctgggtgctcctgtattaggtgcatatatatttaggatagttagctcttcttgttgcattgatccctttaccattatrtaatgcccttttttatcttttttgatctttgttggtttaaagtctgttttgtcagagattaggattgcaacccttgtctttttttttttggtttccattt

SEQ ID NO: 533765 - DNA, 201 bp, Homo sapiens
tttttgatctttgttggtttaaagtctgttttgtcagagattaggattgcaacccttgtctttttttttttggtttccatttgcttggtaaatattcctcygtccctttattttgggcctatgtgtgtctttacacgtgagatgggtctcctgaatacagcacactgatgggtcttgattctttatcgaatttgccagtct

SEQ ID NO: 533766 - DNA, 201 bp, Homo sapiens
cttatgttgccatttcaattttaagtagcttactttctacctatttctcttttccaactatacacaggaacaaagaaagatgctcagaaagatcaagataygaataaacctgctgtttcatctcctaagagagtagcagcttcaaccaccaagcttcattcaccaggtatgtaagaaatatgatgtgttccttgggggaat

SEQ ID NO: 533767 - DNA, 201 bp, Homo sapiens
ttatgttgccatttcaattttaagtagcttactttctacctatttctcttttccaactatacacaggaacaaagaaagatgctcagaaagatcaagatacraataaacctgctgtttcatctcctaagagagtagcagcttcaaccaccaagcttcattcaccaggtatgtaagaaatatgatgtgttccttgggggaatg

SEQ ID NO: 533768 - DNA, 201 bp, Homo sapiens
gtgagatgggtctcctgaatacagcacactgatgggtcttgattctttatcgaatttgccagtctgtgtcttttaagtggggtgtttaccccgtttacatwtaaggttaatattgttatgtgtgaatttgatcctgtcattatgatgctggctggttattttgcctgttagttgatggagtttcttcatagtgttgatggt

SEQ ID NO: 533769 - DNA, 201 bp, Homo sapiens
atgggtcttgattctttatcgaatttgccagtctgtgtcttttaagtggggtgtttaccccgtttacatttaaggttaatattgttatgtgtgaatttgaycctgtcattatgatgctggctggttattttgcctgttagttgatggagtttcttcatagtgttgatggtaattacaatttggtatgtttttgaagtgact

SEQ ID NO: 533770 - DNA, 201 bp, Homo sapiens
cttttctttaagaatgttgaatattggctcccactctcttctggcttgtagagtttctgctgagagatccactgttaagctgatggacttccctttgtggstaacccaacctttctctctgtctgcccttaacattttttccttcatttcaaccttggtgaatcatataattatgtgtcttggggttgctcttcttgagga

SEQ ID NO: 533771 - DNA, 201 bp, Homo sapiens
tggctcccactctcttctggcttgtagagtttctgctgagagatccactgttaagctgatggacttccctttgtggctaacccaacctttctctctgtctscccttaacattttttccttcatttcaaccttggtgaatcatataattatgtgtcttggggttgctcttcttgaggagtatctttgtgatgttctgagtat

SEQ ID NO: 533772 - DNA, 201 bp, Homo sapiens
tctgccttttccagcctttgagctgagctcacaggtgatcacctccatcagcctcggtcctgctgacctcatgagatggttgaggtcgtagggctcgctcrtttagaatatgtcttgtccttcttttttcattatcaggagactaagatccatgagggagaggccttcattttgtttcccagctcagataggaggccacac

SEQ ID NO: 533773 - DNA, 201 bp, Homo sapiens
gctcttcttgaggagtatctttgtgatgttctgagtatttcctgaaattgaatattggcctgtcttgctaggttggggaagttctcctggataatatcctraagtgtgttttccaactcggttccattctccccgtcattttcaggtacaccaatcaaatgtaggtttggtcttttcacatggtcccatatttcttggagg

SEQ ID NO: 533774 - DNA, 201 bp, Homo sapiens
acgttttgaagcctacttctgtcaattcatcaaattcattctccatccagttttgctcccttgctggcaaggagttatgatcctttggaggacaagaggcrttctggtgtttggaattttcagcctttttgtgctggttttccctcatcttcatggatttatctacctttgttatttgatgttggtgatcttcagatggga

SEQ ID NO: 533775 - DNA, 201 bp, Homo sapiens
ttatttgatgttggtgatcttcagatgggacatcttttttgttgatgttgatgttactgcttttgcatgggcgtcctttttgttgatgttgatattattgsattctgttagttttccttttatcagtcaggctcctcctctgcaggtctgctggagtttgctggaggtccactccagaccctattagcctgggtatcacca

SEQ ID NO: 533776 - DNA, 201 bp, Homo sapiens
ctttcagagatgccctgcccagacgggaggaatctagagaggcagtctggttacagccactttggggtgctgcggtgggctccgcccagctcgaactttcyggtggctttgtttacactgtaaggggaaaaccacctactcaagcctcaggaattgcccctccctcaccaagctcgaccaccaggctgcgggcgggcctgg

SEQ ID NO: 533777 - DNA, 201 bp, Homo sapiens
ggaggcaacgaacaaacaggcacacaggaagacagaggcagaatggcctggacctgtacccaggctgtgggatagagtggggaaatggatttcaaaaataytttctgcaggaacaggcagaggcatttgtcaatcaagttgacttgatggaccttggtacagtacagcaacaagtcgtaccaacactgaggtttctgactt

SEQ ID NO: 533778 - DNA, 201 bp, Homo sapiens
tagatgccagaaactcatagccttctctgtgtttcatttgcataggcagtgggatttctattctgaaaacataccattaacgaagaatttttccaatcccwtcttggcttaaaagtaagctcctctcccatctcataaacctccaattcatttagctttctctgcaccaatgattctttacttgtgacaagaaatagagga

SEQ ID NO: 533779 - DNA, 201 bp, Homo sapiens
ttcatttaccaaaaagacataacaataccaaatacctacataccgaacaatagagcttcaaaacacatgaagcaaaaattgatagaactgaaaggagaaakagacaaatctacagttatgattggagactccagtactccactctgagtaacaatagaaaaagcaggcagaaaatcagtcagctgtagaagacctgaacaa

SEQ ID NO: 533780 - DNA, 201 bp, Homo sapiens
gtccttgcatctaactctcctgagttcgcttgtgcgcgcgctctctctctctctttagtttataactcatccaggtttcctcttttatttgatatattctkatcgagataatgtttcctttcttcattctatccaatccctataaatcctaccttgaactgttcccattcaattcatcttacaaatggcatcagaatctgt

SEQ ID NO: 533781 - DNA, 201 bp, Homo sapiens
tatgtctttttaccttttccacaaggttgtggcaaacaagacaggcacagggaaatgaattatgttcataggtcctcagaacttgaaggtatcttaccatycagtttaccacccattttacagctgagcaaactgagatcaggttgacttgccctgggtcctgggctggtgttctttctactctatttccttcttaaagct

SEQ ID NO: 533782 - DNA, 201 bp, Homo sapiens
gagtttgaaggagacctcctgaccaggacatagttggatgtggaggaaaagcaccagtggcaaccatttgagaaaactgctctgagagagattgaggacaraggtaggggatggagattttttttaccaaaggaagaaggagttccacatagtatggaggaagcatcagaggtagaaaggttggggccagggatggaaaga

SEQ ID NO: 533783 - DNA, 201 bp, Homo sapiens
tattagcagtctgatgatttgaaaatacaggagcaactatttatcatcatttttattaataaaattcctgatgacgtgtttcttttttagagaaagtagtwtgaaggaaaaacttatcatatgatatatatctttccaacaaaggagttaagattttgatgtcttaaaaaaaattaacctcaaggcaagatgagccatgtc

SEQ ID NO: 533784 - DNA, 201 bp, Homo sapiens
tgcacctggggggtgtgagggacagtaaccatgctgtaagaatagtgttcaattagccagcaagaaccttggaacctcaaaggaaaggtactttacacacrtgtggggcctcatgttctagtggggtatttgagagtttgaaggagacctcctgaccaggacatagttggatgtggaggaaaagcaccagtggcaaccatt

SEQ ID NO: 533785 - DNA, 201 bp, Homo sapiens
tgtcaggacctgagggtaaaggggaagactgcacctggggggtgtgagggacagtaaccatgctgtaagaatagtgttcaattagccagcaagaaccttgraacctcaaaggaaaggtactttacacacgtgtggggcctcatgttctagtggggtatttgagagtttgaaggagacctcctgaccaggacatagttggat

SEQ ID NO: 533786 - DNA, 201 bp, Homo sapiens
gcatattagcagtctgatgatttgaaaatacaggagcaactatttatcatcatttttattaataaaattcctgatgacgtgtttcttttttagagaaagtwgtatgaaggaaaaacttatcatatgatatatatctttccaacaaaggagttaagattttgatgtcttaaaaaaaattaacctcaaggcaagatgagccat

SEQ ID NO: 533787 - DNA, 201 bp, Homo sapiens
ctggttttagcatcaagattatactggacttatagaatgagtttagaagtattccctcctcttctttttttgggtggggggtgtaatttgtgaataattcrtattaattcttctttaaatgtttgatagaattcactaatgacatctgtgcctggatttttctttgtgggaattttttttttatttctaattcaatctctc

SEQ ID NO: 533788 - DNA, 201 bp, Homo sapiens
gagccgagatgttcctagttctctggcaaacaacactctgatgggggctgccagcaaaagtgctctggttgggtagtggagtgcctgtgggagagttcacygtgctggggtcgtgggggctgcaggagagtacactgtagtcagggggctgcaggcgagcccataccagtggagtgactgggggaggctgcaagcaagcac

SEQ ID NO: 533789 - DNA, 201 bp, Homo sapiens
tctcctgtatctcattgagcttccttgacatccatattctgattctatgttgttaatttcagccatttcaaactggttaagaaacattgctggggagctartgtggtcatttggatgtcttaagacactctggcttttatggttgccagaaatcttgccctggttctttctcatctctatgggctgatattactttaatct

SEQ ID NO: 533790 - DNA, 201 bp, Homo sapiens
caatgagatgacttttctttttaggttgtgacctgcccaaaaacttttgataggacagctgcctcagtcttgatttctgtgtcccaggcttgctggggtayaaaagcaaatgaaatcaaaattaggccttactaattttcataaactgcatagatgttgaagagactgaaatgtaatgcttgtcattttataaaagtgaga

SEQ ID NO: 533791 - DNA, 201 bp, Homo sapiens
agtaaaataaaaataaaaaatatagttgtttggaagagaaaatggttctgagtgtgtgattcattcttttttgtattggaatttaagaggtggtgcttgcrgcagtgagcttttaccagaaaaataagtctggcttttaatttacgtgtgtgtcagagacattaatcaagtatttgcattatatacaggagactcttctgg

SEQ ID NO: 533792 - DNA, 201 bp, Homo sapiens
aattaccagtttaaatgtttttatcatgtggtttatctgaatcaattaagaagatcatatggtttttctttattaatatggtatagtacatggattaattwtgtatgtaaaaccgatcttgcattcctagcataaatatcacttgatcatggtatataatattttgtatatgttgccagcttcagtgcgcagtatcttggt

SEQ ID NO: 533793 - DNA, 201 bp, Homo sapiens
tcctttttaaggctcattagtatttcatagtacatttgtaccacattgtctttattcactcgttaattgatgggcatttgggctgattccatatttttgcrattgcgaattctgctattataaacgtgtgtgcaagtatcttgtataatgatttcttttcctctgggtagatacccagtagggtattgctggatcaaatgg

SEQ ID NO: 533794 - DNA, 201 bp, Homo sapiens
aacactactgtcatttctctcgtttaatttctctttatttttgaaatattatttcagtagtttttgggggaaaggtgatgtttggttatatgtataagttmtttagtggtgatttctgaggtcttggtgcacccattattcaagcagtgtacactgcacctgatgtgtaatcttttatccctcactcacctcccacccatt

SEQ ID NO: 533795 - DNA, 201 bp, Homo sapiens
atcattcttatgcctttgcatcctcatagcttagctcccacttatgcgtgagaacatatgatgtttacttttccattcctgagttacttcgcttagaatartggtctccaacttcatccaggttgctgcgaatgccattatttcattcctttttaaggctcattagtatttcatagtacatttgtaccacattgtctttat

SEQ ID NO: 533796 - DNA, 201 bp, Homo sapiens
agattgcttttggcagtgtggtcatttttacaatattgattctacccatccatgagcatggcatatgtttccatttgtttgtgtcatctgtgatttttttyggcagtgttttgtaattttcctggtagaggtctttcccctctttggttaggtgtaatatactcctgaatgttctgttgtgtttatttgtttgtttgtttt

SEQ ID NO: 533797 - DNA, 201 bp, Homo sapiens
tggttaggtgtaatatactcctgaatgttctgttgtgtttatttgtttgtttgttttgcagctgttgtaaaaggggttgagttcttgattttattttcagyttggttgctgttggtgtatagcagtgctactgatctgtgtatattgattttgtatcctgaaacattgctgaattcatttatcagttctaagagctttgag

SEQ ID NO: 533798 - DNA, 201 bp, Homo sapiens
cagttctcagagggaatgcttttagcttttccccattcagtataatgttggctgtggcgttgtcatagatggcttttattaccttaaagtatgtcctttcygtgctgattttgctgagggttttaatcataaagggatggtggattttgtcaaatgctttttctgtgtctattgagatgatcatgttatttttgtttttaa

SEQ ID NO: 533799 - DNA, 201 bp, Homo sapiens
tccattagctagtattttgttgaggatttttgtatctacgttcatcaggaagattggtctgtaatgtttcttttttgtgatgttctttcctggttttagtrttagggtgatactggcttcatagaatgatttagggaggattccctctttgtctgtcttttgaattagtgtcaataggatttgtaccagttcttctttgaa

SEQ ID NO: 533800 - DNA, 201 bp, Homo sapiens
ttttttctttaaatatttaaagatgctgttttagtaatttctagcttgaatggtttctagtggaaaatctactgttcttatctttgggtctttgtacatartgtgtcggttttctctggccgccttaaagatgttctctttttcatgggttttgaacagtttgtttacaatatgccttgatgttgttttcttcatgttttt

SEQ ID NO: 533801 - DNA, 201 bp, Homo sapiens
catttgttctagggtatagtttaagtccattgttgttttgttgactttctgtcttcatgacctgtctagtgctgtcagtggggtactgaagtctcccactrttattttattgcagtctatgtcatatgtcattttttttagttttagtagtaattattttataaatttgggagctccagtgttagagatatatatatatat

SEQ ID NO: 533802 - DNA, 201 bp, Homo sapiens
tgatttttatcttcctgcatattgttttcaaaaattttagaaaatgatcatactatattatagatcatccctaacttttaaactatacatggcccacctcrgtcatgcccactgtgactacattcccaggagcagttgcaaaaagtgtgaagcttttagagagtctggggttcaagaactgggaaaaatatgtggctatga

SEQ ID NO: 533803 - DNA, 201 bp, Homo sapiens
agatgctgttttagtaatttctagcttgaatggtttctagtggaaaatctactgttcttatctttgggtctttgtacataatgtgtcggttttctctggcygccttaaagatgttctctttttcatgggttttgaacagtttgtttacaatatgccttgatgttgttttcttcatgtttttgtgcttgaagtttgttgaga

SEQ ID NO: 533804 - DNA, 201 bp, Homo sapiens
tggagtgcagtgcgtgatgtcagctcacttcagcctcgacctcccaggcttgagcaatcctctcacctcagccttccaagcagctgggactataggcgtgyaccaccgtacctggctaattttgtttatttttttgtagagatgaggtctctgtatgttgcccaggctggtctcgaactcctgagctcaagctgttatcct

SEQ ID NO: 533805 - DNA, 201 bp, Homo sapiens
cagtgcgtgatgtcagctcacttcagcctcgacctcccaggcttgagcaatcctctcacctcagccttccaagcagctgggactataggcgtgtaccaccrtacctggctaattttgtttatttttttgtagagatgaggtctctgtatgttgcccaggctggtctcgaactcctgagctcaagctgttatcctgccttgg

SEQ ID NO: 533806 - DNA, 201 bp, Homo sapiens
ttgaagtctcgaactattattttgaattgtttatttctcctgtcaattctgttcatttttgcttgatgtaatttgggtatctgttgttaggtgtatatacrtttataattattgtatcttcctaatgcattgacctttttatcattgtgaactatccctcttcattctgggttgacagttgtttttctctttacctttcta

SEQ ID NO: 533807 - DNA, 201 bp, Homo sapiens
ccaaatcaaagagcaaaaaaccatgtgttgaaagattcatggtgcccctgaggtaaagcacccccctcaggaggagtctggccccaaagggaggtctcagrcgcggtggacagcatcctctgccgcatgcctgtcacaaaacatgagcaagcttctagcactacttctcagagccaagcgagtcagagccaagcacagttt

SEQ ID NO: 533808 - DNA, 201 bp, Homo sapiens
ctgtatttttttcttttgtgtgtctcattttatttttgttgtaatgaaacttttagataattatgtagcatccttgactactaattatctctcttcctctstggggcttgttgtttgcttatttatttgtttaacaacttggttgatctactttaatgaagcctatttcccttgcactgtgaattcactaatgttgctcca

SEQ ID NO: 533809 - DNA, 201 bp, Homo sapiens
tggacagcatcctctgccgcatgcctgtcacaaaacatgagcaagcttctagcactacttctcagagccaagcgagtcagagccaagcacagtttagtgcyggcaaatccctgagggctaagcagttcagcagagagaagctctctgggaaaagggatggaggtggagaggcacaaatgggaactccccctctttgaggtc

SEQ ID NO: 533810 - DNA, 201 bp, Homo sapiens
gaatcagttctagtgttctataaaactgtagggtgactctagttaattatacactattgcatattttcaagtagctagaagagaggatctggcatggtccyaacacaaagaaatgatctatgtgtgaggtgatgggtatgctagttatcccaatttgatcaccgcatattgtttacatgttccaaaatatcactctgtacc

SEQ ID NO: 533811 - DNA, 201 bp, Homo sapiens
tcctctctggggcttgttgtttgcttatttatttgtttaacaacttggttgatctactttaatgaagcctatttcccttgcactgtgaattcactaatgtygctccacagaagacatagccttgggcatgtacacaatcacactaagaatgttttagcagggctgtctctcccggatctgtgttacattgtcttcctccct

SEQ ID NO: 533812 - DNA, 201 bp, Homo sapiens
tgaatgcaaaattacagttagaaggaatcagttctagtgttctataaaactgtagggtgactctagttaattatacactattgcatattttcaagtagctrgaagagaggatctggcatggtcccaacacaaagaaatgatctatgtgtgaggtgatgggtatgctagttatcccaatttgatcaccgcatattgtttaca

SEQ ID NO: 533813 - DNA, 201 bp, Homo sapiens
ctcccaggttgagggctcagtcccacaagaccacctccacctcagaaaccagtcctaagtctcagtggccacccaaggttctgtccaatctgctataaacwcagaggttgccataactgcctccttaggtttgataattcactagaatgatgcatagagcaaggtatatggcagggggtgaggtggggagtttccatgccc

SEQ ID NO: 533814 - DNA, 201 bp, Homo sapiens
tccagatgcccacatctggcctcaaagacccgtgttgagagtggcccccactttttcctgaagggaagctcctggtacactcactggtgaccctgcccaaygccagggactgtttctgttcttctctaaggaaggactcaccacccttcacccgtggagccatgggtcccatgtgattggctgccctcccgtgcatgcaca

SEQ ID NO: 533815 - DNA, 201 bp, Homo sapiens
ggttgatctactttaatgaagcctatttcccttgcactgtgaattcactaatgttgctccacagaagacatagccttgggcatgtacacaatcacactaasaatgttttagcagggctgtctctcccggatctgtgttacattgtcttcctccctttggtatcacattcagctgtcaggttccactaattactgactgatt

SEQ ID NO: 533816 - DNA, 201 bp, Homo sapiens
tcacactaagaatgttttagcagggctgtctctcccggatctgtgttacattgtcttcctccctttggtatcacattcagctgtcaggttccactaattaytgactgattgctctataattttctacagtgtcctggggcatacattattccacagtctgatccagttaaattcaagctccttttcaagggtagtttttaa

SEQ ID NO: 533817 - DNA, 201 bp, Homo sapiens
ccacagctgtgcagcttctgcctttactggacacacggctctccatagcctcactttcgggggagctgctggcagaggaagaggtacttttctatgtaccrtttagacccagtgtatcatttattgctgctctctgtattcccacacatagatgctttctaatatgtggtttcttcatggatttatagacgtggaattttt

SEQ ID NO: 533818 - DNA, 201 bp, Homo sapiens
gccaagttctggctacactttggagtcagtgccaacaggatgtcctgatgattggatgttggggtgagagagagagagagagagagtcaaggaagtcaacratgatgaccagggtcttgatctgaacaactggaaggatggagctgtcatcaatggagatgaggaaaacagcagggggaacaggttaggagattcatttgg

SEQ ID NO: 533819 - DNA, 201 bp, Homo sapiens
tttggactaacataacagatagtgtaaaaaggagaaaagaaatctaacatcagtttgagcacatatcaagttcttgtggtataagcagtaatatttatactagatttgcaaagtcagtgttatcattcccagtcttcacatgaaaggaaactgtggctttaagtgttaggacaagggcttgaggttacacagctcgtcatt

SEQ ID NO: 533820 - DNA, 201 bp, Homo sapiens
tgaaacggtttggttcagtctggaccacggagaccttacaaataaaatgatccccaaaccctggggatgtggctttcaccgtaggtcaaggacaggaccabgtatttgccatattctcattgcttgatcccatcttccctctcgaccatctgttattctctttccccaggaatcagtcagcaaagctgaaatacacatggt

SEQ ID NO: 533821 - DNA, 201 bp, Homo sapiens
ttatactagatttgcaaagtcagtgttatcattcccagtcttcacatgaaaggaaactgtggctttaagtgttaggacaagggcttgaggttacacagctygtcattgggagagctgatattccagcctggctagttccacagtctgcactatctcctcctcattcctgcacccaacagaaggttagatgattctttgtac

SEQ ID NO: 533822 - DNA, 201 bp, Homo sapiens
tgcagatgttccatggcttcctgccactgtctaccctgtcgtgaaatactctgtgatctagaacaaggtcaaaagcacaaatctggttggattaaaaataygagagttcatgttgaaatttctaatatttggctgatgaaacggtttggttcagtctggaccacggagaccttacaaataaaatgatccccaaaccctggg

SEQ ID NO: 533823 - DNA, 201 bp, Homo sapiens
tgcagcgatgacaagttctttttatttaattttaggcatagttagtaagcctcaagaagcctttcttattgtttgcctttcctgtattgattgtagagctraagtatgcctaatctttctttaaatactgaccagtaaatctgctgctttcctatgccctggaaaagaaaataatccagcaattcaatgaaagagtagaat

SEQ ID NO: 533824 - DNA, 201 bp, Homo sapiens
ttcccatggttgatcattggacacccagcaaaactagtaacactgatgggtatcactcctacagggcatggaagatgtcacatgccttcttagcgctgctkaggggatcacctgccagaggctctgggacaatgagaggttcttaatttggagaccagggagctttagagggcaaggactcagctcccttggcccctgagc

SEQ ID NO: 533825 - DNA, 201 bp, Homo sapiens
attcattctctgtgcagttctgtgcctgtgctggtgaggaattgtgatcctttggagaagaggtgttctggtttttggagttttcagcatttttttgctgtttttttttttttttttttccccatctttgtggatttatctacctttgatctttgatgctcatgacctttagatggggttttgtgtgcatgttctttttgt

SEQ ID NO: 533826 - DNA, 201 bp, Homo sapiens
ccttctgcaacaggcccagggccaagtgaggccctgggcagagacatcattggccatggaggtctctggcctggcaaagtgacagaaaaatcatgtatcarttattccacacacaaagcaagagggtttgaaaagttttatgacttacataattgaagtctctgggaagagaggactggcctctcatacatttgaaatggc

SEQ ID NO: 533827 - DNA, 201 bp, Homo sapiens
ttcattctctgtgcagttctgtgcctgtgctggtgaggaattgtgatcctttggagaagaggtgttctggtttttggagttttcagcatttttttgctgtttttttttttttttttttccccatctttgtggatttatctacctttgatctttgatgctcatgacctttagatggggttttgtgtgcatgttctttttgtt

SEQ ID NO: 533828 - DNA, 201 bp, Homo sapiens
tcagaagcacgggaaagcaaagaggtcaccacatctgttgctgaaaacaggaaccttctagagaatgcagataagattgaaagcacctcagcaagagcagrttcagttctcaatattccagcacccctccacccagagacaactgtgaacatgacctaccagcctacaacacccagtagcagttttcaggatgttagcgtg

SEQ ID NO: 533829 - DNA, 201 bp, Homo sapiens
tctgtgcctgtgctggtgaggaattgtgatcctttggagaagaggtgttctggtttttggagttttcagcatttttttgctgttttttttttttttttttyccccatctttgtggatttatctacctttgatctttgatgctcatgacctttagatggggttttgtgtgcatgttctttttgttgatgttgatgttatttc

SEQ ID NO: 533830 - DNA, 201 bp, Homo sapiens
atatgaagaactcccttttgggaattcttgtggagttttcacagaggtaattatgagtcaggggttcttgaagaggtcagggctggagattgaaatctgcrtctcactagatgccaagtcagaggactgcagctagggaaaatgtgccccaagatgggcccctacaacattctgacatttaaagatctggcaaagaaggct

SEQ ID NO: 533831 - DNA, 201 bp, Homo sapiens
aggcacagacgatttagcataattgtttaaggccctaggattttcacaaaggtaaatgaacattggcgttaacttaaagtttccaattgcattcatttcttttttttttttttgtcatatatattttttttattatactttaagttttagggtacatgtgcacattgtgcaggttagttacatatgtatacatgtgccatg

SEQ ID NO: 533832 - DNA, 201 bp, Homo sapiens
gtggctcagtgtaggcccacagacaccccttggcacaaacagtctggacactgtgggcaccatggatggcaggttaatggcagcaggaggcagatgggctyctgggcagaaaggggtgggtccctagtgaaaccccaccctcatgtcagggatagcccaaggcctgggggcccaggctgccagttctgtggactggagtga

SEQ ID NO: 533833 - DNA, 201 bp, Homo sapiens
gcattcatttctaacaagagagttagcctgtcctttgaagctttgaagccaggcattgacttctcctctctagttaggaaggtcctagatggcatcttctratagaagactgtttcatctacatttaaaatctgttgtttagtgtagccatcttcatcagttatcttagctaatcatctggataactttctgccgcttttc

SEQ ID NO: 533834 - DNA, 201 bp, Homo sapiens
caccaacatgccagctctgagctgtctcggccccctctggactttgggcaccaacgaacatgggacagaggccaagtcaggactaagggtggctcagtgtrggcccacagacaccccttggcacaaacagtctggacactgtgggcaccatggatggcaggttaatggcagcaggaggcagatgggctcctgggcagaaag

SEQ ID NO: 533835 - DNA, 201 bp, Homo sapiens
gatcttttatgcagaccactcaaatttctcatatcagtaataaagctgttttactttcttatcattcatgtgttcactggaacagcacttttttttttttkttgagacagagttttgctcttgttgcccaggctggagtgcaatggcacaatctctgctcactgcaacctccacctcccgggttcaagccattctcctgcc

SEQ ID NO: 533836 - DNA, 201 bp, Homo sapiens
tttttttttttttttgagacagagttttgctcttgttgcccaggctggagtgcaatggcacaatctctgctcactgcaacctccacctcccgggttcaagycattctcctgccttagcctcccaagtagctggggttacaggcacccgccaccatgaccagctgacttttttgtttttttttaagtagagatggtgtttca

SEQ ID NO: 533837 - DNA, 201 bp, Homo sapiens
attgtgaataatgccgcaataaacatacgtgtgcatgtgtgtttatagcagcatgatttatagtcctttgggtatatacccagtaatgggatggctgggtsaaatggtatttctagttctagatccctgcattcatttctaacaagagagttagcctgtcctttgaagctttgaagccaggcattgacttctcctctctag

SEQ ID NO: 533838 - DNA, 201 bp, Homo sapiens
gccttagttagtcttaacagttatgttctgttccttatcttagcactggcatttgacattattgattactcctttctttctgaaacttgttccttcgtttrcttctttgaacaaacccatctgcctgttctctttttgcctgcatgtgcaagtgttgattcttagttgccttcactagaaacccttcccctgcattttcta

SEQ ID NO: 533839 - DNA, 201 bp, Homo sapiens
ctgcaacctccacctcccgggttcaagccattctcctgccttagcctcccaagtagctggggttacaggcacccgccaccatgaccagctgacttttttgkttttttttaagtagagatggtgtttcaccatgttgtccaggctggtcttgaactcctgacctcagatgatctggccaccttggccttccaaagtgctggg

SEQ ID NO: 533840 - DNA, 201 bp, Homo sapiens
gctggagtgcagtggcgcaatctcggctcactgcaagctctgcctcccgggttcatgccattctcctgcctcagcctcctgagtagctggaactacaggcrcccgccacctcgcctggctaattttttgtgtttttagtagagacgggatttcactgtgttagccaggatggtctcgatctcctgacgtgatgcgcccacc

SEQ ID NO: 533841 - DNA, 201 bp, Homo sapiens
tttagactatttccaacaatagaggtgtgaatatccctctacatcgttctctcacagtcttcctcctccagggttccctagagaattaaccctaatgcccyatgtcacccactctatgtaggaattagcttctcacctgcctgtgcatctagaacagctatgaaacatccttgggagatttgagaaaatccctcaaaacgt

SEQ ID NO: 533842 - DNA, 201 bp, Homo sapiens
gtctttttttgttttatggacttaaactctggaagtttcatataaatggaatcatatgctttaagcctttttgtgtctctttcacttagtatgtttttaaygttcatccatgaatcagtattttatttcttttgatggctgaataatattctattgtatggatttaaaacaatttgtttatccatacattagttggtggac

SEQ ID NO: 533843 - DNA, 201 bp, Homo sapiens
gttttatagcacgtatgaaattaccatccccaggaggaaaattttagatattcttattacattaagctcctttaaaaaagttttttaaaactttttccaayacacaaaactaaatactttcctgctgctgtctgtttcatcagcaccatgtccaccatttcttcagtcacaccaaatttctcatcacatcacagatagagc

SEQ ID NO: 533844 - DNA, 201 bp, Homo sapiens
ttgcatcccagaggatgtttttttagatgacaggcattgtgaatttttcctttatgagtattggatgtatttgtattgccatgtaattttttgagataggktctcactctcttgcccgtcactgcagtggcaagataatggctcactgcagcctcaacttccctggctcaaacgatcctcccacatcagtctcccaagtaa

SEQ ID NO: 533845 - DNA, 201 bp, Homo sapiens
gggaactagatacccaatcagttttacctgttatggtcaaaatgaagtacagagactggaactcccccttatgcaagtcctggggcctgcatggactcatytcaacagagacatttaagaagcttattccagccaccaagagaaaataagatattccaatccacacctggttcttacaaagcaagtgaccccatcctcacc

SEQ ID NO: 533846 - DNA, 201 bp, Homo sapiens
cactcttacccatgtgcctactattgttatatgactttttgcttctgtatttgttgtaaacttttttgctattgatgatggtgattctttatatatcttgrttcattacataaagtgctttatcaaaatttatgtttaaaataaagtatcaaataaagctttaccctctcccaaagaatgtcaacacctttgtcataaaga

SEQ ID NO: 533847 - DNA, 201 bp, Homo sapiens
ggtgaggcaggcagatcacctgaggtcaggagttcgagaccagcctggccaacatggcaaaaacccgtctctctgaaaatacaaaaattagccgggcatgrtggcaggcacctgtaatcccagctacttgcaagtctgagacacaggaatcacttgaacctgggaggcggaggttgcagtgagccgagatcacaccactgc

SEQ ID NO: 533848 - DNA, 201 bp, Homo sapiens
ttgccattctaactggtgtgagatggtagttcattgtggttttcattttcatttatttaatgattagtaatgttgggcattttttcatggatttgttggctgtgtgtatgtcttcttttgaaaagtatctgttaatgtcttttgcccacttttaaatgggattgcttgtttttttttcttttgaatttgtttaacctcctt

SEQ ID NO: 533849 - DNA, 201 bp, Homo sapiens
tgccattctaactggtgtgagatggtagttcattgtggttttcattttcatttatttaatgattagtaatgttgggcattttttcatggatttgttggctgtgtgtatgtcttcttttgaaaagtatctgttaatgtcttttgcccacttttaaatgggattgcttgtttttttttcttttgaatttgtttaacctcctta

SEQ ID NO: 533850 - DNA, 201 bp, Homo sapiens
cagtatggttttaatatgccatcttgttattcgttttctatttgacctatttcttcattctttttatcccctttcactcctttcatttggattagttgacttttttttttttttttttgagccaaagtcttgctgtgttgcccaggctggagtgcagtgatgtgatctcggctcactgcaagctccgcttcctgggttcag

SEQ ID NO: 533851 - DNA, 201 bp, Homo sapiens
tagttaaattttatcacatttcctgttatccaaaacagcttgaagtctaaatggggatctaattttttttttttttttgagatggactctcacgctgttgsccaggctggagtgcagtggtgtgatctcggctcacttcaagctccacctcccaggttcacaccattctactgcctcagcctcccgagtagctgggactac

SEQ ID NO: 533852 - DNA, 201 bp, Homo sapiens
agtatggttttaatatgccatcttgttattcgttttctatttgacctatttcttcattctttttatcccctttcactcctttcatttggattagttgacttttttttttttttttttgagccaaagtcttgctgtgttgcccaggctggagtgcagtgatgtgatctcggctcactgcaagctccgcttcctgggttcagg

SEQ ID NO: 533853 - DNA, 201 bp, Homo sapiens
ctcagtattaaccatcacggtggatgaacctggattacattatgctataggtaaaataagccagacacatgtgacaaatgctgtatgatttcacttacatrtgaaatccatcaaagtcaaactcatggaagcagagagtggaatagtgattgtcaggggatggagggtggggtaaatggggagatcttggtccaaggatac

SEQ ID NO: 533854 - DNA, 201 bp, Homo sapiens
gatagggatccttgaagaaccagctgtttcaggtctaggacaagaaatgtagatcctagaacatcttgccatgctagctggctaagaagaatataaaaacyatgaggattctgttgaaaggacctatggggtcaacttgaataagctcctactggtaaaaaagaaaaaaaaaaggaaaaactgaaagagtttgaatatcaa

SEQ ID NO: 533855 - DNA, 201 bp, Homo sapiens
catctgcctaagtagacggtaaatttgtccaggctggggctgcaccacctcctctctgagttctctgaggcacctgacccacaatataaggggcctttctyttccaaggtccattttagatgtgttgaatcaaaccttgcaagattaattttagtctgtttatgatagaactgggttcgaattcataatctgtagaattca

SEQ ID NO: 533856 - DNA, 201 bp, Homo sapiens
ataaggggcctttctcttccaaggtccattttagatgtgttgaatcaaaccttgcaagattaattttagtctgtttatgatagaactgggttcgaattcayaatctgtagaattcattatctcattatgaactgagaataattttttaattttatttgggttcgttttagcagatttaaagaaagcttccagttcaaatgc

SEQ ID NO: 533857 - DNA, 201 bp, Homo sapiens
ggtctaggacaagaaatgtagatcctagaacatcttgccatgctagctggctaagaagaatataaaaactatgaggattctgttgaaaggacctatggggwcaacttgaataagctcctactggtaaaaaagaaaaaaaaaaggaaaaactgaaagagtttgaatatcaataagattagtatttacaatggatgaataccc

SEQ ID NO: 533858 - DNA, 201 bp, Homo sapiens
tattaccttaaattccagagagttttacagaaagcaaatgccgctctcctccctttggctccctaaagtgtcaactacagtcctgcctattccacaaaccygattgaaacgaggtttgaaattaagaacacacagctcagctcctttcatttttcattttattcctgaccatcaaatcactaaaacagcaagaataagatt

SEQ ID NO: 533859 - DNA, 201 bp, Homo sapiens
tatttatgaatataatgcataaaatctctcctgattttgtcaaaataagcagtttcttaaatgaggagaatatcttcatttaggaataaatgaagaaaaaygtttaaatttagagtcttcagacttttaggaataagccatgaagaggtggatacccacaggatgggaaggtgatcttctcacaggggtgacctgctcctg

SEQ ID NO: 533860 - DNA, 201 bp, Homo sapiens
cttccaaggtccattttagatgtgttgaatcaaaccttgcaagattaattttagtctgtttatgatagaactgggttcgaattcataatctgtagaattcrttatctcattatgaactgagaataattttttaattttatttgggttcgttttagcagatttaaagaaagcttccagttcaaatgctgcaaaatccaatct

SEQ ID NO: 533861 - DNA, 201 bp, Homo sapiens
ccagaaataaatggatgttgtatatgttcccagtccttttcttataataatagtataaatatccagctaaggactatcagaattccatctgtgggctgcartttgtccattaccaatagattgcatgtgtgtgaagggggatggtgtgaagcagggcgatgcccagggctttgtgcttcaggccaggctctctttgagatt

SEQ ID NO: 533862 - DNA, 201 bp, Homo sapiens
ttagtgatttgggagccccaagatttattttcctttcacagctcctatatgattttgtccacagggttgatactacagtgtcaaagaaaaaagtcaaactytataaaatatttaaagaggtttattctgagccaaatatgtgtgaccagggctcgaggcacactctcaaaatgtcctgagaacatgtgcccaaggtgattg

SEQ ID NO: 533863 - DNA, 201 bp, Homo sapiens
gatactacagtgtcaaagaaaaaagtcaaactctataaaatatttaaagaggtttattctgagccaaatatgtgtgaccagggctcgaggcacactctcawaatgtcctgagaacatgtgcccaaggtgattgggttacaacttgatttttatacattttagggggacaaaagttacaggcagacatccatcaatacctgt

SEQ ID NO: 533864 - DNA, 201 bp, Homo sapiens
gagctccagcgtctcctcagtctccagcacccagtccggggacagtgcacagccagagcagggccggccagccacccgtaagtggggtggggcagggtggvgtgccttcactgaattaaaaccggcgcgcctgtgtaactgtgtgtcattttctttgcatgattatttaagaatttgcatcacctcccttagcttcccatt

SEQ ID NO: 533865 - DNA, 201 bp, Homo sapiens
tctcagggtcaaacaattctcctgcctcatcctcctgaatacctgggactacgggcacacaccgccgtgactggctaatttttacatttttagtagagacrgtctcaccgtgtcggccaggctggtctcaaactcctggcctcaggtgttccaccagcctcgggtgacgcacccacctaggcctcccaaagtgctgggatt

SEQ ID NO: 533866 - DNA, 201 bp, Homo sapiens
gtcagaattcatcaatatattcattatgctaggggcacactgtcctgttatgcttttagaatatgatgtctttctagtctttttacgaaactggtactctkcaaaatttattatcagtacactgagaaagggaaggaaaagaatcctttttgcagtctcatgctgtcaggtttgaaatgaaataacactgagcaagtactc

SEQ ID NO: 533867 - DNA, 201 bp, Homo sapiens
accacttcaaagtcaatgttattggatgggaaaccatgacatctcagatgttgttttcaagaccttgccaggggcccaggaaagtcttagaggtttccacrtagagagctgttttgaaggggttatagaagttgaatcaagctggaataattcgaaagagagagagagagattgattgatttgttattttgtcaatttctt

SEQ ID NO: 533868 - DNA, 201 bp, Homo sapiens
ttctgtcttcatgacctgtctagtgctgtcagtggggtactgaagtctcccactattattttattgcagtctatgtcatatgtcattttttttagttttartagtaattattttataaatttgggagctccagtgttagagatatatatatatatatttagggttgtgatattttcctgttggactagtccttttatcatt

SEQ ID NO: 533869 - DNA, 201 bp, Homo sapiens
cttagttaatctctcctggatcaggaaaagacctggaaagggaaggggattctccccagcagggatccccaaccccctggccacgaactggtacccatccyggttctgtggcctgttaggaaccaggctaacagcgggaggtgtgcaggaggtgagcagtgggcgagcgcaagctttacctcctgagctctgcctcctgtc

SEQ ID NO: 533870 - DNA, 201 bp, Homo sapiens
ctcatttactcatctgtaaaatggagatgataatagtgcttatctcacagagttttgtgagagttacgtgagatacagtgcacaagccgttaagcacaggrccgggcatctgttgtcgatcaggtaggtaatgcttatcattagttattgctccaaaacacagtgttcataaagttttctccaaggagacccaccattagg

SEQ ID NO: 533871 - DNA, 201 bp, Homo sapiens
ggcccaggaaagtcttagaggtttccacgtagagagctgttttgaaggggttatagaagttgaatcaagctggaataattcgaaagagagagagagagatygattgatttgttattttgtcaatttcttgtccaagcttgtttattctctgttctttcttgtgtttacagagatgatgtgtggaacatttgcgtagttcta

SEQ ID NO: 533872 - DNA, 201 bp, Homo sapiens
gagagagattgattgatttgttattttgtcaatttcttgtccaagcttgtttattctctgttctttcttgtgtttacagagatgatgtgtggaacatttgsgtagttctaaattttggtctacctagttatttataaaagtaatacattacatttccctttgtcttgatgtgtttgtaagcagtttctaagggtgttttat

SEQ ID NO: 533873 - DNA, 201 bp, Homo sapiens
tgttttctattttaagaaacatatgttagaattgatttttaattatctgctacctactatatatgtaatttttacttcaccaataaatcacagaaaaaccycccatgaatttgatttgtctaagtactactaatcattatacctatacttgttattagatgtaatgtcaataaatattttgtttctgttctttagcgaaga

SEQ ID NO: 533874 - DNA, 201 bp, Homo sapiens
tggtttggtccagaaaggtgggacaactagaagcagaggggaggggaggcttccaggtcttaggtggacgattggcaattggttgaaagagtttaagttaytatctaaagatgtggaatcaatagaaagtaatgtctgggttaaggtaaggggttgtggcaactacagtccttattatgcaggtgaagcctccaggaagca

SEQ ID NO: 533875 - DNA, 201 bp, Homo sapiens
tcctatgtcattatgtattctgaatagcacttcatttactgggtgcccaagaaacagaaaatagctatcaaagaagtacatgaagaatatgatatttgcarctttcctttccagtttctcctcttcttcctctcttttcaaatactgccatgttttctccatgggataacctaagaacagaaatcatggggcaaagaattt

SEQ ID NO: 533876 - DNA, 201 bp, Homo sapiens
caggtaatcattggtttggtccagaaaggtgggacaactagaagcagaggggaggggaggcttccaggtcttaggtggacgattggcaattggttgaaagrgtttaagttattatctaaagatgtggaatcaatagaaagtaatgtctgggttaaggtaaggggttgtggcaactacagtccttattatgcaggtgaagcc

SEQ ID NO: 533877 - DNA, 201 bp, Homo sapiens
tgtcattatgtattctgaatagcacttcatttactgggtgcccaagaaacagaaaatagctatcaaagaagtacatgaagaatatgatatttgcagctttmctttccagtttctcctcttcttcctctcttttcaaatactgccatgttttctccatgggataacctaagaacagaaatcatggggcaaagaatttaaaaa

SEQ ID NO: 533878 - DNA, 201 bp, Homo sapiens
aattcctcaagtttgaatgttgttaattaataacatgatttccaaaaacaatgtgtaggccaaacagaatatacatacatacacacacacacacacacacvcgcgcgcacacacgcacacacgtacacatacacatatgggcacacacatgtatattgtgctgattgggcttgtgtcagtttaaaacctcagttttatgta

SEQ ID NO: 533879 - DNA, 201 bp, Homo sapiens
ttcctcaagtttgaatgttgttaattaataacatgatttccaaaaacaatgtgtaggccaaacagaatatacatacatacacacacacacacacacacccrcgcgcacacacgcacacacgtacacatacacatatgggcacacacatgtatattgtgctgattgggcttgtgtcagtttaaaacctcagttttatgtaat

SEQ ID NO: 533880 - DNA, 201 bp, Homo sapiens
gaatgttgttaattaataacatgatttccaaaaacaatgtgtaggccaaacagaatatacatacatacacacacacacacacacacccgcgcgcacacacrcacacacgtacacatacacatatgggcacacacatgtatattgtgctgattgggcttgtgtcagtttaaaacctcagttttatgtaatcataaattccaa

SEQ ID NO: 533881 - DNA, 201 bp, Homo sapiens
ttaattaataacatgatttccaaaaacaatgtgtaggccaaacagaatatacatacatacacacacacacacacacacccgcgcgcacacacgcacacacrtacacatacacatatgggcacacacatgtatattgtgctgattgggcttgtgtcagtttaaaacctcagttttatgtaatcataaattccaagaatgtga

SEQ ID NO: 533882 - DNA, 201 bp, Homo sapiens
taattaataacatgatttccaaaaacaatgtgtaggccaaacagaatatacatacatacacacacacacacacacacccgcgcgcacacacgcacacacgyacacatacacatatgggcacacacatgtatattgtgctgattgggcttgtgtcagtttaaaacctcagttttatgtaatcataaattccaagaatgtgag

SEQ ID NO: 533883 - DNA, 201 bp, Homo sapiens
ttaattactgtttgcttcctgctttagttcaggtaggtagaaaattctgttttcacaacatggagcattagctattccaggagaaatgtctgtattaaacrttgtgggagtgaaagcattcctcacaagatttaaagtgtttgaatttaaaattcggctgttgttttcaactgaattaggagggatttcacagtgaatgtt

SEQ ID NO: 533884 - DNA, 201 bp, Homo sapiens
aatcccagctacttgcaagtctgagacacaggaatcacttgaacctgggaggcggaggttgcagtgagccgagatcacaccactgcatgctagcctgagcaaaaaaaaaaaaaaaaaagaaaaggaaaagaaaaagaaaatcaaaacagctagcagctagaggatatcctaaagaagcaagggcaaggaaaatggtccaag

SEQ ID NO: 533885 - DNA, 201 bp, Homo sapiens
aggttcacctttctttccacttcattcttccgactgtgatgtagttggatgattgcttagtgctatttattgaaggttttggtttttgcattttttaagaaaaaaaaaaaaagtttggggtaatgtagaaacaccctgagcctagcacagttggagataggtgaccaaaaagtggacttggcttagacaatcggtgagaac

SEQ ID NO: 533886 - DNA, 201 bp, Homo sapiens
cctatttcttcattctttttatcccctttcactcctttcatttggattagttgacttttttttttttttttttgagccaaagtcttgctgtgttgcccagrctggagtgcagtgatgtgatctcggctcactgcaagctccgcttcctgggttcaggtgattctcctgcctcagcctcctgagtagctgggactacatgtg

SEQ ID NO: 533887 - DNA, 201 bp, Homo sapiens
cttctatgatttttatccttgactcattgacagaatgaattatttaaatagattttctaggattatttttctctgtactgttggactaggttatttgcatattaattctttatgattcactcatgaccattttggcctggagcttattataaatcaataactggcaactttctcaatgatattttttgctttttagcctac

SEQ ID NO: 533888 - DNA, 201 bp, Homo sapiens
cctcctgagtagctgggactacatgtgcccgccaccacgcctggctaatttttgtatttttagtagagacagggtttcactatgttggccaggctggtctyaaactcctgacctccagtgatcagcctcccaaagtgctgggattaccgacgtgagccactgcgcccagccatgtttcttcttatttctagtaattttgat

SEQ ID NO: 533889 - DNA, 201 bp, Homo sapiens
ttctatgatttttatccttgactcattgacagaatgaattatttaaatagattttctaggattatttttctctgtactgttggactaggttatttgcatattaattctttatgattcactcatgaccattttggcctggagcttattataaatcaataactggcaactttctcaatgatattttttgctttttagcctact

SEQ ID NO: 533890 - DNA, 201 bp, Homo sapiens
gctatttccatataagttaattcttcatgtgtgaactttctcttacatattcatcaaaggttattagcatcagatagtttttgttgtagctgaaagaaacttaacttttgtgtttatacttttagttccaggctattttttatgattgttttactttgttactgtttgaagaatgctttattttttgagatagggtctcct

SEQ ID NO: 533891 - DNA, 201 bp, Homo sapiens
tctatgatttttatccttgactcattgacagaatgaattatttaaatagattttctaggattatttttctctgtactgttggactaggttatttgcatattaattctttatgattcactcatgaccattttggcctggagcttattataaatcaataactggcaactttctcaatgatattttttgctttttagcctacta

SEQ ID NO: 533892 - DNA, 201 bp, Homo sapiens
ctatttccatataagttaattcttcatgtgtgaactttctcttacatattcatcaaaggttattagcatcagatagtttttgttgtagctgaaagaaacttaacttttgtgtttatacttttagttccaggctattttttatgattgttttactttgttactgtttgaagaatgctttattttttgagatagggtctcctt

SEQ ID NO: 533893 - DNA, 201 bp, Homo sapiens
tttgttttaactggttttaacacttaccactcatccttttgtgccatgattcctcattctcgtgctcttagacttatggttggtgaagattctgggtctckgagacagcaggcacatgggcaaagaggaataactatcctccccttcctctggcgctctctccatcagccagtgtttccaggattggttttcctctattaa

SEQ ID NO: 533894 - DNA, 201 bp, Homo sapiens
ggtagagacggggtttcaccatgttgggcaggctggtcttgaactcctgaattcaagagacccacctgcctcagcctcccaaagtgctgggattacaggcrtgagccaccatgcccagcctcaagaatgctttaaaaacatgttagtatgtggttgtatgtgtatgtttaacaggtgtcacatactcaccaggttaggatt

SEQ ID NO: 533895 - DNA, 201 bp, Homo sapiens
actctagctttttgcctttaattttaattttctaattttatcttaggtttaggggtacatgagcagctttgttatataggtaaattgtgtgtggtttggtrtacagattatttcatcacccaggtgataaacacagtagcctatgggtagtttttcaatcatcaccctcctcccaccttctaccctcaagtaggccctagc

SEQ ID NO: 533896 - DNA, 201 bp, Homo sapiens
ttagccagttaccccagcgccatttattgaataaggactctttcccctgttgcttgtttttgttgactttgtttttcctcctcaattttttggaatagttycagtggaaatggtaccaattcttatttatacattgtttagaatttggctatgaatgcatttggtcctgggtctttttcggttggtaagctttttattact

SEQ ID NO: 533897 - DNA, 201 bp, Homo sapiens
aaatcgaatatctgatccttgtttacaaaagtcaagtatgttgactcccacttttgctatttcaattgccttcaccctgtgtgaatcacagttgtaatacygacacattacttttgtcagtgtaagataaaaaataaagtattattttttctttaattggattctcaatgcactataaaaatttcagtgtgttatcatctg

SEQ ID NO: 533898 - DNA, 201 bp, Homo sapiens
ttatttttgtaagtaaagttttattgcaacacagccacattcattactttgcttattgtctatagctgctttctcacaacagcagagttttgtaaaatgtyatatagtacacaaagcccaatgttatctgctgctttcagaaaaaggttgccaacgttatctaaacaagccaattaaaagataaagattgtcatagtatgt

SEQ ID NO: 533899 - DNA, 201 bp, Homo sapiens
ttacacatctcagtttccttcagttcacctcggattttggttatttcttgtcttctgctagctttggggttggtttggtcttgtttctgtagttcctctaggtgtgatgttaggttgtaatttgatatctttccaactttcatgtgggtctttagcactgtacatttccctaacactgctttagttatgtcctagagattc

SEQ ID NO: 533900 - DNA, 201 bp, Homo sapiens
cagccttgagcaaaccacttacctctgtccatttctcttttcttgtctttaaaattgacagaacaatttcatggagactttaagtgaaaatcaaatgcctrtcacaatatagcacccctccatacacaaacatcttagtctttccctttctcagtaattatattatttataaggaggtattcatttatttacttgcgtagt

SEQ ID NO: 533901 - DNA, 201 bp, Homo sapiens
cagagttttgtaaaatgttatatagtacacaaagcccaatgttatctgctgctttcagaaaaaggttgccaacgttatctaaacaagccaattaaaagatmaagattgtcatagtatgtgtggcaataatgactataaaagcatgatctacctatatgttgtcaacaagaaactggcttcaaatataatgatatacgtaag

SEQ ID NO: 533902 - DNA, 201 bp, Homo sapiens
ttaaacaacaactctgcatttcccccaaccctccagcccctggaaaccacaattctgctttctgtctcaatgaatgtgaccactctagatacctcatatarttggaatcatacagtatttgtgtttttgtgactgacttatttcacttatataatgtcctcagggttcattaatgttgtaacatctgttagaatttccatt

SEQ ID NO: 533903 - DNA, 201 bp, Homo sapiens
gcgtagtacctttttgctttgttgggacggggtctcacattcccagcatctagcacaacgccagcacactatactgactctctcatccttctcaagtcacmtctcctgggaagctttttcagagcggccgccctcccccaggtggaattgacatttcagtctctcttcaaacccctgcctacccagtacagatttctcaaa

SEQ ID NO: 533904 - DNA, 201 bp, Homo sapiens
ctgctttcagaaaaaggttgccaacgttatctaaacaagccaattaaaagataaagattgtcatagtatgtgtggcaataatgactataaaagcatgatcyacctatatgttgtcaacaagaaactggcttcaaatataatgatatacgtaagttcaaagtgaaaggatggaaaacgatgtaacatgaaaccacaaatgaa

SEQ ID NO: 533905 - DNA, 201 bp, Homo sapiens
gttttcctcagagagatgttttgcatatttttgatgagcttcttcctgtgtatttaatgttctttgctgcttttctaaattggactttctcttccattgcrttctctaaataattcatgtttgtgcatatgaaggctattgatttttgttacttttatattttgctaccttattgaattattgtactgtgtgagtcagttt

SEQ ID NO: 533906 - DNA, 201 bp, Homo sapiens
catgtctctgacactgattctttccttccctcttccatatttaaggactattataattacatggggccctctttgataatccaggataatctccctaggtraattcagctaatcagctaatcagaaccttaattttatctacagtcttaattcctctttgctatacaacataacatacttataggttctggggattcagac

SEQ ID NO: 533907 - DNA, 201 bp, Homo sapiens
atagcacttcatttactgggtgcccaagaaacagaaaatagctatcaaagaagtacatgaagaatatgatatttgcagctttcctttccagtttctcctcytcttcctctcttttcaaatactgccatgttttctccatgggataacctaagaacagaaatcatggggcaaagaatttaaaaaacaagtaaaaaaaaaatt

SEQ ID NO: 533908 - DNA, 201 bp, Homo sapiens
taccaaggatatggaagaactgagtaataccaacaggaccatcttgatgtttgtaaaatactctacccaacaacagcagaatacacattcctttcaagtgyacatggaacatttgccaagagagaccacattctgggtcctaaaactaacaaatttaaaacaatgaaattgtacaaagtatgttctctgacatactttgtt

SEQ ID NO: 533909 - DNA, 201 bp, Homo sapiens
gaaaaatgtccagtttcaacctgggataataaaaaagttctggagatggatggtggtgatatcacacagcaatgtggatgtaaaaatgccactgaagtgtrcttaaaaatggttacaatggtaaatttcatcatatatgtattttaccacaataaaaaattaacttaaaaaaccgataagtggcatctatgcaatgatatc

SEQ ID NO: 533910 - DNA, 201 bp, Homo sapiens
aggggagcggtgctgttggtgcattcagaaaacttcctgaatctgaggagttgccattcctggtgcagcctgccacttcatcgtggcgctgtttgtctccygggtgctaagcctacatatttgagctccccaagatttgttctcagaatgtgtctgttcaggtctcctagtcttcaccttgtcatctgatctacagtttca

SEQ ID NO: 533911 - DNA, 201 bp, Homo sapiens
ttttcagaaaacaaattcttcgttttttagtacaaaccaaaaccttctctggaagttgctctatcttttaatgatatctgtgatcacctggcaacccaggytgggaatttcaaaatcagcattatgtcatgcctgctgattttttggagacggagtcttgctctgttacctggagtgcagtggcatgatctcgtctcactg

SEQ ID NO: 533912 - DNA, 201 bp, Homo sapiens
catgcctgctgattttttggagacggagtcttgctctgttacctggagtgcagtggcatgatctcgtctcactgcagcctctgtctcttgggcttaagcarttctctgcctcagcctcctgagtagttggaaatacaggcatgtgctaccacacctagctagtttttgtatttttagtagatggggtttcaccatcttggc

SEQ ID NO: 533913 - DNA, 201 bp, Homo sapiens
gagacggagtcttgctctgttacctggagtgcagtggcatgatctcgtctcactgcagcctctgtctcttgggcttaagcaattctctgcctcagcctccygagtagttggaaatacaggcatgtgctaccacacctagctagtttttgtatttttagtagatggggtttcaccatcttggccaggctggtcttgaactcc

SEQ ID NO: 533914 - DNA, 201 bp, Homo sapiens
gtttaaccagatatctgagtatcccatgtcctactcaaggtgacacataaaattaactatgacacctcctgacactgtgagccacattcacataagaatartttgaaagggaaaagaattaaggaagaaaaagcaaggaaaagcagctctagctcaactctactggcaaaaatccataactaattcgaagagatttagctg

SEQ ID NO: 533915 - DNA, 201 bp, Homo sapiens
tggccatgtcatggctgctttttgccttcttttctgttcactcatcatttctggtgaattctttctctctggcacttaccacatcctcattcttctctctmctcatctctgttaaaactgtggcagtgctttctaatccacaagcacatggtccttggtaattttccctttgaccccgtttcaattgctgcatggtgcccc

SEQ ID NO: 533916 - DNA, 201 bp, Homo sapiens
aacccctagggctcttggcttgtatcacttttattacctactagttcttgtagttatttgtttttatgtcctctctcccctacagactataagctcttagsgggtgggggctatgcctcttaataattttagtatctctcacactaaaggacactgtcctttacaatagtagaattttaagggaagttatctcccaataga

SEQ ID NO: 533917 - DNA, 201 bp, Homo sapiens
tcatctgtagtctgcatttactagattaaaaatcattttctaggttgaaaagagttttcaactatagagacttccagtgttgttcaagagaaacggtaacrccagttgggtaaatattcttttgtaggtgatctgattttttttttttcctccttgaaagctttagaatcttctctcatccctggtgttttaaaacttttt

SEQ ID NO: 533918 - DNA, 201 bp, Homo sapiens
atattctcattaaattctagagttttatttcttgttttaatatataaaataagtaaatgttcttttaattattgaataggatttgggttctggggataatwatctgaagtggaaaactgctagccttttggaaggttaatcaatgaaaatgagggttaatatgaaagctttttgcaatgttaactttagggtttacactga

SEQ ID NO: 533919 - DNA, 201 bp, Homo sapiens
aagaaaatagcctcagaagcaggactttacctggtgcacgcattcatgatctggatgctgtttcagcatgtagagaggaaacccaaacaggccatgagagragctcaggccaagctggattctgaattcccatgtcctttagcaaagtctgggtctctcaagagctaaaggattaagataaaggcctctgctactcatgat

SEQ ID NO: 533920 - DNA, 201 bp, Homo sapiens
ccagttctctgcctcctaataccatcactttgggggttaggtttcagcacaggaatttggggggacacaaacattcagtccagaacagagtcctagctctsacccacactcgcccacctcagcccaccagcctggctcctgcagagctagcaaagggcactccctagggggcacagaacacccaggatttcaccctctacc

SEQ ID NO: 533921 - DNA, 201 bp, Homo sapiens
ctatgatttttatccttgactcattgacagaatgaattatttaaatagattttctaggattatttttctctgtactgttggactaggttatttgcatattrattctttatgattcactcatgaccattttggcctggagcttattataaatcaataactggcaactttctcaatgatattttttgctttttagcctactaa

SEQ ID NO: 533922 - DNA, 201 bp, Homo sapiens
tcccatggttgatcattggacacccagcaaaactagtaacactgatgggtatcactcctacagggcatggaagatgtcacatgccttcttagcgctgctgrggggatcacctgccagaggctctgggacaatgagaggttcttaatttggagaccagggagctttagagggcaaggactcagctcccttggcccctgagcc

SEQ ID NO: 533923 - DNA, 201 bp, Homo sapiens
agcacagtaggtatattttactcaatattgtcttgtattcgatatgttctattacataattagagtgagatttttttaatcaaattatttttgggagtatraggacacataattctgaccccagtcagtcaactttcccacaaactccctgaaaactcaagccctagtacaacctaggcaagaacctagaaagctggagtg

SEQ ID NO: 533924 - DNA, 201 bp, Homo sapiens
tgatagattctgggggtagaaaccagagtggagagatgaatccaagaggttctcaagttttgggggcctcacagaatcctttgaaaatctggaaaaaaaacaacaacccagaaactgataagctcaattctcagaaaaatacttctttgtgcatgtggtttctggtttcctgaagcccctctgtagacctcctagggtgaa

SEQ ID NO: 533925 - DNA, 201 bp, Homo sapiens
atcgaatatctgatccttgtttacaaaagtcaagtatgttgactcccacttttgctatttcaattgccttcaccctgtgtgaatcacagttgtaataccgacacattacttttgtcagtgtaagataaaaaataaagtattattttttctttaattggattctcaatgcactataaaaatttcagtgtgttatcatctgag

SEQ ID NO: 533926 - DNA, 201 bp, Homo sapiens
tcgaatatctgatccttgtttacaaaagtcaagtatgttgactcccacttttgctatttcaattgccttcaccctgtgtgaatcacagttgtaataccgacacattacttttgtcagtgtaagataaaaaataaagtattattttttctttaattggattctcaatgcactataaaaatttcagtgtgttatcatctgagg

SEQ ID NO: 533927 - DNA, 201 bp, Homo sapiens
gggtcttgttagtatttcatctattttaattttttttttttttttttttgagacggagtctcgctctgtcacccaggctggagtgcagtggcacgacctcygctcactgcaagctctgcctcccaggttcacgccagtctcctgtctcagcctcctaagtagctgggactacaggcgcctgccaccacgcccggctaattt

SEQ ID NO: 533928 - DNA, 201 bp, Homo sapiens
gatatcgggaataatttctggtgtttccctcctatgttgatcctgtaagtatcactaggtttacggtggtcttaaagcggcctaaaagaactggacatgcragaaatacatgctagtctacaatgaggatcctcctagtgtttctgtgtcataaatgaatgatatttcctaagacccttgagtcttaacagatcttgatgt

SEQ ID NO: 533929 - DNA, 201 bp, Homo sapiens
ttttttttttttgagacggagtctcgctctgtcacccaggctggagtgcagtggcacgacctccgctcactgcaagctctgcctcccaggttcacgccagyctcctgtctcagcctcctaagtagctgggactacaggcgcctgccaccacgcccggctaattttttgtattttttagaagagacggggtttcaccatgtt

SEQ ID NO: 533930 - DNA, 201 bp, Homo sapiens
catctcttattttttgacttgttagtaatcgccattctgactggtgtaagatggtatctcattgtggttttgatttgcatttctctaattgtgagtgataytgagcttttttttcatagcttgttgacctcatgtatgccttcttttgagaagtgtctgttcatatcgtttgcatgctttttaatggggttgtttgttgtt

SEQ ID NO: 533931 - DNA, 201 bp, Homo sapiens
cccaggctggagtgcagtggcacgacctccgctcactgcaagctctgcctcccaggttcacgccagtctcctgtctcagcctcctaagtagctgggactayaggcgcctgccaccacgcccggctaattttttgtattttttagaagagacggggtttcaccatgttagccaggatggtcttgatctcctgagctcgtgat

SEQ ID NO: 533932 - DNA, 201 bp, Homo sapiens
cctggaatgtaagtggaacactgattcttctaagaccaaagagggaaaaaataggtgaaaaacagagtgggcaaagattcctgtgagaagaataaaaacaattaattgattggcatcacctcagtgccacttcactattttttaccactgttttacttaattttacaactatactatctaccaaggaagtttaaatcaaat

SEQ ID NO: 533933 - DNA, 201 bp, Homo sapiens
cctcagagggacaggatgccttgatcaccctctctccagtgacctcttctcagccagatgctgtctaacacaccctgtgttttcttcactttctttattgkgatctataattttcttattttgcttttacacatttattatctctcaccccgctgcagcatatagtctgtgataacaaagggatttaaaacatcaagatct

SEQ ID NO: 533934 - DNA, 201 bp, Homo sapiens
tcctaagtagctgggactacaggcgcctgccaccacgcccggctaattttttgtattttttagaagagacggggtttcaccatgttagccaggatggtctygatctcctgagctcgtgatctgcccgcctaggcctcccaaagtgctgggattacaggcgtgagccaccgcgcccagcctcatctattttaatattacctt

SEQ ID NO: 533935 - DNA, 201 bp, Homo sapiens
gccagtctctgcgggacagagcccgccgcttcgaagaggccttgaggaagaacacagaggagcagctggaggtcgtttctggattccaggcttccagcccygcaggaaccccgccccagcaaggccgagggactccctcagcagtctcgtcccaagacaaggcctctctgtgaatccgctgctgaagtgacagctggtcac

SEQ ID NO: 533936 - DNA, 201 bp, Homo sapiens
ctggaatgtaagtggaacactgattcttctaagaccaaagagggaaaaaataggtgaaaaacagagtgggcaaagattcctgtgagaagaataaaaacaattaattgattggcatcacctcagtgccacttcactattttttaccactgttttacttaattttacaactatactatctaccaaggaagtttaaatcaaatg

SEQ ID NO: 533937 - DNA, 201 bp, Homo sapiens
tcctggaatgtaagtggaacactgattcttctaagaccaaagagggaaaaaataggtgaaaaacagagtgggcaaagattcctgtgagaagaataaaaacaattaattgattggcatcacctcagtgccacttcactattttttaccactgttttacttaattttacaactatactatctaccaaggaagtttaaatcaaa

SEQ ID NO: 533938 - DNA, 201 bp, Homo sapiens
aataaccagaatctacaagggactcaaacaaatcagaagaaagaaaatcccatcaaaaagtgggcaaaagacataaatagacaattcccaaaagaagatasgtaaatggccaacaaacatacgaaaaaatgctcatcatcactaattatcagggaaatgcaaatcaaaactacaatgtgataccgccatactcctgcaaga

SEQ ID NO: 533939 - DNA, 201 bp, Homo sapiens
tggaatgtaagtggaacactgattcttctaagaccaaagagggaaaaaataggtgaaaaacagagtgggcaaagattcctgtgagaagaataaaaacaattaattgattggcatcacctcagtgccacttcactattttttaccactgttttacttaattttacaactatactatctaccaaggaagtttaaatcaaatgg

SEQ ID NO: 533940 - DNA, 201 bp, Homo sapiens
tattttctacactcttcccttcattattccaaaaccatataaaaatcatgacttcaaagcataggctgagaaggtggacagtactgagtgatttgggtagrtggaatctcatgctggagagaggggatggaatcatgcaataaatatttactggacaccagctgtgctgggctttctatctcgggatggcttttcctgttt

SEQ ID NO: 533941 - DNA, 201 bp, Homo sapiens
attgtcaagtattctatacccttactgattttctctctatatgttctttcagtagctgagaaagggcttgaaacatcagactataattgcagacttgtctrtttcctttgtcaactttatcagcctttcctccatatattctgaagctctgtaaggtatataaagttttagttttatcattttgatgaattggccacttta

SEQ ID NO: 533942 - DNA, 201 bp, Homo sapiens
tttttttttttttttttttttttttgagacagagtctccctctgttgcccaggctggagtaaaattggcatgatctgggctcactgcaacctctgcctccygggttcaagtgattctactgcctcagcctcctgagtagctgggattacaggtgcgtgccaccatgcccggctaatttttggtatttttattagagacggg

SEQ ID NO: 533943 - DNA, 201 bp, Homo sapiens
aattttacttccattttgaaatgctaaagccactgatcagaaaacatgattcaactgaatttgctcacaaaaaatattgtttcttttaatttgcttttggrcctctgatgtttctcctgaaaatcactgttatgaaggatccaggggctttagcaatccatatttataacataacagttgagtagcattagtagatttaga

SEQ ID NO: 533944 - DNA, 201 bp, Homo sapiens
caccaggatttctctctttattggctgcctcccaactgatttccctgtcttcagccttgcccctctccagcccatcttccacatagcaaatcatacccagytctccctcctttaaaattctttgttggctccacattgctgtcagaagaagggccagacaccttaatgtcaagcaagactcttccagctgacctctgcagt

SEQ ID NO: 533945 - DNA, 201 bp, Homo sapiens
tagggtttacactgatgaatactataaaatacatttacatacataacacatttgattttctacgtctgacatgcattttaaataagatcagggttgacaakaaatgttattaataacttacagaaacagccattaacccatctcatgttcatcggcaatgagagagtcattttttattcatggaaaaagcagccaaaggtg

SEQ ID NO: 533946 - DNA, 201 bp, Homo sapiens
gagtctagtaattttagcacttttaaaactgtttatttctctatgccataggatgctttcagtgaatgaaatcttctccactaaaccatgatgatttaagktgtttgaaaggcagcaccatctgttttccactgggcttcccaatagaacacaacacaatttcagttgaaatcagttgctatttatgttttcaagatattt

SEQ ID NO: 533947 - DNA, 201 bp, Homo sapiens
tgaggcaggcagatcacctgaggtcaggaatttgagaccagcctggccaacatggtgaaacctgtctctactaaaaaaaattagccaggtgtggtggcackgcctgtaatctcagctgctctggaggctgaggcaggagaatcacttgaacccaggaggtggaggttgcagtgagccgaggttgcaccactgcaatccagc

SEQ ID NO: 533948 - DNA, 201 bp, Homo sapiens
gtgcttctgctgacatctgagtcaggcagacgacatatattctagttttgaatttttataacaacctcacacatatatggtgaataaccttctgagtgagtgttaagctaaaaacatatcgtttttgagacatgaaagtggaggttgatcatttgattttcatggcaatctctttcttttgagttgtaaacttgtggtggt

SEQ ID NO: 533949 - DNA, 201 bp, Homo sapiens
agtacagttgtgaggactgctatatcagtttttaatgctagtgttgggatgcaattttaatcctgatcccattcacatttgtctgttcgttacatttgtcrtgagggtccagggtggaccagccactctgctgggctccagagttcagcagggagcaagaccaacacaggcttccaggctccagttgttggtacaagataa

SEQ ID NO: 533950 - DNA, 201 bp, Homo sapiens
aaggaaaatcatgatttctttatttaaaaaggctatggcgtgccttcagcacattatcattttagttaatatattcacttggcttccctgtaaatgaaacrtacttatgcgaggtgactaatacattaatctaagctgatggcatttaaaccctctgctcaaaatagaaagtgagagttggatctgattttatttctgtgc

SEQ ID NO: 533951 - DNA, 201 bp, Homo sapiens
gcaaagtctgggtctctcaagagctaaaggattaagataaaggcctctgctactcatgattaccaaggaccgtgttctgtgtggtttgttcctcttatctrcagtcctgacaacagcttgggtacatgagacctgtctgcacagctgctgacatctccccagggtacacactgctgacgtccaatgctttaacgagacaca

SEQ ID NO: 533952 - DNA, 201 bp, Homo sapiens
cccatgtcctttagcaaagtctgggtctctcaagagctaaaggattaagataaaggcctctgctactcatgattaccaaggaccgtgttctgtgtggtttrttcctcttatctgcagtcctgacaacagcttgggtacatgagacctgtctgcacagctgctgacatctccccagggtacacactgctgacgtccaatgct

SEQ ID NO: 533953 - DNA, 201 bp, Homo sapiens
catgcagaatgaaatgggaagagggaagctgacacattgtgtagggagtatctgtctaggttgcaggggcaggagataggagacagccggagaaggcttgrtcagcgaggcagaggagtgtcagacacgaccagcatcaccaaagctgagggagagaggttcctggaaagagatggctggtcaagccatctgtgctgtggg

SEQ ID NO: 533954 - DNA, 201 bp, Homo sapiens
gtgcattcagcaaaatccccaaagggagaaaaaaaatctgtagttatttataaaatactctatttctgtgaatatatctggagaaaggtagacaataaggrgaaatattacagccaaaagaatagtcttctatgggaagaaactttcgtagtgcaacaaagtaatgatgagttccatttacttatccaagcccaggggaaa

SEQ ID NO: 533955 - DNA, 201 bp, Homo sapiens
ggctggtcaagccatctgtgctgtggggctgagatgttttgatattgaggagaatgggtctgcagactgtcattaagatgtcactggtagctttgaagtgmgtttaacaaaatgtatgaaggcagaaatcaggttacaagggggtaaggaaggtaaaggtggagagtgtctactactgttgagaagtttggtgaggaaaag

SEQ ID NO: 533956 - DNA, 201 bp, Homo sapiens
gggatttcggcacagctaacactggaatgccagacaaaaagccaaagtgttgagacattacttgatccttctgccaggagaatcaatgcaggaaaagaacycaaattacctgtcatcatacaatgtgctgcatcttttgcttacataattgtttgacagatttatacctcttgaaattatttcatatggctaagctagatt

SEQ ID NO: 533957 - DNA, 201 bp, Homo sapiens
agctttgaagtgagtttaacaaaatgtatgaaggcagaaatcaggttacaagggggtaaggaaggtaaaggtggagagtgtctactactgttgagaagttwggtgaggaaaagggaaagaaccgtagcaggagaagttggtttgttatgtgtttgctcttttttttaagcacataagaatgcttatgctctgaggagaaag

SEQ ID NO: 533958 - DNA, 201 bp, Homo sapiens
ggttccttctcatttgggtaccctatgtcagagggaagatctagggctcaagggctgttgttcagattcgtttgtcccacagggtgctcgctttatgtggkgttctcccttcccctagggatggggcttcctgagagctgaactgtaattattgttgtattttttctgggtctagccacctagctgagctaccaggctcca

SEQ ID NO: 533959 - DNA, 201 bp, Homo sapiens
ggtcatctcaagtatgggcagtagcagggtgacccagtgagctcctctggaggccctgcagcaagagagaataaacactgtgcctagcgaaggcagggacrtgtttctaaggcaaggatgactaagtgactcttttcaaattttgtttcacatgggaaaatgtcttctgatttgagtaaaaagtgtgtctgtgtagggaag

SEQ ID NO: 533960 - DNA, 201 bp, Homo sapiens
gcagtttcttcataatgtcgttggtctttacattttggtatatttttgcagtacctggtactggttgttcctttccgtggttagtgcttccttcaggagcrtcttataaggcaggccttgtggtgacaatatctctcagcatttgcttgtctgtaaaggattttatttctccttcacttatgaagcttagtttgcctggat

SEQ ID NO: 533961 - DNA, 201 bp, Homo sapiens
caccagttttacaaattcccaccaacagtgcacaagagtttcagttttcccacaccctccctaatacttatcttttgcatttttgatagtgcccatcctartgggtgtgaggtggcatcagtatgagctattttaaacagaagtactacaagcatccatgtttcaaccatgaaagtttaacataatattttccataatttg

SEQ ID NO: 533962 - DNA, 201 bp, Homo sapiens
cttaaatttatagaaattttattcatcaattgtacctcaataaagctggctggggaaagacttcacgagggtcccctgcctccaaatctagtgtgcacctkccacttttcttgctttggtattctattgacaaagacgtgaaattgatttatcacgtctagcagcaccaacagaccaaaatatcaatgcaaaatagcatct

SEQ ID NO: 533963 - DNA, 201 bp, Homo sapiens
atgtaagagaatgatgccagatgcaagaggatttgatacaagtgcatttgaactctacagatgatacaaaatatttctcttcttaagaaattttcataaaytgttaaataaaagactgtgagagattttgcgctcaattcagcttctgctacacatttcagtgaacagattattctggcagtatgtcagcaggaggctaga

SEQ ID NO: 533964 - DNA, 201 bp, Homo sapiens
cataagtggctcaggagagaggcccactgcacagtggctgcacatggaaggcagagctgaccttgaagagatgaaggaaacagttctaaagaagtgaccaytgagctgagagctgaacaatccgttgggcagaagcagaggtaacatgatgcggattgcaagtggcgggagcttcagcaccaagccctgcggttggagaag

SEQ ID NO: 533965 - DNA, 201 bp, Homo sapiens
gatgggtgcaccacagtcttggaaatcaccactaaagaacttatccatataaccacctgttccccaaaaacttattgaaatataaaaaaaagaaaaatccrtcatatccaaagtatacgataccctgtaattttctttttaaaaaaatttttaaatatattttttattttattttactttaagttccaggatacatgtggt

SEQ ID NO: 533966 - DNA, 201 bp, Homo sapiens
cattccggtaggttgcctgttcactctgatactaggatttcctatttaataaatggttctgggaaaattggctagccatatgcagaaaactgaaactggascccatccttacaccttatacaaaaattaactcaagatggattaaagatttaaatgtaaaatcccaaaccataaaaaccttagaagaaaacctaggcaata

SEQ ID NO: 533967 - DNA, 201 bp, Homo sapiens
cgacaaatgagatgtaattaaagagcttctgcacagcaaaagataccctgtaattttcaaagtagttaaaacaagtttaaataaagtctaaattctttctyaaaaaataataaaataaaataaaatggataaggaaaaccaggtggcatataatactcaaacagtgaaaaagaaggaataacatgttcaagttgaaatatt

SEQ ID NO: 533968 - DNA, 201 bp, Homo sapiens
tagggagaacattcttccagtgggtaacctagaaagagaattggatgtttatactaaaggtgtctctttgggacttttctgtcattttacatttttggcctttttttttttttcttctcagggcctcatcctgggttattttctctctctaaaaatcacatccccggctggtcacagtggctcacgcctgtaattctagca

SEQ ID NO: 533969 - DNA, 201 bp, Homo sapiens
gtttaatggactcacagttccacatgtctggagaggcgtcacaatcatgatggaaggcgaggaagagcaagtcacatcttacgtggatggcagcaggcaaagagagagagagagcttgtgcaggggagctcctctttttaaaaccatcagatttcatgagacatattcactatcacgagaacagcacgggaaagacttgcc

SEQ ID NO: 533970 - DNA, 201 bp, Homo sapiens
tttaatggactcacagttccacatgtctggagaggcgtcacaatcatgatggaaggcgaggaagagcaagtcacatcttacgtggatggcagcaggcaaagagagagagagagcttgtgcaggggagctcctctttttaaaaccatcagatttcatgagacatattcactatcacgagaacagcacgggaaagacttgccc

SEQ ID NO: 533971 - DNA, 201 bp, Homo sapiens
ccacatgttctttcttttcttttgttttccctgttttactgcctccttttggcactgaatagtttatgattccatttttttttgttcatgtattagctatstgtctcttatttttgtgttctcagtggttgttttagggttcataatattaatgtatgtttttatcctttaactttctagcttcaagtggtattatatcac

SEQ ID NO: 533972 - DNA, 201 bp, Homo sapiens
agtgagaagaagataggtagcatcttcaaaactctacctggaaatctggaaatctccttagctagatttttaagttcataagttacaatctatacgtttcrtattatagaaggtaacattgttgctcaattttctgctattcattaacaagaattcacttcccattagtttcctcagcttcctttaagccttcactgacag

SEQ ID NO: 533973 - DNA, 201 bp, Homo sapiens
ctaatgccaccacatggggtgtggaaaggccatatgctgtatgtgcagaggactttggtgcctcagagcaagatgtcatcaccatcttctgctaccttccyagaatagtttcctgtggttttgatgcctgagctggattttaatgaatgaaacagagttcacctggcaggcatggaatgcgaaaggcatcccaggtagagc

SEQ ID NO: 533974 - DNA, 201 bp, Homo sapiens
ttttggcactgaatagtttatgattccatttttttttgttcatgtattagctatctgtctcttatttttgtgttctcagtggttgttttagggttcataakattaatgtatgtttttatcctttaactttctagcttcaagtggtattatatcactttatatatgatgtatgaatcttaccaacagcatacttccatctct

SEQ ID NO: 533975 - DNA, 201 bp, Homo sapiens
aacaacacatcttttaaaagttcagcagcagcacaatcttttttgttgttcgaatagaaattttcatcttttttttgggcaaaatcttgtcagaatataatgccttgataaaaatgaaagaaatgagtccacttcagcttctttgcatgagatttgaatatttgatcttaggtttttattaaaaaatgtttattagcttct

SEQ ID NO: 533976 - DNA, 201 bp, Homo sapiens
ttcatttttaccagaacccattttgcagatgaggagaaaacttagattcaaaaagattctgaaatttttctgagaccacctagcatatagtagtggatccwtgtgctttccactaggcagatggctccagggggccagggtggcctcaagagtccatgagccactgggcactgcaggttgagggctcacagtcttgtccct

SEQ ID NO: 533977 - DNA, 201 bp, Homo sapiens
acaacacatcttttaaaagttcagcagcagcacaatcttttttgttgttcgaatagaaattttcatcttttttttgggcaaaatcttgtcagaatataatgccttgataaaaatgaaagaaatgagtccacttcagcttctttgcatgagatttgaatatttgatcttaggtttttattaaaaaatgtttattagcttctg

SEQ ID NO: 533978 - DNA, 201 bp, Homo sapiens
ctttgcctgaagccacctctactcagcactatgtaggaccagcactggaaagaatttttaggagttttctattgctgcctaactaattagcacacacttarctgctaaaaacacctattgagtagctcacatgcagaagagctgagttctctgctcaggatctcaaaggctggaatcaaggcattgaatggaatgagttct

SEQ ID NO: 533979 - DNA, 201 bp, Homo sapiens
aagaaattttaaaaattagctgggcttggtgatgcatgcctgtagtcccagctactgaggctgaggcaggagtattccttgagtccaggaggtcatggctrcagtgagttatgattgtgccgtcatactccagcctgaacaaaagagtgagaccttgtccctccccgccaaaaccaaaccaaaacaaaacaaaacaaaaaa

SEQ ID NO: 533980 - DNA, 201 bp, Homo sapiens
caacacatcttttaaaagttcagcagcagcacaatcttttttgttgttcgaatagaaattttcatcttttttttgggcaaaatcttgtcagaatataatgccttgataaaaatgaaagaaatgagtccacttcagcttctttgcatgagatttgaatatttgatcttaggtttttattaaaaaatgtttattagcttctgg

SEQ ID NO: 533981 - DNA, 201 bp, Homo sapiens
aggtagaatgtgtgtgatagttctgcccccgcacagctggtcggtcaccctgccctgtggaaagacagggtgactgaagtgtttgcttgtgcctgggtggytccctcatgatcaaccagcaggagatatgcctttattggagcacctcaagaagaaagcaactgaagagagagaagagtgtgtagaagaattcaagttcac

SEQ ID NO: 533982 - DNA, 201 bp, Homo sapiens
aactaagaggaatcatatactgtttattcattatttttatttgctaacatttacatatgtttactatgtggcaagcactggagtaaggctaactgtacatktccatatttaattctcatgacagccttgtgtgggcactgccattagcttcgagagatgaattactttgcctaaagtcacactattaaattggaacagggc

SEQ ID NO: 533983 - DNA, 201 bp, Homo sapiens
caggcacagacgatttagcataattgtttaaggccctaggattttcacaaaggtaaatgaacattggcgttaacttaaagtttccaattgcattcatttcttttttttttttttgtcatatatattttttttattatactttaagttttagggtacatgtgcacattgtgcaggttagttacatatgtatacatgtgccat

SEQ ID NO: 533984 - DNA, 201 bp, Homo sapiens
aacacatcttttaaaagttcagcagcagcacaatcttttttgttgttcgaatagaaattttcatcttttttttgggcaaaatcttgtcagaatataatgccttgataaaaatgaaagaaatgagtccacttcagcttctttgcatgagatttgaatatttgatcttaggtttttattaaaaaatgtttattagcttctgga

SEQ ID NO: 533985 - DNA, 201 bp, Homo sapiens
actgccattagcttcgagagatgaattactttgcctaaagtcacactattaaattggaacagggctgggatctgaagcaaggtcattccaacatcaaagcycacgttcatcatgacgttctgctgcctcccagtcgtttaggtttgcaatgatacgatcaagtgagaaaacacaatgtagaggaagcacagaaacttgtct

SEQ ID NO: 533986 - DNA, 201 bp, Homo sapiens
acacatcttttaaaagttcagcagcagcacaatcttttttgttgttcgaatagaaattttcatcttttttttgggcaaaatcttgtcagaatataatgccttgataaaaatgaaagaaatgagtccacttcagcttctttgcatgagatttgaatatttgatcttaggtttttattaaaaaatgtttattagcttctggat

SEQ ID NO: 533987 - DNA, 201 bp, Homo sapiens
cgtttaggtttgcaatgatacgatcaagtgagaaaacacaatgtagaggaagcacagaaacttgtctcagctctgaccctcatctgcacagaccctttctstgtttcatggagcctggaaaaatgtacagaacctctccctattttgatcacctcatgagtaaagtgagaatataatgagggtgacgtgagataacagaca

SEQ ID NO: 533988 - DNA, 201 bp, Homo sapiens
ttgcattctttccaacttttgtctcttatgaataatgtcaaatttatgtgcaagttttatgtaaacatatcttttcattggaatatacctagaaggaggawtgcttggtcacattgcacctctgtatttaatcttccaagaaactgccaggctgttttccaaagtggctgcaccattttacattcccaccagctatatgtg

SEQ ID NO: 533989 - DNA, 201 bp, Homo sapiens
tgcaatgatacgatcaagtgagaaaacacaatgtagaggaagcacagaaacttgtctcagctctgaccctcatctgcacagaccctttctctgtttcatgragcctggaaaaatgtacagaacctctccctattttgatcacctcatgagtaaagtgagaatataatgagggtgacgtgagataacagacatgaaagttgg

SEQ ID NO: 533990 - DNA, 201 bp, Homo sapiens
ttcattggaatatacctagaaggaggaatgcttggtcacattgcacctctgtatttaatcttccaagaaactgccaggctgttttccaaagtggctgcacyattttacattcccaccagctatatgtggagggctccagtttctccatatcctcaccaacacttgttattgtctgtctttttaattatagctgtcctaatg

SEQ ID NO: 533991 - DNA, 201 bp, Homo sapiens
tatgtggagggctccagtttctccatatcctcaccaacacttgttattgtctgtctttttaattatagctgtcctaatgagtgtgtcatggtatctgattrtggcattgatttgcactttttctgatggctgaaaatgctgttcattttgtcatgtgttgctggccagttagttgtacatgttcttgggggagatacctat

SEQ ID NO: 533992 - DNA, 201 bp, Homo sapiens
tttctctgtttcatggagcctggaaaaatgtacagaacctctccctattttgatcacctcatgagtaaagtgagaatataatgagggtgacgtgagataayagacatgaaagttggaaatactctatcacgttgtgctgatgtccatcattcaagaaataatcattgcgtgtctcctgggctggaaactctgctcagaacg

SEQ ID NO: 533993 - DNA, 201 bp, Homo sapiens
ttatttgcaaatattttatcccattcttagggtttttttctcttttttgatagtgtcctttgaagcacaaaaactttcagttttgatgaaattcaacttamctaaatttttcttttgttacttatgcttttcatgtcatagctaagaaaccattggctaatctggtgtcatcaagatttatacctatttttccccaagagt

SEQ ID NO: 533994 - DNA, 201 bp, Homo sapiens
cataaatataaaaggcagtatcagggactgtgatccagtccaagaggtcaggaaacaatattgcctgcaggttgggtgaagggaatgggaggaactattcwggggagatggttgacaggtcgggccttgcagcacctcctaagcagtggtggagaccctggcccttatctaagagcaaaagcggatcctctgagtggaggg

SEQ ID NO: 533995 - DNA, 201 bp, Homo sapiens
tatcagggactgtgatccagtccaagaggtcaggaaacaatattgcctgcaggttgggtgaagggaatgggaggaactattctggggagatggttgacagrtcgggccttgcagcacctcctaagcagtggtggagaccctggcccttatctaagagcaaaagcggatcctctgagtggagggtgatctgagaagactcac

SEQ ID NO: 533996 - DNA, 201 bp, Homo sapiens
agacttcaaggaggtcatatcaggtcgcctcatttgtcccaggtaattaagaagtagagtttttgcagagagtaaccatgatggaattggacatgggattrcataaagaggcaggtaatggttctttgagtaatacactgagtcagtaagaggtgcatgggggaattgcagagttgcacagaaggcccatgtgaggttgga

SEQ ID NO: 533997 - DNA, 201 bp, Homo sapiens
tgcacagaaggcccatgtgaggttggaaaacatgattttataccggaaacaatctgatggattttagggccgtctccagtgatgtggtggtagatcccacrtctctccaatttttttccccatgcatgataatttatagcaattaaaactccaaagtgaatatataatgtttctcaggagcttggagtcaagtgatacata

SEQ ID NO: 533998 - DNA, 201 bp, Homo sapiens
tttgtgaggctttgatgagtttgggtttggtcatgttgagaagcattcctataactacatccagcagacatccatcctataactacatcatacatccattmctataagtacatccacagcagcatacttcccttcctataactacatccagcagatttgggctgaaaataaggagaacagccatggaaaataagtgatgtt

SEQ ID NO: 533999 - DNA, 201 bp, Homo sapiens
tggactggtagccaggaccactgggccctcttaaaactaactggctgggtggccgtaggcaagctaattaatttacttgtttgggcctcaggttcttcatyagtaaaaggaagcatttgaactcagtgatattcagtgttccctccaactgattctttaaaaagaagtcttacacatgttaagctgaattacagaatgtgt

SEQ ID NO: 534000 - DNA, 201 bp, Homo sapiens
aacccttgtggtatttttccaaaggcagtagacagagcgaagagattgatatatttttttttttgcaaggagaaataaaataatttatatggttatgtcasagggttttttgggctcctgtaacaggcagcaattagcaggagagagttaatgggagcccaaactagggggttacagtgggaatgataaagtaagaaagtg

SEQ ID NO: 534001 - DNA, 201 bp, Homo sapiens
attagacacagcaagagattaagaacaataataataaaatagataattgtaataatatgccagcccgtcactcttcttgcactttggggccattcttaagkaacataagggttccttgaacacaggcactaagacgccgccacagtccatctgatcactgagatggctattaagtgactcagggtaggtaggcagggctta

SEQ ID NO: 534002 - DNA, 201 bp, Homo sapiens
tgagatggctattaagtgactcagggtaggtaggcagggcttacagtgtgaatctcccagaccaagggatgattcccatcctggatgggactgaacaatgmagcatgagatttcatcttgctactcagaatgttatgcaatttaaaacttataaattgtttgtttctggaatttttcacttaatatttttggactacagtt

SEQ ID NO: 534003 - DNA, 201 bp, Homo sapiens
ttcttatcacctgtgcatgaggacagagggccaccagcagcttcaagagctgccctcctccacatcttttagtggcttccatgctcgcgttaagtattagyagatgctggtgtccctccccacccactctccttggttttcagggttgagtactaaaaacacgaccacagtaatgcagggctcctccatcccattcctgtg

SEQ ID NO: 534004 - DNA, 201 bp, Homo sapiens
tcaactgccaacacccatttacgctgacccctttgattagaaaatgaaaaatgccaccacacttcgggccctgtcagccgtgaggtgtgcctgtaaggttrgcgccaacacaggagacttctgttgccacttggaagatttgttaatgaaggaaatgagccagggcggaccctgtccagatggtttcactggagaaatgcg

SEQ ID NO: 534005 - DNA, 201 bp, Homo sapiens
gccgtgaggtgtgcctgtaaggttggcgccaacacaggagacttctgttgccacttggaagatttgttaatgaaggaaatgagccagggcggaccctgtcmagatggtttcactggagaaatgcgctaattaggctggaggtcaaagagctgctgctgtttgaagcaggtgctattagttttgtgtgcaccagtggctttg

SEQ ID NO: 534006 - DNA, 201 bp, Homo sapiens
tggcgccaacacaggagacttctgttgccacttggaagatttgttaatgaaggaaatgagccagggcggaccctgtccagatggtttcactggagaaatgygctaattaggctggaggtcaaagagctgctgctgtttgaagcaggtgctattagttttgtgtgcaccagtggctttgaaggtgcatgaaaaatagaccac

SEQ ID NO: 534007 - DNA, 201 bp, Homo sapiens
acatagatacacattggacctgattaactgaggaataaattccccaaaactaattttaacaatctaaatagtggtaaggttatattgctttcatatagttkgttttgttgctggaccttgtggacactgcataacaaaaaaaaatgataaatggcttagtaaatagtagaaagcagttagagatctattattaggaatttt

SEQ ID NO: 534008 - DNA, 201 bp, Homo sapiens
gtttatgcctagtgttccattactggaacgctaagcttgtgggagttatttatatcctatcgctcaatgtcattgccaatgtctgatttttcacacaaaaraatttacagcctctggcataaatgggttaaaacatggttgaatattgaaaacacatacctatatagtccccatgtagctaaagaattaacactgaacaac

SEQ ID NO: 534009 - DNA, 201 bp, Homo sapiens
gagaaattggcctaaagaaaggggcaataggccccacacgaatccaaaacccagcagggcagtcactaagtcttaaagctccaaaataatctcctttgackccatgtcccacatccagggcacactagtgcatggggtgagctcccaaggccttaggtagctcccccactgtggctttgcagggtttagtctccaaggctg

SEQ ID NO: 534010 - DNA, 201 bp, Homo sapiens
ctagtgcatggggtgagctcccaaggccttaggtagctcccccactgtggctttgcagggtttagtctccaaggctgctctcatgggctggagttgagtgyctgtggcttttccttgctgagaggtgcaggctgccaatggatctaccattctggggtctggaggatggcggcccccttcccatagctcccccaggcagtg

SEQ ID NO: 534011 - DNA, 201 bp, Homo sapiens
ttgaccagcatctctgagggtgctttgcagtattgtaaaatgagtgcatttcaactgtattgtaaaaacattatgaaaatgcgttttaagggcactccatrgaaaagacttcttatgtcatcatattacaattttctgagttgtttccttagcaaatagaatacctgctttaattttacttccattttgaaatgctaaagc

SEQ ID NO: 534012 - DNA, 201 bp, Homo sapiens
gccaaggttggagccacagtgattgggatgcagggagcaatatcccaaggctgcacagggcagcaggaccctgggcctggcccacaaaaccattcttcccrcctaggcctctgggcctgtgatgggagggctgccatgaaggtctctgaaatgcatttgaggtctttttcccattgccttggatattagcacttgactccc

SEQ ID NO: 534013 - DNA, 201 bp, Homo sapiens
caaagctgcttccacattttcagtatctgtatagcaatgccccactcctcaataccagttttccgtgttagattattcttgtataaccatgaagaaatacyggagactgggtaatttataaatttagaagaagagattgaattggctcatggttctgcaggctttacaggaagcatggcaccgatatcagcttagcttctg

SEQ ID NO: 534014 - DNA, 201 bp, Homo sapiens
aatcacatgggttcatggttgatatcacgagatctaagggatgaagcccccaaaggagagggtgtaggaaaagaaaagaaagtctgtggaccagcagggasgcctgcatccgagggttgtggggagaaaggacatccagtgaatgagaaagaaagggtggtgggagacaggaaggggccactgagtcaaaggaagtggggg

SEQ ID NO: 534015 - DNA, 201 bp, Homo sapiens
tcacatgggttcatggttgatatcacgagatctaagggatgaagcccccaaaggagagggtgtaggaaaagaaaagaaagtctgtggaccagcagggaggcctgcatccgagggttgtggggagaaaggacatccagtgaatgagaaagaaagggtggtgggagacaggaaggggccactgagtcaaaggaagtgggggtg

SEQ ID NO: 534016 - DNA, 201 bp, Homo sapiens
taacacctggctggctgttctcttgtcagggaggttctgtgctcagaaccccagcaagatgctgagtccttcccttcccctgcagtcaggcagccaccaaygcagaagccacatggggaaaagatcacagttctcagtgacactgaagacaaaactcaggctgtgttctgtgaaccctgaatatctgagacaagtctcagt

SEQ ID NO: 534017 - DNA, 201 bp, Homo sapiens
cagcggatttgaggaagaggccttttgagaaaatagataaaggatgctcagctcagttttaggagggagtcaagggacagggagagactgagggtcaagcygtgtccctccaatgactcccgttttactctgtgtgtgtgaaagtcgagtcttcacgatgctcccgagtccctccaagtcctcctcatcaccattcagatc

SEQ ID NO: 534018 - DNA, 201 bp, Homo sapiens
gcaaaagcggatcctctgagtggagggtgatctgagaagactcacacttgggggacagataggcagggagactgaagagcagaccatgcagtagtccacaygggggagggtgatgggggcctggaccagcatggtggagatggcgtgaagtcgatgggtggtggaagagataattgggaggtaagttgcctaggattggtg

SEQ ID NO: 534019 - DNA, 201 bp, Homo sapiens
ctaccccataactttctgatgaataacacctggctggctgttctcttgtcagggaggttctgtgctcagaaccccagcaagatgctgagtccttcccttcycctgcagtcaggcagccaccaacgcagaagccacatggggaaaagatcacagttctcagtgacactgaagacaaaactcaggctgtgttctgtgaaccct

SEQ ID NO: 534020 - DNA, 201 bp, Homo sapiens
ttcaatacactgatttcttttcttttgggtatgtacttaggagtgggatatatgtcttcttctcaacttgtttgagctttaggtgtcacatctaagaaacmattgcctaatccaagatcattcacatttacacctttgttttcttctaagagttatatatttttagctcttacatttaggtctaagatctattttaaatta

SEQ ID NO: 534021 - DNA, 201 bp, Homo sapiens
gtgatctgagaagactcacacttgggggacagataggcagggagactgaagagcagaccatgcagtagtccacatgggggagggtgatgggggcctggacyagcatggtggagatggcgtgaagtcgatgggtggtggaagagataattgggaggtaagttgcctaggattggtggtatgttggagtaagtagggagtaga

SEQ ID NO: 534022 - DNA, 201 bp, Homo sapiens
agccttctttgtatctctatcatgtaacgtggtcctagggtataattattactcagcatgtttgctgattttacatctgtgcttccttttctttcagttaygttgcagtcggaaaaagaagacttaattgtgtccattgaaaatgttgacatttttcatggaacttaacaagctgattctggaacttatatgcaaaagtaa

SEQ ID NO: 534023 - DNA, 201 bp, Homo sapiens
ctgagaagactcacacttgggggacagataggcagggagactgaagagcagaccatgcagtagtccacatgggggagggtgatgggggcctggaccagcawggtggagatggcgtgaagtcgatgggtggtggaagagataattgggaggtaagttgcctaggattggtggtatgttggagtaagtagggagtagagaaaa

SEQ ID NO: 534024 - DNA, 201 bp, Homo sapiens
atttctggagtgaccttgagcacatcttgtcgctcccgctccatttcccagctcccaagtggaaccattacctttaaaaacttttactttagcgtcctctyccaaaatggacctgcagctaccccataactttctgatgaataacacctggctggctgttctcttgtcagggaggttctgtgctcagaaccccagcaagat

SEQ ID NO: 534025 - DNA, 201 bp, Homo sapiens
attggtggtatgttggagtaagtagggagtagagaaaaggtagctacaaaggatgaggtctaggtctttggcccaaaagagtggaatccacagaagtttaygaactgagttcttagactgtacagtttgtggtgcctttgaaacatcaagtgaaggtgttaagtaggccaaataaaactggcgctcttaaaaccactggcc

SEQ ID NO: 534026 - DNA, 201 bp, Homo sapiens
gtatgttggagtaagtagggagtagagaaaaggtagctacaaaggatgaggtctaggtctttggcccaaaagagtggaatccacagaagtttatgaactgrgttcttagactgtacagtttgtggtgcctttgaaacatcaagtgaaggtgttaagtaggccaaataaaactggcgctcttaaaaccactggccagcacat

SEQ ID NO: 534027 - DNA, 201 bp, Homo sapiens
aaaaccactggccagcacatcttgtcaacatttgctttaagaagtcactgagcacctgctgtgagccttcatatgctgggtccgaaaagattctgccttcrtgtaagacacagcactttcccttacggaattggcctcgtttgtgagattaaatgaacacatgacacaatgggaagatttaagtcagtgtgtgattaatta

SEQ ID NO: 534028 - DNA, 201 bp, Homo sapiens
ttgtcaacatttgctttaagaagtcactgagcacctgctgtgagccttcatatgctgggtccgaaaagattctgccttcgtgtaagacacagcactttccyttacggaattggcctcgtttgtgagattaaatgaacacatgacacaatgggaagatttaagtcagtgtgtgattaattaccaaagatcacagtgctctgg

SEQ ID NO: 534029 - DNA, 201 bp, Homo sapiens
atcacagtgctctggaaatgagtggagaggcttcctgaaaaaaaaataggctcaaatgagagaaacctggctgactgagggacagaggagagaggaggcartgatacagcaacacgagcaagagaacagagttggaataaacactaagccgtgtggggacgcagcgaggttgtagattgagtgtagattgcagtgcaccta

SEQ ID NO: 534030 - DNA, 201 bp, Homo sapiens
gctctgctagtcactcacactttcactttttcacttttttttttttttttgatacagagctttgctcttgttaccctggctggagcgcaatggcatgatckcggctcaccgcaacctccgcctcccggcttcaagcaattctcctgcctcagccttccgagtaggtggggttacaggcatgtaccagcacacccagctaat

SEQ ID NO: 534031 - DNA, 201 bp, Homo sapiens
ctcttgttaccctggctggagcgcaatggcatgatcgcggctcaccgcaacctccgcctcccggcttcaagcaattctcctgcctcagccttccgagtagstggggttacaggcatgtaccagcacacccagctaattttgtatttttttttagtagagacagggtttctccatgttggtcaggttggtcttgacctccca

SEQ ID NO: 534032 - DNA, 201 bp, Homo sapiens
gctactattttttttaaaaagcccagaaaataacaagtgttggtgaggatgtgaagacattggaaccctcatgcattgccgattggactagaatggtgtayccactatagaaaacaagatgacaattcctcaaaaaattaaaagtagaattactgtgtcacccagcaattccactactggatatataccccaaaaatgtga

SEQ ID NO: 534033 - DNA, 201 bp, Homo sapiens
gagatatttatgtatccatgttcctagttgtattattcacaacagtcaagaggtggtaacagaccaagtaaccattgatggatgaatggataaacaaaatrtcatttatccatatagcagaagacaattcagccttaaaaggaaaagaaattctgacacatgctacaacatgggtgaaccttgagtacattgtgctgagtg

SEQ ID NO: 534034 - DNA, 201 bp, Homo sapiens
attgtgctgagtgaaataagccagacacaaaggacaaataaatactgcatgattccactaataggaggtacctggagtactcagattcatagagacggaargtaaaatggggttgtcaggggctaaagagaaggaggaatgggaagttactgtttaacaggtatagagtgtcactttgggaagatgcaaaaattctggaga

SEQ ID NO: 534035 - DNA, 201 bp, Homo sapiens
aataatatgaacactttgtcaagaatatgctgtgctgtttctacatgaacggtttcatgcagccactcctgtgttttgttttcttagccaaagcaccttakgtttttcaagagcccagaggcaacctgccgcaggatttacactctgaaaactaatagctttacctgggaagttataaaaatcactcagtaaaatgaagtt

SEQ ID NO: 534036 - DNA, 201 bp, Homo sapiens
attgaatgtattagaaaggtgtctaagtttgagacatcaaagaaggcagtagaagaagagacaaatttgaaggatcagttgagtttgcaggtgggacagasagacagaatagccatgtgaatttgtagaggcatgacacattgcagcagcgagatgggattagacctcctgggccactgctgggcaggcaggcctttctca

SEQ ID NO: 534037 - DNA, 201 bp, Homo sapiens
aataggcggcaaagggagtgggttagagaaggtgaaactcaaggagaggaaaccggttaggaatcgcccagagacagatgatgcagagggactcagatggygacaggaaggagaggaaaggatgggcaaaagaggtcttcaggattatttcgcattataaataccagaaaatgtgagtgcatatacattaaatgtcaataa

SEQ ID NO: 534038 - DNA, 201 bp, Homo sapiens
ttacatttaagatcattctacagtaactcttgacctctatgtagcccatagttgcttaagagctgggacttaagcccagttttgcttatcatgatatctgytgtctttcctgacaccttaatataaattttgggaggaagtgaaaacaatgtgtggggccagtccttctttaatggctaatttaaatataaggtaagtaaa

SEQ ID NO: 534039 - DNA, 201 bp, Homo sapiens
atgttgagaagaggaaaggcaggtagtgtgaccataagtttcattgcttttccaagtgtttctgctacatgagggatttctgaaagccatgcactatctabctgtctgtctgtctgtctgtctgtctatctatctatctatctatctatctatctatctatctatctatcttacttatttgagacagagtctggctttgtc

SEQ ID NO: 534040 - DNA, 201 bp, Homo sapiens
ttcattttgtttcccagctcagataggaggccacacacattgcctaaaaacccacagaaaatggaattgagttgtcaaggcaggacatagttgggaaaacaaagcagaaactcattttaaatgtaaccaggactttcttttctcagtttcatccaactctaacatctaagccctccttgcatttcaaaatcatttctgcta

SEQ ID NO: 534041 - DNA, 201 bp, Homo sapiens
gtttcctttaacctagatttctgatgtgagtttttggtgagtgattcttttctggttcactcattgaacaaacatctgagtgcttgctttaattcacaggygacttggattcaaagataattagaacagtcttaacccttgagggacttgtaagtaactacacggatttgtaatctagtaattagagtgagagtgagaggc

SEQ ID NO: 534042 - DNA, 201 bp, Homo sapiens
gtaactacacggatttgtaatctagtaattagagtgagagtgagaggcctataatcttattatctggactccagttaattctagcagatcaggagttcacrgtacgatggattaagaaaagaatgacctgaaaaaagtttaaattaaatatagtaagttttattgaagatttatttaatcactttctattatttgtttaat

SEQ ID NO: 534043 - DNA, 201 bp, Homo sapiens
ttaaacaacccctgaaaatcataagcaaaaaacaacttaatttgaaaaacaggtaaagatatgaatgcatattttacacactagaagtacaaagtggtcartggctataaacatatgaaaagatattcaaatttactaataactaaacatattccctttttagaatgagatacagtctttttaatactggattataaacct

SEQ ID NO: 534044 - DNA, 201 bp, Homo sapiens
ttgctaacaaagcactttcagtgactgctgcttcatttctcgctttctgatggactgctgagtcactgcagccagatcatcctctgagaatctaggacttsgtatgcccgagacttgctgctgctcattggtgcagctgagtttgatcattatctgctgtgggctgcaaatgggcagtggccccaaatgcactctgaaggt

SEQ ID NO: 534045 - DNA, 201 bp, Homo sapiens
tatgtgcaggaactttctatgcagcattggttacaatgctaaaaaagttggaaacaatctaaatatctgtcaatatggaaatatgtaaataagttatgatrtagccatttaataaatgcttatgtagttattaaaaaatgagatagatctacatgaattacatggaaagatgtccataacatgtcattaaaggtagaaagc

SEQ ID NO: 534046 - DNA, 201 bp, Homo sapiens
tcctaataattttccaatatcatgataaatatgtgaaaaggttctttttaatgatgttgtaataactgcatattgattaaccatagtttggagaactgctygtctcctgttcatttaggttgctttcagtatttcactatcatgaaacaatgaagtacaattaatttaataaatttattttgcaaaatcatatttgttagg

SEQ ID NO: 534047 - DNA, 201 bp, Homo sapiens
gattaatccacagtgctgagtgtatctgtggtttgctcctttttattgttgactagcattccatttgcatgagtaactatacaccacaatgcatttatctrttcttctgctggtagacatgtgggtggtttccactgtcttgctattataaataaggctgttatgaatatccttattacaagccttttgtggacatacatt

SEQ ID NO: 534048 - DNA, 201 bp, Homo sapiens
ccttttctatcctcaagtcctgtttttccttcttaaatcattcccagcaacaatgagtttatgaagggcttcatctgtcgtgttgagaaatgtatcctctkttctcagatgatgtgaacgcacgaaggacttgaccagatggggccagatgcagacacacaaggcccaggaaaggctcaaagtgtggtccttctttacagt

SEQ ID NO: 534049 - DNA, 201 bp, Homo sapiens
aaactcactcccatgataaccctctcccatgataatgacattaatctatatatggagggcagagccctcatgagtcaatagccccttaaaggtcccacctstcaacactgttgcattggggattaagctcctaatacatgctttttggggtgatacattcaagccatagtagggggtcatttaaagggttttattttagat

SEQ ID NO: 534050 - DNA, 201 bp, Homo sapiens
ggtttaatttgttcttctcattcaagttccttaaattgtaacattaggttgttgatttaagatctttcatgttttttattgtaagcacatatggctacaartttgccctttggcactgcttttgtttattccctaagtcttgttatgttgtatttttattttttttgtctctatttattttctaatttcccttgtgatttc

SEQ ID NO: 534051 - DNA, 201 bp, Homo sapiens
atgtctgttcactctgctgattattgcatttactgtgcagaagctttttagttgaattaagtcccagctatttatctctctttttattgcatttgcttttrggttcatggtcataaaatccttgccaaagccagtgtctacaagggtttttctgatgttatcttctagaatttttatggtttctttaatttttgtagattt

SEQ ID NO: 534052 - DNA, 201 bp, Homo sapiens
tccgcctcccgagttcaagcaattatcccgccttagcttcccgagtagctgggattacaggcatccgccacacacctggctaatttttgtatttttagtaragacggggtttcaccattttggccaggctcctgatctcaggtgatgcgcccgccttgaccttccaaagtgctgggattacagatgtgagccaccgtaccc

SEQ ID NO: 534053 - DNA, 201 bp, Homo sapiens
gtttgagtttctcatagattctggatgttagtcctttgtcagatgcatagtttgcaaagattttctcccactctgagggatgtctgttcactctgctgatyattgcatttactgtgcagaagctttttagttgaattaagtcccagctatttatctctctttttattgcatttgcttttgggttcatggtcataaaatcct

SEQ ID NO: 534054 - DNA, 201 bp, Homo sapiens
aatataaactttataactcaagtacattactggaaagactatattaaaaattaatagatggatgactagagtgggatgactaatgagtgcagggtttcttytggagatgacaaaaatgttctaaactatagcgatggttgtacaactctgtaaacataataaaaaccattgaattgtgttttttatatgggtaaaatttat

SEQ ID NO: 534055 - DNA, 201 bp, Homo sapiens
atcccatgcctggcattctatttctagattactggtgtacctgctgacaaaaatcggtgtcgatgtgcactagatattaggaggggtaaagaaatagcctyaggggtcccctgaccccttccaccatcagagacaaatttacattcttattctgaactaaatttgtcattagcataaaatatattaatgtttggttatttg

SEQ ID NO: 534056 - DNA, 201 bp, Homo sapiens
gagaggagtgtcttacaatattgggggtcaagaagcttcctgaaggtaagccttaacagatacattggaaatatccaggcagatagtgagtagaggacgtkttcgggcagaagttacagcctagagatgctgttggagaggtgcagataattcagtttgattgcagccttgtggttacagaagcacataggagccccagga

SEQ ID NO: 534057 - DNA, 201 bp, Homo sapiens
tcccgagtagctgggactacaggcacccaccaccacacccagctaatttttttgtatttttagtagatacggggtttcactgtgttagccaggatggtctygatctcctgacctcatgatccgcccgcctcggcctcccaaagtgctatggggatctaatttttttaagtattattatttaggtaattatatgtgtatata

SEQ ID NO: 534058 - DNA, 201 bp, Homo sapiens
gcaattgtaactcctgggctcaagtgatcctcctgcctcagcctgcagagtagctgggactacaggtgtatgctactacacccaactgtgtatatatatatgtatatgtgtgtgtgtgtgtgtgtgtgtgtgtgtatatatatatatatattttgtagagacagggtctcaccgtgttgcccaggctggtctcgaactcct

SEQ ID NO: 534059 - DNA, 201 bp, Homo sapiens
taactcctgggctcaagtgatcctcctgcctcagcctgcagagtagctgggactacaggtgtatgctactacacccaactgtgtatatatatatgtatatrtgtgtgtgtgtgtgtgtgtgtgtgtgtatatatatatatatattttgtagagacagggtctcaccgtgttgcccaggctggtctcgaactcctggactca

SEQ ID NO: 534060 - DNA, 201 bp, Homo sapiens
gtgctgggattacaggtatgagccactgcacccagcctccgttctttctttatagcaagagtcacattgtttgttgactgatattcagcttatggttcackgggatcatcctttctatctaacgtatgtcaaatagacagatgcacttggggtctctgccagctgcttcccatccctctatctgattttacctatcagttg

SEQ ID NO: 534061 - DNA, 201 bp, Homo sapiens
acagaatagaagcaaaccccaaatcacatacctattaagaagaacagagctgcatccttatctcttcccaccataaccatatcaggccatctttgctttgwaagatataaattggtgtctgagagaagataataaatagcaagaaaaagacataacgtgttacagatataacctggaaatggctgaagagcatttgcaaaa

SEQ ID NO: 534062 - DNA, 201 bp, Homo sapiens
aatcacgaggtcaggagatggagaccatcctggctaacatggtgaaaccccgtctctactaaaaatatattaaaaaaaaaaattagccaggcatggtggcrggcacctgtagtcccagctactcgggaggctgaggcaggagaatggcgtgaacccagggggcggagcttgcagtgagccgagatcgcgacactgcactcc

SEQ ID NO: 534063 - DNA, 201 bp, Homo sapiens
cagattcaggggaagagggtggagcccaagaatttgcatttcaacatgctttcaggtgctgctaatgttgttggtctggggatcctcttttgagaaccacrggcttaaaagtgttcaagaaatggcaaagtgtggctggagcagagtgaacagaggagaggaccgagaaatgaagtcaggaggctacagagtccagatggt

SEQ ID NO: 534064 - DNA, 201 bp, Homo sapiens
ctattttcaggcttgatgatttccctagaagggctcataggacttagaagttggtatatttatgattataatgtattacaatgaaaggatacagagtaaawtcaccaaagggaaaaagctcatggggcaaagttcaaatgaaacaaggcacaagtttccaaaagtcctctctcagtggaatcacacaacatatacttcata

SEQ ID NO: 534065 - DNA, 201 bp, Homo sapiens
acagtgtgacattttgatacattatacagtgtaataatcaaatcagagtagtgtattaatcacctcaaatatgtatcatttctatgtgttaggaacattcraaatccaatcttctagctatttgagaatatccagaaattgttgttaattacagtcatcttatagtgccatagaacactagaacttactcctcctatctgg

SEQ ID NO: 534066 - DNA, 201 bp, Homo sapiens
tgggagtgcagatatctcttgaacatactgatttcctttcctttggatatatacccagcaataggattgctggatcatatggtagttctatttttaggtttttgtttgtttgtttgtttgtttgtttgtttgtgagacagggtctcactctgtcacccaggctggagtgcagtggtgcgattatggctcactgcagcctgg

SEQ ID NO: 534067 - DNA, 201 bp, Homo sapiens
gggagtgcagatatctcttgaacatactgatttcctttcctttggatatatacccagcaataggattgctggatcatatggtagttctatttttaggtttttgtttgtttgtttgtttgtttgtttgtttgtgagacagggtctcactctgtcacccaggctggagtgcagtggtgcgattatggctcactgcagcctgga

SEQ ID NO: 534068 - DNA, 201 bp, Homo sapiens
ggagtgcagatatctcttgaacatactgatttcctttcctttggatatatacccagcaataggattgctggatcatatggtagttctatttttaggtttttgtttgtttgtttgtttgtttgtttgtttgtgagacagggtctcactctgtcacccaggctggagtgcagtggtgcgattatggctcactgcagcctggac

SEQ ID NO: 534069 - DNA, 201 bp, Homo sapiens
gagtgcagatatctcttgaacatactgatttcctttcctttggatatatacccagcaataggattgctggatcatatggtagttctatttttaggtttttgtttgtttgtttgtttgtttgtttgtttgtgagacagggtctcactctgtcacccaggctggagtgcagtggtgcgattatggctcactgcagcctggacc

SEQ ID NO: 534070 - DNA, 201 bp, Homo sapiens
ggtatttcacacaccagagctggcagggctctgtggtcctgagtcctgagtatggagacctagggccttgtgattccaagggtggtccctagggcagcagygttactatacctgggggcttgtttgaagtgcagactctcagattccaccccagctaattcacaacctgaattagcgtctgcattttaacaggatcctccg

SEQ ID NO: 534071 - DNA, 201 bp, Homo sapiens
acttctcagtagaaaatctacaagccagaagagtttggaggccaatagtcaacattcttaaagaaaagaatgtccaacccagaatttcagatctggccaarctaagtttcataagtgaaggagaactaagatcctttacagacaagcaaatgcttagggaattcatcaccaccaggcctgccttgcaagagctcccaaagg

SEQ ID NO: 534072 - DNA, 201 bp, Homo sapiens
gttcattttttagaaccccacagggcaattctacatagcgaagagtggtcgcaaacttaaaacttttgcctgtgtttaaacatttttcagtcattttttamaagctctttctaaaagggatgttcaacatggagatgatggtaccttacaatttatgtaacaaatattcatttgagataaaattaaaaatcattttttaat

SEQ ID NO: 534073 - DNA, 201 bp, Homo sapiens
acattaaaaaaagtttgaaaaataaccaactagcatcatgatgacaggatcaaatttacacataacaataccaatctaaaatgtaaacatgctaactgccmtgattgaaaggcacagaatggcaagctggataaagagccaaaacccatcagtatgctgttttcaagagacccatctcacatgaaaagacacacataggct

SEQ ID NO: 534074 - DNA, 201 bp, Homo sapiens
caaacacattctcctcactgattgcctcgcttccatccttgcctcctacagtctgttctccatgcaactaccagagggatttaaaagcttcattcgttccygttatcccgtttgatactctctggggactttccactgttacctgagcataaccctaactcttttgaggggccacaggccctgcatgataagtccctacct

SEQ ID NO: 534075 - DNA, 201 bp, Homo sapiens
aggcgtgtatgatattcatgagcttaatctgctagaaggaaagaccattatatagtaacttagtgtatgatataggtaccattagatttacaaaaattgtrtgcgcagagagttggggcaaggtatacttttgcaagtcatctaaacacacacacacacacacatgtgcgtgcatgcacacacacacaaacacacagccca

SEQ ID NO: 534076 - DNA, 201 bp, Homo sapiens
tcttttgaggggccacaggccctgcatgataagtccctaccttcctctggaacttcacctccttctgctctcctccatgggcactcaggccccactggttktctttctctccgcagtatgctagaatttttcccatcttaagaccttggtacttgcagttccttctaactgggactccctttccccatctctccacattct

SEQ ID NO: 534077 - DNA, 201 bp, Homo sapiens
catccttgacctgggagcggagaaggggcctggaccgcaaggcccggtgtttctgggattggggcggcaccctggcccggggcggcactatggtccggggmcagcccaggtaccagctcaagtagttgcccatgacagcaatgcagtagtcgggacgttctcttagaaattcagcttccagaagtttccgaagtctgcggc

SEQ ID NO: 534078 - DNA, 201 bp, Homo sapiens
caagagtcccagtgactcctgttctttcactcttggtccatgaactttctgttgtttttctttttgagatgaagtcttgctctgtcacccaggctggagtrcagtggcatgatctcggctcactgtaacctctgcctcccgagttcaagcgattctcctgcctcagcctcccaagtatctgggattacaggcacgtgccac

SEQ ID NO: 534079 - DNA, 201 bp, Homo sapiens
tgtagagccagatagttctcttttgtttcagtctagttccgtaaccacctattttggctgcctctttggaaaaccaatgtaaagttacaattatgcagaakacacttgggacagtcgttgagagcaaattgatcttactcgctgagtgttctcctactcaatttatgaactgtggttgaaattaagcttgtcttataaatg

SEQ ID NO: 534080 - DNA, 201 bp, Homo sapiens
atatttttataaatatgtctttcttatgagacactaagattaaattaagatacattcagtcagaagagctgaatgcagttatttcacagggtgagttggcrtattctgttgaagttttcaaagatccagggaccacctgaatcagaatcactgacgtgattgtttaaaaagcagactcttgagctctactccagaccaact

SEQ ID NO: 534081 - DNA, 201 bp, Homo sapiens
actgtacaacagattataatcctacttttgcttttcaaatctatgcttataaattagaaatgatatattctcttggccaatcataatctgattatttgaawatttattttctcagctccctagattgtaggggtttatgatagtggtgtctgcctttcactctaaaggattaaatgtttttacgtgagtagaaataatgaa

SEQ ID NO: 534082 - DNA, 201 bp, Homo sapiens
tagttccagccgtataacaaagtaccatagacagtgtagcgtataaaaacagaaatgtatttctcacagttcttgtggctgaaggtctgagatcagggttkcagaccaccatcttctcattatatcttcacatggtggaaacagagggagctctgtttccagcttcttttcatatgggcacttaggcactaatcccattca

SEQ ID NO: 534083 - DNA, 201 bp, Homo sapiens
tttagagatttcaaactggagcgatgaaaggaaagaagcccttgacttttccacacgaaaatgacttacataagctacctgggcataattcaaacacgctstgttgtatgagagccctgcgctctgttcatgatcctttatgatagcaaaagccatttatttatttactcattcacctgtgcaaagaatatctatggaatg

SEQ ID NO: 534084 - DNA, 201 bp, Homo sapiens
cagtggtgcagtcgtggctcactgcatccttgaagtcctcagctcaagtgattctcccacctcagccttccagtttgcttggattacaggaatgagccackgtggccagctcaagaatccattttttatggtcatttgagttgttggcagaagtgatttccttgtgctatataactgagaatcccagttttttgcttgctg

SEQ ID NO: 534085 - DNA, 201 bp, Homo sapiens
gaggctgaggtgggtggatcacgaggtcagaagttcaagaccagcctggccgggatggtgaaaccccatctctactaaaaatacaaaaatgagccgggcaygttggtgggcacctgtaatctcagctaccgggcaggttgaggcaggagaattgctcaaacccgggagatggaggttgcagtgaaccgagattgtgccact

SEQ ID NO: 534086 - DNA, 201 bp, Homo sapiens
actacagattactaggcatccaatttcagcagctgccatcattgttttatagttaataatttgtcatttttaaatcccaaatcagacctccttattaatayttggtaaacatgccaggagaaaactatttacttgacacttaagataaataaattatccaacaagaaaggctacctactacctatgcaaatatgactaaat

SEQ ID NO: 534087 - DNA, 201 bp, Homo sapiens
ttttctaattctgtgaaaaatggcattgatagtcattagctgttgatgctggcctcatgaaatgagttaggaaggagtccttccatgatttttggggttgktttgctctcatttctccagttcctcagggtataatgttaggtggttagtttaagcattttctggccaggtgcagtggctcacgcctgtaatcccggcact

SEQ ID NO: 534088 - DNA, 201 bp, Homo sapiens
tgatagtcattagctgttgatgctggcctcatgaaatgagttaggaaggagtccttccatgatttttggggttggtttgctctcatttctccagttcctcwgggtataatgttaggtggttagtttaagcattttctggccaggtgcagtggctcacgcctgtaatcccggcactctggtaggctgaggcaggcggatcac

SEQ ID NO: 534089 - DNA, 201 bp, Homo sapiens
gtgttattacaaaagagtcaaaaagtttgaaaaaatcaaaaagtttgtcaagtaaaacggttatggtaagctgaagttaacttatcttgagcacagaaaawtttttttaaataaatttagtgtagcctaagtgtatggtgtttctaaagtctatagtagtgtacagtcatgtcgtaggccctcacattcactcatcattca

SEQ ID NO: 534090 - DNA, 201 bp, Homo sapiens
ataatttaaaaagaagaaatttccattttcacgataatatttaaatttattaattgagaagaattcagtgctacttctgtaatattcctgccaaacaggcrtaagctcaatgggataagaagaaaacatcagatgcactaaattcagaaacattctacaagattcctggccagttatctttaaaatagtgtccaggttcta

SEQ ID NO: 534091 - DNA, 201 bp, Homo sapiens
gatacaccttctatgctttcgtaaggaaatcattttagactaaatgactaaaggaagagcatcccaggattaatccaaattcacagaggccactttgtccmtcatctgcattatgcctccttagccctcctgcagagcaggctcatagctgccatgcagcggaaaccacattctctctaatcaaatagaaagagatccctg

SEQ ID NO: 534092 - DNA, 201 bp, Homo sapiens
ctagatcattgcattttgtaaatggctaaatgaagtcaacccacagctgtattcttacctgtctgagagggtggtcttccaaccctgtgctctgctgtccrtcagcccagctgaatagcaggcagctgcgggaatggagtcgtgtcacagggaacagctggttttccatagaacgaggactactgccgtgttgacagacac

SEQ ID NO: 534093 - DNA, 201 bp, Homo sapiens
tgtattcttacctgtctgagagggtggtcttccaaccctgtgctctgctgtccgtcagcccagctgaatagcaggcagctgcgggaatggagtcgtgtcayagggaacagctggttttccatagaacgaggactactgccgtgttgacagacacctccatggcccagcccagaactctgtctctgaggagggaggaggaca

SEQ ID NO: 534094 - DNA, 201 bp, Homo sapiens
catcaagatttcttaagactccttaggggattctaatgtgtagccacacttgagggccactgtctaaagcaggcatggaaatcgtgcacttttttttttcytctttttttttttttttttttttgagacagagtctcactttgttgcccaggctggagtgcagtggtgcgatctcagctcactgaaacttctgcctcctgg

SEQ ID NO: 534095 - DNA, 201 bp, Homo sapiens
taaacatgctaactgccatgattgaaaggcacagaatggcaagctggataaagagccaaaacccatcagtatgctgttttcaagagacccatctcacatgaaaagacacacataggctcaaaataaagggatggaggaaattttaccacactaatggaaaaaaagaaaaagagcagaggtggtaatcctagtttctgacaa

SEQ ID NO: 534096 - DNA, 201 bp, Homo sapiens
caagatttcttaagactccttaggggattctaatgtgtagccacacttgagggccactgtctaaagcaggcatggaaatcgtgcacttttttttttcctctttttttttttttttttttttgagacagagtctcactttgttgcccaggctggagtgcagtggtgcgatctcagctcactgaaacttctgcctcctgggtt

SEQ ID NO: 534097 - DNA, 201 bp, Homo sapiens
agtagctgagagagggcttgaaatctcagactgtaattgcagacttgtctgtttcctttgtcaattttatcagcctttcctccatgtattctgaagctctrtaaggtatataaagttttagttttatcattttgatgaattggccactttatcattatgagatgaacttctttatccctggtaatacttttttccttgaaa

SEQ ID NO: 534098 - DNA, 201 bp, Homo sapiens
ttaaactaccattgacattcttcacagaatggaaccaaaaaagatcctgaatagccaagacaattctaaccaaaaagaacaaagctgtaggcatcaagctrcccgacttcaaactatactacaagactacagtaactaaaacagcatggtactggtacaagaacagacacatagaccaatggaacagaatcatatactcag

SEQ ID NO: 534099 - DNA, 201 bp, Homo sapiens
gagtttgagaccagcctggacaacatggtaaaaccctgtctctaccaaaaatacaaaattagctggacgtggtggtgcatgcctgtaatcccagctactcrggaggctgaggcaggagaatcgcttgaaccccggaggcagaggtagcagtgagccgtgatcgcgccactgcactccaacctggacaagagcaaaactccg

SEQ ID NO: 534100 - DNA, 201 bp, Homo sapiens
gaataaacactgtgcctagcgaaggcagggacgtgtttctaaggcaaggatgactaagtgactcttttcaaattttgtttcacatgggaaaatgtcttctratttgagtaaaaagtgtgtctgtgtagggaagatttctcatcctggggctttcagctttgcattcctgccacaccaggcctgccaccttccctccctttt

SEQ ID NO: 534101 - DNA, 201 bp, Homo sapiens
caggcctgaacccttgcccactcaactcagctaggctcctcaatgctcacccatggtgtgttacccttgcacacataactcgtgcatatgcatacactcamatgcactcacacaggcactgcatgctcactcacacacacacttgcatattcccactcaggcacactctcatacacttacgcacacactcatacactcata

SEQ ID NO: 534102 - DNA, 201 bp, Homo sapiens
tgctggctagccatatgcagaaaaacgaaaatggaccccttcctttcaccatatacaatattaactcaagatggattaaagacttaaatgtaaaactcaamactataaaaaccttagaagaaaatctaggcaataccattcaggacataggcacgggcaaagatttcatgatgaaaacaccaaaagcaattgtgactaaag

SEQ ID NO: 534103 - DNA, 201 bp, Homo sapiens
gaccagaatttcccagcatgacttctttggatcagcatttcttctccttggccccattaatctctgtcctttgccattgttcattagtaatccaggtatgrtgtgatattcccttattaactacagcctcttgggaaagctagatgtctttttacccagtgactcttccccacatgcacaaaggcaaaggctgaaattatg

SEQ ID NO: 534104 - DNA, 201 bp, Homo sapiens
ggtatgctagttatcccaatttgatcaccgcatattgtttacatgttccaaaatatcactctgtaccccatacatatgtacaattactatgtgccaattagaataataaaaatcattttttaaaaggtatgcaaagaatgaaaaggaaaaaatggaagaattaattgctggactgtgctgtggccacagtgatacctggtg

SEQ ID NO: 534105 - DNA, 201 bp, Homo sapiens
ctcactgaggccactgcagtgtagtgaaatgcaggctaagtagggccagaagttgcaggttcaggcacatactggtaaatgcagatatgttacaaactccrtaccttcagttccttcatttgcaaaccagtaataccaataatacccacagagtttggacaggtgtcaggtgaggtaacatacacagaagcaactgcaacc

SEQ ID NO: 534106 - DNA, 201 bp, Homo sapiens
tcattcatgttttctgttcacctccttccagttacactggagtgattatcatcacttgcgttgtggccacctttgcttttccctcttcttgctttgctccrtctgcgtctgcaatcctcgtgttccctgtgtgggagctgatctgtggggccagggcagggtcagccccgtggcatgtgctttcacaggcaagtggaggga

SEQ ID NO: 534107 - DNA, 201 bp, Homo sapiens
gagatgcccgctagccttagccgcacagagtctgcactgggggaaagagatcagggaaagctgaatagggtctaaggaaatactgctattcaagaaagctaaaaaaaaaataaggaaaaacttcataaataagtgtcagggactccagggactaatagagaccaagcagttagtgagtttttggtgagtaaaaagagtttc

SEQ ID NO: 534108 - DNA, 201 bp, Homo sapiens
agatgcccgctagccttagccgcacagagtctgcactgggggaaagagatcagggaaagctgaatagggtctaaggaaatactgctattcaagaaagctaaaaaaaaaataaggaaaaacttcataaataagtgtcagggactccagggactaatagagaccaagcagttagtgagtttttggtgagtaaaaagagtttcg

SEQ ID NO: 534109 - DNA, 201 bp, Homo sapiens
gtgagccaccacgcccagcctgatatggctctttttaaaaaaatctgtaaatacactgataagaaaaagatctccaaaaatgtgggtaggtaaaaagaaaytgcaatgtttatttcatatatttatctaatagctgtatttgtatatgtgtgtatatttataaatacctaggaaaaaatctgggagaataaacacaaaatt

SEQ ID NO: 534110 - DNA, 201 bp, Homo sapiens
gaaccctagatgggaaaatattggaatgaggggttaaaaaaaattcaatcaatataaaggaaggaaaaagaaggaaagaaggaaggccaggagggagatgrgagaaattgaaagaatacaataagatattagaaatgaactcaaatatgtcataatgacttacatgaactatactctctaaactaactcaaagatttagat

SEQ ID NO: 534111 - DNA, 201 bp, Homo sapiens
ttttcttgcctaatttctctggctagcaccttccatacaatgttaaacagaaattgtgagagcagacaaccttttcttgtttttaatcttagaggggaagrattcagtcttttactgtattagctgtaggtttttccaataagcccttataagattgaatatattttctttaattaccagtttaaatgtttttatcatgtg

SEQ ID NO: 534112 - DNA, 201 bp, Homo sapiens
tgtattgaaccctttatgattatgtaatacccttctttatcctttctcataatagtgggcttattaaatcatagtctatttttttctaagataaaaatagyaacccctgttctttttgttttctgtttgtttcatacatttttctccatctccttactttatgggtgtcattgcatgtgagatggatctcttgaagacagc

SEQ ID NO: 534113 - DNA, 201 bp, Homo sapiens
gagtatgtgccatgtgcagatgagaataaggtacattcttacattgttgtgtggagtgctctgtagatgcctgttaggtccatttgttcaagtgttgagtwtaggtcccaaatatcttcgttaatgttctgccttgatttctaatgtcagttaggtgttgaagtctcccactattattgtgtggttatctaagtttcttta

SEQ ID NO: 534114 - DNA, 201 bp, Homo sapiens
ttcccaggagttcccttgcctacctccccttctgagtagtagccacccctctgcagtagcctctggtcagttacatgcagtgagggactccccctgcacgyaaacctgccaaagccttatccagtacagccttgtgtgtgttgctgccatttcatggtcatatcttttttccttgatcaatccctaaattcttcagacccc

SEQ ID NO: 534115 - DNA, 201 bp, Homo sapiens
tagttggaatcatacagtatttgtgtttttgtgactgacttatttcacttatataatgtcctcagggttcattaatgttgtaacatctgttagaatttccrttctttttaagtctgaataatattcctttgtatgcatagaccatattttgtttatccatttgtgaatggacattttggttgcttccacattttagctact

SEQ ID NO: 534116 - DNA, 201 bp, Homo sapiens
tataagcttcccctctcagtcccttctttcccaggagttcccttgcctacctccccttctgagtagtagccacccctctgcagtagcctctggtcagttamatgcagtgagggactccccctgcacgcaaacctgccaaagccttatccagtacagccttgtgtgtgttgctgccatttcatggtcatatcttttttcctt

SEQ ID NO: 534117 - DNA, 201 bp, Homo sapiens
tacactttagatccaatgtatacacaaataggtaaaagtaaagaatgggaaaaataattcaaaaaacatgggaaaaatgtaaacaggatccaaaagatatytaatgtggtcatattaatgtcagacaaaatagactttaaggcaacaattatcattagagatgagagataaaataataaaaggctgctctttcaagaatat

SEQ ID NO: 534118 - DNA, 201 bp, Homo sapiens
tggcaaacataaataatcatatcaataatcattaaatgtaaattaattaaacagtccaattaaaaaggaattaaacactgaattaaaaaatgatccaactrtatgctatctataagatacactttagatccaatgtatacacaaataggtaaaagtaaagaatgggaaaaataattcaaaaaacatgggaaaaatgtaaac

SEQ ID NO: 534119 - DNA, 201 bp, Homo sapiens
ttaagtattttcacattaaaggaaatctgtcactatcagatatttcgtacaagaaatattaaaaataatcctttgaaaaatgacaaggaattaatataacyagaagatatctaacacaaagcagtttgtgttgaataaaaaggacattatagaagttgaataaaaaggacattatagaagttgaataaaaaggacattata

SEQ ID NO: 534120 - DNA, 201 bp, Homo sapiens
ttacaaaaccaggtttcatgagaacttatctccaaggagatgggttaagccattcatgaggaatccactgccatgattcaaacacctcccaccaggcccacctccacactggggattacatttcaacatgagatttggtggggcacacatcaaaaccaaatcagcatcctgtgtgtttctctctttttcactcggacttag

SEQ ID NO: 534121 - DNA, 201 bp, Homo sapiens
cccctccctggtggctactgttagagatattcttcctagtccaatatttctgaagaagaaggttcagatatctatagcttggagtggactgagcctgaggstaagttctaagacaaaaaccttggagtcatccttgattctctctctttctcacacccagtatccaatccatgaggacatgttgacactaacttcaaagtt

SEQ ID NO: 534122 - DNA, 201 bp, Homo sapiens
caaaaccaggtttcatgagaacttatctccaaggagatgggttaagccattcatgaggaatccactgccatgattcaaacacctcccaccaggcccacctccacactggggattacatttcaacatgagatttggtggggcacacatcaaaaccaaatcagcatcctgtgtgtttctctctttttcactcggacttagggt

SEQ ID NO: 534123 - DNA, 201 bp, Homo sapiens
caggaagaaaagggaagtcaaaagactgatgggctgtgactaaggctccatgttgtgttaatgggggtgatatcagtggcattaccactgagtgctgataygttccaggcaatattctaagcactttactctaatgactcctttcatacaacaattccaataattaggtaccacttttatccccattttaaggatgaaaaa

SEQ ID NO: 534124 - DNA, 201 bp, Homo sapiens
aggaaggaaaaagaaggaaagaaggaaggccaggagggagatgagagaaattgaaagaatacaataagatattagaaatgaactcaaatatgtcataatgrcttacatgaactatactctctaaactaactcaaagatttagattaccagagccaggcgtggtggctcgtgcctgtaatcccagcactttgggaggctgag

SEQ ID NO: 534125 - DNA, 201 bp, Homo sapiens
cgtgcctgtaatcccagcactttgggaggctgaggtgggtggattacctgaggtcaggagttcgacaccagcctgaccaacatggtgaaaccctgtctctrctaaaatacaaaaattagccaggtgtggtggtgcgtgcctgtagtcccagctacttgggaagctgaggcaggagtatcatttgaacctgggaggcagagg

SEQ ID NO: 534126 - DNA, 201 bp, Homo sapiens
aggctgaggtgggtggattacctgaggtcaggagttcgacaccagcctgaccaacatggtgaaaccctgtctctgctaaaatacaaaaattagccaggtgyggtggtgcgtgcctgtagtcccagctacttgggaagctgaggcaggagtatcatttgaacctgggaggcagaggttgcagtgagccaaggtcacgccact

SEQ ID NO: 534127 - DNA, 201 bp, Homo sapiens
gagtatcatttgaacctgggaggcagaggttgcagtgagccaaggtcacgccactacactccagcctcggcaacagactgagattccttctcaaaaaagarataaaataaaataaaaatttaaaaaataaattactagactgtgttcccttattaaacagtctaaaggtatgtttcaagtgcgtttttatgctgtaaaatc

SEQ ID NO: 534128 - DNA, 201 bp, Homo sapiens
agcctcggcaacagactgagattccttctcaaaaaagaaataaaataaaataaaaatttaaaaaataaattactagactgtgttcccttattaaacagtcyaaaggtatgtttcaagtgcgtttttatgctgtaaaatctagctttagatcgtttccaaagtacactcctaaaatataaaaatattaaaaatgtataagta

SEQ ID NO: 534129 - DNA, 201 bp, Homo sapiens
gattcatccatctggtaataaccaattccattttactagtgcgtagaattctattatatagatatcactatttatttacttgttgatggaaattggggctytccccccagaacttggctgtaataagtaaagccaaatctttgtacaaatgtacaagatttgtacaaatcttggtatgaacatctgcttccatttctcttg

SEQ ID NO: 534130 - DNA, 201 bp, Homo sapiens
tatgaggaaggcatacattggtttggccttaaaaaggccagacctctcaaagcagagggctggggagatcataggtgggttttagggattctttagttgayggttgggatagttaagctaatgtctaaaacttgaaatcagtagaaaggaatgtttgagttaagctaagggggttgtggagaccaaggttcttagtatgta

SEQ ID NO: 534131 - DNA, 201 bp, Homo sapiens
tccctgtgctccctgtgtccatatgttcttgttattcagctcccacttatgagtgagaacatgtggtatctgggtttctgttcctgtgtaagtgtgctgaraatgatggtttccagctccatccatggccctgcaaaggacatgaactcatcctttttatggctgcatagtattccatggtgtatatgtctcacattttct

SEQ ID NO: 534132 - DNA, 201 bp, Homo sapiens
acattttctttatccagtctatcactgatgggtatttgggttgattccaagtctttgctattgtgaatagtgctgcaataaacatacatgtgcatgtgtctttttttttttttttttgagatgaagtctcactctgttgccaggctggagtgcagtggtgtgatcttggctcactgcaacctgtgcctcctgggttcaagc

SEQ ID NO: 534133 - DNA, 201 bp, Homo sapiens
atctttagtttaattagaccccatttgtcgattttggcttttgttgccacagcttttggtgttttagtcgtgaagtttgcctgtgtctaggtcctgaataktattgcctgggttttcttttagggtttttgtgggtttaggtcttatgtttaagtctttaatccatcttgagttaatatttttgtaagatgtaaggaaggg

SEQ ID NO: 534134 - DNA, 201 bp, Homo sapiens
atgttgaacattttttatatacctggtggccatttgtatatcttttctgagggttgtctattcagctcatttgttcatttattaattgaattattttgatktttactgttgagttgtttaagttctttttatatcctggatattaatctcttgttggatgaatcatttgcaatttttttctcccattctgtaggttgtatc

SEQ ID NO: 534135 - DNA, 201 bp, Homo sapiens
cctaagaaagtgctctcacattgtacatgtttttattatactgtaatgagttaagaagaattataggatttactccatttttctcagcctccttttgcccytgcttaaattagttaaatatgtgtatctctttctcccttggatgcccctccctggtggctactgttagagatattcttcctagtccaatatttctgaaga

SEQ ID NO: 534136 - DNA, 201 bp, Homo sapiens
caggcatcctccgatgtgcctatcatctctgatgacaagagcaaatggtcttcctcagggacccacagaactgacaacctggccacagtgacatgagggcygaggtgggggcagttgctgcttgtgtcaccacccaccaaggtttctggggaccccaagcctgcccattgtcacactggacaccagcctgggtgcaaatag

SEQ ID NO: 534137 - DNA, 201 bp, Homo sapiens
tccaaagtcagacacaagtaagagacagagccaagatctgaacccaagcagtcctaaccacttaactatcagcctttcaaactttatcaaacccagagatwaatgcttacaatgaagccaaagtaaaaactaaacgatgacagaagaaaattattaggtaaatggcaccctctcttgggggaaagagtagtggtgctttgg

SEQ ID NO: 534138 - DNA, 201 bp, Homo sapiens
atgtgacaccgtgcttcattgattttctattttcttcaagttaaggtttatccaaacttattgttttgctccaggtcacaggtcactggctaggctataawctggcttcacttgagtccagtggccacctctggttcagtcattaatgaacagggagtcagagttggttgcatgcttatgggatttggctcttacaagtgg

SEQ ID NO: 534139 - DNA, 201 bp, Homo sapiens
caagcagtcctaaccacttaactatcagcctttcaaactttatcaaacccagagattaatgcttacaatgaagccaaagtaaaaactaaacgatgacagargaaaattattaggtaaatggcaccctctcttgggggaaagagtagtggtgctttggcagaaattatcccccccacacaccaaataaaaccattaaatttt

SEQ ID NO: 534140 - DNA, 201 bp, Homo sapiens
agaactacaatcttccatgaaacatgcaattgagtaggtcacttgaccccaatacctccaaagcgcataaatgggttatgaacacagacatatacacaatrttaatttcaattgccaaacacaagtatcataaagaaacaagcaaccctgagataaagaaaagtagaatgtagggcaaagatagaagcaaattaaaagcaa

SEQ ID NO: 534141 - DNA, 201 bp, Homo sapiens
gacagaagaaaattattaggtaaatggcaccctctcttgggggaaagagtagtggtgctttggcagaaattatcccccccacacaccaaataaaaccattwaattttgataaactctgatttttatcttcctgcatattgttttcaaaaattttagaaaatgatcatactatattatagatcatccctaacttttaaacta

SEQ ID NO: 534142 - DNA, 201 bp, Homo sapiens
ttgattgagaatctttacccagacattcagaaatttctgtagagcactttatttgtgtccattgttttaatgtaacataagccaaagctcagaatatagartaatagatggatgtttatggccgatccatgaagagacagtcagatcagttttattccactggaaggaaaggttaacacccaagaggttagtaagaaaaga

SEQ ID NO: 534143 - DNA, 201 bp, Homo sapiens
actgtgctgttgattgagaatctttacccagacattcagaaatttctgtagagcactttatttgtgtccattgttttaatgtaacataagccaaagctcaraatatagaataatagatggatgtttatggccgatccatgaagagacagtcagatcagttttattccactggaaggaaaggttaacacccaagaggttagt

SEQ ID NO: 534144 - DNA, 201 bp, Homo sapiens
atttaaataaagtagggctcagccacagaagtggattttaagagagatgtagtgcagtgatatgtgaactctccaagtagaagctgctttggctgcctacyttccactgttcagttacagaaaactgtgctgttgattgagaatctttacccagacattcagaaatttctgtagagcactttatttgtgtccattgtttta

SEQ ID NO: 534145 - DNA, 201 bp, Homo sapiens
tggtcaaatcacattaggcatgaaacatgggaaaatctggtgggattttagaagatttagtaagactacgtaaattaaagtggagcaccagaatttaaatraagtagggctcagccacagaagtggattttaagagagatgtagtgcagtgatatgtgaactctccaagtagaagctgctttggctgcctaccttccactg

SEQ ID NO: 534146 - DNA, 201 bp, Homo sapiens
ttaaaattgtttgactaaagcatttgtattaatgaaattcaaatttgtcgaattttgttactttgtcaatttttgtttggtcataccctactttcccaaaygacccattgctttttttttctccccagatttaaagtgaattgtaatgaatttttaaaaagaattttggaataatctttgaaaatcctcggagatattcta

SEQ ID NO: 534147 - DNA, 201 bp, Homo sapiens
ctcatatttgtagaatttacagcgaactaccgggcatttggcatataggtctgatcacgttgaataccaaacaacagaaatgctataaaatttaaagtttmaaattgtttgactaaagcatttgtattaatgaaattcaaatttgtcgaattttgttactttgtcaatttttgtttggtcataccctactttcccaaacga

SEQ ID NO: 534148 - DNA, 201 bp, Homo sapiens
gtattggtgtataggaatgcttgtgatttttgcacattgattgtgtatcctgagactttggtgaagttgcttatcagcttaaggatatttggagctgagaygatggggttttctaaatatataatcatgtaatctgcagagacagtttgactccctctcttcctgttcgaatatgctttatttgtttctcttgcctgattg

SEQ ID NO: 534149 - DNA, 201 bp, Homo sapiens
cccaggaatttatccatttcttctagattttcaagtttatttgagtagaggtgtttatagtattctcggatggtagtttgtatttctgtgggatcagtggygatatcccctttatcattttttattgcgtctatttgattctttcttttcttctttattagtctggctagtggtctatctaatttgttaatcttttcaaaa

SEQ ID NO: 534150 - DNA, 201 bp, Homo sapiens
gttattcctttccatgtttaatgcttccttcaggagctcttgtaaggcaggcctggtggtgacaaaatctctcagtatttgcttgtctgtaaaggattttrtttccccttcacttttgaagcttagtttggctggatatgaaattctggaaaatattttctttaagcatgttgaatattggcccacactctcttctggctg

SEQ ID NO: 534151 - DNA, 201 bp, Homo sapiens
tcctttccatgtttaatgcttccttcaggagctcttgtaaggcaggcctggtggtgacaaaatctctcagtatttgcttgtctgtaaaggattttatttcyccttcacttttgaagcttagtttggctggatatgaaattctggaaaatattttctttaagcatgttgaatattggcccacactctcttctggctggtagt

SEQ ID NO: 534152 - DNA, 201 bp, Homo sapiens
ttccccttcacttttgaagcttagtttggctggatatgaaattctggaaaatattttctttaagcatgttgaatattggcccacactctcttctggctggyagtgtttctgcagagagatctgctgttattctgatgggcttccctttgtgggtaacctgacttttgtctgtggctgctactaacattttttccttcattt

SEQ ID NO: 534153 - DNA, 201 bp, Homo sapiens
ggaccctgtgatgatggcgttaactgcacaaactgtagagcatgtgtgtttgaacaatatcaaatctgggcaccttaagaacaggataacagcaatgttcrgggaacaagggagataaccttaaagtctggctgcctgtgggccaggcggaacagagccatatttctcttctttcaaaagcaaataggagaaatatcgctg

SEQ ID NO: 534154 - DNA, 201 bp, Homo sapiens
tgcacaaactgtagagcatgtgtgtttgaacaatatcaaatctgggcaccttaagaacaggataacagcaatgttcagggaacaagggagataaccttaargtctggctgcctgtgggccaggcggaacagagccatatttctcttctttcaaaagcaaataggagaaatatcgctgaattctttttctcagcaaggaaca

SEQ ID NO: 534155 - DNA, 201 bp, Homo sapiens
catatttctcttctttcaaaagcaaataggagaaatatcgctgaattctttttctcagcaaggaacatccctgagaaagagaatgcgtccctaaggagagrtctctaaaatggctgctttggagatgaccatatcttttacggtcgtagataagggatgaaataagccccggtctcccatagtgctcccaggcttattagg

SEQ ID NO: 534156 - DNA, 201 bp, Homo sapiens
gagaatgcgtccctaaggagagatctctaaaatggctgctttggagatgaccatatcttttacggtcgtagataagggatgaaataagccccggtctcccrtagtgctcccaggcttattaggacgaggaaattcctgcctaataaattttggtcagaccggttgtctgctctcaaaccctgtctcctgataagatgttat

SEQ ID NO: 534157 - DNA, 201 bp, Homo sapiens
aaattttggtcagaccggttgtctgctctcaaaccctgtctcctgataagatgttatcagtgacaatgtgtgcccgaaacttcattagcaattttaatttyaccctggtcctgtgatcttgccctgcctccatttgccttgtggtattttattaccttgtgaagcatgtgatctctgtgacccacaccctattcgtacact

SEQ ID NO: 534158 - DNA, 201 bp, Homo sapiens
acttcctacagtattcagtacagtaacatgctctacaggtttgtagcctaggaacagtaggctacaccatatggcctcggtgggtagtaggctatgcctayactccatgatgtttgcacaatgatgaaatttcctaataaagcatttgtcagaacgtatccccatcattaagcaatgcatgactggatatccatatatgta

SEQ ID NO: 534159 - DNA, 201 bp, Homo sapiens
ggcaaagtacaaatcaggagggttgcattaaaatgagaaagttctcaataaaggcaccataagtgtgaagacaagccaaagactgggagagtatttgaaayatatcagtatccaatatactgatacccaatacagaatccaataaagaatgtgtccagattatttaaagaagtaaggctaaccacctcaattatgggcaaa

SEQ ID NO: 534160 - DNA, 201 bp, Homo sapiens
caaagatagttaggacaatttttaaagtaaaagttcaaggttgtgatatttgtcttatacaggtttagtataccaggactgatcttacattgtagtgaatraatgcagtatggcattggcacggtgatagacaaatagaccaatgaaacggaatagagaactcagaaatggagcctcacgtggcagacagtggatatttgt

SEQ ID NO: 534161 - DNA, 201 bp, Homo sapiens
tggagtagtgctgcccctctttggagacacttgttttgatgtttattttttcatgatactaagccttctttgtatctctatcatgtaacgtggtcctaggktataattattactcagcatgtttgctgattttacatctgtgcttccttttctttcagttatgttgcagtcggaaaaagaagacttaattgtgtccattga

SEQ ID NO: 534162 - DNA, 201 bp, Homo sapiens
cattcatcagtcgatggggggccatttgggtagttttcactttttgacttgtgaataatgttgctatgaacattcatgtacaagcttttatgtgaacataygttttcagttttcttgagcatatacttaggaacagaactggtaaatcacatggtaactctatggggttttttgttctgtttgttttttgttttgtttgtt

SEQ ID NO: 534163 - DNA, 201 bp, Homo sapiens
aaggggctgacagatttggttgtctattgagggctgcaccctctgaggggaagaactttgtgtcctcatatggcagaaggaatgtggaaacagggaggaargtccaggtgccaaaggcaatatgaagcctctttgataagggccttaatcccattcatgagggaagagccctcatagcccaatcacctttaagcccccatc

SEQ ID NO: 534164 - DNA, 201 bp, Homo sapiens
taaagtggactccagaggagatatggaagcttctctggagtgtctgggtggttgagggaatggataaacagcaggagaactttttgttcccccctataatrattaaattgtgattagtgtaaaaaaaaaaaaagtaagtttgaaggaattatgactagctctgggacactgagatgctgaggtcctcagtcagtcaggccc

SEQ ID NO: 534165 - DNA, 201 bp, Homo sapiens
atgtgactgggcaaatattaaagaaaatttcccaaatcaaaagaaagctttaagccatttatgtgccagaagttcagaagtcctgggctggctgatgctgrctttgatcttctgtgattacttctataactttgagagagtcagtgttagcactcctggcctttgccttcttcgttaagcagctctgtctttcttaaagta

SEQ ID NO: 534166 - DNA, 201 bp, Homo sapiens
cctcttgtgtgtttcttcagcagctcttaccctcctgattccttcctgctccaatcttgtgtcccttccctctccaggcccctgtccaccctgtatctgcrctattctttgtattttggcaccacgatcacctaaactaggaaactgggaatactctgtgatggcaaattttgcacattttgattaggccatgggtgccca

SEQ ID NO: 534167 - DNA, 201 bp, Homo sapiens
tggttccaaggtttctacatccacttgtggtggttagatattgactctaactagactgtgagaagtttgcctatcataattcccagaccaacaactaaaaygttatttgagatgtagtcaaaaatacaataaagcacttaaaatggaatactaaaaaatgtgcaaataacccaaaggaaggtaggaaaggggagacagagg

SEQ ID NO: 534168 - DNA, 201 bp, Homo sapiens
gtgcaccaaaatctcagacttcaccactttataatccattcatgtaaccaaaaaccactaataccccacaagctatttaaacatatatgtgtgtgtgtgtrtgtatgtgtgtgtatatatatatgtgtgtgtgtgtgtgtgtatatatatttatttatttatttaatgggaaatgataccagaagaaaacttagaataaca

SEQ ID NO: 534169 - DNA, 201 bp, Homo sapiens
ttctatcattacgaggataatcttaaaaatatttaacaactagtatagcacagatattgacataggaggcagggcagtaaatagttggtctgaatggacastaaccataaacagccgtttgcccatacccatgcacactggctaaatattgaccttgattgaaagtactcttacctattgttgcagagtctatgagtaaag

SEQ ID NO: 534170 - DNA, 201 bp, Homo sapiens
cagattcagttaagaggaccccctacagtttgacttcatttcagtcccactagcagatcagggctattctggctgattccaaggtggtccagggcactcckgagcgagcgcatgtagggatgtgcagccagggctctctcatccatcctgagtgacattgcaacctatgcatgagacactttttggagttcacagtgcatg

SEQ ID NO: 534171 - DNA, 201 bp, Homo sapiens
tccttaaggactagacttataaatatttgcttaatacgattcattaattaatcatgtgaaagtgcttatctagcataaaactaggggactctcggtatccrtttttgttttttcagaatgaaagtgcccttgtgaaagaaaaagagctgtcaatcgaacttgcaaacatcagggatgaagttggtaagtagggcattgaca

SEQ ID NO: 534172 - DNA, 201 bp, Homo sapiens
tatgtatgctttcacccagcaatcttactcctaagaatctgtctcacagaaataaaagcatcaatacatgaagatatatgcataatgatatttatgaccayatgtcatggcaaaaattggaatgaaatgaatggcattcagtaggggagtgggtgaatacgtgataaattgtggagcctccatgtcgtggaatactgtaca

SEQ ID NO: 534173 - DNA, 201 bp, Homo sapiens
agcaatttggcagtatctattttatatgtatgctttcacccagcaatcttactcctaagaatctgtctcacagaaataaaagcatcaatacatgaagatayatgcataatgatatttatgaccacatgtcatggcaaaaattggaatgaaatgaatggcattcagtaggggagtgggtgaatacgtgataaattgtggagc

SEQ ID NO: 534174 - DNA, 201 bp, Homo sapiens
acagcatacacggactttgagaattgaactacagagcaaaccatcaccagagtgctagactggccattgtgggaggcacatgaggtatggatcctaatagyacttcaaaagctttgaaaacggagctaactttggaagcacaacttacagaaggctggatggaactgataacctgaactctacctcactgactgcctgctg

SEQ ID NO: 534175 - DNA, 201 bp, Homo sapiens
caggaagcaaggaaggtagacgagtgagttgtgctaaaaggacagagggaccaaaaagaagggctgcaggccaaaaaggggatacactgagcatcaaaaamcagtaattagtgcaatggactaaaacatattgtgtatgtcaaaataaaaacatgagtttataatttataatgatgtttttaaaaggtgagaggaaacaaa

SEQ ID NO: 534176 - DNA, 201 bp, Homo sapiens
atctagggcctctcaaacttggcagtgaaaagaaaacacatgccatagagaatattaaggtgtggatggctgaaagtcccatgttttgttaaagtcttatrtgtcttccaaacaattatgtaacttttgtattctattccaaaacatatccagttttatattaatagaattatagtgttttttcttacatttgtgaattat

SEQ ID NO: 534177 - DNA, 201 bp, Homo sapiens
aaataatttccaaagttacgcagtgttattgtaagattttcctatcacaacggggcaattgtgtacatttcaaccccctgcttctgtctctctttacacartcatagaattgagggtgacattcttttggtaaatcatatcatgatccaccagctgaaagattaattcaagaaagatgattagaaagagacatctgaatag

SEQ ID NO: 534178 - DNA, 201 bp, Homo sapiens
tggcatatgtcagagcagaggatatacatcatagtgtgatcatattttgccctttcaacccatcctcaaatctgatttaaaaaaataatttccaaagttaygcagtgttattgtaagattttcctatcacaacggggcaattgtgtacatttcaaccccctgcttctgtctctctttacacaatcatagaattgagggtga

SEQ ID NO: 534179 - DNA, 201 bp, Homo sapiens
gtagcacaagtggagcgcaacctgccaggttgagtgggtggaacgagcccagtggacccaagcaaaactcaggtaaaggtgccactggccataaaggtttstggccagaaaagtgacaccccaaggatcctatgacatttgcatatgatcaagtgctctcgtagtaccttggcaatatattgtaatttacttcaaaaaggc

SEQ ID NO: 534180 - DNA, 201 bp, Homo sapiens
attgcaagaccacagaatccagacagtgtggtttcatccacgtcaagtttgtaaacagacttcaggatattgttaccgccacaggtgaagtggtaaaactrtgaggaaaagcaagacatgatcactacagacatcttgacagttgtttcctcgaatggaaaggcggggttgagacctgacatccctctggctgccagtgat

SEQ ID NO: 534181 - DNA, 201 bp, Homo sapiens
gtgtgcttattaatgaaggttcttaatggagtcacaggaaaaaccacagacctaccaagttgaactcaaacagcaccttgctatggcttcttttctcccargatgtagttcattaggaataagtttctgaatgtgtatagctgagggtacttgggttttaaagcaatggagtcaagcaaaggcaatagtgagaggttttta

SEQ ID NO: 534182 - DNA, 201 bp, Homo sapiens
atcacaggctgtgacaccaaagtcaactctcagacatcccgggactaaggatcggtgaacatttggatgggcctccatttgttcaacatatattaattgcrtaccctcttcaagctgaacgctttgttagatacctggggaaatcatggtgaataaggtggacacagtccttgtccctgtggagctgatgggggtcacagg

SEQ ID NO: 534183 - DNA, 201 bp, Homo sapiens
cttgtccctcttaggggtttcagatgcaggcgaagagctaatgccctgtcctaaacatgtttgaggtatatgatccactcctataatattgatttcctgtragttcataatgatcattgagatcagtgtgataacaatggaaagtgttgcggatttagtgctaatgagtatatgtgtacacacatacacacacacacacaa

SEQ ID NO: 534184 - DNA, 201 bp, Homo sapiens
ctgtagtttagagaaattaagtaacccccacacccctagtcatacaacttctttgtagcaggaatcaacctaagcctgttggcctttaaaacctatagacytaacttctgctatttaaatattcttacttcgatggaagccaattaattgcattttactgaagttaccttgattgaaaaatatgacttagagacttagtta

SEQ ID NO: 534185 - DNA, 201 bp, Homo sapiens
agttgtaggagccttctggagtaatgtatagggttttcaaggtatatgatcgtatcagtgaagagggataatttgacttcctctcttcctgtttggatgcstttatttctttctcttgccttattactctggctaggacttctagtacatgttgaaaaagaatgatgagattaggcatccttatcttgttccagttctcaa

SEQ ID NO: 534186 - DNA, 201 bp, Homo sapiens
aagtattttagataccaggcatataaataacaaaaatattttatgaaagtcgtttcttatttcctttttaaaaaagatacgtttgttaagaactgtatgcrtcatgcagtattcttagggctttgtatattcaacttctgatgctcaaggaagctgtagtttagagaaattaagtaacccccacacccctagtcatacaac

SEQ ID NO: 534187 - DNA, 201 bp, Homo sapiens
gaatcatttgcaatttttttctcccattctgtaggttgtatcttcagcctgttgattgtcccatttactgtgcagaagctttttagttttacataattctrtttgtatatttttgcttttgttgcctgtgcttttgaggtattcgccataaaatctttgcccagaccaatgtcccgaagtatttctcctattttttcttct

SEQ ID NO: 534188 - DNA, 201 bp, Homo sapiens
catagttgacaaaaggctcccaaggttgtgcaataaaaagccctgacatgttcattacaagcaaagatgtctggaaagatgttggatgatgaggggaagcrgtgccaaatctggagtctgggtctgaatcctggctttgcctcctacttgctgtgtgatcttcagcaagtcactagactctctgagcttctttcgtcaaat

SEQ ID NO: 534189 - DNA, 201 bp, Homo sapiens
aaagtcttagattgggagccatgtctaaaaagaagtggaggcttcactgtagcagacttgcaggggtatgtttaaggcaagatgtacagggagtgagttgkatgtttcataggagtagcttgtcttgcattccatctgtgaataagagatagaccacaccagaatgaatggagaactcagcgtgcaaaggagagcggtaca

SEQ ID NO: 534190 - DNA, 201 bp, Homo sapiens
gacttctggcatgagtgccttcttgggatgtgttttgtaatcgtctccttactgactgctgcaaataatcttcacacaggcacagtcaaagctcttcactmcaaggggactgtccctcccggactccctcaaacgtctttgcttctgggattttgagcactttgatttctggaaggaatgccctaagaatagatgaaaaga

SEQ ID NO: 534191 - DNA, 201 bp, Homo sapiens
tggcaggatcacagctgtggagctgtcagtcatatgccaaacatcatctggacaaactcagccctttggctgagaggtttagcaatgaagctagagactgrccattaaaggaatgtcgaggactgttctcctctctcgttccaaaaccccttaaggttttctcttgagatgattttaagagagtggacctaagaagtctgt

SEQ ID NO: 534192 - DNA, 201 bp, Homo sapiens
ctttttgatgctataaattatatcatattttctagacttttgtataaatgggatcatacagtatgtactgtttttgtatctggtgtctgtcactcatcatmatgtttttgagattcactcatgttattacatgcatttgtagttcattccttttattgccgagtattgtatggatgtacataccacaatttgatcatctat

SEQ ID NO: 534193 - DNA, 201 bp, Homo sapiens
cccagcgccatttattgaataaggactctttcccctgttgcttgtttttgttgactttgtttttcctcctcaattttttggaatagttccagtggaaatgrtaccaattcttatttatacattgtttagaatttggctatgaatgcatttggtcctgggtctttttcggttggtaagctttttattactgatttgatttca

SEQ ID NO: 534194 - DNA, 201 bp, Homo sapiens
cctaataactattacataggcataccttggagatactgcagattctgtttcaaaccactgctataaaggtgagtcataggacatttttgtttttcagtgcrtataaaacttatggttacactatagtctattaagtgtgctatagcattatgtctaaaaaatatacataccttaatttaaaaatactttattgttgaaaat

SEQ ID NO: 534195 - DNA, 201 bp, Homo sapiens
ccctccctaatacttatcttttgcatttttgatagtgcccatcctagtgggtgtgaggtggcatcagtatgagctattttaaacagaagtactacaagcayccatgtttcaaccatgaaagtttaacataatattttccataatttgattcttaaggaaatagacgttaattaccctttagttgaatttttctgtagacct

SEQ ID NO: 534196 - DNA, 201 bp, Homo sapiens
attattagcttgtgaaataaatgtagtggcctctaactagcgttttgtaaaacaaagtaaaatagaggaaacatttttaaaccagatttttccaaatggarggggaagttttgtttttgtgaaactttggttttgggtatggttgtgtgtgggtgtgtgcactgtgatattgtgtacaatggtgatttttacagtggatca

SEQ ID NO: 534197 - DNA, 201 bp, Homo sapiens
aacttttggagttaagaggtcagtatttcattcataaaagcacctcggaaaggttgtaaggaatatatcatgccattacattacccttaatacaatgggcrtggtattccatcaccaatgactcaaaggcataccttccagcaagccagaatggcatacattgatgccacaaacacagtgtagtactgccagtcagggcac

SEQ ID NO: 534198 - DNA, 201 bp, Homo sapiens
ttttcctaattattggattgtaattctcaagctagagcattgcatatatataacttagtctctttcagtactttccaggcaggatgatggtattatggtcytctctcaatagagggctgcttccaggtctgctagacagtgaacctcggccaccagttgacctgacgttcactgtgacctacattaccatagtagtgaact

SEQ ID NO: 534199 - DNA, 201 bp, Homo sapiens
gggaaccctgtgcagagaagtgagcggcgttaccttacagctgccacacagctgtatgagggaagcccaggaggttttggccatggcattgtcagatatasttgtccgtcttattctccagagtctcataacgcttcagcttgcccaagttgtattcatttttagtcatgctgcccttggagattcagaaatcaagtctga

SEQ ID NO: 534200 - DNA, 201 bp, Homo sapiens
ggggacctgagggggtggtgttgcctcttggctttcttaagtgagtttaaagacaaggtataactcttattttaaaggtgcaattataaaggtgtttaacrtgtgaaagccagctctccttctgtagcaagctgcacattaacagatgccaaattgccacagcttccctttgtcaaagcacgcaaaacagactcactgtaa

SEQ ID NO: 534201 - DNA, 201 bp, Homo sapiens
tggcattgtcagatatacttgtccgtcttattctccagagtctcataacgcttcagcttgcccaagttgtattcatttttagtcatgctgcccttggagaktcagaaatcaagtctgagtttgaggctgtcttttttgatgattgcaaggaatggaaatgggaaaatgtcagaatttcagtctcttagtggcttcaacatt

SEQ ID NO: 534202 - DNA, 201 bp, Homo sapiens
agaggatgaaaatatgagccacagactaatagaagatatttgcaaaccacatatctgacaaaggactaatatacataaagaactcttaaaactcagcagtaaaaaaaaaaaatccaattagaacgtagataagagatatgagcagccatctcactgaagaagatgtacagatggaaaataagatatacagatgttcaacat

SEQ ID NO: 534203 - DNA, 201 bp, Homo sapiens
gttattgtctgtctttttaattatagctgtcctaatgagtgtgtcatggtatctgattgtggcattgatttgcactttttctgatggctgaaaatgctgtkcattttgtcatgtgttgctggccagttagttgtacatgttcttgggggagatacctattcaatttatttgctaattttaaaatttggttatttttctttt

SEQ ID NO: 534204 - DNA, 201 bp, Homo sapiens
ggtgatggcaagcgagttgcagacaagcctaggacaaggatttgacattttgcatctgcctttcctattgcctcgcctagctaagtcccccaaacctgtcwcctctgtttctctgttgagggaccccatgacctgtcattgcctgacagttagcaaatggttgtttgctaatgttgatatattagcaaaggttcaaagaaa

SEQ ID NO: 534205 - DNA, 201 bp, Homo sapiens
gcttgtgtcagtttaaaacctcagttttatgtaatcataaattccaagaatgtgagagctggatggaactttagagtatatgtaaaataaatagccattgrgggggaagagtaagaccagactctggactcccgactccgagttcaggacactacgggtttctaatctgttttacagaaaatatttttgatctgaaaagtt

SEQ ID NO: 534206 - DNA, 201 bp, Homo sapiens
taagtgttctcatgcaagtgggatggagtttgtgtggttttgatctaaattaccaccctcactcctgtcccacttcctagcatcaaaagagggtgcattgrgctttcttaacagctttccccgatatggggccaaaggagtggggattgaggctaaaagctgttagcagtcaaagtgaaaacaaacaaacaaacaaaaaac

SEQ ID NO: 534207 - DNA, 201 bp, Homo sapiens
cctgtaccttttccaactgttttctctgtgttaactgaggatcattgtgcatattcttacaaagataacctggaaacacaggatctcatttagcaggaagscttggtgagtgagtgagagagagagagtgtgtgtgtgtgtgtgtatgtgtgtgtgttgggtgggtaattgtagcgaattaaattttctggttaatgtagg

SEQ ID NO: 534208 - DNA, 201 bp, Homo sapiens
catggccccgccagacgagtggatggggcaccttctgcaacaggcccagggccaagtgaggccctgggcagagacatcattggccatggaggtctctggcytggcaaagtgacagaaaaatcatgtatcaattattccacacacaaagcaagagggtttgaaaagttttatgacttacataattgaagtctctgggaagag

SEQ ID NO: 534209 - DNA, 201 bp, Homo sapiens
gatccaggctggtgcacaagccaggcatggccccgccagacgagtggatggggcaccttctgcaacaggcccagggccaagtgaggccctgggcagagacrtcattggccatggaggtctctggcctggcaaagtgacagaaaaatcatgtatcaattattccacacacaaagcaagagggtttgaaaagttttatgactt

SEQ ID NO: 534210 - DNA, 201 bp, Homo sapiens
ttgatgccagcattttgataaaatggcagccaaatatccccatgtccaaatgggcctatcaaaatatccttattgagtgttttttattagttgagctatarttcacaaaccataaaatttgcccttttcaagtgtacatttcagtgatccctggcaaccactagtctacttttttgttttatggatttaatctactctgga

SEQ ID NO: 534211 - DNA, 201 bp, Homo sapiens
cagcattttgataaaatggcagccaaatatccccatgtccaaatgggcctatcaaaatatccttattgagtgttttttattagttgagctataattcacawaccataaaatttgcccttttcaagtgtacatttcagtgatccctggcaaccactagtctacttttttgttttatggatttaatctactctggaagtttca

SEQ ID NO: 534212 - DNA, 201 bp, Homo sapiens
tctggttgggtagtggagtgcctgtgggagagttcaccgtgctggggtcgtgggggctgcaggagagtacactgtagtcagggggctgcaggcgagcccayaccagtggagtgactgggggaggctgcaagcaagcacatgccagtgaaggaaggctgtagctggttgcacactggtggcaaaaatgttccaatgggaagg

SEQ ID NO: 534213 - DNA, 201 bp, Homo sapiens
cccttgaggtcaggcatctcctgtgctggaagagccgagatgttcctagttctctggcaaacaacactctgatgggggctgccagcaaaagtgctctggtwgggtagtggagtgcctgtgggagagttcaccgtgctggggtcgtgggggctgcaggagagtacactgtagtcagggggctgcaggcgagcccataccagt

SEQ ID NO: 534214 - DNA, 201 bp, Homo sapiens
accctggggacctgagaccaggcttttggttttgttctctggccccttgaggtcaggcatctcctgtgctggaagagccgagatgttcctagttctctggmaaacaacactctgatgggggctgccagcaaaagtgctctggttgggtagtggagtgcctgtgggagagttcaccgtgctggggtcgtgggggctgcagga

SEQ ID NO: 534215 - DNA, 201 bp, Homo sapiens
tgctttagttatgtcctagagattctagtatgttgtattttgttctcattagtttcaaagaatttcttgatatctgccttaatttcattgtttacctagargtcattcaggggtaggtggtttaatttccatgtaattgtatggttttgagcttagtattgacttctgtttttattgtgctgcggcctaagagtgtgtttg

SEQ ID NO: 534216 - DNA, 201 bp, Homo sapiens
ttatttcttgtcttctgctagctttggggttggtttggtcttgtttctgtagttcctctaggtgtgatgttaggttgtaatttgatatctttccaactttyatgtgggtctttagcactgtacatttccctaacactgctttagttatgtcctagagattctagtatgttgtattttgttctcattagtttcaaagaattt

SEQ ID NO: 534217 - DNA, 201 bp, Homo sapiens
aggagaggaatatagctatgtatgtgaactactttgacacgcatttaacttctccatataccaaaaatgaggttggtgggctgtcctcatacctgcacttyctctttcccttaactcctgccctttactgagaacccacggggaggaggtcttttcagttccttacctctatgactgcagtaaccttcaatcccatgtgaa

SEQ ID NO: 534218 - DNA, 201 bp, Homo sapiens
tgacacctgaattttaccacaatcaaaaaaattccaaggtattttatgttttcctatgctactggcaatatttaaaatattttaatttctaggtacacctyatggatctaggatatgtatttttgttatctttcaattgagaagattttctaatttctctcatgacatatttggcccagagtctatttagtagtatgttgc

SEQ ID NO: 534219 - DNA, 201 bp, Homo sapiens
agagatgtgcttcacctctttttaaagccgggacacggcggccttttagagatttcaaactggagcgatgaaaggaaagaagcccttgacttttccacacraaaatgacttacataagctacctgggcataattcaaacacgctctgttgtatgagagccctgcgctctgttcatgatcctttatgatagcaaaagccatt

SEQ ID NO: 534220 - DNA, 201 bp, Homo sapiens
ggggagttgtgttatgggtacagaacgtcagttttgcaagatgaaaaagtcctagagattaatttcacaacagtttaagtatacttaacactgttgaactrtataattagaaattattaagctggtaacttttatgacacctgaattttaccacaatcaaaaaaattccaaggtattttatgttttcctatgctactggca

SEQ ID NO: 534221 - DNA, 201 bp, Homo sapiens
gaaggagcggggatggaaccagggtctggtcttcggaatgtccagctgcctccagagaagcccaccagcgggagactggcataaaccagcagagcccaggracgcgagggctcaacttgatggagcagtaacttggaaacagcttaaatgacctctaagagcagatttcctaaacagattggagttagttgtgcaatggaa

SEQ ID NO: 534222 - DNA, 201 bp, Homo sapiens
ggcagttggagggagagaaaggatcagtgaatttggcaacatggaagacgttgattctctttacaagaacactttaagtggagtcgtggagaccaatcctyattagccagagagagggaagttgacacccaagtgtagccacctcaggcttatgaaatataaggggcaaatagcaaaaatggccagacaagacttggagct

SEQ ID NO: 534223 - DNA, 201 bp, Homo sapiens
aagtttctgtttaaatttacattgagccatactaactggttttactaggggtatggtccatggggtctcattttgccaagccaattttgtatatgtcaaawtcttaattatatttaaatgtattgatcattaggccagagtgtccatgctcactatgggatattttaggacaatgaatgctatgatactggaaaatttaga

SEQ ID NO: 534224 - DNA, 201 bp, Homo sapiens
tgtcagtttaaaacctcagttttatgtaatcataaattccaagaatgtgagagctggatggaactttagagtatatgtaaaataaatagccattggggggraagagtaagaccagactctggactcccgactccgagttcaggacactacgggtttctaatctgttttacagaaaatatttttgatctgaaaagttgaaaa

SEQ ID NO: 534225 - DNA, 201 bp, Homo sapiens
gttgcctttttgaaaaataggttaataaggttcacctttctttccacttcattcttccgactgtgatgtagttggatgattgcttagtgctatttattgarggttttggtttttgcattttttaagaaaaaaaaaaaaagtttggggtaatgtagaaacaccctgagcctagcacagttggagataggtgaccaaaaagtg

SEQ ID NO: 534226 - DNA, 201 bp, Homo sapiens
ccaccataaataaggtccttatattctagagaaagagtaaaaataatatgtaattttagacttaaccatgttaaaatatctgttaaaatttctaagatgascaataaaatacatatatattgttctgaaccctagatgggaaaatattggaatgaggggttaaaaaaaattcaatcaatataaaggaaggaaaaagaagga

SEQ ID NO: 534227 - DNA, 201 bp, Homo sapiens
ccacaagccagccccactgcagtttaagagctggagtctgtgctgccactgtgctctgaaaatccaatttaaaatgctgcagtgcttatggctacttagtygactaagatgtgaaatcacacacacaaggaaacaagccaccataaataaggtccttatattctagagaaagagtaaaaataatatgtaattttagactta

SEQ ID NO: 534228 - DNA, 201 bp, Homo sapiens
tggcagtgaccttcagagaagggggcgtttttcatcaaatcagagacagcagtgtccttacttctcccctgaccactcaaaactaaattccctttcctatraagaagtgtgtcattcatcaagcacagggggtggtgaccatagcaacaaatcacccaaatatttcttttgttgatatgtttgactttcttgaagccaccc

SEQ ID NO: 534229 - DNA, 201 bp, Homo sapiens
cccccaggaacctttgaccacaagccagccccactgcagtttaagagctggagtctgtgctgccactgtgctctgaaaatccaatttaaaatgctgcagtkcttatggctacttagtcgactaagatgtgaaatcacacacacaaggaaacaagccaccataaataaggtccttatattctagagaaagagtaaaaataat

SEQ ID NO: 534230 - DNA, 201 bp, Homo sapiens
ggttttcgagaaaaatgtcttcaacaagaccagccggactgagagtaagtgtccccctcttcctccagcagactatcagatgcacactgtcatcttctccrtctggacacatctgtccccatcagccttgcacacccacaggccatttccctttcttcagaggctttttgtcctctccttccctgctgttctccactccct

SEQ ID NO: 534231 - DNA, 201 bp, Homo sapiens
caggaggttggggcagtaagaagggtctgtctatggggaaatgttgttatttggaatctgggcttgaggctgggacctggaggctcaccattggacccctycttttaggctccatggggtagaggagggcagccagaagggttctttctgggacaatgtgtatcttcgatgccccttagtttccttgggaaccaggaatga

SEQ ID NO: 534232 - DNA, 201 bp, Homo sapiens
atggcgggtgaggaggggacagtcagggacactcacagcaggagtgcctttgataatcatcagccccagatggcacccagcatggctagaactctgaccarcttctcactcccttcccccagcatattcccagggatcccattcccctagcccttccccttactagcgccccactcatgaagatagaagttgatttcaatg

SEQ ID NO: 534233 - DNA, 201 bp, Homo sapiens
ctgtacataaccccaaggcctcacgaaggagcgcctgctctctgagaaaagctacaatatttgggtctatcaaaagggaatttttttgtttgtttctttgtgtgtgtgtgtgtgtgtgtgtgtgtgtgtgtgtgtgtgttttgagatggagtctcactctgtcgcccaggctggagtgcagtggcgtgatcttggctcact

SEQ ID NO: 534234 - DNA, 201 bp, Homo sapiens
ggtgagttgcgattccgcggggagggtaaggagtggcctgtccgtcccagactcggctcccatcaccggtgggtgatgggcatgcttctggagtctacccsggccagggcctgggggcgcgctgatagcgcaggtccagcccggccagggatcagctggaagaaggaggctcggcccgctgtcccccccggcccaggttct

SEQ ID NO: 534235 - DNA, 201 bp, Homo sapiens
tgtacataaccccaaggcctcacgaaggagcgcctgctctctgagaaaagctacaatatttgggtctatcaaaagggaatttttttgtttgtttctttgtgtgtgtgtgtgtgtgtgtgtgtgtgtgtgtgtgtgtgttttgagatggagtctcactctgtcgcccaggctggagtgcagtggcgtgatcttggctcactg

SEQ ID NO: 534236 - DNA, 201 bp, Homo sapiens
catcagccccagatggcacccagcatggctagaactctgaccaacttctcactcccttcccccagcatattcccagggatcccattcccctagcccttccycttactagcgccccactcatgaagatagaagttgatttcaatgttagccaaagtcaagccaaacaagagactaacctgatgtcaaactatgggagactgt

SEQ ID NO: 534237 - DNA, 201 bp, Homo sapiens
gtctggaactcctgacctcaggtgatccacccgcctcggcctcccaaagtgctgggattacaggcatgagccaccgtgcccagccttaaaaaaaaaaaaargggaggaagtaggggagaaggtagatgctgatttttggagtttcatttcttttatgcagggcatgaccccatgccataaaataacagtgcaacaagataa

SEQ ID NO: 534238 - DNA, 201 bp, Homo sapiens
ccctgtacataaccccaaggcctcacgaaggagcgcctgctctctgagaaaagctacaatatttgggtctatcaaaagggaatttttttgtttgtttctttgtgtgtgtgtgtgtgtgtgtgtgtgtgtgtgtgtgtgtgttttgagatggagtctcactctgtcgcccaggctggagtgcagtggcgtgatcttggctca

SEQ ID NO: 534239 - DNA, 201 bp, Homo sapiens
cctgtacataaccccaaggcctcacgaaggagcgcctgctctctgagaaaagctacaatatttgggtctatcaaaagggaatttttttgtttgtttctttgtgtgtgtgtgtgtgtgtgtgtgtgtgtgtgtgtgtgtgttttgagatggagtctcactctgtcgcccaggctggagtgcagtggcgtgatcttggctcac

SEQ ID NO: 534240 - DNA, 201 bp, Homo sapiens
ccagaactgactcctaaggtctccagccagggcttctgagatgcaaaggtttggcctcaggagagtcaccttttctcacggccctggccttaactcatatyttaggcattcctggccccagggccctaataaacctgcttttgtcttctgccaagggtctccttctctcttggcctaggaagtgtgtgtgtgtgtgtgtgt

SEQ ID NO: 534241 - DNA, 201 bp, Homo sapiens
ctcccccaccccaccccaggttcttcagtctgccaaggaacaaattaaatggtcgttattgaaatgaaggctgtggattcaaggctccctgccccccagaycatttccccaatcctggcaaaagcccaaagatcccagggtcaggagagacccctctgtatccccaggtccctcccagaactgactcctaaggtctccagc

SEQ ID NO: 534242 - DNA, 201 bp, Homo sapiens
gttggccaggctggtctggaactcctgacctcaggtgatccacccgcctcggcctcccaaagtgctgggattacaggcatgagccaccgtgcccagccttaaaaaaaaaaaaaagggaggaagtaggggagaaggtagatgctgatttttggagtttcatttcttttatgcagggcatgaccccatgccataaaataacag

SEQ ID NO: 534243 - DNA, 201 bp, Homo sapiens
ttccccatgtttcctcataccatgctggaatgaatgcagctgcaaggcaatttttagagtggaaagagggtagggagtaataagcagagcagataagaacrcaggtgctcatgggagtcatcccagggtacgtgttctaccttaccacctaaagctgggtgacctagggcaagttactcaacctctctgggcctcacataa

SEQ ID NO: 534244 - DNA, 201 bp, Homo sapiens
gtgatgggcatgcttctggagtctacccgggccagggcctgggggcgcgctgatagcgcaggtccagcccggccagggatcagctggaagaaggaggctcrgcccgctgtcccccccggcccaggttctgtgatacactccgactcgggctctggagcagtcagtgcatgacagaacttgggcccggaaggaccttctgca

SEQ ID NO: 534245 - DNA, 201 bp, Homo sapiens
gccctgatatgtcacaggacccttcctccctgtttttctcctgaagtccccacaagactaagataatccaaaaagaaaagttcacagtcgacacaatgaaygaaagtagggctgtgctatagcatctaacctagttgtgaaacgcatctggggtcctgtggtgggtgccagggtgtcaaggcccaaagtatgggaggttgg

SEQ ID NO: 534246 - DNA, 201 bp, Homo sapiens
gctgggtcacttgtgcaccccaaaaatctgggaactcaggcctctgatgcgccctctaccgaaacctggaaagggtaccaaataggagtttggctcttaayccctgtccttgccacttagggtgcacactgggattgttaagggactctcaaacccatgataggatctgactttccccactcatcacttgtcaccttaccc

SEQ ID NO: 534247 - DNA, 201 bp, Homo sapiens
tcaaagaatcagagctgagggctctccatgctgagggagagttctgacttgagggctatcagtgggaagggacctggaaggtggagatgttgcaggatgcmttcggagagggaagaggcttggcaaggagaaggggcggaggggaggattgtgccactgatttgcctcctggtttttcctctcatcttgtagtgtgattct

SEQ ID NO: 534248 - DNA, 201 bp, Homo sapiens; identical to SEQ ID NO: 144495

SEQ ID NO: 534249 - DNA, 201 bp, Homo sapiens; identical to SEQ ID NO: 144648

SEQ ID NO: 534250 - DNA, 201 bp, Homo sapiens; identical to SEQ ID NO: 144548

SEQ ID NO: 534251 - DNA, 201 bp, Homo sapiens; identical to SEQ ID NO: 144496

SEQ ID NO: 534252 - DNA, 201 bp, Homo sapiens; identical to SEQ ID NO: 144649

SEQ ID NO: 534253 - DNA, 201 bp, Homo sapiens; identical to SEQ ID NO: 144650

SEQ ID NO: 534254 - DNA, 201 bp, Homo sapiens; identical to SEQ ID NO: 144498

SEQ ID NO: 534255 - DNA, 201 bp, Homo sapiens; identical to SEQ ID NO: 144499

SEQ ID NO: 534256 - DNA, 201 bp, Homo sapiens; identical to SEQ ID NO: 144500

SEQ ID NO: 534257 - DNA, 201 bp, Homo sapiens; identical to SEQ ID NO: 144596

SEQ ID NO: 534258 - DNA, 201 bp, Homo sapiens; identical to SEQ ID NO: 144501

SEQ ID NO: 534259 - DNA, 201 bp, Homo sapiens; identical to SEQ ID NO: 144421

SEQ ID NO: 534260 - DNA, 201 bp, Homo sapiens; identical to SEQ ID NO: 144626

SEQ ID NO: 534261 - DNA, 201 bp, Homo sapiens; identical to SEQ ID NO: 144627

SEQ ID NO: 534262 - DNA, 201 bp, Homo sapiens; identical to SEQ ID NO: 144467

SEQ ID NO: 534263 - DNA, 201 bp, Homo sapiens; identical to SEQ ID NO: 144469

SEQ ID NO: 534264 - DNA, 201 bp, Homo sapiens; identical to SEQ ID NO: 144558

SEQ ID NO: 534265 - DNA, 201 bp, Homo sapiens; identical to SEQ ID NO: 144422

SEQ ID NO: 534266 - DNA, 201 bp, Homo sapiens; identical to SEQ ID NO: 144559

SEQ ID NO: 534267 - DNA, 201 bp, Homo sapiens; identical to SEQ ID NO: 144561

SEQ ID NO: 534268 - DNA, 201 bp, Homo sapiens; identical to SEQ ID NO: 144423

SEQ ID NO: 534269 - DNA, 201 bp, Homo sapiens; identical to SEQ ID NO: 144601

SEQ ID NO: 534270 - DNA, 201 bp, Homo sapiens; identical to SEQ ID NO: 144428

SEQ ID NO: 534271 - DNA, 201 bp, Homo sapiens; identical to SEQ ID NO: 144602

SEQ ID NO: 534272 - DNA, 201 bp, Homo sapiens; identical to SEQ ID NO: 144603

SEQ ID NO: 534273 - DNA, 201 bp, Homo sapiens; identical to SEQ ID NO: 144604

SEQ ID NO: 534274 - DNA, 201 bp, Homo sapiens; identical to SEQ ID NO: 144517

SEQ ID NO: 534275 - DNA, 201 bp, Homo sapiens; identical to SEQ ID NO: 144605

SEQ ID NO: 534276 - DNA, 201 bp, Homo sapiens; identical to SEQ ID NO: 144518

SEQ ID NO: 534277 - DNA, 201 bp, Homo sapiens; identical to SEQ ID NO: 144606

SEQ ID NO: 534278 - DNA, 201 bp, Homo sapiens; identical to SEQ ID NO: 144575

SEQ ID NO: 534279 - DNA, 201 bp, Homo sapiens; identical to SEQ ID NO: 144519

SEQ ID NO: 534280 - DNA, 201 bp, Homo sapiens; identical to SEQ ID NO: 144520

SEQ ID NO: 534281 - DNA, 201 bp, Homo sapiens; identical to SEQ ID NO: 144521

SEQ ID NO: 534282 - DNA, 201 bp, Homo sapiens; identical to SEQ ID NO: 144480

SEQ ID NO: 534283 - DNA, 201 bp, Homo sapiens; identical to SEQ ID NO: 144523

SEQ ID NO: 534284 - DNA, 201 bp, Homo sapiens; identical to SEQ ID NO: 144634

SEQ ID NO: 534285 - DNA, 201 bp, Homo sapiens; identical to SEQ ID NO: 144525

SEQ ID NO: 534286 - DNA, 201 bp, Homo sapiens; identical to SEQ ID NO: 144527

SEQ ID NO: 534287 - DNA, 201 bp, Homo sapiens; identical to SEQ ID NO: 144638

SEQ ID NO: 534288 - DNA, 201 bp, Homo sapiens; identical to SEQ ID NO: 144449

SEQ ID NO: 534289 - DNA, 201 bp, Homo sapiens; identical to SEQ ID NO: 144642

SEQ ID NO: 534290 - DNA, 201 bp, Homo sapiens; identical to SEQ ID NO: 144670

SEQ ID NO: 534291 - DNA, 201 bp, Homo sapiens; identical to SEQ ID NO: 144645

SEQ ID NO: 534292 - DNA, 201 bp, Homo sapiens; identical to SEQ ID NO: 144673

SEQ ID NO: 534293 - DNA, 201 bp, Homo sapiens; identical to SEQ ID NO: 144674

SEQ ID NO: 534294 - DNA, 201 bp, Homo sapiens; identical to SEQ ID NO: 144620

SEQ ID NO: 534295 - DNA, 201 bp, Homo sapiens; identical to SEQ ID NO: 144675

SEQ ID NO: 534296 - DNA, 201 bp, Homo sapiens; identical to SEQ ID NO: 144621

SEQ ID NO: 534297 - DNA, 201 bp, Homo sapiens; identical to SEQ ID NO: 144622

SEQ ID NO: 534298 - DNA, 201 bp, Homo sapiens
tgaggcaggagaatggcttgaacccagaaggtggagcttgcagtgagctgagatcatgccactgcactccagcctgggcgacagagcgagactccatctcaaaaaaaaaaaaaaaaatttaaaaattagcagggtgccgtagtgtgcacctgcagttccacctacttgagaggctgaagtgggaggattactgctgccttg

SEQ ID NO: 534299 - DNA, 201 bp, Homo sapiens
ggaatttacaggcgcgtgccaccacgccagctaattttgtatttttagtagaggcggggtttcaccatgttcgccaggttggtctgggactcctggcctcragtgatctgctcgcctcccaaagtgctgggattataggcgtgagccacactttgccttctttgcaccagggagaattatattttttctcattttttattt

SEQ ID NO: 534300 - DNA, 201 bp, Homo sapiens
cctggcctcaggtgatccgcctgcctcgacctcccaaagtgctgggactacaggcatgagttgccgcgtgcagccctgcagtcctgttttttttttttttkgggcggagtttcactcttgttacccaggctggagtgcaatggcgcgatctcagctcaccgcaacctctgcctcctgggttcaagcagttctcctgccttg

SEQ ID NO: 534301 - DNA, 201 bp, Homo sapiens
ggagcagaaagcaaattgggactcttcgaagggggcctgatgttgtggggaaactgcgtgcaaatccagctctctgctctgacccctcccaggggaatttrcctgtgtggacactcagccggggcccacctggctgccatgatgctcctggccgactggaccaagcatggggtcacgcccaacctcagaggtttccatggg

SEQ ID NO: 534302 - DNA, 201 bp, Homo sapiens
ggagagtctcactctgttgcccaggctggagggcagtggtgctatgtcatctcactgcaacctccacctcctgggttcaagcagttcttgtgcctcagctkcccgaatagctgggattgcagatgtgcaccaccacgcccggctaatttttgtgtttttagtagagacagggtttcgccatgttggccaggctggtctcaa

SEQ ID NO: 534303 - DNA, 201 bp, Homo sapiens
gctgggattgcaggttcccggttggtatttccttatttggaaagaccatctttgtaggtgttattagctaaagtcaagtcattctgggttagggtgggccmtaaatgccattgactgctatcctgctaagagacagaagagggagggacacacagggaggggaccacgtgaagacggaggcagagacgggaagaggcagag

SEQ ID NO: 534304 - DNA, 201 bp, Homo sapiens
aattgccttgcacagtggctcacacctataatcccacacattgggaggctgaggcaggaggattgagttagaaaccagcctggtcaacatagcaagacccycatctctacaaaagaaaagataaatttgctgggcatagtggtgcacacctatactcctgcttgggaggctgaggcaggaggatcgcttgagcccaggagg

SEQ ID NO: 534305 - DNA, 201 bp, Homo sapiens
cattgcactccagcctgggcgacagagcgaggccctatcgcttagaaaacaaaaagttacatgaagttcccccaaggtcccgtagctagcatgtgatgtgkcagggagagagcctgtccgcttcactctctcacatgggaccagaaaggggtgatgctgtgcgtggacaggacatctggcaagtggtgtgtccaggacaca

SEQ ID NO: 534306 - DNA, 201 bp, Homo sapiens
tgagatcatgccactgcactccagcctgggcgatagagcgagactcagtttcaaataaataaataaacatcaaaataaaaagttactgtattaaagaatgrgggcggggtgggaggggtggggagaggttgcaaaaataaataaataaataaataaaccccaaaatgaaaaagacagtggaggcaccaggcctgcgtgggg

SEQ ID NO: 534307 - DNA, 201 bp, Homo sapiens
agatcttggctcactgcaagctccgcctcccaggttcacgccattctcctgcctcagccacccaagtagctggtactacaggcgcccaccaccatgcccasctaattttttgaatagagacggggtttcaccgtgttagccaggatggtagcattagaaattatttctaacccaggctgggctccatggctcatccctgta

SEQ ID NO: 534308 - DNA, 201 bp, Homo sapiens
ccactaaaaatacaaaaaattagccgggcgtggtggtgggcgcctgtagtcccagctactcgggaggctgaggcaggagaatggcgtgaacccaggaggcrgagcttgcagtgagccgagattgcaccactgcactccagcctgggcgacagaatgagactccgtctcaaaaaaaaaaaaaaaagaaaaaaatctttacag

SEQ ID NO: 534309 - DNA, 201 bp, Homo sapiens
aatggcgtgaacccaggaggcggagcttgcagtgagccgagattgcaccactgcactccagcctgggcgacagaatgagactccgtctcaaaaaaaaaaaraaaagaaaaaaatctttacagtggattacataacaattccagtgaaatgaaattacttcaaacagttccttgagaatgttggagggatttgacatgtaat

SEQ ID NO: 534310 - DNA, 201 bp, Homo sapiens
tagcttctcgtcagtacgtcagtacgcagggagccctgcaggggcaagtggttggtaacgtgggtgctggcaaaacaggttttgcaacctcactggcgttstgcaaaggcagcttcctgcctggattggcccatgggcaacttccctttgatttccctcagctttaatccatccagctgaagtggagacagcccggtttat

SEQ ID NO: 534311 - DNA, 201 bp, Homo sapiens
tattattattattatttttgtttttgagacggagtcttgctctgtcacccaggctggagtgcagtggcaagatcttggctcactgcaagctccgcctcccrggttcacgccattctcctgcctcagccacccaagtagctggtactacaggcgcccaccaccatgcccagctaattttttgaatagagacggggtttcacc

SEQ ID NO: 534312 - DNA, 201 bp, Homo sapiens
cgcctctactcccagaaggccgcggggggtggaccgcctaagagggcgtgcgctcccgacatgccccgcggcgcgccattaaccgccagatttgaatcgcsggacccgttggcagaggtggcggcggcggcatgggtgccccgacgttgccccctgcctggcagccctttctcaaggaccaccgcatctctacattcaaga

SEQ ID NO: 534313 - DNA, 201 bp, Homo sapiens
gacatttacttccccgacgagtcgtctgaaggttgtcggtgaaggggctgggggtcccggggcttgggggtccagtggcagagctcagcagggcgggcctygctcacacgccctgtgcttggttttgcagccttgcctttcttcctgttctttcacggaggatactggcagagcggaaggtgagtcgggggatgtggatgg

SEQ ID NO: 534314 - DNA, 201 bp, Homo sapiens
tacgataaagtttaatttataaattggcaaagggtatataaatattccttctaagagattaacaataactaataaagtagaacgattaaaacaatatactrtgatcaaagttatgtgaagccaggtgctgtggctcatgcctgtaatcccagcactttgggaggctgagacaggtggatcacctgaggtcaggagttggag

SEQ ID NO: 534315 - DNA, 201 bp, Homo sapiens
ataaatattccttctaagagattaacaataactaataaagtagaacgattaaaacaatatactgtgatcaaagttatgtgaagccaggtgctgtggctcaygcctgtaatcccagcactttgggaggctgagacaggtggatcacctgaggtcaggagttggagaccagcctggccaacatgacaaaaccccgtctctact

SEQ ID NO: 534316 - DNA, 201 bp, Homo sapiens
tcatttgaccaaaatgccttggggtggacgtaagatgcctgatgcctttcatgttcaacagaatacatcagcagaccctgttgttgtgaactcccaggaaygtccaagtgctttttttgagattttttaaaaaacagtttaattgaaatataacctacacagcacaaaaattaccctttgaaagtgtgcacttcacacttt

SEQ ID NO: 534317 - DNA, 201 bp, Homo sapiens
agccccaccccaggcagcttgaaatcagagctggggtccaaagggaccacaccccgagggactgtgtgggggtcggggcacacaggccactgcttcccccygtctttctcagccattcctgaagtcagcctcactctgcttctcagggatttcaaatgtgcagagactctggcacttttgtagaagccccttctggtccta

SEQ ID NO: 534318 - DNA, 201 bp, Homo sapiens
tatgcgtctagacatgcggatatattcaagctgggcacagcacagcagccccaccccaggcagcttgaaatcagagctggggtccaaagggaccacacccygagggactgtgtgggggtcggggcacacaggccactgcttccccccgtctttctcagccattcctgaagtcagcctcactctgcttctcagggatttcaa

SEQ ID NO: 534319 - DNA, 201 bp, Homo sapiens
tgaccttgtggtccacccgcctcggcctcccaaagtgctgggattgcaggtgtgcgccgccgcgcccggccaggcttttttttctctaggcctgctgtggycaccaaggctggggaccagggggcctccagggacagggatcccaagttgcacgttaatacacggagccctttctgagatgcaggttctacagggaactgg

SEQ ID NO: 534320 - DNA, 201 bp, Homo sapiens
tggcccccttcccagagacaggggaggatcctccacccactccccagcctccaggaccatcctgactcctgccttcaggcactcaagttatgcgtctagayatgcggatatattcaagctgggcacagcacagcagccccaccccaggcagcttgaaatcagagctggggtccaaagggaccacaccccgagggactgtgt

SEQ ID NO: 534321 - DNA, 201 bp, Homo sapiens
agcaaagaatagccccctcctttcctggtgcaccttcagatgtgccgatggggcccaggctcgctgcagatggcccccttcccagagacaggggaggatcstccacccactccccagcctccaggaccatcctgactcctgccttcaggcactcaagttatgcgtctagacatgcggatatattcaagctgggcacagcac

SEQ ID NO: 534322 - DNA, 201 bp, Homo sapiens
tggggtttcaccatattggccagggtggtctcgaatgcctgaccttgtggtccacccgcctcggcctcccaaagtgctgggattgcaggtgtgcgccgccscgcccggccaggcttttttttctctaggcctgctgtggccaccaaggctggggaccagggggcctccagggacagggatcccaagttgcacgttaataca

SEQ ID NO: 534323 - DNA, 201 bp, Homo sapiens
atctctactaaaaatacaaaaattagcctggtgtggtggtgcatgcctttaatctcagctactcgggaggctgaggcaggagaatcgcttgaacccgtggyggggaggaggttgcagtgagctgagatcatgccactgcactccagcctgggcgatagagcgagactcagtttcaaataaataaataaacatcaaaataaa

SEQ ID NO: 534324 - DNA, 201 bp, Homo sapiens
atttttagtagaaatggggtttcatcatgttggtcaggctgatcttgaactcctgacctcgtgatcccgcctccgcctcccaaagtgctgggattacaggygtgagccaccgcgcccagcctctgtttttttttttctttttttaattctccaaactgcctcagaatggttccttgttactttctgcataaagtgtgaagg

SEQ ID NO: 534325 - DNA, 201 bp, Homo sapiens
gctggagtgcaatggcgcgatctcagctcaccgcaacctctgcctcctgggttcaagcagttctcctgccttggcctcccaagtagctgggattacaggcrtgcgccaccacgtccagctaattttgtatttttagtagagatggggtttctccatgttggtcaggctggtctggaactcccgacctcaggtcatctgccc

SEQ ID NO: 534326 - DNA, 201 bp, Homo sapiens
cagggtggtctcgaatgcctgaccttgtggtccacccgcctcggcctcccaaagtgctgggattgcaggtgtgcgccgccgcgcccggccaggcttttttytctctaggcctgctgtggccaccaaggctggggaccagggggcctccagggacagggatcccaagttgcacgttaatacacggagccctttctgagatgc

SEQ ID NO: 534327 - DNA, 201 bp, Homo sapiens
aggctggagtgcagtggcgcgatctgggctcactgcaacctcttcttccagggttcacgccattctccggcctcagcctcctgagtagctgggactacatgcgcccgcaaccatgcccggctaatttttttgtatttttagtagagatggggtttcactgtgttagccaggatggtctccaactcctgacctcatgatccg

SEQ ID NO: 534328 - DNA, 201 bp, Homo sapiens
ccaaagtgctgggattacaggtatgagccaccgtgcctggactttcaccttttctttctttaaagaaatctggacttgggaacctgtaaactagtgaagtmttaaggtccatttccatctctaccctgtatctgcaaagtgctgtaccacgatctgaacacctggtaatgcatccgtgctgggatggggagcaggccccga

SEQ ID NO: 534329 - DNA, 201 bp, Homo sapiens
aatggtgggatctcagctcgctgcaacctccacctcccgagttccagcgattctcctgcctcagcctcccgagtagctgagattacgggcgcccgccaccatgcccagctaatttttgtatttttagtagagacggagtttcaccatgttggccaggatggtctcgaactcctgacctcaggtgattcacccgcctcagcc

SEQ ID NO: 534330 - DNA, 201 bp, Homo sapiens
aaaaaatttaaaggccaggcgtggcagctcacgcatgtaatcccagcactttgcggggctgaggtgggcagatcacaaggtcaggagattgagaccatccyggctaacacggtgaaaccctgtctctactaaaaatacaaaaaattagctgggcgtggtgcgggcacctgtagtcccatctactctggagactgaggcagg

SEQ ID NO: 534331 - DNA, 201 bp, Homo sapiens
tattgaaacttcaagtcatatgaatgaaagaaaattaaaaggaaaggattaaaaaggaaaaaaaaaaaagaggccaggaactgtcacacacgcctgtaatsccagtactgtgggaggtcaaagcacgaggatcctttgaggccaggagtttgagaccagcctgggcaacatagcaataacctgcctctacaaaaaatttaa

SEQ ID NO: 534332 - DNA, 201 bp, Homo sapiens
gtggctcacatctgtaatcccagcactttgggaggccgaggcaggcagatcacttgaggtcaggagtttgagaccagcctggcaaacatggtgaaaccccrtctctactaaaaatacaaaaattagcctggtgtggtggtgcatgcctttaatctcagctactcgggaggctgaggcaggagaatcgcttgaacccgtggc

SEQ ID NO: 534333 - DNA, 201 bp, Homo sapiens
gggtttcccaagcaaggttccttggaagaagatgtctgcagaggtaggtggattgcagggagggactaaggggctggggcggagttagctcatttattagwttggaattccaagaaggaagcttagaagccgtctagagcactcctgtgggcatgcagagcgcctagtgcgtgccaggtccccagtgcttgagcaccatgg

SEQ ID NO: 534334 - DNA, 201 bp, Homo sapiens
cgacgtggagaacctcgccaaattccacgtggacaggaaccagctgtccagctacccctcagctgccctgagcaagctacgggtggtggaggagctgaagytgtcccacaaccccctgaaaagcatcccggacaatgccttccagtcctttggcagatacctggagaccctctggctggacaacaccaacctggagaaggt

SEQ ID NO: 534335 - DNA, 201 bp, Homo sapiens
caccttgctcccaccttgctcccaccttgctccccagttctcagatggtgccttcctgggtgtaaccacgctgaaacacgtccatttggagaacaaccgcytgaaccagctaccctccaacttccccttcgacagcctggagaccctcgcccttaccaataacccctggaagtgtacctgccagctccggggccttcggcg

SEQ ID NO: 534336 - DNA, 201 bp, Homo sapiens
tgggcaacacagtgagactccatctcaaaaaaaaaaaaaggaaaaaaaaaaaaaaaagaaaataacaccatctgtctcaaagggggttgtgtagattggaktatctgagatcacttggtcatactgctttgaaaactgggaaactcctcaaagtgctatggctcaggttcagggaaggatcctgcccctctggcactcggg

SEQ ID NO: 534337 - DNA, 201 bp, Homo sapiens
tggccccatagttcactgcccttccccccagcactcccaccttcttccccagccccagcaagtttctgtctctccaggtggctggaagccaaggcctccckcccagatgccacctgtgcctcacctgccaagttcaagggccagcacatccgtgacacggacgccttccgcagctgcaagttccccaccaagaggtccaag

SEQ ID NO: 534338 - DNA, 201 bp, Homo sapiens
ctggccgccattaaacaggtgggggccaggtaaacaggtcccctatgtccctctttggtgattccagcaagtgagctggtatcttccaggataccccctgsccctggagggtcaggcagaccctccatttttacagagagaggaggggacgactgggtcccctgttgaagggaggaaaaggtcctgcccaggacttccacc

SEQ ID NO: 534339 - DNA, 201 bp, Homo sapiens
ccagtggcctcgatgctccacgtaggagctggctcggctgccggctgcggtcagggccaccgtataaagagggcggcagacccgagcgcctaggactcgcsgctgcccgcgccccgccgccgctgctgcccccagccccggccccaggcgtcccagccatggtccgcccaatgctcttgctcagcctcggcctcctggctg

SEQ ID NO: 534340 - DNA, 201 bp, Homo sapiens
tggaaacaatcatcagatccttgccccaccccttgcttccagaaagggttttaaagcccatgccccaactctgccagcccccacctgccaggacgttctakcaggacatcggtgctttgctgtccatcttcccatgctgcaatttcttcctgagatttctataaatataaatgtatgtatgtattatatttactcccctgc

SEQ ID NO: 534341 - DNA, 201 bp, Homo sapiens
ctatgtccctctttggtgattccagcaagtgagctggtatcttccaggataccccctgcccctggagggtcaggcagaccctccatttttacagagagagsaggggacgactgggtcccctgttgaagggaggaaaaggtcctgcccaggacttccaccattttcttcaagcatcatctgtgttgttggagtactgacatc

SEQ ID NO: 534342 - DNA, 201 bp, Homo sapiens
gtgagctgcgcgcaggcgccttccagggagccaaggacctgcgctggctctacctgtcggaaaacgcgttgagctccctgcagcccggggccctggacgaygtggagaacctcgccaaattccacgtggacaggaaccagctgtccagctacccctcagctgccctgagcaagctacgggtggtggaggagctgaagctgt

SEQ ID NO: 534343 - DNA, 201 bp, Homo sapiens
acaatcatcagatccttgccccaccccttgcttccagaaagggttttaaagcccatgccccaactctgccagcccccacctgccaggacgttctagcaggwcatcggtgctttgctgtccatcttcccatgctgcaatttcttcctgagatttctataaatataaatgtatgtatgtattatatttactcccctgccacct

SEQ ID NO: 534344 - DNA, 201 bp, Homo sapiens
ccccaggagccagggccacagctggcaccatcccccgtccccaggttccctgtccctctggctatctccaaggtgagcagctctgccacctcccttcctcrccttgtcacatccctaccctaatccctgtctgctgccagtctcgaccactgccctcctaggattcttacatataaaaggagtgggactgccctggcccca

SEQ ID NO: 534345 - DNA, 201 bp, Homo sapiens
tgagcagcagccacctcttcctgttgggccttccacccctcctctgctgtttttcccgtctccagtaaacctaccaccccataaaggaaggtttgtttatygaggagccttccagaggagctgggcagatcaggcccacaaagagaccctgttcctggtgggggctgtgcatgtgtgctaagggggagtgggggactgggg

SEQ ID NO: 534346 - DNA, 201 bp, Homo sapiens
ccagcactttgggaggctgaggcgggtagatcacgaggtcaggagatcgagaccatcctggctaacatggtgaaactgcgtctctactaaaaaaatacaaraaaattagccgggcatggtggcgggcacttgtagtcccagctactcaggaggctgaggccggagaatggcgtgaacccgggaggcggagcttgcagtgag

SEQ ID NO: 534347 - DNA, 201 bp, Homo sapiens
gcgtgaacccgggaggcggagcttgcagtgagctgagatcgtgccactgtgctccagcctgggcaacacagtgagactccatctcaaaaaaaaaaaaaggaaaaaaaaaaaaaaaagaaaataacaccatctgtctcaaagggggttgtgtagattggattatctgagatcacttggtcatactgctttgaaaactgggaa

SEQ ID NO: 534348 - DNA, 201 bp, Homo sapiens
cttgctcccaccttgctccccagttctcagatggtgccttcctgggtgtaaccacgctgaaacacgtccatttggagaacaaccgcttgaaccagctaccytccaacttccccttcgacagcctggagaccctcgcccttaccaataacccctggaagtgtacctgccagctccggggccttcggcggtaagaacacttcc

SEQ ID NO: 534349 - DNA, 201 bp, Homo sapiens
ccgcttgaaccagctaccctccaacttccccttcgacagcctggagaccctcgcccttaccaataacccctggaagtgtacctgccagctccggggccttyggcggtaagaacacttccatgtcactcccagagcccaccctcatgtgatagaggcacattagccctgcactaagacatgttggacatgcatcctagatct

SEQ ID NO: 534350 - DNA, 201 bp, Homo sapiens
agcatgggaccctgggagcctcagtttccccatttgtaaaatgaagatgacagcttcagactatcctgtggccaagtcaatcctggccccatagttcactrcccttccccccagcactcccaccttcttccccagccccagcaagtttctgtctctccaggtggctggaagccaaggcctcccgcccagatgccacctgtg

SEQ ID NO: 534351 - DNA, 201 bp, Homo sapiens
gccaaggcctcccgcccagatgccacctgtgcctcacctgccaagttcaagggccagcacatccgtgacacggacgccttccgcagctgcaagttccccaycaagaggtccaagaaagctggccgccattaaacaggtgggggccaggtaaacaggtcccctatgtccctctttggtgattccagcaagtgagctggtatc

SEQ ID NO: 534352 - DNA, 201 bp, Homo sapiens
agcagtgtcctggggagaaggaaggctgagcctctccccagccttcatgccttccccaccctccagctcctcttggagaagctgttgctgagacccccccmccaagtcaatcagaaccacaacaggttggtcatcaggatggccaccctcccaggatcatccttcctctgttcctctttccctgccacgtggaaacaatca

SEQ ID NO: 534353 - DNA, 201 bp, Homo sapiens
cgcttgaaccagctaccctccaacttccccttcgacagcctggagaccctcgcccttaccaataacccctggaagtgtacctgccagctccggggccttcrgcggtaagaacacttccatgtcactcccagagcccaccctcatgtgatagaggcacattagccctgcactaagacatgttggacatgcatcctagatctg

SEQ ID NO: 534354 - DNA, 201 bp, Homo sapiens
ccaccctcatgtgatagaggcacattagccctgcactaagacatgttggacatgcatcctagatctgctacctaataagcatgggaccctgggagcctcartttccccatttgtaaaatgaagatgacagcttcagactatcctgtggccaagtcaatcctggccccatagttcactgcccttccccccagcactcccacc

SEQ ID NO: 534355 - DNA, 201 bp, Homo sapiens
cccagccccggccccaggcgtcccagccatggtccgcccaatgctcttgctcagcctcggcctcctggctggtctgctgccggcgctggccgcctgccccmagaactgccactgccacagcgacctgcagcacgtcatctgcgacaaggtggggctgcagaagatccccaaggtgtcagagaagaccaagctgctcaacct

SEQ ID NO: 534356 - DNA, 201 bp, Homo sapiens
ctacctaataagcatgggaccctgggagcctcagtttccccatttgtaaaatgaagatgacagcttcagactatcctgtggccaagtcaatcctggccccrtagttcactgcccttccccccagcactcccaccttcttccccagccccagcaagtttctgtctctccaggtggctggaagccaaggcctcccgcccagat

SEQ ID NO: 534357 - DNA, 201 bp, Homo sapiens
atgacactgagctccggctgttgggacggacgcactcggcctgcgatgctctgcggacgctggcagaggcccggcgcctctttcccgggcgcgtgtctgtrgacttgatgctggggctgccggcacagcaggtggggccgtggcttgggcagctgcaggaactgctgcaccactgtgatgaccacctctccctctaccagc

SEQ ID NO: 534358 - DNA, 201 bp, Homo sapiens
gagagtgaaggtgggtggagttgaccagagaaaggggagagaattcgggaaagacccaaagtgtttgtaattcttctttgtccttttacctacagaaatgrtcacatggttctatttaaatagcctaataaacacatctggagcctgtcttgactgtggtcctctcctttgagctccttcctagagcgtggaatcctgatt

SEQ ID NO: 534359 - DNA, 201 bp, Homo sapiens
atcagagcaagccttgcctcttatcttcgggaaaccagaatatgtttggggtggtaggagccacacagactcttctgagccccctcactcacttccttccycctgtgcctttcctttgagagtgaaggtgggtggagttgaccagagaaaggggagagaattcgggaaagacccaaagtgtttgtaattcttctttgtcct

SEQ ID NO: 534360 - DNA, 201 bp, Homo sapiens
tgaaattggtaagatgaagtagtcaccttcaggcctcttggttttccaggggtcttcggtgttcctgggagggtctggctgtgctggactctctcttgctraccctcctgcctcagctccaagaagcctggcagcagagaaccccctcccctgtgccaggaggatgacaaaaatgttcctgtgttccagggtaatgccagg

SEQ ID NO: 534361 - DNA, 201 bp, Homo sapiens
ggagaagtgagaaagactgactggtaaggcgggacctgcgggtgctgggagctcggccctgctgggtgatgggcttgaaattggtaagatgaagtagtcaycttcaggcctcttggttttccaggggtcttcggtgttcctgggagggtctggctgtgctggactctctcttgctgaccctcctgcctcagctccaagaag

SEQ ID NO: 534362 - DNA, 201 bp, Homo sapiens; identical to SEQ ID NO: 344415

SEQ ID NO: 534363 - DNA, 201 bp, Homo sapiens
tccccctcctgccttccagctgcctgccacgtgctgcgttctccctgtatctgtgtctacaatggggaggagggttcttgtctctctctgagctgctggtrtgcttacacccaccctcttttcccagtccctagatgacactgagctccggctgttgggacggacgcactcggcctgcgatgctctgcggacgctggcaga

SEQ ID NO: 534364 - DNA, 201 bp, Homo sapiens
tgctttcatgcatgtcagctgctgagatctccatgctgaactggaccctcccccacctctcaccataccccaactatgtggcccagagtagccaggccagmtccccacctctgaccctctggcttccccagcactggcagcagtttgagccccagctgaccctgtgggatgtgtttggagcgaacaaggaggtgcaggagc

SEQ ID NO: 534365 - DNA, 201 bp, Homo sapiens
gggttcttgtctctctctgagctgctggtatgcttacacccaccctcttttcccagtccctagatgacactgagctccggctgttgggacggacgcactcrgcctgcgatgctctgcggacgctggcagaggcccggcgcctctttcccgggcgcgtgtctgtagacttgatgctggggctgccggcacagcaggtggggc

SEQ ID NO: 534366 - DNA, 201 bp, Homo sapiens
gatgaaggaggtgatgctgtttggccatggcacccggaagcgtgtccccctgggcaggctggagctgtgagcatccaagggcacagggctctcctccaggrtccccacaccccaagaccatgtctatttgtatatcttttatttcctgtcttgtcctggcccctgccttgccacatactgtatggtccctgttagcctcct

SEQ ID NO: 534367 - DNA, 201 bp, Homo sapiens
ctgctggactctgagaactgggaaagatcagagcaagccttgcctcttatcttcgggaaaccagaatatgtttggggtggtaggagccacacagactcttytgagccccctcactcacttccttccccctgtgcctttcctttgagagtgaaggtgggtggagttgaccagagaaaggggagagaattcgggaaagaccca

SEQ ID NO: 534368 - DNA, 201 bp, Homo sapiens
tttggggtggtaggagccacacagactcttctgagccccctcactcacttccttccccctgtgcctttcctttgagagtgaaggtgggtggagttgaccaragaaaggggagagaattcgggaaagacccaaagtgtttgtaattcttctttgtccttttacctacagaaatggtcacatggttctatttaaatagcctaa

SEQ ID NO: 534369 - DNA, 201 bp, Homo sapiens
gtgctttggcagggaaatgacttggtccagaaacctgaagtctctgctactcaccggctcggtgactctgaccaaatggttcaaatttcataacaattttyctcttagcaagacaaaattttcttaagagcagtgttctgactcggtagctgggaaaatggctcataggaaaattgtatgaaaattatatgatcccagaaa

SEQ ID NO: 534370 - DNA, 201 bp, Homo sapiens
cacttccttccccctgtgcctttcctttgagagtgaaggtgggtggagttgaccagagaaaggggagagaattcgggaaagacccaaagtgtttgtaattyttctttgtccttttacctacagaaatggtcacatggttctatttaaatagcctaataaacacatctggagcctgtcttgactgtggtcctctcctttgag

SEQ ID NO: 534371 - DNA, 201 bp, Homo sapiens
actgcagtgtgaccagggcgttgtgaccttctgaagagaaggatcctggccgagatggtgggacattctaacctggggccccttacctgagtctaaaaatraggcctgccctcttcactctgcactatttcctccctccccgcagggggcgctcagtacccacaattggacttactggcagtgtggtcagtaccttggcgt

SEQ ID NO: 534372 - DNA, 201 bp, Homo sapiens; identical to SEQ ID NO: 344353

SEQ ID NO: 534373 - DNA, 201 bp, Homo sapiens; identical to SEQ ID NO: 344354

SEQ ID NO: 534374 - DNA, 201 bp, Homo sapiens
agaagcctggcagcagagaaccccctcccctgtgccaggaggatgacaaaaatgttcctgtgttccagggtaatgccaggtgggttttgagagctgggtcrgtactgcagacatctcttctccgttgtcgggtgccgtctctgctccttgtggttattgctcagccctggcatccccaggggaatggcagcagtgaggtag

SEQ ID NO: 534375 - DNA, 201 bp, Homo sapiens
aaacattgattgagcaccttctgggtgccagggacacagtagggcctagtgcgacacttttataactccttaattgtctgctgctgtcatagaccacagaytttatgagaaagggatcaggtgtggcttttctatttcaaacacttaccatagtgcctggcacatagtaggtggtcaaaaaagatttgctacatgacacgg

SEQ ID NO: 534376 - DNA, 201 bp, Homo sapiens
cagggagccctgactacagctctccacagacccaggagaagtgagaaagactgactggtaaggcgggacctgcgggtgctgggagctcggccctgctgggkgatgggcttgaaattggtaagatgaagtagtcaccttcaggcctcttggttttccaggggtcttcggtgttcctgggagggtctggctgtgctggactct

SEQ ID NO: 534377 - DNA, 201 bp, Homo sapiens
acacagactcttctgagccccctcactcacttccttccccctgtgcctttcctttgagagtgaaggtgggtggagttgaccagagaaaggggagagaattygggaaagacccaaagtgtttgtaattcttctttgtccttttacctacagaaatggtcacatggttctatttaaatagcctaataaacacatctggagcct

SEQ ID NO: 534378 - DNA, 201 bp, Homo sapiens
tgttggggggtgccgggcagagggggctgaggcataccagggagccctgactacagctctccacagacccaggagaagtgagaaagactgactggtaaggmgggacctgcgggtgctgggagctcggccctgctgggtgatgggcttgaaattggtaagatgaagtagtcaccttcaggcctcttggttttccaggggtct

SEQ ID NO: 534379 - DNA, 201 bp, Homo sapiens
ctggatcacaggtgtgttggggggtgccgggcagagggggctgaggcataccagggagccctgactacagctctccacagacccaggagaagtgagaaagrctgactggtaaggcgggacctgcgggtgctgggagctcggccctgctgggtgatgggcttgaaattggtaagatgaagtagtcaccttcaggcctcttgg

SEQ ID NO: 534380 - DNA, 201 bp, Homo sapiens
tgatgctgtttggccatggcacccggaagcgtgtccccctgggcaggctggagctgtgagcatccaagggcacagggctctcctccaggatccccacaccycaagaccatgtctatttgtatatcttttatttcctgtcttgtcctggcccctgccttgccacatactgtatggtccctgttagcctcctctaaatgcatc

SEQ ID NO: 534381 - DNA, 201 bp, Homo sapiens; identical to SEQ ID NO: 344431

SEQ ID NO: 534382 - DNA, 201 bp, Homo sapiens
gtttaattcacttaaatttaaataaccacatgtggctactacctatcatattggacagtacagatatgaacatttccaccattgtagaaagttcttttggrcagtgctggtttataatttactgttaaatgattcagcataataacaggtatgtatgtttaaagagaaacaaatatggacaaatggtgaatcaagatgaag

SEQ ID NO: 534383 - DNA, 201 bp, Homo sapiens
acaggtgtgttggggggtgccgggcagagggggctgaggcataccagggagccctgactacagctctccacagacccaggagaagtgagaaagactgactrgtaaggcgggacctgcgggtgctgggagctcggccctgctgggtgatgggcttgaaattggtaagatgaagtagtcaccttcaggcctcttggttttcca

SEQ ID NO: 534384 - DNA, 201 bp, Homo sapiens
gtattggaatgacagcaagggccaagtagctggtagtctgcttcactcttttgggggctatatattgttcttagctttccttttgtctgattactttcttygtaagatcatcatctttccatttatgtgtcttttttagatgaacagtctagactgagactgacctgtcttgggttcagttccatagtcttagcccagctt

SEQ ID NO: 534385 - DNA, 201 bp, Homo sapiens
cccagctgaccaaaatgtggtgttttacttagcactctttaggttgcaagtaacagaaacctatatttgatagaggagtgaaaattattttaaggacacasggctgtctttaaaacccaagggcaaggggtataacctggagtcataaaggaatggtagatggtagcaggtattggaatgacagcaagggccaagtagctg

SEQ ID NO: 534386 - DNA, 201 bp, Homo sapiens; identical to SEQ ID NO: 345024

SEQ ID NO: 534387 - DNA, 201 bp, Homo sapiens
tatagaaaaacaaagaaggtaagaagaacaccattgtgtttgaaggcatttcccagctgaccaaaatgtggtgttttacttagcactctttaggttgcaartaacagaaacctatatttgatagaggagtgaaaattattttaaggacacacggctgtctttaaaacccaagggcaaggggtataacctggagtcataaag

SEQ ID NO: 534388 - DNA, 201 bp, Homo sapiens
gaaatactgccaggattttaccacctctcgcccatttatttacttctcggtcaccgctttcgggggacagataaacaccacagatgcccatcaaaggggckcacgggtctggaggcgcagctcaggtttttgcgttggtcaccctgccctccgcacgtggagagggcaggcataaagcaccttgaaaggaaggtgctgtca

SEQ ID NO: 534389 - DNA, 201 bp, Homo sapiens
gatgctattgtaaattgattttttttaaatttcatttcttcattatttgctggttgaatacaaaaatacaattgattttcctatgtagaccttgaatcttmcatctttaccaaatccttttagttctagtagttgttttgtaattcccttggattttctgcacaattgtgttgtctcctaatagagacatattaactttac

SEQ ID NO: 534390 - DNA, 201 bp, Homo sapiens
ccccaaaaacaattgaagtaaaacttaaaaaagatattgcaataaaaaggttttcctcagtgtgttatactttttgatgctattgtaaattgatttttttwaaatttcatttcttcattatttgctggttgaatacaaaaatacaattgattttcctatgtagaccttgaatcttacatctttaccaaatccttttagttc

SEQ ID NO: 534391 - DNA, 201 bp, Homo sapiens
ctgggattacaggtgtgagccaccacacccttcctgaaaagtaatttttacatttattataaaacagttgcaaaggattttatagactatgtcacagtgcytcatccaacgtcccacatgaacaatatattacagaatctagtgtcaagaagattgtcacaactgagtaaattaaaaagcatcttcttttcttaaagtgaa

SEQ ID NO: 534392 - DNA, 201 bp, Homo sapiens
cacagagtgagaacctgtctctaaaaaaataaataaaataaaataatgaaaaatattactaatattatttgcaaatcagacaagcatattaacattgagayaggctgtatttgcgtatgactggaattgaaaaatgaaaggcaatgaatgtttcttttgtagccttccacctattacccaagaagaagctttacatattct

SEQ ID NO: 534393 - DNA, 201 bp, Homo sapiens
aactcctgacctcaaatgatccacccgcctcagcctcccaaagtgctgggattacaggcatgagccaccacaccaggcctaaaaactgaaggtttgaatasagaaaaagcatgctttaaaagtaaagaaaatggaattttgcctagcatatgtggagtcctaatatgcagctctgtttccttaaattccatgaaagccatg

SEQ ID NO: 534394 - DNA, 201 bp, Homo sapiens
tgcaggatgtcatctaacatgttggtatttatttattctgtaggaagagtaaccaattgtacactgaaaaccttggcaacggttggataaacagaattgtyataaaactagaagttattacagtttagtagatgaaacaatgttgagataagagaattactgccaattattgctgtgataatattgcagcaacttgctcat

SEQ ID NO: 534395 - DNA, 201 bp, Homo sapiens
tgtgtgtttgtttgtttttaatagcttcaggggccctgtcaaagttaacccgtggattgaaagatgaatcgctggcttatatctatcattgccaaaatcaytatttttgtccaattggcttcgaagcaacccctgttaaagctaataaagcattcaggtaagcattgacatgttttagaaagtgcattttaagaaatatta

SEQ ID NO: 534396 - DNA, 201 bp, Homo sapiens
gtatccagctgctgggcttcaacctctcataggtataccaactttgggctatgcctgaatttctttagaattggaataatgccatctttgttgtagaattrttgccatgaacaaatcttcttgttactttcaggtggtttagacaaattaatgaccacttccatgtaaaaggatgctcttatgttctatataagcctcatg

SEQ ID NO: 534397 - DNA, 201 bp, Homo sapiens
atagatttgacagtaaggtgttgaagacagcacttagtatgttaagtgatagttattagcttttgtgtgtcattttgtgtagtctacagatttagggctcrtggcacacgttctcactgataagtgagagccgaacaatgtgaacacatggacgtagggagggaacaacacacactgggccctgtcgcggggtgggaaccg

SEQ ID NO: 534398 - DNA, 201 bp, Homo sapiens
atttattctgtaggaagagtaaccaattgtacactgaaaaccttggcaacggttggataaacagaattgtcataaaactagaagttattacagtttagtaratgaaacaatgttgagataagagaattactgccaattattgctgtgataatattgcagcaacttgctcatgaaaaattccattgcaatgatactttagac

SEQ ID NO: 534399 - DNA, 201 bp, Homo sapiens
ataaaaacaactagccaggcacaatggcatgtacttgtatttctagtctcttaggagactgaggcaagaggatcacttgagcccaggagtttaaggctgcwgtgagctatgatcacgccactgcactccagcctgggccacagagtgagaacctgtctctaaaaaaataaataaaataaaataatgaaaaatattactaat

SEQ ID NO: 534400 - DNA, 201 bp, Homo sapiens
gtgaaaccccgtctctactaaaaatacaaaaaaaaaaaaaaaaaaattagccgggcgtggtggcaggcgcctgtagtcccagctactcgggaggctgaggsaggagaatggcgtgaacccgggaggcagaacttgcaaaaaaaaaaattaaaaaaattaaaaaatattcaaagtctgtgatattgggaggcttggccatct

SEQ ID NO: 534401 - DNA, 201 bp, Homo sapiens
cctggctaacatggtgaaaccccgtctctactaaacatacaaaaaattagccgggtgtagtggtgggcacctgtagtcctagctactcgagaggctgaggyaggagaatggcgtgaacccgggaggtggagcttgcagtgagcggagatcgcgccactgcactccagcctgggcaacagggcaagactctgtctcaaaaaa

SEQ ID NO: 534402 - DNA, 201 bp, Homo sapiens
gtttgaatagagaaaaagcatgctttaaaagtaaagaaaatggaattttgcctagcatatgtggagtcctaatatgcagctctgtttccttaaattccatsaaagccatgcagtacctttgctagtttctcctcacagatcaggataacctagggggctcttgtgtgaatcgtcttctatttcttgcagcctaactcatag

SEQ ID NO: 534403 - DNA, 201 bp, Homo sapiens
tctcaaagactgcctgtttagcttcctgggacattatgtaaaccctcagcacagtctgttacttgcatgtaatctgtagggcactttttaataagcagttyaatattttacctcttctaacctttttatgtagaacctttagaactttaaggtatatcacaaacactactctaacacattgtattgtttgggtccgtggtg

SEQ ID NO: 534404 - DNA, 201 bp, Homo sapiens
ctcttagagacagggtctcactctgtcatccaggctggagtgcaatggtgtaattataggtcactgctgcctcaaactcctggcctcaagcaatccttctrcctcagcctcctgagtggctagaactacaggcatgcaccaccatgcccagctcataaaattttttaatttgtgttttctatagagacggggtcttgctat

SEQ ID NO: 534405 - DNA, 201 bp, Homo sapiens
aataaatggatgaatttttgtttgggttgaagaatctctctgagaagttgacacgtgggggcaatggtttgtttctcttgtatttctgaagttgcaaatartcatgtaagcagttcaaccaggagtttacaccaaacttttaataggcgatatatcattattttttttcccattggtttggataacatccactttaactgg

SEQ ID NO: 534406 - DNA, 201 bp, Homo sapiens
gtacatatacaaatgcatatatgtacacatgcatatgtctaatttttcattttgtaattaatttttagaccacactaaagtcgctcttagtgatgataggkcttgtttctttgtttcattgtggctacttcttagcaccttctttagaaagcagttaggagaagatcatttgaaggccaacgagtgttgtgggttattgtt

SEQ ID NO: 534407 - DNA, 201 bp, Homo sapiens
gccaatatgcatagtatatgtacatatacaaatgcatatatgtacacatgcatatgtctaatttttcattttgtaattaatttttagaccacactaaagtygctcttagtgatgataggtcttgtttctttgtttcattgtggctacttcttagcaccttctttagaaagcagttaggagaagatcatttgaaggccaacg

SEQ ID NO: 534408 - DNA, 201 bp, Homo sapiens
aggagagtatcaggaaaaatagctaatgcacacagagtgtaatacctaggtaatgggttgatagatgcagcaaaccaccatgacacacatttatctatgtwataaagctgcacatcctgcatgtataccctggaacttaaaaaaaaatattgaagggtcatggttaacttgtatgtgtgccaatatgcatagtatatgtac

SEQ ID NO: 534409 - DNA, 201 bp, Homo sapiens
tgacccctgtgcggccgtcggtctccacgccacgctgggcagggtccgggaaccagcgcgcagcggccgtcgccttcccctgcacgccagcacccgggtcygggccgccgccaggagtcacgggctcaccgccctggtcagcttggcagtcggacccggagccgcctcctctgcctgcctccctcttgccagctgccccga

SEQ ID NO: 534410 - DNA, 201 bp, Homo sapiens
aagttaacccgtggattgaaagatgaatcgctggcttatatctatcattgccaaaatcattatttttgtccaattggcttcgaagcaacccctgttaaagytaataaagcattcaggtaagcattgacatgttttagaaagtgcattttaagaaatattaaaaaatagatgggtgcggtagctcacgcctgtaatcctagc

SEQ ID NO: 534411 - DNA, 201 bp, Homo sapiens
tggacttgtaaaataatccccaaaattgaactctggcaaaaatattcacagcagaaaaaaaaaatcagtaaatgaatgagttgcttgtgttttatcagcawgggccatatagcttatgatgacagaactgttaataatcacttgtccacaaaggtctcttaggttggagttcacactcatatttaaacaactagggcagat

SEQ ID NO: 534412 - DNA, 201 bp, Homo sapiens
cgctggcttatatctatcattgccaaaatcattatttttgtccaattggcttcgaagcaacccctgttaaagctaataaagcattcaggtaagcattgacrtgttttagaaagtgcattttaagaaatattaaaaaatagatgggtgcggtagctcacgcctgtaatcctagcactttgggaggccgaggtgggcggatca

SEQ ID NO: 534413 - DNA, 201 bp, Homo sapiens
ctagtaaagcttaatttctttttaaaatatgagggtcactataaataaatgttctaatattttgtttctgtgcccacaaagggggtcatcttgtataaccmcctggatgtgtcggtactgaaaatcattaacctagaggagcagtagttggcaaatgtttttacataaaaggcttgatagtaaatattcttggctttgaga

SEQ ID NO: 534414 - DNA, 201 bp, Homo sapiens
ggtcttcagctatttcagtggccagaaagtcgatcactgaaactatgacttgcaagctttcatctgcttcatctatttttaggatttctagttttaatggrctgtttatgaataaataatttagcttcttctaggacatgccagttaatgaaacctcagttaatggctttgagtactaagtgctggtgaaaagtcatttct

SEQ ID NO: 534415 - DNA, 201 bp, Homo sapiens
ggcttcgaagcaacccctgttaaagctaataaagcattcaggtaagcattgacatgttttagaaagtgcattttaagaaatattaaaaaatagatgggtgyggtagctcacgcctgtaatcctagcactttgggaggccgaggtgggcggatcacgaggtcagaagatcgagaccatcctggctaacacggtgaaaccccg

SEQ ID NO: 534416 - DNA, 201 bp, Homo sapiens
tgttaaagctaataaagcattcaggtaagcattgacatgttttagaaagtgcattttaagaaatattaaaaaatagatgggtgcggtagctcacgcctgtratcctagcactttgggaggccgaggtgggcggatcacgaggtcagaagatcgagaccatcctggctaacacggtgaaaccccgtctctactaaaaataca

SEQ ID NO: 534417 - DNA, 201 bp, Homo sapiens
ttatacgaaaaggctttactgaagaggtttttagagatgtttggttctctcataaacttgatacttgagaatacagacaaaatataacctgaaaagactayaacctaggcgatgaagattggctttacaaatggacgtttattttacagaacacttcgttcagtgactttgaacaatcatgactctggcggtgctttttaa

SEQ ID NO: 534418 - DNA, 201 bp, Homo sapiens
gctttagcatgcaggatgtcatctaacatgttggtatttatttattctgtaggaagagtaaccaattgtacactgaaaaccttggcaacggttggataaayagaattgtcataaaactagaagttattacagtttagtagatgaaacaatgttgagataagagaattactgccaattattgctgtgataatattgcagcaa

SEQ ID NO: 534419 - DNA, 201 bp, Homo sapiens
atgaggtgctctgatgatgcctggaaggaaagtaccattctgaggccggtgaagtaaaaaaagaaagaagggagttcatagggacctacaaattagtacarttaatttccctttattttcttcagccaacatttttttcttctcaggttgggggaaatttgcattgcatcatagcattccagagacttaactggcaaagat

SEQ ID NO: 534420 - DNA, 201 bp, Homo sapiens
ttccatttggaaccattagacaagaatcacaacctccaacacatgcccagggaattgccaaatctgagagtgaagacaatatttccaagaagcagcatggrcgtctgggccggtctttcagtgctagtttccatcaggactcggcatggaaaaagatgtctagtatccatgagagaaggaacagtggttaccagggttaca

SEQ ID NO: 534421 - DNA, 201 bp, Homo sapiens
ttggaaaattgtctggattgcttagtgccactgaatcatgccatggaaggattttgtatttcacttttaaacttctctgtgacaggagaagcactgcttcrtggcttcttgcccaaggattttagatggacacagtgggtaataaatggatgaatttttgtttgggttgaagaatctctctgagaagttgacacgtggggg

SEQ ID NO: 534422 - DNA, 201 bp, Homo sapiens
cctgccaggtgcagtggctcattcctataatcccagcactttggggggccgaggccagcagatcacctgaggtcaggagttccagaccagcctggccaacrtggtgaaaccccatctctactaaaaatacaaaaattagccaggcatggtggcacctgcctgtaattccagctactccagaggctgaggcaggagaatctc

SEQ ID NO: 534423 - DNA, 201 bp, Homo sapiens
tttaagtggctgggaaaactacttagggaattaagtcattattaggcagtgaagacatctcaagaaatgttagaaactaattcttctgttatctgactctstaagagtcattttaccagtcaaggaaatttggcacaatgagatttggcacagttgctcacctttgccagtgatgttcagctctttgaaaagtgtgttctc

SEQ ID NO: 534424 - DNA, 201 bp, Homo sapiens
caggcatggtggcacctgcctgtaattccagctactccagaggctgaggcaggagaatctcttgaatccaggagacagaggttgcagtgagctgagatccrgccattgcactccagcctgggcaacagagtgagattccatttaaaaaaatcaaatcaaatccctacactgtcacacagagagctggtcccacaggcaaaa

SEQ ID NO: 534425 - DNA, 201 bp, Homo sapiens
ccagggtggactgaatctctcaactgatgctctgttgctggagccctgagaaacccgcataccctgcccgggcacctgcctggggttgtctgctgcgtgtyctgggatggttcaattcaccaaggacttcctctggtataaatcttcagcttccttgcatgccctcagttgctatttaagctttctgttttcttccctaaa

SEQ ID NO: 534426 - DNA, 201 bp, Homo sapiens
tactgtctggctaatttttaaattttcagtcgagatggggtttcaccatattggccaggctagtcttgaactcctgacctcaaatgatccacccgcctcascctcccaaagtgctgggattacaggcatgagccaccacaccaggcctaaaaactgaaggtttgaatagagaaaaagcatgctttaaaagtaaagaaaatg

SEQ ID NO: 534427 - DNA, 201 bp, Homo sapiens
cctcttgaagatattaaacagcggaaagtattagacctcagacgatggtgatgttatcagtttttatttttttcatttttgaaatatgtaatatatgttgrcaataacgtagcagtttacaaattaatacattatatgtatcataaatatttttatttctaaaattattaccaggatttctgaatatttaaagtcaccaca

SEQ ID NO: 534428 - DNA, 201 bp, Homo sapiens
tctgttatctgactctctaagagtcattttaccagtcaaggaaatttggcacaatgagatttggcacagttgctcacctttgccagtgatgttcagctctktgaaaagtgtgttctctgtaaaaacttagaaaaaataattaaaagggtcacgcatgatggctcacacttgtaatcccagcattttgtgaggctgaggcag

SEQ ID NO: 534429 - DNA, 201 bp, Homo sapiens
gtttttatcacaattaaagaacaaagcaaaactgagggaggactcaatagatttgacagtaaggtgttgaagacagcacttagtatgttaagtgatagttrttagcttttgtgtgtcattttgtgtagtctacagatttagggctcgtggcacacgttctcactgataagtgagagccgaacaatgtgaacacatggacgt

SEQ ID NO: 534430 - DNA, 201 bp, Homo sapiens
gagtccaggagtttgaggctgcagtgagccatgattgtgccactgcactccagcctgggtgacagagtgagaccctgtctcaaaaaaaaaaaaaaaaaaaatctgatttctcaaaccatataataatgagagcggccaggtgaggtggctcatacctgtaatcccagcactttgggaggccaaggtgtgaggattgcttaa

SEQ ID NO: 534431 - DNA, 201 bp, Homo sapiens
gagccaagaaggcagaggttgcagtgagccgagatggcaccactgcactccagcctgggcagcagagtgagatcctgtttctaaaaaaaaaaaaaaaagcyaacgtcctgagaagtggcatggctcaccagggtggcagggttgaagagggtcagagtcccccccacaggtgtgcccaggttggaaccttcatgtgccagg

SEQ ID NO: 534432 - DNA, 201 bp, Homo sapiens; identical to SEQ ID NO: 345085

SEQ ID NO: 534433 - DNA, 201 bp, Homo sapiens
gacctcttttgggggcctctcctggggctctgctgctctgagtcagaggcccccttggctgggtccgcagagctggtgggcccctactttgatcacgtggrcctacctgtctccacccagtgcttctgggcctggggcagggaacatgccgaggcctctgagctgcctccctctgtccccagagccatatagccctgcagt

SEQ ID NO: 534434 - DNA, 201 bp, Homo sapiens
aagtgtgagttatcagccactcaggctccgagccagctggattctctgcctgccactgtcagggttaagcggcaggcaggattgggcttttctggcttctrccatgaaatcctggccatgggaccccagtgacagatgatgtcttccatggtcatcagtgacctcagtagcctcaaatcatggtgagggctgggcttttgc

SEQ ID NO: 534435 - DNA, 201 bp, Homo sapiens
gctgtcctcttctcacgcagagttctgccaggagggtgtgctgtgggggtcagactcctgaggctctcccttccctggggctagccagttactggtcatgsctgctgtgggcatggaggctggaacttgtggttgaggcagggccatcccgatccttgctctacctggctagagtttcttctcatcagagcactgggacat

SEQ ID NO: 534436 - DNA, 201 bp, Homo sapiens; identical to SEQ ID NO: 345088

SEQ ID NO: 534437 - DNA, 201 bp, Homo sapiens
acctgacggtggccacgctggaagagcggccctttgtcatcgtggagagccctgaccctggcacaggaggctgtgtccccaacaccgtgccctgccgcagrcagagcaaccacaccttcaggtctgtggagggccctgggaggctagtgtgagctgggtgctgccgtgtgatggtcaggtgtcgtgtatgtcccatgcttg

SEQ ID NO: 534438 - DNA, 201 bp, Homo sapiens
gagcctgaggcatcaaggcaggtgcctgtgggagagggatttcagctgggccctgaaggagagtagacttctgttgggatgaggacattccagcctggggratgctggaacgaggcctggagatgagggcagaatggggctgtttggccagcagactggcagagctgtgggttccagggatgggaggacggttggttgcgg

SEQ ID NO: 534439 - DNA, 201 bp, Homo sapiens
aaggcatcagtagactggagggctgggtcccggtcatggctcctgttcttccccagcccttgctcttctgggatgcccttgggatgctcaactaacctctrtctctttctctttgtccgtgtctgtctgtctccctctctctctgcctctcttcggggagggaggttttcccctcttctctttcatcttccgtatgtgtgt

SEQ ID NO: 534440 - DNA, 201 bp, Homo sapiens; identical to SEQ ID NO: 345097

SEQ ID NO: 534441 - DNA, 201 bp, Homo sapiens
tgttcttccccagcccttgctcttctgggatgcccttgggatgctcaactaacctctatctctttctctttgtccgtgtctgtctgtctccctctctctcygcctctcttcggggagggaggttttcccctcttctctttcatcttccgtatgtgtgtccctctgtccctcctgtctgtccatctgcctctctccaaacct

SEQ ID NO: 534442 - DNA, 201 bp, Homo sapiens
acatgggtggggccctggggccggccctgttgctcacctcgctcttcggtgcctgggcagggctgggtccggggcagggcgagcagggcatgacggtggcygtggtgtttagcagctcagggccgccccaggcccagttccgtgcccgcctcaccccccagagcttcctggacctacccctggagatccagccgctcacag

SEQ ID NO: 534443 - DNA, 201 bp, Homo sapiens
cagggcttcaaccagggtggcgtttccccgtcctcttggggccccggcataagatctcaggacattggctctcaaccctcatcgtgctcttaggaaatacrgacgcctggctttgcacctctggaattcagattcagttggtctggggcagcgcttctcagtctagcgggctcaaggatcggctgaagagcttgtgagaat

SEQ ID NO: 534444 - DNA, 201 bp, Homo sapiens
tgtgagctactgcacctggccaatagtagtgatttcttttctttcctttttttttgagaatgagtcttgctctgtcatccaggctggagtgcagtggtgcrctctcagctcactgcaactgccgcctcctgggttcaactgattctcttgcctcaggctcctgagtagctgggactacaggcatgtgtcaccatgcctggc

SEQ ID NO: 534445 - DNA, 201 bp, Homo sapiens
ctgggctcaggggcaacgggtccttcagagaatacctttgggaggtcccttgcttttggatggcacatgctgggggccagtcagatgacacacacacacasaaacacacacgtgagctcacttcacctggcgagggaatggccaggacgcgtcccccccaaggccaggctgagaccggagctgtgcagtcgggtgggctga

SEQ ID NO: 534446 - DNA, 201 bp, Homo sapiens
gacagcacgtctgcctgcacgcccacgcccacctgccattttgctggggggctgtctgtcctcaccttccaccctgtgccagccacggctcctggctctcyggggcctgggggcctctggggcacaggggcaggactctggggctgggcacaggctacagagacagtgggggactggacgagatcagcagggtagcccgtg

SEQ ID NO: 534447 - DNA, 201 bp, Homo sapiens
cctggctctccggggcctgggggcctctggggcacaggggcaggactctggggctgggcacaggctacagagacagtgggggactggacgagatcagcagkgtagcccgtgggacgcaaggcttcccgggaccctgcacctggagacggatctccagtctggagtcagaagtgtgagttatcagccactcaggctccgagc

SEQ ID NO: 534448 - DNA, 201 bp, Homo sapiens
tgcaagctggtcaccattgggtctggcaaggtctttgctaccactggctacggcatcgccatgcagaaggactcccactggaagcgggccatagacctggygctcttgcagttcctgggggacggtgggtactgccattgctgggatgcccagggtgggctgtggagcccaaggttgtcagcatttccaccaccactcaag

SEQ ID NO: 534449 - DNA, 201 bp, Homo sapiens
gagggctgggtcccggtcatggctcctgttcttccccagcccttgctcttctgggatgcccttgggatgctcaactaacctctatctctttctctttgtcygtgtctgtctgtctccctctctctctgcctctcttcggggagggaggttttcccctcttctctttcatcttccgtatgtgtgtccctctgtccctcctgt

SEQ ID NO: 534450 - DNA, 201 bp, Homo sapiens
gttggaaccttcatgtgccaggtgctagctagagtgattaggagaatgagtcaacctgggcgctcagaccactcattcatctgcaaagcacagtgcctggygcatgggagatgcttcacagttagctacttcctgagacttatagaagactgatgatgccttgggaccaggcagggacaatcgtggcgggtccctgagcgg

SEQ ID NO: 534451 - DNA, 201 bp, Homo sapiens
gggtcagagtcccccccacaggtgtgcccaggttggaaccttcatgtgccaggtgctagctagagtgattaggagaatgagtcaacctgggcgctcagacsactcattcatctgcaaagcacagtgcctggcgcatgggagatgcttcacagttagctacttcctgagacttatagaagactgatgatgccttgggaccag

SEQ ID NO: 534452 - DNA, 201 bp, Homo sapiens
ggtggtggttgggaccttctctgagtcttaggagcacggagagggtgggcagaaagggtggtgtgtcttctgggaacagacagtcccctggccactctgcrgaggagggtgggaggggtcctcaccccatccaggacccaagagaaccagacaagtctctgcccattggtccctcccgggggtgcccagcaggctcatgtg

SEQ ID NO: 534453 - DNA, 201 bp, Homo sapiens
tgtgagctgggtgctgccgtgtgatggtcaggtgtcgtgtatgtcccatgcttgggtgtggggcaggggtccacgtgccaggctggaggagtggctggggyggggctgggccacgacatactctgactcccggtggtctcatggcggcatggctgcagcagcggggacgtggccccctacaccaagctctgctgtaaggga

SEQ ID NO: 534454 - DNA, 201 bp, Homo sapiens
ttgaagaaactgcgttgcttggcctctgaattttcccttatttgcttttttaaaagattgggacagtggcagcagtgagaccagttacgaggggactgcgstggccccggtgccagccggcagtgccttgggtttttgtggtggcagaggggtggagaggaggagctttcccaccctcagggcttcaaccagggtggcgtt

SEQ ID NO: 534455 - DNA, 201 bp, Homo sapiens
acagctgagcagagagtccctctgtcccttatccaacccctcatcttccaggtctcagctgaaacaaacatctcctccactgggaagcctccaggtgcccmggggtgggtgaggtgccctgctctgggctcccataacaccccggcttccctctactatagaacatttcaagcgctcctatctcctggtcctgcccctgca

SEQ ID NO: 534456 - DNA, 201 bp, Homo sapiens
tgaacaaacagcaggtgtcagggtgtggcaaggatcgtggggccaatatagggaagcactttgaacaataaacacaatcaatgccacctgctgtcggtggyggcggtgaggcagaggcagggggtgcctggtccttggcagggctgcaggcatctctcccctctggcaggcacctactgaatgtcacctgggagggccgag

SEQ ID NO: 534457 - DNA, 201 bp, Homo sapiens
tgctctgagtcagaggcccccttggctgggtccgcagagctggtgggcccctactttgatcacgtggacctacctgtctccacccagtgcttctgggcctrgggcagggaacatgccgaggcctctgagctgcctccctctgtccccagagccatatagccctgcagtgtgggtgatgatgtttgtcatgtgcctcactgt

SEQ ID NO: 534458 - DNA, 201 bp, Homo sapiens; identical to SEQ ID NO: 345132

SEQ ID NO: 534459 - DNA, 201 bp, Homo sapiens
aaagttcagcctcagcctgaggtggtggttgggaccttctctgagtcttaggagcacggagagggtgggcagaaagggtggtgtgtcttctgggaacagayagtcccctggccactctgcagaggagggtgggaggggtcctcaccccatccaggacccaagagaaccagacaagtctctgcccattggtccctcccgggg

SEQ ID NO: 534460 - DNA, 201 bp, Homo sapiens
tcaagggcgccaccatgagagcaatattcccttccttgccaaaactcttgtcttcttggcctgaaattctaccacctggcactttagcttaaggctctgaytgtggttaaactacatctctcttgggaatgagaaccctttcagctatgatcagtccctcataccttcctgtgaatgagctctagatgcttagctaagaga

SEQ ID NO: 534461 - DNA, 201 bp, Homo sapiens
gtgttaccctcactgctgtggctcttggtcccaatccaaaataatgacatttagcaaggatacgtgtcaggcccctgggttgggttcaaaagatcctgcaygccagtgatggcccgagaggccagctcaccagctcatgtgtaacaagaccaaaccccagctcaccagcttgggttttccggtacccctgagctctgaaca

SEQ ID NO: 534462 - DNA, 201 bp, Homo sapiens
cagggaaagtctctggagaaatgatgtctaggctgagggcctaagggcgagccggtggggagggggagaggcccaggcagagaagcaggtgggatgaaggycccaaggcgaggaaggagctcagagctttggaggaatagagggaaaagcctggagaaggaggcgggggcctggccacctgggaagacatttgggcttttc

SEQ ID NO: 534463 - DNA, 201 bp, Homo sapiens
tcagctacaaccagaacctcaccagaggcaagagtaagccttgcctgggcccggcaggaggggtgggcctgggcaccctgagggctgggctcaggggcaaygggtccttcagagaatacctttgggaggtcccttgcttttggatggcacatgctgggggccagtcagatgacacacacacacagaaacacacacgtgagc

SEQ ID NO: 534464 - DNA, 201 bp, Homo sapiens
cacagctcagtcaggatacatgtctgcttgtcctgggagtgcagggcccgggaccctgactgtgccccctacccccaggccccttctggatctgtgccacrttggcctttgtcctggccgtcactggcaacctgacgctggtgctggcccagaggagggacccctccatccactacagcccccagttccacaagggtaagc

SEQ ID NO: 534465 - DNA, 201 bp, Homo sapiens
gaaggagcctctcaggacaagggagaagctcctggcagacttccatccttgaccttggccttgcccccaggtcctggaccggatcaaaggctcactgctgycccggcctggccacaactttgtgcggcaccatctgcggaatcggccggatctgtatggtgagtgaggttgtgcatttggttccttgatggatcactcaac

SEQ ID NO: 534466 - DNA, 201 bp, Homo sapiens
acccaggagtgagacccatctctgactcgaaccccgcccccgccctgaactcagacctcaaacccgagcctctcgtccccagaccctgaccccatcccagsgtcaaccctaagttgcagttccactttaggaggaagggaacagatgtcctccggatgcctccaaactgaggaagttgggccccaccttgggggagatcaa

SEQ ID NO: 534467 - DNA, 201 bp, Homo sapiens
gtcaggatacatgtctgcttgtcctgggagtgcagggcccgggaccctgactgtgccccctacccccaggccccttctggatctgtgccacgttggccttygtcctggccgtcactggcaacctgacgctggtgctggcccagaggagggacccctccatccactacagcccccagttccacaagggtaagcagacgggca

SEQ ID NO: 534468 - DNA, 201 bp, Homo sapiens
ggatcaaaggctcactgctgccccggcctggccacaactttgtgcggcaccatctgcggaatcggccggatctgtatggtgagtgaggttgtgcatttggytccttgatggatcactcaacaagtgtggcctgagttgcagatgccagtgtatagctgcggacaaatcagtcactcagacagtgtgacttacctgctgttc

SEQ ID NO: 534469 - DNA, 201 bp, Homo sapiens
aactcctgacctcaggtgatccacccgcctcggcctcctaagtgctggaattacaggtgtgagtcactgttatctggccgagaatggatctttaagtgttytcggggtccctctcgccatcatgagtggcgagggcggaagccaggaggctggggtggaggcggccacatggtggggactgtggatgtggagagtggcact

SEQ ID NO: 534470 - DNA, 201 bp, Homo sapiens
tggtgagtgtggcctggcgcggagtgggtggtggctgtgtggggacactggcatggtcacctgccgcctcattcccatggtggtgagggtggcctggtgcrgagtgggtggtggctggggggactggcatggtcacctgccgccgtgttgctcccaggtcctgtggctcatccctgtgccttggctgcagtggctctttgg

SEQ ID NO: 534471 - DNA, 201 bp, Homo sapiens
ggcctggctgctccccatggctgaaggggtcagagagtcaaagaggaggtgacaggggttgaggaattggcaccaatgaggtgagacacaggccaagggtktgcagtcctgagtgtttcggggagggggatgaactgacagccagcactgggctcagccaccaggaggcccccggtgtcctggtgagtcaggcaaggtgct

SEQ ID NO: 534472 - DNA, 201 bp, Homo sapiens; identical to SEQ ID NO: 345452

SEQ ID NO: 534473 - DNA, 201 bp, Homo sapiens
tctcaaatgcctctccttttcccctccaagcctcccaggcttcctatggtccctaagtcccgggttctcagcgtgacattccagagcaaacacagctcccyattactctataccaggcactggcatggattaatttatctaatcacaacatcccagtaaggtgactattatgacatctcgtttttatagttggggacactg

SEQ ID NO: 534474 - DNA, 201 bp, Homo sapiens
tttgtgctcgggggcctgtcccaaggcctcgagcctaagaggtgagggaggctgagaattgctcaggggtgggaggtcattgtctagcttcacagggaggmtatgttcagagagcctatttgggagtcacatctgatgggtgttattctatggtcacattaagtagtgttctggggtcacattaaggagtcactggaggtt

SEQ ID NO: 534475 - DNA, 201 bp, Homo sapiens
tcgttgcccgggctggagcacagtggcatgatatcggctcactgcaacctccgcctctgaggttcaagcgactctcctgcctcacccttccaagtagctgrgattacaggcatgcgccaccacgcctggctaattttgtatttttagtagagatggggtttctccatgttggccaggctggtctcgaactcctgacctcag

SEQ ID NO: 534476 - DNA, 201 bp, Homo sapiens; identical to SEQ ID NO: 345455

SEQ ID NO: 534477 - DNA, 201 bp, Homo sapiens
tcaccatattggccacgctggtctcgaactcctgacctcaagtgatcctcccgccttggcctcccaaagtgctaggattacaggcgtgagccaccattgcyggccgcgtctggccttgggatcatcttttatccagctttggctcctaccataactgagaagccttgagtttagggctgaggcctctctggcatgtcaggg

SEQ ID NO: 534478 - DNA, 201 bp, Homo sapiens
atcattattattatttattttgttttcttttttgagacggagtttccctcttgttgcccaggctggagtgcaatggcgcgatctcaactcactgcaacctstgcctcctgggttcaagcaattctcctgcctcagcctctcgagtagctgggacaacaggcgcccgccaccacgcccggctaactttttgtatttttagta

SEQ ID NO: 534479 - DNA, 201 bp, Homo sapiens
ggacactgaggcatggagaggttcagtaacgcgaccagtattacacagctggaagggacagagctaggatttgaacccaggccatctagctggagagtttscctgcttaaccgtcatactctgctgtccctggaagtgaggacctccctgaggcagtgactctcggaggggcagcttaggacatttcaggcagaagaaaaa

SEQ ID NO: 534480 - DNA, 201 bp, Homo sapiens
agtagctgggacaacaggcgcccgccaccacgcccggctaactttttgtatttttagtagagatgcggtttcactgtgttagccaggatggtctcaatctsctgacctcgtgatctgcccgcctcggcctcccaaagtgctgggattacaggtgtgagccaccgcgcctggcactattgtcattattattatgactgctgt

SEQ ID NO: 534481 - DNA, 201 bp, Homo sapiens
gcactccagtctgggcaacagagcgagaccccatctctaaaaaaaaaagtgtcaattgggtaaaatgcaagggtcattgaagtcataatttggtgtcacaytggatcacattcaagggaattgggggtcatggtttaagtatcaatgaggtatactatgaagggacacagggcctatatttgggggttacttgagggtcac

SEQ ID NO: 534482 - DNA, 201 bp, Homo sapiens
gttttcttttttgagacggagtttccctcttgttgcccaggctggagtgcaatggcgcgatctcaactcactgcaacctctgcctcctgggttcaagcaaytctcctgcctcagcctctcgagtagctgggacaacaggcgcccgccaccacgcccggctaactttttgtatttttagtagagatgcggtttcactgtgtt

SEQ ID NO: 534483 - DNA, 201 bp, Homo sapiens; identical to SEQ ID NO: 345457

SEQ ID NO: 534484 - DNA, 201 bp, Homo sapiens
ccttcaatgcagaaaaccactgcaatctactgctgtggggcttagggaaggggctgtaaggcagagagactcccatgaatgcacccactgtgtttcttcakcacctagaacagcacctggcactcagcaggccctggctaagcaagtcttaaatgaatggatgaaggaatgaatggaaggaaagagtgtggttgtgtgtct

SEQ ID NO: 534485 - DNA, 201 bp, Homo sapiens; identical to SEQ ID NO: 345461

SEQ ID NO: 534486 - DNA, 201 bp, Homo sapiens; identical to SEQ ID NO: 345447

SEQ ID NO: 534487 - DNA, 201 bp, Homo sapiens
taatgccagtcgatcacacactacttaaaaatggttaaaatggtaaagttcatgttacatatgttttactccctccccctcccctccaaaaaacaaaacastattggcaaaggggtagcaggtgaggggcaggctggtctggtccttgtgactgcgaacatccctgctgcccgttttttgtctgaagcccggctgggtcgc

SEQ ID NO: 534488 - DNA, 201 bp, Homo sapiens
agagtccaaagaatgtgagcctccctttaatggaattaaaagcttccagttctttctgggccatgatataacctatgactgcaaaagaccagtggtaccatacaaaggtagcttccttgtcgattctagcaagacttccctgcacagagcaaagctatagggaatcaaggtagggggcaaaggggcaaagtcatgacaaaa

SEQ ID NO: 534489 - DNA, 201 bp, Homo sapiens
agaccctaggtcccagtggagtgggctcacgagtgggatcttcccatccgtgggttgcacagttccatggaaaaagcacgatttcccaggctaggtagcaygctcactcatcacctcccttggctggggtgtgggggctcccctgacccacgtggctctcgggtgggccaccacaccacactgctcttccttgctctccat

SEQ ID NO: 534490 - DNA, 201 bp, Homo sapiens
gaacattaaccatgggctgatattgtcacaggactagttatcagctttgcagggcttgagtcaatcagtggacccaaagttgaccaggatcttggggactmactctcactaacccaagttacatgagaatgaagagtcaagcagaattccaatttgttaatttatattgatcagaattttatcatttctagtgtctataag

SEQ ID NO: 534491 - DNA, 201 bp, Homo sapiens
tctctgctttctcaatagagaggatttctgggctgggaggagattttgtttttaactgtatttccctaccatcttattcttccacatgcacagtccttagmagtgtttctcatgtataaaagattttctgttgatttctaccattccttttcctattttcacacatctaagagcaagaaggatttttttttttttttttag

SEQ ID NO: 534492 - DNA, 201 bp, Homo sapiens
tcagtgggggaaacccagagaggcctgcatgcccagattcttcttggcttctctgtgcagcactcctttctcctgggtagaaccgctgtgaatgaaagtctttttttttttttgagacaggttctcactctgtcacccaggctggagtgcagtggcacgatctcagctcactgcaacctctgcctccctggctcaagcaat

SEQ ID NO: 534493 - DNA, 201 bp, Homo sapiens
acgctaagcttgatttgagcatgaagagataactacagtcttataagggcccttataagtcatattatcagcttggagctttattaactatctattgctatgtgtgatggttatgtcaacttaactgggccacatggtgcccagatagctggtccaacattactctgggtgtttctgtgataatgttttggatgagtctaa

SEQ ID NO: 534494 - DNA, 201 bp, Homo sapiens
cgctaagcttgatttgagcatgaagagataactacagtcttataagggcccttataagtcatattatcagcttggagctttattaactatctattgctatgtgtgatggttatgtcaacttaactgggccacatggtgcccagatagctggtccaacattactctgggtgtttctgtgataatgttttggatgagtctaac

SEQ ID NO: 534495 - DNA, 201 bp, Homo sapiens
tataaaaatctatttttaaatgaacttctggatattactgttttaatataaagaaaaagaaaatggctaggagaaagaggaataagatcttaaagcagaarataatgatttttaaaatatatagctgaaaagttaatctgagtttgacagttattgtgctattcttacaacttctctaaaagtttgaaattatttcataat

SEQ ID NO: 534496 - DNA, 201 bp, Homo sapiens
agcttgatttgagcatgaagagataactacagtcttataagggcccttataagtcatattatcagcttggagctttattaactatctattgctatgtgtgatggttatgtcaacttaactgggccacatggtgcccagatagctggtccaacattactctgggtgtttctgtgataatgttttggatgagtctaacattta

SEQ ID NO: 534497 - DNA, 201 bp, Homo sapiens
atgccaaagaggtatggagagaatttgccccatcaaaaggtagtcacatccccttcatctatcaatcattatctccgtagagctttctgacttagaggccrgttcagaggaagatgttaacattagcacaggtagataagtcaatacaccagtcacatacgaaaccctctatccacatttaaagaagtgacttcaagagtg

SEQ ID NO: 534498 - DNA, 201 bp, Homo sapiens
gcttagaacagtgctggactcatagtaagaacttgtgggccgggcacagtggctcaggcctgtaatcccagcactttgggaggccgaggcggatggatcaygagatcaggggagatcgacaccatgctcgctaactcggtaaaacccggtctctactaagaatacaaaaaattagctgggcgtggtggcaggcgcccgtag

SEQ ID NO: 534499 - DNA, 201 bp, Homo sapiens
taaaagggcaacctattaactctagatgttgattaataagtatgctgtattagtccgttctcatgctgctataatgaactgcccaagactgggtaatttayaaaggaaagaggtttaattgactcacagttccacatgacagaggaggcctcaagaaacttagaatcatgccagaaggagaagcaaacacgtccttcttca

SEQ ID NO: 534500 - DNA, 201 bp, Homo sapiens
cattcatccattcaacagatagttattgagaaaggaacaatggccttatagtgtctgtattttctgaaccaaaaatctgtacttctcatctgacagatgatttttatgctttttctgtgtgtcacgggaaatattctacaagatgtaacttggaaacagacatgttgggatttccgagatatttttatgatttatgggtac

SEQ ID NO: 534501 - DNA, 201 bp, Homo sapiens
ccatggttcaattacctcccaccaggtccctcccacaacacatggggattatggaaactataattcaagatgacatttgggtggggacacggtcataccawatcattctgcctctggcccctcccaaacatcatgtcttcacatttcaaagcacaatcatgccttccctacagtccctgaaagtcttaactcattccagca

SEQ ID NO: 534502 - DNA, 201 bp, Homo sapiens
atatataagagctctttatatattctgggtataaatcctttatcagatacatgttttgtaaaaattttctcccactctgtggtttgtcttttcattttttwaaaaaaatttatcattctggctttggatgtcatcagaagactttctaaaatccaattatatactttatgcaagacaaataaaaaatgcagaagggttgac

SEQ ID NO: 534503 - DNA, 201 bp, Homo sapiens
ttctcctgcctcagcctcccgagtagctgtgattacaggcatgtgccaccatgcctggctaattttctgtatttttttagtagagatggggtttcgccatkttggccaggctggtctcgaactcctgacctcaggtgatccacccaccttggcctcccaaagtgctgggattacaagcaagagccaccgtgcccggctttt

SEQ ID NO: 534504 - DNA, 201 bp, Homo sapiens
ggtattgaagtgcaaggccgattactgcatttcgccaaggaggccaatgacatgccaaagaggtatggagagaatttgccccatcaaaaggtagtcacatycccttcatctatcaatcattatctccgtagagctttctgacttagaggccggttcagaggaagatgttaacattagcacaggtagataagtcaatacacc

SEQ ID NO: 534505 - DNA, 201 bp, Homo sapiens
gtagctgtgattacaggcatgtgccaccatgcctggctaattttctgtatttttttagtagagatggggtttcgccatgttggccaggctggtctcgaacycctgacctcaggtgatccacccaccttggcctcccaaagtgctgggattacaagcaagagccaccgtgcccggctttttttttttccccagacagggttt

SEQ ID NO: 534506 - DNA, 201 bp, Homo sapiens
gagatggggctagaattttgatttaaagtctaggaattgatctgacgtctaggaattgtggcaaatgcttgcgttttccctctcattcccttagggagaayaaccaaagatgctgctcagtccatttttattgttatagggcttaggtacaagcaaattagccctccacatggatcaggccagatcaccagggagaaaccc

SEQ ID NO: 534507 - DNA, 201 bp, Homo sapiens
aagtgtttcctaaagcagcagcctcaggtctgctatgttatttcttttctgcgtggcttttaaacctgaaaccccttcctttcctgtttgtgcagctttgyagggtaggaaaatgttatataaaagttggacctcacctccactttaggcattgccactgctctgttgcacttgagccctgtaagctgtgtgttctatcac

SEQ ID NO: 534508 - DNA, 201 bp, Homo sapiens
taggggctcagacccagggagatcagggttcagtccctgagcccctggctggagttgttggagttcctgcagggaggccccacccagtgaggagggatggrtcagggtcaggcctgaagaggcactatggctgcatctgccacagccagtgtattgggctgtggggaatacctcttgggaccaacccgtccaacctccctg

SEQ ID NO: 534509 - DNA, 201 bp, Homo sapiens
ggttccatttctggggagagtctaattttggtggtctggagtggggaccagaaatgttccttttcagcaagaaccccaggcagttctgaggtacatgttcrtctgaccatttgggacttgatagctagatgcactgattgtcgagttacacctataggggtttatgttcagattccaccacctaaaagctgtgaaaattag

SEQ ID NO: 534510 - DNA, 201 bp, Homo sapiens
gggcacccatggccaatgctgccacccagaccaagcccctccacattggcaatgctgccaagcatgggatagaagctgcatttttggcaatgttgggtctycaaggaaacaagcaggtcttggacttggaggcaggatttggggccttttatgccaactattccccaaaagtccttccaagcatagcttcctacagttggc

SEQ ID NO: 534511 - DNA, 201 bp, Homo sapiens
atacagatggtcaccctaattatcaagtaaagttagaatgagctgtgtgacaaatggtgctgtcatgtcttcttgagaactagttattgtttatcttgacmacatgcaggtagtgggttgtatctgcttggttatataaaaggatgagacttctgtctttgccatctcatagaggattgcctgtgatgtgcattacattct

SEQ ID NO: 534512 - DNA, 201 bp, Homo sapiens
agatggtcaccctaattatcaagtaaagttagaatgagctgtgtgacaaatggtgctgtcatgtcttcttgagaactagttattgtttatcttgacaacaygcaggtagtgggttgtatctgcttggttatataaaaggatgagacttctgtctttgccatctcatagaggattgcctgtgatgtgcattacattctggtt

SEQ ID NO: 534513 - DNA, 201 bp, Homo sapiens
gcaggatttggggccttttatgccaactattccccaaaagtccttccaagcatagcttcctacagttggctgctggaccagcaggacgtggcctttaagcrttttcctgcacatttatctacccactgggtggcagacgcagctgcatctgtgagaaagcaccttgtagcagagagagccctgcttccaactgactacatt

SEQ ID NO: 534514 - DNA, 201 bp, Homo sapiens
gtcttgaactcctgcgctcgagcaatctgcctgccttggcctcccaaagtgctgagattacaggcatgagccactgtgcccagcctgaaacaagagtcttratttctttatggccagttgttacacagaaatgtgggggaaggttagaggaatatttttaggctctatggctggctttagggaaaagaggttctaatttct

SEQ ID NO: 534515 - DNA, 201 bp, Homo sapiens
agctatgactgtgccactgcactccagcctgggagaaaaagactctgtctcaaaaataaattaattaattaaaaagagataatagtgagtaaacctgaagmtctctctgtaggtctgtgacctgcatattttttaaatgttaacactgtaatatgaaagcgtggctgaacagttagccttgctcttttggcaccctgacca

SEQ ID NO: 534516 - DNA, 201 bp, Homo sapiens
ggatcaatatgaaataattaaagcaagcgccacttgattcttacagctgaatgatatgataacagaattgccacgttgaatttttttctttcagagtaagycaatgtattaatagtttgaaagaatatattttccatatgattcaagccatctagtcttatcaccttaaaccacagccccttatcacctccacctccaccc

SEQ ID NO: 534517 - DNA, 201 bp, Homo sapiens
tcctgtgttctctctcttggccaatggcactgccatttccccatccagaacctgggatactgcagcagtcttttcactgcccctgtctacccctctccaakccattctctacacaactgcctacaggaatctttccaaaacattagttctgaccataactctacttttcttaagacagcactttggctccccattgacatc

SEQ ID NO: 534518 - DNA, 201 bp, Homo sapiens
ataaagtaatggagctgagatctgaacccagacagtgtgactccattatcaatgttcttgatgactacgctatcctgcctcctggtggttacggtttgtayatctccaactctgcttctttgcttttcagattccatcccccttccgtggtaggaacgttgggtagtgctgctgctgcatccaagtttttaggacttagct

SEQ ID NO: 534519 - DNA, 201 bp, Homo sapiens
caattctcccacctcagcttcctgagtagctgggattacaggtacccaccaccacacccggctaatttttgtatttttagtagagatggggttttgccacyttggccaggctgttcttgaactgctgacctcaagtgatccatctgccttggtctcccaaagtgctgggattacgggcatgagccaccacacctggtcaat

SEQ ID NO: 534520 - DNA, 201 bp, Homo sapiens
accttgtagcagagagagccctgcttccaactgactacattaagagaattgtgctcaggataccaaatgtccagtatgtaaacaggccctttccagtttcrgagcatgaagcccgtcattcattccagtatgtggcctgtgccatgctgcttgatggtggcatcactgtcccctcattccatgaatgccagatcaacaggc

SEQ ID NO: 534521 - DNA, 201 bp, Homo sapiens
catgtgatcaaattcactgtttatacagaggacttcacacaccaccaaccatgcaattaatatcaacgcacagggaataatcagaggcaggtaacaaaccrcagcaaccgtgctggtgaccaatggttaacacaccagtcaagtgggtcctgagtccttggtagggtcactgcttctctctgctgacatccaccaagacag

SEQ ID NO: 534522 - DNA, 201 bp, Homo sapiens
aaaatccaaaattagctgggcttggtggcacatgcccataatcccagctacttgggagactgaggcaggagaatcagttggaaccgggaggtggaggttgyggtgagccgagatcacaccattgcactccagcctgggcaacaagagcaaaactccgtctcaaaaacataaaaaataaaaagaacaaaataaacaccttcc

SEQ ID NO: 534523 - DNA, 201 bp, Homo sapiens
gatcacttgagcccaggagttcaagaccagcctgggcaacatggcaaaaccccatctctacaaaaaatacaaaattagccaggtgtgttggtgcatacctrtggtcctagctactcgagaggccaaggtgggagggtcacttgatcccaggaggtcgaggttgcagtgagtcatgatcacgccactgcagtgcactgcact

SEQ ID NO: 534524 - DNA, 201 bp, Homo sapiens
tgaagaagccttgtaaaaggtcccagaagaaaacttgtatttaatatttgaagtaattttctcaaagacactgagaagttacaagattcataaaacaagayattaccggccatgccaatggatatgttaattaagttcacacttacgggcactaactccaacagaagcttccactttcacaatgtctcaatagccaattac

SEQ ID NO: 534525 - DNA, 201 bp, Homo sapiens
tcacaatgtctcaatagccaattacatgtgatcaaattcactgtttatacagaggacttcacacaccaccaaccatgcaattaatatcaacgcacagggartaatcagaggcaggtaacaaaccacagcaaccgtgctggtgaccaatggttaacacaccagtcaagtgggtcctgagtccttggtagggtcactgcttct

SEQ ID NO: 534526 - DNA, 201 bp, Homo sapiens
acatggcaaaaccccatctctacaaaaaatacaaaattagccaggtgtgttggtgcatacctatggtcctagctactcgagaggccaaggtgggagggtcrcttgatcccaggaggtcgaggttgcagtgagtcatgatcacgccactgcagtgcactgcactgccagcctgggtgacagagcaagactctgttacaaaaa

SEQ ID NO: 534527 - DNA, 201 bp, Homo sapiens
aaaatatgttgagacagtcatatttaagcaatgcttttacagccacacagccattcaattgtactgattcctcactttatagtccctgcaacttaatcccytcctgtacgcttaaaaaattccatacaaagtttaataaaacaaaggcacaatgtacatatacatacaaaataaacactgactctatgaggcattctccta

SEQ ID NO: 534528 - DNA, 201 bp, Homo sapiens
aggtgtgagccaatgcacccagtcatgtttccaatttttgatcttataagcaagggtatgaattttgtttgtgtgcaggtggagttttttcccaaaaattktccatacatccatgcttacttccttaggataaattttgagaagtagaatacctagttaaaagagtgtgactattcttctagtattgacataagctatgta

SEQ ID NO: 534529 - DNA, 201 bp, Homo sapiens
ttgcttgaacccaggaggcagaggttgcagtgagccaggatcatgccactgcactccagcctaggtgacagagcaagactctgtctcaaaaaaaaaaaaamaaaaaaaaaaagaaaaaaaatcacagacatttctcagattttcttttctgagaatcagatcaaaagaatctcacataaaacaaggttattactaaactaa

SEQ ID NO: 534530 - DNA, 201 bp, Homo sapiens
attttaaaaacataaacctatccttatgtgctaaaatatttttttaagtagcagtaattttgacattaatttgctagtaatactaccttagatgtgaaaayactaatattagcaccagacttcaggagcaataacccttacaaacgtctctcgggttaaccgtattagcagtagaagaaaagagtgaattctcaaaacacc

SEQ ID NO: 534531 - DNA, 201 bp, Homo sapiens
tcaacctgtgggctacctaattaactgcatggtggctttcattactgttttacaaatgagatacatgattctattgtacaaagttaggaagggaatgaatyatgacaagttcattgaattttaaccccctagttttatgtgtccattatgacgctgccagattgcatttctgttaatctatttactgtcaccaccttctgt

SEQ ID NO: 534532 - DNA, 201 bp, Homo sapiens
gaatccagaaaattgtagaaaattgctctgagatgaaaaaaaagacttgatattccaatagagtctctggtttgaaatgggaatatcaaaagaatgtaacyagatttctgctgttgagatatttaactatattgcttttaaagtctgggataattctatatttaagtttaaaagagcacaaactacctcaattccattctg

SEQ ID NO: 534533 - DNA, 201 bp, Homo sapiens
tcacagtctttagagtgatgtaatgttcatcattcggtcataagctgcaaatccattctccttctcacctctgtctcctgcatgcaactccacagctgaarggagccaaactccctccactctctcacacctcccagccttggcccttgcttccacttctacctttaccctccattctcatcaccctacactattatctga

SEQ ID NO: 534534 - DNA, 201 bp, Homo sapiens
acccagcggggcagtcaaatcttaaagctccaaaatgacatcctttgactccatgtctcacatccaggtcattctgatacaagaggtgggactcccatggycttgggcagctgtgtccctgtggttttgcagggtacagccccctcctcccagcttccttcacaggctggcattgagtgtccacagcttttccaggcacat

SEQ ID NO: 534535 - DNA, 201 bp, Homo sapiens
aaaaaaagaggaagaaaagcaaagaagagaagagaagagaaaggaagagaagaaaagaaaaatgtgatgctgtcctaagggctgggaaaaatggaaccagmacaatggcatatagataatggcctaaggtggaaacaattttggtaattgttgataattgttgctgttgttattttaaagaaattaaacacaatttgcccc

SEQ ID NO: 534536 - DNA, 201 bp, Homo sapiens
aaacccagtgcatacatatgtgttacatttactctatacttcgttttatagacagcacttgatgtacatagcactgttctatatcatttttataatttccyatgttccattatctgagttttaatagtcatccatattctttactaagtcactgtcttaaaaccatacacagtgaggcacagtggctcatatctgtaatcc

SEQ ID NO: 534537 - DNA, 201 bp, Homo sapiens
ttcccccaccctgggagcttagtgtgttaggcagctagcagtcccagtgttggctgctgcccctctcccaaggagctcaaatggcttagacagcaggcagygacagctgtggtgctcgccactcctcagctgggaacttggcaggcttaagcagattctagctgagtggctgttgagaatctccatggctccgtggctgag

SEQ ID NO: 534538 - DNA, 201 bp, Homo sapiens
atttttacacagagcattttaactcctttgtcccaaactcttccctaataggattgaaatggaacctcaaggctcatggagatttcctccataatttaaaygctgtcttctccaaagacaaattctgccaccatatctagaacaacaggttcagatttgaaatcacttgtttttggtacccactgtaagtgcaaaccaatt

SEQ ID NO: 534539 - DNA, 201 bp, Homo sapiens
ctgccaaggagtccaaagttttctggccttgacctgctgctggctttcaatgttggtattgaagtgcaaggccgattactgcatttcgccaaggaggccartgacatgccaaagaggtatggagagaatttgccccatcaaaaggtagtcacatccccttcatctatcaatcattatctccgtagagctttctgacttaga

SEQ ID NO: 534540 - DNA, 201 bp, Homo sapiens
aaagcacgatttcccaggctaggtagcacgctcactcatcacctcccttggctggggtgtgggggctcccctgacccacgtggctctcgggtgggccaccrcaccacactgctcttccttgctctccatggatcatgccagcctcctagtcagttctgataacagaatctggacacctcagttgctggcgcaggattcaca

SEQ ID NO: 534541 - DNA, 201 bp, Homo sapiens
tttgagaagtagaatacctagttaaaagagtgtgactattcttctagtattgacataagctatgtaggcacaaaaggcaatcctagttttactataaattyactttttctgatgcctgtgagtaatcatatgatcacgattactgtacatcctagcctcattgaattcttcatccacgtaagagttaaacaattccttaaa

SEQ ID NO: 534542 - DNA, 201 bp, Homo sapiens
aaatttatcattctggctttggatgtcatcagaagactttctaaaatccaattatatactttatgcaagacaaataaaaaatgcagaagggttgacggtawaaaagatgggggatatacggatggaatattaacaaaagaaaactggacaaataaatgttagtattggaccaagcattactataaatagtgtcactatgta

SEQ ID NO: 534543 - DNA, 201 bp, Homo sapiens
tgcctgtaatcccagcactttgggaggccgtggcaggaggactgcttgagcccaggtgttcaaaaacagcttaggcaatatagggagaagctgtttctacaaaaaagtaaaaaattagccaagcatggtggcgtacacctgtaaccctagcttacttgggaggctgaggtgggaggatcattagagactgggaggcagagg

SEQ ID NO: 534544 - DNA, 201 bp, Homo sapiens
gcaacatggcaaaaccccatctctacaaaaaatacaaaattagccaggtgtgttggtgcatacctatggtcctagctactcgagaggccaaggtgggaggrtcacttgatcccaggaggtcgaggttgcagtgagtcatgatcacgccactgcagtgcactgcactgccagcctgggtgacagagcaagactctgttacaa

SEQ ID NO: 534545 - DNA, 201 bp, Homo sapiens
tcatagtaagaacttgtgggccgggcacagtggctcaggcctgtaatcccagcactttgggaggccgaggcggatggatcacgagatcaggggagatcgasaccatgctcgctaactcggtaaaacccggtctctactaagaatacaaaaaattagctgggcgtggtggcaggcgcccgtagtcccagctactcgggaggc

SEQ ID NO: 534546 - DNA, 201 bp, Homo sapiens
catggcaaaaccccatctctacaaaaaatacaaaattagccaggtgtgttggtgcatacctatggtcctagctactcgagaggccaaggtgggagggtcayttgatcccaggaggtcgaggttgcagtgagtcatgatcacgccactgcagtgcactgcactgccagcctgggtgacagagcaagactctgttacaaaaaa

SEQ ID NO: 534547 - DNA, 201 bp, Homo sapiens
gctactcgagaggccaaggtgggagggtcacttgatcccaggaggtcgaggttgcagtgagtcatgatcacgccactgcagtgcactgcactgccagcctrggtgacagagcaagactctgttacaaaaaaaaaagataatttgtcaagctattagaaaagtggtcacgtctatatttatctgcaggaaggaaaataggaa

SEQ ID NO: 534548 - DNA, 201 bp, Homo sapiens
aaaccaaaaataaatgggctacataatatttaaacacaatcaacatgtttatacaacaggaattctgtacccaacaactagagatttcacaatcttttagraatctcatagaacatttacaaaagtggactaacactgagccataatgcaagtctcaacaacttttcaaagtactggatcatacagttattttctctaatc

SEQ ID NO: 534549 - DNA, 201 bp, Homo sapiens
atttcaagtttggtacgaagtagaactatatctattaaaaagcttttgagataactccatacattttaaaaacataaacctatccttatgtgctaaaatawttttttaagtagcagtaattttgacattaatttgctagtaatactaccttagatgtgaaaatactaatattagcaccagacttcaggagcaataaccctt

SEQ ID NO: 534550 - DNA, 201 bp, Homo sapiens
catgtttatacaacaggaattctgtacccaacaactagagatttcacaatcttttagaaatctcatagaacatttacaaaagtggactaacactgagccayaatgcaagtctcaacaacttttcaaagtactggatcatacagttattttctctaatcacaatgcaattaagttaaagatcaatattttaaaaaagataat

SEQ ID NO: 534551 - DNA, 201 bp, Homo sapiens
actaaatctgagcaactgggtttcttgtagtggagcaaaactctttatgcaaaagtgcctcaaggtgtcttatagaacagaagtgtgtaagtaaagtgggrtgtatccctgtcctaacactcttccctttaaagtctatcacagaaagctttgccacagcaatccatggcttgaaagtgggacacctgacagatcgtgtta

SEQ ID NO: 534552 - DNA, 201 bp, Homo sapiens
gggtgctgggttcctgggaaccactacggaagtgtttcacatagccagccaatatagcaaggtaagaagctcaaggtctacattagagataaaacccagtrcatacatatgtgttacatttactctatacttcgttttatagacagcacttgatgtacatagcactgttctatatcatttttataatttcctatgttccat

SEQ ID NO: 534553 - DNA, 201 bp, Homo sapiens
gacccctgtctctacaaaaattaaaactaaaaaattagccaggaatggaggtgtgtgctgcagtcctacctactcaggaggcagaggtgagagaattgccygagcccaagagtttgaagttacaatgagctttgatcatgccactgcactccagtttgggtgacagagcaagaccccgtttaaaaaaaaaatgctaaaaac

SEQ ID NO: 534554 - DNA, 201 bp, Homo sapiens
gcatttactgggttgtaatctagactcaataagtccatgtacctctcccggacttcatctcaagcacagagacctgagttcattaaatactcacaaacccyagtgtgtaggacatcgcccttcacccattaggaaatcagtaactacttgttgaaaggatgaatgaataacacccacattaatcttaatacccttcaagtg

SEQ ID NO: 534555 - DNA, 201 bp, Homo sapiens
agagacagggcctcactatatttcctgggctggtcttcaacttacaaagggcgagtggagaccttgcattggaatgctggagttagacctgagccctcttktctcttccttccatgaggctggagaacaagcactgtttctgagctgccctgccctgagaaagcctgagatggggctagaattttgatttaaagtctagga

SEQ ID NO: 534556 - DNA, 201 bp, Homo sapiens
ttggtgattcatgagaaggacccagcatttagtagccccgtggctagggtttactacagtgcaaggatacatgacacgataagcaacagaaaaacacacakgcaaagtctggaaaaatccaagcacaggcttttaatgctctctccctcccctgaggagactcatgaagcaggctccttttgtcagcagcgaaaaattcag

SEQ ID NO: 534557 - DNA, 201 bp, Homo sapiens
cctgttggaaggtctcaggtctcacccagttgggtggcacagagaacaggacccgtttaatatagcactttgaatatcccttggtggagggggtgtgcttygctggggggaaatgcactcgtctgggctgtctgggttcctcagaactagcaggaggaaagactaagtcagctagtccgtggagactatggctaccccttc

SEQ ID NO: 534558 - DNA, 201 bp, Homo sapiens
gctcccaaattgctgggattacaggtgtgagccaccatgcccagcctagtaaatcaatcttttatttcaatttatttatttcaataaaagattgatttatgttttattgatcacaaatcaaattaaagtctaattttaaatcttttatttgaaaagggagcgttatcaatctaaaactgatttctgccctgaaaaggtcca

SEQ ID NO: 534559 - DNA, 201 bp, Homo sapiens
gacatactattccttatgaagggaattaaaaagaagtcaaagaaaaatatctgagaaaattgtactcataaatgaatcttttatttaagtaaataaatcttttttttttttttttttttttttgaggcagagtctcaatctgtcacccaggctggagtgcggttgtgcaatcttggctcattgcaacctctgcctcccggg

SEQ ID NO: 534560 - DNA, 201 bp, Homo sapiens
tgttcagattccaccacctaaaagctgtgaaaattagtaacttcagttctctaggtctcagtctcctcacctgcaaaaataactacctagagacttgtggrtattaaaagggtaatatatttgagacattcagcacagtgcctggcaggtgtctcataatagcagctgtgcactgcacccgcagaaatctctatcacacag

SEQ ID NO: 534561 - DNA, 201 bp, Homo sapiens
ctaaacattctctcttcgtatgttgttttataaaattgaataatagctcctatctgatataccatatatacatacatatatgagcttagaatctcatatatatatatatatatatatatatatatatatatatgagaaaagactttgaatattctgaagggcaagaaagatgcagatgcagatacaggctgggcatggtgg

SEQ ID NO: 534562 - DNA, 201 bp, Homo sapiens
acacactgttatggtttttgctgggagcctccgatctctgttgcatagtttcacatggctggggaggcctcacaatcatggcagaagatgaagaccaaagrgatgttttacatggcagcaggcaaaaaagctctcattctctttatggctgcacagtattccatagtgtatatgtaccacattttctttatctagtctatc

SEQ ID NO: 534563 - DNA, 201 bp, Homo sapiens
acactgagccataatgcaagtctcaacaacttttcaaagtactggatcatacagttattttctctaatcacaatgcaattaagttaaagatcaatattttwaaaaagataattagaaaagctgccagccgcagtggcacgcatgttcgtgcagtcctggctactcaggaggctgaggcaggaggatcacttgaccccagga

SEQ ID NO: 534564 - DNA, 201 bp, Homo sapiens
taaacattctctcttcgtatgttgttttataaaattgaataatagctcctatctgatataccatatatacatacatatatgagcttagaatctcatatatatatatatatatatatatatatatatatatatgagaaaagactttgaatattctgaagggcaagaaagatgcagatgcagatacaggctgggcatggtggc

SEQ ID NO: 534565 - DNA, 201 bp, Homo sapiens
tactggatcatacagttattttctctaatcacaatgcaattaagttaaagatcaatattttaaaaaagataattagaaaagctgccagccgcagtggcacrcatgttcgtgcagtcctggctactcaggaggctgaggcaggaggatcacttgaccccaggagattgtggctacaatgagatatgatggcaccattgcact

SEQ ID NO: 534566 - DNA, 201 bp, Homo sapiens
agttgtaaatgcagaattcaacattccgatattaccatctcatttaaaaagttatcctttttgtgcagttattacaaacaagtcaaccaaccccagttacrgctggcacctatgaaggagccaacctggaggttcaataaaaactttaaaacagcccaatgcccatctttcagaagcatggcatgatagtgttgcttctga

SEQ ID NO: 534567 - DNA, 201 bp, Homo sapiens
aaacattctctcttcgtatgttgttttataaaattgaataatagctcctatctgatataccatatatacatacatatatgagcttagaatctcatatatatatatatatatatatatatatatatatatatgagaaaagactttgaatattctgaagggcaagaaagatgcagatgcagatacaggctgggcatggtggct

SEQ ID NO: 534568 - DNA, 201 bp, Homo sapiens
agcctgctgtaaaacatgtcctaccatttttactaatccaccagaaatatcatgcaaagagccaggtgcagtggtgtgtggctatagccccagctactcgygaggctgaggcaggaagctggcttaaacccaaaagttcaagactgtagtgcacaatgatcacatcagtgaatagccactgtactccagcctgggcaacat

SEQ ID NO: 534569 - DNA, 201 bp, Homo sapiens
aacattctctcttcgtatgttgttttataaaattgaataatagctcctatctgatataccatatatacatacatatatgagcttagaatctcatatatatatatatatatatatatatatatatatatatgagaaaagactttgaatattctgaagggcaagaaagatgcagatgcagatacaggctgggcatggtggctc

SEQ ID NO: 534570 - DNA, 201 bp, Homo sapiens
cattaaagacattacatagcttcaatgtagccttatagcaagtggactcaatagacataaagggcttatattaacctaataataataaataatcattttgmatcaacagtatgaaattctgaagattcaagctgggacacctatcatgatgctaatttttgctaaatatttcaagtttggtacgaagtagaactatatcta

SEQ ID NO: 534571 - DNA, 201 bp, Homo sapiens
atatgagcttagaatctcatatatatatatatatatatatatatatatatatatatgagaaaagactttgaatattctgaagggcaagaaagatgcagatrcagatacaggctgggcatggtggctcatacctgtaatagcagcagtttggaaggccaaggtgggagaattgcttgaggccaggaatttgagacgagcctg

SEQ ID NO: 534572 - DNA, 201 bp, Homo sapiens
accctgggatcctgtaggggccctgatctggggaaacatgaggacgtggaggcaagggaggaagctcaggggagacacttgtatattgggggttgcctttsagccacaccttcttcactggcttctattccaacctaaaacacacaggtcagcttcaccaggaggtacacgaggctggtctgaatcaaatgtcccttgact

SEQ ID NO: 534573 - DNA, 201 bp, Homo sapiens
tgagcttagaatctcatatatatatatatatatatatatatatatatatatatgagaaaagactttgaatattctgaagggcaagaaagatgcagatgcasatacaggctgggcatggtggctcatacctgtaatagcagcagtttggaaggccaaggtgggagaattgcttgaggccaggaatttgagacgagcctgggc

SEQ ID NO: 534574 - DNA, 201 bp, Homo sapiens
ctgggcatggtggctcatacctgtaatagcagcagtttggaaggccaaggtgggagaattgcttgaggccaggaatttgagacgagcctgggcaacatagwgagacccctgtctctacaaaaattaaaactaaaaaattagccaggaatggaggtgtgtgctgcagtcctacctactcaggaggcagaggtgagagaattg

SEQ ID NO: 534575 - DNA, 201 bp, Homo sapiens
gccacctggcctctctaaactccccctcattactccctgatagcaactggtcccaccccaggtttcatcctatcctaaggtgagtgcctgagctgaaactsgtccctaaaattccagaagtctttggagacagggcaattctaaacccttcagggaagtccctgttgtccaatttaggacatgcaagcagaatgtcactct

SEQ ID NO: 534576 - DNA, 201 bp, Homo sapiens
atttctgggctgggaggagattttgtttttaactgtatttccctaccatcttattcttccacatgcacagtccttagcagtgtttctcatgtataaaagaytttctgttgatttctaccattccttttcctattttcacacatctaagagcaagaaggatttttttttttttttttagtttgtggggaaaaaggtaatact

SEQ ID NO: 534577 - DNA, 201 bp, Homo sapiens
cttccacatgcacagtccttagcagtgtttctcatgtataaaagattttctgttgatttctaccattccttttcctattttcacacatctaagagcaagamggatttttttttttttttttagtttgtggggaaaaaggtaatactaattcaaaatataaagccatagtcagaaagtttgaaaatctttgcaaactagatt

SEQ ID NO: 534578 - DNA, 201 bp, Homo sapiens
ataaagccatagtcagaaagtttgaaaatctttgcaaactagattttattaataatgttaaacggtgagggtggggaaatatgttcttagtggataccaargggtaaaaaagaagggaaggaggaagggagctacatgaagtaggaattctggaaggcagaacccaagtagtcatacggaaggtaccaagccttcgaaaca

SEQ ID NO: 534579 - DNA, 201 bp, Homo sapiens
acccatatgttttgggcaccagggagatagacgatatcatggcttctcagtgatctgtgtgagggagccctcagcactcattctttccctactaaccaagwgagcattgttaacttgccttcccaggcaccttgatatagagaagggcctcaagaacacactcctgtacatattagaaatgataaaattctgatcaatgta

SEQ ID NO: 534580 - DNA, 201 bp, Homo sapiens
gaaattatcaccagaccaactcaaaattacaaagtttcccagagcttatataccttttaagcgatatgtctgtgtgtaagtgtgcattcatctaaagacayacatgattaacttcttctaatctatgactaagatctgagtcctgaagaccttcctctggagcctcagtaaatttacttaatctaaatgcattcaggtgct

SEQ ID NO: 534581 - DNA, 201 bp, Homo sapiens
tagcagcgtgaaaatcaacattattgttattcttccaccctaatctgaaacctttgtgccaccatcctttctctctcccagccatcttctctcctgctttygcccaccccatacacccctccacctttctatcaaagccctcagagacataaaaaatagcccatccttttgaaaatggcaagtgttccttgacttgataaa

SEQ ID NO: 534582 - DNA, 201 bp, Homo sapiens
atactgtattcacactatcactggttgatttgcttttgttccagatctacagttccaacatatccagcactgtttggggtcagccagacatcaggctccckcccacatatgctgcttttgtgaacggtgtggctgtaaggaggttttcacgtcttttcaactattagataatcataataattttagagtcaggaaatatct

SEQ ID NO: 534583 - DNA, 201 bp, Homo sapiens
agggtcacttgatcccaggaggtcgaggttgcagtgagtcatgatcacgccactgcagtgcactgcactgccagcctgggtgacagagcaagactctgttwcaaaaaaaaaagataatttgtcaagctattagaaaagtggtcacgtctatatttatctgcaggaaggaaaataggaaagcgccgtaggacctgcttactc

SEQ ID NO: 534584 - DNA, 201 bp, Homo sapiens
cccaactcagagtgaacggtcacggtcatcccaggaaaacaacacttaagcttaaccaatcagaaaccaccaaccaacctctaactagagactttaccaawcagaaattgccaatgaacctcaaactagtgacttttcactttaaccactcaaatggttttttgtggggtttttcttttttttgccttgcttccaagaaca

SEQ ID NO: 534585 - DNA, 201 bp, Homo sapiens
gaaaacaatcaagcaacactatctcagaatctaaaccaggaagccaagaccaaaagccgcgaagtgattctgtatgccttcagggccaacatcagctagamatattatagctcaaccacaaagaagaaagtgcaggggccttctaaaagggggaaaaaaagagctgtaaattagcttccaaaaggaagggagatcaagtag

SEQ ID NO: 534586 - DNA, 201 bp, Homo sapiens
aactaaaaaattagccaggaatggaggtgtgtgctgcagtcctacctactcaggaggcagaggtgagagaattgcctgagcccaagagtttgaagttacartgagctttgatcatgccactgcactccagtttgggtgacagagcaagaccccgtttaaaaaaaaaatgctaaaaacatggatttgattttaaagaattcc

SEQ ID NO: 534587 - DNA, 201 bp, Homo sapiens
tatacaacaggaattctgtacccaacaactagagatttcacaatcttttagaaatctcatagaacatttacaaaagtggactaacactgagccataatgcmagtctcaacaacttttcaaagtactggatcatacagttattttctctaatcacaatgcaattaagttaaagatcaatattttaaaaaagataattagaaa

SEQ ID NO: 534588 - DNA, 201 bp, Homo sapiens
gatgtattgtcaattcccaacagtccagccctggcagcttgcaacccagtctccaaactgtaactcttgtgatccttttagaacacaagtcttacggtgcmagttccttgctgataacctttttctggctttctattgcctatgtgctgaacccctagcacaatttacacagctctctgtgatctgacctagcagtctcct

SEQ ID NO: 534589 - DNA, 201 bp, Homo sapiens
tcactctgttccaaagtccccccaatgatgcctctttccataggggagagaatggccctgggggcttcatcgtgctcaagtcggccagtaacccccgtgtytgcacctttgtctggattcttaatacagatctcaaggtggggtgctggggggctgccaggtgggttctgtggagtggaggggaccctgctgctgacttgg

SEQ ID NO: 534590 - DNA, 201 bp, Homo sapiens
ctagccctgcccatcggggcggcctggatccttagaggactggtattggtgcctgaggtctctggccgtgggctgagatcccttggtgcttccagggcccyctgggtggtggcttagcatcaacagcctcccctccaggttcctccatcccctacctcttgccccttccgggaggtgaggggcagccccaggcccttgctt

SEQ ID NO: 534591 - DNA, 201 bp, Homo sapiens
gggaggggaagactggctgctgggagggaatgtggctttgtgcttggaaaacaaagaacagagcttggggccctcttctcctgggggtggtggcaggcccrgaggctgttgacaggaccagaggctggagctcagggctaggcctggtaggagcaggctacagccccagggatccaggagggggtaggtgcccatgcagag

SEQ ID NO: 534592 - DNA, 201 bp, Homo sapiens
ggagtcagggccaaggcctcaggggtcctggtgaaaatgtctggtgggctggggtagggacaggggcaaggacacatccactccgtctccacttcaccctytcaagcagcgtgatggattttgcccattaagcataaacctaatcaattgatttgccacctgaggctccgtctgacaccactgcccacccccaccccccat

SEQ ID NO: 534593 - DNA, 201 bp, Homo sapiens; identical to SEQ ID NO: 345525

SEQ ID NO: 534594 - DNA, 201 bp, Homo sapiens
gctggtggccagcccggccccaccctggtctgtttgtgttgctggtgccaagagccaggcccagcatgttcttcctgccaggggtgagtgggagagggcgrcccaggctggattccagagctgcacctgcattctggcccagagcccccctgctggtgccagctgcaaggggagaccctgctgagggcaggccatcaagtg

SEQ ID NO: 534595 - DNA, 201 bp, Homo sapiens
aaaaagaccaggggcggcttctgaggagctgacagttaatggggcctataaagcgatgggaggattttatcagagggaggcagaggctggagtgggctcakagatcagaaagctgggtcctctgaacagagctccagtagatggtggctgggtgggggaacaggggagacggagctgaggaagacagaggcagcgtccttt

SEQ ID NO: 534596 - DNA, 201 bp, Homo sapiens
gtgggtgccccccaccaagagggaagggttggtctgcccgagcccatctggcaccacccagccctctgccgccctgtcccagaccttcctgccctgtcctscggagctcgtgtaccaggaggtgatcctgcagcccgagaggatggtgctgtggaacaagacagtgactgcctgccaggtgagcccagtctggctgcctct

SEQ ID NO: 534597 - DNA, 201 bp, Homo sapiens
agaataatgtaagaagccctctcccacctgaccttcccatgcgtgttaggagtttctgttctcttttctgaggcctgaggaagaaacccaaagattacatrggttggagccatattcctgccccaagagagggagctgggccctcgggtcggcaggaggctgggctggattggacgtttcccccgtgccccttggcccccc

SEQ ID NO: 534598 - DNA, 201 bp, Homo sapiens
tggggggcagtagcttcctgtgactgccttgctcccgtcccccaccaggtcctggccttcttccgcttctctggactgctcctaggctatgccgtgctgcrgctccggcactggtgggtgattgcggtaagatgccactttcctggcagcttctgggccctggcagggctggtggaagggatgggatggaggaggactcac

SEQ ID NO: 534599 - DNA, 201 bp, Homo sapiens
tggtgtaattccagcactttgggaggccaaggcggggagattgcttgagtccaggagtttgacaccagcctgggcaacatagtgagaccctgtctctacaaaaaaaaaaaaaaaaagaagaagaaaagaaaagaaaaattagcctggcatggtggcatctgcctgtagtcccagctactcaggaggctgaggcaggaagat

SEQ ID NO: 534600 - DNA, 201 bp, Homo sapiens
ctctgcttcacatggagctcactgggtccaaacttgaactggtcttttccttgcagattaattcttcctctaccccaacccagccggaagtctggtaattwccttacactttctcctctctttcaagtcccacatcttaaaagtgacctagtactgccaacttcctgaacatccttcaaacctgggccagctccatctctt

SEQ ID NO: 534601 - DNA, 201 bp, Homo sapiens
atgaagactgggaggaacaacaggggttctcatattctgaatgaaggaatgtggaggggttcggaggggttgtgtcatttggccaaggtccctctgcaccsaagtgtgtgaaggcaacggccttgaacctaccctccagctgagttcatgctcttggcctctgccccatactgccccctagtggaggctcccgagagagga

SEQ ID NO: 534602 - DNA, 201 bp, Homo sapiens
gagaagggtaaacagtgaaataaaacaataaagatcgtttcagatagtgacccacttcactgaagaaaggaaggcagcttactatcatgttatgctgtgakttggagcaggagggtgggaggctttctgaggagaggacttttgagctgcctgttgaagggtctgtgggagaacattccaggcatggggagagccagatcg

SEQ ID NO: 534603 - DNA, 201 bp, Homo sapiens
gactttcccccagataaacagaggcttggtgagaaggacttgcccagagttaggcggaattactggttgcccggagactggggtacaggttccttaactcygggccagtgctctgcctactgtacaggctgtcatttggactttgagctgctttcggtgggagggtgatatcaaaccccctttctttgactcttggccaac

SEQ ID NO: 534604 - DNA, 201 bp, Homo sapiens
gggaccccggaggcagagagggagcagggaaatgacttctgctgggttctcttttggcagcatatatccagtctgatcagagactcggctcccatccttcrggagccatcagtcattaaaacctttgctccacaaggctgggcgcagtggctcacgcctgtaatcctagcaccttgggaggctgaggtgggtggatcactt

SEQ ID NO: 534605 - DNA, 201 bp, Homo sapiens; identical to SEQ ID NO: 345535

SEQ ID NO: 534606 - DNA, 201 bp, Homo sapiens
agcatggccggccgcggtggctcacacctgtaatcccagcactttgggaggctgaggcgggcggatcacgagatcaggagattgagaccatcctagctaayacggtgaaaccccatctccactaaaaatacaaaaaattagccaggcgtggtggtgggcgcctgtagtcccagctactcgggaggctgaggcaggagagaa

SEQ ID NO: 534607 - DNA, 201 bp, Homo sapiens
cccagatttggctgccctgctggagagcggaagccccagtctaggcggttgtgaggggtcttcctctccagggctcctgggctccatcgcccagagtcccygtgtcctcccttctccagggtggctggtgccccacctgaaggagcctaggcccgtcacccccgtcattccaaggagtcaggtcgcagtctggcctggtgt

SEQ ID NO: 534608 - DNA, 201 bp, Homo sapiens
ctgggagcattgagcagtgcagggtacagcatgtacagctgggcacttcccctgctgaggctgcgttcctgttccctgtcccgctgggctctgctcctccyggctactaatcctgctaatcttgctgctctgtctgtggagatggggggtggtggacagctggaaccaagccaccaaggctggacgggatgtgcggcggtg

SEQ ID NO: 534609 - DNA, 201 bp, Homo sapiens
catccgtaagaacttggagcaggagatcatccagtacaactttaaaacttccttcttcgacatctttgtgagtggccttggctgatcctggggaccccggmggcagagagggagcagggaaatgacttctgctgggttctcttttggcagcatatatccagtctgatcagagactcggctcccatccttcgggagccatca

SEQ ID NO: 534610 - DNA, 201 bp, Homo sapiens
gaatggggtgtatgccagtttggctggctagagttggtagccacagaagggggctctgggtttggggtgacccctgccatggagctcagccccctcccttyacagctgctcagcaaaggggcatttggctacctgctccccatcgtctcttttgtcctcgcctggttggagacctggttccttgacttcaaagtcctaccc

SEQ ID NO: 534611 - DNA, 201 bp, Homo sapiens
gctcgcactgcccacatgggacctggccccaggctgtcaccctccaccgagccacgcagtgcctggagttgactgactgagcaggctgtggggtggagcastggactccggggccccactggctggaggaagtggggtctggcctgttgatgtttacatggcgccctgcctcctggaggaccagattgctctgccccacct

SEQ ID NO: 534612 - DNA, 201 bp, Homo sapiens
caaggtggggtgctggggggctgccaggtgggttctgtggagtggaggggaccctgctgctgacttggttgctgcatgactttgggggctctctgccatgsctgggcctcccctttgtcagccacctttcttacttgaaaatttgggtcagggtccagatggtctcttagccctgggttgctgtagggcatgtgccccccc

SEQ ID NO: 534613 - DNA, 201 bp, Homo sapiens
ctggaggaagtggggtctggcctgttgatgtttacatggcgccctgcctcctggaggaccagattgctctgccccaccttgccagggcagggtctgggctrggcacctgacttggctggggaggaccagggccctgggcagggcagggcagcctgtcacccgtgtgaagatgaaggggctcttcatctgcctgcgctctcg

SEQ ID NO: 534614 - DNA, 201 bp, Homo sapiens
tggtagccacagaagggggctctgggtttggggtgacccctgccatggagctcagccccctcccttcacagctgctcagcaaaggggcatttggctacctrctccccatcgtctcttttgtcctcgcctggttggagacctggttccttgacttcaaagtcctaccccaggaagctgaagaggagcgatgtgagtgcttgc

SEQ ID NO: 534615 - DNA, 201 bp, Homo sapiens
ggagcaggagatcatccagtacaactttaaaacttccttcttcgacatctttgtgagtggccttggctgatcctggggaccccggaggcagagagggagcrgggaaatgacttctgctgggttctcttttggcagcatatatccagtctgatcagagactcggctcccatccttcgggagccatcagtcattaaaaccttt

SEQ ID NO: 534616 - DNA, 201 bp, Homo sapiens
agagcttggggccctcttctcctgggggtggtggcaggcccagaggctgttgacaggaccagaggctggagctcagggctaggcctggtaggagcaggctrcagccccagggatccaggagggggtaggtgcccatgcagagggaccccagagccctccaggggtgaaccctgtggctgctgggcttggggcagggagcac

SEQ ID NO: 534617 - DNA, 201 bp, Homo sapiens
cttcgacctgctcttcatctccctgctctggatcatcgaactgaatgtgagtgggggcgaggtgggggcacaggccatgttgcaggccacccgggcctcartttgtccatctgccacatgggagggctgcctctcccctggggttggttagctgggtaaaatgaagactgggaggaacaacaggggttctcatattctgaa

SEQ ID NO: 534618 - DNA, 201 bp, Homo sapiens
ttgctgtagggcatgtgcccccccttcttacctctgagtcctgaggccctgaggaagggtggctggtggccagcccggccccaccctggtctgtttgtgtkgctggtgccaagagccaggcccagcatgttcttcctgccaggggtgagtgggagagggcgacccaggctggattccagagctgcacctgcattctggccc

SEQ ID NO: 534619 - DNA, 201 bp, Homo sapiens
gatggggcctgagcttcagggtcactgaggcacctctgggatccaggccacctggagccccggacctcccagactccactcacccattccctctccccgcrcggcactcacaccaggggcggcctggagcccggatcgcagggcggggccaggccactgcctgccttcctcctccctcccggctggcctgcccccttgcct

SEQ ID NO: 534620 - DNA, 201 bp, Homo sapiens
gacgttcgggatctccttccaaagcctccgtcttaactgaggggagaggagagggtgaggtgtctgggtgttatgagcaggggcaggtatggggaggggtsggaatctggggtgagaggaaaacatctacgcattccggtagctctgcgtctcagtgtcatcccgtgtctccccaacttcctttcgaaacggccgtgaata

SEQ ID NO: 534621 - DNA, 201 bp, Homo sapiens
cccctaacccctgcccttggaatgggtgcctggaggagggcgggtgcaggggtcagccggggtgggcaggggtttcccagtagaggctgaacctcgggcartgcccatccgagtgtctcccccaccaccagtccggcccccctggtctgcctcatgcctgggcacacaggtggagcagccacaagcctgcagggcccaggg

SEQ ID NO: 534622 - DNA, 201 bp, Homo sapiens
ggggccctcttctcctgggggtggtggcaggcccagaggctgttgacaggaccagaggctggagctcagggctaggcctggtaggagcaggctacagcccyagggatccaggagggggtaggtgcccatgcagagggaccccagagccctccaggggtgaaccctgtggctgctgggcttggggcagggagcaccaggaag

SEQ ID NO: 534623 - DNA, 201 bp, Homo sapiens
gcttgagtccaggagtttgacaccagcctgggcaacatagtgagaccctgtctctacaaaaaaaaaaaaaaaaagaagaagaaaagaaaagaaaaattagyctggcatggtggcatctgcctgtagtcccagctactcaggaggctgaggcaggaagatcacttgagccagggaatgtttgaggctgcaatgagctgtaat

SEQ ID NO: 534624 - DNA, 201 bp, Homo sapiens
ttccagggccccctgggtggtggcttagcatcaacagcctcccctccaggttcctccatcccctacctcttgccccttccgggaggtgaggggcagccccrggcccttgcttctacctgcagagctcttcctgtctccctctcacagaccaacacaggcatccgtaagaacttggagcaggagatcatccagtacaacttt

SEQ ID NO: 534625 - DNA, 201 bp, Homo sapiens
tggtctgctatcctgcgttcccctaactggcaccctcctgggccagccagcagcaggacatagaccaaggccaacctcctccacacccagggcctctgccttctaccctctgtggagtctccattaacttggcattgacagggctgcttgactcaaaacaaccccagccctgccctgaagccatctcgccagtcagtcaga

SEQ ID NO: 534626 - DNA, 201 bp, Homo sapiens
atcatagctcactgtagcctccaactcctagattcaagggttcctcccacctcagcctccccagtagctgggaccacaggtgcatgaccacatttggctattttttttttttttggtagagatggagtctcactatgttgcccaggctggtctcaaactcctgggctcaagtgatcctcccatctcggcctctcacagtgc

SEQ ID NO: 534627 - DNA, 201 bp, Homo sapiens
ccacctcccgcctcccagagtgctgggattacaggtgtgagccaccgcgcccggcttcctctctgactttcagtgggacctttccttctcacccaagggayggggcctcttagagcccagcacatgggtggggcagagactgtaggcctgggggctacatggcagggagggagtgccagagttccttttgtctttagggtt

SEQ ID NO: 534628 - DNA, 201 bp, Homo sapiens
tcaagagtgaaaaaggctcagacctggtctgctcaggaaaaccagtctggaagtgtgtgtgtgttacatggcaagcattaaatctagagaaatgtatagakctgggaactagagggagaaaaagaccaggggcggcttctgaggagctgacagttaatggggcctataaagcgatgggaggattttatcagagggaggcag

SEQ ID NO: 534629 - DNA, 201 bp, Homo sapiens
aactaaccctccctcccgcagggacttcgtgaatgtccggcgcattgagcggcgcagggaccgatacttgtcatcagggatcgccacctcacacagtgccyagcccccgacgcacaaatatgtccggtgagcctcactttgcctggggtcacccctgccagcccctcccctgggagcattgagcagtgcagggtacagcat

SEQ ID NO: 534630 - DNA, 201 bp, Homo sapiens
ggcggcgtggtctccccaaggtgagtccatgccgggccccctcctttcagccaggtcttctgcactttggccttgggtcattgtcccctgaactaaccctmcctcccgcagggacttcgtgaatgtccggcgcattgagcggcgcagggaccgatacttgtcatcagggatcgccacctcacacagtgccaagcccccgac

SEQ ID NO: 534631 - DNA, 201 bp, Homo sapiens
gggatcgccacctcacacagtgccaagcccccgacgcacaaatatgtccggtgagcctcactttgcctggggtcacccctgccagcccctcccctgggagyattgagcagtgcagggtacagcatgtacagctgggcacttcccctgctgaggctgcgttcctgttccctgtcccgctgggctctgctcctcccggctact

SEQ ID NO: 534632 - DNA, 201 bp, Homo sapiens
gagctgggggcccgggcgtgactgtgccccctcccaccctgcgggccagggtcctgtcgccaccacttccagagccagaaagggtgccagttgggctcgcrctgcccacatgggacctggccccaggctgtcaccctccaccgagccacgcagtgcctggagttgactgactgagcaggctgtggggtggagcactggact

SEQ ID NO: 534633 - DNA, 201 bp, Homo sapiens
ctcttcctgtctccctctcacagaccaacacaggcatccgtaagaacttggagcaggagatcatccagtacaactttaaaacttccttcttcgacatcttygtgagtggccttggctgatcctggggaccccggaggcagagagggagcagggaaatgacttctgctgggttctcttttggcagcatatatccagtctgat

SEQ ID NO: 534634 - DNA, 201 bp, Homo sapiens; identical to SEQ ID NO: 345543

SEQ ID NO: 534635 - DNA, 201 bp, Homo sapiens
cccacatgtggctgggccaggcccctctgggaagcatgtggtatgtctagagagagaacaggccacgaacatggtggactgcaggccccaggctgaccccyccctgcctcctgcttccgtccaggagcgggagtacatccgccaggggaaggaggccacggcagtggtggaccagatcttggcccaggaagagaactggaa

SEQ ID NO: 534636 - DNA, 201 bp, Homo sapiens
tcgcttgaacccaggaggcggagcttgcagtgagcctagatcgcgccactgcactccagcctgggcgacagagtgagactccgtctcaaaaaattaataamaaataaaaaaataaaaattagctgagcataatggcatgtgcctgtggtcccagttactcgggaggctgaggcaggaggatcacttgagcccaggaggtca

SEQ ID NO: 534637 - DNA, 201 bp, Homo sapiens
ccgggccccctcctttcagccaggtcttctgcactttggccttgggtcattgtcccctgaactaaccctccctcccgcagggacttcgtgaatgtccggcrcattgagcggcgcagggaccgatacttgtcatcagggatcgccacctcacacagtgccaagcccccgacgcacaaatatgtccggtgagcctcactttgc

SEQ ID NO: 534638 - DNA, 201 bp, Homo sapiens
ccctgagctgttaaaaacctgccctgcctgtcacccatttctgtgccaccagcccaccccctgcctccactctcctccctgccaccttctgtccctgccayaggaatatggggacaccgtgtacaccattgaagttccctttcacggcaagacgtttatcctgaaggtgagtgaggggagcgggtgtcctggagccccaga

SEQ ID NO: 534639 - DNA, 201 bp, Homo sapiens
aggtgcctgggaggagtggccctgatccaggaaaatgtgaggggaatctggaacgctctaggcagaagaagctgggagggagggggaggtgaaaagggcavaggcaaggatggtggggcccccagcaccctctgttagtgccgcaataaatgctcaatcatgtgccagagttgcatctctttccttgtggttgggggggct

SEQ ID NO: 534640 - DNA, 201 bp, Homo sapiens; identical to SEQ ID NO: 345518

SEQ ID NO: 534641 - DNA, 201 bp, Homo sapiens
gccttctgggcagaatggaaggatctgacactgtccacacggcccgaggaggggtgagtgtgggtctgctagagccctgcctctgctcccccagagcaccytcactgagccatgaggccagagcatgaagccctggagaaatttctgggggtgggggcaggaagaatgccccatggggagagcaaaggggaaccacccttc

SEQ ID NO: 534642 - DNA, 201 bp, Homo sapiens; identical to SEQ ID NO: 345536

SEQ ID NO: 534643 - DNA, 201 bp, Homo sapiens; identical to SEQ ID NO: 345527

SEQ ID NO: 534644 - DNA, 201 bp, Homo sapiens; identical to SEQ ID NO: 345530

SEQ ID NO: 534645 - DNA, 201 bp, Homo sapiens
tgtagtagaatgatggttagacttcaggaaggacttcccatggtcagacaagagctagtggaacaggcaatggcaggaaatcaagggatcctctgggatcktggaaaaagccctccttctcccatccgcatccacctctgtctcccttctctcaggagtgagctggggctggcctgccctgcctgaggcagggggtgagac

SEQ ID NO: 534646 - DNA, 201 bp, Homo sapiens
gccttggagtctgttctagggaaggcctcccagcatctgggactcgagagtgggcagcccctctacctcctggagctgaactggggtggaactgagtgtgytcttagctctaccgggaggacagctgcctgtttcctccccaccagcctcctccccacatccccagctgcctggctgggtcctgaagccctctgtctacct

SEQ ID NO: 534647 - DNA, 201 bp, Homo sapiens
cctattcaacaactattaataacagttgtgataaattaaggaacaggagccatgtgacaggcttgtctgaagcactttacatacatttccttatttcatcytcatagtacccttatgagctctgagttagattcagaggggaaaaaaacttgcccaaaatgcacagctaacaagttagcaaggaataaagacagggttggt

SEQ ID NO: 534648 - DNA, 201 bp, Homo sapiens
gtggcaggaagtccaccccagggaccctggctgggtgggggtagagggacataggtttgttcagagggctccaggggcaggaaaagcacatttcttgtccygcagagccccttcccaaaggtgaaatggatgtgagcaaatgggggtccctgccttgaggtcagggtggggggcagcatgctcaccagcccctccctcctt

SEQ ID NO: 534649 - DNA, 201 bp, Homo sapiens
cccagggagctaagcatagtgggaggtgcagttctgggcagcctgggcagcagacggcaggcagagtcaaggggtgctccggtagagagccctgggagtcrtgaggtggggagaccgcgtcctctaactggggaagtctgccaggccagggaagcccggggaggaggagaggtttaatctgggacttagacacatacatgt

SEQ ID NO: 534650 - DNA, 201 bp, Homo sapiens
ccctgctgcttggaacacaccccaagctggctcgagcccctccaccccacccacctcattcccgcccccagaggctgaggtcactggctcccctgggcccsgggtggtgctgtcaacacctgccggttggaggaggaggcaaggcccctgggggctgttgtcttagcaattgagtaactagggagcttggctataccggaa

SEQ ID NO: 534651 - DNA, 201 bp, Homo sapiens
ggagaccccgccctccagcaggactcatgataacgctggcacaagaaggcagcccttgccttgccatttaggcctgggcttgggctggggagcagccaggyggcgggtggggagcctaccaaagctccgcataccatgtctctttgacttcacggagtaggggcccctgctgtgtgccaaagccagaaggccaaaccaatt

SEQ ID NO: 534652 - DNA, 201 bp, Homo sapiens
gcaaatgggggtccctgccttgaggtcagggtggggggcagcatgctcaccagcccctccctccttaggtgtccctcaatgcatggttctggtccacagtyttccacaccagggacactgacctcacagaggtgagcattcctccagctccccctcctgcacagggtggtcccagaggagcccagaagtgggcagaggggc

SEQ ID NO: 534653 - DNA, 201 bp, Homo sapiens
ctgaggtgtctccgttctggaatggagagaccctggggccccatagtttgacctcaaactttgtgactcttgcggaaagggaagttgaggggcaggtgaasgggcgtggtgagagtcagtctactggacctgatgaaggaaactgacattgatgggcacctactatggaccaggcagcaaaaccagcagccattcagagga

SEQ ID NO: 534654 - DNA, 201 bp, Homo sapiens
aggttgcagctgtagtagaatgatggttagacttcaggaaggacttcccatggtcagacaagagctagtggaacaggcaatggcaggaaatcaagggatcytctgggatcgtggaaaaagccctccttctcccatccgcatccacctctgtctcccttctctcaggagtgagctggggctggcctgccctgcctgaggcag

SEQ ID NO: 534655 - DNA, 201 bp, Homo sapiens
cagaggccaggcttcaggtgggtctctgtgagtggaaggcacccagggaggcggttggagaggggacccggcagccccacccatcctgtggccctacgcayatgtttgcccgcacacacaccccctgctttcggtgttctgagccacttagctcagtcctgcagtcctcttctcacctcccccttcctgctgtgggtgaca

SEQ ID NO: 534656 - DNA, 201 bp, Homo sapiens
gtgtctccgttctggaatggagagaccctggggccccatagtttgacctcaaactttgtgactcttgcggaaagggaagttgaggggcaggtgaaggggcrtggtgagagtcagtctactggacctgatgaaggaaactgacattgatgggcacctactatggaccaggcagcaaaaccagcagccattcagaggagttcc

SEQ ID NO: 534657 - DNA, 201 bp, Homo sapiens
ctccagaggaaggaggaggggctcttcctatagctgaggtgtctccgttctggaatggagagaccctggggccccatagtttgacctcaaactttgtgacycttgcggaaagggaagttgaggggcaggtgaaggggcgtggtgagagtcagtctactggacctgatgaaggaaactgacattgatgggcacctactatgg

SEQ ID NO: 534658 - DNA, 201 bp, Homo sapiens
gaaggatgcatgaatgttaactaggtaaatttgagaagagtaagggaaggcttctaaagagaagtctcagaaagtgcccaggtgggagagagggagggtcrttccaggcagcctgacatgcaggaaatcagagagtgggtgtgagctgggcggactgatgggtggtggatggggccagccatggagagcctcacattggag

SEQ ID NO: 534659 - DNA, 201 bp, Homo sapiens
gagaacttagctcttcttctaggccactccgtgtcctgtgatgagtgtccattgagcatttgctgggggtggagacagggtttagcacttgtggaggctgratcccctgccccagggagctaagcatagtgggaggtgcagttctgggcagcctgggcagcagacggcaggcagagtcaaggggtgctccggtagagagcc

SEQ ID NO: 534660 - DNA, 201 bp, Homo sapiens
gatctgttcggttcacattgatgggaacatggctccagaggaaggaggaggggctcttcctatagctgaggtgtctccgttctggaatggagagaccctgrggccccatagtttgacctcaaactttgtgactcttgcggaaagggaagttgaggggcaggtgaaggggcgtggtgagagtcagtctactggacctgatga

SEQ ID NO: 534661 - DNA, 201 bp, Homo sapiens
gggttctgtgctggtcaggcaagtggagagaacactcatgtttcagcctgtcctgggctctgtgctgtacgctgtatttgtattgctcattaaacccttaycaactatgattattcccattttgcagatgagaaaactgaggcacagcaaggctaaataacttgcccaaggacacacaggaaatgcagagccaggaactga

SEQ ID NO: 534662 - DNA, 201 bp, Homo sapiens
tttgggcctttgctgtggacacagcagtccctgaagaaagtgccagcaccaacgcccacaagctcttaggctcattcgctagataacttttgtgctctctycacgcagctaatttccaggaagaaggcctcaaacattcccctgggccctggcccaccacagcccctccagtcctgccctctactcctcccaggctcggga

SEQ ID NO: 534663 - DNA, 201 bp, Homo sapiens
tgttcatccataacaagtggcaaaagacaaattacagcaaacttacttatagagccaattggctttaatttgtgattcatgaattggtgcagcctccgttytacaaaatagaatgcaagtttccattgggcaatagcagaacagtgggttttgtaaggtgggaaccaggaaacagaacaatagaaagaaacctgattggtt

SEQ ID NO: 534664 - DNA, 201 bp, Homo sapiens
agcgtggtcatgtcctggagcctcagcaggaaccctccaccagcgtccctaaagccttgttcctgggcacatttttaaaaacttgtatggtgatgtgaacwcaagactcagtcagagtgaaacagtgataggcaggcccaggaccccggcccctctctgccactcctccatgcccccatccccgcgggtcctctccgtgaa

SEQ ID NO: 534665 - DNA, 201 bp, Homo sapiens
tggcctcctgtgcagtgagcatcattatgaacctgttttgtaggtgaggcagtggaggctcacacatactgggttatgtgtccaaggtcacacagctgcgyaggggctgaggcaggacttgaatgcagactctgtctcattgtgaagactggacactcttcccccagcctggagctgtggaggtgggcctaggcagctagg

SEQ ID NO: 534666 - DNA, 201 bp, Homo sapiens
aggccaggccggaacctgtggaggctgcagccccccgtggccttgggggtttggggtggcaggaagtccaccccagggaccctggctgggtgggggtagasggacataggtttgttcagagggctccaggggcaggaaaagcacatttcttgtcccgcagagccccttcccaaaggtgaaatggatgtgagcaaatggggg

SEQ ID NO: 534667 - DNA, 201 bp, Homo sapiens
aggggcaggtggagaactgggagatagtgtgcttggattgtgcttcccgggatgagcacaggaaggagagaggcttctgctgtcctgaattgtacacgtgrgaactgaaggagaccccggaatctggagacacagaggtctctagggccttagaaaagctgatagatggggcgtgctgcgaagtccaggccgagccttaga

SEQ ID NO: 534668 - DNA, 201 bp, Homo sapiens
ccccgggtggtgctgtcaacacctgccggttggaggaggaggcaaggcccctgggggctgttgtcttagcaattgagtaactagggagcttggctataccsgaactggttcccaggccaggccggaacctgtggaggctgcagccccccgtggccttgggggtttggggtggcaggaagtccaccccagggaccctggctg

SEQ ID NO: 534669 - DNA, 201 bp, Homo sapiens
agactgtgggagcagtgtctgagaagccaccaggttcagtcctgttgtgtagcctccatgcctgtctctggggagggggctgcagcagggcagagccttgwgtctggtggaagggacagagtggccatcctcaaagaaggaagcagcctgccctagaccacaccacctaacgccaggctggaaaggaactgaagtttcact

SEQ ID NO: 534670 - DNA, 201 bp, Homo sapiens
aagctttttaaaaatttatttccttaacaaatacatacatagctcatactgtatgccaggcatcactctaagcattttataagtattaagcttgttcatcyataacaagtggcaaaagacaaattacagcaaacttacttatagagccaattggctttaatttgtgattcatgaattggtgcagcctccgttctacaaaat

SEQ ID NO: 534671 - DNA, 201 bp, Homo sapiens
ccgtctccagcccaagcctgctcctctccccatgctgactctaagcttttcagactgtgggagcagtgtctgagaagccaccaggttcagtcctgttgtgyagcctccatgcctgtctctggggagggggctgcagcagggcagagccttgtgtctggtggaagggacagagtggccatcctcaaagaaggaagcagcctg

SEQ ID NO: 534672 - DNA, 201 bp, Homo sapiens
ccttctcccggttcctgttctttcaagagccggcatcggccgtggcctcgtttctcaatggcctggccagcctggtgatgctctgccgctaccgcaccttygtgccagcctcctcccccatgtaccacacctgtgtggccttcgcctgggtaggtaacctagcaggactcctgctgtctcctcttatctaggaaggtggag

SEQ ID NO: 534673 - DNA, 201 bp, Homo sapiens
ctggtttccatagaattggataggacccatgtgtcctgcctctggatttggagtagcaatatctggaaggctttggagtctccccagagagtggtgctggrcctcttagagtggttgagatgcccaccttactgcagggacaaattcccttacctactgtggcttgtttcctgttgcttctccagtaggggtctggattca

SEQ ID NO: 534674 - DNA, 201 bp, Homo sapiens
aagtacacttgagctgtgttttggaggtaacattaaagctttttaaaaatttatttccttaacaaatacatacatagctcatactgtatgccaggcatcaytctaagcattttataagtattaagcttgttcatccataacaagtggcaaaagacaaattacagcaaacttacttatagagccaattggctttaatttgtg

SEQ ID NO: 534675 - DNA, 201 bp, Homo sapiens
tgaaggagggactttggactggtacattcgatttggaccatagtgggcaaagaaccaacgtattgagcactcactgtgtgacaggtgtcacaatatgtcargtaatttttatcacaccctttgagatagtttctctaatcccagttttacagatggggattagagagattaaatgccctgcccaaggtcacacagccagta

SEQ ID NO: 534676 - DNA, 201 bp, Homo sapiens
aaggggagaaagcttatggctgggtctggtttcttcccttcccagagggtcttactgttccagggtggccccagggcaggcaggggccacactatgcctgygccctggtaaaggtgacccctgccatttaccagcagccctggcatgttcctgccccacaggaatagaatggagggagctccagaaactttccatcccaaa

SEQ ID NO: 534677 - DNA, 201 bp, Homo sapiens
cctaaggtgatgagagccttaccagcctctcttactttcccagaagctttcatttacttatttgttcagtcaaaagggtatttattaaatacattcgggcyacaatgtctaggaatggcacagaaatcagaccagggtcccgcccattgggactcacagtccccacggggacatgagccttttcaagtgcaaggcagagaa

SEQ ID NO: 534678 - DNA, 201 bp, Homo sapiens
taggggtctggattcacagtaatatgcttcagcttgtctagcgaggcacagtttgctggtacctttctttcttttgttttttgttttttgtttttttttttgagatggagtctccctctgtcgcccaggctggagtgcagtggcatgatcttggctcactgcaacctctacctcccaggttcaagcaattctcatgcctga

SEQ ID NO: 534679 - DNA, 201 bp, Homo sapiens
gagcgagtctgccccagtggggatcctgcccccgccctgctggcctcccttctcccctcaacccttgagatgattttctcttttcaacttcttgaacttgsacatgaaggatgtgggcccagaatcatgtggccagcccaccccctgttggccctcaccagccttggagtctgttctagggaaggcctcccagcatctggg

SEQ ID NO: 534680 - DNA, 201 bp, Homo sapiens
tggtgccattcctggagaaggaggttctagagagactcttggggtagaggaatggagaagaatttgaggtgggagagagaggaggctgggaggagagtccraggatgatcctggggtcagagagcatggagtttcgggtggccttggggagaaggagccgaaggaatgagtctctcctgcccccactggcacccaggcctg

SEQ ID NO: 534681 - DNA, 201 bp, Homo sapiens
gactcttggggtagaggaatggagaagaatttgaggtgggagagagaggaggctgggaggagagtccaaggatgatcctggggtcagagagcatggagttkcgggtggccttggggagaaggagccgaaggaatgagtctctcctgcccccactggcacccaggcctggtcaacgtggtgtggtggctggcctggtgcctg

SEQ ID NO: 534682 - DNA, 201 bp, Homo sapiens
cttttcaagtgcaaggcagagaatgatttgagcccctgaaagactctttgattaggaagcatttgggataggaaggtgtcagttccggctttgaagacgtrggggcagggatcatcttggaacgttttgtttgaaggagggactttggactggtacattcgatttggaccatagtgggcaaagaaccaacgtattgagcac

SEQ ID NO: 534683 - DNA, 201 bp, Homo sapiens
ggaagcttgggctgagaagggcagggccctttgaccaggtcaagaggagcagaagcagcaaggctcagcccagagcccaggccagacaggtgcactaggcrgccttgcgccttccagagcttggcaccccgagaacctgactggctgtgcagcagttctgccccgcctgtaccccttctcctcccattctctcctgagctc

SEQ ID NO: 534684 - DNA, 201 bp, Homo sapiens
actcttggggtagaggaatggagaagaatttgaggtgggagagagaggaggctgggaggagagtccaaggatgatcctggggtcagagagcatggagtttsgggtggccttggggagaaggagccgaaggaatgagtctctcctgcccccactggcacccaggcctggtcaacgtggtgtggtggctggcctggtgcctgt

SEQ ID NO: 534685 - DNA, 201 bp, Homo sapiens
ctcgagagtgggcagcccctctacctcctggagctgaactggggtggaactgagtgtgttcttagctctaccgggaggacagctgcctgtttcctccccaycagcctcctccccacatccccagctgcctggctgggtcctgaagccctctgtctacctgggagaccagggaccacaggccttagggatacagggggtccc

SEQ ID NO: 534686 - DNA, 201 bp, Homo sapiens
attgcactccagcctgggcaacaaaaacaaaactgtctcaaaaaaacaaacaaaaaaaagacgaatatctctaattgctcactaaaatatgcatacatacrtacatacaccttcccctatgtgtacatctcatcatctctcattcattcaaaggggaagctagaattttgagatttctcctggttctctccaacttacagg

SEQ ID NO: 534687 - DNA, 201 bp, Homo sapiens
ttgtcccgggggaagcttgggctgagaagggcagggccctttgaccaggtcaagaggagcagaagcagcaaggctcagcccagagcccaggccagacaggkgcactaggcggccttgcgccttccagagcttggcaccccgagaacctgactggctgtgcagcagttctgccccgcctgtaccccttctcctcccattctc

SEQ ID NO: 534688 - DNA, 201 bp, Homo sapiens
ctctgtgtgcccatccgccccctcccaccttgcctgcatgcaccccacccttgtctccatgcgagctgtcagagctgtgtgcctcaatgggctactccttyggcccacagctttctggaagatgacagcctgtacctgctgaaggaatcagaggacaagttcaagctggactgaagaccttggagcgagtctgccccagtg

SEQ ID NO: 534689 - DNA, 201 bp, Homo sapiens
tggatgcttgttctttggccagccaaggttcacggcgattctccccatgggatcttgagggaccaagctgctgggattgggaaggagtttcaccctgaccrttgccctagccaggttcccaggaggcctcaccatactccctttcagggccagggctccagcaagcccagggcaaggatcctgtgctgctgtctggttgag

SEQ ID NO: 534690 - DNA, 201 bp, Homo sapiens
actgcaacctctacctcccaggttcaagcaattctcatgcctgagcctcccaagtagctgggactacaggtgtgtgccaccacacccagctaattttttgkatttttttttttttttttttaagtagagatggggtttcaccatgttagccaggatggtctcaatctcctgaccttgtgaccctctcgcctcagcttccca

SEQ ID NO: 534691 - DNA, 201 bp, Homo sapiens
cagtcctgttgtgtagcctccatgcctgtctctggggagggggctgcagcagggcagagccttgtgtctggtggaagggacagagtggccatcctcaaagraggaagcagcctgccctagaccacaccacctaacgccaggctggaaaggaactgaagtttcacttgagccatgatttgtcccgggggaagcttgggctga

SEQ ID NO: 534692 - DNA, 201 bp, Homo sapiens
gtgactgccggtgaatgtgtccacagttgagaggttggagcaggatgagggaatcctgtcaccatcaataatcacttgtggagcgccagctctgcccaagrcgccacctgggcggacagccaggagctctccatggccaggctgcctgtgtgcatgttccctgtctggtgcccctttgcccgcctcctgcaaacctcacag

SEQ ID NO: 534693 - DNA, 201 bp, Homo sapiens
tcttctggatggcaactctgtgctgtttccaccaggccatactgagtcatctaccctgacccatctggtcttcccagagatcagggcttacagtgctgtgsctgctggccaggatgggggtataactcttaactaggcactggagggtggctcattagtctgaagaggtactgaacctgaggctttggccaaactccagag

SEQ ID NO: 534694 - DNA, 201 bp, Homo sapiens
agagggctccaggggcaggaaaagcacatttcttgtcccgcagagccccttcccaaaggtgaaatggatgtgagcaaatgggggtccctgccttgaggtcrgggtggggggcagcatgctcaccagcccctccctccttaggtgtccctcaatgcatggttctggtccacagtcttccacaccagggacactgacctcaca

SEQ ID NO: 534695 - DNA, 201 bp, Homo sapiens
ctccccaggggggaggggcttttcaggggtgcagaggccaggcttcaggtgggtctctgtgagtggaaggcacccagggaggcggttggagaggggacccrgcagccccacccatcctgtggccctacgcacatgtttgcccgcacacacaccccctgctttcggtgttctgagccacttagctcagtcctgcagtcctct

SEQ ID NO: 534696 - DNA, 201 bp, Homo sapiens
gccgtggcctcgtttctcaatggcctggccagcctggtgatgctctgccgctaccgcaccttcgtgccagcctcctcccccatgtaccacacctgtgtggscttcgcctgggtaggtaacctagcaggactcctgctgtctcctcttatctaggaaggtggagctctacatccctattaacacccaacagggcttctactt

SEQ ID NO: 534697 - DNA, 201 bp, Homo sapiens
accccttgtccctctttgagggaggggagctatgctaggactccaacctcagggactcgggtggcctgcgctagcttcttttgatactgaaaacttttaargtgggagggtggcaagggatgtgcttaataaatcaattccaagcctcacctgcccttgttcagctcatttgtgtgaatagggtgggctggagggcaggag

SEQ ID NO: 534698 - DNA, 201 bp, Homo sapiens
cccctgctgcttggaacacaccccaagctggctcgagcccctccaccccacccacctcattcccgcccccagaggctgaggtcactggctcccctgggccbcgggtggtgctgtcaacacctgccggttggaggaggaggcaaggcccctgggggctgttgtcttagcaattgagtaactagggagcttggctataccgga

SEQ ID NO: 534699 - DNA, 201 bp, Homo sapiens
ccctctcctcagtgtttacgcaaagctctgggtgcctgctgggcagcctgtcgccctcctggccagttcccctccctgccccccttcacttgagcgtggcraggagtccgagagtagccgtgccttggcatcttggaactctccttccttccagagcccatctttcccctttgcttgctcttgatgacaaactctgagtga

SEQ ID NO: 534700 - DNA, 201 bp, Homo sapiens
gcagtctccgtggttgaagcagactggatttttgctctgcccctgaccccttgtccctctttgagggaggggagctatgctaggactccaacctcagggastcgggtggcctgcgctagcttcttttgatactgaaaacttttaaggtgggagggtggcaagggatgtgcttaataaatcaattccaagcctcacctgccc

SEQ ID NO: 534701 - DNA, 201 bp, Homo sapiens
cctggtgcttcgtatgtttctttttccctgccttcattttttctggcttttagagccgatggagcagcacatctgtggacaaccttgtccccaatgaccastttccccctgtgccttattaggaaaggcctcatcaccccagaggagcttatgcaatgactcagagccaattcctgtaagaaacactgtggacagagctgg

SEQ ID NO: 534702 - DNA, 201 bp, Homo sapiens
cgctcctccccacccgaggagtcagctagaggaagtgggcctagatcagggtgccgggcttgtgtgcaggctgtgtgcacgtgcggtgttttccctccttscccagctctggttaacaagatcctctttcccttacagatccccagacgaggccttgcctggaggtcttagtggctgcagcagtgggagtggccactcccc

SEQ ID NO: 534703 - DNA, 201 bp, Homo sapiens
tatgtatccaaacacgtttcagcgtcagggtcactttgtttttcccattcatctgtccaaaggcaaaacaacgagtggatgagaaacccagcctgggagcygtgaagctgcaggaggccccctcggctgcctcccagatgaagcgaaccggagcgatcaagcctcgggctgtcaaagtggaggagagtaaggcctgacagt

SEQ ID NO: 534704 - DNA, 201 bp, Homo sapiens
tggtcactggggatgcggctcgttgctcagccaccagtggccttgcggtattgtccaccatccactagagtgggatgaagtccagagtgtgggtatacatytcagatgcccatctacccactggggacttcaatgccagctgcatttggtttggttttcttaactgttggcttctccccacagcgttttttgttttttttt

SEQ ID NO: 534705 - DNA, 201 bp, Homo sapiens
gtggtggcgcgcacctgtaatcccagctactcgggaggctgaggctggagaatcacttgaacctgggaggcagaggttatagtgagccaagattgtgccastgcactccagcccgggcgacagtgtgagcctctgtctcaaaaaaagaaaagaaaagaaaagatggagggcattaaagaaaacattgtacaagcaggttaa

SEQ ID NO: 534706 - DNA, 201 bp, Homo sapiens
tcagcgtcttttgtctcactttttttggcccctgtttgtaatcgattttcgctccctatgtttcatttggatcataatatagttgtgtgtgtgtgtgtgtktttttgatggagtcttgctctgttgcccaggctggagtgcagtggtgcgatctcagctcactgcaagctctgcttcccgggttcacgccattctcctgcc

SEQ ID NO: 534707 - DNA, 201 bp, Homo sapiens
tagctttgttttccagtgagaagtgatgatcacttatacaagtgttttatttttttgttgtttttgttcttgttgttgagatggagtcttgctctgtcacycaggctggagtgcaatggcacaatctcggctcactgcaacctctgcctcctgggttcaagtgattcttctgcctcagcctcctgagtagctgggattaca

SEQ ID NO: 534708 - DNA, 201 bp, Homo sapiens
tctcgaactcctgaccttaagtgatctgcccaccttagcctcccaaagtgctgggattacaggcgtgaaccaccacgcccagccaggcgcttagtattttdagtgagtgagtgagtgagtgagtgagtgagtgaactgatgaggagagcactagtagactcatggacacctgtagcacattagaaagtggcagaggaggga

SEQ ID NO: 534709 - DNA, 201 bp, Homo sapiens
tgcttgaacccgggaggcagaggttgcagtgagccgagatcatgccactgcactttagccagagtgacagagcgagattccatctcgaaaaaaaagaaaaraaaaaaaagttcttattgtaggtcgggcgcagtggctcacacctgtaatcccagcactttgggaggctgaactgagcagatcacatgaggtcaggagttc

SEQ ID NO: 534710 - DNA, 201 bp, Homo sapiens
cgggcgcagtggctcacacctgtaatcccagcactttgggaggctgaactgagcagatcacatgaggtcaggagttcaagactggcctggccaacatgttraaaccccgtctctgctaaaaatacaaaaattagccaggcgtggtgctgcataactgtaatcccagatattcgggagactgaggcaggagaatcgcttgaa

SEQ ID NO: 534711 - DNA, 201 bp, Homo sapiens
gcctggcaaaataataacacataataccctttgacctagcaagtgcaccctgaggaaattgctctacaaattatactcgcccgtgtgtgaaatgacttgcrcataagattattcactgcaacattataatagcaaaagattgcaaacagtcccttgaaatgcctgtaaaattatggtactttaatgaaatgtgatttggct

SEQ ID NO: 534712 - DNA, 201 bp, Homo sapiens
tctcggctcactgcaagctccatctcctgggttcacgccattctcctgcctcagcctcccgagtagctgggactacaggcgcccgccaccacgtctggctratttttttttgtatttttagtatagatggggtttcaccatgttagccaggatggtcccgatctcctgacctcatgatccgcccgcgtcggcctcccaaag

SEQ ID NO: 534713 - DNA, 201 bp, Homo sapiens
ccaggctggagtgcagtgcatgatctcggctcactgcaacctccacctcttgggttcaagtgagtcctgtctcagcctcctgagtagctgggattacaggyatgcactaccacgcccagctaatttttgtattttcagtagagtcagggtgtcgccatgttggccaggctggttccgaactcctgacctcaggtgcacctc

SEQ ID NO: 534714 - DNA, 201 bp, Homo sapiens
catgtgccaccacacccagctaattttgtatttttagtagaggcgggtttctccatgttggtcaggctggccttgaactcctgacctcaggtgatccgccygtctcagcctcccaaagtgctgggattacaggcgtgagccaccgcgcccagcctgtttgcatcattttaagggacacgaattatgtctttctggggttaa

SEQ ID NO: 534715 - DNA, 201 bp, Homo sapiens
gactctttacactgtggtacttgtttcctaccaagatggggacattccacccaggtaactacagttacttccaggaaattagccttgataattgattgtcrtttaatctgcaggccccattcagcttttaccagttgtcccattaatgtccttactcgaaataatccagttcagaatcacacacctctagccttctttatc

SEQ ID NO: 534716 - DNA, 201 bp, Homo sapiens
tataagagaaactgtagggagcatctcggcatgttaagtcttggtccacgtggctgattatctcccataagtggaatttctggggtcagaggattgcaggyttgttcttctcttctggacaggatcggttgtctccttcagtctttgtcacctccctctccagccttgagcccaaggcagtctctttcttagttttttctt

SEQ ID NO: 534717 - DNA, 201 bp, Homo sapiens
tcctgttatccagcctttactctgcctttgcggctccagtgagggctagttgtgctggagcacatccgccagggaagaggtgaggatggagtgttggtgarggcatagacccccgtgtagttctctgctgccccaggccacatcctcccaccaaggtatcaggtggcaagtgggcccacaacgtggggactcagtgcttag

SEQ ID NO: 534718 - DNA, 201 bp, Homo sapiens
aaagattgcttcactgacaccagacaggccagtgatcttccctgtttctgtcaggccacccaagggacagggagaaagaagtgaggctggcgtcctgtctyctgtgccgtggggaaaatctggccatctcgctcatatgtggctccagtgaatgctgctcagtggagtttttgagtcgcggaaactgcatcacgttaatgt

SEQ ID NO: 534719 - DNA, 201 bp, Homo sapiens
atcatcttcctcaattcctgggacagtagaagctagagagtgtggtcattccagtctgtgtgtctccacctctctgcttttttatcaaggattcagaacarggctctggacagagcaaggagcacagaccaggacccatcggcaacgagcgttctctgaaaaacagaaagggctcggagggggccgagcggctgcaagggg

SEQ ID NO: 534720 - DNA, 201 bp, Homo sapiens
tcaaggattcagaacaaggctctggacagagcaaggagcacagaccaggacccatcggcaacgagcgttctctgaaaaacagaaagggctcggagggggcsgagcggctgcaaggggctgtcgtcccgcctgttaacggggtggagattcacgtggactccgtgctgcctgtgccacccattgaatttggagtcagtccaa

SEQ ID NO: 534721 - DNA, 201 bp, Homo sapiens
cagcacatgtatttcaggctgacctgggctggcacgtgactcagttgctagcagctccatgtccttaaaaggtgcttaaatgttcctgcccaggttttgtraccttccagtggggatcatacagttcctaagggctggtttatttggctctctttggttccattgtctcctctgtgccaggtgcgagcccagactcaggct

SEQ ID NO: 534722 - DNA, 201 bp, Homo sapiens
atcagtcatggtcctggctgccatcagtttcatctgggtggtcttgggtacatgtggccaatactgaagatgcatttggacaattcatagacacggagctstaggtgcttttgggaaaagccatggatgggtttgggcaagtcatagatacatttggacgagccttgagtgtgttcaggagagccatggatgggttttggc

SEQ ID NO: 534723 - DNA, 201 bp, Homo sapiens
ctgaaggataatactctggctgccctcctttgatttggttttgcttgcccttgagatgaacagccgtggtgtaagtgggttgtgtacctcccctattctgstagccttattttcagtgttatacatggatgtgttaaagtactgagcatttatttttccatcttgagctgtccttgacttggagagggctctgttgaagtt

SEQ ID NO: 534724 - DNA, 201 bp, Homo sapiens
tgtggaaatcagaaatgtatgggtcccagaagagaacttgtgggtcagcctgctttccagagagtgccgaggccctttgaatggtgaacattatgcaagcrttcttgtatggccagtggccagcagggaggagggcagagaatgactgtgcctccgggaagccggcgtcaacttcccgacacgcttcaggatcatctcttt

SEQ ID NO: 534725 - DNA, 201 bp, Homo sapiens
cagcctcccaaagtgctgagattataggcatgaggcactgtatttgtcttcttgttatagttaaaaaaaattaaaacagccaggcatggtggctcacacartttgcaaggctgaggcagggggattgcttgagaccaggagttcaagaccatcctggccaacacagtgaaaccctatctccaaaaaaaaaaaaaaaaaaag

SEQ ID NO: 534726 - DNA, 201 bp, Homo sapiens
tctgtacacacgccctcgtccccactgagtcccctgggtagagcagacctgtagactgtttccctcagggacattgagaagtagtgaggcttgatcctctwctacgtcccttttgccgctctgtttccaggcagccacctcccgcccctgtacctggatggccatgtgtttgcaagtcagccccggctggttcctcaaacg

SEQ ID NO: 534727 - DNA, 201 bp, Homo sapiens
ttgaattttgggcagtgttccagcagccatgtggagaggggcaggggaggtgggaggggaagaaccacctggatgggccttgcggttacctccccgacccygttttcccgttcacaggccgccgctgcccagcagatcccgatctcccttcacacatctctgcaggcacaagctcagcttggactgaggggtgggcttcct

SEQ ID NO: 534728 - DNA, 201 bp, Homo sapiens
ttattatatttagatattccaactatgatatttcatgcattccattcttattcttctctttctgtgccttttcttctaattcctgccttttcttggtcctrttgtttttcttttgcttctacatttcatttctatatgttagtggttacatgaaaattctaacatgcaccttcaacttagcaaagcatttggggaggtaga

SEQ ID NO: 534729 - DNA, 201 bp, Homo sapiens
aacctgaagggccttgacgatctggacgccgatgccgatgatggctgggcaggtgggcagagaagcacgggtggtttagacgggcaggaccaaagtccatmtgtacttaccagggatggaaaccccctggcaccaccgtgtgttttcccttggcaagatagggatgaagagccggacagggaagcagacctgatgccctcc

SEQ ID NO: 534730 - DNA, 201 bp, Homo sapiens
ttctgagaatctccctgcatctctgtcttcctgagaattaaaggggtccactagcagatcctaaacacctgggagtttgtcctcatggtgtttgaaggtcygctctctgtaccagcacccttaaactgtgacacttaaactgtgacacaccaacgtggggacgggtccccagtgcacaggaggaggtagaagcacaggtgc

SEQ ID NO: 534731 - DNA, 201 bp, Homo sapiens
attcttctctttctgtgccttttcttctaattcctgccttttcttggtcctattgtttttcttttgcttctacatttcatttctatatgttagtggttacrtgaaaattctaacatgcaccttcaacttagcaaagcatttggggaggtagaaatctgaagtctctgtcccttaaacctccatgaaagtaagcatgtgagt

SEQ ID NO: 534732 - DNA, 201 bp, Homo sapiens
ccctggcaccaccgtgtgttttcccttggcaagatagggatgaagagccggacagggaagcagacctgatgccctccttcctcatttactccctgactagmggttccttcctggccaagccattagcttcttttggtctttagtcttgatcttagagttttgttgttaactttttaaaaattattgatgatgcaaaattta

SEQ ID NO: 534733 - DNA, 201 bp, Homo sapiens
gctgaggcaggagaatcacttgaacctgggaagcagaggttgcagtgagccaagatcgcaccactgcactccagcttgggcgacagagggagacactgtcycaaaaaaaaaaaaaaaaaacaaaaaaaaaaaaaaaaaaaaaaggaaagagaaagagtctggctgtgtttcccattctggagtggagtggctgtttgcagg

SEQ ID NO: 534734 - DNA, 201 bp, Homo sapiens
tcagccttccaagtagctgggattacaggtgtgggccactatgccctactaattgttgtatttttagtagagacgaagtttcaccatgttggccaggctgrtctcgaactcctgacctcaggtgataggtccgccttggcctcccaaagtgctgggattacaggtatgagccaccatgtccagtccttaattttgaatctt

SEQ ID NO: 534735 - DNA, 201 bp, Homo sapiens
tcccagctacttgggaggcggaggcaggagaattgcttgaactcgggaggcggaggttgcaatgagccaggatcgtgccactgcactccagcctgggtgayagagcgagactccatctcaaaaaaaaaagaaaatacagttgatttttttgtgttcactggtaccagacactttgttgaatatacattagttttactagtt

SEQ ID NO: 534736 - DNA, 201 bp, Homo sapiens
ttgatggtggcattcagatcttactgtatatttactgatgtttttgtctgcttctatgagttaaggaaagtgagatgttaaactccaattatggatttatstgttcctccctttaatactgttggtttctgcttcatttattttgaagctgctattaggcatacacacatttatagtttctatgcctttctggtgtgtttc

SEQ ID NO: 534737 - DNA, 201 bp, Homo sapiens
ttaccttttaaatttttttaattttaatttaatttattttttctagagttgggatcttgctctgttgcccatgctggtcttaaactcctgggctcaagcartcctcccaccttagtctcctgtgtagccaggactgcaggcatacatcatggtgcttagttagccttgtgtttgaggcaagatcttgctctgtcgcccaag

SEQ ID NO: 534738 - DNA, 201 bp, Homo sapiens
tgttatgcagaccacgtcttcatggattgcttgtggctgtcgtgcccaaaaaggctgctgtggccaagcaagtttgggaaacctccctgggttcaacttctttttttttttttttttttttgagacaggctctcactctgtcacccaggctggagtgcggtggcatgatgtcagctcactaaaacctccatctcctgggct

SEQ ID NO: 534739 - DNA, 201 bp, Homo sapiens
tctagcagtggagcgtacgggccaacaggaagaagtacttgtttgtaaacacttggttggctgagcttctgtgagctcactgtgtcatttctctgctggtrtattctctaggctccccagaattccctgcccaagagacccccaccacattcccagaagaggcacccacagtgtccccagcagtggcacagagcaacagca

SEQ ID NO: 534740 - DNA, 201 bp, Homo sapiens
tctactaaaaatacaaaaaactagctgggcatggtggtaggtgcctgtagtcccagctactcgggaggctgaggcaggagaatggcatgaacccgggaggmggagcttgcagtgagccgagatcacgccacatgccactgcactccagcccgggcaacagagcgagactccacctcaaaaaaaaaaaataccccacaatta

SEQ ID NO: 534741 - DNA, 201 bp, Homo sapiens
gatgtactcgtttgctcattatatatttcttttaaaggaactgatagaaataattaaatcaaacatgaacctttgcagtgtggaatttatttttggaaagrtatttgattttgcttccgtctgtatactggacatgattccatcatcttttcttttatcagaaaagaaaacaggctgggattgtctcgcccactccgccca

SEQ ID NO: 534742 - DNA, 201 bp, Homo sapiens
ttctagcagtggagcgtacgggccaacaggaagaagtacttgtttgtaaacacttggttggctgagcttctgtgagctcactgtgtcatttctctgctggyatattctctaggctccccagaattccctgcccaagagacccccaccacattcccagaagaggcacccacagtgtccccagcagtggcacagagcaacagc

SEQ ID NO: 534743 - DNA, 201 bp, Homo sapiens
ctgtcctccatggcccgtccttgacaccctgcccatagtcatcttctaaaaacacaggtcttttagacaggtcagcagctttactgtggtctccatttctsacaaagtcagataggaatcaccgttgtcccctctgtaattgttgtcccctctgtaattgtcccctctgtaatctcctaagctatgttacctgcctcgtct

SEQ ID NO: 534744 - DNA, 201 bp, Homo sapiens
taccccgtcttcttgacaggtttaaggggctcaagccgactgttatccttctctcccgaggaatttccgacgctgaaagcagctggagggcaggacaaggstggcaaagaaaagggcgtcttagatctgtcgtatgggccaggaccaagcctccgccctcagagtaagtgactgcagcctctgggcactcgatggagtaac

SEQ ID NO: 534745 - DNA, 201 bp, Homo sapiens
agagcccacctgcctcctccctcctcctaggtctgacgctgcaccctccctacgttccctgaggtgcgtgccaggcgtgttgtgagcaggcgtgtgcttcmggcacacagggaacctagcagcctctgtacacacgccctcgtccccactgagtcccctgggtagagcagacctgtagactgtttccctcagggacattga

SEQ ID NO: 534746 - DNA, 201 bp, Homo sapiens
cagacggcgggggcaggtccagggtgaggctgggtggagggctgaccaaggtccaaagggcctgcgcagcctccgggagggcagcttctccagccagaggyttgtgtgagccatcgtgtgctgggcttgtttttaagtaagaaacaaggaaatcactccagattctgtcattccaaggaaagggaaggggacagttcaggt

SEQ ID NO: 534747 - DNA, 201 bp, Homo sapiens
accctagggggcagagggtggcatggtgctgtcaatcagagaaacagcccctgtgtggtgggctgaaaacacagggcctggctgcctggggcccacttggwtggctgcacctttgtctcctgctgcaagtcctctctgagtgtttagccagtgctaagacaattcagggaaggggatgtgttcagggagggacagggcctt

SEQ ID NO: 534748 - DNA, 201 bp, Homo sapiens
tgtttgtctgctgccctcctgtgaggagcagcagaagtggggggcctgaagcttctgaggtttgccactcaggttctctcttcacttttttggggggtctyctttccccaccccttccccctctgaccctggtgttctcaagtctagacttctcttgtttaatgtatccagtgggggagggaaggggccgtaggtgtctag

SEQ ID NO: 534749 - DNA, 201 bp, Homo sapiens
agcagtaggacactctgtgttccttgtctctttgaggcgatgggaactgcatattcccctgaaggaactggacattggttttggagacagttttgcccctractttgaccaagggcacttcaaaatcagagtgcccgaacgatctcctcctgaaacctgctctttttcttcatgttctctgagctggttggtgacctggta

SEQ ID NO: 534750 - DNA, 201 bp, Homo sapiens
agaaccggcccttcaggagaaggcgccccccacgccaagataagccccctcgattccggcgcctccggcaagagcgggagtccctgggcctgtggggaccygaggaggagccccacctgctggcaggtcagtggccaggcaggcccaaactgtgttctggggacaagagtggcactgtgggccgcaggtcccctgagctct

SEQ ID NO: 534751 - DNA, 201 bp, Homo sapiens
agcagaacaacttatgtctggagcaaggtgacgtgaccgtgcctggcagcagcctgggcactgagatctgggagagcagcagccagggtgagagttggggrtgtgaccccagctgtggcacccaaggtcacatcacacactgggtttgcttctggggaggatcctgcttttgagctacgaatatagatggaatacagatgg

SEQ ID NO: 534752 - DNA, 201 bp, Homo sapiens
ctggctggaaatttctccttggaagccgagggtggctggaggttaaggtggtgtttaggaatgtgattttccacgtgttctactcagggattttgaagtgkctcatgtagtccaggggtcttgatcaggtcttaaattgtgaggccttttgtttgcttgccttgatgtatccccaaggcctctcccattcaagtcataagt

SEQ ID NO: 534753 - DNA, 201 bp, Homo sapiens
cttttagacaggtcagcagctttactgtggtctccatttctcacaaagtcagataggaatcaccgttgtcccctctgtaattgttgtcccctctgtaattktcccctctgtaatctcctaagctatgttacctgcctcgtcttccctccctcgccacgtacgtgtgtgggtagacacacaggcccacacatctgccatccc

SEQ ID NO: 534754 - DNA, 201 bp, Homo sapiens
tgaatttactgggaggacatagttcaaggaatagttgcagacagactgacatctcgtaaacacaattctaaatttctaggagagtgtctcatgtttgggcraggttttttgttttttgagatggattctcactctgctgcccaggctggagtgcaatggcgcaatcttggctcactgcagcctctgcctcctgggttcaag

SEQ ID NO: 534755 - DNA, 201 bp, Homo sapiens
gaaggggtggaaaacatttcacctggaacacagaaggtgcccagttaatatttgttgggtggttgaatttactgggaggacatagttcaaggaatagttgyagacagactgacatctcgtaaacacaattctaaatttctaggagagtgtctcatgtttgggcaaggttttttgttttttgagatggattctcactctgct

SEQ ID NO: 534756 - DNA, 201 bp, Homo sapiens
cctccctcgccacgtacgtgtgtgggtagacacacaggcccacacatctgccatccctgattcccgcttttctctgatctgcagtattaccgggcccttgyaaatgctttgccccagcaccattgcttccattgtgaggcgtccagacgagcatggcacccatccccttcttgtccagccacccctgcagctctgtttgga

SEQ ID NO: 534757 - DNA, 201 bp, Homo sapiens
ctatttctcattgtctgtctggttttccatccccctcacatgtggtgaccagcacctggcccgccacggcagccaggaggcatttgttaagcgaataatcsagacagggaagaggagtggagttggctgctccagactctgcttagttttcctttctcaaagttctccctcctgtgtcctagccggggaattagctaaaat

SEQ ID NO: 534758 - DNA, 201 bp, Homo sapiens
cagggtctcactatgttgcccaggcttgtctcaaactccagctcaagtgatgccaaagtgctaggattacaggtgtgagccaccatgcccggctgttcttmctttttttaagataaggtcttgctctatccttcacctcccaccctcaagcgatcctcccacctcagcctcctgagtagctgggactacctgtgtgctgcc

SEQ ID NO: 534759 - DNA, 201 bp, Homo sapiens
cctgtccatattggaaactgtgttctcattgatacctccagttccacagactttgttccacttcctcccagtgcatgtttgcacctcctttctgtgacagkgagaatctatctctcatcgtccctcgtatttatactcacttggtcagtctccccatgtatgaccaatctcatttctgctgccacactctctcccttgcac

SEQ ID NO: 534760 - DNA, 201 bp, Homo sapiens
gacaagaacgggagccccaacaaacagccatcctcggagcctgaatggactcccgagccccggagctccagcagccagcacccggagcagacgggcaggasccggaggtcgggacccatcaagaaaccagtcctgaaagccctcaaggtggaagacaaggagaaggagcttgagaagattaagcaggagctaggggaggag

SEQ ID NO: 534761 - DNA, 201 bp, Homo sapiens
agcccctgtggccacatccctgcctaggtgctgcctgtgcccctggggggccctgccccagcacatctccctctctttcatgcatcagatatcccttcccrtcagtacacagacgagctgcagtgctgaccccgtaatcccgccccccacacccctcgaaccactttcttcacccagtttccaggccgtcgctcctggctt

SEQ ID NO: 534762 - DNA, 201 bp, Homo sapiens
caccaaggcagaagttcattcagtcagagatgtccgaggcggtggagcgagcccgaaagcgccgggaagaagaggagcgccgagcccgggaggagaggctrgccgcctgtgctgccaaactcaagcagctggaccagaagtgtaagcaggcacgaaaggcaggtgaggcccggaagcaggcagagaaggaagtgccctggt

SEQ ID NO: 534763 - DNA, 201 bp, Homo sapiens
gctcctctaaagccagtggatgtgctgggcaccagagacaaatcatggagatggctgctggtggctcccaggttggcccagatggggtgagctgacatacyacaggcccatcccaggccccgtgggctctgcttctggggctccataccctgccctgcaggggtgctgtgtttttcacacatttctttccctgaagccttc

SEQ ID NO: 534764 - DNA, 201 bp, Homo sapiens
ccttgttaaacgttgacatcagtgctctccagccgtgctgtcaccctcctatcttctggatctgccttcgggatggtcagtgacagcttctggaagctgascacacacaggtgcacagccatgctgtggtctggcctgctacggcagcatggcagctctggtggagccttctcccttgccatttggttcccctgtgccaag

SEQ ID NO: 534765 - DNA, 201 bp, Homo sapiens
tccttccagccacttctagggacactggggaaccttgttaaacgttgacatcagtgctctccagccgtgctgtcaccctcctatcttctggatctgccttygggatggtcagtgacagcttctggaagctgagcacacacaggtgcacagccatgctgtggtctggcctgctacggcagcatggcagctctggtggagcct

SEQ ID NO: 534766 - DNA, 201 bp, Homo sapiens
tggtggctcccaggttggcccagatggggtgagctgacatactacaggcccatcccaggccccgtgggctctgcttctggggctccataccctgccctgcrggggtgctgtgtttttcacacatttctttccctgaagccttctgtaacctgtcattttccttccttcctcttccggagcctgctgctttctctggacctg

SEQ ID NO: 534767 - DNA, 201 bp, Homo sapiens
aagtgaggctggcgtcctgtctcctgtgccgtggggaaaatctggccatctcgctcatatgtggctccagtgaatgctgctcagtggagtttttgagtcgsggaaactgcatcacgttaatgtatgcctctggggaatgtagggccaggaggatctcagtgggctgtgtggccttttttattttttcaggactccgatttc

SEQ ID NO: 534768 - DNA, 201 bp, Homo sapiens
gaaggattcctccgcccgggtcccagccgccagtcctgaacaccagcagagaggtaaggggaccccatctgcctctgaccctagggagggggccttgtgtmaccaactttttctagcaagctaagtacccctgtgtggtagaaagagccagtggcgtgggactgccagggcagaaaggaaggtgaccatgtgtggggccat

SEQ ID NO: 534769 - DNA, 201 bp, Homo sapiens
gccactgcacccggcccccagttgactttttaaaaagaaaattcaagttgctcagggaggtataaaggctcttccccactctctctgaaaaaaaaaaccastgtgaggaagttcttgggattcctcccagaaaaaaacccacattatccacatgcacgtttgtattcttcaagcatgctgctgccctttcacgtgataaaa

SEQ ID NO: 534770 - DNA, 201 bp, Homo sapiens
gggtgccgggcttgtgtgcaggctgtgtgcacgtgcggtgttttccctccttccccagctctggttaacaagatcctctttcccttacagatccccagacraggccttgcctggaggtcttagtggctgcagcagtgggagtggccactccccctatgccctggagcgggcagcccatgccagtgctgaccttcccgaagc

SEQ ID NO: 534771 - DNA, 201 bp, Homo sapiens
ccaaagtactgggatttcaggtgtgagccactgcgcccggcctgctctttgctattgaaagggcttctattccacattcttataaaatgaaaatgcccctyagctacagtcttcttattgaatatttattgtatgccaggcacatacatatgtgctgggtacaagagatacagaagtgaaacaaaatagacacaatgccac

SEQ ID NO: 534772 - DNA, 201 bp, Homo sapiens
gcctcagaccagctggagagctgttctcttgcctcagccggcttcctgcttcacacttggatgctcaccggtgctttctccctgcctccggataggctagyttagcttggggtatgcatgtgtgttgatggatggaaactcggcaggtatttgaagcctggtaaagccctgctaacagcgccctggcctgatgtttgtgaa

SEQ ID NO: 534773 - DNA, 201 bp, Homo sapiens
gctgtagtgcagtggcccaatctccgttcactgcaacctccacctcccaggctcaagcagttgtcctgcctcagcctccccagtggctgggattacaggcrtgcatcaccacgcccagctaatttttttaaatatagttttagtagagacagagttttaccatgttgctcaggctggtcttgaactcttgggttcaagtga

SEQ ID NO: 534774 - DNA, 201 bp, Homo sapiens
gtttgacttatgctaacctgcgaggacttggtgcgtctatgccgggtctagtcccacagacctaggggtgagtcagagctggatggaaatgcctcagaccmgctggagagctgttctcttgcctcagccggcttcctgcttcacacttggatgctcaccggtgctttctccctgcctccggataggctagcttagcttggg

SEQ ID NO: 534775 - DNA, 201 bp, Homo sapiens
aaaggaaaaagaaaaaaaaaattaagtgcactggggaggtgaagaagcagaatgcatgccagctttcctgaatttatttgaccatgttaattttgtctctytttttttttttttttggatcatttccttggactagtttagttttgtttaatttcctttagaaaatactgcattgtactctcatccctctagtttttataa

SEQ ID NO: 534776 - DNA, 201 bp, Homo sapiens
cagctgtaggagcagagctggggtttaagctctttgcgtgttctctcagttgtgcccttgggcctctttggtttggggtaacaatgtgttagatcagaggyggcctgagaaaagtgcggaagtcctgtccaggtttctgtcgagcctgatgctagatctcaggcgcctgttgaattgggttgttcttgtctcctggtgagt

SEQ ID NO: 534777 - DNA, 201 bp, Homo sapiens
tctcacaagtcaagcttctgtattctaagggtagacaactacttggtttctgcctgctttgttcatcctcttgggccttgaaatagattttaaagatatawtgttcagatttaagaattgttacctgtgggagggttagtctaaccaagctgccctgctcttaccagaagccaaaactgcccttcagtcacaggggtaggc

SEQ ID NO: 534778 - DNA, 201 bp, Homo sapiens
tggtgccgcacacctgtaatccgagctactcaggaggctgaggtaggagaatcgcttgcacccaggaggtggaggttgcagtgagccgtggtcgcaccackgccttccagcctgggtgacagagcgagactccatctcaaaaaataaaataaaataaaataaataatagaaggaagtctgaaagcaccagggcagcctgtc

SEQ ID NO: 534779 - DNA, 201 bp, Homo sapiens
actcagggcttatggggagggagcagagacggcactcgcgccactttccttactaggaggggggtttctaagtctggtccttcaaccaagggactgacaayttaggggagctttccctgcaactcaggagcaggaagggagtggtgggaactatgtatccaaacacgtttcagcgtcagggtcactttgtttttcccattc

SEQ ID NO: 534780 - DNA, 201 bp, Homo sapiens
ttagtagagacagagttttaccatgttgctcaggctggtcttgaactcttgggttcaagtgatccgcctgcttcagctccccaaagtgctgggattacaarcgtgagccccggcgcctgggtagtaaaccattatttctgtggctgtcagttgtcaacattgatgggcttgattttagggtcagtgcttgtctaggccact

SEQ ID NO: 534781 - DNA, 201 bp, Homo sapiens
ccatcatgcctggctaattttttgtatttttagtagagacagggtttcaccgtgttagccagattggtcttgatctcctgacctcgtgatcggcttgcctyggcctcccaaagtgctgggattacaggcgtgagccaccgtgcccagcctaattttgtatttttaatagagatggggtttctccatgttggtcaggctggt

SEQ ID NO: 534782 - DNA, 201 bp, Homo sapiens
aactgagctgggcagcaggaactcgagtacgggagatggagccccctcctcggcatgtaccagcgattctaaggacccctctctccgcccggctcagcctrtccgaaaaggggcttcacagttcatgggaaatgtataccacccacctacataccatgacatgcttcctgcttttgtaagtcttcagagtgtacttttttt

SEQ ID NO: 534783 - DNA, 201 bp, Homo sapiens
cccgggttcacgccattctcctgcctcagcctcccaagtagctgggacgacaggcgcccaccatcatgcctggctaattttttgtatttttagtagagacrgggtttcaccgtgttagccagattggtcttgatctcctgacctcgtgatcggcttgccttggcctcccaaagtgctgggattacaggcgtgagccaccgt

SEQ ID NO: 534784 - DNA, 201 bp, Homo sapiens
cagtgagatcagaaatgcttggcctgagtgcaaaaacttaacatcaaatgtggtttgtcctaggaacagttgggaccctaggaggcagcggcagttgtcartgagctctgcagacagtgcggacgctaagcggactcgagaggaagggaaggactgggctgaagcagtgggtgcgtcccgtgtggtccgaaaggcgccaga

SEQ ID NO: 534785 - DNA, 201 bp, Homo sapiens
aaagccctcaaggtggaagacaaggagaaggagcttgagaagattaagcaggagctaggggaggagagtacccggctggccaaggagaaggagcagagccycacggcagaaaaggatgaggacgaagagaacgatgcctctctggccaactcctccaccaccactttggaggacaaaggccctggccatgccacttttggc

SEQ ID NO: 534786 - DNA, 201 bp, Homo sapiens
gctcttttccccttcctcagctccgccttgaacctcgagttccttttagacagttccagatgaatgaccaagacgggtgagtccattgcattacagtcacstgtgtagagatgagtgcggtggtgattctggtcaagatgaggggctgatgaatagaagtgctgtgtctcctggagaccacagagaacttaaccagctcag

SEQ ID NO: 534787 - DNA, 201 bp, Homo sapiens
tccacacccctgcatgctgtccagctcctgtagggactcctacctggcctccctgcaagtcagatcataccccaagtcagcactctataaatggcagcatsttcccatcattttcatcctgcaccattttggtgctccaaggaggagcatggtgttttgcggctctggccaccacaagtctcagtgatgtaattccaatag

SEQ ID NO: 534788 - DNA, 201 bp, Homo sapiens
ccacttgatgcaaaacagtaagagtcttgaacgtgtgtgctgtacaaaggaatgcagagatatacgtccgatgcagctttcatcttttgggacttggcttsgccattacttctgactttcctcactcgtcctctccttgcccaccccgccccgtgtgcacccataaatctggtgtgcacccacagatcctatgccgctctg

SEQ ID NO: 534789 - DNA, 201 bp, Homo sapiens
atgttagccaccagccagagaccgctgacacagcccatggtgttgagcgggagacaccccgggaggggacggcctttaacatctcctcctgggacaagaaygggagccccaacaaacagccatcctcggagcctgaatggactcccgagccccggagctccagcagccagcacccggagcagacgggcaggagccggaggt

SEQ ID NO: 534790 - DNA, 201 bp, Homo sapiens
ctttggggccagtggggcggggaggggtgggagtttgctctgaatcactcttcagtccgttgttaactgtgctctaggagaggcctggggcgagctgataygtggtgggccgtgttttgcttttccatgtcatcttgcctcctttccttgctccttcctcctcctctccccttgactccctgtctcctccccaccgcgggc

SEQ ID NO: 534791 - DNA, 201 bp, Homo sapiens
ccaccaaaagttctagagaggacaaagcattactccctcctgttatccagcctttactctgcctttgcggctccagtgagggctagttgtgctggagcacrtccgccagggaagaggtgaggatggagtgttggtgaaggcatagacccccgtgtagttctctgctgccccaggccacatcctcccaccaaggtatcaggt

SEQ ID NO: 534792 - DNA, 201 bp, Homo sapiens
ggaccacagcggtctagatgccaagagccgaggccctcgggcctttgggcgagccctccctccccggctgagcaattgcgggtatggacggagaaccttcrtctccaaagagtcaccccactggcagagcaaaagtccaggcagctcttggcaggaatatggcccttccgacacatgcggatcccggcgacctacagacag

SEQ ID NO: 534793 - DNA, 201 bp, Homo sapiens
gaactgggggataacagcgaggcactcctgcctactggtgacaggagcgagcaaaggcttgactttgagtcagacctgggtcatgtgctggagccgtgtcrcctcggctggtgagcagctcttgccgagccacagtgtcctctcctctcttacatgaaactccgtggggtggccacacccgtgaggccaggtcttacctgg

SEQ ID NO: 534794 - DNA, 201 bp, Homo sapiens
tatagcccattgcagcctcgatctcccgggctcaagcaatcctcccacctcagcttcctgagtagctgggactacaggtgtgtaccacgacatctggctgmtttttttttttttctttccattctgagtagagacaagatttcactatgttgcccaggctggtctcaaactcctaggctcaagagatcctcccacttcagc

SEQ ID NO: 534795 - DNA, 201 bp, Homo sapiens
tcccgcccctgtacctggatggccatgtgtttgcaagtcagccccggctggttcctcaaacgatacctcagcagcagagttaccaacaggtgacagcagcwagccaggtggcctggctgggggtggtggggaggagccagtgcaggacggaattggcttgctcatctatttctcattgtctgtctggttttccatccccct

SEQ ID NO: 534796 - DNA, 201 bp, Homo sapiens
ctatctctcatcgtccctcgtatttatactcacttggtcagtctccccatgtatgaccaatctcatttctgctgccacactctctcccttgcacatatgcyctccttgcccactcagatgtcattgtccccactcctggatgccctgaatgtccctgctgggccaactctgcctatgaatgtccccctcatctagcttggg

SEQ ID NO: 534797 - DNA, 201 bp, Homo sapiens
gctggttcctcaaacgatacctcagcagcagagttaccaacaggtgacagcagcaagccaggtggcctggctgggggtggtggggaggagccagtgcaggrcggaattggcttgctcatctatttctcattgtctgtctggttttccatccccctcacatgtggtgaccagcacctggcccgccacggcagccaggaggca

SEQ ID NO: 534798 - DNA, 201 bp, Homo sapiens
ctgacataggtccccaagtctacttactggcagcaggaatgaaatgggagagatggtggtaggattaattaggaaaccccatgactttcctgtttcttttycccattttccactttataaaacacattctgatttaagtggaaattgcagtttcagccattaccagcaaatcctgttcattgatgttatgtttcagatgtg

SEQ ID NO: 534799 - DNA, 201 bp, Homo sapiens
agagtgaagtgactggatttgccttgggtgagaatctggctgttggtggcatggcgtaaataaaatgcttgtttttgaagctgtccaggatcatcatctgyacagttggccagaaagcagctgttgagcctgggctgacttatatcagaacccattgtgccgcctttcgtgtctgcaccggtactcccactgggaaagcag

SEQ ID NO: 534800 - DNA, 201 bp, Homo sapiens
tggatatgattttagcctttggttctttagaaacaggagaggcaggttttccctgacataggtccccaagtctacttactggcagcaggaatgaaatgggrgagatggtggtaggattaattaggaaaccccatgactttcctgtttctttttcccattttccactttataaaacacattctgatttaagtggaaattgca

SEQ ID NO: 534801 - DNA, 201 bp, Homo sapiens
acattagttttactagtttttgttgatttcttagagttttctacataaacccttatgtagtttgtaaataaggagttttacattgtctttttcagattacrtgccttttatttatttatttgtattttgccttattgcactgtggtatacttctagtataatattaacctcaagttctttctggtctgaggaagaaaatgt

SEQ ID NO: 534802 - DNA, 201 bp, Homo sapiens
gctctgtgtggccagcaaagctgagtacatttactgtctggccctttacagacaaactttgcagatctctcctgctgcaggagtgcagggtggagtctcckgtctccatgtccccagcaccaagtgacacagggtctggcacacacattggtcagtaaacgtttgagtatttgaagtaggtgaggtcgccttacttacgtt

SEQ ID NO: 534803 - DNA, 201 bp, Homo sapiens
ctaattgttgtatttttagtagagacgaagtttcaccatgttggccaggctgatctcgaactcctgacctcaggtgataggtccgccttggcctcccaaaktgctgggattacaggtatgagccaccatgtccagtccttaattttgaatctttaggtccaggaacctggtgtatctctttattagggctttcatttctct

SEQ ID NO: 534804 - DNA, 201 bp, Homo sapiens
ctgtgttagccaggatggtctgtatctcctgacctcgtgatccatccgcctcggcctcccaaagtgctgggattacaggtgtgagccaccgcgcctgtcatttttttgtactttcaatagaaatggggtttcaccatgttggcgaggctggtcttgaactcctgacctcaagtgatccacccgcctcagcctcccaaagtg

SEQ ID NO: 534805 - DNA, 201 bp, Homo sapiens
tcaagcaatcctcccaccttagtctcctgtgtagccaggactgcaggcatacatcatggtgcttagttagccttgtgtttgaggcaagatcttgctctgtygcccaagctggagtgcagtggcacagtcacagctcactgcaacgtcaacttcctgggcttaggtgattctctcacctcagcctccggagtagctgggact

SEQ ID NO: 534806 - DNA, 201 bp, Homo sapiens; identical to SEQ ID NO: 343807

SEQ ID NO: 534807 - DNA, 201 bp, Homo sapiens
ctccaagaaagaaaagtgacccccatcgactcaccccctgtgtggagcccagagggctacatggcactgcagagcaagggctacccgctcccgcacccgargtcgagtgacaccttggctatggacatgcgtgtcaggtgagatgaagcctggtcctgctgccttgccactgaaggaagactccaggtcctaattgagagg

SEQ ID NO: 534808 - DNA, 201 bp, Homo sapiens
aacccagtgttggccacaagtgaggactgagacccaggtcacctcttggctgaacatgttagcttgttggtaaatggctctgcagtggttctgcattttaktggggaatttgttttggttcattttggcattcccgcaaccatcttgttggttttttggtaaaatgtggcaccccctccagacctcttagctgtggaactg

SEQ ID NO: 534809 - DNA, 201 bp, Homo sapiens
ctgaatgctccatgctaaaaatgtttaataataaacaggatgtcgccactcggggcctgccagatgggtttttttttttttcctcctcttttgcctccccycaacccccaggagagaaattcagccctgttgaaactgtgggcctctgaagagtggatttgccttaagaggtggatttttttcctttttcttttttcctcc

SEQ ID NO: 534810 - DNA, 201 bp, Homo sapiens
ggccaggcccccgctcccctggggctggggctgggtcagcctccctcaggctccatcaggaaggaggaagggagaattaactgctgggtaggcagacaggrgtggtcccactaatattgccagtccctcggtttgctctcttgtaaaaatcctattttgagtccttatgtaggtctgaaaaagtctttttctgtccctaca

SEQ ID NO: 534811 - DNA, 201 bp, Homo sapiens
ttcagagagagctcgctgggagagttgggaatgccatgccccctcttcctggtggagagtagctctcccttgcaggcacagtgcagcaccccacactggargccctgctttggggtcagctgccttcaagtccaggttctaccacttagaagctgggtgacctggggccagcttttaaatctttttgaatctccattctct

SEQ ID NO: 534812 - DNA, 201 bp, Homo sapiens
tggcttttagagccgatggagcagcacatctgtggacaaccttgtccccaatgaccagtttccccctgtgccttattaggaaaggcctcatcaccccagargagcttatgcaatgactcagagccaattcctgtaagaaacactgtggacagagctggggcttgaggacttcattcctggtgatgggtgtccctgtgagct

SEQ ID NO: 534813 - DNA, 201 bp, Homo sapiens
cgaatttgtgttgcgctgcatccagagcccagggccatcctgggccacatgtggttggacaagcttgctttaaagtgaggatcatgaggacttttttttgyatcggtgaaatagtgtgacatatcgtgcctggggctctgtttaatgagagtgacttgataaatggtggggctgaaccgtggaattcacatggaagtagtg

SEQ ID NO: 534814 - DNA, 201 bp, Homo sapiens
cttccagccacttctagggacactggggaaccttgttaaacgttgacatcagtgctctccagccgtgctgtcaccctcctatcttctggatctgccttcgsgatggtcagtgacagcttctggaagctgagcacacacaggtgcacagccatgctgtggtctggcctgctacggcagcatggcagctctggtggagccttc

SEQ ID NO: 534815 - DNA, 201 bp, Homo sapiens
aagaaaatgttcaggatgcaggtgctcctgggggtcacacccaaaacctcaggtgttccccattggagcctgactttgtcccagatgagaaaaagccagartgtggcagttgggatgttagccaccagccagagaccgctgacacagcccatggtgttgagcgggagacaccccgggaggggacggcctttaacatctcct

SEQ ID NO: 534816 - DNA, 201 bp, Homo sapiens
tacaggtaaagccactccctggggactgcgtgctgtgtagctgagcagttgccagagctgcggcccagtgactcagaagaatctgggcccagggagagcckccagagacctggtccctctatgggccatgtgtcactgtggtgtttcagcactgggatgcacttgtgttccagttaaatttgggggagtgaggagtcagga

SEQ ID NO: 534817 - DNA, 201 bp, Homo sapiens
cctcaccaccgcaggcttcctcattgcttctccagtgctctgccctgccaccgctcaagggcctgctgctcttctgattcactttaccctagattagtttwgcctagttaacagacttcagatgagtggagtcatacagtttttactcttgtatggttttcatattcatcaatgttgtttatatgccagttgcttttagtt

SEQ ID NO: 534818 - DNA, 201 bp, Homo sapiens
gctctaggtgcttttgggaaaagccatggatgggtttgggcaagtcatagatacatttggacgagccttgagtgtgttcaggagagccatggatgggtttkggcaaagccatctctgcacctgtttgtgttccatggtttccttttcctcctctccaggcagggttaacacagagtatccccatcctgcggcgggaccatc

SEQ ID NO: 534819 - DNA, 201 bp, Homo sapiens
ccccgccgtcccacccccagcgcaccttttacccacaccacccccagatgttgggcttcgatcccaggtggatgatgatgccttcctacatggacccacgyatcacgcccactcggaccccggtggacttctacccctccgccctgcatccctcaggtaagcactgtggtctgacggtccatacctgtatcacccaggata

SEQ ID NO: 534820 - DNA, 201 bp, Homo sapiens
gtgtatagctttaccactctgaaagtctatgacttttaattgcaaaagttggtccttttagatttattgggatgatgattattattattattatttgagayagagtcttgctctgtcatgcaggttggagtgcagtggtgcaatttcaactcactgcaacctccgcctcccgggttcaagcgattcttctgcctcagcctc

SEQ ID NO: 534821 - DNA, 201 bp, Homo sapiens
atatttctgtaaggttagaattttttgttttgtttttgttttttttgagacagagtcttgctttgtcacacaggctggagtgcagtggcacaatagctcaytgcaacctccataaggttagaatttttaaaaatagatagaatatattaatttttatttaaaaagaactacaaaaattaaaagaaaaacttctgtataaat

SEQ ID NO: 534822 - DNA, 201 bp, Homo sapiens
ttctaacatgcaccttcaacttagcaaagcatttggggaggtagaaatctgaagtctctgtcccttaaacctccatgaaagtaagcatgtgagtctgaatycctgggagggggacaattgtttccctgccctggtccaggccagacagacccgccagtctgttcctggtagtaaagcgcatgtgtctatctaatgtgcctt

SEQ ID NO: 534823 - DNA, 201 bp, Homo sapiens
gtagctgggactacaggtgtgtaccacgacatctggctgatttttttttttttctttccattctgagtagagacaagatttcactatgttgcccaggctgrtctcaaactcctaggctcaagagatcctcccacttcagcctcccaagtagctggggctgggatcacaggcgcatgcaccaccacgcctggcttattgatt

SEQ ID NO: 534824 - DNA, 201 bp, Homo sapiens
ttgcccttgcactgagtaccttagctttcggaacagctcggccaggccctgggctgggttctggggctgtagaggtgagcagagtaggtaggattcccacygagtgttgctcacagcccgttgaatccccgtgacaccctgcagcttccgggctttaaagagaggaagcctggggcccagagacgttcggtggtgtgtccg

SEQ ID NO: 534825 - DNA, 201 bp, Homo sapiens
gcttttagcattgttcattttctccattgtttgacttgttttctgtatctattttaaatgattttttaaatcattgaggcaattttttattacggggacawttctagattgctaatttagttgtcttacagccagagagcacattctgtatgatttcagttgttttcaagttagtaagacttgttttatgactaggatatg

SEQ ID NO: 534826 - DNA, 201 bp, Homo sapiens
cagacgccatgaggtatccccacgactacacaggtacttgtgggcctgaggagcgctctgcaagccgggcccccatggtctgcaagttgctccagctgcaycccctctgcctcgctgccctccctctgccctttgcctgtcctccatcacagcattccactcttgtaccttcatttccagagaaaggggtttttgtagatt

SEQ ID NO: 534827 - DNA, 201 bp, Homo sapiens
gtctcctggagaccacagagaacttaaccagctcagcgtggcagggtgtgtggggtggtggctgggatttggagctggatgacagattgagtcatgatttsaagtgcctggtagagttgaagttctggcacgtgtgtgttgctgctgccctaggccttagcaaccagcatgtaaaactgcaggacaaggcagaacttcttt

SEQ ID NO: 534828 - DNA, 201 bp, Homo sapiens
acgggtgcaggacagcgctcaggcttgggctctaagctctgtgtctagtgtagaacatggggaaggagcatcttaggaactgctgaagtaacttcttactkctctcacaattctaaggaagcgggagaacggcctcctaccaacagcgcccaccccagagctgcctgggaaagggcagttttactgaaaggtgctttactg

SEQ ID NO: 534829 - DNA, 201 bp, Homo sapiens
cctcagggctcgcccgccacccccgtacccccgaggccgggccgggctgcagaggccggaggggcgggggtcccgggcccgcagccgggtctcggggttcyggggccggcgtctttgctccccgccccgcccaattgacggagcagcgcgcccgaggcgggatcctgcggggtcgggccttgggtccggggcgctgagcgg

SEQ ID NO: 534830 - DNA, 201 bp, Homo sapiens
gagaaattcagccctgttgaaactgtgggcctctgaagagtggatttgccttaagaggtggatttttttcctttttcttttttcctccttctaaatatcgkgggaggtcggagcccacctttaggcaagaattggaggtgttttcagtggtgagcttgaaggaagtgggagaaggggggctggggagtgtcttttgctaaa

SEQ ID NO: 534831 - DNA, 201 bp, Homo sapiens
ctctggccctggtgcttcgtatgtttctttttccctgccttcattttttctggcttttagagccgatggagcagcacatctgtggacaaccttgtccccartgaccagtttccccctgtgccttattaggaaaggcctcatcaccccagaggagcttatgcaatgactcagagccaattcctgtaagaaacactgtggaca

SEQ ID NO: 534832 - DNA, 201 bp, Homo sapiens
atctatagatatctatagatagatagatagatatctatctatagatatctataggtgtgtgtgtatgtgtgtgtgtgtgtgtgtgtgtgtgtgtgtgtgtrtatatatgttttggagacagagtctcactctgtcacccaggctggagttcagtggcatgatctcagctcattgcaacctccaccttctgggctcaagcga

SEQ ID NO: 534833 - DNA, 201 bp, Homo sapiens
tgtgtgtgtgccttcagaggtcctcaggtcaggaaagattaagagccctatgatgtgtaggtgggtggggtgctgtatccacatgaaagtcagggtaactrttaacttctttggcctttggttgaccctgagattggagcagggctttctaaatgagatgatgtagatcagtctttgccttcttcaggactgatgaagccc

SEQ ID NO: 534834 - DNA, 201 bp, Homo sapiens
ggagttaactgggtcatgggtgagcatatggtggctgcatgggcagctgccagctctcagtgatggcaccaggtacatgagggtcatccttgctctgctgrcgctgtaaagatgttgcttctttgcaaattaaccgctggattccctgtaattctagtgaaaatcccagcagcttttcttttgttttagctgtttatttca

SEQ ID NO: 534835 - DNA, 201 bp, Homo sapiens
agaacaagcctgggttagagggtctgctggaaatggcctttgaagaccaaggataccaggatgtgtgcactctgtcgtgttctgtgatgaatgggaaacgbaggcttccagaaagccagctctcttctgaaatgtgacggacctaagcaggaagtcatccaggacaggagtggctcagtgttggggatggacgctgtcgcc

SEQ ID NO: 534836 - DNA, 201 bp, Homo sapiens
ggctccagtgaatgctgctcagtggagtttttgagtcgcggaaactgcatcacgttaatgtatgcctctggggaatgtagggccaggaggatctcagtggrctgtgtggccttttttattttttcaggactccgatttcagcttgccacctggttctgcctctggtcctactgggagtccagttgttaaacttcaggatgc

SEQ ID NO: 534837 - DNA, 201 bp, Homo sapiens
cattaggtcatagcctgttcctttttcttatttgaaggtgtttttacctttcttagcattccacaagttactttctccttcctttgttctcctctgccttygcctcttttaaaaagttctaagttcctagccaatcgggacagatacagaatgtgaggtcctgttccagccaatggaaactgaacgcagtagggtggacgc

SEQ ID NO: 534838 - DNA, 201 bp, Homo sapiens
ggtatccccacgactacacaggtacttgtgggcctgaggagcgctctgcaagccgggcccccatggtctgcaagttgctccagctgcatcccctctgcctygctgccctccctctgccctttgcctgtcctccatcacagcattccactcttgtaccttcatttccagagaaaggggtttttgtagattttcctcccattc

SEQ ID NO: 534839 - DNA, 201 bp, Homo sapiens
accttactctgaaggtaacaccagccctgagctgggtgagggcccacccagtaccttagcttacaaagaggcagaagggaggagtccccgaacccctaaascttagattggctctgtccactgccagcgtgatagtaattttcatccctccccctccccttgcttctgaagatggagtctgcgcgcaaggcttgggaaaac

SEQ ID NO: 534840 - DNA, 201 bp, Homo sapiens
ggcaggtggattgcttgaggccaggttaagaccagcctgggcaatgtgatgaaaataaaaaaatgcctcttaaaagaaaaaattagtagggtatagtggcrcatgcctgtagttctaactacttgggaggctgaagcaggaggatcacttgagcttgggaggttgaggttgcagtgagccgtgatcatgccactgcactct

SEQ ID NO: 534841 - DNA, 201 bp, Homo sapiens
agaggggctccgagaacgggaatgaaggctcgctcctggagagggaggagagcaccttgaagaagggcgactgcagagattcttggcggtccaacaagggktgctctgaggaccacagcggtctagatgccaagagccgaggccctcgggcctttgggcgagccctccctccccggctgagcaattgcgggtatggacgga

SEQ ID NO: 534842 - DNA, 201 bp, Homo sapiens
atggagtaacagaacttcctcctctcatctctctgcactcctaaaagggtgctgatgccactggggtctccggttcgagctggaaacgtggtctttgactmgccacgtgatctgtgcatccattggacttgctgcctaggccattggattgggccttgtgccttttttgtctcttgggttgggccaggcctgtcccctccc

SEQ ID NO: 534843 - DNA, 201 bp, Homo sapiens
cttaagattcacagtgaattgttttctctccataggaaggtgatgaaatgtatgtgtttgttgattatctgtttttctggttcctttctccttccttcctyccttgccctcttcctctctccctccctccctttcccttccttttccttccttcccttccttcttttttcttttcttttctttttttttttttttgagaca

SEQ ID NO: 534844 - DNA, 201 bp, Homo sapiens
tgttattaattttttttttcctgttcaacactcctaacctcttttgaatttcagttctctttttttatcctgaaggattattttattgtacttttgagggtttttttttttttttttgccttgcacaaagtactgactcatgttgctaatggctgtggctgtatgctagttatatgtctcattatcctaccccttaagatt

SEQ ID NO: 534845 - DNA, 201 bp, Homo sapiens
agtcttaccgtcaggtttatttgaccctggacctttttactaagggagtggcaagcgaattgctgccacgtgcttgtgtggtgatccagccgcgcctttcyggcacagtcggctttagtgaacaggcccgtggatcagtggtgctaagaataatttaaactacttaggggaagatttgggtttagctgtatagggaacaag

SEQ ID NO: 534846 - DNA, 201 bp, Homo sapiens
tgggaggctgaggtgggcggatcacgaggtcaggagatcgagaccatcctggctaacacgatgaaaccccgtgtctactaaaaatacaaaaaattagccgrgcgtggtggcgggcgcctgtagtcccagatactcaggaggctgaggcaggagaatggcatgaacccgggaggcggagtttgcagtgagccgagatcacga

SEQ ID NO: 534847 - DNA, 201 bp, Homo sapiens
tcgtgaacgctatactaaaatggagtcagggctggacctgcacacagattacagtccgttggcctttcaggtctttcttggggggtgctttgcttggcatygcagttctgcttgaggttttgggagacgagcgttccacacatctctggagcattttcaggtggtgtgatttttggtacctgggatacttatcctggggag

SEQ ID NO: 534848 - DNA, 201 bp, Homo sapiens
ggagacggggtttcgccattttgcccaggctgtttgtttttcttttcttttctttctttttttttttgagatggcatcttgttctgttgcgcaggctggastgcagccgtgcgatcttggctcactgcaacctccacttcctgggttcaagcaattctcgtgcctcagccttcgagtagctgggattacaggcgtgcacca

SEQ ID NO: 534849 - DNA, 201 bp, Homo sapiens
cttcctgggttcaagcaattctcgtgcctcagccttcgagtagctgggattacaggcgtgcaccaccacacctggctactttttgtatttttagtagagayggggttttgccatgttggccaggctggtctcgaaatcctgacctcaggtgatccacctgccttggcctcccaaagtgctgggatgacaggtgtgagccac

SEQ ID NO: 534850 - DNA, 201 bp, Homo sapiens
gttttttgtttgtttgtttgtttttggtaaaatgttaattgcagaagtatacaggttattttatttatttatttatttttttttgaggtggagtcttgctstgttgcccaggccggagtgcagtggcatgatctcggctcactgcaacctccacctcccaggttcaagcaattcccctgcctcagcctcttgagtagctgg

SEQ ID NO: 534851 - DNA, 201 bp, Homo sapiens
ttttgccccctccttgccaaaactgtccctgttgtttgggttcttcgctgttttcattttcgggggttggaaggatgagctgtacaagccctcagtctttytgccatgtttaaccagaagccccctgtattctaaatagtgtgtctgtgagttggatggaattgaattaagggccatctgtgggatgtgtgtgcgtggaga

SEQ ID NO: 534852 - DNA, 201 bp, Homo sapiens
tttttttcttccttagggatgtgggggtgggtctcgctatgttgaccaagcttgtcttgaactcctggcctcaagctgtcttcccatcttggcctctgaargtgctaggattacaggtgtaagccaccacacccagccatttttccatattcatgtgaacagacctgccacactaagtgttttaaaaataatgttaggttt

SEQ ID NO: 534853 - DNA, 201 bp, Homo sapiens
tcttttgttactaaaaatgtgatggagaaataaatgagcagtactgggattatccacttccataaggccatctattgtaacatcagagggtgactgcagtraatagctacgtttattgccccaaagtgggaagccttgaaactggggcagtttagtgtggtttaaattagtcacagtagagtgtttatctcaagagggttt

SEQ ID NO: 534854 - DNA, 201 bp, Homo sapiens
gcactctgtgcggtgcctgaccccactgccctgcctttgtctagttccagtgcgacggcctctcagccgccggagtcgctgccgcagccgggtttgcagaratctgtctccaatttgcagaaaccgacacagtcaatcagtcaggaggtaggtgctgggaccccatcccaactgtttcctgggcatggtagcccctaaatc

SEQ ID NO: 534855 - DNA, 201 bp, Homo sapiens
tttttttggtggtggggacagagttttgcttgttgcccaggaaggcaatggcgtgatcttggctcactgcaacctccgcctcctgggttcaagcaattctyctgcctcagcctccctagtagctgggattacaggcatccgccaccatgcctagttgatttttttgtatttttaataaagacgagatttcactatgttggc

SEQ ID NO: 534856 - DNA, 201 bp, Homo sapiens
atgttaaactccaattatggatttatctgttcctccctttaatactgttggtttctgcttcatttattttgaagctgctattaggcatacacacatttatrgtttctatgcctttctggtgtgtttccacatttccctcgttatctctagtagtctattatcttgcagtctgttttgtcctgtgttcataccattgctctg

SEQ ID NO: 534857 - DNA, 201 bp, Homo sapiens
aagtgatcctcctgcctcaccttctgagtggctggggttacaggtttgggccactgtgcctggccagtattactttaccagtgaaacaattttgcccctgsagttttcattgtggaaatgttttcagtaatttattttatttgattagttatgagactgtgcagtttccctatgtcatttcgtgtgagtttttcggtaagt

SEQ ID NO: 534858 - DNA, 201 bp, Homo sapiens
aggcaggagaatggcgtgaacccgggaggcagagcttggcagtgagtggagatcgcgccactgcactccagcctgggcgacagagcaagactccgtctccaaaaaaaaaaaaaaaaaaaaaagaaagatatattttttaatgtaaaaaaagagaagctaccaacttttagaaatagtataagtgaaaagaagcatgagcat

SEQ ID NO: 534859 - DNA, 201 bp, Homo sapiens
gggctacccgctcccgcacccgaagtcgagtgacaccttggctatggacatgcgtgtcaggtgagatgaagcctggtcctgctgccttgccactgaaggargactccaggtcctaattgagagggccctgggatgagctaccatcctaggagacactgcccacgggagacgtgctccttgaagggactcctggttcctctg

SEQ ID NO: 534860 - DNA, 201 bp, Homo sapiens
gactactggaatccagaaggtcgaggctgcagtgagccatgattgcaccactgcactccagcctgagtgacagagtaaggccctgtctcaaaaaattaatrataacaatcatacctatggttgtcataatttgtattttttgagtactagcaagtaagactttttcctttgcttcctttgtataatgcctgtttccttcac

SEQ ID NO: 534861 - DNA, 201 bp, Homo sapiens
ggatgacaggtgtgagccaccgtgcctggacacccaggctgtttcagactcctggactcaagtgatccctccgcctccgcctatcaaagtgctgggattayaggcatgagccacggcacccagcaaggcagcctctttcatgagccactaggttctggggggtctcagtcctggttaagccctttgatgagtggggcttga

SEQ ID NO: 534862 - DNA, 201 bp, Homo sapiens
gtattgcccagactgatctcaaattcctcacctcaagcgatcctctcacttcggactctcagagtgtggggattacaggtgtgagccactgtacctggcckgaatttttcttaaagtctaatatagtcacttttagaacatgtttgctcatctacgttgaccgtctctatcttgatgggcttgatctaccaaggtggacag

SEQ ID NO: 534863 - DNA, 201 bp, Homo sapiens
atttgaattttaaaaattgtggtgaagtatacataacataaaatttaccatttttaagtgtacagttgagtggcgtgaagcactttcacagtgttgtgcarccatcaccaccatccatctccagaacgttctcatcttcccaaactgaaactctgttcccattagatgccaactcccctcccccatccagtggcggcggcc

SEQ ID NO: 534864 - DNA, 201 bp, Homo sapiens
ttaaaaagaatgaggtagatcactatgtgtatttttatcttttaatttttaagtctgaactaaacagaacttatgtatatttttagaaagatgaccatgtrtagaaagagaagaacccaggttgaataatacagtagcttcctgcatttgtagagaagaccatgactgctaatatgaatgtgtataagcctggaggctgtc

SEQ ID NO: 534865 - DNA, 201 bp, Homo sapiens
cgtggtgtgggcagacgattcaaaggaatgtactggggaaagcccacaattcactttctcctgtaaagcagcactggctgccctttattaccctttgccaycatcctgatatcgccttctgcttcctgcactacccctgccagccaaggcttcaccagacttggtctttagtagcctgtattagaaaaccagctgcacatc

SEQ ID NO: 534866 - DNA, 201 bp, Homo sapiens
atgtctcattatcctaccccttaagattgatcatttctgtgttggtttctatttcaaaccagaataggccaggtgggtcaattcatgtatttctgaattcrataatgaggcttccctaccgtgaaatgtacatatcttgtcatgggcggacaggtactaaatagagcctatctatactagattttaaaacaatggatttct

SEQ ID NO: 534867 - DNA, 201 bp, Homo sapiens
tggttagagactcgaaagggcactggacataggcaggctggagactggtcctggtcctgctgttctgcatctgactcagtcactcttctctgagcctcagkgggggatgtgactagagccttctcagggggtggtgagcattcagtcaggctgggtgtgcttcgcataatgctgaccctggcgagttttcagcagaggtga

SEQ ID NO: 534868 - DNA, 201 bp, Homo sapiens
aggacagccgcgtggaggacaagagatccttcttccaagatgaacacgtggcagattctgaaaatgcagagaaccggcccttcaggagaaggcgccccccrcgccaagataagccccctcgattccggcgcctccggcaagagcgggagtccctgggcctgtggggacccgaggaggagccccacctgctggcaggtcagt

SEQ ID NO: 534869 - DNA, 201 bp, Homo sapiens
aagtgccctggtctccaagtgctgagaaggcatctccccaggaaaacggccctgctgtccacaaaggtaagagctgggccgtcttcccaccaactggaaaycctggcctgttgtcctcgtcttgttacttgcaactgccttccttcttagctagcagaacgtatggcttacaacgagatcgtattgggaagcatcagttat

SEQ ID NO: 534870 - DNA, 201 bp, Homo sapiens
aaagctgtctggcggcagcgccctcctggcctgcatctctggtggcctccctgctgatgtaggaaaccagacggtaaaagggacccagatctcagcctgcygaccccagcatccttttcttacaagtctgtgctagaaatgaccatggtagcttttgtaaaattgttgcctgtatttacttcagacaggatgtagagagtg

SEQ ID NO: 534871 - DNA, 201 bp, Homo sapiens
gccacttttggccgcgaggccaccaaatttgaagaggaggagaaacctgacaaggcctgggaagccagacccccacgagagtccagcgatgttccccccaygaagagaaataactggatctttattgatgaggagcaagcctttggggtcagaggacaggcccggggccggggccgtggtttcagagagttcacttttcgt

SEQ ID NO: 534872 - DNA, 201 bp, Homo sapiens
agtgttaaggaccaagcctatatctgacaaatgtgcttttcttgcccccttccttggacaggtctttgaaccaggcagggtgcatgtgtgtgtgccttcaraggtcctcaggtcaggaaagattaagagccctatgatgtgtaggtgggtggggtgctgtatccacatgaaagtcagggtaactattaacttctttggcct

SEQ ID NO: 534873 - DNA, 201 bp, Homo sapiens
gacacatgcggatcccggcgacctacagacagagactatgtcccagattcctacagacaccctgacgcatttggtggccggggctttgaggacagccgcgyggaggacaagagatccttcttccaagatgaacacgtggcagattctgaaaatgcagagaaccggcccttcaggagaaggcgccccccacgccaagataag

SEQ ID NO: 534874 - DNA, 201 bp, Homo sapiens
agcggcgggagcggcgggaaggccctgggtccgagcccgactcccaggtggatggtggcctgtcgggggctagtttgggtgagaagaaggagctggccaaraggagcttctccagtcagagacccgtggttgacagacagagccgaaagctggagccgggagggtttggggagaagcccgttaggccaggtggtggtgaca

SEQ ID NO: 534875 - DNA, 201 bp, Homo sapiens
aggggccgctgcagcgaggaacgttgcctgtgcacagtgccaggtgccggtcagtccaccagagtcctctgctccggagttgctgccaggcggcgtcctagggggcatcgctggcctcgtggctgcatggaagtggctcttcctaggtggttctgcttctccactgtgaggagacgtggccccacggtggggttgccacct

SEQ ID NO: 534876 - DNA, 201 bp, Homo sapiens
ccccacggtggggttgccacctcagcatggcaggagcccagcaaacgcagaggggagcaggctgcacatggtctggcgagcacctcttccacagccagagrcattcgggtgatgacctctgctcagggaccaggagagggtcccctgcacagtctgggttgactgactgcacttggcttgtgcctcggacagggaggtgca

SEQ ID NO: 534877 - DNA, 201 bp, Homo sapiens
tggcacagtcacggcttactgcaaccccaaactcctggattcaagggagtctcccaagtagctgggatccaggcatgtgccaccacacccagctaattaattttttttttttttctgtagagatggcgtcttgctgtattgcccagactgatctcaaattcctcacctcaagcgatcctctcacttcggactctcagagtg

SEQ ID NO: 534878 - DNA, 201 bp, Homo sapiens
ggttctgcattttagtggggaatttgttttggttcattttggcattcccgcaaccatcttgttggttttttggtaaaatgtggcaccccctccagacctcytagctgtggaactgagatattttagcagggtcctgtcatcctttgatttttcctcgcttcctgcctcttggcccttcctttttgtctgacttcactcggg

SEQ ID NO: 534879 - DNA, 201 bp, Homo sapiens
ctctatcttgatgggcttgatctaccaaggtggacaggcttctgtttgttctaatgtttgtactttcattgtgggtggtcctcttggccctttaaaactaccctgctctgctgcttgctcttttgtgtctgtctcctttgattcaacattttttttgtgcgtttcatctgtatagttgtgtatgtttatttgttcttattg

SEQ ID NO: 534880 - DNA, 201 bp, Homo sapiens
ttttgttttagctgtttatttcagaaattgacaaactcattctgaaatttatatgaaaatgcaaaagggccaagaataatcaaagcattctctctctctcttttttttttttttttttgagaaggagttttgctgttgctcaggctggagtgcagtgagacgattataggtcactgcagcctaaaactcctgggctcagga

SEQ ID NO: 534881 - DNA, 201 bp, Homo sapiens
tttgttttagctgtttatttcagaaattgacaaactcattctgaaatttatatgaaaatgcaaaagggccaagaataatcaaagcattctctctctctcttttttttttttttttttgagaaggagttttgctgttgctcaggctggagtgcagtgagacgattataggtcactgcagcctaaaactcctgggctcaggag

SEQ ID NO: 534882 - DNA, 201 bp, Homo sapiens
caccattatcaatgcggaaaacctgaagggccttgacgatctggacgccgatgccgatgatggctgggcaggtgggcagagaagcacgggtggtttagacrggcaggaccaaagtccatctgtacttaccagggatggaaaccccctggcaccaccgtgtgttttcccttggcaagatagggatgaagagccggacaggga

SEQ ID NO: 534883 - DNA, 201 bp, Homo sapiens
gctggtcttgaactccggacctcaggtgatccacccgccttggcctcccaaagtggtgggattttcaggcctggccaacagcaactatcttaataagaacrttcattgactcaagtaattgcaagtccagaagtagacaggtttgggattatttgggtgcacccattctgaaccagtcattagaaccggagctgggcttct

SEQ ID NO: 534884 - DNA, 201 bp, Homo sapiens
ggattacaggcgcatgccaccacgcctgactaatttttgtatctttagtagggatggggtttcactatattggccaggctggtctcgaacccctgacctcrtgatctgccgcctcggcctcccaaagtgttgggattaacaggtgtgagccactgcgcctggcctcttctacctcttctaattggattattttactttaga

SEQ ID NO: 534885 - DNA, 201 bp, Homo sapiens
tttgtcacaactaatgaaccagtattgatacattattattgactaaagtttatgctttattcagatgttcttagcttgtacccagtgtctttttttttttccgttctaggatgccacattaaatttaatcatgtccccatagtttccactaggttgtgacaattaagtttttgatgaccatgacagttttgaggcataccg

SEQ ID NO: 534886 - DNA, 201 bp, Homo sapiens
caggtgctccccgtggtctgtgttgctgtgtgagccgtggctctggtggaggggacccagctgaccatgtggttccggcaaggggcttgcaactaagtgcyggagaaccccccagttctccactgggggtggggagtgcttcttgtgtcctcaccatacgcctcaatgcttctttgtttttcctttcctcttattttaaat

SEQ ID NO: 534887 - DNA, 201 bp, Homo sapiens
tgactgccgtaaagcaggtgtgtatacacaaactttgtaaaggaccaggcagtaactgttctgggctttgtgggccatagatggcctcttgcttatttctsttcaggctgccggccccttctctgatggaacgttgaggctggaagattctccacttgtgcagtcttcactgtggagagtgtaattgtcctcgtaggggct

SEQ ID NO: 534888 - DNA, 201 bp, Homo sapiens
tgtcctcaccatacgcctcaatgcttctttgtttttcctttcctcttattttaaatttgttgcttcctatatatgctgtctccttggggtgcgtggtcttytggggatggctcatgtctcccataaggaacactgggttaccaggaaccccactttccccactctgtggtttcctcaaaccttattttcaggctgtttatt

SEQ ID NO: 534889 - DNA, 201 bp, Homo sapiens
aatgaaaggatggtttgcgcacttgcgtgtttgacacggcaccagctcagtcagcgtcttttgtctcactttttttggcccctgtttgtaatcgattttcrctccctatgtttcatttggatcataatatagttgtgtgtgtgtgtgtgtgtttttgatggagtcttgctctgttgcccaggctggagtgcagtggtgcga

SEQ ID NO: 534890 - DNA, 201 bp, Homo sapiens
gtgtatacacaaactttgtaaaggaccaggcagtaactgttctgggctttgtgggccatagatggcctcttgcttatttctcttcaggctgccggcccctkctctgatggaacgttgaggctggaagattctccacttgtgcagtcttcactgtggagagtgtaattgtcctcgtaggggctgctttcattcactgcagca

SEQ ID NO: 534891 - DNA, 201 bp, Homo sapiens
tccagatgagccagtgcctcgctcttagggaacagaaatgtgggcgctttagggctctttgaaagccacctctgcttttcttttttctttttctttttctytttctttctttctttctttctttctttctttctttctttctttctttctttctttcttttctttcttttttttttttttttttgagatggaggctccctc

SEQ ID NO: 534892 - DNA, 201 bp, Homo sapiens
caagtgatcctcctgcctcaccttctgagtggctggggttacaggtttgggccactgtgcctggccagtattactttaccagtgaaacaattttgcccctkgagttttcattgtggaaatgttttcagtaatttattttatttgattagttatgagactgtgcagtttccctatgtcatttcgtgtgagtttttcggtaag

SEQ ID NO: 534893 - DNA, 201 bp, Homo sapiens
gcttggaagcacttttgctggtatgtttcttcattgtgccagactctcttacgccctctagtacattcagcatccttgggcttggccactgaatgtgggcrgcagtcccatcattgtgacatcaaaaatgctcctgcacatttgcaaacaccctggtattccttggcccatggcagcagctgaataaactgggatttgggt

SEQ ID NO: 534894 - DNA, 201 bp, Homo sapiens
ctcaatttgttaatatgttttaaagttctgtcatgagggatattagtttgtaattttctgttcttttaatgtctttgtcaggttttggtatcaagttatgstgggcttataaaatgagttgtggagtgttcttctctactttcctaaagaataagattggtatttttgtaagatcagtattatatatttttctttttcttt

SEQ ID NO: 534895 - DNA, 201 bp, Homo sapiens
aagtgctgggattacaggtgtgagccaccacacccggccaaaatatatattccttctaaaatcttgaaaaataactacaaaacaaattacccttagtcatrcttctcagggataagcacatttggtgtaatttcagtcctagacacacagatacagttaatatattctgtaactttttgtccttatttatttcactaaatg

SEQ ID NO: 534896 - DNA, 201 bp, Homo sapiens
gggtggatcacgaggtcaggagatcgagaccatcctggctaacacggtgaaaccccgtctctactaaaaaatacaaaaaattagcccggcgtggtggcggrcacctgtagtcccagctacttaggaggctgaggcaggagaatggcgtgaacccaggaggtggagcttgcagtgagctgagatcatgccactgcactccag

SEQ ID NO: 534897 - DNA, 201 bp, Homo sapiens
tatacaatttgaactagaggttgctttcttcttttaggtgtcatgtagggtaagactccagtcctgagactttttacctgatccccaactgacccagtgcrtagtataggtggcccttggaggaggggaggaagaagagtggtgtccttttcattagagtcctgatggaaccaaatccttcggaatactagcttttttctt

SEQ ID NO: 534898 - DNA, 201 bp, Homo sapiens
atttattttttttttttgaggagtctcgctctgtcgcccaggctagatagagtgcagtggcacgatcttggctcactgtagcctctgcctccaaggttcargtgattctcctgcctcagcctcccaaaatgctgggattacaggtgtgagccaccacctgtataagtttaatgtttaaaagttttaatggttgtaaaagtt

SEQ ID NO: 534899 - DNA, 201 bp, Homo sapiens
actgaaccagccctacatttccagatgcagtactgctttttggcatcctaagcagagttgtttatataccctaaattctagagcaagggggtttgtggagsaaattccgtacagcatggacaaagctgactactttgcctttctgactcagttgcaggtagagctggtaaaccctggccaggttgtactttactgcacaag

SEQ ID NO: 534900 - DNA, 201 bp, Homo sapiens
agggaccgggcacggtggctcacgcctgtaatcccagcacttcgggaggctgaggcgggtggatcacgaggtcaggagatcgagaccatcctggctaacayggtgaaaccccgtctctactaaaaaatacaaaaaattagcccggcgtggtggcgggcacctgtagtcccagctacttaggaggctgaggcaggagaatgg

SEQ ID NO: 534901 - DNA, 201 bp, Homo sapiens
tcttaaacctttgctgttgaggacagaacacgtgttttccttggagtggcatatgtgcagcttagctgctaggatttactttttttagaatgagttctttwtgcagttccattgggtgctcatcgtgtgagagtgtgggttgggggcagagagagatgtgatcatttgtgcaacagtccttgtgagtcagaaattcaattg

SEQ ID NO: 534902 - DNA, 201 bp, Homo sapiens
ttcatcactgtgaagacaaagaggatgatggtgatagttgtgttgaatgttgggcaaattctgaagagaacgacacaaaaggaaaaaataaaaagaagaaraagaaaagcaagatactgaaatgtgatgaacatgtaagtgtcataacttgtaattcttaaacctttgctgttgaggacagaacacgtgttttccttggag

SEQ ID NO: 534903 - DNA, 201 bp, Homo sapiens
gcgttttaccatgttgttcaggctggtctccagcttgtgggctcaagcaattctcccacctcagcctcccaaaatgctacaattacaggcatgaaccaccrtgcctggcctcttgtattcttaaattatctctaaattataatacctaatgcaatgtaaaagctatgtaaggctgggcatggtggctcacgcctgtaatcc

SEQ ID NO: 534904 - DNA, 201 bp, Homo sapiens
tagccgggactacaggtgtgtgcttctgcaactggtgtatttacataatggctgggcaagggaagatggctgagagtcaggtagcagtcagtgttgaaataacgtgagtgccaggcacactgctagatacagtggggatagagaaaagtggtttttttgtgttttgttttgagacttctctctaaaagacagtaaatagag

SEQ ID NO: 534905 - DNA, 201 bp, Homo sapiens
cgggaggctgaggcgggtggatcacgaggtcaggagatcgagaccatcctggctaacacggtgaaaccccgtctctactaaaaaatacaaaaaattagccsggcgtggtggcgggcacctgtagtcccagctacttaggaggctgaggcaggagaatggcgtgaacccaggaggtggagcttgcagtgagctgagatcatg

SEQ ID NO: 534906 - DNA, 201 bp, Homo sapiens
gaggcagaggttacagtgagcctcgatggcgccactgcactccagcctgggcaacagagagagactctgtctcaaaaaaaaaaaaaaaaaatatatatatrtgtgtgtgtgtgtgtgtgtgtgtgtgtgtgtgtgtgtatatgtatatatgtatatgtatatatatgtatatatatgtgtatatatatatatatagcatag

SEQ ID NO: 534907 - DNA, 201 bp, Homo sapiens
gggcggatcacttgaggccaggagttcgagaccaacctggccatgatggcgaaaccctgtctctactaaatatacaaaaatcagccagtgtggtggcgcaygcctgtggtctcagctacttgagaggctgaggcaggagaatcgcttgaacctgggtggtagaggttgcagtgaactgagatggtgccactgtactccagc

SEQ ID NO: 534908 - DNA, 201 bp, Homo sapiens
aggcagaggttacagtgagcctcgatggcgccactgcactccagcctgggcaacagagagagactctgtctcaaaaaaaaaaaaaaaaaatatatatatatgtgtgtgtgtgtgtgtgtgtgtgtgtgtgtgtgtgtatatgtatatatgtatatgtatatatatgtatatatatgtgtatatatatatatatagcatagg

SEQ ID NO: 534909 - DNA, 201 bp, Homo sapiens
ctacgggcagaagagcagacatggcagatgcttttctatcttggtgttgatgctttacgcaagagttttgaggtaagaacagtgggctgttccagtatctmagattgcttagtcacgttattggactgaatcttaatgtaagccaccagtgcctaaaaggactgtccatcactgatagagcttcatggatttggctggata

SEQ ID NO: 534910 - DNA, 201 bp, Homo sapiens
ggcagaggttacagtgagcctcgatggcgccactgcactccagcctgggcaacagagagagactctgtctcaaaaaaaaaaaaaaaaaatatatatatatgtgtgtgtgtgtgtgtgtgtgtgtgtgtgtgtgtgtatatgtatatatgtatatgtatatatatgtatatatatgtgtatatatatatatatagcataggc

SEQ ID NO: 534911 - DNA, 201 bp, Homo sapiens
cttgctgaagagaccatctattttcagagactggaaggagagagaacaaaccaatcaagagtcattggtttgttgcctctattgttttatttctgacctgygcaaatagcttttgaagtggagatatgctagttcttggcaactaatacttttctgggcatgcattttatgaaataataggtatgtatctgcctcattctt

SEQ ID NO: 534912 - DNA, 201 bp, Homo sapiens
gacattatttaaaaatgggcagtgtcatagtatatgtgatattattcacttttcttttttctttttttttgagacagtctcgctctgttgcccaggcaggrgtgcagtggcttgatctcggttcactgcaacctccgcctcccgagttcaagtgattctcctgcctcagcctcctgagtagctgggattacaggcacacac

SEQ ID NO: 534913 - DNA, 201 bp, Homo sapiens
ggttgaggctacagtgagacaagagtatgccactgcactccagcctgggcaacagagtgagaccctgtctcaaaaaaccgtgaaacataaatttacctttyaaacagtttttaagtgtacattataattttgttaactatatgcacattgttgtacaacagatctctagaactttttcatctcaactgaaactatacgcat

SEQ ID NO: 534914 - DNA, 201 bp, Homo sapiens
gcagaggttgcagtgagccgagatcacgccactgcagtccagccagggcgacagagcgagactccgtttcaaaaagaaaaaaagaagagcgactgggcgcrgtggctcacgcctataatcccaacactttgggaggccgaggcagttggattgcctgagctcaggagttcaagactagcctgggcaacacgctgaaaccga

SEQ ID NO: 534915 - DNA, 201 bp, Homo sapiens
gcacatcttttgggtcgtgctgagccagagttcgcaggagggtatgagtatgtaatttgctagaatgggctatctagcgctttgcttcattttattactgraagtttattttcatcaccttctgcctcagtacatatgatatatgtataaattaaagtatgcctgtaaagattttgcttctctttaaagtatgcatttctt

SEQ ID NO: 534916 - DNA, 201 bp, Homo sapiens
gaacagccaggtaaaaacaagcaatactttaatctgttttttgtttttttaaggttttacccttctgtattctcccttttcactaatatttgttctttctrcagaggttgttggatggatgtatgggaactaatgtcgcaggaatgcagggatgaagtagttttaattgactcgagttgtcttttagaaacactagaaaca

SEQ ID NO: 534917 - DNA, 201 bp, Homo sapiens
cagaatgacatgatgcttattctgcaaacactccaattaaaggctttatgtgactgatgtgaaactaaaaagttagactggtttaatttttagctgtcctyctccattacataacattttgcattcttaagtcatagtcttaactactgctttaatttgcaggatgagtctgaatgtacttcagatgaggaaatctttatc

SEQ ID NO: 534918 - DNA, 201 bp, Homo sapiens
tgaggcaggagaattggttgaacctgggaggcggaggttgcagtgagccgagattgtgccactgcactccagcctgggtgacagaacaagactctgtctcaaaaaaaaaaaaaaaaaaaagctattgaaatggaagcatgtctctaaacatggtatagtgaatatagaattggaagcaaggagcattaactcttcccctgc

SEQ ID NO: 534919 - DNA, 201 bp, Homo sapiens
ggtgtgggtcttgacgagatggtcagtgaattcctgacaggaagacttgatgaatacagtctccttccagaggtcgggggtcaggtagctgtaggtcttaragatggcatcaaaggtgtccttggtatagttacccagggcggcagtgtagcccctggctaaggtgtagcagtcatcaataccagccatcataagcagctt

SEQ ID NO: 534920 - DNA, 201 bp, Homo sapiens
taattgaactattaactattttattgcttttattataatagttttctggaccaggatttccaataccaggattattattatttttttaaatttgagtagascatgttaattagaataaatacaataggcagtatggttcattagatattttgctcttttcagtcatcctcaccagattattgatagctacagcattaaaat

SEQ ID NO: 534921 - DNA, 201 bp, Homo sapiens
ttaaggatagttgttattttgctgcttgatttgtcagtatcttttttttttctttctttcaaattctttttttttttttgagatggaatttcccctgtcayccgggctagagtgcagtggcgcgatctcggctcactgcaacctctgccgcctgggttcaagtgattctcctgcctcagcctcccaagtagctgggattac

SEQ ID NO: 534922 - DNA, 201 bp, Homo sapiens
ttgcttagtcacgttattggactgaatcttaatgtaagccaccagtgcctaaaaggactgtccatcactgatagagcttcatggatttggctggatattgktacatggctttgggttggagtgggggtggtctagggaactgggatttagaagaagttgatggatttaaaaaaatgtttttaatcctgttaactttgctag

SEQ ID NO: 534923 - DNA, 201 bp, Homo sapiens
agaaatagattagatcttagtatttttgctactaattaggtgaaaatgaaatgattggaaacaagttttgtttttaaaaataaccgtgttctttattgacttttttttttttttgagaccgagttttgctcttgtcgctcaagctggcgtgcaatggcacgatcttggctcaccacaacctccgccttctgggttcaagtg

SEQ ID NO: 534924 - DNA, 201 bp, Homo sapiens
attttaaaactgctttatagttccaagaatatcatataatttagtcagatacttaatatttcctttttctttatgttctttgacttatttttgacaaaaaygaaaaatggtaaattcctaatcatattttcattatttaatttactttctacttaaaaaaaaaatccttcattggaaatgttctacttttaataagccatt

SEQ ID NO: 534925 - DNA, 201 bp, Homo sapiens
gcagaggttacagtgagcctcgatggcgccactgcactccagcctgggcaacagagagagactctgtctcaaaaaaaaaaaaaaaaaatatatatatatgtgtgtgtgtgtgtgtgtgtgtgtgtgtgtgtgtgtatatgtatatatgtatatgtatatatatgtatatatatgtgtatatatatatatatagcataggca

SEQ ID NO: 534926 - DNA, 201 bp, Homo sapiens
cagaggttacagtgagcctcgatggcgccactgcactccagcctgggcaacagagagagactctgtctcaaaaaaaaaaaaaaaaaatatatatatatgtgtgtgtgtgtgtgtgtgtgtgtgtgtgtgtgtgtatatgtatatatgtatatgtatatatatgtatatatatgtgtatatatatatatatagcataggcaa

SEQ ID NO: 534927 - DNA, 201 bp, Homo sapiens
agtcatcctcaccagattattgatagctacagcattaaaatagaccattgacttcagttttgctttgtgctgttgataaagttaatgtatgaaagtgcttmtaacaatgtctaatacacatgaagtgtctttattattacttattgctacccccctttagaggtattaataagactgagaaggaaaactagaaacaagatg

SEQ ID NO: 534928 - DNA, 201 bp, Homo sapiens
gaggttacagtgagcctcgatggcgccactgcactccagcctgggcaacagagagagactctgtctcaaaaaaaaaaaaaaaaaatatatatatatgtgtrtgtgtgtgtgtgtgtgtgtgtgtgtgtgtgtatatgtatatatgtatatgtatatatatgtatatatatgtgtatatatatatatatagcataggcaact

SEQ ID NO: 534929 - DNA, 201 bp, Homo sapiens
gcactccagcctgggcaacagagagagactctgtctcaaaaaaaaaaaaaaaaaatatatatatatgtgtgtgtgtgtgtgtgtgtgtgtgtgtgtgtgtrtatatgtatatatgtatatgtatatatatgtatatatatgtgtatatatatatatatagcataggcaacttaaaccatgccagagggaattgaaaatagg

SEQ ID NO: 534930 - DNA, 201 bp, Homo sapiens
tggcattttcaaaattaaattagtagctttttacttaatatttgaagtatttcttctgtcattatcaggaccccaaaagagagttgatattcatgtgtttygttactataaaagtaacttcagatttttctttatagaacactacttttacaaaggaattttctttttttttttttgagacgaagtctcgctctgttgcca

SEQ ID NO: 534931 - DNA, 201 bp, Homo sapiens
caccttcccctcgtcccccgccctccttcttccactccccgcggcgcgagcggctgactgcccgtagaggaaacgacattcggagctgcgctcccgcccasgccggccctgacgcgggcctcgtcagccagtaacagggagcagaggtgggagttagcgaggcgaccacgaaaacggtgaaggtcggaaccgacagcctcc

SEQ ID NO: 534932 - DNA, 201 bp, Homo sapiens
tcagtatcttttttttttctttctttcaaattctttttttttttttgagatggaatttcccctgtcacccgggctagagtgcagtggcgcgatctcggctyactgcaacctctgccgcctgggttcaagtgattctcctgcctcagcctcccaagtagctgggattacaggcacctgctaccatgcccggctaatttttgt

SEQ ID NO: 534933 - DNA, 201 bp, Homo sapiens
tcttcatctcatcagtattcttttgctatcaaaggcagttgatcagttttgttcctcaatatttttttttgcaaatatctaccgaagttttttcaaatttyatgtaaaatgcaagtcattgtagagatgccagtctatgcctttatgcttgccagtctcaattaagacttgattgagctgcagtactttaaaaaggattag

SEQ ID NO: 534934 - DNA, 201 bp, Homo sapiens
cgtcccccgccctccttcttccactccccgcggcgcgagcggctgactgcccgtagaggaaacgacattcggagctgcgctcccgcccaggccggccctgmcgcgggcctcgtcagccagtaacagggagcagaggtgggagttagcgaggcgaccacgaaaacggtgaaggtcggaaccgacagcctcctccgagaaggg

SEQ ID NO: 534935 - DNA, 201 bp, Homo sapiens
gctgcttgatttgtcagtatcttttttttttctttctttcaaattctttttttttttttgagatggaatttcccctgtcacccgggctagagtgcagtggsgcgatctcggctcactgcaacctctgccgcctgggttcaagtgattctcctgcctcagcctcccaagtagctgggattacaggcacctgctaccatgccc

SEQ ID NO: 534936 - DNA, 201 bp, Homo sapiens
gaaacgttgtttggtcccgattccggaaaaggtgccaagagcttagttgaactccttgtaagtattccatgtggtcttactgtacataactgtttgggaayggggtggatgtgggaggggatagtatttgagggcttaaggtaggtagttgaaggaagcttatgagaaattaagggtagtatttcattattgtttggggac

SEQ ID NO: 534937 - DNA, 201 bp, Homo sapiens
tttgcttatttcgataaggtgcacctaagtctcttcatctcatcagtattcttttgctatcaaaggcagttgatcagttttgttcctcaatattttttttkgcaaatatctaccgaagttttttcaaattttatgtaaaatgcaagtcattgtagagatgccagtctatgcctttatgcttgccagtctcaattaagactt

SEQ ID NO: 534938 - DNA, 201 bp, Homo sapiens
catcgtgtgagagtgtgggttgggggcagagagagatgtgatcatttgtgcaacagtccttgtgagtcagaaattcaattgttctttttatacttttaaawttataagctgtgtaatcttaaacaatttgtttagtccctatcatattaggttctatgaaggtgaagtgaatgtatattggcaggtgtggcatagtgtcta

SEQ ID NO: 534939 - DNA, 201 bp, Homo sapiens
tttgacctctgtattgagaatgaatgacggctttggaggtagtgaaaaatggttataaaggatcctggatatattttgaggaatgagccagtgggattttytggatagattggttgtgagggaggccatcaaagatgattctcagatttgtgatgtaaagaatggacaacaggccttgcgtggttgctcacacctataatc

SEQ ID NO: 534940 - DNA, 201 bp, Homo sapiens
aattattgtggaggatggtcagggaaggcctccctgataaaatgacattgaatatagatttgaatgaagtgagcaagcaaatcttgtagaaaactgggggraaggcagagaagggacagctagtgtaaaggttctgaggttggggttttattggcatgtttgaggaatagtaaggaagcccttgtggctggagccagatga

SEQ ID NO: 534941 - DNA, 201 bp, Homo sapiens
gtactaaaacccagtaaggattaggactagctcaagaccacttttatttatttttccctctcattttatagcattaattggggtgtgtttgtgttttggcttttttttttttttttttttttgatatggagtctcgctctgtcacccaggctggagtgcagtggtgcaatctcagtggctccctgtagcctctgcctgcca

SEQ ID NO: 534942 - DNA, 201 bp, Homo sapiens
acgacaaggtgtaatatgttaatgtgtaggtatgtgtgtttatctgttcaaaatcaggtagtgtaggagcgtggtgtgtggtatgggcttgttttggttayatttatcagcaggaaccccaaacgtcagagaagagccacctgtgtccctgtaattatatttgaatttaaactatttagggagggaactcactggagagca

SEQ ID NO: 534943 - DNA, 201 bp, Homo sapiens
cgcgctcagcttccatcgctgggcggtcaacaagtgcgggcctggctcagcgcgggggggcgcggagaccgcgaggcgaccgggagcggctgggttcccgsctgcgcgcccttcggccaggccgggagccgcgccagtcggagcccccggcccagcgtggtccgcctccctctcggcgtccacctgcccggagtactgcca

SEQ ID NO: 534944 - DNA, 201 bp, Homo sapiens
tgacacagtggagcagaacatctgccaggagactgagcggctgcagtctacaaactttgccctggccgagtgaggtgtagcagaaaaaggctgtgctgccmtgaagaatggcgccaccagctctgccgtctctggagcggaatttacctgatttcttcagggctgctgggggcaactggccatttgccaattttcctactc

SEQ ID NO: 534945 - DNA, 201 bp, Homo sapiens
ctgggcaccctttgggtctgcctactgttggagttgacacaccaccaaatgaagtcagtacaccggagagctgagtccatgaggtttctctagaaccagcyaggggaggcccaagggtctgggaatctggagacctggattctagatcctgcggttttgagtgaccttgggatggacggcttctttctaagaatccggttt

SEQ ID NO: 534946 - DNA, 201 bp, Homo sapiens
aggcgaccgggagcggctgggttcccggctgcgcgcccttcggccaggccgggagccgcgccagtcggagcccccggcccagcgtggtccgcctccctctsggcgtccacctgcccggagtactgccagcgggcatgaccgacccaccaggggcgccgccgccggcgctcgcaggccgcggatgaagaagaaaacccggcg

SEQ ID NO: 534947 - DNA, 201 bp, Homo sapiens
ataaccctttgacttgatttccaagaagcaacagagttaaaactgttatttctaggtgagtggcttcatgcaggtgtggtcaggtatttttcctgacagakgctgctgttcttgttgattgctttttcttttttcttttttttttttgagacagtctcgctctgtcaccctggctggagtacaggtgcacgatctcagctc

SEQ ID NO: 534948 - DNA, 201 bp, Homo sapiens
aggggaggcccaagggtctgggaatctggagacctggattctagatcctgcggttttgagtgaccttgggatggacggcttctttctaagaatccggtttytcctctgtgaagtagatttggtaaccctggctcctgctgacctcacggagctgttgggggaaccaaaccttggtgtaatgtactgtacacaggctccctc

SEQ ID NO: 534949 - DNA, 201 bp, Homo sapiens
ctttgccctggccgagtgaggtgtagcagaaaaaggctgtgctgccctgaagaatggcgccaccagctctgccgtctctggagcggaatttacctgatttyttcagggctgctgggggcaactggccatttgccaattttcctactctcacactggttctcaatgaaaaatagtgtctttgtgattttgagtaaagctcct

SEQ ID NO: 534950 - DNA, 201 bp, Homo sapiens
atattaagaataatcactctgttccagttcaggagcctctctccctttaaccaaccttttaactaaaatctcccacaagggaaaaccttcgactggaaagraaggttcagactaaagaactgaggggaaaaaaagacagatgaggtcagcaacccttaaggtgatgagagagggctgtggccagccctgcattgtgacaca

SEQ ID NO: 534951 - DNA, 201 bp, Homo sapiens
aagaatggcgccaccagctctgccgtctctggagcggaatttacctgatttcttcagggctgctgggggcaactggccatttgccaattttcctactctcmcactggttctcaatgaaaaatagtgtctttgtgattttgagtaaagctcctatctgttttctccttctgtctctgtggttgtactgtccagcaatccacc

SEQ ID NO: 534952 - DNA, 201 bp, Homo sapiens
accagggaggaaatggcggcagctgggctcaccgtgactgtcacccacagtgagtgtcgggcgccaggtgggctccatgcaggtcccgaaagcccggcggkgtctgtgggtttagtcacgtgtcctccagaagcgtgtgaccttgcgcttgtcctggcgtccggaagcgtgggttattggttgtgtccgtggaactgtctt

SEQ ID NO: 534953 - DNA, 201 bp, Homo sapiens
gaatggcgccaccagctctgccgtctctggagcggaatttacctgatttcttcagggctgctgggggcaactggccatttgccaattttcctactctcacmctggttctcaatgaaaaatagtgtctttgtgattttgagtaaagctcctatctgttttctccttctgtctctgtggttgtactgtccagcaatccacctt

SEQ ID NO: 534954 - DNA, 201 bp, Homo sapiens
cggagtactgccagcgggcatgaccgacccaccaggggcgccgccgccggcgctcgcaggccgcggatgaagaagaaaacccggcgccgctcgacccggakcgaggagttgacccggagcgaggagttgaccctgagtgaggaagcgacctggagtgaagaggcgacccagagtgaggaggcgacccagggcgaagagatg

SEQ ID NO: 534955 - DNA, 201 bp, Homo sapiens
tgttttaattacagaatacatggctgactgtacaaaagttttaagtacatgtataggcactaatatggaaaataaaaattacccatggggcaccaactcasagatgacgattaccaaagcctgaaatatatttttcatcttaaaaaaatttgatataatgttatttacactttataaactattcttttattggataaaaaa

SEQ ID NO: 534956 - DNA, 201 bp, Homo sapiens
gcgtccacctgcccggagtactgccagcgggcatgaccgacccaccaggggcgccgccgccggcgctcgcaggccgcggatgaagaagaaaacccggcgcygctcgacccggagcgaggagttgacccggagcgaggagttgaccctgagtgaggaagcgacctggagtgaagaggcgacccagagtgaggaggcgaccca

SEQ ID NO: 534957 - DNA, 201 bp, Homo sapiens
ttttttgagacgaagtttcactcttgtcgcccaggctggagtgcaatggcacgatctaggctcactgcaacctccgcctcccggattcaagtgattctccygcctcagcctctcaagtagctgggattacaggtgcataccaccatgcccggctaatttttgtatttttagtagagacagggtttcaccatgttggccagg

SEQ ID NO: 534958 - DNA, 201 bp, Homo sapiens
tctttgtagatggaaaacttgatgtataaccctttgacttgatttccaagaagcaacagagttaaaactgttatttctaggtgagtggcttcatgcaggtrtggtcaggtatttttcctgacagaggctgctgttcttgttgattgctttttcttttttcttttttttttttgagacagtctcgctctgtcaccctggctg

SEQ ID NO: 534959 - DNA, 201 bp, Homo sapiens
gcttaaaaaataggtaaggtgcttaggatagtgtgtggcatgtaggaagtgttcaataaaagtattcatcgttgttaaccagcatcacattaaacaggagmgctcaattggaggctgccatttaggaattccatttaaaggaatggtagaattccacctttcttgccattctggactcctcacaagtgtttactgaaatgt

SEQ ID NO: 534960 - DNA, 201 bp, Homo sapiens
ctcaagtgatctgcccgcctcggcctcccaaagtgctgggattacaggcatgagccactgcgcccggcctatatgtttgtgttttaattacagaatacatggctgactgtacaaaagttttaagtacatgtataggcactaatatggaaaataaaaattacccatggggcaccaactcagagatgacgattaccaaagcct

SEQ ID NO: 534961 - DNA, 201 bp, Homo sapiens
gaagcagcagcaggcacttttcctgtcacaatgagcccatggtgtggccagggcagagtatccatacataggaaacaataaaagaacaaagtctgtgttamagatcagttcctatggcccagacattgagaacacagggagcttttatagggacaagagccatggaaaggccatacaggatacagacccagggaaagggtt

SEQ ID NO: 534962 - DNA, 201 bp, Homo sapiens
gcgagacgagaccaatacaatacagggtacagggcagtcaagccacaggaagcagatggcttgtgatgaaaaaggtgggcttgggaatcagctagatctgrtatcaacttctgattccaacagttgagtctccataggcagtccttaacttgcctgaagtcacagtttgctcatctgtgaaataagaagtaataggtagat

SEQ ID NO: 534963 - DNA, 201 bp, Homo sapiens
gcgattgtgcagttgctgtgcagtggccctgaggcaaagctccctgcctttaccaccttttaggggattgctggcctagagcatggtcagaatgctggtcstatgctccctccctccccttaccttggaacccaggccagtggcccatctccattcatgcacaatctgttttgagtctcagccatgggttccccagaatgg

SEQ ID NO: 534964 - DNA, 201 bp, Homo sapiens
caatacaatacagggtacagggcagtcaagccacaggaagcagatggcttgtgatgaaaaaggtgggcttgggaatcagctagatctgatatcaacttctsattccaacagttgagtctccataggcagtccttaacttgcctgaagtcacagtttgctcatctgtgaaataagaagtaataggtagatctacttcgtggg

SEQ ID NO: 534965 - DNA, 201 bp, Homo sapiens
atttgtgcgatcctgggtgtttgagcttctccgtgctttacgtcgtgggcctggttgtgtttgtgtgcccgcgcagttattgtgccctttgtgtcaggcatatattgggccatgtggtctacgactgctccgtgtgtgataagtcagaacttcgtgcatgccggggtgctcctcgtgtgctgagtgccttctccgtgtgcg

SEQ ID NO: 534966 - DNA, 201 bp, Homo sapiens
gagtagagagagggcagataaacaaagtgaaggcaaaaaaaatctaatccagacttggaactgccaggagactggaactcaggacttgccacaaagagaartgaataatttgggatagcataactaagcagaaagctgctagacctatctatcaattgtttacctgagagaagagggaaatattctaaatttcttgcttca

SEQ ID NO: 534967 - DNA, 201 bp, Homo sapiens
gggctcttgatggcagaacacagcatccactactatctcctttcttccctctgttacacagcagtaagagaggggtggagaggagttaaaatcatgtgttytcaatgcccggcacataataactgctgaattgctattttataattattatatgggacataacaattccagtgggatctaactaacaaggaataggctgga

SEQ ID NO: 534968 - DNA, 201 bp, Homo sapiens
caggggaaatgagtgcctcagacttgcgcgagggctcttgatggcagaacacagcatccactactatctcctttcttccctctgttacacagcagtaagakaggggtggagaggagttaaaatcatgtgttttcaatgcccggcacataataactgctgaattgctattttataattattatatgggacataacaattcca

SEQ ID NO: 534969 - DNA, 201 bp, Homo sapiens
tctgagctatacatgcaatttactggggagcgttcatgggagtaacatccatgaaggatgagggaagttgacttccatgcagcacaacagaggcttcagawgatcctacaggcagctttgggcgaggggatcaggccctttgtaaccacatcaacccgacatgggatatgggctgttcctgggtagtggatgcagccctgg

SEQ ID NO: 534970 - DNA, 201 bp, Homo sapiens
ttctgggctgggagaaaagaaacttgggttcaaatcctgactggcgcagaattaccaaagtcccctaccctcttggggcctcagtttctccagctgtaaargagggcattgttccagttcaaagctgcactgagcaactattgggctggaggctgtggggacagaagggagcaggtaggtcccagctctcaggagagactg

SEQ ID NO: 534971 - DNA, 201 bp, Homo sapiens
gagagcggcactataaataggcccccatccttcctcaggcccaggccccagccagctcaggctacactatcccaggatcagcatggccgtccgccagtggrtaatcgccctggccttggctgccctccttgttgtggacaggggtgagtgggcagaacctggattctctgtggctttgtgttggtaggtgagcttggggtg

SEQ ID NO: 534972 - DNA, 201 bp, Homo sapiens
gaactcccgatctcaagtgatccacccgcctcagcctcccaaagtgctaggattacaggcatgagccaccgtgcccggccttcagcacagaattctaaggratcagtggggcacacaggaataagtagaaattagctaggaaaaaggagcaagggaagataattccaagtagatgaatttgaaaaggtctacaaggaaaag

SEQ ID NO: 534973 - DNA, 201 bp, Homo sapiens
aggaatagctggggcatggagaggtgtactgggaagtcagcccaagaagcaagtttagggtcagcttacgcagtaccctaaacataagactaagcagctcmggtccatagggaggcttagtgatcaggacagggaaccacggaagggctttatattttttaaatgcttttcttttccctaacagttaaatatcaagaaatg

SEQ ID NO: 534974 - DNA, 201 bp, Homo sapiens
tgtcagcgtgcaaagattaactctggtctctccatctggccctagataagataagattaggagagcggcactataaataggcccccatccttcctcaggcscaggccccagccagctcaggctacactatcccaggatcagcatggccgtccgccagtgggtaatcgccctggccttggctgccctccttgttgtggacag

SEQ ID NO: 534975 - DNA, 201 bp, Homo sapiens
tctcgaacttccaaccccaagatttgcccgcctcggcttcccaaggtgctgggattacaccaatgcactttagtattcaattcctgaacacccacagtgtrggacattgaaccaagtgctgcgcaaaggcagacataaaggaaccccaaggagctcaggtgcatagggaggcggggtgacccagtgagtgggacagtacat

SEQ ID NO: 534976 - DNA, 201 bp, Homo sapiens
ttgagactcttgagattgccccttcatgtagtggaatgaggaggctcggagccaccttcccatccacagcctcagcatcgtccccgtcagtccatcagaayccagccccgcttattcagtgccaaagagccaaatagtttacatacattatttcaattagccctatgtgagagaaacgccactattataatttttacagat

SEQ ID NO: 534977 - DNA, 201 bp, Homo sapiens
gaaaagcctgctctgaagaagtttggtttttgtttgtttgtttttgtttttgttttttgcacatttcagactactgcctgggctgagtgaggagggggcaytttgggtcaaggtcaagggcagcctgggggtaaatgtagcttttccccacatcccccagaaagaaactctgacatcttagagttctgaacaccccctcct

SEQ ID NO: 534978 - DNA, 201 bp, Homo sapiens
tcatcacctttccttgaggaattccaggttgggtagttgctggaccaagctccctgaagcagaagcagtcctcagacccctagacctggggtctagagccrgcataatctaattcttgcttctttgtgtttcagaagtgccagtggcagcaggaaagctccctttctcaagaatggtaaggcagctgcgtgttgttctcac

SEQ ID NO: 534979 - DNA, 201 bp, Homo sapiens
ataacaattccagtgggatctaactaacaaggaataggctggactgtcaccttcctaatttttgaatttctgtctctgtttatggaacccaagatcacatyagctttctggcagccccattgtctggtggctcatcacctttccttgaggaattccaggttgggtagttgctggaccaagctccctgaagcagaagcagtc

SEQ ID NO: 534980 - DNA, 201 bp, Homo sapiens
caatggggtagaggaaaaggggaaaggcaataaacaagatggttacaatgtatgttaaacggtatgttagaagctgataaaagttaaggaaaaaatacttrgcagggtgatgggcactggaagggggttgcaatttcaaatcaggggaggtatctctgagagtccgatgtttgagcaaagcttgaaggagatgagggacta

SEQ ID NO: 534981 - DNA, 201 bp, Homo sapiens
gaggctgtggggacagaagggagcaggtaggtcccagctctcaggagagactgacaagtatgctgggtgcagggtggtggatgctaagagagacctggccraggtcttctgagctcccgatctctctgaaaggctgtggtttgggacttgggcagccatgtgagcacgacagagccctttcccaggactggacacatatac

SEQ ID NO: 534982 - DNA, 201 bp, Homo sapiens
agcagtaagagaggggtggagaggagttaaaatcatgtgttttcaatgcccggcacataataactgctgaattgctattttataattattatatgggacayaacaattccagtgggatctaactaacaaggaataggctggactgtcaccttcctaatttttgaatttctgtctctgtttatggaacccaagatcacatca

SEQ ID NO: 534983 - DNA, 201 bp, Homo sapiens
tagaacagagcctaagttagacagcatcactggccttctggaacatacaattggtgtaagggggaagccaggctgatagtcagccaattgcagcacagaatttttttttttttttttttgagacagactctcactgtcactcaggctggagtgcagtggcacgatcttggctcattgcaacctccgcctcctgggttcaag

SEQ ID NO: 534984 - DNA, 201 bp, Homo sapiens
atcatgcaggccagggagagttcaggagcccccagggagagaggggcctcctgggaatgatgggtggttccgtatcctggggtcttcaatgggaccagcavaagttctgattagtgcctctgaagagggtgtgaacaagtccccaggagcttgagggcacaaactcactccacacacatagacataaacacaggcatacgc

SEQ ID NO: 534985 - DNA, 201 bp, Homo sapiens
atttatttatttatttttgagacggagttttgctctgtcacccaggttggagtccagtggcacaatcttggctcactgcaatctctgcctactgggttcargtgattctcctgccacagcctcctaaatagctgggattataggtgtgcaccaccacgcccagcaaattttgtatttttagtagatatggggtttcaccat

SEQ ID NO: 534986 - DNA, 201 bp, Homo sapiens
gcctcacaagtagctgggactacaggtgcgtgccaccacactcagctaatttaaaaatttttttaaatttatttttatttatttatttatttatttttgasacggagttttgctctgtcacccaggttggagtccagtggcacaatcttggctcactgcaatctctgcctactgggttcaagtgattctcctgccacagcc

SEQ ID NO: 534987 - DNA, 201 bp, Homo sapiens
cctggattcaaacgatcctcctatctcagcctcacaagtagctgggactacaggtgcgtgccaccacactcagctaatttaaaaatttttttaaatttatwtttatttatttatttatttatttttgagacggagttttgctctgtcacccaggttggagtccagtggcacaatcttggctcactgcaatctctgcctact

SEQ ID NO: 534988 - DNA, 201 bp, Homo sapiens
agggcattgttccagttcaaagctgcactgagcaactattgggctggaggctgtggggacagaagggagcaggtaggtcccagctctcaggagagactgayaagtatgctgggtgcagggtggtggatgctaagagagacctggccgaggtcttctgagctcccgatctctctgaaaggctgtggtttgggacttgggcag

SEQ ID NO: 534989 - DNA, 201 bp, Homo sapiens
aggcaacgcctggcaggatccagggccactgacctcatggccagtcccacacccatttccccagctggaaacagacctgggcacagggggaaagggaaackggtctggggacctgttcaggagcagcctgcttacgcccagcctggcacctacacctacctactccttgagcagttgggaacactgaaaagcctgctctga

SEQ ID NO: 534990 - DNA, 201 bp, Homo sapiens
cctgcttacgcccagcctggcacctacacctacctactccttgagcagttgggaacactgaaaagcctgctctgaagaagtttggtttttgtttgtttgtktttgtttttgttttttgcacatttcagactactgcctgggctgagtgaggagggggcattttgggtcaaggtcaagggcagcctgggggtaaatgtagct

SEQ ID NO: 534991 - DNA, 201 bp, Homo sapiens
ggggcgagagggattcggctggagaagctgtaagccgtgggcggtggagggcttgctgtgtggagccagtaacctgttctataaaccactcccccccaccrctgtgtgcccagacgtctttttctggagagtatatggagtttatcagatttgccaaagacagtgatagtgtaatgaccggtagactgaacatatcagtgc

SEQ ID NO: 534992 - DNA, 201 bp, Homo sapiens
tgctggcatttaatgtgcagtagtgaatgagtgaaggactgtaatcataatatgctcactacttgctcttgtttttgttttaataaactatagtagtgttwtaaaaagttaaatgaagaataaacgcaaatataaaagctctgattttgccctgtatgtatgatgacttcagtgtgcaagatgaagtttaatacctgtaaa

SEQ ID NO: 534993 - DNA, 201 bp, Homo sapiens
caggctggtctcaaactcttgacctcaggtgatctgcccatctcagcttcccaaagtgttgggatttgtaatcccaattgtatgagccaccgcgcctggcctaaaaacatctttggtaaggaagaactacccttttgagagtaagaatagctttgtttaaatatgtcgtaagaagggttaggctgttgcaggatgggtttt

SEQ ID NO: 534994 - DNA, 201 bp, Homo sapiens
ggtgatccaccctcctcagcctcccaaactgctggaattacagatgcgaaccacagtgcctggcctaaccctcactcttgtgagttgttttttttttttttccctctgagaaaccagatttaaaactaggtaatgaaacagttcactgatggtaaatggtaaaggctgcctagagtgtgtggaatgactttgaatccttaa

SEQ ID NO: 534995 - DNA, 201 bp, Homo sapiens
ctctacaaacacaggttttcttacatgagttatgttctaagagacgttgcccaaacccttactgaactaaaatatgtgggtcagaggtgaggggcacgaaktctcagtttaaaaaaaaaaaaaaaggcgtgtttttttgccctgttagaaaatactcctccccttgtattttacggaccacatgggctaagggagtgtcta

SEQ ID NO: 534996 - DNA, 201 bp, Homo sapiens
tgtcagtgtatgatactgatagcgctttaagtccttatttaagaggtacgtactgaagtatttgtgggttaatggatatagttggagtttgcttgaaagtrtatgtggggggcatgcgtaggggtgtaatacatgaaatattagtcatgagttagtaactgctgaagccaaattggatggatatgtaggaattcattgtac

SEQ ID NO: 534997 - DNA, 201 bp, Homo sapiens
ccaactgaaaacctcccacctaaagaaatatcagcacttttttctgtgtatattttaaatacagttgggatcaagctagtttggtatcttttttgtaatawgtaaaattatttattggaaagtgtgttctaataagaatgaaactcattggaatgatctcatcagttgtacattcagagggtagcattccatcaggcttcg

SEQ ID NO: 534998 - DNA, 201 bp, Homo sapiens
ggtacggtgtttttttgttttgttttgttttgtttttaagcacctttaatatgacacctgaaaatggagctaagacttctagatagatatgtaaaattgaytcatgtacactacctagattttgggggaggagagggcagatatgaagaaaaccaactgaaaacctcccacctaaagaaatatcagcacttttttctgtgt

SEQ ID NO: 534999 - DNA, 201 bp, Homo sapiens
tagatagatatgtaaaattgattcatgtacactacctagattttgggggaggagagggcagatatgaagaaaaccaactgaaaacctcccacctaaagaartatcagcacttttttctgtgtatattttaaatacagttgggatcaagctagtttggtatcttttttgtaataagtaaaattatttattggaaagtgtgtt

SEQ ID NO: 535000 - DNA, 201 bp, Homo sapiens
agtgaaaggtaacaggattgctttgccacgtaagttttactcctgccaatgagctaggacagtgctctgttctttatattccctgcctcataaaaatgtgmccatacttaaggaagaacttggcttcaatgtttttaggtcagattgtcaagcatggagatatcaagtgtgtactaaatgaaggcatgccaatttatcgta

SEQ ID NO: 535001 - DNA, 201 bp, Homo sapiens
cctaagcagcagatgggtggggaaaacatccctggacaaaaatttgccctcaatctttgtaaagcaatttaagtgccttaaagctctcaccagttttcaayctcatttatgataaattgaattgcttttaattataaatatccaaaagcatctctgtaggaaacttaaattgtaactcaatactaagtataaattcaggtc

SEQ ID NO: 535002 - DNA, 201 bp, Homo sapiens
cggtaaagacttttatcaaccactcaaattgatatcacatatttgggttgttggttttgttttttgtttttttgttttttttaaagtgttttccattactyttagaacctatttctcaggaagattgttaaccattgttcagatcataagaggttgaatacataggatcagatttttagctttttgtctctaagtatggaa

SEQ ID NO: 535003 - DNA, 201 bp, Homo sapiens
taactcttagcagcttagtaaataatgttcttttatccagacataattttgcacattggtatattactaatacagaatatattaggaatctcctcatttartataacaggatcatcttttgaaatctgtggtcctgtaaatgattgaatagtgttccaaacttaattctctcctgttaaaccatagttcttccatctttta

SEQ ID NO: 535004 - DNA, 201 bp, Homo sapiens
ttagaagttcatattgacaaaggtgagttctgagttacttattctgaagtcttgaatgctgtggcagatttattattaacattttataattgtttaaaaakcattcttaattaggttatatatgatcctatcaatcagaaataactcttagcagcttagtaaataatgttcttttatccagacataattttgcacattggt

SEQ ID NO: 535005 - DNA, 201 bp, Homo sapiens
ttttgggggaggagagggcagatatgaagaaaaccaactgaaaacctcccacctaaagaaatatcagcacttttttctgtgtatattttaaatacagttgrgatcaagctagtttggtatcttttttgtaataagtaaaattatttattggaaagtgtgttctaataagaatgaaactcattggaatgatctcatcagttg

SEQ ID NO: 535006 - DNA, 201 bp, Homo sapiens
cgttgaagcactgtgtggcttccagaagccaatatctactcttgacaaccgaaccatcgtcatcacctctcatccaggtatgggaactaggcaagcttaarcttctcttttctattctagtattttccttgtctcctgttaacaaagtgtagtataggcactgagggaaacccattgtttttctttctcggttacatatcc

SEQ ID NO: 535007 - DNA, 201 bp, Homo sapiens
agcactgtgtggcttccagaagccaatatctactcttgacaaccgaaccatcgtcatcacctctcatccaggtatgggaactaggcaagcttaaacttctsttttctattctagtattttccttgtctcctgttaacaaagtgtagtataggcactgagggaaacccattgtttttctttctcggttacatatccttctct

SEQ ID NO: 535008 - DNA, 201 bp, Homo sapiens
atacctttctgtaggaggggtttatcataatatgctgcttcttgaaggcttgcacttccagaattgtgtttccttctgctgtgccattcatatatatatayatatatatatatatatatatatataatcttgaccagtcctggtcatttgctcccctccttgtctgtggaccatgataagcccaagtagtgacttcagagc

SEQ ID NO: 535009 - DNA, 201 bp, Homo sapiens
aacctcccacctaaagaaatatcagcacttttttctgtgtatattttaaatacagttgggatcaagctagtttggtatcttttttgtaataagtaaaattdtttattggaaagtgtgttctaataagaatgaaactcattggaatgatctcatcagttgtacattcagagggtagcattccatcaggcttcgaaaatatta

SEQ ID NO: 535010 - DNA, 201 bp, Homo sapiens
ggcatacttttaaggatttgaaaggggagttaggtgaagaattgggtctcataaaaattcatggtttttttggagacggagtttcgctcttgtttcccagrctggagtgtgcaatggcacgatctcagctcattgcaacctctgcctcccgggttcaagcagttcttctgcctcagcctcccaagtacctgggattacagg

SEQ ID NO: 535011 - DNA, 201 bp, Homo sapiens
agaagtagaaattgatactcttctgtggtgactcaataaatacatcagcttccctggccaatcttgattaatgagaatttactgtgctacagaatttttgsatgaagtaattggccatgttgctcaatacggtacgaagtgaaagcttcaaaaaatatattgtgacagaaatgaatgtttggattattgtgaaatgtgccc

SEQ ID NO: 535012 - DNA, 201 bp, Homo sapiens
gaaacgagtttgagaacttttttcagttggtggaaaggcaataatattgttgtgaataagtccttgtggaaggaccactagttaggaacttactaacttaytagcaggtgacttcatacttctaacctcagtgtccttatgagatcttgaccttccatttcctattctgatttaagtgaagtaaggcactccttagtagcc

SEQ ID NO: 535013 - DNA, 201 bp, Homo sapiens
atgggagtaagttaaagttcagaaacctaaaacttcttcaagctcatatagcaagccaacagagccagggctgaaaactggttcgttgcctgccatctatstattcttgtttcagctttattgtgtcaaaattatgtatttaatatgtttatcaggaaagtggcctatgggctctagaaatactgcttataggagtaaaat

SEQ ID NO: 535014 - DNA, 201 bp, Homo sapiens
tgaaagaaacaacttactacgatgttttgggggtcaaacccaatgctactcaggaagaattgaaaaaggcttataggaaactggccttgaagtaccatccwgataagaacccaaatgaaggagagaaggtgaatagtatctactcttaaacatatctgaatagttctttgccagacgtatagtatttctattatggcctga

SEQ ID NO: 535015 - DNA, 201 bp, Homo sapiens
aggaagaattgaaaaaggcttataggaaactggccttgaagtaccatcctgataagaacccaaatgaaggagagaaggtgaatagtatctactcttaaacrtatctgaatagttctttgccagacgtatagtatttctattatggcctgaaatcgagtatctaatatagtaactatgatcacttctcggcctttttagcta

SEQ ID NO: 535016 - DNA, 201 bp, Homo sapiens
ggcagtagaagatggtgaaagaaacaacttactacgatgttttgggggtcaaacccaatgctactcaggaagaattgaaaaaggcttataggaaactggcyttgaagtaccatcctgataagaacccaaatgaaggagagaaggtgaatagtatctactcttaaacatatctgaatagttctttgccagacgtatagtatt

SEQ ID NO: 535017 - DNA, 201 bp, Homo sapiens
gcccctagtcccctgcctggcgccattggcgccgggaaaccgatggagccgcggtcgggaggcagttggccgcgtgggtaggaccgctgtcagttcctggrcccacgatttcccttttggagggctggtgtggtgccctggcaacccatccccggcacgcacagtgaatgggcccgagacctttcctagacctccctcctt

SEQ ID NO: 535018 - DNA, 201 bp, Homo sapiens
ccccggctgcgcacagctcggcgctccttcccgctccctcacacaccggcctcagcccgcaccggtgagtttgagccctcgcgctgcccctagtcccctgsctggcgccattggcgccgggaaaccgatggagccgcggtcgggaggcagttggccgcgtgggtaggaccgctgtcagttcctgggcccacgatttccctt

SEQ ID NO: 535019 - DNA, 201 bp, Homo sapiens
atggtgaaggagaccaagaaccaggactggagccaggcgatattatcattgtgttagatcagaaggaccatgctgtttttactcggtaaagacttttatcmaccactcaaattgatatcacatatttgggttgttggttttgttttttgtttttttgttttttttaaagtgttttccattactcttagaacctatttctca

SEQ ID NO: 535020 - DNA, 201 bp, Homo sapiens
gcgcccccgcgccgttgcccaggtaacggcggggcggtggcagcggccgagaagggcgggacttccggcgggtgacgcgcccgggttcggctacaaaagasgacggctgcggcgcgccgggcggaactttccagaacgctcggtgagaggcggaggagcggtaactaccccggctgcgcacagctcggcgctccttcccgc

SEQ ID NO: 535021 - DNA, 201 bp, Homo sapiens
gggaagaaaagggtgtctttgtaaaagaccctttgcttttattaaacaaaaaaacagcctgctttggtacatctactgattcgtgatttgaaaaatataartatgtgtcatattttatgcagacgaggagaagaccttttcatgtgtatggacatacagctcgttgaagcactgtgtggcttccagaagccaatatctact

SEQ ID NO: 535022 - DNA, 201 bp, Homo sapiens
gggtcaaacccaatgctactcaggaagaattgaaaaaggcttataggaaactggccttgaagtaccatcctgataagaacccaaatgaaggagagaaggtkaatagtatctactcttaaacatatctgaatagttctttgccagacgtatagtatttctattatggcctgaaatcgagtatctaatatagtaactatgatc

SEQ ID NO: 535023 - DNA, 201 bp, Homo sapiens
aaattgatatcacatatttgggttgttggttttgttttttgtttttttgttttttttaaagtgttttccattactcttagaacctatttctcaggaagatygttaaccattgttcagatcataagaggttgaatacataggatcagatttttagctttttgtctctaagtatggaacgttgaaaatgtgtttcaattagat

SEQ ID NO: 535024 - DNA, 201 bp, Homo sapiens
ttatttatttattttttttgagatgcagtttcgctcaacaggcccaggctggattgcgatggtgagatcttggctcactgcaacctccaactcccaggttyaagcaattctctcacctcagcctcccgagtagctgggattacaggcgcccaccaccacgcccagctgatttttgtatttttagtagagacgggtttcacc

SEQ ID NO: 535025 - DNA, 201 bp, Homo sapiens
aatataaaagctctgattttgccctgtatgtatgatgacttcagtgtgcaagatgaagtttaatacctgtaaaaactacaaagaagttcccctagcatttytaggccaaaccttgtaattgacttcagctatgtacgtggacaagcttagactgaaatgctaggtatatgtattggcttcagtgtatgacccttcattgtt

SEQ ID NO: 535026 - DNA, 201 bp, Homo sapiens
tgggtgacagtaagaacccacctttttttttttttttttttaatggagtggaggtgaaattgggaacatcttaaactagtttaggattaattaatatttcrgcttggtttggtggcttacgcctgtaatcccaacactttaggaggccgaggtggatggtcaggagttcaagaccagcctagccaacatggtgaaatgcca

SEQ ID NO: 535027 - DNA, 201 bp, Homo sapiens
aacactcactgctggcatttaatgtgcagtagtgaatgagtgaaggactgtaatcataatatgctcactacttgctcttgtttttgttttaataaactatrgtagtgttataaaaagttaaatgaagaataaacgcaaatataaaagctctgattttgccctgtatgtatgatgacttcagtgtgcaagatgaagtttaat

SEQ ID NO: 535028 - DNA, 201 bp, Homo sapiens
agaagagtggcttgaactcaggagttcaaggttatgatcatgccccactgcattctagcctgggtgacagtaagaacccacctttttttttttttttttttaatggagtggaggtgaaattgggaacatcttaaactagtttaggattaattaatatttcagcttggtttggtggcttacgcctgtaatcccaacacttta

SEQ ID NO: 535029 - DNA, 201 bp, Homo sapiens
aaacctcccacctaaagaaatatcagcacttttttctgtgtatattttaaatacagttgggatcaagctagtttggtatcttttttgtaataagtaaaattatttattggaaagtgtgttctaataagaatgaaactcattggaatgatctcatcagttgtacattcagagggtagcattccatcaggcttcgaaaatatt

SEQ ID NO: 535030 - DNA, 201 bp, Homo sapiens
aaaacctcccacctaaagaaatatcagcacttttttctgtgtatattttaaatacagttgggatcaagctagtttggtatcttttttgtaataagtaaaattatttattggaaagtgtgttctaataagaatgaaactcattggaatgatctcatcagttgtacattcagagggtagcattccatcaggcttcgaaaatat

SEQ ID NO: 535031 - DNA, 201 bp, Homo sapiens
ttcttataatcggattttgcaaagagattgctcggccttagctctcttttttattaaaagctaccagttgaaagccggttaaagttgcattttcttatttyaggcagtagaagatggtgaaagaaacaacttactacgatgttttgggggtcaaacccaatgctactcaggaagaattgaaaaaggcttataggaaactgg

SEQ ID NO: 535032 - DNA, 201 bp, Homo sapiens; identical to SEQ ID NO: 346190

SEQ ID NO: 535033 - DNA, 201 bp, Homo sapiens; identical to SEQ ID NO: 180992

SEQ ID NO: 535034 - DNA, 201 bp, Homo sapiens
gatcggccacggaggatacgaatggaagatataaaaaaagcctttccttcccattcagaaagcagcatccggaagaggctaaagctctgcgctgacttcaracgcacagggatggattcaaactggtgggtgcttaagtctgattttcgtttaccaacggaagaagagatcagagctaaggtgtcaccagagcagtgctgt

SEQ ID NO: 535035 - DNA, 201 bp, Homo sapiens
agacagggttactatattcgggaattagtggatatttttgtggttggccagcagtgtcccttgtttgaagttcctgggcctaactccagaagggccaataygcatattcgagactttctacaggtttttatttaccgccttttctggaagagtaaagatcggccacggaggatacgaatggaagatataaaaaaagccttt

SEQ ID NO: 535036 - DNA, 201 bp, Homo sapiens; identical to SEQ ID NO: 346204

SEQ ID NO: 535037 - DNA, 201 bp, Homo sapiens; identical to SEQ ID NO: 346205

SEQ ID NO: 535038 - DNA, 201 bp, Homo sapiens; identical to SEQ ID NO: 346206

SEQ ID NO: 535039 - DNA, 201 bp, Homo sapiens
gggagtgaaatgcttaattcaggaatggattttggagtttctgggtgctgaagaaatagggcctttccgcctgcgggcccagtgagtcgacacggtggggrcccgcgatccccgggacttaccactgaataaatccagtccagcgtgcgacgacttactggcttcatggtaaggaggcggcagcagtccgcgggagctggc

SEQ ID NO: 535040 - DNA, 201 bp, Homo sapiens; identical to SEQ ID NO: 346207

SEQ ID NO: 535041 - DNA, 201 bp, Homo sapiens; identical to SEQ ID NO: 346209

SEQ ID NO: 535042 - DNA, 201 bp, Homo sapiens
gtaagagtaagacagaaggtgatgtgaagacagaagcagagagatttgaagatgctacactactgggtttgaaggcagagaaagagaaaggaatgcagctytggtagctggaaaatgcaagaaagtagattctcctctggagcctccagaaggaaccaactctgctgacatcttggtttttgccctgtaagactcatgtag

SEQ ID NO: 535043 - DNA, 201 bp, Homo sapiens
acatttgtgttgtttaaagtactaactttgggaggccaaggagggcagatcacctgagttcaggagttcgagactggcctggccaacatggtgaaaccctrtctctactaaaaatacaaaaattaactgggtgtggtggcgcatgcctgtaatcccaactactcgggaggttgaggtaggagaatcacttgaaccaggagg

SEQ ID NO: 535044 - DNA, 201 bp, Homo sapiens
ctccaaagaagaaacggcgagttggaaccactgttcattgtgactatttgaatatacctcataagtccatccaccgacgccgcacagaccctatggtgacrctgtcatccatcctggagtctatcatcaatgacatgagagatcttccaaatacacaccctttccacactccagtcaatgcaaaggttgtaaaggactact

SEQ ID NO: 535045 - DNA, 201 bp, Homo sapiens; identical to SEQ ID NO: 181002

SEQ ID NO: 535046 - DNA, 201 bp, Homo sapiens; identical to SEQ ID NO: 346217

SEQ ID NO: 535047 - DNA, 201 bp, Homo sapiens; identical to SEQ ID NO: 346219

SEQ ID NO: 535048 - DNA, 201 bp, Homo sapiens
actgctagcagcttatttaaaacttggggtcctttttaaataagaaaaattatataaattttagaagttatttcataaagccatacggtattgacatattwttaaggtagtcaatgagtatttttgaattttttttttttgagagttattctggaaatgtgttataagctaggagaatccctttggacagtctttattttt

SEQ ID NO: 535049 - DNA, 201 bp, Homo sapiens
gtatttagtgatgattttgaagagctaataacttatttgatctacatgcattccaattgtttgatgtttctttttcttttttaaaatagagactggatctygctttgttgcctaggctgtttcaaattcctggcctcaagggtctcctgccttggcttcccaaagtgatgggattacaggcgtgagccaccgtgccccgcc

SEQ ID NO: 535050 - DNA, 201 bp, Homo sapiens; identical to SEQ ID NO: 181010

SEQ ID NO: 535051 - DNA, 201 bp, Homo sapiens; identical to SEQ ID NO: 181011

SEQ ID NO: 535052 - DNA, 201 bp, Homo sapiens; identical to SEQ ID NO: 181012

SEQ ID NO: 535053 - DNA, 201 bp, Homo sapiens; identical to SEQ ID NO: 181013

SEQ ID NO: 535054 - DNA, 201 bp, Homo sapiens
acatacacaattaaattttctctattagtctgttattatctgtagtttctttctttcttccctccctctctccctcctcctcccacctctttctttccatrcttctttattcttgtgttttgatgattttgatttttgttaaattagttttgggtattgccattggtttcataaattattggtaggaagaaacagaaataa

SEQ ID NO: 535055 - DNA, 201 bp, Homo sapiens; identical to SEQ ID NO: 181015

SEQ ID NO: 535056 - DNA, 201 bp, Homo sapiens; identical to SEQ ID NO: 346228

SEQ ID NO: 535057 - DNA, 201 bp, Homo sapiens; identical to SEQ ID NO: 181017

SEQ ID NO: 535058 - DNA, 201 bp, Homo sapiens; identical to SEQ ID NO: 346229

SEQ ID NO: 535059 - DNA, 201 bp, Homo sapiens; identical to SEQ ID NO: 181019

SEQ ID NO: 535060 - DNA, 201 bp, Homo sapiens; identical to SEQ ID NO: 346230

SEQ ID NO: 535061 - DNA, 201 bp, Homo sapiens; identical to SEQ ID NO: 346231

SEQ ID NO: 535062 - DNA, 201 bp, Homo sapiens; identical to SEQ ID NO: 346232

SEQ ID NO: 535063 - DNA, 201 bp, Homo sapiens
attcctgaaaattctaatatacaaaaaccatatcaaaacaaatgaaaccaccactaccaccaccaccaccacaacaaattttgtgttccatgtacaaaaamaaaacaaaacaaaacaaaaaacaggagttaggttgtcagctcagctcattataaacagcaatgtcacccacatgaatcctgctgggataagaaatgattc

SEQ ID NO: 535064 - DNA, 201 bp, Homo sapiens
aacttggaggtaacttctttgaggacctcatcatgctgatcctttgaactattcgaggatttttgggctttctctgagtttctgtctcttctatcctgttktttgtttgtttgtttttgtttttgtttttttaaagacagtcttactctatcgccctggctggagtgcagtggtgcgatctcggctcactgcaatctccgc

SEQ ID NO: 535065 - DNA, 201 bp, Homo sapiens; identical to SEQ ID NO: 181026

SEQ ID NO: 535066 - DNA, 201 bp, Homo sapiens
tcaaaaaaatcaaaaaattagccagcatggtggcacgtggctgtagtctcagctgcttgggaggctgaggcaggaggatcagttgagcctaggagttggaractgcagtgaattatgatcatgtgactatattccagcctgggtgacagagcaagaccctatctcagaaaaaaaagagaagaaaaaaaaaaaagagagaaa

SEQ ID NO: 535067 - DNA, 201 bp, Homo sapiens
aaattggtcaaagcagtcacaggtcatctcagatttcaggagagggccaatagaccctacttctcaatggaggagtggcaaagaatttgtcctcatttttwtttatttatttatttatttatttatttatttatttatttatttatttttgagacagagtctcgctatatcaccaggctggagtgcagtggtgtgatctta

SEQ ID NO: 535068 - DNA, 201 bp, Homo sapiens; identical to SEQ ID NO: 181040

SEQ ID NO: 535069 - DNA, 201 bp, Homo sapiens
gctggcctcttccgcccggagttggggggcggtatcacgtgatcgggggccttgcccgccttttagagaggggaataaacgagaaaatgttaaaaattgcttttttttttttttttttgccaactaaggagataggcgtacctccactggttttctttctagttgcaatgcaatattaatgcaggataaggtgctgtcgtg

SEQ ID NO: 535070 - DNA, 201 bp, Homo sapiens
gggcggtatcacgtgatcgggggccttgcccgccttttagagaggggaataaacgagaaaatgttaaaaattgcttttttttttttttttttgccaactarggagataggcgtacctccactggttttctttctagttgcaatgcaatattaatgcaggataaggtgctgtcgtgtccatttaaaagttaatttgaaaaac

SEQ ID NO: 535071 - DNA, 201 bp, Homo sapiens
tgtaatgacacttgcttttcagaaagagaaatgaggaaaggtgagtcaacaaaattctgatactttttctgaattcgccttgatgtgaggaagaagtggaytgaggcacgaggaggtggggaaactgacgcgtaggagccactcttcgtgccactgcagacccttgctaaggcagaggagtaggcagggccgggcattctc

SEQ ID NO: 535072 - DNA, 201 bp, Homo sapiens
ggggtattgctcaagaaatttttgcccagaccaaaagttctggagattttccccaatgtttccgtgtaatagtttcatagtatgaggtcttagatttaagkctttaatccattttgattttttttttagatggtgagagataggggtctagtttccttcttctgctatggatatccagttttcccagcaccccttattgaa

SEQ ID NO: 535073 - DNA, 201 bp, Homo sapiens
tttcaatgagccaagatcgcaccactgcactccagtctgggtgacagagtgagattgcacctcaaaaataataataataatgatgataagttgcattgtgttttttttggcatttctgtaatgtccaataatgttgagcatctcttctgtgcttatttgtcattcaaaactgtactttatcaaagggtctattcaaatttt

SEQ ID NO: 535074 - DNA, 201 bp, Homo sapiens
tttgtcttttcaaagaaacaactcttggtttcattgggttttttttttctctattacctttcttttccctttttctttgatttctgatcttcatttatttycttttgcttacttcaggtttcatttgttcttctaataattttttaagtggaagcttaaatcatggatttgagtcatttcttcttaaatattattcttcaa

SEQ ID NO: 535075 - DNA, 201 bp, Homo sapiens; identical to SEQ ID NO: 181051

SEQ ID NO: 535076 - DNA, 201 bp, Homo sapiens; identical to SEQ ID NO: 181055

SEQ ID NO: 535077 - DNA, 201 bp, Homo sapiens; identical to SEQ ID NO: 181056

SEQ ID NO: 535078 - DNA, 201 bp, Homo sapiens
gaggatggaaagctgacccttccattggctgggattatgcagcatgatgccaccaagctgttgccaagtgtcaccgaactttttccagaatttcgacctgsaaaagtgttacgcttcctacatctttttggaccagggaagaatgtcccatctgtttggcggagtgctcggagaaagaggaagaagcatcgtgagctgata

SEQ ID NO: 535079 - DNA, 201 bp, Homo sapiens
tgagtaaatttgcccgtggatcaaggttttctgtggctgagcatcaagagcgttacaaagaggaatgtcagcgtatctttgacctacagaacaaggttctrtcatcaactgaggtcttatcaactgacacagacagcatctcagctgaagatagtgactttgaagaaatgggaaagaacattgagaacatgttgcagaaca

SEQ ID NO: 535080 - DNA, 201 bp, Homo sapiens; identical to SEQ ID NO: 181059

SEQ ID NO: 535081 - DNA, 201 bp, Homo sapiens
actgcatctaccgggactgaccgggtgagaaatgaaaagcctggagggaaacgaaaatacaaaacacggcatttggagggtactaacgaagtggctcagcsatctcgtgaatttgcttctaaagcaaaggacagtcattaccaaaaatcttcatcaaaattggatggaaactacaaaaatgagagtgataccttttcagac

SEQ ID NO: 535082 - DNA, 201 bp, Homo sapiens
ttcctggcctcaagggtctcctgccttggcttcccaaagtgatgggattacaggcgtgagccaccgtgccccgcctctttgatgtttctgatgaagactgtttgtttgtttgtttgtttgttttgaaacagggtctcattctgtcacccaggctggagtgaggtggtgcaattatggctcactgcagcctggacctcccag

SEQ ID NO: 535083 - DNA, 201 bp, Homo sapiens
tcctggcctcaagggtctcctgccttggcttcccaaagtgatgggattacaggcgtgagccaccgtgccccgcctctttgatgtttctgatgaagactgtttgtttgtttgtttgtttgttttgaaacagggtctcattctgtcacccaggctggagtgaggtggtgcaattatggctcactgcagcctggacctcccagg

SEQ ID NO: 535084 - DNA, 201 bp, Homo sapiens
gaaccgcacccatagaagatggcaaacttaattgataaaggttctgtgggttctgactgctccaccaactggctgtttctccattggttcattaggtttamggaaagaagccctctccataacaaaagtgcaaggtgaagcagcaagtgctgatgtagaagctgcagcgagttaaccagaagatgtagctaagatctgtga

SEQ ID NO: 535085 - DNA, 201 bp, Homo sapiens
gactctcttgttaggggcgaatgtagctggagactttaagtggaagccattgctaattaccattctgaaaatccctaaaaagcccttaagaattttgctcwgtctactctggttgtgatctataaatggaacaacaaagcctggatgacagcacatctgtttacagcatggtttactgaatattttaagcccactgttgag

SEQ ID NO: 535086 - DNA, 201 bp, Homo sapiens
gtcctttttaaataagaaaaattatataaattttagaagttatttcataaagccatacggtattgacatatttttaaggtagtcaatgagtatttttgaattttttttttttgagagttattctggaaatgtgttataagctaggagaatccctttggacagtctttatttttcttcttaaaaatttatatgattcaaaac

SEQ ID NO: 535087 - DNA, 201 bp, Homo sapiens
tcctttttaaataagaaaaattatataaattttagaagttatttcataaagccatacggtattgacatatttttaaggtagtcaatgagtatttttgaattttttttttttgagagttattctggaaatgtgttataagctaggagaatccctttggacagtctttatttttcttcttaaaaatttatatgattcaaaacc

SEQ ID NO: 535088 - DNA, 201 bp, Homo sapiens
attctactgcctcagcctcctcagtagctaggattacaggcatgcaccaccatgcctggctaattttgtgttttcagtagagatggggtttctccatgttrgtcaggctggtctcgaactcctgacctgaggtgatctgcccacctcggcttcccaaagtgctgggattacaggcatgagccaccgctcccggccaactga

SEQ ID NO: 535089 - DNA, 201 bp, Homo sapiens
ttcagccttcagtttgcctttgccttgctactgtattcattctttattcagtagaaattgcagtgcctactatgtggcaggttctgcactaagttttgggktttttttttttgttgttgttgttgtttttttttttgagttggagtctggctctgttgcctaggctggagttcagtggtgcaatctcacttcaccacaacc

SEQ ID NO: 535090 - DNA, 201 bp, Homo sapiens
ctactgtattcattctttattcagtagaaattgcagtgcctactatgtggcaggttctgcactaagttttggggtttttttttttgttgttgttgttgttkttttttttgagttggagtctggctctgttgcctaggctggagttcagtggtgcaatctcacttcaccacaacctctgcctcccgggttcaagcgattctc

SEQ ID NO: 535091 - DNA, 201 bp, Homo sapiens
ctgtgtcacataatctttgtttttttctacactttttttcaaattgaggtggagctttgctttgttgcccagcatggtctcaaactcctgggttcaagcartcctcccatcttggcctcccaaagtgctgtgattacaggtgtgagccaccatgcctggcctacaacactttctaaatgttaaaacaatttttagcttttg

SEQ ID NO: 535092 - DNA, 201 bp, Homo sapiens
gaagatttaaaatgtgctgaataaatgattatttcctcattcttggtttttagtcaaaacctgaatcagttattagaaaactgtgggatatggccattttaaaaaaatacagtaggattagttgttacaatgtcatgaaaatcggtaagttgtttcctattttacctgcaaagatattgggcgatggtaaataacattgga

SEQ ID NO: 535093 - DNA, 201 bp, Homo sapiens
aataggatttttagaatataggactgggaagtaccatctttagattctactctatcagtcactctcctttgctttccttcatgtccagttatgattttccmgataatgttttaatcactctccttgcaataccctccaactcacttgcccttctttctttcatcatttacctactttaggagttgggaaacttttcctcta

SEQ ID NO: 535094 - DNA, 201 bp, Homo sapiens
agatttttctgatcaacatgagcaagtttgcctccttgtccccttgaaaataataatgtcttgtgtggttgggtgaagctatatatatatatattttttgktttgttttgttttgttttgtttttgctaaaaaaagaatcttacagggagataaagggatttctggaggaattaatttttttttcaattatgtgggacaaa

SEQ ID NO: 535095 - DNA, 201 bp, Homo sapiens
actatggaacatagactttttgagaggttaatcttatttttaggttcttgggagcacctcactcttactttcatgtgatgattatgttagaaaccgttgcyttggtggagcaggttaggctgcctccaaggaaatctaataggatttttagaatataggactgggaagtaccatctttagattctactctatcagtcactc

SEQ ID NO: 535096 - DNA, 201 bp, Homo sapiens
agaccactcatcacaattagcagttgattactaaatgccttatctcccactagtctgaaagttctgtgaaactatgtatcagtgtactgctagactctttyactacttgacaaccaacatgcttaaaacactgggtgaatgaatgggacctggagaatttgaaaatgggctaaggcctgctttcaagaagctccactatct

SEQ ID NO: 535097 - DNA, 201 bp, Homo sapiens
ttcattcgtggcagtttctgctggaaactgaactccaccctggctaaactagatttctgttaaaagtgtgccctcttcccacctccccaaaactgcttcawacaactccaggctccttcagaccactcatcacaattagcagttgattactaaatgccttatctcccactagtctgaaagttctgtgaaactatgtatcag

SEQ ID NO: 535098 - DNA, 201 bp, Homo sapiens; identical to SEQ ID NO: 181060

SEQ ID NO: 535099 - DNA, 201 bp, Homo sapiens
atgccacgctaggctgctccagggctatggaggtgctgctccgtactacgtgagagctttcattcgtggcagtttctgctggaaactgaactccaccctgrctaaactagatttctgttaaaagtgtgccctcttcccacctccccaaaactgcttcaaacaactccaggctccttcagaccactcatcacaattagcagt

SEQ ID NO: 535100 - DNA, 201 bp, Homo sapiens; identical to SEQ ID NO: 181061

SEQ ID NO: 535101 - DNA, 201 bp, Homo sapiens
tgtctaagaagaatctaaaattgatgttggcaatttttaagtaagctcagacattgagaaattgtgggaagactatagttgatcaagaaatacacattaartttgaaattactttgtagttaacaatgtaatttttcttaagtattaaaaacaacactattccacatagtaatttcacatcatgttttcccttaaacattt

SEQ ID NO: 535102 - DNA, 201 bp, Homo sapiens; identical to SEQ ID NO: 181062

SEQ ID NO: 535103 - DNA, 201 bp, Homo sapiens
ccatgactagccttaagtcttctgccactggacactgtctcaagatttatcgcacatttcgagatgaagaggggaaagagtatgttcgctgtgagacagtycgaaaaccagctgtcattgatgcctatgtgcgcatacggactacaaaagatgagaaattcattcaaaaatttgccctttttgatgaaaaacatcgggaag

SEQ ID NO: 535104 - DNA, 201 bp, Homo sapiens; identical to SEQ ID NO: 181067

SEQ ID NO: 535105 - DNA, 201 bp, Homo sapiens; identical to SEQ ID NO: 346202

SEQ ID NO: 535106 - DNA, 201 bp, Homo sapiens; identical to SEQ ID NO: 181069

SEQ ID NO: 535107 - DNA, 201 bp, Homo sapiens
gctagattggagatttctgaggtacacaacacaatatttgggtacaatttaaatggagatgggctgtgaaggagagggaaaagtctgggatgaccagaccttttttttttttcaatatgagagttggatgcatggtgataccaatatccatggcgagaaataggaataggaataggaatagtctggggaggaaaattagtt

SEQ ID NO: 535108 - DNA, 201 bp, Homo sapiens
gcaacatcagttatgggagctgtgaggagcctgatcccaagttgaacacccaagacacaagcttcagcagcatcggaaatttccagctgggcatggtggctcacacctgtaatctcagcactctgggaggccgaggcgggtggatcacctgaggtcagttcgagaccagcttggccaacatgtcgaaacttcatctctact

SEQ ID NO: 535109 - DNA, 201 bp, Homo sapiens; identical to SEQ ID NO: 181070

SEQ ID NO: 535110 - DNA, 201 bp, Homo sapiens
gaaatctaaagtaacctagagacaatggtattgtcaaagtagtaggaagtagaatataacaagagtcagaaatagacacacatacattcaatggacttggtttttttacaaaggtcccaaggctatccaatgccaaaaggaaaagttttcaacaaacggtgctgaaacaattagaaatatggaaaaagtgaacctggaccc

SEQ ID NO: 535111 - DNA, 201 bp, Homo sapiens; identical to SEQ ID NO: 181071

SEQ ID NO: 535112 - DNA, 201 bp, Homo sapiens
gggagaggtgatagcaaaggggattgagagggaatgctcagagaagtggagaaaacctggaatcagtgaagtccagggaagagtatagaagagggtgagartgttgaatggcaataagaggtaaagaggtgagaactgcagagtgttccaaacttgagcaatgatggcacttataggcaaccttagcaagagcaaatgtgg

SEQ ID NO: 535113 - DNA, 201 bp, Homo sapiens; identical to SEQ ID NO: 181072

SEQ ID NO: 535114 - DNA, 201 bp, Homo sapiens
ataatagtctttgctctcactctttctcccaggcacccctttgcacagtgtttcccttatctaattacgtgtttgtttagaagttccagagactaaatctkaaagcaattcagtctactgtgggattctcccccacctggagattacttcaaggctgcagttaatttgcaacctggctgtcccagagatggcactagccca

SEQ ID NO: 535115 - DNA, 201 bp, Homo sapiens; identical to SEQ ID NO: 181075

SEQ ID NO: 535116 - DNA, 201 bp, Homo sapiens; identical to SEQ ID NO: 181076

SEQ ID NO: 535117 - DNA, 201 bp, Homo sapiens
aggaatgtgatattgccacacttagtaacaacttgaataatgccaacaaaactgtagataatattccacctctggcagcttcagttgaacaaactctcgaygtaagagaagagagcacctttgtttctgatttggagaaccagcccagtaacattgtgtctcttcaaactgagccatcaaggcaattgccatcgccacgga

SEQ ID NO: 535118 - DNA, 201 bp, Homo sapiens
agccacgatcgcgccactgcattccagcctgggcgacacagcaagactctgtctcaaaaaaataaaataaaagattacattccatccataaagttcacccktttaaagtttgtaggtcaatgattttttagtatatttacagagttgtacaaccatcacaataattaattgtagaacgttttcatcaccccagaaataaac

SEQ ID NO: 535119 - DNA, 201 bp, Homo sapiens
tgttacaaagttagtgattttaatcagttgctctttcctttgttttgttttgcttttgtttctgagacggagtctagctgtcgcccaggctggagtgcagwggcgcgatctcggctcactgccagctccgcctcccgggttcacgccattctcctgcctcagcctcccgagtagctgggactacaggcgcccaccaccacg

SEQ ID NO: 535120 - DNA, 201 bp, Homo sapiens
tgtgtattgcattgactttgaacacactggaacattatttgagtcacgggcatttttctatttttccttttaaataatgacaatcatttgaaccaattcaytgttttgaagagctgatctgcttcatagcaccctccaagttgcgatagtaataaaatattagaacaattaaaagtcataataaatgcttttccatttggc

SEQ ID NO: 535121 - DNA, 201 bp, Homo sapiens
taattaccctgattaagacaggagagaagaaactgggagaaagaaagaagataataggagagaaaggcaatgattttcttcagagacacatgtgagcattygaactcttttctgcaagttttaagagcaagcacatggtttataaatactgaaaacatccagcagaacagctgtaagtaaaaccacaacactctgtttgac

SEQ ID NO: 535122 - DNA, 201 bp, Homo sapiens; identical to SEQ ID NO: 181078

SEQ ID NO: 535123 - DNA, 201 bp, Homo sapiens
ttatatctgaaggagaagatgatgaggaagatgctgggagtgacgaagaaggagacaatcctttctctgctatccagctgagtgaaagtggaagtgactckgatgtgggatatggtggaataagacccaaacaacccttcatgcttcagcatgcttcaggagaacacaaggatgggcacggaaaatgaagaaagcatgatg

SEQ ID NO: 535124 - DNA, 201 bp, Homo sapiens
ctgctgttggcttcctttgtttctgggaataaaccaatgttgccactatcaaatttgcaggaggcaatgatgagagcagaagtggtggaagatcccaccaytggtctttaatttttaattggataaacttccttttaggtttgagagcaaatacctgacacaaaggatgccagtattaatgaatgcacagttaggaaaaag

SEQ ID NO: 535125 - DNA, 201 bp, Homo sapiens; identical to SEQ ID NO: 181079

SEQ ID NO: 535126 - DNA, 201 bp, Homo sapiens
tgtttataacactcttttattttccttttaatgtctgcaggatctgttgtgatgttctctctttcatttgatattggcgacttgtgatctctctacttttyctcatcattctgactagaaatttatgatttacttttttgtcttttcaaagaaacaactcttggtttcattgggttttttttttctctattacctttcttt

SEQ ID NO: 535127 - DNA, 201 bp, Homo sapiens; identical to SEQ ID NO: 346223

SEQ ID NO: 535128 - DNA, 201 bp, Homo sapiens; identical to SEQ ID NO: 181080

SEQ ID NO: 535129 - DNA, 201 bp, Homo sapiens
tacgttaatagctggtgcagtggcgtgtacctgtagtcctagctattcaggaagctgaggcttgagggtcacctgaacccaggagttcaaagtttgaggcyggccttggcaacatagcaagatcacatctcttaaagaaaacaataaaaaagatgttagttgtagaatttttgtagatactctttaccaggtttaggaagt

SEQ ID NO: 535130 - DNA, 201 bp, Homo sapiens; identical to SEQ ID NO: 181081

SEQ ID NO: 535131 - DNA, 201 bp, Homo sapiens
agcaaataagtcttaggaaatgctgcaaaagcacagggctgattagagatttttcttggttgggcagagttgagagtccagtgtcacagtggcaagtgtcyggggatggcagtggtgaatgtccaacagtcatgtccccatcagggcaggtattagttcctgcagcagagtcttggctgtgcatagccttctttggttcct

SEQ ID NO: 535132 - DNA, 201 bp, Homo sapiens; identical to SEQ ID NO: 181082

SEQ ID NO: 535133 - DNA, 201 bp, Homo sapiens; identical to SEQ ID NO: 181083

SEQ ID NO: 535134 - DNA, 201 bp, Homo sapiens; identical to SEQ ID NO: 181084

SEQ ID NO: 535135 - DNA, 201 bp, Homo sapiens
ttatagtagctttattcataatagtaaaaatataggaactgtttattggtaaatggataaacaaatacacattggaatactcctcaagtttcttggaagattcttggaagaatctttttttttttttttttttttttgagacagagtctcactctgtcacccaggctggagtgcaatggcacagtcttggctttctgcaac

SEQ ID NO: 535136 - DNA, 201 bp, Homo sapiens
aagatgttaaattcagctcttagtgagtggaattaaagtgtaagcaatgcaaactgaaaatgctgtagcaggagacatgcttaaatcgttggaagagaaawaaccttgaggtacttaatttaaggatattggctatgtaatatatttttgttcattcgtatatttagcaaatattgattgaataccaactatgttgtagat

SEQ ID NO: 535137 - DNA, 201 bp, Homo sapiens
cactgtgcccagctctccctcactcacggctaatttttaaattttttttacagatggggtcttgcgatgttggccagactgttcttgaactcctggcttcsagcaatcctcttgcatcaggttccgaaagtgttggaattacagagccactgcacccagcctaatttgtaagtagtttacccaaggtttttgcatctgtat

SEQ ID NO: 535138 - DNA, 201 bp, Homo sapiens
atattaagtatgatgattattttgttgttataaactatcctctgtctggacccatataatcagttatgggtgatgagctaccgaaattcacttcgtgttcrcgtaacatagagaacattgttgagttcttactgtgcatcaagcactgtgctaagggtttttatgaaatatgtcccgtcacacaaccaccttttcaattcc

SEQ ID NO: 535139 - DNA, 201 bp, Homo sapiens; identical to SEQ ID NO: 181089

SEQ ID NO: 535140 - DNA, 201 bp, Homo sapiens; identical to SEQ ID NO: 181090

SEQ ID NO: 535141 - DNA, 201 bp, Homo sapiens; identical to SEQ ID NO: 181091

SEQ ID NO: 535142 - DNA, 201 bp, Homo sapiens
ccaggctggagtgcagtggcgcgatctcggctcactgcaagctccgcctcccaggttcatgccattctcctgcctcagcctcccgagtagctaggactacrggcgcctgccaccacacctggctaatttttgtatttttagtagagacggggtttcactgtgttagctaggaaggtctcgatctcctgaccttgtgatcca

SEQ ID NO: 535143 - DNA, 201 bp, Homo sapiens; identical to SEQ ID NO: 181092

SEQ ID NO: 535144 - DNA, 201 bp, Homo sapiens
cccagccaggcctgcgccggcatcctccgaggtgagtgagattcggaacaatgggacgcgggggtcggaagggccgtgggagttggcgctcccgcctggakcggcgcctcgggacccgagggttgcggtcatggcctgcggggctgtccgggcctcggcgggccagggccagggcccccgagcggctcctgcgcgcacctg

SEQ ID NO: 535145 - DNA, 201 bp, Homo sapiens
ctccggggtctggagcggcgggggaggggccgcatttgggccggtgcgctgagccccgcccccgaggccggcgtccatctgctgcgcatgcgtgaggaagscgggtgttgtgttttgatgcgcgggagctggggggtgggtctcgctctctgccctgcttccgagctgccattggtgatgagccctttgcgtcacaggggt

SEQ ID NO: 535146 - DNA, 201 bp, Homo sapiens; identical to SEQ ID NO: 73264

SEQ ID NO: 535147 - DNA, 201 bp, Homo sapiens; identical to SEQ ID NO: 181093

SEQ ID NO: 535148 - DNA, 201 bp, Homo sapiens; identical to SEQ ID NO: 181094

SEQ ID NO: 535149 - DNA, 201 bp, Homo sapiens; identical to SEQ ID NO: 346185

SEQ ID NO: 535150 - DNA, 201 bp, Homo sapiens; identical to SEQ ID NO: 181095

SEQ ID NO: 535151 - DNA, 201 bp, Homo sapiens; identical to SEQ ID NO: 346186

SEQ ID NO: 535152 - DNA, 201 bp, Homo sapiens; identical to SEQ ID NO: 181096

SEQ ID NO: 535153 - DNA, 201 bp, Homo sapiens; identical to SEQ ID NO: 346188

SEQ ID NO: 535154 - DNA, 201 bp, Homo sapiens; identical to SEQ ID NO: 181097

SEQ ID NO: 535155 - DNA, 201 bp, Homo sapiens; identical to SEQ ID NO: 181098

SEQ ID NO: 535156 - DNA, 201 bp, Homo sapiens; identical to SEQ ID NO: 346191

SEQ ID NO: 535157 - DNA, 201 bp, Homo sapiens; identical to SEQ ID NO: 181100

SEQ ID NO: 535158 - DNA, 201 bp, Homo sapiens; identical to SEQ ID NO: 181099

SEQ ID NO: 535159 - DNA, 201 bp, Homo sapiens; identical to SEQ ID NO: 346194

SEQ ID NO: 535160 - DNA, 201 bp, Homo sapiens; identical to SEQ ID NO: 346196

SEQ ID NO: 535161 - DNA, 201 bp, Homo sapiens; identical to SEQ ID NO: 181102

SEQ ID NO: 535162 - DNA, 201 bp, Homo sapiens; identical to SEQ ID NO: 181103

SEQ ID NO: 535163 - DNA, 201 bp, Homo sapiens; identical to SEQ ID NO: 181104

SEQ ID NO: 535164 - DNA, 201 bp, Homo sapiens; identical to SEQ ID NO: 181105

SEQ ID NO: 535165 - DNA, 201 bp, Homo sapiens; identical to SEQ ID NO: 181106

SEQ ID NO: 535166 - DNA, 201 bp, Homo sapiens
atgataccaacacatccctcagtacgtctcgagatgcctctgtatttcaagatgagagcaatttgtctgtcttggatatttccactgccactccagaaaarcagatgtgccagggccaaggtaggctgggtgaggaagactctgatgtggatgttgaagggtatgatgatgaggaggaggatgggaaacctaagcctccag

SEQ ID NO: 535167 - DNA, 201 bp, Homo sapiens; identical to SEQ ID NO: 181109

SEQ ID NO: 535168 - DNA, 201 bp, Homo sapiens; identical to SEQ ID NO: 346208

SEQ ID NO: 535169 - DNA, 201 bp, Homo sapiens
cagccccaggagattaaaacgatggcaagcagcaactaaaccaaaaatcgcaaaggaggtgtgaaatctacctgatatttcccctcgcccccgtcaggttrccgttgccattgctaaggtgggaattaaagtaacaaagtcgaataaatggggttccagtggcgggtacacccagcagcccttacgtaagaagcggaagat

SEQ ID NO: 535170 - DNA, 201 bp, Homo sapiens; identical to SEQ ID NO: 346213

SEQ ID NO: 535171 - DNA, 201 bp, Homo sapiens; identical to SEQ ID NO: 346214

SEQ ID NO: 535172 - DNA, 201 bp, Homo sapiens; identical to SEQ ID NO: 346216

SEQ ID NO: 535173 - DNA, 201 bp, Homo sapiens; identical to SEQ ID NO: 346218

SEQ ID NO: 535174 - DNA, 201 bp, Homo sapiens; identical to SEQ ID NO: 346220

SEQ ID NO: 535175 - DNA, 201 bp, Homo sapiens; identical to SEQ ID NO: 346221

SEQ ID NO: 535176 - DNA, 201 bp, Homo sapiens; identical to SEQ ID NO: 346222

SEQ ID NO: 535177 - DNA, 201 bp, Homo sapiens; identical to SEQ ID NO: 181113

SEQ ID NO: 535178 - DNA, 201 bp, Homo sapiens; identical to SEQ ID NO: 181114

SEQ ID NO: 535179 - DNA, 201 bp, Homo sapiens; identical to SEQ ID NO: 346224

SEQ ID NO: 535180 - DNA, 201 bp, Homo sapiens; identical to SEQ ID NO: 181117

SEQ ID NO: 535181 - DNA, 201 bp, Homo sapiens; identical to SEQ ID NO: 346225

SEQ ID NO: 535182 - DNA, 201 bp, Homo sapiens; identical to SEQ ID NO: 181119

SEQ ID NO: 535183 - DNA, 201 bp, Homo sapiens; identical to SEQ ID NO: 346227

SEQ ID NO: 535184 - DNA, 201 bp, Homo sapiens; identical to SEQ ID NO: 181122

SEQ ID NO: 535185 - DNA, 201 bp, Homo sapiens; identical to SEQ ID NO: 181124

SEQ ID NO: 535186 - DNA, 201 bp, Homo sapiens; identical to SEQ ID NO: 181125

SEQ ID NO: 535187 - DNA, 201 bp, Homo sapiens; identical to SEQ ID NO: 181126

SEQ ID NO: 535188 - DNA, 201 bp, Homo sapiens; identical to SEQ ID NO: 181127

SEQ ID NO: 535189 - DNA, 201 bp, Homo sapiens; identical to SEQ ID NO: 181128

SEQ ID NO: 535190 - DNA, 201 bp, Homo sapiens; identical to SEQ ID NO: 181129

SEQ ID NO: 535191 - DNA, 201 bp, Homo sapiens; identical to SEQ ID NO: 180989

SEQ ID NO: 535192 - DNA, 201 bp, Homo sapiens; identical to SEQ ID NO: 346187

SEQ ID NO: 535193 - DNA, 201 bp, Homo sapiens; identical to SEQ ID NO: 346189

SEQ ID NO: 535194 - DNA, 201 bp, Homo sapiens; identical to SEQ ID NO: 180990

SEQ ID NO: 535195 - DNA, 201 bp, Homo sapiens; identical to SEQ ID NO: 346195

SEQ ID NO: 535196 - DNA, 201 bp, Homo sapiens; identical to SEQ ID NO: 180991

SEQ ID NO: 535197 - DNA, 201 bp, Homo sapiens; identical to SEQ ID NO: 346197

SEQ ID NO: 535198 - DNA, 201 bp, Homo sapiens; identical to SEQ ID NO: 180993

SEQ ID NO: 535199 - DNA, 201 bp, Homo sapiens; identical to SEQ ID NO: 73259

SEQ ID NO: 535200 - DNA, 201 bp, Homo sapiens; identical to SEQ ID NO: 180994

SEQ ID NO: 535201 - DNA, 201 bp, Homo sapiens
tttcaccacacgtatttttgggtgaaagcatgaattcatctatgcaattttgctagatattaagctactcttttcactattcctgtacagatggagggacrgatgagacagctgcccagggcacttcagcagttactggcatagctgggatttgaactgggatgtaactattttcatacactctctaggtcattccaaggt

SEQ ID NO: 535202 - DNA, 201 bp, Homo sapiens; identical to SEQ ID NO: 180995

SEQ ID NO: 535203 - DNA, 201 bp, Homo sapiens
tcttctgcctctggcaccccaagacagcaagaccaacccctctctttgcctccttatgattttcttaataacagtttattttctctggcttactttattgkaataatatagcatataatacatatacaaaatgtgtgttaattgactgtatgttatcagtaaaacttctggtcaagagtaggctattaagtttttggagag

SEQ ID NO: 535204 - DNA, 201 bp, Homo sapiens; identical to SEQ ID NO: 180996

SEQ ID NO: 535205 - DNA, 201 bp, Homo sapiens; identical to SEQ ID NO: 346201

SEQ ID NO: 535206 - DNA, 201 bp, Homo sapiens; identical to SEQ ID NO: 180997

SEQ ID NO: 535207 - DNA, 201 bp, Homo sapiens; identical to SEQ ID NO: 180998

SEQ ID NO: 535208 - DNA, 201 bp, Homo sapiens; identical to SEQ ID NO: 180999

SEQ ID NO: 535209 - DNA, 201 bp, Homo sapiens; identical to SEQ ID NO: 181000

SEQ ID NO: 535210 - DNA, 201 bp, Homo sapiens
taactcctgtaaatccataaaccaaaaaactccaaagtcaggcaaaagattggagcagatgcttcacaaaagatatatgaatgacccagtaagcacatgcraatgtgcccaccattaattatatgggaaattaaaattaaaaccacaataatataccatttcacaccgaccaagatggaagttaaaattaaaaaaaaaaaa

SEQ ID NO: 535211 - DNA, 201 bp, Homo sapiens
ggaaaagatggtttaatgaatgaacagatagtggttctcagctgagacatgagaagtagaaaaaagaaacaatggaaatcctggaactacaaaaaaaaaamaaaaacaaacctaaaatgaaaaagttactggaagccttaacaaattggagaagacagaagtgaaataacattagttggaaaccagtgtttaccagaggca

SEQ ID NO: 535212 - DNA, 201 bp, Homo sapiens
gtatttaactccactcgcaaaggaaacatttgggttatcaaatgactcattgtgtaactaagtgtcctgtttttaaaagtttttctctctctctttcctgcccgttccttgtcttgcctttaacaatgagataatagtctttgctctcactctttctcccaggcacccctttgcacagtgtttcccttatctaattacgtg

SEQ ID NO: 535213 - DNA, 201 bp, Homo sapiens; identical to SEQ ID NO: 181001

SEQ ID NO: 535214 - DNA, 201 bp, Homo sapiens
ctatgaccgccctgctctggctttattaatttgttcggacaattcacagaactcaggaaaacacgttttctggcttattattgtaaaagatattacaaagkctacagaagaacagtcagatggaacaggtgcacacagcaaggtatgtgggaaggggtgtggagtttccatgccgtctctgccaccctccaggaacctcca

SEQ ID NO: 535215 - DNA, 201 bp, Homo sapiens; identical to SEQ ID NO: 181008

SEQ ID NO: 535216 - DNA, 201 bp, Homo sapiens; identical to SEQ ID NO: 181007

SEQ ID NO: 535217 - DNA, 201 bp, Homo sapiens; identical to SEQ ID NO: 181009

SEQ ID NO: 535218 - DNA, 201 bp, Homo sapiens
ttgcatataacctatgcacatcctcacatatactttaaatcatctctaggttatgtaactgagtatccccatttttctaagaaaaagagaatgagttattattttttattagttttcttcttttctcttctgtttcttgctattctccacttcctactagcccgtttgaaatgcaattataacctttacctccccttcacc

SEQ ID NO: 535219 - DNA, 201 bp, Homo sapiens
tcaatgtttggcaaggcaacttcacaggcaatgaggcagctttccaccaggaggcgcagttggtccctttttgagatgtttgcagctattgacggataaascactgcattgatttattaataaactttaacagttgcaaaatggtgatattctaactgtgccatccccttttctttcattagctttttaatgattctttga

SEQ ID NO: 535220 - DNA, 201 bp, Homo sapiens
gacaccgccaaactaatgttctaacagccagtcaatattttatcccttctctcttatgctgccattttggtctgtttaggtttaatgatatctgttttagktggtacctaaccatctcttggcataaaaaatctgctcaatgattgcttgttaaatcttgaatgactgaattgtaataagcatgcagatgactcagcattg

SEQ ID NO: 535221 - DNA, 201 bp, Homo sapiens
gcaggtttgttctctaggcggcaggacaatgaggatgagagttccattccgatgacctctatcttcatcatgaaggtcatctcctgaaagtgagttgaaaytgaagaaggacaatcttagatctggggaaagaggggaagtcactgactagtcatagtggagcaggaagtgagcagaacaggccattatctctgtgatgcc

SEQ ID NO: 535222 - DNA, 201 bp, Homo sapiens
tattctgggtcttttgtggttccatataaattttagaattttgttttctatttctgtgaagaatgtcattggtattttgataggaattacattaatctatmgattgcttttgggtagtatggacattttaacaatccatgaacatgaaatattttcaatgtttttggtgtcctcttcaatttctttcatcagtgtcttgta

SEQ ID NO: 535223 - DNA, 201 bp, Homo sapiens; identical to SEQ ID NO: 181014

SEQ ID NO: 535224 - DNA, 201 bp, Homo sapiens
tcaggaagctcaattaaggaatcagtgttcagttgcaggccttgccctttcatctctgtatacttctttcctaggtagtgccattcacaacttggcttccrttattgacaggcatatgaccacaaatttatatcacccacacagatttttcttccaaattctagtctcatatatccaactacctatttgatgttccctatt

SEQ ID NO: 535225 - DNA, 201 bp, Homo sapiens; identical to SEQ ID NO: 181016

SEQ ID NO: 535226 - DNA, 201 bp, Homo sapiens
tgtcctcatctttagtctgtcacaaatgtcgatattaggatattcttttcctttctctctctctctttttttttttcttgaggcagattctcactcttgtygcccaggctgttgtgcagtggcgtgatctcagctcactgcaacctctgtcttccgggttcaagtgattctcctgcctcagcctccctagtagctggtatt

SEQ ID NO: 535227 - DNA, 201 bp, Homo sapiens; identical to SEQ ID NO: 181018

SEQ ID NO: 535228 - DNA, 201 bp, Homo sapiens; identical to SEQ ID NO: 181021

SEQ ID NO: 535229 - DNA, 201 bp, Homo sapiens; identical to SEQ ID NO: 181023

SEQ ID NO: 535230 - DNA, 201 bp, Homo sapiens; identical to SEQ ID NO: 181024

SEQ ID NO: 535231 - DNA, 201 bp, Homo sapiens; identical to SEQ ID NO: 181025

SEQ ID NO: 535232 - DNA, 201 bp, Homo sapiens
taagcctccagccccagaagggggagatggtgatcttgcagatgaagaggaaggaactgtacaacaacctgaagccagtgtcctgtatgaggatttgcttrtatctgaaggagaagatgatgaggaagatgctgggagtgacgaagaaggagacaatcctttctctgctatccagctgagtgaaagtggaagtgactctga

SEQ ID NO: 535233 - DNA, 201 bp, Homo sapiens; identical to SEQ ID NO: 181027

SEQ ID NO: 535234 - DNA, 201 bp, Homo sapiens; identical to SEQ ID NO: 181028

SEQ ID NO: 535235 - DNA, 201 bp, Homo sapiens; identical to SEQ ID NO: 181029

SEQ ID NO: 535236 - DNA, 201 bp, Homo sapiens; identical to SEQ ID NO: 346233

SEQ ID NO: 535237 - DNA, 201 bp, Homo sapiens; identical to SEQ ID NO: 181030

SEQ ID NO: 535238 - DNA, 201 bp, Homo sapiens
agagaacattatcacctacaatctcatatcttatttttgcaagtttcagtcttttctatatatatacattttttatagtaagcatgttatttaaaaaactrtgtatggtgcttttttccacttaaaattatatcacatgaaagtcatagtaatcaacacaatgtggtattaattaaaggatagacacatagattaatggaa

SEQ ID NO: 535239 - DNA, 201 bp, Homo sapiens
tttaaaagacaccattaggaaaatgaaaagaaaattcacagactgggagaaaatatttgcaaaactgagaattctttaagaattatgaatgcaagtccttyatcataaagtcttgataaaggatttgcatccagaaaacttgaattctcataatcattcagaaaccttgaataatctcataattcaataataagaaaacag

SEQ ID NO: 535240 - DNA, 201 bp, Homo sapiens
ctaaataaataaataagcaaaacaaaacaacaaaaaaaaactgactaaaatatctgaacaggcacttcatcaaaggtgaattatgaatagcaaataagcayatgaaaagatgctcaatgttattagtcatcaagaaaatgcaaattaaaaccacaatgacatacagctacctagcaaatttttaaaaagagaaaagcaact

SEQ ID NO: 535241 - DNA, 201 bp, Homo sapiens; identical to SEQ ID NO: 181032

SEQ ID NO: 535242 - DNA, 201 bp, Homo sapiens
caccactaccaccaccaccaccacaacaaattttgtgttccatgtacaaaaacaaaacaaaacaaaacaaaaaacaggagttaggttgtcagctcagctcrttataaacagcaatgtcacccacatgaatcctgctgggataagaaatgattcttcattgtgtgggattgttccttgcattcaggatgtccagcatccttg

SEQ ID NO: 535243 - DNA, 201 bp, Homo sapiens; identical to SEQ ID NO: 181033

SEQ ID NO: 535244 - DNA, 201 bp, Homo sapiens
ttttgtgttccatgtacaaaaacaaaacaaaacaaaacaaaaaacaggagttaggttgtcagctcagctcattataaacagcaatgtcacccacatgaatyctgctgggataagaaatgattcttcattgtgtgggattgttccttgcattcaggatgtccagcatccttggtccctgtctgctgaataccaggtcacctt

SEQ ID NO: 535245 - DNA, 201 bp, Homo sapiens; identical to SEQ ID NO: 346193

SEQ ID NO: 535246 - DNA, 201 bp, Homo sapiens
taggcatcctatatttttgtttcttttttattactgtaaatcaagtggtttcagctgtaacttatttgttcatgtccaatactccttccagcttaattttmtaattttggactaatttacaaaaaacctagcatgctaaggtttaagaaaacagcatagcatggagtaaatgtaagcgtatgcaatgaaatccatggcaaa

SEQ ID NO: 535247 - DNA, 201 bp, Homo sapiens
ctgacctgctgggtaaagttcagactccagagctttgcacagaaatccttcaggatctggcttctgcttccctctccattctcatcttgaagcatacacgygccctctggccattcagaccatgagagtttccctgactgggtgcacctctcctgtccctgtgcctgggaacagctctctcccagtttaacttattcatga

SEQ ID NO: 535248 - DNA, 201 bp, Homo sapiens
gttcttgtcaatttcttcccagctctactcccacactgtgatcttcttaagggtaggagaaagagctcctgtgtctttgtactctgatgtggtccccctgrgtgttcagttaatggctgctgatgttgatgtgcttacggagaagacctggccttctctccgtgccgggctctgtcctgcccccaggtcttctacatgctc

SEQ ID NO: 535249 - DNA, 201 bp, Homo sapiens
gtatgacccagaaaataatacaggcactcaaataacataataaccaatacttgcttattatcctgtggaattctctgtgctctataaaaacattagcaagkggaatggactccacagtgttaaggtaattaaatagaaaggtaagcattttattgttgaaaaaagtgattagttaaaattatatacaaagacatgtaggtt

SEQ ID NO: 535250 - DNA, 201 bp, Homo sapiens; identical to SEQ ID NO: 181036

SEQ ID NO: 535251 - DNA, 201 bp, Homo sapiens; identical to SEQ ID NO: 181035

SEQ ID NO: 535252 - DNA, 201 bp, Homo sapiens; identical to SEQ ID NO: 181038

SEQ ID NO: 535253 - DNA, 201 bp, Homo sapiens; identical to SEQ ID NO: 181039

SEQ ID NO: 535254 - DNA, 201 bp, Homo sapiens; identical to SEQ ID NO: 181041

SEQ ID NO: 535255 - DNA, 201 bp, Homo sapiens
acaaggaatgtgatattgccacacttagtaacaacttgaataatgccaacaaaactgtagataatattccacctctggcagcttcagttgaacaaactctygatgtaagagaagagagcacctttgtttctgatttggagaaccagcccagtaacattgtgtctcttcaaactgagccatcaaggcaattgccatcgccac

SEQ ID NO: 535256 - DNA, 201 bp, Homo sapiens
tatggaaatgcacagggattcaaggttgcagtgacccctgtttgcaccactgcactccagcctgggagacagagtgagaccttgtctcaaaaaagaaattwaaaaaaaaaaaaaaaaaaggaatgcaaagaatctcaaatagctaatatcttcacagtgaaaaacaaatttggagaacttagtagtacttgattttgagac

SEQ ID NO: 535257 - DNA, 201 bp, Homo sapiens; identical to SEQ ID NO: 181042

SEQ ID NO: 535258 - DNA, 201 bp, Homo sapiens
ctctgtctcaaaaaaaaaaaaaaaaaaaaaaaaaaaaaaaaaaaaattaaggtgttccagcagtgattcataaattaagcagctacaaaccagaaatggtytggggctctgttagagggggttgaagggacacagagcaaagaaattgtttcattggttaaagtttgagtgtttgccttatttggactatccaagtgagaa

SEQ ID NO: 535259 - DNA, 201 bp, Homo sapiens
gtcggctgatctaagccttcacctggggttactgggctctatgtggtttctcatcctccagcacattggcctgagcttgtttacgtgatctgaccaactcrtctaatataagcagccccattactccttattcctttttctactttatttctcctcacagcacttattactatataacatctacttttctgtctgtctccc

SEQ ID NO: 535260 - DNA, 201 bp, Homo sapiens; identical to SEQ ID NO: 181043

SEQ ID NO: 535261 - DNA, 201 bp, Homo sapiens; identical to SEQ ID NO: 181044

SEQ ID NO: 535262 - DNA, 201 bp, Homo sapiens; identical to SEQ ID NO: 181045

SEQ ID NO: 535263 - DNA, 201 bp, Homo sapiens; identical to SEQ ID NO: 181046

SEQ ID NO: 535264 - DNA, 201 bp, Homo sapiens; identical to SEQ ID NO: 181047

SEQ ID NO: 535265 - DNA, 201 bp, Homo sapiens; identical to SEQ ID NO: 181048

SEQ ID NO: 535266 - DNA, 201 bp, Homo sapiens; identical to SEQ ID NO: 181049

SEQ ID NO: 535267 - DNA, 201 bp, Homo sapiens
gcaagaaagtagattctcctctggagcctccagaaggaaccaactctgctgacatcttggtttttgccctgtaagactcatgtaggacttctgatacccasaactatcagataatacatttgtgttgtttaaagtactaactttgggaggccaaggagggcagatcacctgagttcaggagttcgagactggcctggccaa

SEQ ID NO: 535268 - DNA, 201 bp, Homo sapiens; identical to SEQ ID NO: 181050

SEQ ID NO: 535269 - DNA, 201 bp, Homo sapiens; identical to SEQ ID NO: 181052

SEQ ID NO: 535270 - DNA, 201 bp, Homo sapiens; identical to SEQ ID NO: 181053

SEQ ID NO: 535271 - DNA, 201 bp, Homo sapiens; identical to SEQ ID NO: 181054

SEQ ID NO: 535272 - DNA, 201 bp, Homo sapiens; identical to SEQ ID NO: 181057

SEQ ID NO: 535273 - DNA, 201 bp, Homo sapiens
tattcgtcaaacagaatagatttattcctatggatagggagaaggctttctccttctaggaaaagaagatgatctccatatggtaatgtatatgacatgcrgaatagctcttcacttctgagaagaaagtatggccagaagcactcctccgtaatgtacagagcgtgggctcctgctgacctctgagcatactactgacac

SEQ ID NO: 535274 - DNA, 201 bp, Homo sapiens; identical to SEQ ID NO: 181058

SEQ ID NO: 535275 - DNA, 201 bp, Homo sapiens
ttatatcatccagagccagaaggagaaacaaacttgagacttgagggcaggaccttgtcttaatgccccttgcagtgaccaatcatctgcaagcgcagagsctaatatatagtaggttcccaatacacgtttgctttgtgtgccgattcagtttctttttaagatgttaaattcagctcttagtgagtggaattaaagtgt

SEQ ID NO: 535276 - DNA, 201 bp, Homo sapiens
attcaaagagttaggggaacatgtgtagttctacaccatctatctactcccttctcttccactgtgactatcagctgttttaaaatctgtttcgtccaaarggaagagttttcccatgtttatttcctctttcttaattggaaagacacaattgtttttgctacttcaagttttcattaaacaataactattttcagaata

SEQ ID NO: 535277 - DNA, 201 bp, Homo sapiens
cttgattttgagacttagttgaaatctaaagtaacctagagacaatggtattgtcaaagtagtaggaagtagaatataacaagagtcagaaatagacacayatacattcaatggacttggtttttttacaaaggtcccaaggctatccaatgccaaaaggaaaagttttcaacaaacggtgctgaaacaattagaaatatg

SEQ ID NO: 535278 - DNA, 201 bp, Homo sapiens; identical to SEQ ID NO: 346234

SEQ ID NO: 535279 - DNA, 201 bp, Homo sapiens
ggtggattgcctgagctcaggagttcgagaccacccaggcaacatggtgaaacccagtctctactaaaaaaatacaaaaaaattaactgggtgtgatggcrcatgcctctagtcccagctacttgggggccgaggcaggagaatctcttgagccctagaggtgaaggctgcagtgagccaagattgtgccactgcactcca

SEQ ID NO: 535280 - DNA, 201 bp, Homo sapiens
tatcatcacatcctggcctatgtaccttctaaatagctcttgactctgtcctcatctctccacttccactgccaccaatttagtcaaagctaccatttaamctctgccctggaccattggagcagccaagtacctgatctttctgatttcatttcttgtaacttccaatttgttctccagagtgcagagtaatctttttga

SEQ ID NO: 535281 - DNA, 201 bp, Homo sapiens
acttcacatttggcagttactatttgtgtttttacatctttattgtgtcttcttcctccttcaatcagactctaagctcttgacagagactcttttccacktatctccatgtatctagtgtttttcacagtacctgacatacagtagatattctgtaaatgtgttgagtaaattaatgcccaggtgaggagatggtctaag

SEQ ID NO: 535282 - DNA, 201 bp, Homo sapiens
caccagacactccctacagggcaagttcatctaactttgtactcagaagctccagaacaaactctcacccaccaggagattgcctcaagaggtaacagtcratttacaacccaaagtatacatgatgagaaactctttcccaccgggaaagtttttggccattttaataacttatttctgcccatgaagatgccaacttga

SEQ ID NO: 535283 - DNA, 201 bp, Homo sapiens
ttccactgccaccaatttagtcaaagctaccatttaacctctgccctggaccattggagcagccaagtacctgatctttctgatttcatttcttgtaactkccaatttgttctccagagtgcagagtaatctttttgacacacagatcaatatgtcactccctacttaacatcccacaatggcttctcattgcccttggaa

SEQ ID NO: 535284 - DNA, 201 bp, Homo sapiens
acttctttttgtcccaccagcattcaacattggaagtagaagcagaaactaatgttggacctatagtattcatttagtatttgtactgagcaaatgaatamatgggtggatttatgattggatgttctggatgtgagcagtaaaaggacaaaggggcaagggaattgagggatagagtggcgagagtagcggaattgatgc

SEQ ID NO: 535285 - DNA, 201 bp, Homo sapiens
catgctgagcaagccagtagcacatctctggatgcagaaaaaattttggaaggtgctttggggtgctggaacccaagtgtgatctggtttaggctgttggsactcccagtattcccaccaacaggggcaaggaatgggaagtggagagggaggagtttccctgtgtcaaaacccttgatttcctcagcattcagtgtggat

SEQ ID NO: 535286 - DNA, 201 bp, Homo sapiens; identical to SEQ ID NO: 346184

SEQ ID NO: 535287 - DNA, 201 bp, Homo sapiens
tgtaggctggaagggggcagtgctgagatgagccacatagtgatttaagaggaaaacggagtagaccttttgataggtaattttcaagattatttaagatwattaagaaacagctgcccaagatttaagttaatagtggtgagagctttctgggttttgtccatgaaatgcaaagaaagctatacaatcagctaaaatcaa

SEQ ID NO: 535288 - DNA, 201 bp, Homo sapiens
ttgtaggctggaagggggcagtgctgagatgagccacatagtgatttaagaggaaaacggagtagaccttttgataggtaattttcaagattatttaagakaattaagaaacagctgcccaagatttaagttaatagtggtgagagctttctgggttttgtccatgaaatgcaaagaaagctatacaatcagctaaaatca

SEQ ID NO: 535289 - DNA, 201 bp, Homo sapiens; identical to SEQ ID NO: 181063

SEQ ID NO: 535290 - DNA, 201 bp, Homo sapiens; identical to SEQ ID NO: 181065

SEQ ID NO: 535291 - DNA, 201 bp, Homo sapiens; identical to SEQ ID NO: 181064

SEQ ID NO: 535292 - DNA, 201 bp, Homo sapiens; identical to SEQ ID NO: 346192

SEQ ID NO: 535293 - DNA, 201 bp, Homo sapiens; identical to SEQ ID NO: 181066

SEQ ID NO: 535294 - DNA, 201 bp, Homo sapiens; identical to SEQ ID NO: 181068

SEQ ID NO: 535295 - DNA, 201 bp, Homo sapiens
ctcctatgtgaagattccaaataaaccaacacagcagaaggatgataaagagccacaggcagtgaagaagacagtgacaggaacagatgcagaccttcgtygcctttccctgaaaaatgccaagcaacttctacgtaaatttggtgtgcctgaggaagagattaaaaagttgtcccgctgggaagtgattgatgtggtgcg

SEQ ID NO: 535296 - DNA, 201 bp, Homo sapiens
taggaagaaacagaaataaaacatctaataatatttggagactgacttatatatagacaattgagtcatgttcatttttattgatgctaagtggtgacttsaaatcatttgggagaaaacttttaataaataatttaaataaacattttcacttgaaaaaatagtagacaatgtaacatagaaacaaactttgtacatccc

SEQ ID NO: 535297 - DNA, 201 bp, Homo sapiens
tgggaactttgcattatgaattttatttttatatctacataagcatgagggaaagaactgtattttcagataattaaatccagaagagttacaaattttcwttcgtcccaaagattttgtctgggtatttcttccttagctgtcgtcttgcagacaccatcgaagcatagatgatgcagccccaggagattaaaacgatgg

SEQ ID NO: 535298 - DNA, 201 bp, Homo sapiens; identical to SEQ ID NO: 346210

SEQ ID NO: 535299 - DNA, 201 bp, Homo sapiens
tgacttatatatagacaattgagtcatgttcatttttattgatgctaagtggtgacttcaaatcatttgggagaaaacttttaataaataatttaaataarcattttcacttgaaaaaatagtagacaatgtaacatagaaacaaactttgtacatccccattataagtatccctctaactttctggtgtccacaagcaaa

SEQ ID NO: 535300 - DNA, 201 bp, Homo sapiens; identical to SEQ ID NO: 181074

SEQ ID NO: 535301 - DNA, 201 bp, Homo sapiens; identical to SEQ ID NO: 181073

SEQ ID NO: 535302 - DNA, 201 bp, Homo sapiens; identical to SEQ ID NO: 346211

SEQ ID NO: 535303 - DNA, 201 bp, Homo sapiens; identical to SEQ ID NO: 346212

SEQ ID NO: 535304 - DNA, 201 bp, Homo sapiens; identical to SEQ ID NO: 73258

SEQ ID NO: 535305 - DNA, 201 bp, Homo sapiens
ttaccaccatctttctctttttgggtaaaagcatactgtataaattcctatccattttttttccactttgtaatgtattctggagatcacaccacagatgyatatagagttcttccttattacttttgacgattgtattagcatttcattgctttgttgtgtgaaagtttttgggaagccactgttttggactagcttcac

SEQ ID NO: 535306 - DNA, 201 bp, Homo sapiens
ctcaattgttttcattcccattattttgaaaatttaagaaaatatgtatatatattgaaattaccaccatctttctctttttgggtaaaagcatactgtayaaattcctatccattttttttccactttgtaatgtattctggagatcacaccacagatgtatatagagttcttccttattacttttgacgattgtattag

SEQ ID NO: 535307 - DNA, 201 bp, Homo sapiens
ctcccctccccgtcccctgaccagccgacctcaagcaagcaatcaattctgcaggagacactagctgggtgtcctctaattcaattcagttctgacactawctacctggagacagtgttgcaggacagagaaatatgttacaggaaagaggtcccaatccagacccgagagagggttcttggatctcgtgcaagaaagaat

SEQ ID NO: 535308 - DNA, 201 bp, Homo sapiens
aagtttaaagtaattcatcggtaattcagtggaatgctagaacaaaaagtaatactcttgagagtaaaataatagaatccagagattctataatacatctrtagcatccagtataaaaaaaatactagacatgtgaatgaacccatagtcaagagaaaaagccgtcaccaaaacaggttccaagatggaattcacagacaa

SEQ ID NO: 535309 - DNA, 201 bp, Homo sapiens
gtccaaattttcccaatcaactggagatgtagataaagtgacagataccaaaccaagagtggctgagtggcgttatgggcctgcccgactgtggtatgatrtgctgggtgtctccgaagatggcagtgggtttgactatggcttcaaactgagaaagacacaacatgaacctgtgataaaatctagaatgatggaggaatt

SEQ ID NO: 535310 - DNA, 201 bp, Homo sapiens
ggtgtgtaattgccgggtcatatgttcgacttcatttgcgttttaaaaaacattttaatttagtatttagtgatgattttgaagagctaataacttatttdatctacatgcattccaattgtttgatgtttctttttcttttttaaaatagagactggatctcgctttgttgcctaggctgtttcaaattcctggcctcaa

SEQ ID NO: 535311 - DNA, 201 bp, Homo sapiens; identical to SEQ ID NO: 181085

SEQ ID NO: 535312 - DNA, 201 bp, Homo sapiens
acaccgaccaagatggaagttaaaattaaaaaaaaaaaagaaaggctgaccaatgtgtctatctactggagctctcctactgcgggtgggaatgtaaactrgatgtaatcagtcattttggacaacaggtggcggtttcctataaagctaaacatagacttaccctggcacccagccgacgtgggagaactgggtacacag

SEQ ID NO: 535313 - DNA, 201 bp, Homo sapiens; identical to SEQ ID NO: 181088

SEQ ID NO: 535314 - DNA, 201 bp, Homo sapiens
gagagaattaagcagtgaaatctgggaggattcagggataaaaatccctagagaggataaaccaggaagggatttgtggaggtacaaatatagaatgtcartttttaccttgttttcttcaggttgtatgatatagctacccttcctgtcccctccttctcctccaggacccacagagtcttcagggaaattaacattgct

SEQ ID NO: 535315 - DNA, 201 bp, Homo sapiens
gcagtcctcctaccttggccttctgagtagctgagtctacaggtgtacaccactgtgcccagctctccctcactcacggctaatttttaaattttttttamagatggggtcttgcgatgttggccagactgttcttgaactcctggcttcgagcaatcctcttgcatcaggttccgaaagtgttggaattacagagccact

SEQ ID NO: 535316 - DNA, 201 bp, Homo sapiens
gtacaattcatgttgtttttcttattaccattgctattatcaattataaatatttcttatatataaacaaagtatcactgacaaagcataaaattaggtamtagttcttgctggtcaatttgaaacagaaactgcttgcactatacatatgtcattagccatcccaaaatgttcactcatgagatacaggaaaataataat

SEQ ID NO: 535317 - DNA, 201 bp, Homo sapiens; identical to SEQ ID NO: 181101

SEQ ID NO: 535318 - DNA, 201 bp, Homo sapiens; identical to SEQ ID NO: 346199

SEQ ID NO: 535319 - DNA, 201 bp, Homo sapiens; identical to SEQ ID NO: 346200
  misc_feature (1)...(201): n = A,T,C or G

SEQ ID NO: 535320 - DNA, 201 bp, Homo sapiens; identical to SEQ ID NO: 181108

SEQ ID NO: 535321 - DNA, 201 bp, Homo sapiens; identical to SEQ ID NO: 346203

SEQ ID NO: 535322 - DNA, 201 bp, Homo sapiens
gttatgtacagcccaatgtaatcctaactcatataaactccacttgtgtttaaaagttaaatatgtacacgtgtatgcacagacacacacacctccccccyacaaggtgtatatgcttaaagcatacatgcataaaatatttgtaagtgtatataacaaactattaagagttgggggggtatgagattataagcaggaagt

SEQ ID NO: 535323 - DNA, 201 bp, Homo sapiens
acctgtatttctaatttttcagcaagttagagtgccctctggtgggaatgtctccagtagttacccaggtcttgcagactatctgaatttgtgagtccacrttttctgcttgtgctaagctgaacacggtctctcactgctccctttttattcaactcagcctcatgagtttcacagccagagataagtgagaaaggatgg

SEQ ID NO: 535324 - DNA, 201 bp, Homo sapiens; identical to SEQ ID NO: 32060

SEQ ID NO: 535325 - DNA, 201 bp, Homo sapiens; identical to SEQ ID NO: 181112

SEQ ID NO: 535326 - DNA, 201 bp, Homo sapiens
gggaaccaactaattggaggatttctgaaaacactgctactgttctagaagctgtatcccagcaatacttaaaccagagtggattattgccatcaggtgtygccaatctcatttaggaccagatcggatttgggtctcaaaactagacccctcccagctcctggtctggatcacttcgttaaactgacaataaaggaaaca

SEQ ID NO: 535327 - DNA, 201 bp, Homo sapiens
agaaaatctctggttctcaagtttcctaaacagcagcttcctccaaagaagaaacggcgagttggaaccactgttcattgtgactatttgaatatacctcrtaagtccatccaccgacgccgcacagaccctatggtgacgctgtcatccatcctggagtctatcatcaatgacatgagagatcttccaaatacacaccct

SEQ ID NO: 535328 - DNA, 201 bp, Homo sapiens; identical to SEQ ID NO: 181115

SEQ ID NO: 535329 - DNA, 201 bp, Homo sapiens; identical to SEQ ID NO: 181116

SEQ ID NO: 535330 - DNA, 201 bp, Homo sapiens; identical to SEQ ID NO: 181120

SEQ ID NO: 535331 - DNA, 201 bp, Homo sapiens; identical to SEQ ID NO: 346226

SEQ ID NO: 535332 - DNA, 201 bp, Homo sapiens; identical to SEQ ID NO: 181123

SEQ ID NO: 535333 - DNA, 201 bp, Homo sapiens
ataatgttatggtagagaggtggtaatacattctgcaatgcaatacattgcatcttattattttccccctcactaatttgtcttggagagctttccatagyaatatacgtggatcaatgtaatgatccacatgtattttaatggctgccttgtatcgcattacataaatgtagcataatttacttgactcacccaatgaaa

SEQ ID NO: 535334 - DNA, 201 bp, Homo sapiens
tcagaagtttccttgaaaaggagagaattatgcccctttccctctcctccaatctgctccttggaatgtggatgtaatggcagaagccctgtcatttttcsctggtgagagataagatttatcttgttcaagtcataatttgagagtttctgttatgtacagcccaatgtaatcctaactcatataaactccacttgtgtt

SEQ ID NO: 535335 - DNA, 201 bp, Homo sapiens
tgcacagacacacacacctcccccccacaaggtgtatatgcttaaagcatacatgcataaaatatttgtaagtgtatataacaaactattaagagttgggkgggtatgagattataagcaggaagtggggggacttttttatattttttaagttttagcaataaacatgttttcaggaaaaattaagatatttctattttt

SEQ ID NO: 535336 - DNA, 201 bp, Homo sapiens
aaaatcactgagccacggaggtcaaagtttacagaggcagtaggacttgggtaagactctctgctggcagataggaagaactcaaggagacggtagtgaawacggtgatatttttgaaggacagaaatgcaattgctccataatgtagggttgaggtaggggaagagggtgaaattaagtggtgtaggcaaaataaaggca

SEQ ID NO: 535337 - DNA, 201 bp, Homo sapiens; identical to SEQ ID NO: 181130

SEQ ID NO: 535338 - DNA, 201 bp, Homo sapiens
agcaagtttgcctccttgtccccttgaaaataataatgtcttgtgtggttgggtgaagctatatatatatatattttttgttttgttttgttttgttttgkttttgctaaaaaaagaatcttacagggagataaagggatttctggaggaattaatttttttttcaattatgtgggacaaatggtgcttaaaatgaagata

SEQ ID NO: 535339 - DNA, 201 bp, Homo sapiens; identical to SEQ ID NO: 535118

SEQ ID NO: 535340 - DNA, 201 bp, Homo sapiens; identical to SEQ ID NO: 535144

SEQ ID NO: 535341 - DNA, 201 bp, Homo sapiens; identical to SEQ ID NO: 346219

SEQ ID NO: 535342 - DNA, 201 bp, Homo sapiens; identical to SEQ ID NO: 535145

SEQ ID NO: 535343 - DNA, 201 bp, Homo sapiens; identical to SEQ ID NO: 535287

SEQ ID NO: 535344 - DNA, 201 bp, Homo sapiens; identical to SEQ ID NO: 535288

SEQ ID NO: 535345 - DNA, 201 bp, Homo sapiens; identical to SEQ ID NO: 535048

SEQ ID NO: 535346 - DNA, 201 bp, Homo sapiens; identical to SEQ ID NO: 535049

SEQ ID NO: 535347 - DNA, 201 bp, Homo sapiens; identical to SEQ ID NO: 535255

SEQ ID NO: 535348 - DNA, 201 bp, Homo sapiens; identical to SEQ ID NO: 535069

SEQ ID NO: 535349 - DNA, 201 bp, Homo sapiens; identical to SEQ ID NO: 535310

SEQ ID NO: 535350 - DNA, 201 bp, Homo sapiens; identical to SEQ ID NO: 535081

SEQ ID NO: 535351 - DNA, 201 bp, Homo sapiens; identical to SEQ ID NO: 535070

SEQ ID NO: 535352 - DNA, 201 bp, Homo sapiens; identical to SEQ ID NO: 535082

SEQ ID NO: 535353 - DNA, 201 bp, Homo sapiens; identical to SEQ ID NO: 535083

SEQ ID NO: 535354 - DNA, 201 bp, Homo sapiens; identical to SEQ ID NO: 535039

SEQ ID NO: 535355 - DNA, 201 bp, Homo sapiens; identical to SEQ ID NO: 535138

SEQ ID NO: 535356 - DNA, 201 bp, Homo sapiens; identical to SEQ ID NO: 535086

SEQ ID NO: 535357 - DNA, 201 bp, Homo sapiens; identical to SEQ ID NO: 535087

SEQ ID NO: 535358 - DNA, 201 bp, Homo sapiens; identical to SEQ ID NO: 535117

SEQ ID NO: 535359 - DNA, 201 bp, Homo sapiens
acataaagggaagtacaagtgaaaaccacagtgtgaaactgctatacttctgctaaaatggctgagatcagaaaggctaacagtacccagtgttggtgagwaggtggcagatttagaactatcaaacattagggccgggcgctgtggcttacgcctgtaatcccagcactttggaggtcgaggcgggtggatcacgaggtc

SEQ ID NO: 535360 - DNA, 201 bp, Homo sapiens
cagtctctgcctcctctagcagcagaggccctgtctggcctccctgccttccctgtactgtggggttctgcagtcctgtgggaatggaaccactgggtggygtggaaagaagtgagtgggtgaccctatgtcctttgctggctttttggaattaggaagactgttccatggtattgggcctgagcagtttctctcatccca

SEQ ID NO: 535361 - DNA, 201 bp, Homo sapiens
cggctaattttttttttgtatttttagcagagatggggtttctctgtgttggtcaggctggtcttgaactcccgacctcaggtgatccacccacctcggcytcccaaagtgctgggattacaggcatgagccaccacgccctacccagggtacctttaggtatcatgtcacattgagggaagaattcgtttttattctgaa

SEQ ID NO: 535362 - DNA, 201 bp, Homo sapiens
atagcctattagcagggctcttggttatatctttttatttatatatatacacatatattatatatataatatattttatatatattttatatattatatatatatattttatatatatatatttgagacagggtctcactctcacccaggctagagtgcagtggtgtgatctctgctcactgcaacctctacctcctgtgc

SEQ ID NO: 535363 - DNA, 201 bp, Homo sapiens
ctcttggttatatctttttatttatatatatacacatatattatatatataatatattttatatatattttatatattatatatatatattttatatatatatatttgagacagggtctcactctcacccaggctagagtgcagtggtgtgatctctgctcactgcaacctctacctcctgtgctaaagtaattctcttgc

SEQ ID NO: 535364 - DNA, 201 bp, Homo sapiens
ttatatctttttatttatatatatacacatatattatatatataatatattttatatatattttatatattatatatatatattttatatatatatatttragacagggtctcactctcacccaggctagagtgcagtggtgtgatctctgctcactgcaacctctacctcctgtgctaaagtaattctcttgcctcagcc

SEQ ID NO: 535365 - DNA, 201 bp, Homo sapiens
tatctttttatttatatatatacacatatattatatatataatatattttatatatattttatatattatatatatatattttatatatatatatttgagacagggtctcactctcacccaggctagagtgcagtggtgtgatctctgctcactgcaacctctacctcctgtgctaaagtaattctcttgcctcagcctcc

SEQ ID NO: 535366 - DNA, 201 bp, Homo sapiens
cccaactgtctgataattgagaagagccagtctgaagagcagctcccattatgggtgataagggtcagagtacagatcatagtaagatggggagtttgttctctctctcttttttttgagtcggagtctcactctgtcaccaggctggagtccaatggtgcaatcttggctcactgcaatctctgcctcccaggttcaagc

SEQ ID NO: 535367 - DNA, 201 bp, Homo sapiens
tctgctcactgcaacctctacctcctgtgctaaagtaattctcttgcctcagcctcctgagtagctgggactacaggcatgcgccacaatgcccggctaattttttttttttttttttttgtatttttggtagagacggggcttcaccatgttgcctaggctggtcttgaactcctgagctcagatgatccacccacctca

SEQ ID NO: 535368 - DNA, 201 bp, Homo sapiens
ggagttatttattcatcagacaggagatgtgggatgcccccaagaggttacatttcgcctgctgtcttctccttccagcattaaagactgtaaatggcaaraaaaaaacatcgtagtcatggaagaagttgttattacacccccatatcaagtggaaaactgtaaaggcaaagaggggagtgcactgagccatgtacgcaa

SEQ ID NO: 535369 - DNA, 201 bp, Homo sapiens
gagtcttgctgtcacccaggctggagtgcagtagcatgatcttggctcattgctacctccgcctccccggttcaaacaattctcctgcctcagcctcccargtagctgggattacaggcacatgctaccacacccagcggatgtttgtatttttagtagagatggggtttcaccatgttggccaggctggtcttgaactcg

SEQ ID NO: 535370 - DNA, 201 bp, Homo sapiens
acagtctctgcctcctctagcagcagaggccctgtctggcctccctgccttccctgtactgtggggttctgcagtcctgtgggaatggaaccactgggtgktgtggaaagaagtgagtgggtgaccctatgtcctttgctggctttttggaattaggaagactgttccatggtattgggcctgagcagtttctctcatccc

SEQ ID NO: 535371 - DNA, 201 bp, Homo sapiens
cagcctcccaaagtgttgggattacaggcgtgagccactacgtccagccccccagctaatttgttaaaaaattttttgtagggttttgccatgttgcccasgctggtctcaaacccctgagctcaaagtatccacccgcctatctcccaaagtgctggagttacagttgtgagctaccatgcctgtccaggaacagtattt

SEQ ID NO: 535372 - DNA, 201 bp, Homo sapiens
tgtctctctagagggccagcagctcttccagaccattcacaagacgtgagttgggatcggagaggtcctttgtcctggggtaatgctacctggttgtgctrtctggtggcaggcttttgggtggttgtcttcctaaaagtctactggggaagctgggtagggtattggcaatatgccagcatccagaggtgcaggtgctgt

SEQ ID NO: 535373 - DNA, 201 bp, Homo sapiens
ccccgtctctactaaaaaaaaaaaaaatacaaaaattagccgggcatggtgtccacatgtctgtaaccccagctacttgggaggctgaggcaggagaatcrcttgaacccaggaggtggaggttgcattgagctgagatcgtgccattgcactccagcctgggcaacaagagagaaactccatctcaaaaaaataaaaata

SEQ ID NO: 535374 - DNA, 201 bp, Homo sapiens
ttcccagtctggcaagtgcccaactgtctgataattgagaagagccagtctgaagagcagctcccattatgggtgataagggtcagagtacagatcatagkaagatggggagtttgttctctctctcttttttttgagtcggagtctcactctgtcaccaggctggagtccaatggtgcaatcttggctcactgcaatctc

SEQ ID NO: 535375 - DNA, 201 bp, Homo sapiens
aacaaaaacaaacaaacaaaaataagggttacccagcatcaggcatgattagaagccggttttttttgttcgttttgtttttgttgttgttgttgttgttktttaaagacagagtctctgtcacacaggctggagtgcagtggcacaagctcagctcactgcagcctccgtctcccgggttcaagtgattgtcctgcctca

SEQ ID NO: 535376 - DNA, 201 bp, Homo sapiens
ataatcatctttttttgtttgtttgtttgttttgagacagagtctcgctctgttgcccaggctagagtgcagtggcacaatcttggctcagtgcaacctcygccttccaggttcaagagatcctccagcctcagtccccctagtagctgggattacaggcacgcgccaccgtacccggctaatttttgtatttttagtaga

SEQ ID NO: 535377 - DNA, 201 bp, Homo sapiens
aaggagccttcagactttaggggagagaggatggttcctcaggccttcagtctttagcaccagaccaggacattgtgctacagtctctgcctcctctagcrgcagaggccctgtctggcctccctgccttccctgtactgtggggttctgcagtcctgtgggaatggaaccactgggtggtgtggaaagaagtgagtgggt

SEQ ID NO: 535378 - DNA, 201 bp, Homo sapiens
caactaaaataatagagggtaactgatgctgaggctagtgaatgtcgttacctcagatctggagttcctatcttgtcagattctagggaaatgccacacaktttttagtgatggccagggacagatttggaaggctattgagttcatatgggtgttgtcttgtatgggatgtcccattctttgaagcttataggtttttga

SEQ ID NO: 535379 - DNA, 201 bp, Homo sapiens
gccttctggagttatttattcatcagacaggagatgtgggatgcccccaagaggttacatttcgcctgctgtcttctccttccagcattaaagactgtaartggcaagaaaaaaacatcgtagtcatggaagaagttgttattacacccccatatcaagtggaaaactgtaaaggcaaagaggggagtgcactgagccatg

SEQ ID NO: 535380 - DNA, 201 bp, Homo sapiens
tcctcccctagcttcactcaatgttagtaaggtaaggactcaagggcagatctggctctctaaaatggtgggaaagatgagtctcattgagtcttagtgayacattgttgtctattttttattttttaaaattgacttaaaattgtttgttctgatatctttttaaaaaatgtaggtttagtttttctctttattcctgga

SEQ ID NO: 535381 - DNA, 201 bp, Homo sapiens
cctagcttcactcaatgttagtaaggtaaggactcaagggcagatctggctctctaaaatggtgggaaagatgagtctcattgagtcttagtgatacattkttgtctattttttattttttaaaattgacttaaaattgtttgttctgatatctttttaaaaaatgtaggtttagtttttctctttattcctggatgttat

SEQ ID NO: 535382 - DNA, 201 bp, Homo sapiens
taattttgtatttttagtagagacggggtttctccgtgttggtcaggctggtctcgaactcccgacctcaggtgatccgcccgcctcagcctcccaaagtsctggaattacaggcgtgagccactgtgcccagcattattcctagtatattaaagaaccaaataggctctgagttattttttggtgtttatagggtatgat

SEQ ID NO: 535383 - DNA, 201 bp, Homo sapiens
gctggtctcgaactcccgacctcaggtgatccgcccgcctcagcctcccaaagtgctggaattacaggcgtgagccactgtgcccagcattattcctagtrtattaaagaaccaaataggctctgagttattttttggtgtttatagggtatgataagtctgtcactagatctttagtgagtagtaaagatctgaaagaga

SEQ ID NO: 535384 - DNA, 201 bp, Homo sapiens
gcaaccacagaaggaggctgccctgtcatcctgagtccgtacacatggaggactcttccagcatccagccaaggaggcgctggtggtggcttcagcggagscaggccgggggagggaagggatcctatatgtcctgttggctcttaacaaagggtcagcatttccaaatcttagacttgaacaaacaaaacacccaacaaa

SEQ ID NO: 535385 - DNA, 201 bp, Homo sapiens
cctctggaatctctagcaaccagtagtgtggggtagggatcagaaatgtgctggagaggtgatagggattgacagggtagaagttacgagattgtagtagmctaccagattttactagattttcttttgatcagtttgtggatggttccaccagagggcagtgaaggaacagacatgacgtagaattcagactcttcgttt

SEQ ID NO: 535386 - DNA, 201 bp, Homo sapiens
cggccttcctcagcctcccaaagtgctaggattacaggtgtgagtgaccacgcccagccaagaactcttaataaggcagcccgggcttggtggtttatgcytgtaattccagcactttgggaggctgaggtgggaggatgatttgagatcaggagtttgagactagcctagggaacacagggagaccccatcgctacataa

SEQ ID NO: 535387 - DNA, 201 bp, Homo sapiens
ctcccaggttaagtgattctcgtgcctcagcctctggagtagttgggactacaggtgtgtgccacgacgcctggccaaattttttttttttttggagacargcacacactgtcacacccggctaatttgttttattttagtagagacggggtttcattctgttgcccaggctggtcttgaactcctgagctcaggcagtct

SEQ ID NO: 535388 - DNA, 201 bp, Homo sapiens
attattctctctcatagtaccttgtccttcacagttaaggtgaccatatcatttgtagtccaacctgggacatttttgagagtaaaggggaatgcttttattttacacagggacaacaggtatagattaggttaccctattcatagcttttttttttttttttttttttgagacggagtctcgctttgtcgcccaggctgg

SEQ ID NO: 535389 - DNA, 201 bp, Homo sapiens
gtctttggtaggttcttggaaactttgactttatgtattattattattattattactttgttttttttttgagacagagtctccgtctgtctcccaggctrtaatgcagtagtgctgtctcagctcactgcaacctctgcctcccaggttcaagcagttctctacctcagcctccggagtagctgggattccaggcatctg

SEQ ID NO: 535390 - DNA, 201 bp, Homo sapiens
tggatcacgaggtcaggagatcgagaccatcctggctaacacagtgaaaccccatctctactaaaaaactacaaaaaaattagctgggcgtggtggcaggygcctgtagtcccagctactcgggaggctgaggcaggagaatgacgtgaacctgggaggtggagcttgcagtgagcagagcttgcgccactgcactccagc

SEQ ID NO: 535391 - DNA, 201 bp, Homo sapiens
tctttggtaggttcttggaaactttgactttatgtattattattattattattactttgttttttttttgagacagagtctccgtctgtctcccaggctgkaatgcagtagtgctgtctcagctcactgcaacctctgcctcccaggttcaagcagttctctacctcagcctccggagtagctgggattccaggcatctgc

SEQ ID NO: 535392 - DNA, 201 bp, Homo sapiens
gaaggtgtggtatgtattaatttttaaactggaggctctagcacaacagctgataaatcttaattttcgccttgaatggaaattctgtgtgtgtgtgtgtktgtgtgtgtgtgtgtgtgtgtgtgtgtgtgtgtgtgtgtgtgtttgttttttttttttttaaagagacagagtctcacttctttgcccaggctggagtac

SEQ ID NO: 535393 - DNA, 201 bp, Homo sapiens
aggtgtggtatgtattaatttttaaactggaggctctagcacaacagctgataaatcttaattttcgccttgaatggaaattctgtgtgtgtgtgtgtgtktgtgtgtgtgtgtgtgtgtgtgtgtgtgtgtgtgtgtgtgtttgttttttttttttttaaagagacagagtctcacttctttgcccaggctggagtacag

SEQ ID NO: 535394 - DNA, 201 bp, Homo sapiens
cccaatctcaagcagtccttctgccttaccctcctgagtagctgggactacaggtgtgtgccaccacgtccagctaattaaaaaaaaacaattttttgtcrgttggggagtagagacatggtcttactatactgccaacgctggtctcaaactcctggcctcaagtgatcctcccacctcagcctcccaaagtggtggatt

SEQ ID NO: 535395 - DNA, 201 bp, Homo sapiens
tgttagatgctcaagaagtgacaatacaaatgcctatgaagaaacaggatcaggtaatttgcttgctcaaggtcaggtgatttagtaagaggctgacctcsgattctggttccagcttatctaactccacagccaatgttctttccactatcactcagtagttataatcatctttttttgtttgtttgtttgttttgagac

SEQ ID NO: 535396 - DNA, 201 bp, Homo sapiens
gtggtatgtattaatttttaaactggaggctctagcacaacagctgataaatcttaattttcgccttgaatggaaattctgtgtgtgtgtgtgtgtgtgtktgtgtgtgtgtgtgtgtgtgtgtgtgtgtgtgtgtgtttgttttttttttttttaaagagacagagtctcacttctttgcccaggctggagtacagtagc

SEQ ID NO: 535397 - DNA, 201 bp, Homo sapiens
tactcttgttccccaggctggagtgcaatggcgcgatctcggctcaccacaacctccgcctcccggtttcaagcaattctcctacctcagcctcccaattytcctacctcagcctcccaagtagctgggattacaggcatgcaccagcatgcccggctaattttttttttgtatttttagcagagatggggtttctctgtg

SEQ ID NO: 535398 - DNA, 201 bp, Homo sapiens
acaacagctgataaatcttaattttcgccttgaatggaaattctgtgtgtgtgtgtgtgtgtgtgtgtgtgtgtgtgtgtgtgtgtgtgtgtgtgtgtgtgtttgttttttttttttttaaagagacagagtctcacttctttgcccaggctggagtacagtagcatgatctcggcacactgcaacatctgcctgctgtgt

SEQ ID NO: 535399 - DNA, 201 bp, Homo sapiens
caacagctgataaatcttaattttcgccttgaatggaaattctgtgtgtgtgtgtgtgtgtgtgtgtgtgtgtgtgtgtgtgtgtgtgtgtgtgtgtgtgtttgttttttttttttttaaagagacagagtctcacttctttgcccaggctggagtacagtagcatgatctcggcacactgcaacatctgcctgctgtgtt

SEQ ID NO: 535400 - DNA, 201 bp, Homo sapiens
ggaaggtgacaggcagagatttcctgaggagaaccgtgattcttataaggccctcatgctcctggcctgccttttacaagccttgtgtgaatcgtgttttmtatgccccttttgggatgtgtcagtgcctctgcttgtcctatttttccttaacttttttttttctcaccagaatgtccctcttccagtggaaagcccaac

SEQ ID NO: 535401 - DNA, 201 bp, Homo sapiens
ttcttataaggccctcatgctcctggcctgccttttacaagccttgtgtgaatcgtgttttctatgccccttttgggatgtgtcagtgcctctgcttgtcmtatttttccttaacttttttttttctcaccagaatgtccctcttccagtggaaagcccaaccatgcagacatcttgctcataaacttacagtatgtttca

SEQ ID NO: 535402 - DNA, 201 bp, Homo sapiens
cagctactttggagactgagatgggaggatcacttgaacctgggaaggtcaaggctgcagtgagctgtagtcatgccactgtactccagcctgggtgacasagtgagaccctgtctaaaaacaacaacaacaaaacccattggctttttgaagtgagattcagtggcattcaatctttggggtcaacctgacagaatcatg

SEQ ID NO: 535403 - DNA, 201 bp, Homo sapiens
tgcccaactgtctgataattgagaagagccagtctgaagagcagctcccattatgggtgataagggtcagagtacagatcatagtaagatggggagtttgttctctctctcttttttttgagtcggagtctcactctgtcaccaggctggagtccaatggtgcaatcttggctcactgcaatctctgcctcccaggttcaa

SEQ ID NO: 535404 - DNA, 201 bp, Homo sapiens
agtttcatcatgttgaccaggatggtctcgatctcctgacctcatgatccgcccacttcggcctccaaagtgctgggattacaggcgtgagccactgtgcmtggcctttcttttttttttttttttttgagacagggtctcacttttattgcctaggttgggagtgcagtggtgcgattttagcttactatagcctcaatc

SEQ ID NO: 535405 - DNA, 201 bp, Homo sapiens
cctcccaagtagctgggattacaggtacccgccaccatgcccggctaatttttgtaattttagtagagatggggtttcaccatgttgggcaggctggtttygaactcctgacctcacatgatccgcctgcctcagccttccaaagttctgggattacaagtgtgagccaccgcacccggcctgtttgtttttgtaaagaca

SEQ ID NO: 535406 - DNA, 201 bp, Homo sapiens
attggctttttgaagtgagattcagtggcattcaatctttggggtcaacctgacagaatcatgatgggggtacagtgctgcaggctagaactcatgactcrgttcaggttatagtgcatggcagtctgctgacaaagtggggctctttttaagccaagagtttagttcccaaggggaccttcttggccttataggacatgg

SEQ ID NO: 535407 - DNA, 201 bp, Homo sapiens
taatcgtttgctttacaaaagaaggcatattcatgttctgcatgagttttcatgacaaaaaagggcaaggtaatctccttctccccaccctcaattttgaraaaaggaaacacttctagtttcttttattgagagcggtctcccccattgatggggacccctaattgatggggtcctctctaggagattttatcccatttg

SEQ ID NO: 535408 - DNA, 201 bp, Homo sapiens
cagcagaagtcatttgactctccactagcttccctagctgctgaaaaactggaacatttgacacccctctccaccccgcctccccccaccccacactgccrtctgttactctgtttaaccaccctggatctggtgcacagatggcagctggcatcagagctgtttgaggctgtggtgtgagtatctgaacatttacaggta

SEQ ID NO: 535409 - DNA, 201 bp, Homo sapiens
aaaaaatgttcaggcacaagctttcagctagggaacagttgccctggggatgctgatattcagaagatatatttttgagagcctatttgttgctagctaaraataaaggctttgtctgggtgcggtggcgcatgcctgtaaccccaacactttgggaggctgaggcaggtggattacctgaggtcaggagttcgagaccag

SEQ ID NO: 535410 - DNA, 201 bp, Homo sapiens
gagccaggcctatgcaatcagtgctggtgtctctctagagggccagcagctcttccagaccattcacaagacgtgagttgggatcggagaggtcctttgtyctggggtaatgctacctggttgtgctgtctggtggcaggcttttgggtggttgtcttcctaaaagtctactggggaagctgggtagggtattggcaatat

SEQ ID NO: 535411 - DNA, 201 bp, Homo sapiens
tgttggcgtgaagatggttcccgaggcggagcttcggtctcctccgtcctcctgcctctggctggccctgccgggtcacgagcaggccgggtttacctgtytatcttcaaaatgttcccttgcttttccacatcctcatcactgtgccccccacctatcgttccccacagatgggggtcacggctcctacaatgacggtgc

SEQ ID NO: 535412 - DNA, 201 bp, Homo sapiens
gtgagcagaaccctagaaatgaaggaggtggaagacaaagatgagagaggacacacagagccaaacgcagctcttcgagagggctgatgggaccaataaasgcgtggccgacgggcagaaagcaggagccttacacacggaagggagccctcgtgcagccaccgtggagatggaaaatggcatgttaagaatatcttttgc

SEQ ID NO: 535413 - DNA, 201 bp, Homo sapiens
gtttacccgggagcccagcaacaaatgggagcttctgtgctgctgtccgtgcatacggcccaggagccgggctcatccccgagacgccgtgttccctcccrctgtccgctcacacctgcctgtgtggacgtggctctgacatgtctccttcctggttcattgctcatctgttctcatgtggctgcgccgccaccctgtcct

SEQ ID NO: 535414 - DNA, 201 bp, Homo sapiens
aggagaaaggttcactctgcacagggcgggtgggaagagggcagtgagcagaaccctagaaatgaaggaggtggaagacaaagatgagagaggacacacasagccaaacgcagctcttcgagagggctgatgggaccaataaacgcgtggccgacgggcagaaagcaggagccttacacacggaagggagccctcgtgcag

SEQ ID NO: 535415 - DNA, 201 bp, Homo sapiens
agtctgcgatgtggactgcatgtggcccacagggcccgaggttctctctggccctggcaggaatcacttggtgactcggcctcagacacgtgtacagaaamggagaaaggttcactctgcacagggcgggtgggaagagggcagtgagcagaaccctagaaatgaaggaggtggaagacaaagatgagagaggacacacag

SEQ ID NO: 535416 - DNA, 201 bp, Homo sapiens
tgtggtcactcagcgagcttgtccatcagggtcttcccagggctgcttggtgcccacaggcgaaggcttcacccttgctggggcttgcagggccctcaccktgtgacctgacccctccctgcatcctctaggcttctgtgtggttcttaaaagttcagcctgccgccaaggcctggtccctgggagagacgtcttcgtgca

SEQ ID NO: 535417 - DNA, 201 bp, Homo sapiens
gaccaggagccaggtcccagggtctgtgccatgggccccttcatggcgtgtccaggggatgacaatgcaggttccccatgtgggtgtgaagagggctacaygttgctgccttttgaggggcattcgggaggcaggatctgtaggaactggtgaccggtgagacgcagcacctggtgatgaaggggcggtgtgtggcctggg

SEQ ID NO: 535418 - DNA, 201 bp, Homo sapiens
ctgattctcaaaccatcgcaagcctggcagcacttggggaggcttaggctcggggagcttggtttccccacgcaggtgtggcagagccgcctccctctgcrtccgtgagggttctgaggagtctgtgctttctgagcaaactcagagtagaggcaccacccctgggggcagccctgcctctgtcctgctccgccccctcca

SEQ ID NO: 535419 - DNA, 201 bp, Homo sapiens
ggaagactttcatggggctacacgagcagctggctgtggaaacaggcctgtgcacaagacgcatggcaggtgtgggggagggaggtcccaggggctggggmccagctgccggggccaggccttgcacgtgggcacggtgtcctgaggtcaagggatgcagagttgggtccagggaggagggaggggctgagaagtgggcag

SEQ ID NO: 535420 - DNA, 201 bp, Homo sapiens
gtttctataaagtaagagctgagcgctgcttggaattagttctgtgatgggataccagtcaggactagaatgtccagtaaaaattaaaaatcagcatcacyccagctaggatgggagacctctggaagatggctgtaccacgttttttcctttcttttcataaaaggttgctcatgctcagtaacacattcaactagttct

SEQ ID NO: 535421 - DNA, 201 bp, Homo sapiens
gtagatctctgttccatacgctttgctttagtttattttatttagtttatgtaacccttgaaaaatgtgaaaaccattcttagctgagggccgtccttackcgaagaggcctcgggctgggcttgcggctgcagactgcattgcctccgcttctcaggtgctttgtcttttctgttccctcagagttgcaggcgatggtct

SEQ ID NO: 535422 - DNA, 201 bp, Homo sapiens
gttggtacatatgcccgtggtgtcggagctgtgggactctccagctgttgctgtctgtctctgcctcagttctgtcggcctttccttcacgtgttttgggyggggtcacttattggaggcagatacactttcgctttttgtctcttcctaatgtattgaccctttatctttgcggaacggccctcattgtctcgtgtgaga

SEQ ID NO: 535423 - DNA, 201 bp, Homo sapiens
cagcttcctgatgggcaggcggggccacgctgcctgtgctgtgctgcactctgctcacatccccgccgctccctccagggcaggtttctccccagtcatcygcaccccacctcgaccgtgaccatcagggcgcctgtggcaccgttgccagccccgagccagcatccactccggcccttcccttgacctttgcttctcaga

SEQ ID NO: 535424 - DNA, 201 bp, Homo sapiens
taattaatttgtcagttgtatcagccgattagtcaataacgtctttaaaaccaaagttacagatatatgcccatagcgtcggagctgtgggactctccagytggtacatatgcccgtggtgtcggagctgtgggactctccagctgttgctgtctgtctctgcctcagttctgtcggcctttccttcacgtgttttgggcg

SEQ ID NO: 535425 - DNA, 201 bp, Homo sapiens
tcctgctgcacagagacagagccatcagcggagcccctcatggcggccatcctgggctcctgtccacacactgtcctgccctcctgccgtggttggatgargtcttccctggacccaggcagggcctcttcatgtcccctccctgtgaggcccccatcctcccagtatctcccagcttcctgatgggcaggcggggccacg

SEQ ID NO: 535426 - DNA, 201 bp, Homo sapiens
ggtcccctaaaccgaacctggggaaaattaattaatttgtcagttgtatcagccgattagtcaataacgtctttaaaaccaaagttacagatatatgcccrtagcgtcggagctgtgggactctccagttggtacatatgcccgtggtgtcggagctgtgggactctccagctgttgctgtctgtctctgcctcagttctg

SEQ ID NO: 535427 - DNA, 201 bp, Homo sapiens
cctgtggggtctcctgctgcacagagacagagccatcagcggagcccctcatggcggccatcctgggctcctgtccacacactgtcctgccctcctgccgyggttggatgaggtcttccctggacccaggcagggcctcttcatgtcccctccctgtgaggcccccatcctcccagtatctcccagcttcctgatgggcag

SEQ ID NO: 535428 - DNA, 201 bp, Homo sapiens
agaagtaatatgaattccagtcttcatgccggatgtgttgagtcatggtctgtctccagttccacttctggagcgcctggtccagtgtgtccgacgtggcrgtgtacccgtgcgaatgtccacgctggcgtgttgtggagtgccgctgccgtccgagggggcgcgggcgtagcttggaggcggactctgcgttgtctccct

SEQ ID NO: 535429 - DNA, 201 bp, Homo sapiens
ccctcccatcccccacgtgccccaccgaggagaactggaaaagctgtttcccaggtactgtcggggtgtaggccccccgtgctggccccgcagccatggcragatcattggcagcccggccttgtctcactcactctcttgcaggtccgatgtggcctccgtgaactggagtgcaccttcccaggccttcccacgcatcac

SEQ ID NO: 535430 - DNA, 201 bp, Homo sapiens
tgaagttgtggtttcatttaacgttttgttccatccgaagtaagtgactcgtaatgtttatttgtgacactagatgtgtgtgagggtgtgtgtgtgaatgygtagctgggatggaatgaagtccctgcctgtggggagccagctccaggttcactcaaaggagacaagagactctactggcttgtgtgtgtgctctgtcat

SEQ ID NO: 535431 - DNA, 201 bp, Homo sapiens
ctccctggttcaagggattctcctgcctctgcctcccgagtagctgggattacaggcatgcgccaccatgcccagctaatttttgtatttttagtagagayggggtttcactatgttggccaggatggtcttgatctcctgacctcgtgatccgcctgcctcggcctcccaaagtgctgggattacaggcgtgagccaccg

SEQ ID NO: 535432 - DNA, 201 bp, Homo sapiens
gttcacctgggaaagaggaaggtggcaatagtcaccacgttgagagggagcaccctgggtgggggcaccctggcttcatagcccagtttcaccattcagtytttgagctgctctttgccggggtttcctcgccccccgtggtgttgagatctgtgtgagagacactaagggtcagcctttcatgtgcgcacacgtgcctct

SEQ ID NO: 535433 - DNA, 201 bp, Homo sapiens
gaagcaggagaattgcccgaacccaggaggcagaggttgcagtgagccaagatcgtgccattgtactccagcctgggcaacaagaacgaaaacgtttcggraaaaaaaaaaaaaaaaaaaaaaaataaataaataaatttttttttttgtagagaaggggtcttgccgtgttgcccaggctggtctcatacctctgggttc

SEQ ID NO: 535434 - DNA, 201 bp, Homo sapiens
cccaggaggcagaggttgcagtgagccaagatcgtgccattgtactccagcctgggcaacaagaacgaaaacgtttcggaaaaaaaaaaaaaaaaaaaaawaaataaataaataaatttttttttttgtagagaaggggtcttgccgtgttgcccaggctggtctcatacctctgggttcaagcggttcacccaccttggc

SEQ ID NO: 535435 - DNA, 201 bp, Homo sapiens
ccccggggcaccgtggggacagcgggggcctgctcactccccggggcaccgtggggacagcgggggcctgcttgtgttgggggtggggctccttgcccccyaagggcaggccgagcaccaagtctgtgcttgccccgctgtgcagcgttgcaggtgcagcagacatgaggccagctgctgctccctgcaggcagctgaggg

SEQ ID NO: 535436 - DNA, 201 bp, Homo sapiens
tggaattcctttttagaaaaaggaaaatgtagtcgtgggatgctggtcctttgtcatttgttgcacatttttccacccttttgcttttttttttttctttwttttttttttttttgagatgtagtctctctgttgcccaggctggagtatagtggcccaatcttggctcactgcaacttctgcctccagggttcaagcgat

SEQ ID NO: 535437 - DNA, 201 bp, Homo sapiens
accccgtctctactaaaaatacaaaaattagccaggcgtggtgacgcgtgcctgtaattccagctacttgggaatctgagggaggagaatagcctgaaccygggaggtggaggttgcagtgagctgagatcacgccactgcactccagcctgggggacagagcaagactctgtctcaaaaaaaaagaaaaaaaagagacgg

SEQ ID NO: 535438 - DNA, 201 bp, Homo sapiens
gactgcggccatggaagcttgacgcgggacctccgcacacctgaggttctccggtgggcactcgagagactcacggctctccctctcctcacagggacgcrgagcttgcagtggtgagagagcagcgcaaccgtctgtgtgaccttctgggcgtacccaggccccagctggtgccccaggtaaccctgtcaccttcacagc

SEQ ID NO: 535439 - DNA, 201 bp, Homo sapiens
cctgccctacccttggtaacctggctgctgactccccaccgtgttttctgttttctgagtctgatctgaaagagtcacctcggggcctagaggtggagtgyggtgtgtggtgcgttgagtgtctgttctgagaatgcctgtaagcctttgagttttgggaactttcatcctgtgacctggacctttcctcgaaagcgccct

SEQ ID NO: 535440 - DNA, 201 bp, Homo sapiens
caggccgtccacatgtacacaccctcacctgccctctcggccctgtctcttgcagtcttcccgaggctgctgtccatgacactgagtccagatcttcacaygaggcatgggtcgattctcgcctgcgcagaagttgcttacgccttgtacaaacttgcagcccaagagaacaggtaggaagagtgggtctcgaggagacac

SEQ ID NO: 535441 - DNA, 201 bp, Homo sapiens
tcctcagtgaaggttggtgattttctttagatgattcctggagacttttttttaggtttatttctaggtatgttttgtcttttattgctcttgtgaaactmtttgttatgtgttctaactagttattgctgatgtctagtgaagatatgttttgtatactgtttttgtaaatggcaacactgtaatggaatatgtatgtgt

SEQ ID NO: 535442 - DNA, 201 bp, Homo sapiens
cgggcgcgtgcggggagacccgggccacatgcgagcggggccccgagacattctgcactcgggaattgcggggattatcaaatcccgcttcagtgggaaaygtgagcgaaacccaaggtgagtggccgcagcctttcgtcacgtgctctcccgcatgtcctgagtgagggctcaggctgagctgccgttgccgagagcctt

SEQ ID NO: 535443 - DNA, 201 bp, Homo sapiens
tggtctcagggtggctgggcccatcctcagaaccttctgtcccagtcttctgtggaacagcagcagcaggttccgcagctcgtggtcgaccggggaaggcrggcctcggagcctgggtgttacaggggtccttcaccgagagattgagtggaaggtcctgcagctctgagaagctggcggtttccgcctgggggctgcctt

SEQ ID NO: 535444 - DNA, 201 bp, Homo sapiens
ccaggtactgtcggggtgtaggccccccgtgctggccccgcagccatggcgagatcattggcagcccggccttgtctcactcactctcttgcaggtccgaygtggcctccgtgaactggagtgcaccttcccaggccttcccacgcatcacccagctccttgggctgcccacctaccgctaccacgtcctgctggggctag

SEQ ID NO: 535445 - DNA, 201 bp, Homo sapiens
ccccgtcaccgtcgaggctgcctggcttggtctcagggtggctgggcccatcctcagaaccttctgtcccagtcttctgtggaacagcagcagcaggttcygcagctcgtggtcgaccggggaaggcgggcctcggagcctgggtgttacaggggtccttcaccgagagattgagtggaaggtcctgcagctctgagaagc

SEQ ID NO: 535446 - DNA, 201 bp, Homo sapiens
catgggatccagccttggcacttcaggatctgcagctccagacggactcctgcctgtgtggcgggtgggcctcgcagccgccatgccatctaaaactcgcmtgtgggggtttatccagttgaaacacagataaatgtgaaacaggatcacttggagatatgacagatgaggttgtcgggacccagcagcttcctttgtcaa

SEQ ID NO: 535447 - DNA, 201 bp, Homo sapiens
ccagccctggcagcagggtaggttgggcgggtgaggggcaggagctggccgcacacaactcagaatgtggcaaaggcaagccgctgtggcaggcgcttttrgaaaagtaacattgcgtctatccttttttttttttttttccagtgtgtgttttaatagaaaagttgtcactttccaaaatgccctttagaggtgacaccg

SEQ ID NO: 535448 - DNA, 201 bp, Homo sapiens
cgtggccgtggacggtgagggtgccggcctcacctcggaggcatggaagtaccaggttacttcacatcgagaggaccgttttcctctttccagtcggctgyggttggcactgaagaatcttggtgctgacagacacagagcagggtctctcgtggaacaggagttgtctggtctgttcagtttgatgagtggcagtatctg

SEQ ID NO: 535449 - DNA, 201 bp, Homo sapiens
aaaaagttaattagtgtacaaagactaaattgtaaaactgcctgtgacgaggtaaaggatccagtatgaaatggggcagagcagacgtgtgggcatttcawgcagaagaggagcagactcacgtggccgtggacggtgagggtgccggcctcacctcggaggcatggaagtaccaggttacttcacatcgagaggaccgtt

SEQ ID NO: 535450 - DNA, 201 bp, Homo sapiens
agaccacctggttaccatgaagatcagccactgggatgggtaggttttctgtttttgtttttctaagagctttttttccccccaaaggagagattcagttragcttataagccttgagtgtattttctcactgtggatgtcgtattttaaaataacttctgagaagtaatatgaattccagtcttcatgccggatgtgttg

SEQ ID NO: 535451 - DNA, 201 bp, Homo sapiens
tcgtgcgcctggggcccgtcctcagcgtgtgtgtccgcagcgcgtgtgtctgcacctccttttggttggtgagttgtgtgcactgttctgtggctatacartttttctgtgagtttgcctgacatttaggttattttgaatttttggctctgatgaataaagcagttgtatatatttatttagaaatcatcttcatgtgga

SEQ ID NO: 535452 - DNA, 201 bp, Homo sapiens
tcctcagcgcatgtcctcagcgcacgtgtcctcagcgtgcgtgtcctcagcgcgtgtgtcctcagtgcgtgtgtcctccgctcacgtgtcctcagcgcgcrcgtcctcagctcgtgtcctcagtgcgtgtccgcagtgcgtcctcagtgcacgtgtcctcagcacgcgtgtcctcagctgcttttcgttggtgagtctttg

SEQ ID NO: 535453 - DNA, 201 bp, Homo sapiens
caggttctttgctcagcgtagtgcgcctggggaccgtccgcagcgcgtgtgtcctcagtgcatgtgtcctccgctagtgtcctcagcgtgtccgcagtgcrcgcgtcctcggctcgtgtcctcagcgcgtgtccgcagtgcgtcctcagcatgtgtcctcagcgcatgtcctcagcgcacgtgtcctcagcgtgcgtgtcc

SEQ ID NO: 535454 - DNA, 201 bp, Homo sapiens
gcagagctgctgtgcgctcaccgtgctgcctttgttttaggatgcagcagtctcggccctggctgctctatgcagtgaatattacatgaaggagccggggraggcagatcccgcaattcagggtgagtggggagcccttttcttgaagactccaggggcttccagcaggaagctgctggggagtgtctgggcacggaggag

SEQ ID NO: 535455 - DNA, 201 bp, Homo sapiens
atgttcaataggtacatttttgtaaatgttaacatctgtaaattcgtacctatcaccacaatcaagacgagaaaaggcccaggtttcccctttcccattcrgggtccctcccctcccacacccccttcttcaggcacccctggtctgttgctctcactgcagctgtgtctgcatttcccaaagctctgtgtgaatgggttc

SEQ ID NO: 535456 - DNA, 201 bp, Homo sapiens
gaaggtgggagttgccagggcattacagagggtctcagagctgtgttggcatcactccgcaggtggagggcacagctgagggcgacagtgtcgttgagtgygaggaggttggggcctcagcttgcacgtgctggcctgcgaggaagcatcagccgtgctgacacggagatgtttcctctgcaaattggagtttcggacaca

SEQ ID NO: 535457 - DNA, 201 bp, Homo sapiens
gggcttgagggctcttgggagacgggagagggctgggggcctggaggtgtgcccgctggaggaaggtgggagttgccagggcattacagagggtctcagarctgtgttggcatcactccgcaggtggagggcacagctgagggcgacagtgtcgttgagtgcgaggaggttggggcctcagcttgcacgtgctggcctgcg

SEQ ID NO: 535458 - DNA, 201 bp, Homo sapiens
gcctcagacggcagcggggcctgctatgctcgctgtcttctgcgtggtatgtatttggaggagcacacggtttataaccgtgcagtgcggtggcttgtctyggcgtggatgtgactgatgagcgctgtggggcatttccctgctgccctgcactccgtgcccttctttccctagtacttctagcgccccccagtggaatga

SEQ ID NO: 535459 - DNA, 201 bp, Homo sapiens
ggggccctgacgtctcttgcgggtgtcatggagcaggattggaggtttctgagcagcaggagggcaggagaaaggccccaggactttgcgctgtggcctgkcctggaaggaggctggctgggcccttctggatgcctgtagcagcactgccacctgggcagaggccccagaggccccagaggccgaggcaggctttgttct

SEQ ID NO: 535460 - DNA, 201 bp, Homo sapiens
ttgggtcctgcctcaggcagggctggtttctgcgctggtgctggtggatgggcttggagccccacctgttgccagcagagggcagtggtgccacgcagccsgggctccccagggtaggtttctctgcatctgggctgcttagttcctgtttaagtgcagagactgaacgagctctaataaaacaaggtgggtgagttgaaa

SEQ ID NO: 535461 - DNA, 201 bp, Homo sapiens
ttgggacacagaccctggcctctgcctgcaggtgcctggttagtgccctggctgcagccctttgccagccctttccctgccctttcgctctgattgtctcttgtgttaccttttcttgtgctaacgaggaggaaaggtcaagtctcagaagagggcaaagcctcttttgggtcagcgtcctggaggctgcagctccctggt

SEQ ID NO: 535462 - DNA, 201 bp, Homo sapiens
actgccagcctgctttccgcccctgtggatttgaccctgagacctccagagacgactggccagatgttctgtaggacgcccctctctctgatgctttctcgtgtgttactggaaagagtgatgtgaggtgacctgccctcctccgtgtgctgttgggcccatatagtgccccacaacgggtcctgcgtggtctggaccttg

SEQ ID NO: 535463 - DNA, 201 bp, Homo sapiens
ctgccagcctgctttccgcccctgtggatttgaccctgagacctccagagacgactggccagatgttctgtaggacgcccctctctctgatgctttctcgtgtgttactggaaagagtgatgtgaggtgacctgccctcctccgtgtgctgttgggcccatatagtgccccacaacgggtcctgcgtggtctggaccttga

SEQ ID NO: 535464 - DNA, 201 bp, Homo sapiens
cctcagggcaggtagcgggtgggcctccgtggtgttgggaggtgctgggcccggaggtatcagcaggaactgcagggtccctaccgcaggctccccacacrgtgacacctgtctgtccgtccgtctgtccacaggagcaggaggggctgggcggggaggacgcagggtctgtcggagcatagcagtggcccgtacgtgagg

SEQ ID NO: 535465 - DNA, 201 bp, Homo sapiens
tggagggcacagctgagggcgacagtgtcgttgagtgcgaggaggttggggcctcagcttgcacgtgctggcctgcgaggaagcatcagccgtgctgacayggagatgtttcctctgcaaattggagtttcggacacacagactggaattgaactaacgggcaccccaggaagactgtggggcgagacgaggaggatgggg

SEQ ID NO: 535466 - DNA, 201 bp, Homo sapiens
gatggggttttaccatattgaccaggctggtctcaaactcctgacctcaggtgatccgcctgccccagcctctcaaagtgctgggattacaggcgtgagcygcagtgcccagcctacagtgagctttgctcacaccactgtactccagcctgggtgacagagcgagacccggtctcaaaacaacagcaaaaaaaccctaag

SEQ ID NO: 535467 - DNA, 201 bp, Homo sapiens
gtttgttaccctacaaccagggagggtgtcgggtgacaccctgggctcagaccccgcgctcagcacccgtctcccaccgtgggctgccacagaagctacamggcaccgggtcaaggccaagcaaatgaaacacgtaatgatagctctgtctttctaatttccccctattagaagaaagaacgtgaaataattctttatggg

SEQ ID NO: 535468 - DNA, 201 bp, Homo sapiens
aaatggttctgggatgtttccagccctggcagcagggtaggttgggcgggtgaggggcaggagctggccgcacacaactcagaatgtggcaaaggcaagcygctgtggcaggcgcttttggaaaagtaacattgcgtctatccttttttttttttttttccagtgtgtgttttaatagaaaagttgtcactttccaaaatg

SEQ ID NO: 535469 - DNA, 201 bp, Homo sapiens
cactcaggcgagctcccagccagcaggtaaggcgagtagatggtggccagcccgtgctctgtgtaaaagtgaggcgggtactctgggattgtggggtgcaygtaaggggaaatggccccaagcccctttgtagatgagattttatgtggaaactctggtggaaggaaaggtgagccggctttccaggggtagccaggagtg

SEQ ID NO: 535470 - DNA, 201 bp, Homo sapiens
atgcctctcgtgcagaactgttctgagggtgagggaccctcatccagggaccagtgaagccagattttttgttcctggtgtaacagcccaatggcttcttscttttttttttttttttttttttttgatacgaagtcttgctctgttgcccaggctggagtgcagtgcagtggtgcgatcttggctcactgcaacctcaac

SEQ ID NO: 535471 - DNA, 201 bp, Homo sapiens
acgtggtgaaaccccatctctactaaaaatgcaaaaaatagccaggcatagtggcgtgggcctgtaatcccagctactccggaggctgaggcaggagaatkgcttgaacctgggaggcggaggttgagtgagccgagatcatgccactgcaccccagcctaggtgacagagcaagactctgccagaaaaaaaaaacagaaa

SEQ ID NO: 535472 - DNA, 201 bp, Homo sapiens
atcatgcctggccaatttttgtgtcattagtagagatggggttttaccatattgaccaggctggtctcaaactcctgacctcaggtgatccgcctgccccygcctctcaaagtgctgggattacaggcgtgagccgcagtgcccagcctacagtgagctttgctcacaccactgtactccagcctgggtgacagagcgaga

SEQ ID NO: 535473 - DNA, 201 bp, Homo sapiens
gccttccagagcaggctgggcaccgagggcggcttccggagctgggctcttgcagggtgatgccctgtggagggctggcttctgtcccaggcacctgtggkttccccgggcttgcagctccaggttttccttgatgtcttccctggcagagctgtgctgaagcttcgagtcgaaggcagagagtccatttgcgacagactt

SEQ ID NO: 535474 - DNA, 201 bp, Homo sapiens
tgaggcaggagaatcacttgatcccgggaggcggaggttacagtgagccgaaatcgcgccactgcactccagcctgggcagcagaatgagactccgtctcaaaaaaaaaaaaaaaaatcagctttatctttgtacatctactttattacatatagtttacatatagtaaaattgccagttttcaatatgggtttaagtgtg

SEQ ID NO: 535475 - DNA, 201 bp, Homo sapiens
ccgacttggtgtggaaagacacggccttggcagtggggttgtgtaaagccagtgtctcgggcgcctcggcgttgtctggccccttgagtctgtgctcgccractggaacaaatgcagaaggccgagctgcgccttccagagcaggctgggcaccgagggcggcttccggagctgggctcttgcagggtgatgccctgtgga

SEQ ID NO: 535476 - DNA, 201 bp, Homo sapiens
ggtgtaagctggggcggataacgatgcctctcgtgcagaactgttctgagggtgagggaccctcatccagggaccagtgaagccagattttttgttcctgrtgtaacagcccaatggcttcttccttttttttttttttttttttttttgatacgaagtcttgctctgttgcccaggctggagtgcagtgcagtggtgcga

SEQ ID NO: 535477 - DNA, 201 bp, Homo sapiens
ttgatcccgggaggcggaggttacagtgagccgaaatcgcgccactgcactccagcctgggcagcagaatgagactccgtctcaaaaaaaaaaaaaaaaaycagctttatctttgtacatctactttattacatatagtttacatatagtaaaattgccagttttcaatatgggtttaagtgtggcagcgggtttggcaga

SEQ ID NO: 535478 - DNA, 201 bp, Homo sapiens
ttcatgtgtgtgtggagtggccatgtgtgtctagtttcgtgcagattgatgccctgtgtagatttctgtaactaactccacactcaaatcagaaacctgcrtccttcccacagagacagcccctgccctttgcattctcaccctgcccccctgccaccagtctgtcccttctagaatatgccatgatcgactcgtatggtt

SEQ ID NO: 535479 - DNA, 201 bp, Homo sapiens
tgacctcctgggctcaagcaatcctcctgcctcagcctctcaagttggtgggactacaggcaaacatcccattgctcagctaatttttgtattttttgtarggatggggtctccctgtgttgcccagactggtcttgaactccttggctcaagcagtcctctcacctcagcctcccaaagtgctgggattatgggtgtgtg

SEQ ID NO: 535480 - DNA, 201 bp, Homo sapiens
tactttattacatatagtttacatatagtaaaattgccagttttcaatatgggtttaagtgtggcagcgggtttggcagatgtgagctgttgaatgaccascactgtggtcagtgtggtgcacatgaccctccctccaggaggcgccatcctgactgacctcctgtcgctggggctcccccgttttagaatccgtgcaggt

SEQ ID NO: 535481 - DNA, 201 bp, Homo sapiens
gtgtgggagcagctgactaactcgtgttctagtgactgatgatgcagtttcagtcatcatccatttcaggggcgtgtttaacacatctttcgcccatttayttattaggttagtcgttttcttcctgttgagaatttgagaattcttcatgaattctgcatacaattcctttttcagatgcttccttgctacatatttcct

SEQ ID NO: 535482 - DNA, 201 bp, Homo sapiens
agcctgctgtgaagcgcctgtttcctccaatctccagcccagcccaggggtctgccttggagccacccgcacgtctggtttctgtgtgattggccagaggyggtgggcgcgtctgctccttttccctggggggtgggggcacagaccctgggtggctgtgttcggctccttacttggtgcccgtctgtgtgtgctcctccc

SEQ ID NO: 535483 - DNA, 201 bp, Homo sapiens
gcaaagcagcagtcaggcctcctcccagcctgctgtgaagcgcctgtttcctccaatctccagcccagcccaggggtctgccttggagccacccgcacgtstggtttctgtgtgattggccagaggcggtgggcgcgtctgctccttttccctggggggtgggggcacagaccctgggtggctgtgttcggctccttactt

SEQ ID NO: 535484 - DNA, 201 bp, Homo sapiens
ttcctcacgatgccaggccctgcgtgcagaccagatgccacttgtgaggacgcaccggcaggcaggcccctccaatcctgagggcggcatcacggggacckgcagtcatggctgcaccctagtaccgcggggcccccctgcacccgaggcagggtcctgctgtcagcctggaccttggggtgagggaggcagtggtcctgt

SEQ ID NO: 535485 - DNA, 201 bp, Homo sapiens
aatactaaaaatacaaaaattagccaggcgtggtggcgggtgcctgtaatcccagctactcaggaggctgaggcaggagaatcacttgagcccgggaagcrgaggctgcagtgagccgagatcgtgccactgcactccagcctgggtgacagagtgagactccatctaaagaaaaagacaatctaccaccttttcccgagt

SEQ ID NO: 535486 - DNA, 201 bp, Homo sapiens
tgcatttttaacattaaccattaaataccctaaagatcgattccccaacagccctgctgtgtagaccgtgcagaaaggacgtttctccgtcaccagcctgsgcagaattttgaaaatgtagcatttggcctctttcccaggaaggatctttgaacacacttatctgtatttttataccctttcaggtttcctcaacattta

SEQ ID NO: 535487 - DNA, 201 bp, Homo sapiens
tggaggttgcagtgagctgagatcacgccactgcactccagcctgggggacagagcaagactctgtctcaaaaaaaaagaaaaaaaagagacgggttttgstctgttgcccaggctggagtgcaatagtaggatcatagctcattgccgccttgaaattctggcttcaaatgatcctcccaccttggtctcccaaagtgct

SEQ ID NO: 535488 - DNA, 201 bp, Homo sapiens
gcctgctcgctctggtgtgcaccgacctgccagctttgtggcactttgtggcatggggctcaggccgatggaggtcagtggctgtaacactgttgagaccygaagaccgtttacggtgtatgttttcgggaaaggtctcttaccacgtaccgaagtggaaatgtttgagttgtttgaaaaagatgaaatacttgtgagtgg

SEQ ID NO: 535489 - DNA, 201 bp, Homo sapiens
catcgcagcgggaggggggtccatgctgtgtgactgggaccactggatcccacccatcgcagcgacagggggtccatgctgtgtgactgagaccactggaycccacccatcgcagcgggaggggggtccatgctgtgtgactgggaccactggaccccacccatcgcagcgggaggggggtccatgctgtgtgactgggac

SEQ ID NO: 535490 - DNA, 201 bp, Homo sapiens
cgccgccccaccacagcaggccaggtgcgttctgcccccaggccctgtcctcgtggctctttgatcctgtgccctcggtgtgcaccgtctcgtggctctcrttagaaccagggtcggccacccccagctcccacatggcgtctggtgtcttgggggtcacatgtgtctgtctgcagtccctgggtgcctcaagctgtgtgt

SEQ ID NO: 535491 - DNA, 201 bp, Homo sapiens
cagcgggaggggggtccatgctgtgtgactgggaccactggaccccacccatcgcagcgggaggggggtccatgctgtgtgactgggaccactggatcccrcccatcgcagcgacagggggtccatgctgtgtgactgagaccactggatcccacccatcgcagcgggaggggggtccatgctgtgtgactgggaccactg

SEQ ID NO: 535492 - DNA, 201 bp, Homo sapiens
gtgcacgtgggctcacacatgggccttctgccacgtggctgggtctgcagcactttcttcaggctgctcagcggaggaggcgtcttgggcttctcatggtsgttctgaaatggttctgggatgtttccagccctggcagcagggtaggttgggcgggtgaggggcaggagctggccgcacacaactcagaatgtggcaaag

SEQ ID NO: 535493 - DNA, 201 bp, Homo sapiens
gtcctctgcctgactttgtctacagattcacatgctttgctggtccagagcccctgacacaagcactggaagcaggtgtgatgaaatagcggggcgccccmcggcgcagtcaggttgccatgtaaagttaagcatcacaagcactgaaatgttggtacagaaaataatccagtatcctagttctctcgataatgatgtgcg

SEQ ID NO: 535494 - DNA, 201 bp, Homo sapiens
agcgggaggggggtccatgctgtgtgactgggaccactggaccccacccatcgcagcgggaggggggtccatgctgtgtgactgggaccactggatcccayccatcgcagcgacagggggtccatgctgtgtgactgagaccactggatcccacccatcgcagcgggaggggggtccatgctgtgtgactgggaccactgg

SEQ ID NO: 535495 - DNA, 201 bp, Homo sapiens
actgggaccactggaccccacccatcgcagcgggaggggggtccatgctgtgtgactgggaccactggatcccacccatcgcagcgacagggggtccatgmtgtgtgactgagaccactggatcccacccatcgcagcgggaggggggtccatgctgtgtgactgggaccactggacccgacccatcgcagcgggaggggg

SEQ ID NO: 535496 - DNA, 201 bp, Homo sapiens
tgcgctgtcaggagcaggcggggcgggtgtgttcgcttccctctctgcatatgtgtgtttgggttgagcgggtgggtgtcacccggcccgctgtgggaggygcatgagggtctgacctggttgtgtgattgggttgagtgggtgtcacctggccactgtgggaggtgcatgagggtctgacctggttgtgtgtttgggttg

SEQ ID NO: 535497 - DNA, 201 bp, Homo sapiens
ctgcactcggtcagtgtttttagaatttttgtatgcaccgtgacatttttctgctgtgtgtttcactcgttaatacattttgctgttttttccttctttaygaaagtagcattaggctggctttacgccgtgtcccgtgcgtagctgctgtgccgcctcactgtacatcctgcacccccgtgctgaagttcaggcttgctt

SEQ ID NO: 535498 - DNA, 201 bp, Homo sapiens
gaggacagacttgaaaaagctgaattctgggagggaggagaaggtgttgtttgtagaagcagctgccgagagtgaggagaacacagttgcctttgtgcgtygtggagccgggtcctgttttggttgcggccgtgcatcctgcatccaggtcggggcagaggtggttccacgtcctcccagaggtcagccccacgctggcct

SEQ ID NO: 535499 - DNA, 201 bp, Homo sapiens
ccacactgggctgccagagcacagtgaagggagcccccagggctgtggtgtcccggggctgtctcagcagcctcagaagttaggactttttttttgttaaytgaatagccttcacatttgttgcttgtgcaggatctaattgagttaaagatttgggtttatattggtgggagccgggggagaccgtttgaaggaaaagat

SEQ ID NO: 535500 - DNA, 201 bp, Homo sapiens
ggaattgcggggattatcaaatcccgcttcagtgggaaacgtgagcgaaacccaaggtgagtggccgcagcctttcgtcacgtgctctcccgcatgtcctragtgagggctcaggctgagctgccgttgccgagagccttgtgtctgcttcgggtgtctgcactgtgagtggctccgtgctggcgtccgcaccagccgctt

SEQ ID NO: 535501 - DNA, 201 bp, Homo sapiens
caggatggtctccatctcctgacctcatgatccgcccacctcggcctcccaaagtgctgagattacaggtgtgagccaccgcgcctggcccgagtgtgtctttttttttttttttttaatttttttagtatttattgatcattcttgggtgtttctcagagagggggatttggcagggtcataggacaatagtggagggaa

SEQ ID NO: 535502 - DNA, 201 bp, Homo sapiens
cgtggcaggaggctggcgtgtgcgtcgtgtggctcggtcagcgtggcaggagggtggcgtgtgcgtcgtgtggctcagagtcagcgtggcaggagggcggygtgtgcgttgtgtggctcggagtcagcgtggcaggagggtggcgtgtgcgtgatcgtgtggctcagggtcagcgtggcaggagggcggcgtgtgcatcgt

SEQ ID NO: 535503 - DNA, 201 bp, Homo sapiens
cgcgcaggccaactagatggatgtgctggaacaagggccgggaaggtgggatggccggagttgaagttgcagtggagatgacgtgggggccggagggaggktgggcgtcatagcctggcagctccagcttccacgtctcaccttgcctggggtctccacgtagctgtctcgtgggcgtcgcgtggggcactcccccacgtg

SEQ ID NO: 535504 - DNA, 201 bp, Homo sapiens
gagcatctttcacgggcttacttgccgtctgtacctcctctttggtgaaatgtctgctcaggtcttttactcatttctaagtggattgttttttgtagttsttgagtttagggcactctttacatatgtaggattctggtcctctgttggatttgcgtttggctttctcccagtctgtagctcatctttccgtcctcttca

SEQ ID NO: 535505 - DNA, 201 bp, Homo sapiens
caggcttctgacgcctcagcctggagctggcgttgtgcccctcgcccctttacctgtgccatcccggccgcagacccaagggtgcccttggagccgtgccygccggcctgggtgtcaggcttgtccaacgggttcttagagaacctgggccccatccctccttggcccacgcagactccaggcatccggccgggcgggctg

SEQ ID NO: 535506 - DNA, 201 bp, Homo sapiens
agggacgccgcctgctacgtgtgctgggccttcgcgcgtgcctatgagcctcaggagctgaagccctttgtgactgcaatctcgaggtaggcccattcgtygaggtacatcggatgcgccgtgccccctgacggcgccgtgtgtcgtttcctccatgagaggtgtgcacagcagatgctcgtgaaaaggtgaaattacttg

SEQ ID NO: 535507 - DNA, 201 bp, Homo sapiens
tctgataggaggaggaaagagggttcccaggtctccacatcctctgcttaggttttacaaggcagccgtgctgctgtagccgaaacctcttctcaaccgcyctgtccccaaacagtgtcaggtgtcaggaacacagcaaagccatccatcccaccaggggagcgggcacctgtaccacaaggctgtgtctggtggcctgtg

SEQ ID NO: 535508 - DNA, 201 bp, Homo sapiens
gctcaccacctgcctcagggctcggggttcatgagtgtaaatgtctgtggatgtgattattgaacttggtgaaatgcctttgttcattcaaattcttcttyttcccccatttccactttcttattagggcactttccctcatggtattgatattttgaccacagctgactattttgccgtcggtaacagatccaactgttt

SEQ ID NO: 535509 - DNA, 201 bp, Homo sapiens
caccgcccctcttcctgtccccaccgtgtctactcgtctctcccaaaaccctctgataggaggaggaaagagggttcccaggtctccacatcctctgcttrggttttacaaggcagccgtgctgctgtagccgaaacctcttctcaaccgccctgtccccaaacagtgtcaggtgtcaggaacacagcaaagccatccatc

SEQ ID NO: 535510 - DNA, 201 bp, Homo sapiens
aataaagttaaatgacccaaatgcctatcagtgatagactgaataaagaaaatgcggcacatatacaccatggaatactgtgcagccataaaaaggaacgygatcatgtccttcgcagggagaaatggatggagctggaagccagcatcctcagcaaactaacgcaggaagagaaaaccaaacgtgcatggtctcacccat

SEQ ID NO: 535511 - DNA, 201 bp, Homo sapiens
gggtttataggtaggaatcttgagagctataaccctggtgtcttctcgcactgtgagatgtggtgtggctacatcaatgccagggtcatgagttcactatrggacgcacatgttaaacagcgagtcctgtttcacagggaacctgcatgtacagtaatttacacacacaggccggaaagctgtgctttacacgttgccaag

SEQ ID NO: 535512 - DNA, 201 bp, Homo sapiens
cagttttgactatggaagtactcacagccgtctcagggtggggcttggggttcgtagtggcgaggcgcatttctgttgtctggcgggaaagtccttggccrgcgagaggacactgcgggtgagctgccaaggacacgcaggcctctgtagctcctctgtttgaggttaggatttctccggaaggcgtggtatcactgagct

SEQ ID NO: 535513 - DNA, 201 bp, Homo sapiens
agggcgagggtgtgggagcctcgtgtgttggggcatgaggtaggcccagccgttaataaacccatcagtgcttgtagctgggagggggttcctggaaaccrgcacctgtggccaggaggaagggggcagagggcacccaaggtctgtggccccttagggccctggcgaaccctttgctgtcagaggacagacttgaaaaag

SEQ ID NO: 535514 - DNA, 201 bp, Homo sapiens
tcacagccgtctcagggtggggcttggggttcgtagtggcgaggcgcatttctgttgtctggcgggaaagtccttggccagcgagaggacactgcgggtgrgctgccaaggacacgcaggcctctgtagctcctctgtttgaggttaggatttctccggaaggcgtggtatcactgagcttcagggaagtgttaatgaatt

SEQ ID NO: 535515 - DNA, 201 bp, Homo sapiens
tagtggcgaggcgcatttctgttgtctggcgggaaagtccttggccagcgagaggacactgcgggtgagctgccaaggacacgcaggcctctgtagctcckctgtttgaggttaggatttctccggaaggcgtggtatcactgagcttcagggaagtgttaatgaatttgggcccttgcggtttgtaggcacttattcctc

SEQ ID NO: 535516 - DNA, 201 bp, Homo sapiens
tggagcgcctggtccagtgtgtccgacgtggcggtgtacccgtgcgaatgtccacgctggcgtgttgtggagtgccgctgccgtccgagggggcgcgggcrtagcttggaggcggactctgcgttgtctccctcagcagtgcttcccgctgactctgctccatgtggctccacaggtggtttctgcgctgtctcctgggag

SEQ ID NO: 535517 - DNA, 201 bp, Homo sapiens
tctgaaaggccggctccagcaggtgaggctggccacgcgcagtggacggggcctagggcgagggtgtgggagcctcgtgtgttggggcatgaggtaggccyagccgttaataaacccatcagtgcttgtagctgggagggggttcctggaaaccggcacctgtggccaggaggaagggggcagagggcacccaaggtctgt

SEQ ID NO: 535518 - DNA, 201 bp, Homo sapiens
cgcagccggggctccccagggtaggtttctctgcatctgggctgcttagttcctgtttaagtgcagagactgaacgagctctaataaaacaaggtgggtgwgttgaaatttgattctgttcctttgcactgggctcgggttggatgttcctgactgcttcgttgggacacagaccctggcctctgcctgcaggtgcctggt

SEQ ID NO: 535519 - DNA, 201 bp, Homo sapiens
gtgcgtcgtgtggctcggtcagcgtggcaggagggtggcgtgtgcgtcgtgtggctcagagtcagcgtggcaggagggcggcgtgtgcgttgtgtggctcrgagtcagcgtggcaggagggtggcgtgtgcgtgatcgtgtggctcagggtcagcgtggcaggagggcggcgtgtgcatcgtcgtgtggctcggagtcagc

SEQ ID NO: 535520 - DNA, 201 bp, Homo sapiens
gtggcaggagggtggcgtgtgcgtcgtgtggctcagagtcagcgtggcaggagggcggcgtgtgcgttgtgtggctcggagtcagcgtggcaggagggtgrcgtgtgcgtgatcgtgtggctcagggtcagcgtggcaggagggcggcgtgtgcatcgtcgtgtggctcggagtcagcgtggcaggagggcggcgtgtgcg

SEQ ID NO: 535521 - DNA, 201 bp, Homo sapiens
gcaatctctgctcactgtaatctctgcctcccaggaccaggcgatcctctcacctcagcctcctgagtagctgggaccaccggtgcccaccaccatgccasattaatttttttttttagttttgttagagacagggcttcaccacattgcccaggctggtcttgaagtcctcagctgaagcagtccacccgccttggcctc

SEQ ID NO: 535522 - DNA, 201 bp, Homo sapiens
gctagagggaggtggggcattccctccaggtggcctgtgtggcctcctttagtgagaggggaggtgtgctcttgagagctggggaagaggtggagctgccytgtggaagctagcaagggaaaatggggtttctgaggctcatgggtatgtttggcctagtgataattaattttcatgttatatttgtttttagtaataatg

SEQ ID NO: 535523 - DNA, 201 bp, Homo sapiens
atacacatgttggtactcttggtggtaccctatgagtctcttaggttttgcactcatttcagctcttgagtcttcttgttatgttaatacacatgttggtrcgcttgatggtgccctatgagtttcttaggttctgccctcatttcagctcttgagtcctcttgttatgttaatacacatgttggtaagcttgatggtgcc

SEQ ID NO: 535524 - DNA, 201 bp, Homo sapiens
gtcatctccagtttacagatggggacactgaggctcggttttcttactttagtgtaaggggtgtggtttcttattgttttctttatttttgatgtatttcmcactgattaaaatttttctttttctacctacaaatgtgacacatgcttctggcagttcacctgggaaagaggaaggtggcaatagtcaccacgttgagag

SEQ ID NO: 535525 - DNA, 201 bp, Homo sapiens
tggtggtatcacggcttactgcagcctcaacctcccaggcccaagcagctctcccgcctcagcctcctgagtagctgagaccacaggcctgctgcactggaaaaaaaaaattgtagaaacaggatctcactttattgtccagactgctttcaaattcttggactcaagtgatcttcctgccttggcctgccttgggattat

SEQ ID NO: 535526 - DNA, 201 bp, Homo sapiens
agggcattccctccctggtagagccgttggggctcagtgccgaggctggctcaggctcttgtggggggccctgctgtctgtccagccctggctgtggcctrgcctgaccctgctgccccctgcaggcctgtgtacctcagttcccaggtgatcaaggggccctgggagaggttgggtctgagcacgtcctgacatggcccc

SEQ ID NO: 535527 - DNA, 201 bp, Homo sapiens
tgcactgctgcctggccagctcacccatccacagcaggagccgcgagggagctgctgagagtgccagctgcgggcaggccactggttcttactgtctctgrgcgtcttcagcgtgtgaagggcggtcagggttaagcatccccagagctgcagccatcactgctgggggttgatgggtgatggaggcgagtgggaggtgcc

SEQ ID NO: 535528 - DNA, 201 bp, Homo sapiens
agtggtgcgatctcggctcactgcaagctccgcctcccaggttcacgccattctcctgcctcagcctcctgagtagctgggactacaggcgcccgccaccrtgcccggctaattcgttttgtatttttagtagagatggagttttatcatgttagccaggatggtctcgatctcctgacctcatgatccacccaccttggc

SEQ ID NO: 535529 - DNA, 201 bp, Homo sapiens
ggctcactgcaagctccgcctcccaggttcacgccattctcctgcctcagcctcctgagtagctgggactacaggcgcccgccaccgtgcccggctaattygttttgtatttttagtagagatggagttttatcatgttagccaggatggtctcgatctcctgacctcatgatccacccaccttggcctctcaaagtgctg

SEQ ID NO: 535530 - DNA, 201 bp, Homo sapiens
ccaccgtgcccggctaattcgttttgtatttttagtagagatggagttttatcatgttagccaggatggtctcgatctcctgacctcatgatccacccacyttggcctctcaaagtgctgggattacaggtgtgagccaccgcgcccgacccatatatttattttttaaagataggatctcactgtattgtccaggctgga

SEQ ID NO: 535531 - DNA, 201 bp, Homo sapiens
ttttgagagcttatcactttttgtatgtaaaaattacgagtgtttagttcttaagtcggatcatgcataaatgcagaaacgtagttaaaaaataagtctcttttttttttctttttgctataaagctctaggaatcgattttgcttttagagatagacacaaagggcttatcctggttgcaatgggtgagctattgcagat

SEQ ID NO: 535532 - DNA, 201 bp, Homo sapiens
ccaggctggagtgtggtgatgcaatctctgctcactgtaatctctgcctcccaggaccaggcgatcctctcacctcagcctcctgagtagctgggaccacsggtgcccaccaccatgccacattaatttttttttttagttttgttagagacagggcttcaccacattgcccaggctggtcttgaagtcctcagctgaagc

SEQ ID NO: 535533 - DNA, 201 bp, Homo sapiens
cctccagggcaggtttctccccagtcatccgcaccccacctcgaccgtgaccatcagggcgcctgtggcaccgttgccagccccgagccagcatccactcyggcccttcccttgacctttgcttctcagagccctccctggttgcgtggtaggcgcccgcatctgtgctgggcggctctgagtcccgggcggggccctggg

SEQ ID NO: 535534 - DNA, 201 bp, Homo sapiens
gccaccttgttttgcttttcatctgcttttccccagtgactgatgacactgagcattttctgtgtttgcccgtttgtatgtcttctttggagaaatgtctkttcaagttctttactcatttaaaaaaatatttttttaattgttgttgtaagtaagagtttttttatgtattctggatataagtctcttattggatatatg

SEQ ID NO: 535535 - DNA, 201 bp, Homo sapiens
ttgcatttcataggcagttaaatgtgtctcagaaaggaaaagtgaagtgcggtctggagcataaacagcgcgttagtgctgtgaccgccgccctgaggagrtcagagggtcccctcctaggacagtgccgtgctgtggcactcctcacggagcctcgaggagcggtaggtgcctgtgggtggaggtggctttgtgagggtg

SEQ ID NO: 535536 - DNA, 201 bp, Homo sapiens
ggtgctgaagggagggtctgcagggacggccacacggatggctgtgtgtgctggtgctgaagggagggtctgcagggacggccacgcggctctcgggagcygtttcctgcgctcgggctctgcaccggcaggctccacgctgagggtccctccacatccaccccatcgtgggagggaggctcagtgctctgcaggggcctg

SEQ ID NO: 535537 - DNA, 201 bp, Homo sapiens
gcgaggcgcatttctgttgtctggcgggaaagtccttggccagcgagaggacactgcgggtgagctgccaaggacacgcaggcctctgtagctcctctgtktgaggttaggatttctccggaaggcgtggtatcactgagcttcagggaagtgttaatgaatttgggcccttgcggtttgtaggcacttattcctcataaa

SEQ ID NO: 535538 - DNA, 201 bp, Homo sapiens
cagcgcgttagtgctgtgaccgccgccctgaggaggtcagagggtcccctcctaggacagtgccgtgctgtggcactcctcacggagcctcgaggagcggyaggtgcctgtgggtggaggtggctttgtgagggtgcgagtccagaatctcagtttcagagttggtgtgatgtggagggggtcctttctgatccatggggg

SEQ ID NO: 535539 - DNA, 201 bp, Homo sapiens
agctgctgtccttgtgtccaggtaagtttccatggcacatttcttggtgtgtggctggtgggttctgagaggggtttgtttgggtacgtgtttcatgtgcrtcttcagtcctcagacgaaggaccccgggaagtctttggactctgtggctttctctgagggagcgtgcagcagtgtttgggcacagaagacctctgaccc

SEQ ID NO: 535540 - DNA, 201 bp, Homo sapiens
ctgagaggggtttgtttgggtacgtgtttcatgtgcgtcttcagtcctcagacgaaggaccccgggaagtctttggactctgtggctttctctgagggagygtgcagcagtgtttgggcacagaagacctctgaccctgaaatgaccaccctcagtggtggtttggggtgctggtgggggtcacctgacaggcccatcgac

SEQ ID NO: 535541 - DNA, 201 bp, Homo sapiens
gaacagttgacattttccccctctgcaatagtgaaagtcgaaagctggtcctaaaacctttcggtggttgtggttgggaatacggtcagtgcctcatgcarcgtcaccttcactcgggtgtgtagctgcaacttgcacagcttctttcccagagaagtgggaggagagaagcttcctttgtggggcagttggaggcattgg

SEQ ID NO: 535542 - DNA, 201 bp, Homo sapiens
ttacatactccgcttcgtgacctgactctgcgtgtctgtgggctccttggggccttttcttccccacgagtgtgagtttcctccggtgaagggcgatgggkattgccccaggtggttgttggccttttcctttttttttggaccaaagttttaattttaatgtcaaaccgtttttttctcctttatttagttatttttact

SEQ ID NO: 535543 - DNA, 201 bp, Homo sapiens
ccagtaaaaattaaaaatcagcatcaccccagctaggatgggagacctctggaagatggctgtaccacgttttttcctttcttttcataaaaggttgctcrtgctcagtaacacattcaactagttctcattttaatgctttttggagcctgaggttacattggcaagcatatttcatggtgttttatacgtcaagaggtt

SEQ ID NO: 535544 - DNA, 201 bp, Homo sapiens
ttccccatccccccgtgtgtcctggtgtctttgcttggctcgccggcctccatgggctccccaggtggcaggtggctctcagccatgctctccgtcctcaygcttgtttctgccctggcagagctgctcagtggccagcccgtgggacccctgtgcaccctgccgcccccagcatatgtcagcagcgccgtccgggggaga

SEQ ID NO: 535545 - DNA, 201 bp, Homo sapiens
tcctgggccaaccggtatgttcctgggaacagcagtgatggtgtcttacacatatgggcatgggcacccatgctggctcacacacatgctcactcgcgcgmacacacacacacacacacacacacacacacacttctaaaaggggagcagtctcgtcaccccgtgttggagatcaggactgaagcaaccagaggctgtgtg

SEQ ID NO: 535546 - DNA, 201 bp, Homo sapiens
agtacctggctgagcttcggaaccccgaggagatgactcgctgtggcttctcgttggccttgggcgcccttccaggcttccttctgaaaggccggctccarcaggtgaggctggccacgcgcagtggacggggcctagggcgagggtgtgggagcctcgtgtgttggggcatgaggtaggcccagccgttaataaacccat

SEQ ID NO: 535547 - DNA, 201 bp, Homo sapiens
gagactgggggctggggtgtgcctgcctgtggggcgttaggggagagtgggggccggggtgcacctgcctgtggggcgttagcggggagtgggggccgggstgcacctgcctgtagagtttaggggagagtgggggctggggtgcacctgcctgtagagtttaggggagagtgggggctggggtgtgcctgcctgtggggt

SEQ ID NO: 535548 - DNA, 201 bp, Homo sapiens
gggacttaggtgaaagtcacggctttctctcccgtcctgctgggcccgggtctccggggccctctgagggttgcacagtctccaagttctctgcggcactyggcctcccagccattctctgacaggtgcgtctgagtctcgccttgtgcttccttatcttggagtgcccagggatccaagggaatttttgggcagagtttt

SEQ ID NO: 535549 - DNA, 201 bp, Homo sapiens
tttccttcgtaacttttctttgcactgtggaagtccccagctgtttgtcgtttctctccagagtgtcagctgtgggagggaagggccttgtctgttctccrtgtggcagtgccagtctcgatcatggaggcaagctgggggcctggcctatgaactcctggtggagaaatcaggaggatctgggctaattagctgggcatg

SEQ ID NO: 535550 - DNA, 201 bp, Homo sapiens
aaaaatggaaggagagtttagtccctcaggagaaatagcaaataccatgaacaagtgtgcagcaggcgtctgcgagtgggttccgttgttaggtagagacrgtgggagctagagcagtgtgtggccgtgggagctgctgatgctgtccagtcgtctctgtctcgtgcgtcctggccccctcgtggctggtcagggccacgt

SEQ ID NO: 535551 - DNA, 201 bp, Homo sapiens
ctctcccgcatgtcctgagtgagggctcaggctgagctgccgttgccgagagccttgtgtctgcttcgggtgtctgcactgtgagtggctccgtgctggcrtccgcaccagccgcttggggccagaccttcgcgtctctgcagctcggagcagttctgctcttcagcagatgcttgaccggctgtagccaagcctgagggg

SEQ ID NO: 535552 - DNA, 201 bp, Homo sapiens
ccttctgaggtgtctccgtgttgcagatccggcactccacccagagcctctttgagtacatgaagggcattcagagcgacccgcaggccctgggcagcttyagcgggacccttctgcagatctttgaggacaaccttctgaatgagaggtgagtggtgtctcttggggcctcagaggcgtgagtggtgctggtgcctctca

SEQ ID NO: 535553 - DNA, 201 bp, Homo sapiens
ctcttctccacccgctcctgtaatcctatttgttgtccctgcttcaaccctaagacctcatcagcacgcatgtaacacgtagcacatgtgtaacaagtacrtagcatgtatttgctgcgcacctgtagggttgggctcctgggatgtgaaggtaacggagtgtggttcttccgagccagtgtcctggtgtcagctgccaac

SEQ ID NO: 535554 - DNA, 201 bp, Homo sapiens
tccacaggcgtgactggtggtctgtctggctgtctccttcccgttttgatcgtaggtgtgggatctgcaccacaggtgtgactggtggtctgtgtgccttygctgcttctccactcagcgcttaggagagccccccagcgggctccatggagagagtctaagttccctctccttttaagaagatgtttctattctacactt

SEQ ID NO: 535555 - DNA, 201 bp, Homo sapiens
tccctgtgtgtaggaaggcgttgtgggagctcctccagcttggtgctcccacggacgtgcttgcggacgctcatcagccacccggcaagtgagagctctgygttcctgaggatggaatgtcaagtgagaaacatcgctgctttctagaagtttctggctttacatggaggcagagtatagaccctgtgggccttgacctca

SEQ ID NO: 535556 - DNA, 201 bp, Homo sapiens
tggtctgatggactccaggtgatgacgtccgtgtgtgcgcatcgtggggaccgggctgccaggtgtgtgtgtgagacacgggctgagctggtcacccttckcatttgttggtgaagcatgaatgcagatggaggcctttgtgtgaggtggtttggcctgtaacttttatcctttgtaactttatttatacgcagataattt

SEQ ID NO: 535557 - DNA, 201 bp, Homo sapiens
ctaaaaatacaaaaattagctgggcatggtggcacatgcctgtaatcccagctactcgggaggcggaggcaggagaatcccttgagccagggagttggagrttgcagtgagctgagatcgcgccacagcactctagcctggcgacagagcaagactctgtctcaaaaaaaaaaaaaaaaaaaaaagaaactatccgaatat

SEQ ID NO: 535558 - DNA, 201 bp, Homo sapiens
acgccccgtgtctctctcaggagtgtgcgagttttcgtgtgcagcctgtttcatccctgcaccgcacaggagggacacacagtgccatctcacctgtgtgyacttccatacatgtctctggaaggtggggctctttatgtcctcaccacacccgagaacgcgagcagccgttgccaggccctgtcggcgggaggagcgtcc

SEQ ID NO: 535559 - DNA, 201 bp, Homo sapiens
ccatcacctcacctaactctcagctctgtcttcagcttctcttcttttctcctgtcccctgtcagttggttgcagtcttgtccatttcacttccagcccayctctgaagccgccatgcacttccaccccagcccttgtctgtcccgggaatgctgtcctcctggcctcagcttgccctcgtcgcagcacccgggcgtctcc

SEQ ID NO: 535560 - DNA, 201 bp, Homo sapiens
ttccagcccatctctgaagccgccatgcacttccaccccagcccttgtctgtcccgggaatgctgtcctcctggcctcagcttgccctcgtcgcagcaccygggcgtctcctgctcgcaggctctccctgtcgtgctgtgcccagtgctaccttgagcctccccttggctcagcctcctgtcctgctattgtcatcactgc

SEQ ID NO: 535561 - DNA, 201 bp, Homo sapiens
gctgtcctcctggcctcagcttgccctcgtcgcagcacccgggcgtctcctgctcgcaggctctccctgtcgtgctgtgcccagtgctaccttgagcctcyccttggctcagcctcctgtcctgctattgtcatcactgcatgacaccgagtgattccccctgaaaaacagagcaagccacaggaaccccgtggcctgtgt

SEQ ID NO: 535562 - DNA, 201 bp, Homo sapiens
tgttagcgaccttcagtttgtttcaagtgctataatacgtgtggtttgggaaggaattacttggttaaggtcagctcacactccgtcctggatgatggcamattccagagacgcgtgttgtgttgcagtgttgggtgtgcagctcactctgtaggaagttgctcattaggcacagtgttcgtggctagtttctcaaagctg

SEQ ID NO: 535563 - DNA, 201 bp, Homo sapiens
cacggaggaggagtgaggctctgcttttcatgacttcccttccgattaagcctaagtagctcatgtattaaagaaaaagtcatcagacacagagatcagarttccaggaaatgatcttccagtgcgttctgggtcagttatggtgactgtaaataccgtcatcacagctggccctcaaaataacgcaataataacatattt

SEQ ID NO: 535564 - DNA, 201 bp, Homo sapiens
gataggtgcgtggggtctaagcggcggcctctgctcttgggcaccgtcgggccaattcccctctactccaggaccacacttccttcttccttgctggtgcyggcactgtctggccacccgtccccttcgctgagtgcacggtcactgcccgtcctctggctcctgaacccaggcctgtccctgaccatggacagtctcttc

SEQ ID NO: 535565 - DNA, 201 bp, Homo sapiens
ctctgctcttgggcaccgtcgggccaattcccctctactccaggaccacacttccttcttccttgctggtgctggcactgtctggccacccgtccccttcrctgagtgcacggtcactgcccgtcctctggctcctgaacccaggcctgtccctgaccatggacagtctcttcctgtgtgccgtagaagccctttttccca

SEQ ID NO: 535566 - DNA, 201 bp, Homo sapiens
ctgtgggccttgacctcagaattgggaacatcctctggaagggttgttcccagcatgtgcgaggacgaggacacgggcctggtgtcccctcgggcggggcytcggcagcctctcccatgagagcacagatgccgctctcggcaaacaggaactcggcccagccatgttttcttttctcgttacgactataatcagctgcac

SEQ ID NO: 535567 - DNA, 201 bp, Homo sapiens
tgccttggactctggctgtccaggtggcgtgatcactgtcgacgccgcgtgcacttcgtggtttctaaagaggcacctcccgctttgctttctttcccgakcacttctatcagaagccagctctgcgtgctgagggtctggcgagagcctccgtcatctggcggctgggagctgtaataaagagcagtcttggtgtcagga

SEQ ID NO: 535568 - DNA, 201 bp, Homo sapiens
accgtgacatttttctgctgtgtgtttcactcgttaatacattttgctgttttttccttctttatgaaagtagcattaggctggctttacgccgtgtcccrtgcgtagctgctgtgccgcctcactgtacatcctgcacccccgtgctgaagttcaggcttgcttctcgcacatcatgttcgagggatctgcttcatgaat

SEQ ID NO: 535569 - DNA, 201 bp, Homo sapiens
cgtggctctttgatcctgtgccctcggtgtgcaccgtctcgtggctctcgttagaaccagggtcggccacccccagctcccacatggcgtctggtgtcttsggggtcacatgtgtctgtctgcagtccctgggtgcctcaagctgtgtgttgcctgtggggcatgtctgaacctcaagtgggcctgagtcgtgagagaaag

SEQ ID NO: 535570 - DNA, 201 bp, Homo sapiens
tgaggcaggagaatggcgtgaacctgggaggcggagcttgcagtgagccgagatcgcgccacggccctccagcctgggcgacagagcaagactccgtctcaaaaaaaaaaacaaaaacaaaaacaaaaaatatatacacctactatgtaccccaaaaattaaacactaaaaattaaaaataactaggtatttgtagtaaat

SEQ ID NO: 535571 - DNA, 201 bp, Homo sapiens
aacctcagagtagcgtgggggtggggaggccggacacccaattgccacctggccctgagaaggaaaggcagctgtgtcccaagaagaaccgtggttagccrtgtgacctcgctgttgtagactgtccttgtcgtctgttggagtcggaggttcttgtactggttcgtgtgagtgagtgagtgagcctctgctaagtggccg

SEQ ID NO: 535572 - DNA, 201 bp, Homo sapiens
gcatgtcctgagtgagggctcaggctgagctgccgttgccgagagccttgtgtctgcttcgggtgtctgcactgtgagtggctccgtgctggcgtccgcaycagccgcttggggccagaccttcgcgtctctgcagctcggagcagttctgctcttcagcagatgcttgaccggctgtagccaagcctgaggggtggcagg

SEQ ID NO: 535573 - DNA, 201 bp, Homo sapiens
gctggtgtgaccaaggcctgagtttgaattggatttcattttaacgaaatgtgaggctttgggaggccaaagtgggaggacggcttgagcctgtgaattcragaccagcctgggcaacgaagcgaaaccccatctctacagagagttaaaaaattagccagacgtggtcccagctactcgggaggctgaggtgggaggatc

SEQ ID NO: 535574 - DNA, 201 bp, Homo sapiens
ctgtgaattcgagaccagcctgggcaacgaagcgaaaccccatctctacagagagttaaaaaattagccagacgtggtcccagctactcgggaggctgagrtgggaggatcacttgaggccaggagtttgaggcttcatgagccatgatggtgccactgctgcactccagactgggcaacagagtgagacccggtctcaga

SEQ ID NO: 535575 - DNA, 201 bp, Homo sapiens
gggagttctgggtcttgggaccgtgtggcttgtgggtggtagagttgtgggctgggatgtgcgggtggcagggcctgggatttcagcctggggcctgcagwcctgccctggtgtgctcacacgtgtgaggcatcgatctgtgacctccccagggaattctcccttttgcttgtgtaaatgtctctcccagtttcagaagcg

SEQ ID NO: 535576 - DNA, 201 bp, Homo sapiens
gccctgagggtgatggcatttgaatggctttcataggcattgggtgggcatggagggcagtgactttgagtagattgtggccagtggcctgtgattttcargcaagactcattcttcccgtggtttaattttttaggcttgggaaacccgctacatgcttttgctctggctctccgtgacctgcctgatcccttttgattt

SEQ ID NO: 535577 - DNA, 201 bp, Homo sapiens
agctgtgctgtcagcactttggaggctccagttcgcgttgcctgtcagtcaccagggacagctccggagccgttcacaaagccttgttttccttctggagsagatttcttgtgcacttagcctccagcctgctcagtgacaatttcaggagcacaggaaacaatgtgtcagatacgggtcatgtttttcagagcagtgtgc

SEQ ID NO: 535578 - DNA, 201 bp, Homo sapiens
tcgttgtgtccttctctgcgtttcccggatgccagttgcagttgttttccatgtatgaagacttgcagcccagcgtatggtctgttttgttgaacattccrcgtgcacttgagaaaaatgtctgttctgttgttgggtagattgttctctaaatgtcacgtaagtaaggtgggtgatagtgctgtttaggtttcagcgatt

SEQ ID NO: 535579 - DNA, 201 bp, Homo sapiens
tgtgggtcgggagtctggcatggctgagctgggtcctttgtgtcaagcttgcccacagctgcagttaaaactcgacatgggcaggctttgccccaaggccrttggattgaggccaccctcagttctttgccacctgggcccctccaacttagtgacttattccatcaaagcctgcaagggagaaactctgctaatgagatg

SEQ ID NO: 535580 - DNA, 201 bp, Homo sapiens
atgtctgttctgttgttgggtagattgttctctaaatgtcacgtaagtaaggtgggtgatagtgctgtttaggtttcagcgattttctcttacttgttctrtcagttcctgaaacaggagtgtcgaagttttcaaccgtgtctcctttcatttctctcagcttcttctgtgcttattttgaagctctgtaggttggtgtgt

SEQ ID NO: 535581 - DNA, 201 bp, Homo sapiens
tacttttctgaagtgtcttatttctttctatgggagcgtgggtgttgcccgtacttggagcgacaccactgtggtgggaaaaccccacctgggacggcacrgacgggacggtctctttgtttggggactgaccaagacttgtcctcactctcgggagatctgaagaggccctggggtaggcacggctgttgtcttcatact

SEQ ID NO: 535582 - DNA, 201 bp, Homo sapiens
tgtaagtaagagtttttttatgtattctggatataagtctcttattggatatatgatttgcaaatgttttattgcgttccatggttgccttttcactttcyattgattgattgacagagtcttgctccgttgcccaggctagagtgcagtggccccatcacagctcgttgccaccttgatctcctgggctcaagccatatt

SEQ ID NO: 535583 - DNA, 201 bp, Homo sapiens
gttttattgcgttccatggttgccttttcactttctattgattgattgacagagtcttgctccgttgcccaggctagagtgcagtggccccatcacagctygttgccaccttgatctcctgggctcaagccatattcccaccttagcttcccaagtagttgggactacaggggtgcaccaccatgcctggcaacttttttt

SEQ ID NO: 535584 - DNA, 201 bp, Homo sapiens
tgtcttatggcaacatgcactgaccccaggcagctggggcgagaggatatgggtgttggcatcataaacgaaaagggtaaagctatggttcagaaactgayacgtgatgtggaatacactggcccatgaccttcgcatggttggttggccccttctgcctggcggtgccctccatgtgagctgaaccctctttgcagcccc

SEQ ID NO: 535585 - DNA, 201 bp, Homo sapiens
tgacgcccagcggtgcccaccccaattgctgggagggctcccctctccgctgcattgccgttgcagctttgtaagaaactgtgggtttactttggactctyctgtgcccgacgtgtttgcttcactttgcaccagggccgtgctgtttctatcccttccactttaccatcattttcgaagttcagcgtcagcctccagcct

SEQ ID NO: 535586 - DNA, 201 bp, Homo sapiens
actcttgttaaaggataaaatagtcacacacaacagcattaaaaaccaagaaagccaaagaacgctggcactgtcagcctcactcccagctcccgctcggyccttgtgaagagaggtgctgaagccactctgcttttttatagttaataaaagcagccaggtccccaagtaggagtggttgtggccaagagtgtgtgggcc

SEQ ID NO: 535587 - DNA, 201 bp, Homo sapiens
tacgtgtgctgggccttcgcgcgtgcctatgagcctcaggagctgaagccctttgtgactgcaatctcgaggtaggcccattcgtcgaggtacatcggatrcgccgtgccccctgacggcgccgtgtgtcgtttcctccatgagaggtgtgcacagcagatgctcgtgaaaaggtgaaattacttggccagaggatctgtg

SEQ ID NO: 535588 - DNA, 201 bp, Homo sapiens
tgtcatgcaaagatgggctgtgcagaatgagctcggaatagcagccagaaggctcagtgatgggggagttgtttaagctggaatactgtaatgctgctggmtgtttatggctgtgaggtcactacgtgggctgctgagaacattttaaaatgctgagtgagtcatgaaacagtcatgcgtcccctaacaatgagggtagtc

SEQ ID NO: 535589 - DNA, 201 bp, Homo sapiens
gggtctgctcctgccaggaccagctgagccatcactcagttccctgcacctgaggctgccattggggcctgcccttgctgtgtgtctctgtcgggggcackgggttgtgggtacccccaggccctgccctttctgtcggtctctctgtcgggggcactgagtcatggaggtccaggccctgcccttgcggatctctgtcag

SEQ ID NO: 535590 - DNA, 201 bp, Homo sapiens
aagctctcttctgtttctgagcgctctcccgtcctgtctagggcaactgctgctctttctaggggtggtagtggggctcttgaagatgtccctcgctttgrtttttgcaggccagcaaatgcactggacgttgtggtttttctggcctccagtagtggtgtggtgggaaggttcttttcctgccctgctgctgaggggagc

SEQ ID NO: 535591 - DNA, 201 bp, Homo sapiens
cagggggtccaggccctgcccttgcgggtctctgtcgggggcactgagtcatgggggtccaggccctgcccttgctgtcagtctctctgtcagggacactyggccgtggggatcccagggcctgatttccttagttctcacctctttctctttccccctccccatctcttccccagccccagcttctctctccccatcccc

SEQ ID NO: 535592 - DNA, 201 bp, Homo sapiens
ctggggctgtgctctcaaggcattccagcctggaaagggttgttttggtgttaaagatcctcttccgtgcctgtcctgtggcccctctgtgtggcatgccyaagagtggctttgaacatggctgccctccgtgtgctgagcctgcgggggcacggctaccctccgtgtgctgagcctgcgggggcacggatgcgattggtt

SEQ ID NO: 535593 - DNA, 201 bp, Homo sapiens
atgactagagtgcgctctctctggccgcgtcctcctgctgacaggtaccccatcccaccgccacgctgagcactggccactgcacactgcacactttctcwggtgaagatggccttacttttcagtgaaataaatggaaacaaagccctgtcttcattgactcgttccttccctgtcgtctcttttgccctcctgcaccca

SEQ ID NO: 535594 - DNA, 201 bp, Homo sapiens
cctccgcatctgtagcacggtcaggcctccttgttcacggtgacaaaaaatggaaggagagtttagtccctcaggagaaatagcaaataccatgaacaagkgtgcagcaggcgtctgcgagtgggttccgttgttaggtagagacggtgggagctagagcagtgtgtggccgtgggagctgctgatgctgtccagtcgtct

SEQ ID NO: 535595 - DNA, 201 bp, Homo sapiens
aacgttcatgtgtgagggcactctaggaatttcacagtgtcttggattctttttatttagtgagagaaaccagacgacgtgttagcccgttgccaagtaaractgggggacacgtcagcctgttgccgagagagaccaggggacatgttagcccgttgctgagagagaccgggggacacgatagcctgttgctgagagaga

SEQ ID NO: 535596 - DNA, 201 bp, Homo sapiens
gtgctgccactgccccattttacagacagaggaacaggagcgcagagaccctgctctgctccacaggcgtgactggtggtctgtctggctgtctccttccygttttgatcgtaggtgtgggatctgcaccacaggtgtgactggtggtctgtgtgccttcgctgcttctccactcagcgcttaggagagccccccagcggg

SEQ ID NO: 535597 - DNA, 201 bp, Homo sapiens
catggggtggggaggcaggcgccttggttctggacacagttgggggcactctctggagggcaggccgagccgtaggtgagcgtctggtgtggctggtgctrtggcttttgtgtccagtggtgatggcagagaagatgtgttagtaacaagtgttttctgctttcattcatttctttaatcctagaagtgtttctgattttg

SEQ ID NO: 535598 - DNA, 201 bp, Homo sapiens
cccagctatttaggaggcggaggtggggggattgttagggcccaggagtttgagaccagcctgggcaacatagtgagaccccatctctaaaataacaaaasaatgcaatgtaaaacaatacagtagaatacaaaaataatcggaggtatgtcctgcagaggtctctgggacccactgggacctgaacaagaatgagacctt

SEQ ID NO: 535599 - DNA, 201 bp, Homo sapiens
cagtagaatacaaaaataatcggaggtatgtcctgcagaggtctctgggacccactgggacctgaacaagaatgagaccttgctgagcctatgctcctccragtgtacttggggttagggtcttggggagtgtggcctcagctcctccgagtgtactcggggttagggtcttggggagtgtgacttcagctctgtgtttga

SEQ ID NO: 535600 - DNA, 201 bp, Homo sapiens
ggaggtggcctttcacagcagggacgttctgtgctcttattttaacaactgtaagaatctgagcttggtgacagttgggtgacccgggctctgtgtcttcrtgttggccagggtgtgtcatacacctggcctggcctgcgtgcctcacgtgtggtggggatttgtgactgtccccagcaccttgacagagggtccttgact

SEQ ID NO: 535601 - DNA, 201 bp, Homo sapiens
caggtgatgcatatccgggcgcccaccctagcagcacaggaagggctgggatcaccactccccggggcaccgtggggacagcgggggcctgctcactcccyggggcaccgtggggacagcgggggcctgcttgtgttgggggtggggctccttgccccccaagggcaggccgagcaccaagtctgtgcttgccccgctgtg

SEQ ID NO: 535602 - DNA, 201 bp, Homo sapiens
ggttgaggactcgtgtgttgtctccctcactttctttttatgaattgaataaagctagaatcataaaatgaaggcacttacgacattctctcctcactctyagggtcatccgagagttggctgcgagggcgctgcacaacctggcccagcaggcacccgagttcagcgccacgcaaggtgggtgtgtgtcccggccggcct

SEQ ID NO: 535603 - DNA, 201 bp, Homo sapiens
ggtcctgagtaatcctcggagcccagagcaaggcagagcagacacggagcaaacgctgcgttcagctgggtattttagatacgtctgagaagagttttaarataaaacttgaatttgaaaagaaatagtgagtacttaccagaggtgggcagtgctgggatgtggccggtcttggtgccggtggctggcggtgctcaggaa

SEQ ID NO: 535604 - DNA, 201 bp, Homo sapiens
ttcacacaggctgccggcgtggtgggcagaaccagggttggaacccccctctcaagctgggtgtctctgcctctccttgtcccatcagggtccgcaaggcygccatgaccagtctgatggatctgacacttctgctggctcggagccagcctgagctgatcgaggcccatacgtgagtgtcacgtcgcagctcttctgcat

SEQ ID NO: 535605 - DNA, 201 bp, Homo sapiens
ggggagcacctgaggccaggagttcgagaccagcctggccaacatggtgaaaccccgtctctgctaaaaatacaaggatgtggtggtgcatgtctgtaatyccagctactcgggaggctgaggcagaagaatcgcgtgaacccaggaggcagaggttgcagtgaaccgagatcgcaccactgcactccagcctgggtgaca

SEQ ID NO: 535606 - DNA, 201 bp, Homo sapiens
gcacaggtggggggatgtattggtttaagtttaccttttttttttttttctttttttgagacagagtcttgctctgttgcccaggctggagtgcagtggcrccctcttggctcactgccagctccatctcccaggttcaagtgattctcatgactcagcctcccgagtagctgggagtcaggcgcccgccaccatgcccag

SEQ ID NO: 535607 - DNA, 201 bp, Homo sapiens
tagcgtgggggtggggaggccggacacccaattgccacctggccctgagaaggaaaggcagctgtgtcccaagaagaaccgtggttagccgtgtgacctcrctgttgtagactgtccttgtcgtctgttggagtcggaggttcttgtactggttcgtgtgagtgagtgagtgagcctctgctaagtggccggttgaggact

SEQ ID NO: 535608 - DNA, 201 bp, Homo sapiens
gctcaggctgagctgccgttgccgagagccttgtgtctgcttcgggtgtctgcactgtgagtggctccgtgctggcgtccgcaccagccgcttggggccaraccttcgcgtctctgcagctcggagcagttctgctcttcagcagatgcttgaccggctgtagccaagcctgaggggtggcaggctcgggggtcccactgc

SEQ ID NO: 535609 - DNA, 201 bp, Homo sapiens
ttctaacttttttccatttttatctcctcggttggattttcgttgtctctgttagtaccgttctcttcttggttgtcttctgttgatgaggacggacttasgctctgacgggctgttagatttctggttcatcccactcctcctgccagccttggctcgaggctttgttagggtgggtctttctcagctcttttcctccag

SEQ ID NO: 535610 - DNA, 201 bp, Homo sapiens
ctggccaacagtggctttaagtcttccgtccgagtctcaccattgttgaggtcgggagggcatgtgtagaagcagcctgaggtcattgtctttgtggtgcygtctggtctttgtgaggtggctgagctgcgcgcttgcgtgaggagaatggcggctggggtgcaccggtctgtggggcgttaggggagactgggggctggg

SEQ ID NO: 535611 - DNA, 201 bp, Homo sapiens
atgttcctgggaacagcagtgatggtgtcttacacatatgggcatgggcacccatgctggctcacacacatgctcactcgcgcgcacacacacacacacayacacacacacacacacttctaaaaggggagcagtctcgtcaccccgtgttggagatcaggactgaagcaaccagaggctgtgtgggtgtccacatggcat

SEQ ID NO: 535612 - DNA, 201 bp, Homo sapiens
tgttcctgggaacagcagtgatggtgtcttacacatatgggcatgggcacccatgctggctcacacacatgctcactcgcgcgcacacacacacacacacwcacacacacacacacttctaaaaggggagcagtctcgtcaccccgtgttggagatcaggactgaagcaaccagaggctgtgtgggtgtccacatggcata

SEQ ID NO: 535613 - DNA, 201 bp, Homo sapiens
tcagggtcatccgagagttggctgcgagggcgctgcacaacctggcccagcaggcacccgagttcagcgccacgcaaggtgggtgtgtgtcccggccggcytgcgggcaccatgcatgcactgcagaaaggcctgggttgctggtttcaaaggctgggggctgaaaataaggttgtgcttctgtcttggtgagaagcatct

SEQ ID NO: 535614 - DNA, 201 bp, Homo sapiens
cgcgcgtgcctatgagcctcaggagctgaagccctttgtgactgcaatctcgaggtaggcccattcgtcgaggtacatcggatgcgccgtgccccctgacrgcgccgtgtgtcgtttcctccatgagaggtgtgcacagcagatgctcgtgaaaaggtgaaattacttggccagaggatctgtgacaaagccaccgcttgg

SEQ ID NO: 535615 - DNA, 201 bp, Homo sapiens
gaccgaaacgccgcctctagcacctgaaacacaagccctcagaggagcagatgattccctcaggatttaagaaaattgaggacttcagttttcgaagccgsattatttcacattgctgatacctctagcgcctgaaacacaagcgctcagaggagcaaatgattccctcaggatttaagaaaatgaggacttcagttttcg

SEQ ID NO: 535616 - DNA, 201 bp, Homo sapiens
tcactgcaacctccgcctccctggttcaagcgattctcctgcctcagcctcttgagtagctgggattataggcgtgagccgctgtgcccagccttgatacyttaaaaacttaggaatgggttttagtgagccttacgtgagccttacaggcagaggatatggacctgccaggctgtgctccttgccatgctgtgggctttg

SEQ ID NO: 535617 - DNA, 201 bp, Homo sapiens
gggggcaggcagctgctccctgtagccggctttaatggggtagatctctttcttaggaacagagaacttgggaacatggctgtatgtgatgatttgagaamggagggaaggaaatgttcttttcctgtcattaaaattaatattgttaatgtaattcccttcggcgtgtgcactgagtagcgtacaggatgggtcacctta

SEQ ID NO: 535618 - DNA, 201 bp, Homo sapiens
cctggaggcccctggccaggaccttccccacggggccatctccagggacttggaccctgtgagccagcctcaggcggcctccatgtggggccgtgagcccrtcacctggcctgatgggtgcctgcacagtcagcgtttggggtggcacagaggaagcccggctctagtagggagggtcagggtgaagccctcagcgttcgc

SEQ ID NO: 535619 - DNA, 201 bp, Homo sapiens
agggtcagggtgaagccctcagcgttcgcctgctgcctcggtaccctcagccgtcactggtggcctgcagcgtccgcgttacagtggtacatggtgacctrccctgtgccgcgtgtgttcactcgtcccctttgaatctggctgcaggctcctttaccctgcagcgtgttttagcgcgggggctccaagcagggtgcgggc

SEQ ID NO: 535620 - DNA, 201 bp, Homo sapiens
ggagaccaaagatagaggtccttgggagagggtcagctgcagggaacatgactctgacatctggtggaggggctagccatgctggatggcgtggcaggcastgggctccccaggccatatcttataggaggtcttgggttcctggagttcctgtgtgtgagcgctggttcccaggaaacagatgtggtcactgctcacaag

SEQ ID NO: 535621 - DNA, 201 bp, Homo sapiens
tcgggcatggtggcgcacccctgtaatcccagctactcgggaggctgaggcaggagaatcacttgatcccgggaggcggaggttacagtgagccgaaatcrcgccactgcactccagcctgggcagcagaatgagactccgtctcaaaaaaaaaaaaaaaaatcagctttatctttgtacatctactttattacatatagt

SEQ ID NO: 535622 - DNA, 201 bp, Homo sapiens
agtggctccgtgctggcgtccgcaccagccgcttggggccagaccttcgcgtctctgcagctcggagcagttctgctcttcagcagatgcttgaccggctrtagccaagcctgaggggtggcaggctcgggggtcccactgccttctgaggtgtctccgtgttgcagatccggcactccacccagagcctctttgagtaca

SEQ ID NO: 535623 - DNA, 201 bp, Homo sapiens
cggggccagcgtcggttgccgccttagcgggcgcctccttttcatccctcatccttcatccctggctttcgcgctctagcggagtgggatctgcgaacacgtgaggcgggggcgcggtccccaggctgccgagatggccctgagcgacgaaccggccgcgggcggccccgaggaggaggcggaggacgagacactggcctt

SEQ ID NO: 535624 - DNA, 201 bp, Homo sapiens
cgggcgctgctgggccgcctgcgggaggtgcacggcggcggcgcggagcgcgaggtggccctggagcggttccgcggtgcgtgggcggcgccgcgtgcccscttcctcccccggcccgggttcggcgcgctgagtgcactttaccgggcggggaccgcagcccggcggcgccggccgctctgcgagggctgccggtgcgcg

SEQ ID NO: 535625 - DNA, 201 bp, Homo sapiens
accaggaacctcggaggcgctggcggccttggaggccgcttatctccgcgtgtctgaaattctgttttccaccttttccctttaggctggtaggaggcgcmatctctcaagccttccttagaaaggatgattgtcctccaccctgccccaaaccccctgtgttctgtgcaacgcctgatgagagcgttctgggttattcac

SEQ ID NO: 535626 - DNA, 201 bp, Homo sapiens
tattaaatattcaaatatattagcctttgcttttagattttttatcctgttccattgacctatctgtatgctcttttttctgggtcatttcgtttgtttgttttttttttttttttgagatggagtctcgctctgtcacccaggctggagtgcagtggcgtgttcttggcttactgcaacctccgcctcccaggttcaaga

SEQ ID NO: 535627 - DNA, 201 bp, Homo sapiens
tggtgtgggcggctttctgtagacggagcccaggaaggggcgtgactacttcttgctggcccgaggcagccgaggcccacccagcatccttggggtgccgyggggcctgcatgtgttcagagccctgagccctggtcggagccagttcactaggaagagacaccagccttgcaaggggagcctgggtgtgcagacagcaag

SEQ ID NO: 535628 - DNA, 201 bp, Homo sapiens
ctcagcgttcgcctgctgcctcggtaccctcagccgtcactggtggcctgcagcgtccgcgttacagtggtacatggtgacctgccctgtgccgcgtgtgytcactcgtcccctttgaatctggctgcaggctcctttaccctgcagcgtgttttagcgcgggggctccaagcagggtgcgggcttgcctggagttggcct

SEQ ID NO: 535629 - DNA, 201 bp, Homo sapiens
tgggcagcgctttcctcttgaaggtgccacagcctgttagttttgatgtgttggccacgaacaggctgccctgttagcacagaaagtgaacgtgagcagtrcgagaaggctcagagtggactttccggggcaaacaactgagggccttttgggcgtcacagatttggtttagttcggatcgaggtaatcatcttgaacccg

SEQ ID NO: 535630 - DNA, 201 bp, Homo sapiens
tcattttaatgctttttggagcctgaggttacattggcaagcatatttcatggtgttttatacgtcaagaggttcttctaattctgatgttttcattcctyttcaggggtctgggaggacagctcatgagacaagcaggtaagtctgaaggcctttgcagccctctgcagccctttgccgcagccatcgttgagggaggtg

SEQ ID NO: 535631 - DNA, 201 bp, Homo sapiens
attccagtcttcatgccggatgtgttgagtcatggtctgtctccagttccacttctggagcgcctggtccagtgtgtccgacgtggcggtgtacccgtgcraatgtccacgctggcgtgttgtggagtgccgctgccgtccgagggggcgcgggcgtagcttggaggcggactctgcgttgtctccctcagcagtgcttcc

SEQ ID NO: 535632 - DNA, 201 bp, Homo sapiens
tgcctatgagcctcaggagctgaagccctttgtgactgcaatctcgaggtaggcccattcgtcgaggtacatcggatgcgccgtgccccctgacggcgccrtgtgtcgtttcctccatgagaggtgtgcacagcagatgctcgtgaaaaggtgaaattacttggccagaggatctgtgacaaagccaccgcttggaggtca

SEQ ID NO: 535633 - DNA, 201 bp, Homo sapiens
cgtgtggcttgtgggtggtagagttgtgggctgggatgtgcgggtggcagggcctgggatttcagcctggggcctgcagacctgccctggtgtgctcacaygtgtgaggcatcgatctgtgacctccccagggaattctcccttttgcttgtgtaaatgtctctcccagtttcagaagcggagggtcgagagcaggcgtcc

SEQ ID NO: 535634 - DNA, 201 bp, Homo sapiens
ctcatccgcccactcatagcttccactattttctgttgtcttccctcctctgagaccccccctgtgcttccaggagtgccttaagcttggatctgagggcrggaactcgccccggctgcttggcttctccctgtgcccctggtgtccatggacagggtcccctgtccggttccactgtgccgtggtggtgctgggcctctg

SEQ ID NO: 535635 - DNA, 201 bp, Homo sapiens
tttgcagcccccattctgttcctggtgggacatggagaagctgtgctgtctctgcacagggcaagggttctttcaggcaggggtgaaagagatcccatctyggggctgactcaggaggtgacagggctgacatttgatgagcatttgcagcatgctttttatgtttttgttttagacctcacaccattcctctgagagccg

SEQ ID NO: 535636 - DNA, 201 bp, Homo sapiens
ctcttaggttctgtgctcatttcagctgttgagtcctcttgttgtgttaatatacatgttggtaagcttgatggtgccctatgagtctcttaggttctgcrctcatttcagctgttgagtcctcagttccagaatttctctttagtttctcttttaataatttctttttgagacagggtcttgctctgtcgcccaggctgg

SEQ ID NO: 535637 - DNA, 201 bp, Homo sapiens
ggctcaaggtccctgtgaacctgcatcaggtagtaagccctgcatgtcggaaatacagactgcctaactcttatctaaggtgatgttttgagaaaattttwaaatgtataatacattttataaatttcgaaaaaattttaataaacattaaatttttataagtttatataaatgttataaattttgaaaaatgtacagagt

SEQ ID NO: 535638 - DNA, 201 bp, Homo sapiens
catttacgctgagagcttctaccgtgaaggagccgagcaggatggactcctgaccgcagcatctcaaagaggaacgaaggctcgcacgagctgggacagcrgaaagagcagaagagtgggcacagaaaagcgcctgggggccagatcctagaggggcttcaggaacacagtgaggggtttggaaattattcaacataaagt

SEQ ID NO: 535639 - DNA, 201 bp, Homo sapiens
aagacttaagattttacatggctttgtgtttacttttatatttaattccttttttttttcttttgagacagggtcttgccctgtcacccaagctggagtgyagtggtgcgatcacggttcactgtagcctcaacctcctggactcgagtgatcctcccgcctcagtctccccagtagctgggactacaggcacggtcacta

SEQ ID NO: 535640 - DNA, 201 bp, Homo sapiens
aaagagcagaagagtgggcacagaaaagcgcctgggggccagatcctagaggggcttcaggaacacagtgaggggtttggaaattattcaacataaagtcrgatactggggaatacacgggagtgcagtggaaaggaagagcgagggagagtgaggccattcgggagccaccacagtgttcggagtgagaccagagctgtg

SEQ ID NO: 535641 - DNA, 201 bp, Homo sapiens
agaaaagcgcctgggggccagatcctagaggggcttcaggaacacagtgaggggtttggaaattattcaacataaagtcggatactggggaatacacgggrgtgcagtggaaaggaagagcgagggagagtgaggccattcgggagccaccacagtgttcggagtgagaccagagctgtgaagaaagagaaaaggaaatac

SEQ ID NO: 535642 - DNA, 201 bp, Homo sapiens
ctcgtgcagaactgttctgagggtgagggaccctcatccagggaccagtgaagccagattttttgttcctggtgtaacagcccaatggcttcttccttttttttttttttttttttttttgatacgaagtcttgctctgttgcccaggctggagtgcagtgcagtggtgcgatcttggctcactgcaacctcaacctctca

SEQ ID NO: 535643 - DNA, 201 bp, Homo sapiens
caggtgcctggttagtgccctggctgcagccctttgccagccctttccctgccctttcgctctgattgtctcttgtgttaccttttcttgtgctaacgagraggaaaggtcaagtctcagaagagggcaaagcctcttttgggtcagcgtcctggaggctgcagctccctggtcagccttctggagggggagccggcagcc

SEQ ID NO: 535644 - DNA, 201 bp, Homo sapiens
aggagggcgtcgtgtgcgtcgtgtggttcggagtcagcgtggcaggagggcggcgtgtgtgtcgttgtgtggctcggagtcagcgtggcagcagggtggcrtgtgtgtcgtgtggctcggggtcagctcagcctccctggcgtggcagcgtgtgtgcgtcgtgttgctcagaggcggtgtggcctccctggtgtggatgcg

SEQ ID NO: 535645 - DNA, 201 bp, Homo sapiens
gatttcatgtaactgctgatgaatggctccgtcgtgttctgctgtgtttcgatactgcactcagctctgtcacttcctgcctcttgtgagcagtcacggaygcctgggtttggttacagacccgttctcgtgtcaggattgtttcgtgaggatgggcccttagagatggacttctgggttccaggacacgagagtggtgtt

SEQ ID NO: 535646 - DNA, 201 bp, Homo sapiens
cctgcctcaaaaaaaagctaaatggaaatgacttaagaaaactgtttcaactgcagtattttttttaaggaatgggcagatgtgcccattcttgagtctgygaggttttatgtgtagacatcagggtggctaaaagtcaagtgaaaagccgccccttgaaaatagagcaacgtgtgtgggagcctaggaggcagctgtccc

SEQ ID NO: 535647 - DNA, 201 bp, Homo sapiens
cccactttgctctcaggattgaatgcttctccctgtatcactggcggctctacagctgcacccgtctcccttgattaactgagcttgccaacatccacagygctgtaggtggtgcttggtgttacagtgttgctagaacatgcagattgagtgctgccttagaaacccacaggaaggggaacatcacactctggggactgt

SEQ ID NO: 535648 - DNA, 201 bp, Homo sapiens
gctgaggcacggtcaggggggatgtctggcgctggcggagctgggcaggagaggcctgttgctgccatctcgactcgtggatggtgagtagctgaagcacrgtcagctgcgtcaccaggctgtccgtggcaggctgcagcccttcgtctgaacccatctccgcggtgtggccctgccgcgggcacgcccagaagagcttga

SEQ ID NO: 535649 - DNA, 201 bp, Homo sapiens
acacgtgagcatcgtgcatgtggcccctctgcagtgcaggagtcactgattgatgggtgtgccgaccagcagcttcacaaatgtctgctgcaaggggaatygtcagagtccaatgtgtgcctctacagtaatgtgggaaataaataccattcttgaaataattacactgtcttaggagagcctgggcagagtccacacttg

SEQ ID NO: 535650 - DNA, 201 bp, Homo sapiens
agctgaggcacggtcaggggggatgtctggcgctggcggagctgggcaggagaggcctgttgctgccatctcgactcgtggatggtgagtagctgaagcayggtcagctgcgtcaccaggctgtccgtggcaggctgcagcccttcgtctgaacccatctccgcggtgtggccctgccgcgggcacgcccagaagagcttg

SEQ ID NO: 535651 - DNA, 201 bp, Homo sapiens
caacctctcaggttcaagctattctcctgtcttagcctcccgagtagctggggctacaggcgcgcgccaccacgcccggctaattttgtatttttagtagrgggggtttcaccatgttggtcaggctggtctcaaactcctgacctcaagtggtcgcccgactcagcctcccaaagtgttgagattacaggtgtgagccac

SEQ ID NO: 535652 - DNA, 201 bp, Homo sapiens
aatttttgggagatgatttcactagtctcttataattactttatcatgtacagaaactgttttctttattattaggtggtgagtgtttagaataaaaattytgaaagatgtgatgaattgttttcacaatttgtgtgtatgttttaaacttctatttgtatttgtaacattaaaaatcttttttttttttttttaggcaca

SEQ ID NO: 535653 - DNA, 201 bp, Homo sapiens
cttgtccatcagggtcttcccagggctgcttggtgcccacaggcgaaggcttcacccttgctggggcttgcagggccctcaccgtgtgacctgacccctcyctgcatcctctaggcttctgtgtggttcttaaaagttcagcctgccgccaaggcctggtccctgggagagacgtcttcgtgcagccgctggctgggggtt

SEQ ID NO: 535654 - DNA, 201 bp, Homo sapiens
agccagcatccactccggcccttcccttgacctttgcttctcagagccctccctggttgcgtggtaggcgcccgcatctgtgctgggcggctctgagtccygggcggggccctgggtctgccccttccccgtgtccgcagcctgccccaggttcattcccgtctcccacccgctgcaggcagtcccccctgcccgcattcc

SEQ ID NO: 535655 - DNA, 201 bp, Homo sapiens
gctgcactctgctcacatccccgccgctccctccagggcaggtttctccccagtcatccgcaccccacctcgaccgtgaccatcagggcgcctgtggcacygttgccagccccgagccagcatccactccggcccttcccttgacctttgcttctcagagccctccctggttgcgtggtaggcgcccgcatctgtgctggg

SEQ ID NO: 535656 - DNA, 201 bp, Homo sapiens
accagagctgtgaagaaagagaaaaggaaatacgctgcatgtaggattctgaactcaacgactttgctgttctattcagtgaaagagagtgagatagtaargtcagtgagtgacatgttggagccttccacatagtaatggtctacaaagttatggattgatgagttcacacaggagggagtgagagatgaggaaggtgaa

SEQ ID NO: 535657 - DNA, 201 bp, Homo sapiens
tggatagggggctctttctggcatctgagattagtttctataaagtaagagctgagcgctgcttggaattagttctgtgatgggataccagtcaggactaraatgtccagtaaaaattaaaaatcagcatcaccccagctaggatgggagacctctggaagatggctgtaccacgttttttcctttcttttcataaaaggt

SEQ ID NO: 535658 - DNA, 201 bp, Homo sapiens
tggctccttggcccctaaaccctgctcagttccttacctcaggagccatttcaaactcccttaaaccacattacaccttgcaggggtctccatccactgcsctgttctcctcctgtggggtctcctgctgcacagagacagagccatcagcggagcccctcatggcggccatcctgggctcctgtccacacactgtcctgc

SEQ ID NO: 535659 - DNA, 201 bp, Homo sapiens
ctacattacagtgtaccccgaaatttagcagcttaaacagtgcactttttcctcacagttttggtgggtctggaatcttgacgtggctcagctgggtcccyggtcagggtctctcctgaggcttcttaaacagtgcactttttcctcacagttttggtgggtctggaatcttgacgtggctcagctgggtccctggttagg

SEQ ID NO: 535660 - DNA, 201 bp, Homo sapiens
gggcattcgggaggcaggatctgtaggaactggtgaccggtgagacgcagcacctggtgatgaaggggcggtgtgtggcctgggcggtggcagtggtggcygttcaggaaggggctgccaggaggcagagggtcccgaaggccgggtgcttccccagggaaggcgctggtcctgtcgtctgtgtacccatcatctgccttc

SEQ ID NO: 535661 - DNA, 201 bp, Homo sapiens
tggaaactgagtcccagagggctagagctaggatgagtcattcgaagcaggttgatggcatcagcaccagtgtgtgagttctggttctgccgccaaagccyaagctgtttgtcctctgggaggctgtctcaggctacagccgcagcagctgccctgaactctcactggacaccttttctgcatgaggccggggaagcaggg

SEQ ID NO: 535662 - DNA, 201 bp, Homo sapiens
ggaagtgggggcatggagcggctcaggagctgttcagaatcacacagcaagtaggcgtagagcaggcctgaccaggagccaggtcccagggtctgtgccaygggccccttcatggcgtgtccaggggatgacaatgcaggttccccatgtgggtgtgaagagggctacacgttgctgccttttgaggggcattcgggaggc

SEQ ID NO: 535663 - DNA, 201 bp, Homo sapiens
catctgttctcatgtggctgcgccgccaccctgtcctgggggtccttgtcccagcacgtggctctgtgcttcacgtcatcctgagtctgtcccgctctgcygcctggtccaggtgggagccatttccttctgtgaagtgttccctctggaggccctgggctccccgactaccctcccgcctctcctgtggctgtcggctgc

SEQ ID NO: 535664 - DNA, 201 bp, Homo sapiens
gtacatcggatgcgccgtgccccctgacggcgccgtgtgtcgtttcctccatgagaggtgtgcacagcagatgctcgtgaaaaggtgaaattacttggccrgaggatctgtgacaaagccaccgcttggaggtcaagctccttttctgtgggtgagcaaccagagcagaagtgtgtggaggaacattctggaggtcttggc

SEQ ID NO: 535665 - DNA, 201 bp, Homo sapiens
agcaggtttgtgtgcagcctctgggtgtaccctcaggaggcatcacaggacctgcccccttagggcctcccaccctccccaggcagggtctgcagtcctgrtggccactgtgctccatcagtcctgggctcagtgggggacctgcggtgtgatcactctgggaacaggctctccgctggcgtcatgcttgtgaacagccac

SEQ ID NO: 535666 - DNA, 201 bp, Homo sapiens
gcctcaggagctgaagccctttgtgactgcaatctcgaggtaggcccattcgtcgaggtacatcggatgcgccgtgccccctgacggcgccgtgtgtcgtytcctccatgagaggtgtgcacagcagatgctcgtgaaaaggtgaaattacttggccagaggatctgtgacaaagccaccgcttggaggtcaagctccttt

SEQ ID NO: 535667 - DNA, 201 bp, Homo sapiens
tgcaggagtcactgattgatgggtgtgccgaccagcagcttcacaaatgtctgctgcaaggggaattgtcagagtccaatgtgtgcctctacagtaatgtsggaaataaataccattcttgaaataattacactgtcttaggagagcctgggcagagtccacacttgggtttttaggcaaagggcaggaggctacctttgt

SEQ ID NO: 535668 - DNA, 201 bp, Homo sapiens
ctggaggtgactcctccccgggtgtccttcctgggttgtactgggggccgtggagaggctggaggtgacctctccccgggtgtccttcctgggttgtaccrggggccatggatggccgtgaggaaggtggtgccaggagctgcctatctcatggtgtggggtctgtggctccgggccaacattgccacctccctaaagagt

SEQ ID NO: 535669 - DNA, 201 bp, Homo sapiens
tgactcctccccgggtgtccttcctgggttgtactgggggccgtggagaggctggaggtgacctctccccgggtgtccttcctgggttgtaccaggggccrtggatggccgtgaggaaggtggtgccaggagctgcctatctcatggtgtggggtctgtggctccgggccaacattgccacctccctaaagagtgcacttt

SEQ ID NO: 535670 - DNA, 201 bp, Homo sapiens
gaaggtggtgccaggagctgcctatctcatggtgtggggtctgtggctccgggccaacattgccacctccctaaagagtgcactttgttatagcttatggytcttctgtgattctttattgctttccaggttctcacaggtttaagagcagttacccacacttcccccgaggacgtaagttttgctgagtccaggagagac

SEQ ID NO: 535671 - DNA, 201 bp, Homo sapiens
ccgcagccttggagctcccagcgtcccctcggggttcaatcctccaggacctgtgtctgatgcctgcatgtgggtacctgggctccatcaggttctagatmggcctccgccctccactttcagggctccaggcccagcttctcatgtctgtggggagggtctccagagccttggtctgtggctgagctgtggaacttgaag

SEQ ID NO: 535672 - DNA, 201 bp, Homo sapiens
ttcctatccgcggcattgtcttcctatccgcggcgttgtcttcctgtctgtggcgtcgtcctgtctgcggtggcgtcgtcctgtctgcggtggcgtcctcmtgtccgcagaggcgtcctcatgtcctcagtgttgtcttcctgtccatggcgttgtcttcctgtctgcggtgtcgtcttcctgtccatggcggcctcctgt

SEQ ID NO: 535673 - DNA, 201 bp, Homo sapiens
tgtgagctgttgaatgaccaccactgtggtcagtgtggtgcacatgaccctccctccaggaggcgccatcctgactgacctcctgtcgctggggctccccygttttagaatccgtgcaggtagcttccttcatctgctgcctgcctcatcagctgcctgtgtttcagggttcctcagtggttctcactgtgtggacgcccc

SEQ ID NO: 535674 - DNA, 201 bp, Homo sapiens
gtgcgtgtcctcagcgcgtgtgtcctcagtgcgtgtgtcctccgctcacgtgtcctcagcgcgcacgtcctcagctcgtgtcctcagtgcgtgtccgcagygcgtcctcagtgcacgtgtcctcagcacgcgtgtcctcagctgcttttcgttggtgagtctttgctcagcatcgtgcgcctggggcccgtcctcagcgtg

SEQ ID NO: 535675 - DNA, 201 bp, Homo sapiens
cagcgcgtgtgtcctcagtgcgtgtgtcctccgctcacgtgtcctcagcgcgcacgtcctcagctcgtgtcctcagtgcgtgtccgcagtgcgtcctcagygcacgtgtcctcagcacgcgtgtcctcagctgcttttcgttggtgagtctttgctcagcatcgtgcgcctggggcccgtcctcagcgtgtgtgtccgcag

SEQ ID NO: 535676 - DNA, 201 bp, Homo sapiens
agcacacggtttgcgcagattgagccagtgagggggcctcatgaggcagggcttggtccaggcccccgcatgccagcccaggtctgatctcgccagggacyttcccttggatgtcagtggacatgagctgtcgtctcagcctcacctggacctgtctgttttccaaggtggtcacattggcaggggtcacagctttaaggg

SEQ ID NO: 535677 - DNA, 201 bp, Homo sapiens
ccaggaacctcggaggcgctggcggccttggaggccgcttatctccgcgtgtctgaaattctgttttccaccttttccctttaggctggtaggaggcgcawtctctcaagccttccttagaaaggatgattgtcctccaccctgccccaaaccccctgtgttctgtgcaacgcctgatgagagcgttctgggttattcaca

SEQ ID NO: 535678 - DNA, 201 bp, Homo sapiens
gctttccacgcgacgtgccctccctgggcgtgaggctgcatttgcacttagcggggagagggggaatgttgtgggttctagttgggctttttgatgatgawatttggaaagacttgagacaaagtagccaccctgtcctgtcccttcctcacccaccacacccactgctccccgctggcaggcactgcaggctgcacaagt

SEQ ID NO: 535679 - DNA, 201 bp, Homo sapiens
ctataaagtaagagctgagcgctgcttggaattagttctgtgatgggataccagtcaggactagaatgtccagtaaaaattaaaaatcagcatcaccccarctaggatgggagacctctggaagatggctgtaccacgttttttcctttcttttcataaaaggttgctcatgctcagtaacacattcaactagttctcatt

SEQ ID NO: 535680 - DNA, 201 bp, Homo sapiens
caaagtagccaccctgtcctgtcccttcctcacccaccacacccactgctccccgctggcaggcactgcaggctgcacaagtaaccgtggaacctaaacamtgatgtgcttcgtccgggttttaaaaaggcgcccttaccgcggtttcggtgtttggcgtcttcacgccatccgggttctcggtgctctgctctgaaggat

SEQ ID NO: 535681 - DNA, 201 bp, Homo sapiens
ccctgagacctccagagacgactggccagatgttctgtaggacgcccctctctctgatgctttctcgtgtgttactggaaagagtgatgtgaggtgacctgccctcctccgtgtgctgttgggcccatatagtgccccacaacgggtcctgcgtggtctggaccttgatccctggtcaagatggggcctgccaggtgcctc

SEQ ID NO: 535682 - DNA, 201 bp, Homo sapiens
ctccagagacgactggccagatgttctgtaggacgcccctctctctgatgctttctcgtgtgttactggaaagagtgatgtgaggtgacctgccctcctcygtgtgctgttgggcccatatagtgccccacaacgggtcctgcgtggtctggaccttgatccctggtcaagatggggcctgccaggtgcctccacttgagg

SEQ ID NO: 535683 - DNA, 201 bp, Homo sapiens
cctcagacggcagcggggcctgctatgctcgctgtcttctgcgtggtatgtatttggaggagcacacggtttataaccgtgcagtgcggtggcttgtctckgcgtggatgtgactgatgagcgctgtggggcatttccctgctgccctgcactccgtgcccttctttccctagtacttctagcgccccccagtggaatgat

SEQ ID NO: 535684 - DNA, 201 bp, Homo sapiens
aaattggagtttcggacacacagactggaattgaactaacgggcaccccaggaagactgtggggcgagacgaggaggatggggggaccagccgtcgccccrctctcctgttcatcatcacagcctcgttggggtgtaaacgacccccagtaagctggtgcatgttcaataggtacatttttgtaaatgttaacatctgtaa

SEQ ID NO: 535685 - DNA, 201 bp, Homo sapiens
tgtggagggctggcttctgtcccaggcacctgtgggttccccgggcttgcagctccaggttttccttgatgtcttccctggcagagctgtgctgaagcttygagtcgaaggcagagagtccatttgcgacagacttggaagaggctggcttcgccgtggcatcgggctggttggtttgcttggggtctagtgagttagatt

SEQ ID NO: 535686 - DNA, 201 bp, Homo sapiens
tcagcgtggcagcagggtggcgtgtgtgtcgtgtggctcggggtcagctcagcctccctggcgtggcagcgtgtgtgcgtcgtgttgctcagaggcggtgyggcctccctggtgtggatgcgctgtgggggaaagctgcatcggatcagtgatgagtctgaatgacaggctccctttctttttttttttttttttcccaag

SEQ ID NO: 535687 - DNA, 201 bp, Homo sapiens
tttttaataatagcattttcttacagaatgacttcagattaaaaggtaaaaatgaacctgttaggatgggggcgataaacgattatagcttaaaggttcargatattaatcggatacgttgccttgaagttgttacaagaacctgcttaaataatgggtacccaccgccctctccccccaacacaggagggcccttccccg

SEQ ID NO: 535688 - DNA, 201 bp, Homo sapiens
agctgtaataaagagcagtcttggtgtcaggacagcgagtgaggggtcggcgagaagccggcctcggctcgccacagtgccacaggatccctgaagcagarcccctgaagggctgaaactgcctgctcctgaggggagcagctgccggtcacagaagcagccctgccctacccttggtaacctggctgctgactccccacc

SEQ ID NO: 535689 - DNA, 201 bp, Homo sapiens
tgtaatgtggcttttttggcttccgctctttgaggagactcattttcctccttatgccttggactctggctgtccaggtggcgtgatcactgtcgacgccrcgtgcacttcgtggtttctaaagaggcacctcccgctttgctttctttcccgagcacttctatcagaagccagctctgcgtgctgagggtctggcgagag

SEQ ID NO: 535690 - DNA, 201 bp, Homo sapiens
gagctgaagccctttgtgactgcaatctcgaggtaggcccattcgtcgaggtacatcggatgcgccgtgccccctgacggcgccgtgtgtcgtttcctccrtgagaggtgtgcacagcagatgctcgtgaaaaggtgaaattacttggccagaggatctgtgacaaagccaccgcttggaggtcaagctccttttctgtgg

SEQ ID NO: 535691 - DNA, 201 bp, Homo sapiens
ccctgggcggcttgacggagtcgacggtgaggaggcgtcgggctggctggggcaggaggtggctccaggagtgcctggtgcttccctgtctcttgggagcrtgtatggagctgggccttttcttccattgctttctatctctctcgggcatatttggttagggggtcaggggcccagtgtcttcctcatgacccaggaggc

SEQ ID NO: 535692 - DNA, 201 bp, Homo sapiens
gtgtggggcaccgtgccaggtgcatcacctgcactggtccatttactcagaagcaccacgcacctggcctgtggagtccccccacccacaggtcgggaacrtggccgaggtacccagcccagagggcgatgagcagagttacaccagaggtggggggtgcttccctgggtggggaaggaggggtacctggggtggtggctg

SEQ ID NO: 535693 - DNA, 201 bp, Homo sapiens
ctccaacctcagggcgacccgctgggtccctggtcaggcaggggctgctctgacctcagggtgaccacggtgtccctggtcaggtgcttctccgacttcasagtgacctgctctgtccctggccgggggcttctccgagcagagctgctgtgcgctcaccgtgctgcctttgttttaggatgcagcagtctcggccctggc

SEQ ID NO: 535694 - DNA, 201 bp, Homo sapiens
ctttcagggaaagagagtctcgtgggtcgtctggcctgccggctctgtgtcctccctacactgacacactggctttcagagaaagggagtctcgtgggtcrtctggcctgccggctctgtgtcctccctacactgacacactggctttcagggaaagggagtcttgtgggtcgtctggcctgccggctctgtgtcctcccc

SEQ ID NO: 535695 - DNA, 201 bp, Homo sapiens
tcatcagctgatgtacatctgggttgtttccacctttcactgttaggttaatgctgccatgaacatcgtgtacacgtttttgagtggatgttgggtgtagrcctagtagaaatgctgggtcatacggtaactccacgtttaactttctaagaacctgccaaactttttccaaaatgattgcaccatttcaagttcctgcct

SEQ ID NO: 535696 - DNA, 201 bp, Homo sapiens
gcgggagggagtcatggccgagagagggaacgcagagctgccgtgtgtggccgtgcagggccttccacagtgagttgtggggtcctgggggtgagagctgrtggtggtctgaccatggtgggaggtggtccggtcctgtagaggcgtggctgccgcagttggggcgggctctgggaatggcgcggtgtctggatgtggagg

SEQ ID NO: 535697 - DNA, 201 bp, Homo sapiens
agccttcacatttgttgcttgtgcaggatctaattgagttaaagatttgggtttatattggtgggagccgggggagaccgtttgaaggaaaagatttaggkgtaacaaaagaataaaagtttcccaaaatgtgatgtataaaaatttacagaatgctggtatttccctcaataagagcttacacaatttaacagccatgag

SEQ ID NO: 535698 - DNA, 201 bp, Homo sapiens
gtgagccttacgtgagccttacaggcagaggatatggacctgccaggctgtgctccttgccatgctgtgggctttgaaccaaaagctgacacgtgggctgyggtctcaggatctttgttgctctcagtttccaggagactgacaaggcgtggcatgggggatgtctggcgctggcagagctgggcaggagaggcctgttgc

SEQ ID NO: 535699 - DNA, 201 bp, Homo sapiens
catgtgcgaggacgaggacacgggcctggtgtcccctcgggcggggcctcggcagcctctcccatgagagcacagatgccgctctcggcaaacaggaactyggcccagccatgttttcttttctcgttacgactataatcagctgcacataaaggggcagttcgatcgattttgataggtgtccacccttaaaatcttccc

SEQ ID NO: 535700 - DNA, 201 bp, Homo sapiens
cgaattcttcggctgagtttctctgtgtcgtagcctgtggagtgcctccttccttcctgtggcagagccttgtcctgctgtgtaaatgcaccacacgccaygttttgtccatccttttcatcagctgatgtacatctgggttgtttccacctttcactgttaggttaatgctgccatgaacatcgtgtacacgtttttgag

SEQ ID NO: 535701 - DNA, 201 bp, Homo sapiens
tcacattaaaatccctttaaattggcaataaatcttttctgataaataccaccgagtgcacctagcttaccctgtagcttgcaaaattaaaacagccaaargtaaaagacacctttttgaagcttagttggaaatgtgaggattgagggcctcataattgggaatcattttttggagctgctgctttcagataacgatgtc

SEQ ID NO: 535702 - DNA, 201 bp, Homo sapiens
gagcagctgggctgtcttctcaacatgcgttgagagaatggccatcttaactactgctctggagacccgtttttacaatgatttttttaaaaaaaaacacyaaggtgcattctggaccagattctaaaataattggctttaggactgaagaagccaggtgtcccgagcggggcgaggcctcctccagcgaggctgggtcgg

SEQ ID NO: 535703 - DNA, 201 bp, Homo sapiens
gtggcccctggtgagtgggaccaggcggaaggggtgctgggaccggtgatggtttcctgtcagccctgcagtgtgtggcccctggtgagtggggccgtgcrggtgcagtgttggttctctctctctctcaaatgcaggagctcagatgataccctgaagtctttctagctcaaaatgtctgtcatcttctatagcttctgg

SEQ ID NO: 535704 - DNA, 201 bp, Homo sapiens
gagaggaaccgggagcagctgggctgtcttctcaacatgcgttgagagaatggccatcttaactactgctctggagacccgtttttacaatgatttttttwaaaaaaaacaccaaggtgcattctggaccagattctaaaataattggctttaggactgaagaagccaggtgtcccgagcggggcgaggcctcctccagcg

SEQ ID NO: 535705 - DNA, 201 bp, Homo sapiens
ccccacaacgggtcctgcgtggtctggaccttgatccctggtcaagatggggcctgccaggtgcctccacttgaggagactgtgttttcctctgtaactakcagtgttcttgtggggtactcgaaggttatgcaacatcctgctgtttctcctttggttttcaccccatccgagctctgtccaaagaccttgttgtgtggt

SEQ ID NO: 535706 - DNA, 201 bp, Homo sapiens
ggtgtcctgggccaaccggtatgttcctgggaacagcagtgatggtgtcttacacatatgggcatgggcacccatgctggctcacacacatgctcactcgmgcgcacacacacacacacacacacacacacacacacttctaaaaggggagcagtctcgtcaccccgtgttggagatcaggactgaagcaaccagaggctg

SEQ ID NO: 535707 - DNA, 201 bp, Homo sapiens
taggtggcttccatctgccacacgacactccctggtctctggttggcatgcacctgccacacgacactccttggtctctaggtggcttgcacctgccacaygacactccttggtctctaggtggcttccatctgccacacgacactccctggtctctaggtggcttgcacctgccacacgacactccttggtctctaggtg

SEQ ID NO: 535708 - DNA, 201 bp, Homo sapiens
ggatgcagggtcagcgtcctcctcctgacgccttccactgacggggctccctggcctgggtcctgtcgtctctccggggtggggcggtggcgcttccctcyggcaaatgcactgcatccctgtcccagatccggaagaccacggccagccaggtgtacgagacattgctcacctacagtgacgtcgtgggcgcggatgtgc

SEQ ID NO: 535709 - DNA, 201 bp, Homo sapiens
gtctctaggtggcttgcacctgccacacgacactccttggtctctaggtggcttccatctgccacacgacgctccctggtctctaggtggcttgcacctgccacacgtgaatgcactttggaattgggcagcgtgtatagaaagaaaaggcctgaatgggagactcaaagtctgcccaggactaacatcaccttggaatgg

SEQ ID NO: 535710 - DNA, 201 bp, Homo sapiens
cacctcccacgttcaagcgactctcctgtctcagcctcccgggtagctgggactacaggtgccccccatcatgcccacctaatttttgtatttttaggagrgacggggtttcaccatgttggccaggctggtcttgcactcctgacctgaagcgatccgcccgcctcggccttccacagtgctgggattacaggctgagcc

SEQ ID NO: 535711 - DNA, 201 bp, Homo sapiens
aaaattaaaaatggaattgggaacagtgactgaaacttgtgtttcatgttgattggacacacctcatgctttactacgctagataggggacatttactcaygtgttaaagaggggctcagcttcaggagtgcggccttgccgtgagtgctgtctctgcttatgatttttctcctggtcgccccgttttacccgtgctggtt

SEQ ID NO: 535712 - DNA, 201 bp, Homo sapiens
ggctcactgcagcctccatctcccaggttcaagtgtttctcccgcctcagcctcccgagtagctgggattacaggcatgcgccaccgtggcaggctaattkttgtatttttagtggagatggggttccaccatgtgggccaggctggtcttgaactcctgacctcaggtgatccacccacctcggcctcccaaaggtgctg

SEQ ID NO: 535713 - DNA, 201 bp, Homo sapiens
ccttgatgtcttccctggcagagctgtgctgaagcttcgagtcgaaggcagagagtccatttgcgacagacttggaagaggctggcttcgccgtggcatcrggctggttggtttgcttggggtctagtgagttagatttagggcacttgggaactcgatcctgctctgatactaaagtaatcgagtttttacaaagaccat

SEQ ID NO: 535714 - DNA, 201 bp, Homo sapiens
tgtgggcttcccacaggtcgtccgtgtgtgcacgccgtcgcctgccctcccggccctgtgtgggtgcgtgtgggcttcccacaggccgtccgtgtgtgcaygccgtcgcctgccctcccggccctgtgtgggtgcgtgtgggcttcccacaggccgtccacatgtacacaccctcacctgccctctcggccctgtctcttg

SEQ ID NO: 535715 - DNA, 201 bp, Homo sapiens
ccttgatactttaaaaacttaggaatgggttttagtgagccttacgtgagccttacaggcagaggatatggacctgccaggctgtgctccttgccatgctrtgggctttgaaccaaaagctgacacgtgggctgtggtctcaggatctttgttgctctcagtttccaggagactgacaaggcgtggcatgggggatgtctg

SEQ ID NO: 535716 - DNA, 201 bp, Homo sapiens
gtgccttaagcttggatctgagggcaggaactcgccccggctgcttggcttctccctgtgcccctggtgtccatggacagggtcccctgtccggttccacygtgccgtggtggtgctgggcctctgaggcgagccggatggacggacggcatcccctggaccctgccacccttgccaccgtgccacagtgaacacgtgtct

SEQ ID NO: 535717 - DNA, 201 bp, Homo sapiens
gccgcctgctacgtgtgctgggccttcgcgcgtgcctatgagcctcaggagctgaagccctttgtgactgcaatctcgaggtaggcccattcgtcgaggtrcatcggatgcgccgtgccccctgacggcgccgtgtgtcgtttcctccatgagaggtgtgcacagcagatgctcgtgaaaaggtgaaattacttggccaga

SEQ ID NO: 535718 - DNA, 201 bp, Homo sapiens
cgtcgtcctgtctgcggtggcgtcgtcctgtctgcggtggcgtcctcctgtccgcagaggcgtcctcatgtcctcagtgttgtcttcctgtccatggcgtygtcttcctgtctgcggtgtcgtcttcctgtccatggcggcctcctgtccgcggtgccctcctgtccatggtggcctcctgtccgctgtgccctcctgtcc

SEQ ID NO: 535719 - DNA, 201 bp, Homo sapiens
ttcctatccgcggcgttgtcttcctgtctgtggcgtcgtcctgtctgcggtggcgtcgtcctgtctgcggtggcgtcctcctgtccgcagaggcgtcctcmtgtcctcagtgttgtcttcctgtccatggcgttgtcttcctgtctgcggtgtcgtcttcctgtccatggcggcctcctgtccgcggtgccctcctgtcca

SEQ ID NO: 535720 - DNA, 201 bp, Homo sapiens
cctgctacgtgtgctgggccttcgcgcgtgcctatgagcctcaggagctgaagccctttgtgactgcaatctcgaggtaggcccattcgtcgaggtacatyggatgcgccgtgccccctgacggcgccgtgtgtcgtttcctccatgagaggtgtgcacagcagatgctcgtgaaaaggtgaaattacttggccagaggat

SEQ ID NO: 535721 - DNA, 201 bp, Homo sapiens
tcgccgtgatcctgaaggcgctgacctacgacgagaagcggggtgcctgcagcgtgggcaccaacgtcagggacgccgcctgctacgtgtgctgggccttygcgcgtgcctatgagcctcaggagctgaagccctttgtgactgcaatctcgaggtaggcccattcgtcgaggtacatcggatgcgccgtgccccctgacg

SEQ ID NO: 535722 - DNA, 201 bp, Homo sapiens
aaatagcagttatataactttttttttttcttgagacggagtcttcctctgtcgcccaggctggagtgcagtggtgcgatcttggctcactgcaatctccrcctcctgggttcaagcaattcttctgcctgcctagtagctgggattacaggtgcgcatcaccacccccgattaagttttttgtatttttagtagagacag

SEQ ID NO: 535723 - DNA, 201 bp, Homo sapiens
ggcggcaataaagatagaagcctgtgttcctcttgtggcaaatgttaaaggaaaccagaaattcttgattcatatttttccctagaacacgtggctttacrggtttcaaaaaatgaaactcttgttcatatggtaaatatgacacacatttctatgcattctgaaaagatttagaataaactgccatttgttgttaaaaat

SEQ ID NO: 535724 - DNA, 201 bp, Homo sapiens
ggtgtcctgttggagtagtcctttaggaaggagcttttatatttatatttaactagcatcattaaacctgtttgtatttatttctcgatgagccagttttrttctgagaatgagaaaatagagccgttttaataaatgtccaaatcaggacagtgttaaatttgttgtaagtccatatatagttgattggtcgaattaact

SEQ ID NO: 535725 - DNA, 201 bp, Homo sapiens
atcctggtgaagtatcacataaacttctccagcgaaagcaaacgggcgaggacacctagggcacgtttcagcgcagacaggccggcccttctcgcggcctygcagtgtctctctccaggttcccggggatggtagatgaacgtggtgactcactcagggtgttcctgcgaagggaaactgagaggcccacgtgggacgttg

SEQ ID NO: 535726 - DNA, 201 bp, Homo sapiens
tcacctgggagggtgtctaggtgggcacggaacccagggtcgtgtatgggccatcactcatgggttctctgttttgggggaaagctgatcccactggaggktgactgtaatgagagtctccagatcaggtgccgactttggagaaatgcaggtgcaactgtccgaacaaatcaagtccccgctactggacggggctggcag

SEQ ID NO: 535727 - DNA, 201 bp, Homo sapiens
ctccactcacctgggagggtgtctaggtgggcacggaacccagggtcgtgtatgggccatcactcatgggttctctgttttgggggaaagctgatcccacyggagggtgactgtaatgagagtctccagatcaggtgccgactttggagaaatgcaggtgcaactgtccgaacaaatcaagtccccgctactggacggggc

SEQ ID NO: 535728 - DNA, 201 bp, Homo sapiens
gaaattttaggagacgttgtaggacagtgtcagtctctgaagaaaacttcttagtttagaaattttcaaatctgcgcagaagtaaagagaagtagtttacgggggggcccagagtctcgcccggcgcttcctttctcctcccctcctctgagtttaaagaagaccctgaatgtcaggtcccagcagcccctcgctgggttt

SEQ ID NO: 535729 - DNA, 201 bp, Homo sapiens
agtgtggcttacctgaggccagggaggtctggggtggctgagagcggctgtggcctctgtctgctgctctccccagtggccactctggcagcgctgctggrcaggggcttggctgctggtggtcttcagggagcagtgccttgcagagtggagcagagaagacggagaggtccggctttaggcccctgccgagctcctgag

SEQ ID NO: 535730 - DNA, 201 bp, Homo sapiens
ctgttgtagactgtccttgtcgtctgttggagtcggaggttcttgtactggttcgtgtgagtgagtgagtgagcctctgctaagtggccggttgaggactygtgtgttgtctccctcactttctttttatgaattgaataaagctagaatcataaaatgaaggcacttacgacattctctcctcactctcagggtcatccg

SEQ ID NO: 535731 - DNA, 201 bp, Homo sapiens
cccgatgtgtccaaggttcatctgcgctgtggtgttgtcagtgcctcgttccctttatggccgaatcataagccaacgtgtgggtattttccatatgccarcgtgtgggtattttccatatgccagtgtgtgggtattttctgctcttacaaattacgctgtgaagaactttcatgtgcaagtttttgtttaaacttaatg

SEQ ID NO: 535732 - DNA, 201 bp, Homo sapiens
gcagatatgtacacatgcacacccacagaatcgagtgtgcacacacccatacataatgcgcatgcactcacatgattgaatgtgcacacacccagagatgcacacacacacatctaatcagatgtgcacccccacacagatatgcacatgtgcacacccacaggatcgaatgtgcacgcctaatcagatgtgtacacccct

SEQ ID NO: 535733 - DNA, 201 bp, Homo sapiens
cagatatgtacacatgcacacccacagaatcgagtgtgcacacacccatacataatgcgcatgcactcacatgattgaatgtgcacacacccagagatgcacacacacacatctaatcagatgtgcacccccacacagatatgcacatgtgcacacccacaggatcgaatgtgcacgcctaatcagatgtgtacacccctc

SEQ ID NO: 535734 - DNA, 201 bp, Homo sapiens
catgcacacccacagaatcgagtgtgcacacacccatacataatgcgcatgcactcacatgattgaatgtgcacacacccagagatgcacacacacacatytaatcagatgtgcacccccacacagatatgcacatgtgcacacccacaggatcgaatgtgcacgcctaatcagatgtgtacacccctcccacatatgtac

SEQ ID NO: 535735 - DNA, 201 bp, Homo sapiens
catccacacgatcaaatgtgcacgtgcatctgcagacatgcacaagcagacacctacacgcactcgcagacatgcacacccacatgggcgaatgtgcacaccccccccacacagatagcacacgtgtacacccacacaattgaatgtgcatacacgcacccgttcacaggttaatcgctgccacagctatcagctcttttt

SEQ ID NO: 535736 - DNA, 201 bp, Homo sapiens
tgtcgtctgttggagtcggaggttcttgtactggttcgtgtgagtgagtgagtgagcctctgctaagtggccggttgaggactcgtgtgttgtctccctcrctttctttttatgaattgaataaagctagaatcataaaatgaaggcacttacgacattctctcctcactctcagggtcatccgagagttggctgcgaggg

SEQ ID NO: 535737 - DNA, 201 bp, Homo sapiens
catatcagtcttagagtcattcaggtgtttttacaaccaaaagtagaagcaccttttaatattcatgcttaatatttataaaaactgaattggagggttttttgtttgtttgtttgtttgtttttttgagaagcagcagctgcatttgtaaaaatgtgaaagtgccagttcagaggtgttgtagcttgccaccttggaagg

SEQ ID NO: 535738 - DNA, 201 bp, Homo sapiens
aagcatctgaggaaagagctgtggacttgatcagtggataggctgtgaggacggatgcggtgagtgtgtccgcctgcagggcagggagccgctgaactgtrttacgtacaccggagcccgtgatggtcccgccggatgcctgacatgcagtgctgcttccctggtctctaggtggctcgcacctgccacacgacactccct

SEQ ID NO: 535739 - DNA, 201 bp, Homo sapiens
taattctgatgttttcattccttttcaggggtctgggaggacagctcatgagacaagcaggtaagtctgaaggcctttgcagccctctgcagccctttgcsgcagccatcgttgagggaggtgtgctcgtggcgtgcagggcggcccattagcccccagggtgaagggctgggtgtgtttcttctgtggaggcggcatctg

SEQ ID NO: 535740 - DNA, 201 bp, Homo sapiens
atatcagtcttagagtcattcaggtgtttttacaaccaaaagtagaagcaccttttaatattcatgcttaatatttataaaaactgaattggagggttttttgtttgtttgtttgtttgtttttttgagaagcagcagctgcatttgtaaaaatgtgaaagtgccagttcagaggtgttgtagcttgccaccttggaaggc

SEQ ID NO: 535741 - DNA, 201 bp, Homo sapiens
tatcagtcttagagtcattcaggtgtttttacaaccaaaagtagaagcaccttttaatattcatgcttaatatttataaaaactgaattggagggttttttgtttgtttgtttgtttgtttttttgagaagcagcagctgcatttgtaaaaatgtgaaagtgccagttcagaggtgttgtagcttgccaccttggaaggcg

SEQ ID NO: 535742 - DNA, 201 bp, Homo sapiens
cgtggagaatgttcactttggcttttccacagattcctctcaaaggttaccatcgactttaagattagtattaatagaagctgtttttgctgttgtttttkatttcatggtgtttttgattgcctgggtacgctaacttgattttttgacagatggttggcaatggctgataaatgacactttgagacatctccatctcat

SEQ ID NO: 535743 - DNA, 201 bp, Homo sapiens
atcagtcttagagtcattcaggtgtttttacaaccaaaagtagaagcaccttttaatattcatgcttaatatttataaaaactgaattggagggttttttgtttgtttgtttgtttgtttttttgagaagcagcagctgcatttgtaaaaatgtgaaagtgccagttcagaggtgttgtagcttgccaccttggaaggcgt

SEQ ID NO: 535744 - DNA, 201 bp, Homo sapiens
cgtgaaatacgaaggggtttgtggctgtttccccttaacatgtacccacagtcacagagtgcccctcacttttacacagagcgtgggctggccaccgtctrcttgctcctacctgctggctgggagctctcccaagtgctgtgcgcccctgccgtcggcctgtagaacccaagaccatggatgctgctgcctcccctgggg

SEQ ID NO: 535745 - DNA, 201 bp, Homo sapiens
cttacaagcttgcgggtgtctgtgctcatagtctgcttttcttacaagcttgcgggtgtctgtgtgctggcccagaggctcactgttggcagttttgactrtggaagtactcacagccgtctcagggtggggcttggggttcgtagtggcgaggcgcatttctgttgtctggcgggaaagtccttggccagcgagaggaca

SEQ ID NO: 535746 - DNA, 201 bp, Homo sapiens
tttggattcttccagagggtctctgtgtcccccttaccagcctcaggtttccttcagaggctgtgccgcacgcccaaggctgagaacaaaggctgtttttytttttttgagacagagtttctcccttgttgcccagtctggagtgccatggcgcaatctcagctcactgcaacctccgcctcctgggttcaagcgattctc

SEQ ID NO: 535747 - DNA, 201 bp, Homo sapiens
tccgcggcattgtcttcctatccgcggcgttgtcttcctgtctgtggcgtcgtcctgtctgcggtggcgtcgtcctgtctgcggtggcgtcctcctgtcckcagaggcgtcctcatgtcctcagtgttgtcttcctgtccatggcgttgtcttcctgtctgcggtgtcgtcttcctgtccatggcggcctcctgtccgcgg

SEQ ID NO: 535748 - DNA, 201 bp, Homo sapiens
actcacggctctccctctcctcacagggacgcagagcttgcagtggtgagagagcagcgcaaccgtctgtgtgaccttctgggcgtacccaggccccagcyggtgccccaggtaaccctgtcaccttcacagcatgaggtgcctgtgcttccctgagctctggaatgttctggggccagcggctgtgcttagcttctgcca

SEQ ID NO: 535749 - DNA, 201 bp, Homo sapiens
ttgttcctgcccactgctgttccatcttaccaaatactcagtagcgtccggagagggacctcaacccggttacttccctgggtgtgcagcacgtggccagygtctcatagtctagattcttgcatcagagcgaagcctgagaggagccgagggtcctcctcctatccagggagaccgtgtgtttcccgaggcagctgtgaa

SEQ ID NO: 535750 - DNA, 201 bp, Homo sapiens
acgccccgcgagcaccagcagggcctccccggcatgtggcggggccagcgttggcctggggcccgcttggctttgatctcgtggggcttcgtcttttggaygtcctgggtgcgcctccactgtggctcctgggttccctcacgcacccgggtgtaagcgccactgcctgtgtccgacaagcagctcgttgtgaggcacacg

SEQ ID NO: 535751 - DNA, 201 bp, Homo sapiens
tctggaatgttctggggccagcggctgtgcttagcttctgccagcacgtccacacggcccgttccctcgtctcatgtcaggacccctgggattacgggacyagcagagctgccttctctggccactgcccacacctgtgggcccctgtggcatccaggccacttgctctggggcgtttggggggccggggagtgggtggag

SEQ ID NO: 535752 - DNA, 201 bp, Homo sapiens
gcttgtcttgtctcttcttcagcctggtgcctgctgaagccagtcctggagcccatacctcacccctgcctggtgaggatgtcttgttcctgagggaggcyggtgtggaaagcctcgcacagtggtgcctccagctgttgaagggtagcgctggcccttggaggctggcactagctgacagcttttcctctctgcacctgc

SEQ ID NO: 535753 - DNA, 201 bp, Homo sapiens
ctctgggtgggctccgtgtcgcttgcgtgcctcactcatctggcaccgtgaccgcgctccggccctgagccccacttctctgaagcctcacgtgttgcccrtgtggtctgctcctcaccgtcttttctcttgtccttgcccagttgtcgccgtgatcctgaaggcgctgacctacgacgagaagcggggtgcctgcagcgt

SEQ ID NO: 535754 - DNA, 201 bp, Homo sapiens
gacccctgggtggtatcatgtgctattctgaaggagcttttgcttcatggcacttgaaaaaaatcctttcactggatctgagttggtgagcatgcatcttyctttcgtaggtttgttttctgaccaggccgtgggtctaacaggagccccgagcctctgggtgggctccgtgtcgcttgcgtgcctcactcatctggcacc

SEQ ID NO: 535755 - DNA, 201 bp, Homo sapiens
ccacgaacaggctgccctgttagcacagaaagtgaacgtgagcagtgcgagaaggctcagagtggactttccggggcaaacaactgagggccttttgggcrtcacagatttggtttagttcggatcgaggtaatcatcttgaacccgcttattagagtcagtggctttttctgtctcacagccgccttcttgtttggtttc

SEQ ID NO: 535756 - DNA, 201 bp, Homo sapiens
catgctggccactgccactcgcggttgtctgttgggagtcggtctgtccagtggatgaataaattgggactcagcggtttgcacccagatgcccgaggctrtggagttgccgggtggtcgtgcctggggctgcctggagtggtgttgcagtgactgtccctggggatctggcctggcagggatgccacatttgggcagcgc

SEQ ID NO: 535757 - DNA, 201 bp, Homo sapiens
actcattttagacttaaagaagaattgcaaaaccagtggagttcttctagaccctccacagcattctccgatgtgaacatctcacatttggaagccaggargtgcagtgtgggataaaggccactaacaggctggtctgcccgggaccccgcatggcatctggtggtcctgtgccctcagcctcctctgctctgtgagctc

SEQ ID NO: 535758 - DNA, 201 bp, Homo sapiens
gtgtccaggtgcatgcgttgggcgtgcaggaggcctgaggccattgtccatgctggccactgccactcgcggttgtctgttgggagtcggtctgtccagtrgatgaataaattgggactcagcggtttgcacccagatgcccgaggctatggagttgccgggtggtcgtgcctggggctgcctggagtggtgttgcagtga

SEQ ID NO: 535759 - DNA, 201 bp, Homo sapiens
aggggagggctgggcttcttggtctgaggcatttcctgctgtccctgcacttccaggctcctccgtggtcctggtgctgccttccctgcccttcctcttcyaccctgtagcttatttcttgaaaaaagaaaatggtccgtttctgctgtttttagtgggattttacccgctattttttacatgttcaaccccctgtgttac

SEQ ID NO: 535760 - DNA, 201 bp, Homo sapiens
tccgtgccgctgctgaagacgctggaccacgtgctcacccacggctgcttcgacatcttcaccacggaggaggagtgaggctctgcttttcatgacttccyttccgattaagcctaagtagctcatgtattaaagaaaaagtcatcagacacagagatcagaattccaggaaatgatcttccagtgcgttctgggtcagtt

SEQ ID NO: 535761 - DNA, 201 bp, Homo sapiens
cactgccacctgggcagaggccccagaggccccagaggccgaggcaggctttgttctctgctgctgggactcagccctgcgggagcacagggaggacagckggaagcccagcccctctgtggctctgtccacagctggggacagcagtccagtgtgcacgggccacccacagccctctcaggaactggcctcttctcttta

SEQ ID NO: 535762 - DNA, 201 bp, Homo sapiens
actgggttccccacgcccttccctccccatgggatccagccttggcacttcaggatctgcagctccagacggactcctgcctgtgtggcgggtgggcctcrcagccgccatgccatctaaaactcgcatgtgggggtttatccagttgaaacacagataaatgtgaaacaggatcacttggagatatgacagatgaggttg

SEQ ID NO: 535763 - DNA, 201 bp, Homo sapiens
tgctgtgccgcctcactgtacatcctgcacccccgtgctgaagttcaggcttgcttctcgcacatcatgttcgagggatctgcttcatgaatcgtactttwatttttaaagtgtcacatgcacatatgttggcccacagtgttcctttatgtcatatgatagaacatgcattattaatcacgtcaaaagtgtgtgaatcac

SEQ ID NO: 535764 - DNA, 201 bp, Homo sapiens
cgctccacaggaggtttgcggcatggctgccatctgtgttgtggcctgggactttcttagagagtgggtaaaagatgagtcatctcttgtgtgatttatcrgcttcacttgtgcttccagggctctttgaagcgtctcactttttaatttcatgaagaaacaaatgtagtgcagagaacagaaagctgctgtgtgacctgc

SEQ ID NO: 535765 - DNA, 201 bp, Homo sapiens
ggtgcactttgcccctgggattggcacaggtggtgactcgtggaatgcagcaccctgtagacgacgcacctcctctgctcatggcccccacctgccccgcycccagtgcctctccaaggctgctctgttggcctcggctcctgggcttcgggggagcggtggaaagaacacgtgggtttggtgtttgccacttgctggctg

SEQ ID NO: 535766 - DNA, 201 bp, Homo sapiens
ctcctgcctcagcctcccgagtagctggaattacaggcgcccaccaccatgcccagctaattttttttgtatttttagtagagacggggttttgccatgtkggccaggctggtctcgagctcctgacctcaggtgatccacctgccttagcctcccaaagtgctgggattagaggcgtgagccaccgcacccgtcccagaa

SEQ ID NO: 535767 - DNA, 201 bp, Homo sapiens
gggcccagagtctcgcccggcgcttcctttctcctcccctcctctgagtttaaagaagaccctgaatgtcaggtcccagcagcccctcgctgggtttttcyaacttgtggtaagaactggttttctggggttttttgtttctttttgtttcccccctcttggcatgtaatccccagctaacagattttataataataattc

SEQ ID NO: 535768 - DNA, 201 bp, Homo sapiens
gctgggacaaaggcgtgtcacttgagtgagtgatggtgtcacaggtgcccacgtggaagaaggtaaagtcgtatctaaaactaaatgtgagagtaactaawaacttacgcataaaaactaccatcataaaaatcctcgaagaaattttaggagacgttgtaggacagtgtcagtctctgaagaaaacttcttagtttagaa

SEQ ID NO: 535769 - DNA, 201 bp, Homo sapiens
caggtgagctttacaaaaccaaagttcttatatctgtgtcctaatgaagaactgcgctgtcaggagcaggcggggcgggtgtgttcgcttccctctctgcmtatgtgtgtttgggttgagcgggtgggtgtcacccggcccgctgtgggaggtgcatgagggtctgacctggttgtgtgattgggttgagtgggtgtcacc

SEQ ID NO: 535770 - DNA, 201 bp, Homo sapiens
caggaagagaaaaccaaacgtgcatggtctcacccataagtgggagctgaacagtgaaaacacatggacacagggaggggaacatcacacaccagggcctrtttaggggtgggggtcggggggagggagagcattaagacaaatagctaatgcatgcagggcttaaaacctagatgatcggttgatgggtacagtaaacca

SEQ ID NO: 535771 - DNA, 201 bp, Homo sapiens
atgcagcagacagttgttagggtaatagtgagaagttgggatgcttaacaagcttctaaggagtttgaactttgaaaaatagacaagagaaagagttcttaaaaaaaaaaactttgataggacagagcggaagtaattacagtttaactttatgggacgtttctgtgacaggctgggtaactatgcttgtcatgcgtccta

SEQ ID NO: 535772 - DNA, 201 bp, Homo sapiens
tcccaaagtgcttggattacaggtgtgagccactgcacccggtctgtttttttgtttttgttatttttttccttaagacttaagattttacatggctttgygtttacttttatatttaattccttttttttttcttttgagacagggtcttgccctgtcacccaagctggagtgcagtggtgcgatcacggttcactgtag

SEQ ID NO: 535773 - DNA, 201 bp, Homo sapiens
gtccaggagagacggcttgaaggccattgcgaggtgagtcccaacagttcctccctaaagtcgtaagtctctgaaaggccagcagatgaacgctaaggggratgtttttgctcagaggcaggacttatgattcttcacttcctaggtttcctctcttccagaggatcgtcagtcccagctgctggaggctctttcattctc

SEQ ID NO: 535774 - DNA, 201 bp, Homo sapiens
tgaggcagcctcgtgctgcccagatgcaaggcgggagccgagggctccacctctcagcggcaggagtgccaggtgtctgcgctacgactccctctgcccgkaagccccaccttggcctttcctaagctgagtgttctgacccttgccatggagggtccagtgaggcctttgagaatctgtgtaccttccaccctctaccct

SEQ ID NO: 535775 - DNA, 201 bp, Homo sapiens
gcgatctcggctcactgcaaactccacctcccatgttcacgccattctcttgcctcagcctcccaagtagctgggactacaggcgccctccaccacgtccrgctgattttttgtatttttagtagagacggggtttcaccatgttagccaggatggtctcgatctcctgacctcgtgatccgcccgcctcggcctcccaaa

SEQ ID NO: 535776 - DNA, 201 bp, Homo sapiens
aatgaaagtggagttgatttggctcttgtggtgagatacagccaaggtgtatgagagaatttggggaaagctttctttctggacatttgttgacgttgatsagtagtggagggctttatttgtaagttgaagtctgagatttgtcatgccaatacctaaattttaatttgtttgtacaaataacgccacaatttaattctt

SEQ ID NO: 535777 - DNA, 201 bp, Homo sapiens
tgctgcgtcttctccacctcgatgtcccccgctctgctgcgtcttctccacctcgatgtccccctctgcctgctgcgtcttctccacctcgatgtccccckctctgctgcgtcttctccacctcgatgtccccctctgcctgctgcgtcttctccacctcgatgtccccctctgtctgctgcgtcggggctgcctaccggg

SEQ ID NO: 535778 - DNA, 201 bp, Homo sapiens
tggccagggacttggcggggggagctcttcagaatctgtcacatgcacgtgaatgctttatggctttggtattcttctgtttaattttagtaaaaccgcgrcccgttgcaagaagagtgtgggcgttggcagctttgtcccaggtgctgcagggttggggtggtccctgtcaccgcctgctgctggtgggggtcagctgca

SEQ ID NO: 535779 - DNA, 201 bp, Homo sapiens
gtttacctcctgctctcggtttgcagctgtgagcgcatcatgtgctgtgtggcccagcaggccagtgagaagattgaccgtttccgtgctcacgccgccarcgtgttcctgacgctcctgcactttgacagccctcccatcccccacgtgccccaccgaggagaactggaaaagctgtttcccaggtactgtcggggtgta

SEQ ID NO: 535780 - DNA, 201 bp, Homo sapiens
tgtcctcttttgtcctttgggtctgaggtcacactgggcctcttggctctccatggagctcagtgtgggtgtgtcttgccggcaggcaggttccggggccscagcatccccatcgcccacccggatgttcctggggctgtaggccgccagctggcacagggccacggctgccgtctgcttctgctcctcgctgctgtccac

SEQ ID NO: 535781 - DNA, 201 bp, Homo sapiens
aggagtctttagcctcaggaattggactttcgaactcgacgtgttttctgttggggtccgaagggtttaacctggaaggactcgaggctggatagaccagrgtggcttcttcaagcaggtgagagctctgatctcgggtgaggccagtgacaggtgggagtctgagaccataggaggaaaatgcagactctggcctgtaaa

SEQ ID NO: 535782 - DNA, 201 bp, Homo sapiens
ctggctcgtctgcatgaagtcggtggggctcggcctccctggggagcccgtggctgcactccctgcgcgggggctcattttggacccttccgtgtctctcygcccagccttggaggagtctttagcctcaggaattggactttcgaactcgacgtgttttctgttggggtccgaagggtttaacctggaaggactcgaggc

SEQ ID NO: 535783 - DNA, 201 bp, Homo sapiens
aggggggatgtctggcgctggcggagctgggcaggagaggcctgttgctgccatctcgactcgtggatggtgagtagctgaagcacggtcagctgcgtcaycaggctgtccgtggcaggctgcagcccttcgtctgaacccatctccgcggtgtggccctgccgcgggcacgcccagaagagcttgagaacaaggtctgtc

SEQ ID NO: 535784 - DNA, 201 bp, Homo sapiens
tctctgatttcttggagaggttgagggggcccatcccggagctgtcgtccggactggaaggcgcggcctccgagacgagagaggcgcttccggtcggagcmggagggtctccgttcacaacattgaggctagaagaagccaagaaaaagcttagtaggagcttgcttagaaaagcaactgcgtgaagcagtgtgagcaagt

SEQ ID NO: 535785 - DNA, 201 bp, Homo sapiens
cgattactgttgaccccataggatttttaatgattttgttgagacgcaattcacatgccattcagttctgtcattaagtgtacagttcagtggcttgtaaygcatttgcagagttttgcagccatcgccacagtcagttgtagaacattttaccccacgctccttcgctgtcatccccaacccccccgacagatggataaa

SEQ ID NO: 535786 - DNA, 201 bp, Homo sapiens
acgtgtgttgccggccccggctcagctgtggcagaagtcagtcacctgtggagttatggaagtccaggcggccaccccaggccggggcctcattccgttargtagggccaggtgtctgtcctctcacgcgtccgaggtggctgccggcgtgcgggtgtgactgtcgatgagagctctgagctgggatatctggtgacggct

SEQ ID NO: 535787 - DNA, 201 bp, Homo sapiens
tcagatttttatgcaggggggctgcataatgtctccctggagagcctcagcctctgtggaagagttgggtcaggagaagcctctcggcggaggaagccggrgggagaagcctctcggtggaggaaccttcacccagagaccagcctgggggtccttggcccagacgggggaggtgggaacatggccttgggttctttcctc

SEQ ID NO: 535788 - DNA, 201 bp, Homo sapiens
cttcagcctggtgcctgctgaagccagtcctggagcccatacctcacccctgcctggtgaggatgtcttgttcctgagggaggccggtgtggaaagcctcrcacagtggtgcctccagctgttgaagggtagcgctggcccttggaggctggcactagctgacagcttttcctctctgcacctgcgctctggtgacttggg

SEQ ID NO: 535789 - DNA, 201 bp, Homo sapiens
gactacaggcgcccgccaccttgcccggctaattttttgtatttttagtagagacggggtttcaccgtgttagccaggatggtcttgatctcctgacctcrtgatctgcccgcctcagcctcccaaagtgctgggattacaggcgtgagccactgcgcccggccaaaacctgaaggtcttatattgtggtgtgagtttata

SEQ ID NO: 535790 - DNA, 201 bp, Homo sapiens
gttagtttttaaaaaatattcttcatttcgaaataattatagacttacaggaagttatgagattagtaatagagcctggctgtgcttcccatgcttcctcygcggtgactccgggtatgacagtgttggagccgggactgcggtgtcgaggccctgcctctaactggactgcaggcctgtgcggtttcgtggcttcatgtg

SEQ ID NO: 535791 - DNA, 201 bp, Homo sapiens
ctcctgcctcagcctcctgagtagctgggactacaggcgcccgccaccttgcccggctaattttttgtatttttagtagagacggggtttcaccgtgttarccaggatggtcttgatctcctgacctcatgatctgcccgcctcagcctcccaaagtgctgggattacaggcgtgagccactgcgcccggccaaaacctga

SEQ ID NO: 535792 - DNA, 201 bp, Homo sapiens
cattgggttttgggacgtaggaggggtccgtgctgggctggcccacgttttacacctatttctaggtgtggtcctctgggttcagagcctgtggtgagggstctaccgcttctccctttggtcatcctggactcccgttctcctgctagctggagatgctcctggatgcactgttgggggtttctggttcttgtggcgccc

SEQ ID NO: 535793 - DNA, 201 bp, Homo sapiens
ttagctgtgggcgttccgagtgccagcgcacagtgttgagcagagcgggtaggagcgccctggcttcagggagggcccccgccccctgcatggcggtcacrctgcgctgagcgtcccctcccctctggtggcctttcgcagtggtggaggggcaggaactgactggctcttttccctgtggtggctgctcgggtggcagtg

SEQ ID NO: 535794 - DNA, 201 bp, Homo sapiens
atgacagaaatgctttgaggtctgcaatgttctcctctcccagagagacttgatgttggctcttgacgggaggcgggtgcttgctgtcggggtcacctccrttgggttttgggacgtaggaggggtccgtgctgggctggcccacgttttacacctatttctaggtgtggtcctctgggttcagagcctgtggtgagggct

SEQ ID NO: 535795 - DNA, 201 bp, Homo sapiens
ctcctgggctcacgtgatctactcacctcggcctcctgaagggctgggattacaggtgtgagccactgtgcctggccaggtgtttgctcttaaaaagtcayttctctctttctgtgtgtatttgtgttttgaggtaaaatttcacataacataaaaataaccattaactttaaagtgaaaaactcagagcatttagtacat

SEQ ID NO: 535796 - DNA, 201 bp, Homo sapiens
tctttgtttaatgtcatcatctggagcctctgtggctgtttctgaaggacggtatatcatacatgaaaagcatctccaccaagctgcaggaacaagacatkacagaaatgctttgaggtctgcaatgttctcctctcccagagagacttgatgttggctcttgacgggaggcgggtgcttgctgtcggggtcacctccatt

SEQ ID NO: 535797 - DNA, 201 bp, Homo sapiens
aagctctgtccttgggactcatcatctacgaaaggccacacctcctaacaccgtgctcttgggagtgaggatttcagcaggaattctggggaacagaagcrttggggcgtcgcatctccctgtggccttcctccctgtggccttcctccgcctgccagctgccccctcaccctgctgtccacctcacggacccctcttcgc

SEQ ID NO: 535798 - DNA, 201 bp, Homo sapiens
gcgtttggagtccccgtggctggcggtgatggagttgaaggcgttccgaatccccgtggccggtggtgacggagttgaaggcgttccgagtccctgtagckggcggcgatggagttgaatgcgttccgagtccccaggacgccattttggctgaatttcctttaccctcctgctccgtgaagcggggcccattggggaggt

SEQ ID NO: 535799 - DNA, 201 bp, Homo sapiens
aatcacaagacaagcaaagctctgtgtaaaggccctgatcgcattcatgaagctctgtccttgggactcatcatctacgaaaggccacacctcctaacacygtgctcttgggagtgaggatttcagcaggaattctggggaacagaagcattggggcgtcgcatctccctgtggccttcctccctgtggccttcctccgcc

SEQ ID NO: 535800 - DNA, 201 bp, Homo sapiens
catcatgcccacctaatttttgtatttttaggagagacggggtttcaccatgttggccaggctggtcttgcactcctgacctgaagcgatccgcccgcctyggccttccacagtgctgggattacaggctgagccaccgcgcccagcctcctagtggctttttactgggacttgtgtggggtagtgaacctcgtgctgttc

SEQ ID NO: 535801 - DNA, 201 bp, Homo sapiens
tgggctagatccatcccccgacctcagcctcacaagtagctgagactacaggtgtttgccagcacacccagctcattttttctttttttttttgtagagayggtctcaccatctagcccaggttggtcttgaactcctcgcctcaaatgatcctctcatcttggcctcccaaagtattgcgattacaggcatgagccactg

SEQ ID NO: 535802 - DNA, 201 bp, Homo sapiens
tggaagatggctgtaccacgttttttcctttcttttcataaaaggttgctcatgctcagtaacacattcaactagttctcattttaatgctttttggagcstgaggttacattggcaagcatatttcatggtgttttatacgtcaagaggttcttctaattctgatgttttcattccttttcaggggtctgggaggacagc

SEQ ID NO: 535803 - DNA, 201 bp, Homo sapiens
ttgctaccgagggtgtcacacagtaggaagcctttgggtgtggtttcttccccgacgtgtctttgagatacctgtgttgctgtgtgttccgtggtgtgcaygtacggcgccgtgttatccactcaccagcccaggctcatctgggtttccagcctttggctattgtagggaagctgctgtgcacatctagacgtacaagtc

SEQ ID NO: 535804 - DNA, 201 bp, Homo sapiens
tgactggggatgaaaatcccccaacgtcctgtattaactgcaccccccgtgtgccccagacaggggaaggtggttttctctgctgagcgcagcaggcctgyggtgttggaaagataccaaggatgtgtgtatagactgagcgaacctgtttcatgagatgcaagaaggaagaaagcaatatttctaatcagtattttacat

SEQ ID NO: 535805 - DNA, 201 bp, Homo sapiens
gcaggagccttacacacggaagggagccctcgtgcagccaccgtggagatggaaaatggcatgttaagaatatcttttgccaggaaatttggtagcttagkcaaaatagacgttccgagagaaatgtaatttatcaaagttgacccaggtgggaatagaaaagtgactcctcactgcttcagcgcatctgcttgtaagcgg

SEQ ID NO: 535806 - DNA, 201 bp, Homo sapiens
tgaggcagaagaatcccttgaacctgggaggtggagattgtagtgaactgagattacgccactgcactccagcctgggtgacagagcgagagtccatctcaaaaaaaaaaaaaaaaaatttaacctatacgttgatgattgatagatcatcagtgattaattaactgtgattaataatcattgaattctccttcatgaggc

SEQ ID NO: 535807 - DNA, 201 bp, Homo sapiens
tcccttttttcagtaaaatataagcagtaatagagccgatctccttgagtttttgtgagaattaaagaatacattttaaagaattgaggagaatttttggsacagtgtgagcattcagtaaattttagttgtagtggccatcacaacgtggcttttaagctctcttacaaaaaaagaaacatcagcatcctgtttggcaca

SEQ ID NO: 535808 - DNA, 201 bp, Homo sapiens
ttgcagatgacctttggaggaattgtgtcggagtgtagaattttcacagtgtagctcgccatgcatcaggcacatgtagcctgtgccacaaccattgtgcytgggcggggttctccatgctgccctgttgcaggaggatgctctgcccctgcttctccctatttgtcatttaagatgattcctggtgctttttggtgagcg

SEQ ID NO: 535809 - DNA, 201 bp, Homo sapiens
tatggatcttggtgttacaggagaatataaaaattgttcacgagggattacgtggtttacttgtctgttgtccagatagctttatattctttaagattcakctcggattcttatcctatttttgccattaactttcattatgattttggcaaagccattttgtttgcttacatttttcacttttaatgtggtgtctggcct

SEQ ID NO: 535810 - DNA, 201 bp, Homo sapiens
cctccccaggcagggtctgcagtcctggtggccactgtgctccatcagtcctgggctcagtgggggacctgcggtgtgatcactctgggaacaggctctcygctggcgtcatgcttgtgaacagccaccttggagggttgccctgggaggggaagagactcctaggaaatgagtgcagactttctgtgcacgtagccagca

SEQ ID NO: 535811 - DNA, 201 bp, Homo sapiens
ctggactgttctgagcgtgtcttctcaggatcaggaacacacatcagccctctgcgatgtggaagatgaggctcaccgatgtttgtttgttagctcacacmttttaaatttcaggatttgccagactgttggtgtgaaagcaggagccccagacgaagctgtgtgcggagagaatgtttcccagatttactgtgcgctgct

SEQ ID NO: 535812 - DNA, 201 bp, Homo sapiens
tgtttcacagggaacctgcatgtacagtaatttacacacacaggccggaaagctgtgctttacacgttgccaagagccacataatgtggctctgcagggtrgggcgggtccctgggaccagcctggccttgcggggacgcagacctgaccccgcctcatcccacacagagcaggagctggctctgttgacgtcagcttgtg

SEQ ID NO: 535813 - DNA, 201 bp, Homo sapiens
ctgaggcagagaattgcttgaacccgggaagcagaggttgcagtgagccaagattgcaccactgcactctagcctgggcagcagagcaagactccgtctcaaaaaaaaaaaaaaaaaaaaagcctgccccagaaaaaaagatcttctaagtgtatcgttatgggaaaaaacaaacaaacaaacaaaaaaaaccgagacaag

SEQ ID NO: 535814 - DNA, 201 bp, Homo sapiens
ccacgtgccccaccgaggagaactggaaaagctgtttcccaggtactgtcggggtgtaggccccccgtgctggccccgcagccatggcgagatcattggcrgcccggccttgtctcactcactctcttgcaggtccgatgtggcctccgtgaactggagtgcaccttcccaggccttcccacgcatcacccagctccttgg

SEQ ID NO: 535815 - DNA, 201 bp, Homo sapiens
acgatgcctctcgtgcagaactgttctgagggtgagggaccctcatccagggaccagtgaagccagattttttgttcctggtgtaacagcccaatggcttyttccttttttttttttttttttttttttgatacgaagtcttgctctgttgcccaggctggagtgcagtgcagtggtgcgatcttggctcactgcaacctc

SEQ ID NO: 535816 - DNA, 201 bp, Homo sapiens
attacaggtgtgagccactgcgctcggccccagtgggttctttctgcgggctgcccagatagagttgatttgtcagggcaggggagttgccatggagaagrtttagttcacgcagagccggttgaaagggagactagactagaggtttttttttttttttttgaggcggagtctcactttgtcccccagggtggagtgcag

SEQ ID NO: 535817 - DNA, 201 bp, Homo sapiens
atagtgagaagttgggatgcttaacaagcttctaaggagtttgaactttgaaaaatagacaagagaaagagttcttaaaaaaaaaaactttgataggacasagcggaagtaattacagtttaactttatgggacgtttctgtgacaggctgggtaactatgcttgtcatgcgtcctaacctgtgccctgagattgtgctgt

SEQ ID NO: 535818 - DNA, 201 bp, Homo sapiens
cacaaatgtgcttcctataaaatcatgtaccaagaagttcctgccttttgtctctgagcctgatgtgtgtaggggtgatggaaaggctcactgcccagggrtcagccagaggggaggtgggctgcactcctcctgcctggagaccaggcccccttcttgcctggtgctgtccctgctgtgggagacgtctggccacaggca

SEQ ID NO: 535819 - DNA, 201 bp, Homo sapiens
gtctgtgctcttcatcagggctcagcattgccccatgacctgctgttctgagtcctttttaccctcagcaacacgttcttagtgtcttacgatgtcagaargtgtccccctcataatcgttaagggaaaaggtactccattgtaatctaatttaaaattctctctgatagatggatgttttgtttgttcttgttttgttac

SEQ ID NO: 535820 - DNA, 201 bp, Homo sapiens
gggagtctgagaccataggaggaaaatgcagactctggcctgtaaaatccgtaaggaatcggcaggttagagggatattgctggaaaaacctgtagtgatygtatgtggctggagatggagccaggtgcttagggatcggccccgggtgaggcaggaagtgtctcgggtcttgggttccgtagactgacagcaggggtgcg

SEQ ID NO: 535821 - DNA, 201 bp, Homo sapiens
aaatccgtaaggaatcggcaggttagagggatattgctggaaaaacctgtagtgatcgtatgtggctggagatggagccaggtgcttagggatcggccccrggtgaggcaggaagtgtctcgggtcttgggttccgtagactgacagcaggggtgcgtcacactcaggcgagctcccagccagcaggtaaggcgagtagat

SEQ ID NO: 535822 - DNA, 201 bp, Homo sapiens
tgctggaaaaacctgtagtgatcgtatgtggctggagatggagccaggtgcttagggatcggccccgggtgaggcaggaagtgtctcgggtcttgggttcygtagactgacagcaggggtgcgtcacactcaggcgagctcccagccagcaggtaaggcgagtagatggtggccagcccgtgctctgtgtaaaagtgaggc

SEQ ID NO: 535823 - DNA, 201 bp, Homo sapiens
ctgccgccaaagcccaagctgtttgtcctctgggaggctgtctcaggctacagccgcagcagctgccctgaactctcactggacaccttttctgcatgagrccggggaagcagggcccacagccaggcggcccgccctgcactcacccttggcaggagcagctgtgtacgcgggggccttgctcagcgcagggctgggctg

SEQ ID NO: 535824 - DNA, 201 bp, Homo sapiens
aagtagccaccctgtcctgtcccttcctcacccaccacacccactgctccccgctggcaggcactgcaggctgcacaagtaaccgtggaacctaaacactsatgtgcttcgtccgggttttaaaaaggcgcccttaccgcggtttcggtgtttggcgtcttcacgccatccgggttctcggtgctctgctctgaaggatgg

SEQ ID NO: 535825 - DNA, 201 bp, Homo sapiens
gtggtaagctgccagcctcttctgaaacgggtccgagaaagggcattaattatattaactgtaagaacacccagcacccaggagggttaacttactcccckctcctttcctgggctgggttatgcagtgagtggaactgcacccatccccagggggttcaggatctgtgtggctgatgtggctgtcccccaagcgtgcacg

SEQ ID NO: 535826 - DNA, 201 bp, Homo sapiens
gtgctgctcgctgattctcgctcggacactggggctggtcctgtctgcacccaaatccccctcccacgaccgcgccggtggagatgatacccgagacaacrgaattctggacagatctggggttggaattgggtccccagactccaactctgcagctccataaatcccgctgggtcctcgcaaattccctggctgataaca

SEQ ID NO: 535827 - DNA, 201 bp, Homo sapiens
cttgggttgctggggggtgtattgtatatgagtaacagggttcttataaggacggagtcggataatcatgcaacagagcacttggtgctattcctggcacrcaatgaccatattgttgttgttgttgttgttgttgttgttgttattgttagagctgtgtgtgggggacccaagtcctgagctcggaggcattttctggcc

SEQ ID NO: 535828 - DNA, 201 bp, Homo sapiens
agcgagactccatctcaaaaaaaaaaaaacaaagaaagaaatggggggtggagggagggagggagagagagagagagagaaagaaggaaggaaggaaggaaaggaaaggaagaaagaaagaaaaaaaattgtgcaaataacttagtatgtagaggaatccagggtgtcaaaagcctatgcgtgtcccctggggcccagacc

SEQ ID NO: 535829 - DNA, 201 bp, Homo sapiens
ctcacaagtagctgggactacagtcatgtgccaccacacccagctaattttttgtatttttattagagatggggtttcgctggtctcaaactcctgacctyaaatgatcctcccgccttggcctcccaaagtgttcgtgttacaggcatgagccacacccagcctcccaattttttttttttttttttttttgagacagag

SEQ ID NO: 535830 - DNA, 201 bp, Homo sapiens
gagcgagactccatctcaaaaaaaaaaaaacaaagaaagaaatggggggtggagggagggagggagagagagagagagagaaagaaggaaggaaggaaggaaaggaaaggaagaaagaaagaaaaaaaattgtgcaaataacttagtatgtagaggaatccagggtgtcaaaagcctatgcgtgtcccctggggcccagac

SEQ ID NO: 535831 - DNA, 201 bp, Homo sapiens
agagcgagactccatctcaaaaaaaaaaaaacaaagaaagaaatggggggtggagggagggagggagagagagagagagagaaagaaggaaggaaggaaggaaaggaaaggaagaaagaaagaaaaaaaattgtgcaaataacttagtatgtagaggaatccagggtgtcaaaagcctatgcgtgtcccctggggcccaga

SEQ ID NO: 535832 - DNA, 201 bp, Homo sapiens
cagagcgagactccatctcaaaaaaaaaaaaacaaagaaagaaatggggggtggagggagggagggagagagagagagagagaaagaaggaaggaaggaaggaaaggaaaggaagaaagaaagaaaaaaaattgtgcaaataacttagtatgtagaggaatccagggtgtcaaaagcctatgcgtgtcccctggggcccag

SEQ ID NO: 535833 - DNA, 201 bp, Homo sapiens
tttttttggtagagtcttgctcgttgggtcgggcaggagtgcagtggctggcacgatcttggcccactgcaatctccatctcccaggttcaagtgattctyaggcctcagcctcctgagtagctgggattacaggcatgtgtcatgacgcccagataagtttctttgtttgtttttcccagactgagtttcactctaatgc

SEQ ID NO: 535834 - DNA, 201 bp, Homo sapiens
tagtagagacggggtttctccatgttggccaggctggtcttaaactcctgacctccagtgttccgcccgcctcggcctcccaaagtgctaggattacaggygtgagccaccgcacctggccgcagctgtgttctttaacctctctgagtaggcctctgtgtttggggacggtcccagctgcaggtctgtgctctccttggg

SEQ ID NO: 535835 - DNA, 201 bp, Homo sapiens
tatcaggtcatcatcatcgaacccttttttgactgctacgagcccatgacaatgatggcagggggtcgtcctgtgtttgtgtccctgaagccggtaaggaygctaggtagaggatggatgggcagagggatccaaggcgtgggctgagttggaccctgggagttggaaaaggaggaaagaagtgaaggaagccagttcctc

SEQ ID NO: 535836 - DNA, 201 bp, Homo sapiens
aatcacttgaacccaggaggcggaggttgcagggagccgcgattgtgccactgcactccagcctgggtgacatgagtgagaccctgtctcaaaataaatamataaataaataaataaataaataaataaataaaagcctctcccgcaaagctgctgggaggatcaagtgggcacaaacatgcttcttaaacttacagatgt

SEQ ID NO: 535837 - DNA, 201 bp, Homo sapiens
acaggcgtgagccaccgcacccgaccgcactcgttctttttaatggctgcatactgttctgttgcctggatgtgccataatttatttaagcagttctgcastgatggactgcttctgctatctcaatatcataagcaatgccacagcaaatatccctgtgtggacatctttgtatacatatgtatttctctaagataaatt

SEQ ID NO: 535838 - DNA, 201 bp, Homo sapiens
gccaaggggggcggtggatcacctgaggtcaggagttcgagaccagcctggccaacatagcaaaaccccatctgtactaaaaatacaaaaattagctgggygtggtggcgggtgcctgtaatcccagctactcaggaggctgaggcatgagaatcgcttgacctcgggaggcggaggttgcagtgagttgagattgcacca

SEQ ID NO: 535839 - DNA, 201 bp, Homo sapiens
aatggtgcgatctcggctcacttcaacctccggttcccgggttcaagtgattcttctgcctcagccttccaagtagctgggattacaggcccctgccaccrtgcctgactaacttttgtatttttagtgaagacagagtttcaccatgttggccaggctggtctcaaactcctgacctcaggtgatccgcccacctcggcc

SEQ ID NO: 535840 - DNA, 201 bp, Homo sapiens
atgcaaaggtgatttcttggccggtagtggtggctcacgcctgtactgctagcactttgggaggccaaggggggcggtggatcacctgaggtcaggagttsgagaccagcctggccaacatagcaaaaccccatctgtactaaaaatacaaaaattagctgggcgtggtggcgggtgcctgtaatcccagctactcaggag

SEQ ID NO: 535841 - DNA, 201 bp, Homo sapiens
caccatgcctgactaacttttgtatttttagtgaagacagagtttcaccatgttggccaggctggtctcaaactcctgacctcaggtgatccgcccacctyggcctcccaaagtgctgggattacaggcgtgagccaccacacctggccggttgtccagtttttctaaacaggccgaagtccaggtcaccatggagggctg

SEQ ID NO: 535842 - DNA, 201 bp, Homo sapiens
gggcagaggggaggtgtgtgtgttgggatcccaggggagagaaggtggggatagatgctggggaagacctgcatgtcaggtggttaagtggtaccaccccrtgccacctgctcttgcagggtcccatccagaatggagaactgggttccagcagcaactggcagctggaccccatggagctggccggcaaattcacatcac

SEQ ID NO: 535843 - DNA, 201 bp, Homo sapiens
atgaagcttccattccatgtttgtgctccacagggttgatgatgcaaaggtgatttcttggccggtagtggtggctcacgcctgtactgctagcactttgrgaggccaaggggggcggtggatcacctgaggtcaggagttcgagaccagcctggccaacatagcaaaaccccatctgtactaaaaatacaaaaattagct

SEQ ID NO: 535844 - DNA, 201 bp, Homo sapiens
gctcgccatggccaaacagctgcaggcccgaaggctagacgggatcgactacaacccctggtgagccagctgggctggggaggtgtgtgggtgtcccctcrggcatgggttggccatccctgggtttacagcaactcagtagtactccagatggtggcggtacacagactgccagattccagccatagctcaggagagaca

SEQ ID NO: 535845 - DNA, 201 bp, Homo sapiens
gtggtgcaatctctgctcactgcaacctctgcctcccaggttgaagcgattctcctgcctcagccttccgtgtagctgggattacaggtgtgcatcaccaygcccggctaattttttgtatttgtatttaattttttttttctttttgagatggagtctcgctctgtggagtgcagtgccgctcactgcaacctctatctc

SEQ ID NO: 535846 - DNA, 201 bp, Homo sapiens
tacgacgggcaccagcacatcagcattggtgagccaagccagcctggggcccctcccctgcacattggtgggagggccttgaccccacctgagagtcagcrcaggcctggtagttagaacccagggttatggagccctgcagatcctgtgacctttgcctcccagagtacacagtgtcacagtagcacctgcctccctggt

SEQ ID NO: 535847 - DNA, 201 bp, Homo sapiens
ttataaggacggagtcggataatcatgcaacagagcacttggtgctattcctggcacgcaatgaccatattgttgttgttgttgttgttgttgttgttgtkattgttagagctgtgtgtgggggacccaagtcctgagctcggaggcattttctggccagggctgtttcctcccttctcccctgcctctggaaaagtctgc

SEQ ID NO: 535848 - DNA, 201 bp, Homo sapiens
tggtgagccagctgggctggggaggtgtgtgggtgtcccctcgggcatgggttggccatccctgggtttacagcaactcagtagtactccagatggtggcrgtacacagactgccagattccagccatagctcaggagagacagggcccgagggagtaggcttggttcaaatctcagctttcttctgcatgactgtgccac

SEQ ID NO: 535849 - DNA, 201 bp, Homo sapiens
attgttgttgttgttgttgttgttgttgttgttattgttagagctgtgtgtgggggacccaagtcctgagctcggaggcattttctggccagggctgtttyctcccttctcccctgcctctggaaaagtctgcagtgccccaaggctctgggaggcatgttcaggactgcagcagccatctctgtgcacctggtggggccc

SEQ ID NO: 535850 - DNA, 201 bp, Homo sapiens
gcgttggggaggaaaaagtaaaatgctgtccaaagccattctacccaggcaccaagctaaggcctttccagggatgactctttctcacttggtatagagtyagataaactaagataagtaaaataagcaagtaagatacagtcagctcttcaccagacatttgcagaggttgatattgttttcttttttgacttgttttat

SEQ ID NO: 535851 - DNA, 201 bp, Homo sapiens
gagtcagactttaacctggccaagtcagggctctgtctcaggacgcatggagccagggctggaagtctccactgggcaggcgccaggcagcccctgcaggytggggaggtggaggctgctggagtcaagaggaaccaggtgagggtgttggagcataacaggcttgggaggcaggcagaaacctgcccttctgcaaactct

SEQ ID NO: 535852 - DNA, 201 bp, Homo sapiens
ctgggccagcagatagttggtcttcatagaacaggcagagggcacagagtgcctcccatgaccagccctgggcttgggcctgcccttgggccgctcatccstttagctgagttacctgagctaaagcaccagactccctcccttgaggtgacaccaaggaatgtccctcctgggatggcagtaacactaccctttgttgct

SEQ ID NO: 535853 - DNA, 201 bp, Homo sapiens
taagatttgtgaggccatcagcagctttcaccattgcctcagtttctggcaccagattgaactgggcttttgatgcctcaaaaatttgttattttaatttwaaaatatctaaagtaaggttatcttctcttccttgtagatggcgtctaaccatgtcccagtgatgttcagattcattataggctcgaggtgtaatacaaa

SEQ ID NO: 535854 - DNA, 201 bp, Homo sapiens
gggaggtggaggctgctggagtcaagaggaaccaggtgagggtgttggagcataacaggcttgggaggcaggcagaaacctgcccttctgcaaactctatmtcttccccctcctgggagcagacaggatggcgctgtggcctgaaagcagctgtccctcctgtgtgcaagctcggactgctgcacccagacagattccatc

SEQ ID NO: 535855 - DNA, 201 bp, Homo sapiens
gctgaggcacaagaatcggcagaggctgcagtgaatcaagatcgtgccattgcactgcagcctgggcaacagagtgagactctgactcaaaaaaaaaaaaattagtgggccatagatgtttgggtttattactgggctctcaattttattccatgggtctatgtctgtctttatggtaataccacactattctaattataa

SEQ ID NO: 535856 - DNA, 201 bp, Homo sapiens
tgagtttcctcactttttattgattattatttttattatctcagcaagaggaatgcagtaggagagcagggtgataataaggagaagttcagcaaaaaacrtgagcaaaagaatctgtcataattaagttcaaggggaggtactatgcctgcatgtgcatgtaggccggatttatgtttctctccacccaaacatctcagt

SEQ ID NO: 535857 - DNA, 201 bp, Homo sapiens
ggactttaggaggccaagaccagaggatcacttgagcccaggagttcaagaccagcctgggtaacatagggagaccctgtctctatttttttttttttttwaaagcaaagaatttgagctgggggttggggcatgcacttatagtcccagatactcaggcggctgaggcaggaggatcacttgagctcaggagttcaaggc

SEQ ID NO: 535858 - DNA, 201 bp, Homo sapiens
gggagaatcacttgaacccgggaggcagaggttgcagtgagccgagatcgtgccattacactccagcctgggtgaaagagtgagactccatctcaaaaaaataaaaataaaaataaattagctgggcgtggtggcgtgcacctgtaatcccggctacttgggaggctgaggcaggagaatcacttgaacccggcaggtggg

SEQ ID NO: 535859 - DNA, 201 bp, Homo sapiens
tcctccgccccggaagtgacgtcaccgccgggcgcgaacgcggcggccagggcgtcgccatctttatgaggagaattctagcggcgctttctcccgctctmgcctccgcgctagcgccctgctgcttcggggcggaagtagcggagccgggctcggcccccttaaagggacagggactgctgcaacctacggggtgtactt

SEQ ID NO: 535860 - DNA, 201 bp, Homo sapiens
agttagaacccagggttatggagccctgcagatcctgtgacctttgcctcccagagtacacagtgtcacagtagcacctgcctccctggttgtcgaaaggwtgaggtcaaagaaatcctatgccgagcatggtgggtcacacctgtaatcccagcactttgggaggctgaggctggcagatcacttgaggtcaggagtttg

SEQ ID NO: 535861 - DNA, 201 bp, Homo sapiens
aagttagggcaaagtggctggggcaaagttacaaattaacaacatctcagcaaagcaattgttcaaggtacaggtcaaaatggaatttcttatgtcttccmtttctacatagacacagtaacagtctgatctctctttcttttccctacactgaagaaggaggatcgcttgaagtcaggggttcaagaacagcctgggctg

SEQ ID NO: 535862 - DNA, 201 bp, Homo sapiens
ggtgggtcacacctgtaatcccagcactttgggaggctgaggctggcagatcacttgaggtcaggagtttgagaccagcctggccaacatggtgaaacccygtctgtactaaaagtacaaaaattagctgggcatggtggcacgtgcctgtagtcccagctactcaggaagctgaggtaggaggatcactggaacctggga

SEQ ID NO: 535863 - DNA, 201 bp, Homo sapiens
gctttaactccccctcttcttaagagaattttaatgaagctgagataagaggcatatttactttcagtttgccccattgttaccctggattcctccgagcrcacaagcatactgcaaggctgaccgtggacgtactcgggaatctctcatcagctgtcctcaatactcacgttctcagcataacttcaccctggagaaagg

SEQ ID NO: 535864 - DNA, 201 bp, Homo sapiens
aggtataacctcaccttccctggctcatcttggccttggggagttgcctttaggcttgagtcctcaagcctctccttttcgtccataataaaatgtttaarttattaagatccttattgacggcttctctctgcttcacactcatgctgatggctgatctaacttgtgaagaatgcccagaagaacctcagacacccccac

SEQ ID NO: 535865 - DNA, 201 bp, Homo sapiens
tctggtaattttaggtaaaatccaagtaatcaattttaagaactggaagatttttgtttttgggtaatgattgtcaataattcccacaaaatcagcaagascaatctggcatgcagcagaattgataaaagcttgtctaacctgttccttgtttaaaggaacaatgattttatctgggtcacttccacacaattttactat

SEQ ID NO: 535866 - DNA, 201 bp, Homo sapiens
ctgggcccaggtcggcggcttcgcttttttggtggatggcaactttttctgtaagttgtaggtacccaaactggaagctgattttctcctggtgaaacacragcaaaacctctcccccacgttatcaccttctctattttttatgttttatttttgttgtctttttaccaaatcagtttttcctcatgtgggctgttcttt

SEQ ID NO: 535867 - DNA, 201 bp, Homo sapiens
tccacttaccatatgataagtaaatttattggtggcactgacagtagatacttctaccaaccaattttgggttgtaggcattaagcatcctggtgctttcyccaggcaaataggaggataatgatacccagtggaaatgtttatcatcattccttcttcttcaggttgggcagggccgcggtcatctgtgggtcctggtac

SEQ ID NO: 535868 - DNA, 201 bp, Homo sapiens
aacagtctgatctctctttctttgccgtacatatcccccttttctttttgacaaaaccgccatagtcattatggcctgttttcgctggttgctgtctctcyggagctgctggatacacctgtagaccagcaacagagaacagacatacaaggattaatacaaaatttgcaatagtggaacttccagtggttttaacccaag

SEQ ID NO: 535869 - DNA, 201 bp, Homo sapiens
agacattcagttcccaggggcaggcaggagacagtggccttcctctatttcaacttcaagaggctttcctcttttactaatctacctcagcacagaccctwtacgggtgttgggctgggggacagtcaggtctttctcatcccacaaggccatatttcagattatcacatggggagaaaccttggacaatacgtggctttc

SEQ ID NO: 535870 - DNA, 201 bp, Homo sapiens
tgctttggatgttatgtctagaaccccaaggtcacagagatttattcctatgttttcttctagttttcttgttttagttcatacatttagttttgtttttygtttgtttgtttgttttgagacggagtctcgctgtgtcgcccaggctggagtgcagtggcgtgatctctgctcactgcaagctccgcctcccgggttcac

SEQ ID NO: 535871 - DNA, 201 bp, Homo sapiens
agttcctctaagctgggagggcagaggggaggtgtgtgtgttgggatcccaggggagagaaggtggggatagatgctggggaagacctgcatgtcaggtgkttaagtggtaccaccccgtgccacctgctcttgcagggtcccatccagaatggagaactgggttccagcagcaactggcagctggaccccatggagctgg

SEQ ID NO: 535872 - DNA, 201 bp, Homo sapiens
ggactacaggtgcccaccaccacacctggctaatttctgtatttttagtagagacagggtttcgccgtgttagccaggatggtctcgatctcctgacctcrtgatccgcctgccttggcctcccaaaatgctgggattacaggcgtgagtcaccgtgcctggccaagggtaactatttttaagtatgccagagcattcctc

SEQ ID NO: 535873 - DNA, 201 bp, Homo sapiens
ccgcagcagtagctgtgactgcaataagacccataatcactgcaattaaagtaaaaaatgaatcttttggatctagttagaactccttttaatacttctgktaaaatatggatggatggggaagcctcccacggtcggtccatggacacagggatccacacaccctctcttgccctcactggcagaatatggtgctgccaa

SEQ ID NO: 535874 - DNA, 201 bp, Homo sapiens
tggttgtagccccaatggccccaatgattctggactttttccttttaattttaatgtttcaggatatattacctcctgtaattgattgtagtcaacacttkgcgttgactgagccattaccggctctgctacatatttacaatgtgaactttccgttcctttcttgaactctgtctctgcctcttcttcacaatctatcac

SEQ ID NO: 535875 - DNA, 201 bp, Homo sapiens
agtagagacagggtttcaccatcttggccaggctggtcttgagctcctaacctcatgatcagcctgcctcggcctcccaaagtgctgggattacaggcatragctgccacgcctggccccaaattcattcatttacatgtggatatttagttgtctcagcaccatttgttcatttgttgaaaagattattatttcccaccc

SEQ ID NO: 535876 - DNA, 201 bp, Homo sapiens
ggcatgtgccaccatgccctgctaattttgtatttttcgtagaaatggggtttcaccatgttgaccaggctggtatcgaactcctgacctcaggtgatccrtccacctcagcctcccaaattgctggaattacaggcatgagccaccatgcctggcctccccacctttttttttgagacagtctcattttgtcgcttaggc

SEQ ID NO: 535877 - DNA, 201 bp, Homo sapiens
aaggctgttgtaacaaactagccacacttcattgtattgcgtttggcagatatcacggtctttgcaaattgaagctttgtgagaaccttgcaccaagcaartctattgttcccattgttccaacagaatgtgttcccttagggtctgtgtgtaattcccacaatagttcaaactttatcattattattatgtctgacacgg

SEQ ID NO: 535878 - DNA, 201 bp, Homo sapiens
acttcagcctgggcgacagagcacgactttgtcccccaaaaaataagtaaataaataataaaagtgatgggacctgatttcaagtagtcaaaatcgcagasacagcaaatgggctgggctatgggccagagggtaaagggatgtaattgtttaatgggtacagagttgtcagttttacaagatgaaaacagttcccaaaac

SEQ ID NO: 535879 - DNA, 201 bp, Homo sapiens
tttcagcatcctttcaaggttattgacttttttttttttttgagacagagtctcgctctgtcacccagactggagtgcagtggcacgatctcagttcaccrcaacctccgcctcctgggctcaagcgattctcctgcctcagcctcccaagcagctgggattacaggcgcacatcacggctaatattttttatatttttag

SEQ ID NO: 535880 - DNA, 201 bp, Homo sapiens
ggggccaccctgggaaggcatggtcacctcgcctgcccttgtaagcagccatgcaaggtgaagttggacaagacatggctcctgtccccaaggggctggtsgtctcctgtcagccctagcacccgcctgagaggagatttcacgggacagaatttggactttggaaataggcaaaccagggtttgaatcacagctggagct

SEQ ID NO: 535881 - DNA, 201 bp, Homo sapiens
ttttaagacaaggtctcactctgtctcccaagctggagtacagtggcacaatcttggctcactgcagcctcaaccttctgggctcaagcaatcctcccacytcagcttcccgagtagctgggactacagacacgtaccaccgtggccagctaattttttgcattttttgtagagatgggatttcaccatgttgcccaggct

SEQ ID NO: 535882 - DNA, 201 bp, Homo sapiens
gccaccatgcccggctaattttttttgtattttcagtagggacggggtttcatcatgttgaccaggctggtttcaaactcctgacctcaagtgatctgccygcctcggcctcccaaagttctaggattacaggcctgagccaccacgtctggccaacatggtctttttttttcttttgagacggagtctcgctctgtcacc

SEQ ID NO: 535883 - DNA, 201 bp, Homo sapiens
ggtggagcttccagttagctgagatcacgccactgcactccagcctgggcgacagagccagactctgtctcaaaaacagaaaaaaaaaaaaaaaaaaagamcaaaggatgactgggtgtggtgtctcatgcctataatccaagctgtaatcccaggactttaggaggccaagaccagaggatcacttgagcccaggagttc

SEQ ID NO: 535884 - DNA, 201 bp, Homo sapiens
ggagctgggactatttgatccaagtccaaggtttggtcttctgtggttattcatgcactagactggtcttcctgggcatggtatccccagttctgtacccyttctctagaggtgccacgatgtgtgttgtctcagtaactgggagtctcctggcattttaagcccagggatgctaaacatccttcaaggctccagatagct

SEQ ID NO: 535885 - DNA, 201 bp, Homo sapiens
tatctgttgtgtgttcctttaatgtatgggagtgagattgtggtttttgaatctgggtcctgtgccaggaggaataagtggtgagatacctactgtttgtstcactcaggtcttccaccaacccctccagcctgtaaacctgccgtctggactccagaagtcatttctctctcctctgccaattcctaagcccagggggac

SEQ ID NO: 535886 - DNA, 201 bp, Homo sapiens
atgattgagccgcccgcgggaatcaactgcgcgtgctgctcgctgattctcgctcggacactggggctggtcctgtctgcacccaaatccccctcccacgmccgcgccggtggagatgatacccgagacaacagaattctggacagatctggggttggaattgggtccccagactccaactctgcagctccataaatcccg

SEQ ID NO: 535887 - DNA, 201 bp, Homo sapiens
caggacagttgctgattgtctagtttttgtttttcttgtgtgtgtatgtgtgtgttttttgttttttgtttttgtttttttaagacagaatctcactcttrttatccaggctgcagtgcaatggtgcgatctcggctcacttcaacctccggttcccgggttcaagtgattcttctgcctcagccttccaagtagctggga

SEQ ID NO: 535888 - DNA, 201 bp, Homo sapiens
ttgtttttcttgtgtgtgtatgtgtgtgttttttgttttttgtttttgtttttttaagacagaatctcactcttgttatccaggctgcagtgcaatggtgygatctcggctcacttcaacctccggttcccgggttcaagtgattcttctgcctcagccttccaagtagctgggattacaggcccctgccaccatgcctga

SEQ ID NO: 535889 - DNA, 201 bp, Homo sapiens
gtgttatttaacatgttcttctgtccctgtattttagtcattcaacagtgtgatctaatttagggccacttttacagcaggaataatttgcaggtggtgtrtgtgtttccagagtcagaacatgtttggtttatgctcttggtgatattcagggctatcagtgatcctctcctggatcattttttaattagaggtgatttg

SEQ ID NO: 535890 - DNA, 201 bp, Homo sapiens
agatggaagtagaaaggctggctggctgtgccttgtactagctgggaggctttaggcaagtcactccactccttatccccacagtggtccaggaacaagaygtgcctcacaggccattgtgaaggctatatgagcagagcgtttaactgtggtgttgacgaatccaaggaggagtcatgcaatctgtacagggggtctcaa

SEQ ID NO: 535891 - DNA, 201 bp, Homo sapiens
gtctcactctgtcacccaggctggagtgcagtagcatgatcttggctcagtgcaacctccgaggagagctgtccctttgcagagaatggtgatctcacacrtataaaagggctgtatgttcccaaagattatttccaagttgattatttggaatgtgggacacattttcccataaaagcaatgtggttgggttactagtct

SEQ ID NO: 535892 - DNA, 201 bp, Homo sapiens
aagatccacttcctggcagggactcttttctcaggactgaatggctgcagatagcctccgcgttgtattttccaccggccctggtgctgggctatttctamaagccaacctggaaggagcaccttctaactgatctttgggttggatagacagccacccgatttcttcattgagtaacattttatgtgccaatgctgcccg

SEQ ID NO: 535893 - DNA, 201 bp, Homo sapiens
aaaatgagggacccttttgatttggtgaccagtgtcatccactgttattatcgagctgtgtgcaaaggggcccgttagggagcagccgccaagtgctgggyggtgggcctgcttcctgtggggctcagagaggcctgctctggtgactccccaactcttgaagctagttttcaggatgggcgtaggtgatcatctctattt

SEQ ID NO: 535894 - DNA, 201 bp, Homo sapiens
tttacctggactactgtcaacgctggttgtttttctcctccagggcatgaggcagccttcgctgctttcctctgctgtctctgcaagattggggtgctccrggtggatgaccaaatagctattgtcttcaaggtgttcaatcggtgagagaaaggacaggagggttggaggagggggcgtgaggggccatctgtttcctcc

SEQ ID NO: 535895 - DNA, 201 bp, Homo sapiens
gtacatacatagctcttggctgagtctttgcacatggcaggcctggtctgccttgccctcccaggcgcaacttctcatgtgggcatcaccctgctagttcytacccagtgccaggatttcctgtaagtttcttatgccgtttgtttccatagacacaggcaagatccacttcctggcagggactcttttctcaggactgaa

SEQ ID NO: 535896 - DNA, 201 bp, Homo sapiens
aaataaattagtccatcaatatcatggagtactgtgcagctataaaaaggaattttttttattttttattttatctttttttttttttagacggagtctckctgtgttgcccaggctggagtgcagtggcgcagtcttggctcactgcaagctccacctcctgggttcacgccattctcctgcctcagccttccgagtagc

SEQ ID NO: 535897 - DNA, 201 bp, Homo sapiens
gggttttatgttgaaaatgagggacccttttgatttggtgaccagtgtcatccactgttattatcgagctgtgtgcaaaggggcccgttagggagcagccrccaagtgctgggtggtgggcctgcttcctgtggggctcagagaggcctgctctggtgactccccaactcttgaagctagttttcaggatgggcgtaggtg

SEQ ID NO: 535898 - DNA, 201 bp, Homo sapiens
tccacctcaggttcccaacttccctctctgggccaagtgatggcacctggctgcctctcttctcggtttctaccttgtaggtttgggctgccttttctctmtttctctctctcgtgggtctcgttgtggagtgggtgtctttggatagaaggagtgaggaactgggggaggaaggcctgggggatcccctggcggggctac

SEQ ID NO: 535899 - DNA, 201 bp, Homo sapiens
gctgctgcagcagcctttccaaaaatagctccagagtcactgggtgcggtggctcacctctgtaatctcagcaccttgggaggccgaggcaggcggctcaygaggtcaggagatcgagaccatcctggccaacatgtgaaaccccatctctagtaaaaatacaaaaaattagccgggtgtggtgacgggcgcctgtagtcc

SEQ ID NO: 535900 - DNA, 201 bp, Homo sapiens
ctcccagtggccgaaagggtgagactgtctttttactttttgctaccttccctttccctgtcctcctgtgcaggtaccttgaggttatgcggaaactccaraaaacatacaggatggagccagccggcagccagggagtgtggggtctggatgacttccagtttctgcccttcatctggggcagttcgcagctgataggta

SEQ ID NO: 535901 - DNA, 201 bp, Homo sapiens
actagatgttggcagcatgcctttccccagctgtcacaactaacattgtctccagatcttgtcagatcttctctgagccagattgctctagttgagaaccwgcttctttgtctgaatccaaatgtgacacttcctttgctgcttctcatccatgtgttccagtgtagctgcagtcaggacaggggctcagacttgccctgg

SEQ ID NO: 535902 - DNA, 201 bp, Homo sapiens
ccaccaccacgcccggctaattttttgtatttttcgtagagacggggtttcaccgtgttagccaggatggtcttgatctcctgaccttgtgatccgcccayctcggcctcccaaagtgctgggattacaggtgtgagccaccacgctcggccccaaaaaggaatttttttcatagctgggcacggtggctcatacatgtaa

SEQ ID NO: 535903 - DNA, 201 bp, Homo sapiens
ggggtgctccgggtggatgaccaaatagctattgtcttcaaggtgttcaatcggtgagagaaaggacaggagggttggaggagggggcgtgaggggccatytgtttcctcctcaaactgggaaatggggtgctctagggttctcctgagtagctcatggttctcttgtcctgtcctaatcaagctctggctgtggatggag

SEQ ID NO: 535904 - DNA, 201 bp, Homo sapiens
gtggcaggcccaaggtcgggaggacttgggggcagcctggctcactgccttgaaagccagtcacgcgctgctctctgtggagtggaatgtgggggtctgcrgagccctgggggacctcaggataagctggaggagcagggtgggaagaagggtgcagatgccacactgagttcttgggtgtggctgaaaggctgagctgtt

SEQ ID NO: 535905 - DNA, 201 bp, Homo sapiens
tctagtaaaaatacaaaaaattagccgggtgtggtgacgggcgcctgtagtcccagctactcaggaggctgaggcaggagaatggtgtgaacccaggaggyagagcttgcagtgagctgagatcgcgccactgcactccagcctgggcgacagagcgagactctgtctcaaaaaaaaaaaatagctccagagtcttgtggg

SEQ ID NO: 535906 - DNA, 201 bp, Homo sapiens
attttcacatagagcagaggggaggactcaggacccagtgaagtgctgttcccaagagacgcccgggcctgcctctggactcttaagatggtacatgatctttttttttttttttttcctgttgttcaggctggagtgcagtggcatgatctcagctccctgcagccttgacctcctgggctcaagcaatcgtcctgcctc

SEQ ID NO: 535907 - DNA, 201 bp, Homo sapiens
aacatacaggatggagccagccggcagccagggagtgtggggtctggatgacttccagtttctgcccttcatctggggcagttcgcagctgataggtactrgagcgggaggtgcctatccctccacccccaaccaaggctgcgttctgtggccctcccctgcccctcctgcgctccctccttcccttcttcctgcccaggg

SEQ ID NO: 535908 - DNA, 201 bp, Homo sapiens
cagacatgggcaaatggaagcgttctcaggtaccatttggaactgtggtgagaaacttgggcttttcaaagacagtggttttcctagcatgacgggcggtragttcctggcccttcttgctcttggagcctgacttttcagaagctagggagaaaggtgacaggggagctggctgtctcttcccttcagaggcagtactca

SEQ ID NO: 535909 - DNA, 201 bp, Homo sapiens
gagtgcagtggcatgatcttggctcactgcaacctccacctcctgggttcaagcgattattctgctgggactataggcacacaccaccatacctggctaatttaatgtttttggtagagacagggtttcaccatgttggccaggctggtctcgaactcctgacctctggtgaggtcacttctccacccaccttggcctccc

SEQ ID NO: 535910 - DNA, 201 bp, Homo sapiens
ttcgtcctccagagacaggacagaagtattctctgacacattctcttctcacctccctccagataggttttgtgtgacattgtgaacaatgggattcaatsacagtccagtgagttgttcctacagtgcagaccattcctgtttgatatgactgggaaaggaaggaggatactttttcaccctgtaatctgatcatgtgtt

SEQ ID NO: 535911 - DNA, 201 bp, Homo sapiens
ctctgttgcctgggttggagtgcagtggtgcaatctcggctcaccacaagctccgcctcccaggttcacgccattcttctgcctcagcctcccaagtagcygggaccgcaggcgcccgccaccacgcctggctaatttttttgtacttttttagtagagatgggatttcaccatgttagccaggatggtctcgatctcctt

SEQ ID NO: 535912 - DNA, 201 bp, Homo sapiens
ggtctcgaactcctgacctctggtgaggtcacttctccacccaccttggcctcccaaagtgctgggactgggattacaggcgtgagccactgcgcccagcygattgttttgtattttttgtagagatggggttttgccatgttgcctgggctggtcttgaactcctgagctcaagctgttctcccacctcagcctcccaaa

SEQ ID NO: 535913 - DNA, 201 bp, Homo sapiens
ttaaacctacgtaatgaaatgtaaatgtccagcccgggtcttttacgagtggaattatagtactggtagttcttttttttttttttttttttttttttttkgagacagtctcactttgtcacccaggctggagtgcagtggccttatcatggctcactgcagcctcaacctcctgggctcaggagatcctccatctcagcc

SEQ ID NO: 535914 - DNA, 201 bp, Homo sapiens
aatgggcccagtgggggctgggcaggcccattgagggccaccgccgaggtttctcctagggctgttcctgggcctggctcttacaggctcgtcccccaggsctgcccttctccactgccccctcctgtgtctgggtccacacacccttcaggaagggggagcactgagaagcacagcacaggggctcagcctgggatccgg

SEQ ID NO: 535915 - DNA, 201 bp, Homo sapiens
gcagtggcatgatcttggctcactgcaacctccacctcctgggttcaagcgattattctgctgggactataggcacacaccaccatacctggctaatttartgtttttggtagagacagggtttcaccatgttggccaggctggtctcgaactcctgacctctggtgaggtcacttctccacccaccttggcctcccaaag

SEQ ID NO: 535916 - DNA, 201 bp, Homo sapiens
agaggctgaggccctgcccagggttttacaagttgtcaggagttgatggcaccaaaacccaccttcctaatcagtgattttttatttatttatttgtttattttttttgagacagggtcttgctctgtcgcccaggctggagtgcagtggagagatctcggctcactgcaagctctgcctcctgggttcatgccattctcc

SEQ ID NO: 535917 - DNA, 201 bp, Homo sapiens
ctgggattacaggcatgagccaccgtgcctggcctatgttttaagaaagtttacaaatttgtgtccggctacattcaaagctgtcctgggctgtgggttgracaagctagccttagaagttctggtgatgactccgggcacagtggctcacacctgtaatcccagcactttgggaggccgacacaggcggatcacttgagg

SEQ ID NO: 535918 - DNA, 201 bp, Homo sapiens
ggcccagtgggggctgggcaggcccattgagggccaccgccgaggtttctcctagggctgttcctgggcctggctcttacaggctcgtcccccaggcctgsccttctccactgccccctcctgtgtctgggtccacacacccttcaggaagggggagcactgagaagcacagcacaggggctcagcctgggatccggtgat

SEQ ID NO: 535919 - DNA, 201 bp, Homo sapiens
cgtttctgcttctcctgctattgggttgggagtcagggtcaggagaagtagaaagctcggagctctttggtaacctggtggagctcggggcaggtggggcrggggggtctgccacccctctccccatccccattctcctctctgtttggtaggcatacgctgactacatcggattcatccttaccctcaacgaaggtgtga

SEQ ID NO: 535920 - DNA, 201 bp, Homo sapiens
agtgggggctgggcaggcccattgagggccaccgccgaggtttctcctagggctgttcctgggcctggctcttacaggctcgtcccccaggcctgcccttytccactgccccctcctgtgtctgggtccacacacccttcaggaagggggagcactgagaagcacagcacaggggctcagcctgggatccggtgatggtct

SEQ ID NO: 535921 - DNA, 201 bp, Homo sapiens
cctccaagtaaaagcaagtgaaagaattgtcacataggccgggcgcggtggctcacgcctgtaatcccaggactttgggaggcccaggcaggcggatcacraggtcaggtgttcgacaccagcctggccaacatgatgaaaccccgtctctactaaaaatacaagaattagctgggcgtggtggcactcgcctgtaattcc

SEQ ID NO: 535922 - DNA, 201 bp, Homo sapiens
cctgacctcaggtgctttgtcctcccaaagtgctgggattgcaggcgtgagctgctgcgcccggcccaggtattgtcttagctcaagggctgtactttggmaggattgcagtgtggttacatgcttgggttctggagtccagctggctagtttcataacttgtgaatcatttttgaccctctgtttcctcatctgtagagt

SEQ ID NO: 535923 - DNA, 201 bp, Homo sapiens
tgggggctgggcaggcccattgagggccaccgccgaggtttctcctagggctgttcctgggcctggctcttacaggctcgtcccccaggcctgcccttctycactgccccctcctgtgtctgggtccacacacccttcaggaagggggagcactgagaagcacagcacaggggctcagcctgggatccggtgatggtctgg

SEQ ID NO: 535924 - DNA, 201 bp, Homo sapiens
agggggagcactgagaagcacagcacaggggctcagcctgggatccggtgatggtctgggcagaggctgggtcaggagtcccaaaggtcagtgacagtttytcagaagaggcccagcgtccacctctctcccagggccagacaccccttcctggctcccccatccccctatgggctcccagccccttgcaccctcattgct

SEQ ID NO: 535925 - DNA, 201 bp, Homo sapiens
gcactgagaagcacagcacaggggctcagcctgggatccggtgatggtctgggcagaggctgggtcaggagtcccaaaggtcagtgacagtttctcagaaraggcccagcgtccacctctctcccagggccagacaccccttcctggctcccccatccccctatgggctcccagccccttgcaccctcattgctgttcaga

SEQ ID NO: 535926 - DNA, 201 bp, Homo sapiens
tccggtgatggtctgggcagaggctgggtcaggagtcccaaaggtcagtgacagtttctcagaagaggcccagcgtccacctctctcccagggccagacascccttcctggctcccccatccccctatgggctcccagccccttgcaccctcattgctgttcagattaaagcctctgttttgcacctgtcacttgtgtgag

SEQ ID NO: 535927 - DNA, 201 bp, Homo sapiens
ctgccacagaagtctgaccagcctggcagtaggtggcctcaggatttgggtctaactctgctctgtcccagcctttctgaccgaagaaccaagtgctctcrggggccttgtgtggttgcggggcggcaggggggagggtctgtctttcctctgggccatggctgtgtgggtgctgccttcagaaggaccttgtcaggaccc

SEQ ID NO: 535928 - DNA, 201 bp, Homo sapiens
acatactctgttttctgtggccaaaggtgtgggaggaggccctggtcagtcttggcagatccaaccctcgcatgcccagaacggctcctgtgagagctagygtccaggtgtggcaggcatgggggtgctgttgcgggagctgcagctggaagctggggttggctgcctgtgggccaggccagcttctgtgataggccctgt

SEQ ID NO: 535929 - DNA, 201 bp, Homo sapiens
cactctgctcacctgctccttcctcacagtgcctggagaagttccctgtgatccagcacttcaagttcgggagcctgctgcccatccatcctgtcacgtcsggctaggaggggccaagccgaagagccacccaggccacagttcctgtgcctgccttccccaccccagcagtggcccctccccatcccctccctctgttcg

SEQ ID NO: 535930 - DNA, 201 bp, Homo sapiens
cgggctgcagctcgctcgctcattctggttctttctcttctccctttgtggctagaatgagctaattttttctttgtcttccagccccgattcctttttcycccactcgtctgttttcctttgccagagttacaggcaaaggactgtaacctccctgaaggacttagggagaccctggggtactgaaggcctgggggcagc

SEQ ID NO: 535931 - DNA, 201 bp, Homo sapiens
tcttcattggacccagagcttcctggatcccatcagcagaggcgggacaacggggaagggcgccagaggccagcggggtgggggagcacagatgcttccarttggcttggctccctgcacttggtcctgaaggggttaatgaggcttgaactgaacagaccgggccctcactcccttccgccccctccccctttggtcccc

SEQ ID NO: 535932 - DNA, 201 bp, Homo sapiens
ctgcaaatacctgggagctgggacccagagcactgggcacagactggctttctctgctgctcagctgaaatgatgggcagaagataactacttgtacctcycaggcttgtggtacaggctgtggaaagacagactgagcaaaagaaagccaatttcaatttctcagggaaggcctctggcccagttctcgtcaggctcctg

SEQ ID NO: 535933 - DNA, 201 bp, Homo sapiens
aaaaacatggctgagcacaacccaaacttgacgccccgcacaatcgtggcagtcgcggcgcccgacgttcgggcggccgtgagcggtcctagcgcttggcrgccgttggcgcgcatgcgccccgcgcgccccgcactgacatggccgtcgcccgggtccgcgcgtccgccgcgcgccggccgttaataggcttgctccctg

SEQ ID NO: 535934 - DNA, 201 bp, Homo sapiens
aagtgatcctctcacctctgcatctccccactccccagtacctgggactacaggtgtgcaccaccagcctggcaatttatttatttatttgagacagagtstcactctgttgcccaggctggagtgcagtggcatgatcttggctcactgcaacctccacctcctgggttcaagcgattattctgctgggactataggcac

SEQ ID NO: 535935 - DNA, 201 bp, Homo sapiens
ttcagcctcccaagtagctgggactacaggtatgcaaccacacccagctaatttttaaattttttttgtaaagatggcgttttgccaagttggccagcctsgtcttgaacccctggcctcaagtgatctgcctgccttggcctcccaaattgctgggattaggtatgagccaccacacctagccagatgtttttaatttgc

SEQ ID NO: 535936 - DNA, 201 bp, Homo sapiens
ttgactacggcacaggtatctgctgcttgtggggctctgtacttatctagcttcactgctttctgttttgggcttcaggtggtctctgggccctctgagcragtgagagcaatcaagaattcgccaagcacctgcaacctattggggccagctggggttagggtggcttcaccggcagggagggcgtaggcatgcagggag

SEQ ID NO: 535937 - DNA, 201 bp, Homo sapiens
ctctggcacttgcatgtgcctgtttgtatgtttgcccctcaggcagatgctatagcttggtccccaagtgtctgtgcgtgcattgtgtgtgtgtgcgtttktgtgtgtgtgtgtgtgcatgcatgggtgtgactttgctgcaggggaggagggatgagctcccagccagaacctgtctcttcagcttgtggcttctctttt

SEQ ID NO: 535938 - DNA, 201 bp, Homo sapiens
aagctgacaaatcatagctttacagcttgatggatttttacatgtttttactcatggactcaccactcatgccaagttttttacccatggattcaccactyatgtcaagcaatagaacattctagctggagtgctccccttcccaattgatatcgcccagattattctgatttctattccataaattgatttttttccatg

SEQ ID NO: 535939 - DNA, 201 bp, Homo sapiens
tggtccaaagtgaaccagggtctcatccgcatgtataaggccgaggtgagtgggggctggccagtgtgcccgtccctgctgccgcacttggtcctgggctggggacaaagcaaaagatgtggaacctggggctcctgcttcctcctaccccactgttttgctctgaatcttaggccagcccctctgacacttggggcctcg

SEQ ID NO: 535940 - DNA, 201 bp, Homo sapiens
ttcactatgttggtcaggcgcatctccaactcctgacctcaggtgtgatccacccactttggcctcccaaagtgctgggattgtaggcatgagccaccgcrccccgcctaaaatttttttttttttaaagtagagatggggtctcgctgtgttgcccaggttggtgtcaaactcctggactcaagtgatcctcccacctgg

SEQ ID NO: 535941 - DNA, 201 bp, Homo sapiens
ccagccagaacctgtctcttcagcttgtggcttctctttttcagatgaagactggcccatttgcagagcactccaaccagctgtggaacatcagcgccgtsccttcctggtccaaagtgaaccagggtctcatccgcatgtataaggccgaggtgagtgggggctggccagtgtgcccgtccctgctgccgcacttggtcc

SEQ ID NO: 535942 - DNA, 201 bp, Homo sapiens
gggaaatttatcctcttacaggctactttttctgtcctcccatgccccaagcctagataaaggggagataagagagagcagcactcagggccggtttcacrtatgcagctgggggcatggccagcctgtttcattagcttaagcctgcctctccccaggtacatacatagctcttggctgagtctttgcacatggcaggcc

SEQ ID NO: 535943 - DNA, 201 bp, Homo sapiens
cctgactttaagatcaccaagtcaggccgggcgtggtggctcacgcctgtaatcccagcactttgggaggccgaggtgggcggatcacgaggtcaggagaycgagaccatcctggctaacacagtgaaaccccgtctctactaaaaatataaaaaaattagccgggcgtggtggcgggtgcctgtagtcccagctactcgg

SEQ ID NO: 535944 - DNA, 201 bp, Homo sapiens
accttgttggccaggctggtttcgaactcctgatctcgtgatctgcctgtcttggcctcccaaagtgctgggattacaggtgtgagccaccacgcccagcstatttgggttgtttctaattaataaaaaatttttttatttgagtcagagtttcactcttgttgcctaggctggagtgcgatggcacgatcttggctcact

SEQ ID NO: 535945 - DNA, 201 bp, Homo sapiens
gtgttgggtgtaactgcagcccagcagggaagaagagtgtctagttgaaagctgggaatggttgtgtggggagacctgtctgtggcaggcatctgcactcyaactagacagcctggcccgcctttggtcgctgattgctgggggtgagacacttggtggtactccttgaattcctggtggtagagcatcatggacaagcat

SEQ ID NO: 535946 - DNA, 201 bp, Homo sapiens
ctccaaccagctgtggaacatcagcgccgtcccttcctggtccaaagtgaaccagggtctcatccgcatgtataaggccgaggtgagtgggggctggccartgtgcccgtccctgctgccgcacttggtcctgggctggggacaaagcaaaagatgtggaacctggggctcctgcttcctcctaccccactgttttgctct

SEQ ID NO: 535947 - DNA, 201 bp, Homo sapiens
gcagaggcaggagaatggcgtgagtccgggcggtggagcttgcagtgagctgagatggtgccactgcactccagcctgggcgacagagcgagactctctcaaaaaaaaaaaaaaaaaagatcaccaagtctttgcctgtaatcccagcaatttgggaggctgaggtgggtggatcacttgaggccaggagttcgagaccaa

SEQ ID NO: 535948 - DNA, 201 bp, Homo sapiens
accaccacacctggcaaactttttaattttttgtagagatggggtctcactatgttgcccaggctggtctcaagctcctgggttcaagtgatcctcctgcmtcagcctcccaaagtgctaggattacagacttgagccacaatacctgaccctcagtgctttcttatccctgtgttgggtgtaactgcagcccagcaggga

SEQ ID NO: 535949 - DNA, 201 bp, Homo sapiens
tcctggccggccttctcttctgggaaggggctgctccaggtcttcattggacccagagcttcctggatcccatcagcagaggcgggacaacggggaagggygccagaggccagcggggtgggggagcacagatgcttccagttggcttggctccctgcacttggtcctgaaggggttaatgaggcttgaactgaacagacc

SEQ ID NO: 535950 - DNA, 201 bp, Homo sapiens
tgtccctttgcagagaatggtgatctcacacgtataaaagggctgtatgttcccaaagattatttccaagttgattatttggaatgtgggacacattttcycataaaagcaatgtggttgggttactagtctgacctacaaagctttttatttggcatcttagttgaagtgccaatttactaatagcagttttgggttctg

SEQ ID NO: 535951 - DNA, 201 bp, Homo sapiens
ataagctatgaaaatttttattatgtgggcctatcttttttttctcttttttaaatttgagacggagtcttgctgtgttgcccaggctggagtgcagtggygtgatcttggctcactgcaacctctgcctcctgggttcaagcggttcttctgcctcagcctcccgagtagctgggattacaggtgtgcgccaccatgcct

SEQ ID NO: 535952 - DNA, 201 bp, Homo sapiens
aagatgtgtgcaaagcatgggacatagtaggcgatcagtaaatgctgattgcccttatctttttcaaagtttcaaagttgtacaggttgaacatgtagacragtttcaaatggccaatgataatgctatatattatagtctttgttggggggcttaggaaggaacatttctaaaattctgaatgttgattttatactgtga

SEQ ID NO: 535953 - DNA, 201 bp, Homo sapiens
ctcccagccagaacctgtctcttcagcttgtggcttctctttttcagatgaagactggcccatttgcagagcactccaaccagctgtggaacatcagcgcygtcccttcctggtccaaagtgaaccagggtctcatccgcatgtataaggccgaggtgagtgggggctggccagtgtgcccgtccctgctgccgcacttgg

SEQ ID NO: 535954 - DNA, 201 bp, Homo sapiens
gtgcagtggcgcgacctcggctcactgcaacctctgcctcctgggttcaagcgattctgcctgcctcagcctcctgagtagctgggattacaggcactcgycaccacgcctgactaatttattttttatttgaggcggagtctcgctctgttgcccaggctggagtgcagtggcgcgatctcggctcactgcaagctctgc

SEQ ID NO: 535955 - DNA, 201 bp, Homo sapiens
ctggggcctggtcactcggccactctctcctgtttctggcctcttctcccttcactcccgtccagtctggttttgagagcaggggctgttctgcagcacckcagggaagggaggagagatacctgctgcttccattgcttttcccttcctggagtcgatgcctttctaagggttggagctgctccttgcaggggcgggtca

SEQ ID NO: 535956 - DNA, 201 bp, Homo sapiens
ccttgagggccaaaggggaaccttgtctctggcacttgcatgtgcctgtttgtatgtttgcccctcaggcagatgctatagcttggtccccaagtgtctgygcgtgcattgtgtgtgtgtgcgtttgtgtgtgtgtgtgtgtgcatgcatgggtgtgactttgctgcaggggaggagggatgagctcccagccagaacctg

SEQ ID NO: 535957 - DNA, 201 bp, Homo sapiens
acatctttcagatttcagattagatgttacttccttaggggaaaccttgaacccttacgtcagggtccttctgtgatatcctccagttagtaccctgtctktctccttcagagctggaatcatagtagtgactgtatatttataatgtctgttgtccctgatagatcataaactttctgagggcaaggacttacttgtcac

SEQ ID NO: 535958 - DNA, 201 bp, Homo sapiens
atcagcctagtgtgcttccctctctggaaagcctatcatgctctcctgaccctccttcatattcagaacagtggggaagaaagagggatgggggagagttsccagtaggggccatgccaaggggtcattgtctggcagcagtggacttccctctgtggctaagcgggagccacttgctctgtagcttggacccctctattt

SEQ ID NO: 535959 - DNA, 201 bp, Homo sapiens
cggcgcccgacgttcgggcggccgtgagcggtcctagcgcttggcggccgttggcgcgcatgcgccccgcgcgccccgcactgacatggccgtcgcccggktccgcgcgtccgccgcgcgccggccgttaataggcttgctccctgagcgccccgcaccgacatggcggccgtcttcgctgtggtgactttaactctcggt

SEQ ID NO: 535960 - DNA, 201 bp, Homo sapiens
tctaaatccctaattttaaaaggctggttgtgcaaggaggttagtctctccggcatctccttcggtaactcttatttaccttgtagcctctttttagttcwtcttaaataactgggatggaggtgctacggaaggatcttagagaccctttttgtgcagaaggagaaggctgtttgccgacctaccttgaactaagaagga

SEQ ID NO: 535961 - DNA, 201 bp, Homo sapiens
ggggtttttccatgttggtcaggctggtctcgaactcccgaactcaggtgatctgcccgtcttggcctccgtaagtgctgggattacagacgtgagccacygtgcctggccagctagctcttattttaaatgatgcctgtcctcctcttatgggggttaacattttcgatttttgcaaaataaatgtgataagagatttat

SEQ ID NO: 535962 - DNA, 201 bp, Homo sapiens
ctttttagttcatcttaaataactgggatggaggtgctacggaaggatcttagagaccctttttgtgcagaaggagaaggctgtttgccgacctaccttgractaagaaggactggccatagataacttttacattcccgacagaggcaaataggttggccgaccaaacacagctaatgttttgaaagcatttgatattct

SEQ ID NO: 535963 - DNA, 201 bp, Homo sapiens
caggctttggcactcagaatgggcccagtgggggctgggcaggcccattgagggccaccgccgaggtttctcctagggctgttcctgggcctggctcttamaggctcgtcccccaggcctgcccttctccactgccccctcctgtgtctgggtccacacacccttcaggaagggggagcactgagaagcacagcacagggg

SEQ ID NO: 535964 - DNA, 201 bp, Homo sapiens
gttttgaaagcatttgatattcttgctatcctgtctccaatgttggggtccctgggaaggtctcaggagggagaaatgttgaaaatcagaaaaggcatccyctccatgccccacaaaagaggtgaacaaagagctgggttccgtttcttaggacattcaaaaccagacatttattttgtacaaaacctctgggtgtgtgcc

SEQ ID NO: 535965 - DNA, 201 bp, Homo sapiens
cctttccaaaaatagctccagagtcactgggtgcggtggctcacctctgtaatctcagcaccttgggaggccgaggcaggcggctcacgaggtcaggagaycgagaccatcctggccaacatgtgaaaccccatctctagtaaaaatacaaaaaattagccgggtgtggtgacgggcgcctgtagtcccagctactcagga

SEQ ID NO: 535966 - DNA, 201 bp, Homo sapiens
gactactgtcaacgctggttgtttttctcctccagggcatgaggcagccttcgctgctttcctctgctgtctctgcaagattggggtgctccgggtggatraccaaatagctattgtcttcaaggtgttcaatcggtgagagaaaggacaggagggttggaggagggggcgtgaggggccatctgtttcctcctcaaactg

SEQ ID NO: 535967 - DNA, 201 bp, Homo sapiens
agaactttccctggcagggaggggatggcagaaactcagggaggggcttggggcccattgtatctggagagcctggattcctcttggcagtcttaggcccrgccacttctgctacctttgcgctgctgtgagcctcaccctgggcccctgggccctgcttctctgctcccctgggtgatgggtgggcccagaaggtggcag

SEQ ID NO: 535968 - DNA, 201 bp, Homo sapiens
tctgctcccctgggtgatgggtgggcccagaaggtggcagtcccacaccttgtcctcccacctccctgaactgtccattgcttttatagggtgaggtaagwgacagcctcccaagcccaggctttggcactcagaatgggcccagtgggggctgggcaggcccattgagggccaccgccgaggtttctcctagggctgttc

SEQ ID NO: 535969 - DNA, 201 bp, Homo sapiens
cccctggctcttcagttctctagcccttggctttgctgggtttcctgactgtagccacatctctcccgctccctaagggtaacctagccaatggaagctgscctttgggtaggtgctgggctcctgggagggcccagatgatggggtgaggcatgtctttccagaactttccctggcagggaggggatggcagaaactcag

SEQ ID NO: 535970 - DNA, 201 bp, Homo sapiens
gaccagcctggccaacacggtgaaacactgtgtctactaaaaatacaaaaattagcctggcatcgtggtgcgcacctgtaattccagctactcaggaggcygaggcaggacagtcacttgaatttgggaggtggaggttgcagtgagccgagatcatgccactgcactccagcctgggcaacagcgagactccatctcagg

SEQ ID NO: 535971 - DNA, 201 bp, Homo sapiens
gcagggccggccggagcgggttattgaaaaggaagcaccactgggcctcttccgaaagagccgctgctgactgtcaggtcctccgcccagttctccttcartttctcctgaacaccacaggagtcttgagatgagggtctaagacttggtcactaactggccttggtgactgctgcagcaggtctgaaagggtcggggcgg

SEQ ID NO: 535972 - DNA, 201 bp, Homo sapiens
agcagtgtctaccttatagggctattgtgtaaaaaaactgctggcagcaatagtgagtacttggttcactctggctggagatcagcgtgttgctgtggtcrctgtcttgccagcttttctggagggtaggggtcggtatttggcattacgtttctgcttctcctgctattgggttgggagtcagggtcaggagaagtagaa

SEQ ID NO: 535973 - DNA, 201 bp, Homo sapiens
ttcttgaaaggaaagggcctagcaagtctttctgaatggggaagaggtctcattgtctccatgttgaccaccctcctcagaggggcacttatcaatgattyggattctgggagactaaaacaatcccagtcctttacctggactactgtcaacgctggttgtttttctcctccagggcatgaggcagccttcgctgctttc

SEQ ID NO: 535974 - DNA, 201 bp, Homo sapiens
cttgggttcatgtcccaccttgagtctcttatctcagacaccagggcctgaagggcctccctttactttggcctacccagctctctagccacagccttggrcctgttgggtaagatgtagccctgccctggcccagtttttccacctgccccaagattaacactgtgtgcctcaccctcatacccggcccctggcagagct

SEQ ID NO: 535975 - DNA, 201 bp, Homo sapiens
ccaggccagcttctgtgataggccctgtcacttgctctccagctctgctcctctgctaggagcccgggctgggctgggctcagggagtcgggcctcccccstgctcagccattcccctgttcagcgctctttttcccctgccccccacacaggctgctgggaattgcccaggggtggggggaactcagtgtcagctggttc

SEQ ID NO: 535976 - DNA, 201 bp, Homo sapiens
ttggcactcagaatgggcccagtgggggctgggcaggcccattgagggccaccgccgaggtttctcctagggctgttcctgggcctggctcttacaggctygtcccccaggcctgcccttctccactgccccctcctgtgtctgggtccacacacccttcaggaagggggagcactgagaagcacagcacaggggctcagc

SEQ ID NO: 535977 - DNA, 201 bp, Homo sapiens
tctccactgccccctcctgtgtctgggtccacacacccttcaggaagggggagcactgagaagcacagcacaggggctcagcctgggatccggtgatggtytgggcagaggctgggtcaggagtcccaaaggtcagtgacagtttctcagaagaggcccagcgtccacctctctcccagggccagacaccccttcctggct

SEQ ID NO: 535978 - DNA, 201 bp, Homo sapiens
tgatgggtgggcccagaaggtggcagtcccacaccttgtcctcccacctccctgaactgtccattgcttttatagggtgaggtaagagacagcctcccaarcccaggctttggcactcagaatgggcccagtgggggctgggcaggcccattgagggccaccgccgaggtttctcctagggctgttcctgggcctggctct

SEQ ID NO: 535979 - DNA, 201 bp, Homo sapiens
tgccccctcctgtgtctgggtccacacacccttcaggaagggggagcactgagaagcacagcacaggggctcagcctgggatccggtgatggtctgggcaraggctgggtcaggagtcccaaaggtcagtgacagtttctcagaagaggcccagcgtccacctctctcccagggccagacaccccttcctggctcccccat

SEQ ID NO: 535980 - DNA, 201 bp, Homo sapiens
gtgggtggggtcgggtggtggagaggccttagctgtcctggctggtgcccctcccaggctccttttcaccctgccccctgggcctgaggccccctgtgtcyaagcctccccctggctcttcagttctctagcccttggctttgctgggtttcctgactgtagccacatctctcccgctccctaagggtaacctagccaatg

SEQ ID NO: 535981 - DNA, 201 bp, Homo sapiens
gccagaggccagcggggtgggggagcacagatgcttccagttggcttggctccctgcacttggtcctgaaggggttaatgaggcttgaactgaacagaccsggccctcactcccttccgccccctccccctttggtccccttcctctggacctcacatcctgtgtttaggttccagcccacatacctctctaatctgagag

SEQ ID NO: 535982 - DNA, 201 bp, Homo sapiens
gggtgggggggctcttatgaccacttctgggatgacataagcaccatggcagctgccttggcctctggcctggatctgcggctgctccccctcccgcccasggaccacctcccgctccctgctcccgcattctgtgtctcaggcccaggatcctggctgtggccagggctctgctccccaccccaccatgagcttggtttc

SEQ ID NO: 535983 - DNA, 201 bp, Homo sapiens
ggaggctgaggcaaggacctgctgcatggggagtgggggcgatgggggcctcccttctcctttatcaagtggccaaaggctcctcaaagctcgggcagtckgagtctggctctcccatggcatacctgggaagggtcttaccctttggaggcatctccaaagtgctgccttcaaatgttagtgtgtatgatcactgagtgg

SEQ ID NO: 535984 - DNA, 201 bp, Homo sapiens
agtaggtggcctcaggatttgggtctaactctgctctgtcccagcctttctgaccgaagaaccaagtgctctcgggggccttgtgtggttgcggggcggcrggggggagggtctgtctttcctctgggccatggctgtgtgggtgctgccttcagaaggaccttgtcaggacccagggagtcccttccccagcttgaatca

SEQ ID NO: 535985 - DNA, 201 bp, Homo sapiens
gggaaccttgtctctggcacttgcatgtgcctgtttgtatgtttgcccctcaggcagatgctatagcttggtccccaagtgtctgtgcgtgcattgtgtgygtgtgcgtttgtgtgtgtgtgtgtgtgcatgcatgggtgtgactttgctgcaggggaggagggatgagctcccagccagaacctgtctcttcagcttgtg

SEQ ID NO: 535986 - DNA, 201 bp, Homo sapiens
cagctgtggaacatcagcgccgtcccttcctggtccaaagtgaaccagggtctcatccgcatgtataaggccgaggtgagtgggggctggccagtgtgccygtccctgctgccgcacttggtcctgggctggggacaaagcaaaagatgtggaacctggggctcctgcttcctcctaccccactgttttgctctgaatctt

SEQ ID NO: 535987 - DNA, 201 bp, Homo sapiens
tgtattcaaaatacaaaaattagctgggtgtggtggcacacgtctgtaatcgcagctactcgggaggctgaggcaggagaatcacttgaacccaggaggcrgaggttgcagtgagccgagattgctccactgcactccagccactgcaccccagcctgggcgagagagctagactccatctcaaaaaagaaaaagttctgg

SEQ ID NO: 535988 - DNA, 201 bp, Homo sapiens
gcaggtgcagaccacgtgtcctgtgggggggcctgggggagagggggtgggcctggaggggtggggcctagctgctgctgctatttatctgaacccaagtraatccctgtgctggagaggcgctctgaggctcctggggagtcggtgggaacgacaccagaagctcaggtggagatcttatcttcctgaggctgctggatt

SEQ ID NO: 535989 - DNA, 201 bp, Homo sapiens
gacttgcggtgtcagggggatatgctcaggcacacaggcgtccctctgtggtttctgatgtcatgggaacttcatgctggctgcagaatctttctcttccktcctggagggtcagactctttggcaagagggaggaccaggaatggagccgtccttgtgcctgcctctttcagctgctgtggcggccaccccttccccacc

SEQ ID NO: 535990 - DNA, 201 bp, Homo sapiens
gttggccaggctggtcttgaactcctggcctcaagtgatccacccgcctcggattcccaaagtgttgggattacaggtgtgagccaccacacccagcctctttttttttttaagacagtctcactctgtcacccaggctggagtgcagtggaacggtccagctcactgcaagctctgcctccccagttcaagcgattctcc

SEQ ID NO: 535991 - DNA, 201 bp, Homo sapiens
ggggaattatgaactgcttggttaataaatacaaatgtgctggacttgcggtgtcagggggatatgctcaggcacacaggcgtccctctgtggtttctgaygtcatgggaacttcatgctggctgcagaatctttctcttccgtcctggagggtcagactctttggcaagagggaggaccaggaatggagccgtccttgtg

SEQ ID NO: 535992 - DNA, 201 bp, Homo sapiens
gcctcccaaagttctgggattacaggtgtgagtcaccatgccggacctgggcatatcattatttacccattgtcttatcaactgatatttgagttgtttcttttttttttttttcccccgagatggagtcttgctctgtcaaccagagctggagcgcaatggcacgatctcagctcactgtaacctctgcctcctgggttc

SEQ ID NO: 535993 - DNA, 201 bp, Homo sapiens
tgaggatctgttctttggccctggtaggcgaggctggccaggaggcaggggctcttgtcttccagtgcccatctgcctgcctttgcctcggagcccttgcygggcaggcccctggcagacaaagccgacaaagccgacagggtgcctcctggttgcttgctcagagggccctgtccagagagtgaaactggttacacagct

SEQ ID NO: 535994 - DNA, 201 bp, Homo sapiens
tgtgttgcccaggttggtgtcaaactcctggactcaagtgatcctcccacctggggctcccaaagtgctgagattacaggtgtgagccactatgcccagcttttttttttttttttgatgcattaaacacctttgtgtttccgtgagcacatctgaaagatagattcctgtaagtagacctgttgactcattgtgtatatg

SEQ ID NO: 535995 - DNA, 201 bp, Homo sapiens
ttggagagggtttggtgacatttatttgaggcagcagaaggaacagggaggggagggcgtgcctagagttgttggctgttccgcaccttctccacaggtcygggttttcactttgggtctaggctcttgggcatggtgttcaacagtagaccctaggaggagtgtgcccaggagccggggtggctgcagcaagggcccatc

SEQ ID NO: 535996 - DNA, 201 bp, Homo sapiens
cctcaagtgatctgcctgccttggcctcccaaattgctgggattaggtatgagccaccacacctagccagatgtttttaatttgccaaccttatccagaaagagaaatcacatataatttacgtgtccgtgcttattcaggaggttggcaatttattccaaatgtttactgcaattaggttttttttttttttttgagacg

SEQ ID NO: 535997 - DNA, 201 bp, Homo sapiens
tgggtgtggctgaaaggctgagctgtttgggctcccccggcggctggccaggcctctgggtccctgtcggtattctaactaggaggcatgccaggcctggyctccaggattttgggaattgattccatggtaaaattttgtctttagttggttggttgattttgttggtataaacaccccaaaagcttttccaaagtttgg

SEQ ID NO: 535998 - DNA, 201 bp, Homo sapiens
ctcaagtgatctgcctgccttggcctcccaaattgctgggattaggtatgagccaccacacctagccagatgtttttaatttgccaaccttatccagaaagagaaatcacatataatttacgtgtccgtgcttattcaggaggttggcaatttattccaaatgtttactgcaattaggttttttttttttttttgagacga

SEQ ID NO: 535999 - DNA, 201 bp, Homo sapiens
agggcgccctcgctcagctatctggagagggtttgagagttctatccctcctcagtccctttcccgacaccagcacggatgtctgctgcctcagtgaggtycctagcaggcctgtggatgctggccacgggggctgctctccgtccgggctgtgtattctgagcccccgacgaggtggagaaagctgggttataaccagca

SEQ ID NO: 536000 - DNA, 201 bp, Homo sapiens
caggataagctggaggagcagggtgggaagaagggtgcagatgccacactgagttcttgggtgtggctgaaaggctgagctgtttgggctcccccggcggytggccaggcctctgggtccctgtcggtattctaactaggaggcatgccaggcctggtctccaggattttgggaattgattccatggtaaaattttgtctt

SEQ ID NO: 536001 - DNA, 201 bp, Homo sapiens
ccactctgctcacctgctccttcctcacagtgcctggagaagttccctgtgatccagcacttcaagttcgggagcctgctgcccatccatcctgtcacgtygggctaggaggggccaagccgaagagccacccaggccacagttcctgtgcctgccttccccaccccagcagtggcccctccccatcccctccctctgttc

SEQ ID NO: 536002 - DNA, 201 bp, Homo sapiens
ggttttgtgggagtccaggctgcccgaatgctgggtgggcagcgccgtggtcataagggggccttttgcatctctgggcagcgcgtgcttaagtaagctgytgactcggtggggaagctgccagggaggggggcgaaagtgattccggaggctgccgtctttattagtcgctgcttaggggatggggtggtgctccgtggg

SEQ ID NO: 536003 - DNA, 201 bp, Homo sapiens
atctctcaaaaatataaaagggaggtgttctctaggtcagggcatggcctgtggagccaccatgctgagaccccatctctcaaaaatatagaagggaggcrttctctgtgtcagggcacggcctgtcgagccaccatgctgagaccccatctctcaaaaatagagaagggaggcgttctctaggtcagggcctggcctgtg

SEQ ID NO: 536004 - DNA, 201 bp, Homo sapiens
agagaacctgtgccctgaaagagagctgtgctcagggaggttatccgtggctggaaacagccaggtccctggttgtggtccttttttgaaatttgaaacaraacttttgggaacagctggaaagaacttcttctttttagtttttttttgagacagagtttcactttgtctcccaggccagggtgcagtggtgcaatctca

SEQ ID NO: 536005 - DNA, 201 bp, Homo sapiens
actcagaatgggcccagtgggggctgggcaggcccattgagggccaccgccgaggtttctcctagggctgttcctgggcctggctcttacaggctcgtccsccaggcctgcccttctccactgccccctcctgtgtctgggtccacacacccttcaggaagggggagcactgagaagcacagcacaggggctcagcctggg

SEQ ID NO: 536006 - DNA, 201 bp, Homo sapiens
ttgcttttcccttcctggagtcgatgcctttctaagggttggagctgctccttgcaggggcgggtcagtttcccaggccatgccggggtggccatctatgstagggctggaagctgaggctggccgccagctgtgggctggggtggggtgggtggggtcgggtggtggagaggccttagctgtcctggctggtgcccctcc

SEQ ID NO: 536007 - DNA, 201 bp, Homo sapiens
tctcctagggctgttcctgggcctggctcttacaggctcgtcccccaggcctgcccttctccactgccccctcctgtgtctgggtccacacacccttcagkaagggggagcactgagaagcacagcacaggggctcagcctgggatccggtgatggtctgggcagaggctgggtcaggagtcccaaaggtcagtgacagtt

SEQ ID NO: 536008 - DNA, 201 bp, Homo sapiens
gctggtgcccctcccaggctccttttcaccctgccccctgggcctgaggccccctgtgtccaagcctccccctggctcttcagttctctagcccttggctytgctgggtttcctgactgtagccacatctctcccgctccctaagggtaacctagccaatggaagctgccctttgggtaggtgctgggctcctgggagggc

SEQ ID NO: 536009 - DNA, 201 bp, Homo sapiens
gcaattaggttttttttttttttttgagacgaagtctcgctctgttgcctgggttggagtgcagtggtgcaatctcggctcaccacaagctccgcctcccrggttcacgccattcttctgcctcagcctcccaagtagctgggaccgcaggcgcccgccaccacgcctggctaatttttttgtacttttttagtagagatg

SEQ ID NO: 536010 - DNA, 201 bp, Homo sapiens
cttaggggacaagagccaggaacctgcatctaaacacacgtgccaggcgactgcacaggaaagctggggaccctctgctctctggacctctcttgagggasgtgttaggacttctcatcctctctgccatccccatgccccagtttccaaagggcgccctcgctcagctatctggagagggtttgagagttctatccctcc

SEQ ID NO: 536011 - DNA, 201 bp, Homo sapiens
ttgttgtcatggcccctaggaggaggtgctcttcttgtccccagtgtccaggtgaggaaactgaaccttggcaggctgaagtcatgcgtccaacgccatgyagctagagcttagcacattagaatacacaaacccagagttacttattgctccttcaaggtgaggtgttgagggcaccacgggcaggactgaggcccctgg

SEQ ID NO: 536012 - DNA, 201 bp, Homo sapiens
agccgccaagtgctgggtggtgggcctgcttcctgtggggctcagagaggcctgctctggtgactccccaactcttgaagctagttttcaggatgggcgtrggtgatcatctctattttgatgaagaatgaactgcctacagactgatattcataaatgaccattagttgtggcctcgggtgcattgcctccccgaatctt

SEQ ID NO: 536013 - DNA, 201 bp, Homo sapiens
tagtggttgtcttttgcatagcgcctaacacatactaaataaatacttcgattgttattagctattgttaccattaggcattagtcagttctaattttcartagtgttgttgcatagaaagctagcttttggctgggcgcggtggctcatgactgtaatcctagcaccttgggaggccaaggcgggtgaatcatgaggtca

SEQ ID NO: 536014 - DNA, 201 bp, Homo sapiens
ttcaggaaaaccccagggtagtgctggctctgggacaggctatggagatggctaaagctttgggggtaccagtcactcactatcttcatagcccagtgctrtgagggtgagcttcatagtggagaggcccaggaaagagaagggactcacccactgtcacccagtgggactgtggcagcaccagcacttgaccccaggcac

SEQ ID NO: 536015 - DNA, 201 bp, Homo sapiens
atccaggagccacggccctgtggaggtagggcctcagctgcgagggcctgaggttcccccaggttggggcgttactgggaggtctgcatccccccgtgatrccctggtctcctctctctcccaggcccccacacagcagtgggcaccaagtacgggatgccctccagccattcccagtttatgtggttcttctccgtctat

SEQ ID NO: 536016 - DNA, 201 bp, Homo sapiens
acaggccttcctcacaggccagtgtcctaatgggagactctcccctctccacaaactgcacgcttggttttgccaggatgccctgcctcagccatggacayggggctatgggcaggtatgtggttctgctctgatcgcacctgcccacccccgaaggtgtctgtcctggcagcggctgggcctggggcaagctgagcctgc

SEQ ID NO: 536017 - DNA, 201 bp, Homo sapiens
gttaaaaaggaaaagcaaactggagggtgtgtcagaagacatcccggctgcagtgtggagtgggaaagctaccgggagcagcttcaggcgcacccgccccygctaactcatcgccttcacttcatccacactcacctgcttaccctgaccccgctccaacctgcccaaggtgcggtgctgggcagaagcccaactcttcaa

SEQ ID NO: 536018 - DNA, 201 bp, Homo sapiens
cctgagtcctaggggctcagagcttggcccgggggtggctctgcagcagggcacgcatgtccaggagcgccttctccaggtaatgcgccaggcgggcggcrttggtctccgcgcagctgttgtaggccgacagggagaagttgatgtgggcctccatggggttatagcagacaccgtagccgtcggggaccacgggcccga

SEQ ID NO: 536019 - DNA, 201 bp, Homo sapiens
ggaggatgcggtccgtggctcagtagatttggggggaccagggaagagggaaccaaggaagagggaaccaaggagctgagccctggtgggtggcccatccyagggtgggcttggctgtggcattggcaggcctgagtcctaggggctcagagcttggcccgggggtggctctgcagcagggcacgcatgtccaggagcgcc

SEQ ID NO: 536020 - DNA, 201 bp, Homo sapiens
tcccctgtcccagagaggccgcactcctgttccagcgtgcagggagtgtcttgtttccttcgaacagtgctttgggctgcttgtaagagaaagagctcccsgttgctgggagtgtgcaagccgaagccaggcttttgagtacttgtggtgccacgccctgagcagggcacgattccacaacagagaggacccgatgagggg

SEQ ID NO: 536021 - DNA, 201 bp, Homo sapiens
acgtcgaatatcctgcaggtaaaaggcggtcccggctccaaggacgccttcccagggacggcctctcagtcccgggcgctccggcctgctcgagcccgcgragggggcgccgggggaccggggtgggaactgtcaaatagtgaaccacggaggggctcggccggcgcgcgcgccgcgcaggcgcagtggtgcgaggatgag

SEQ ID NO: 536022 - DNA, 201 bp, Homo sapiens
gaagagggaaccaaggagctgagccctggtgggtggcccatcctagggtgggcttggctgtggcattggcaggcctgagtcctaggggctcagagcttggsccgggggtggctctgcagcagggcacgcatgtccaggagcgccttctccaggtaatgcgccaggcgggcggcgttggtctccgcgcagctgttgtaggcc

SEQ ID NO: 536023 - DNA, 201 bp, Homo sapiens
cgctcgccccagattgggcgccagctggggcggctcgttggctcccaggggccccgctctctgattcgccgctcgggccagcccccacggcctgcacgctraatggctgcgccgctacctatattggcctccgattgggtgcacggcgcctccccggcgtgataggtcaggaccaccgcccccctggctccccattggctg

SEQ ID NO: 536024 - DNA, 201 bp, Homo sapiens
cagattgggcgccagctggggcggctcgttggctcccaggggccccgctctctgattcgccgctcgggccagcccccacggcctgcacgctgaatggctgmgccgctacctatattggcctccgattgggtgcacggcgcctccccggcgtgataggtcaggaccaccgcccccctggctccccattggctgctcgaagaa

SEQ ID NO: 536025 - DNA, 201 bp, Homo sapiens
ccgtggagtcagtgtcctgtctgtgtctccacatgtgtgggcacaggtccctgggaagctggcacatgggcagtggggattgtgcgggcctgtgtctgacwggctctcacatacttcgcttctggccttggcccagggtctacctgctgtaccacacctggagccaggtgctctatggaggcatcgctggaggcctcatgg

SEQ ID NO: 536026 - DNA, 201 bp, Homo sapiens
ggtaggcactgatatccctattccacaagtgggtgagctgaggcttgaatccttgcctcagttcatgcagccagtgagtgtgggcataggagctgaaccaygctctcagaccccagagtggctacatagctgcctgtctcaagtggtgagggtggccttcagactcagcctcccctgcccttggattctcagcttgagtgt

SEQ ID NO: 536027 - DNA, 201 bp, Homo sapiens
acactgggttctctccacctctgccccaacatggaagtgtcctggttgccagggaccaagctgggtgtctcacaggtcccatctcattgagtctcatgcasctgtaggaggtaggcactgatatccctattccacaagtgggtgagctgaggcttgaatccttgcctcagttcatgcagccagtgagtgtgggcataggag

SEQ ID NO: 536028 - DNA, 201 bp, Homo sapiens
acaggagcacagccgcaacggaggtgaaacctcacaccctggcccctcggccccagacaatcctgtctccaggtcctgggagtttgggaagcagggtacaratggtggcctggtcatggagttggcagggagtggccggggctgagctggtgagacaaagagctcttgccagtctcctgctctggagggctggttcccttc

SEQ ID NO: 536029 - DNA, 201 bp, Homo sapiens
cacctgtcttgaggtgcgtggagcctcctggctggttctaggttactcacctgttgggctgggaggttcagtcagaggccatggtctttgggactaggtarcagccaacaggtgcacagaggcccagctgaccatgcgtcttccccagcagatctccttccttgggggcctggcactgaacgagggggtcaactggctgat

SEQ ID NO: 536030 - DNA, 201 bp, Homo sapiens
gagctgagctttggagactcctgactcatgctgtttcattcaccccaaatcctgggtgaggttcttaggggagtgggaaggctggcttttcttttttttctttttttttttttttgagacggagtctcgctctgtcgcccaggctggagtgcagtggcgcgatctcggctcactgcaacctctgcctcccttgttcacacc

SEQ ID NO: 536031 - DNA, 201 bp, Homo sapiens
cctccagcccccggggcacctggggcagtggcccacctggctggtggagaggtggaagtgcatggcgatggcgtaggaggtgtccatgaagatgtcgggcrtgctcaccaggtcctcgatggcctgcagcttcaggcccagcaggtgtcgatcaaaggcctccccgcggatggcctgttggggtgggagagctgtcaggag

SEQ ID NO: 536032 - DNA, 201 bp, Homo sapiens
gcatgggcctgtttctctctgcagtgcagagagaaataccatatggcagccaaatagcatatctcctttccttacagaggccttccgtcgagcccggcgcygcatgcaggaggcccgggaaagcctcccgcaggacctagtgagcccctctggaaccctggtctcctagctcacagcagccctggcccacagtgcaagagg

SEQ ID NO: 536033 - DNA, 201 bp, Homo sapiens
tcagcatgggcctgtttctctctgcagtgcagagagaaataccatatggcagccaaatagcatatctcctttccttacagaggccttccgtcgagcccggygccgcatgcaggaggcccgggaaagcctcccgcaggacctagtgagcccctctggaaccctggtctcctagctcacagcagccctggcccacagtgcaag

SEQ ID NO: 536034 - DNA, 201 bp, Homo sapiens
cgtgacgggaacggcgggttgcgcgcgcagcacctccgtcgcctcccgatccagcgtctccgttgccaggaaaacagagcggcgcgctttccggcgcagtygcggcgcgtcgcagctgtcatggcggagaccgtctggagcactgacaccggggaggcagtgtatcgctcccgggaccccgtgcgcaacttgcgcctccgg

SEQ ID NO: 536035 - DNA, 201 bp, Homo sapiens
tctttccagggaagcctcattctactgcttggggcttgctgaggttgagatatgagttatttctgagtaagtgaaggctgaaggcagtgctgagtcctttytgctagctgggtggtatcttttactgtgtttttttgtttgtttgtttttttgttttttgttacataaaccccttttattttgactgatgttctgttggct

SEQ ID NO: 536036 - DNA, 201 bp, Homo sapiens
aagtggggaaaccgagattgaggagctaagtagtctgcccaaggtggcatagcttgtaagggcgagagtcaggattctgccccagaccagctgactccagsgcctctgcttcacggtaaaatggcggtgagtcaggtgcttacgcctccagctcttgctgacccttcccactattgcttttcttcttcccattcagaactg

SEQ ID NO: 536037 - DNA, 201 bp, Homo sapiens
gctgttgtgaacctatttgttctctccagcaccctacaccaagccaccaccatctcttgtctaggccagtgcattcaacttctgatgtatccccctgcttsctgccttgctcccatttgccgttgatttgccacagacaccaaagccaagttgagctttaaaaaatgtaaacaagttatgtcccttttgagctgaaaaccc

SEQ ID NO: 536038 - DNA, 201 bp, Homo sapiens
agaagcaggagctgtggaaatatacgatcgacaatgtttccccccacgcacagccggaggaggaggagcgggaacggcgagtgttcaaggatgtaagcgcragttcattccaagtatccaagggatgagcctcagtgcctggagctgagaccatttctgaacttgatgtcagcagttgctcgggaaaagccttgcccttca

SEQ ID NO: 536039 - DNA, 201 bp, Homo sapiens
gaacctatactttctgagtctagtctggtgccctctctgctttacccttttgtttctctctcctggtcgtcaatacagccacttttatcatcatatacttyagtgaggtgtatggcccctgatcgctcatccctgggctgggagctatcccagggcccatctctcattattagagttgctcctttctgtggttttgacctt

SEQ ID NO: 536040 - DNA, 201 bp, Homo sapiens
cttagatcattccaacctgagctcggtgttctgaggtccccactttctgcttacaatcccgaccacttctccgggctccccacttctttcactatccgtamccccatccactcacagcctctaagaaccccttacagacctacccaagtccattcacgtctttgttgctcccagtttctcaaagccctgtgcccccagtac

SEQ ID NO: 536041 - DNA, 201 bp, Homo sapiens
cttgggctgcacttgcactgtgtggccaactgcgaccgtggcgccgtgacgggaacggcgggttgcgcgcgcagcacctccgtcgcctcccgatccagcgyctccgttgccaggaaaacagagcggcgcgctttccggcgcagtcgcggcgcgtcgcagctgtcatggcggagaccgtctggagcactgacaccggggagg

SEQ ID NO: 536042 - DNA, 201 bp, Homo sapiens
cccacccacctcctctccgttgtctgcacccagcacaccttggcaaccctacctcctctgttttgtttcccccatccttgctttgtgttcatctcctggtkgcgtgtctggtaacgaatattttgggcttttcttgacagagtccacctgcaaagaatcacatcaagcaacttttttcattatcagcctgctgccgagctc

SEQ ID NO: 536043 - DNA, 201 bp, Homo sapiens
cttttctggcttgtctcacagtagcaggggatctgctgttctccaccctttaaaaatggagcctttcatcttccaagaccaaagaaggaaggaaggtggayggtgagagggtcttaaatccccagcctgtgagtctcagcctctttccagggaagcctcattctactgcttggggcttgctgaggttgagatatgagttat

SEQ ID NO: 536044 - DNA, 201 bp, Homo sapiens
tggtttggctcaagcatttgattcactctgttgtctttggaggtggacaccgcccagaggaagacgaagaggaggagattgtgattgggtggcaggagaarctctttagccaggtgagccagtgtctcttgtcttctctgtctattccatctggtctacctccacatggctggtgatacatattgccaaagtgatttccag

SEQ ID NO: 536045 - DNA, 201 bp, Homo sapiens
taggttgagtgcttactaaattgctgaattccagctagtttttgtggcaaatataagaatagggactttggttataataaaccacagaacaagaagtggtrctggtttggctcaagcatttgattcactctgttgtctttggaggtggacaccgcccagaggaagacgaagaggaggagattgtgattgggtggcaggaga

SEQ ID NO: 536046 - DNA, 201 bp, Homo sapiens
ctggcattccttcccttggttgcactttttgtccctagtcaactagactgtcagaaagtccttcatctgttctaacttttacattcccaggcaatggttcrtattctgttccaagtcatagggccttagaaaaccagggactcctttctcagaaaatgtgcaactgcaccaatttgaaagggatcacttcagtggtacagt

SEQ ID NO: 536047 - DNA, 201 bp, Homo sapiens
ctgtgctctactgtgaggtcctctcgctggacttctggcagaggtaccgtgtggaaggctatggggctgtggtgctgcctgccactccaggtaaccgctcrtctctgcccttctgtggcccacatgccctaggccctaagaacaagactaacactcgaatgcttctggtgaggggtggagataattgggaattggaaatgt

SEQ ID NO: 536048 - DNA, 201 bp, Homo sapiens
tgtgattgggtggcaggagaagctctttagccaggtgagccagtgtctcttgtcttctctgtctattccatctggtctacctccacatggctggtgatacrtattgccaaagtgatttccagacaggttgtaacagtttatactttcccctgttgtgtttaaagggcattgtaacatagggattgccactactcagttttg

SEQ ID NO: 536049 - DNA, 201 bp, Homo sapiens
aggtatactctacagtgtgaaaaggaagtcaaagaatagcacatatagtccttgttatgtgttttgcaacattgcatgttgatagagaactgttaatgctragaaaaaggtctgaaaggctatgcacatgctgtgggtggctttctctggggagggtgggattagatgtggtagaagggtagtgggtggtgagagggatat

SEQ ID NO: 536050 - DNA, 201 bp, Homo sapiens
ccccttccttcctgtggcttaagctggaagtcatgaccacattttgaatcaggttccaatatctacactgctatcgtaggaggtctctggaaaatagtatrattagagatttcccctggttcccatcagaataactggctctttcccccatcactgaaggcctcagtaatcagatgtggggaggattcacagtaagcatat

SEQ ID NO: 536051 - DNA, 201 bp, Homo sapiens
atcgctcccgggaccccgtgcgcaacttgcgcctccggtagtcgcaccgccccagccccgaggccccatgcttttgtgtccttagatcattccaacctgarctcggtgttctgaggtccccactttctgcttacaatcccgaccacttctccgggctccccacttctttcactatccgtacccccatccactcacagcctc

SEQ ID NO: 536052 - DNA, 201 bp, Homo sapiens
gcccctctggaaccctggtctcctagctcacagcagccctggcccacagtgcaagaggacaagatgggggatatctgaggccagtgctctcctgcctcttygtctttctgattagagaccacgttggtctgctgagaaccagaaaagctgggaaattcccggctggcccctctgcctagccttctgcagggtcttctccct

SEQ ID NO: 536053 - DNA, 201 bp, Homo sapiens
tatctcctttccttacagaggccttccgtcgagcccggcgccgcatgcaggaggcccgggaaagcctcccgcaggacctagtgagcccctctggaaccctsgtctcctagctcacagcagccctggcccacagtgcaagaggacaagatgggggatatctgaggccagtgctctcctgcctcttcgtctttctgattagag

SEQ ID NO: 536054 - DNA, 201 bp, Homo sapiens
ctttcccctgttgtgtttaaagggcattgtaacatagggattgccactactcagttttgtgattctgggtgaggaacttttcatctctgggctatatgccrtctgtaatagcagacttggattagactatcagtctggttccttttagctctaatgttcttggttcccctgccattcattagtttagtgttggttatgaaa

SEQ ID NO: 536055 - DNA, 201 bp, Homo sapiens
gctggagtgcattggcacaatcagggctcactgcagcgtcgaattcctgggcttaagcaatcctcccacctcagcctcttgagtagctggggctccaggtrcgtaccaccgtgcccagcttgaccccatttttaatgtcttgaaaagagacccttcctcagcccacatccaccccctcacctacctcttcctccttttcct

SEQ ID NO: 536056 - DNA, 201 bp, Homo sapiens
ccatcatggagactgggaggagtttctgcccaattctgcaggtgcagtgagacattcatctcttcacccagacgtctcttcgcggacgctgatgcatccaygcagcatcaaacacctgctcctcttcccttcctcctgtctcgcctgggcctgcaatagctgtttcctgcccctggacatgcttagcattctttcctcctg

SEQ ID NO: 536057 - DNA, 201 bp, Homo sapiens
cctggaggcatcgtctaggctctcggggattcagggtccagcaaggagggaaagtcccaggtgtaatagtctgttcttcagtctctgacaatccagcaccraagaaaaattgctggagtcatcctcttatttgccttagatttatagctttattcctgattggtctattaagttatttatatacttaatacaaaagtgcaa

SEQ ID NO: 536058 - DNA, 201 bp, Homo sapiens
acgtctccagggattctgggagcctcagggcttgacatatgcagtgctgaaagcatcccggtattcatgtgctctgactgttttattatttaagggattcygagggccctgaaggttgatgacatcatcttcaagccaaggaagaaagcatttctctggtcccccagtgtgcttttgggtcatcccagcactgtactgggg

SEQ ID NO: 536059 - DNA, 201 bp, Homo sapiens
atttggcggcagtttacaaggtggaatgtggggagctaggaagcctggaggccagttaggaggattttatggggcagatgagttgtgtcctctgtgccctyggtgtgcatggcgtcacctatgcatgcatggcgtggagtgctagaggtgctgacttctcacacaaaatgacccggaagtgtgaacaaacatcttcattcc

SEQ ID NO: 536060 - DNA, 201 bp, Homo sapiens
actaagaggaactttttctattttttactacttaacccaccatgggggctcatggaatccagtggaacctgttgggggccagcactttttaaaagggtgcrattgtcgtgtataacatgaattgccagcacaacagtcctgggcacgtgatcagtgtcagctgccgctggtggtcggtcccctcagagttggagtcagggt

SEQ ID NO: 536061 - DNA, 201 bp, Homo sapiens
gcagcagctttctgctgccccaaggttatgtcatgcttctgtgcattcgcagttgcagggaggtgatgaaggaggggcagggagcaccagggtcccgaggrccatggccgaggaatggggccaagcaggcatgcctccttctgccggcatgcttctttctcagactctgaggtttccgcgtgggtagagccacgctttcac

SEQ ID NO: 536062 - DNA, 201 bp, Homo sapiens
atagttacgactctctaagaaatagacaataggctgggcgcggtggctcacgcctgtaatcccagcactttgggaggccgaggctggcagatcacgaggtyaggagatcgagagcatcgtggctaatatggtgaaaccccgtctctactgaaaatacaaaaaattagccgggcgtggtggcgggcgcctgtagtcccagct

SEQ ID NO: 536063 - DNA, 201 bp, Homo sapiens
gtggctccttttcagcatgagtctgcctaggaaggtacggtgcattttcagagtgtggctgttgattagcagccaaggcttggcatttgggggagtgtggygcgaagggggccactgctgcgctgggtaggggtgaggctccggatcatgagctgtggcaggagtgaggcagcagctttctgctgccccaaggttatgtca

SEQ ID NO: 536064 - DNA, 201 bp, Homo sapiens
cctctgatagttacgactctctaagaaatagacaataggctgggcgcggtggctcacgcctgtaatcccagcactttgggaggccgaggctggcagatcaygaggtcaggagatcgagagcatcgtggctaatatggtgaaaccccgtctctactgaaaatacaaaaaattagccgggcgtggtggcgggcgcctgtagtc

SEQ ID NO: 536065 - DNA, 201 bp, Homo sapiens
aaaacgatgcaggaagccaggaccactgtgggaagataggcccccctgcacttccatagccccctgctcctccatagccccctgctcccacttcagtgggmacttggcccccggggaaacaactggccttggatcagggctcttgtgtgttatttttactgccttttcctaccatatttgcatttttaaaaatagcactgc

SEQ ID NO: 536066 - DNA, 201 bp, Homo sapiens
tagttgggagccattgaggaaaagccggagagagaggccacgagaactagcattttggggttacttagcacacgtcccattacttatcacacatagaggtstcaaaaacatcaccacaggcctgcctgaccctcctgtggcttggttgtcccttaaaggaaggacacagcagatcctttgagacatctccatcttcccatt

SEQ ID NO: 536067 - DNA, 201 bp, Homo sapiens
agcctcagcgggcacttggcatgatgctggaccttttctgtttgagactactgcaagctgtgagctgaaaacctagtattggggccaggcacagtggctcrcgcctgtaatcccagcactttgggaggctgaggcaagaggatcacttgagctcaggagttcaagaacagcctgggcaacatggtaaaacccagtctctac

SEQ ID NO: 536068 - DNA, 201 bp, Homo sapiens
tttcctgcattgccagatgttctccaggccccgccattggggattctgcccacgccacccattgggactgctgagcccaggtcagcagggacacttccccrtggcactggatctctcagcagcatcaggcattgctagccactcctttcttgacacttgttcccaattcccatggcttttccttcagctgtctctagtgac

SEQ ID NO: 536069 - DNA, 201 bp, Homo sapiens
tgtctagccttgaatatataggaatcactaaaaaagtgggatcctaggcctcagcaaggtttcctgcttccacccccgcaaaactgagttgggtttttttrtttcattttgttttgttttgtttttgagacagagtcttgccctgtcttccagtcacctaggctggagtgcaatggcgcaatctcggctcactgcaacctc

SEQ ID NO: 536070 - DNA, 201 bp, Homo sapiens
ctcagcccacatccaccccctcacctacctcttcctccttttcctgctcttcagccgtagttcctgaatgagctccatgctgtgattcctgtttcctgcaytgccagatgttctccaggccccgccattggggattctgcccacgccacccattgggactgctgagcccaggtcagcagggacacttccccgtggcactgg

SEQ ID NO: 536071 - DNA, 201 bp, Homo sapiens
acgtgtatgtacatatatttgtatatacatgtatgtatatatatttgtatatacatatatgtgtatgcacacacacacacacacacacacacacacacacmgtcttgctctgttgcccaagctggagtgcagtggcgtgatctcagctcactcaaactccacctcctgggtccaagcaattctcctacctcggcctcctaa

SEQ ID NO: 536072 - DNA, 201 bp, Homo sapiens
ggcacttggggtcttgttcgttgtgggagagtttcttgtactacctcgggctgagttgatggtagaagacgaattgtgctatttagggcatgtgggcgcaytggcatctcagaatcgcaactttttggtactcactgtgtcccctggtggagaccaaacctctgttctctgttttaggtgctccatgaacacggaagatgg

SEQ ID NO: 536073 - DNA, 201 bp, Homo sapiens
ttcctcagcccacatccaccccctcacctacctcttcctccttttcctgctcttcagccgtagttcctgaatgagctccatgctgtgattcctgtttcctkcattgccagatgttctccaggccccgccattggggattctgcccacgccacccattgggactgctgagcccaggtcagcagggacacttccccgtggcac

SEQ ID NO: 536074 - DNA, 201 bp, Homo sapiens
acatatacacacatatatacacatatacatatacacacacacacgtatgtgtatataaagccacactttatatatctatacacgcacatatatgtatataygtatacacatacgcatatacatgtatgtacatatgtatacacatacgtatatacgtgtatgtacatatgtacacacacatatatacgtgtgtgtacatat

SEQ ID NO: 536075 - DNA, 201 bp, Homo sapiens
aaacttaaaaactttttttaattaaagacaaatattcctaagtagtcagagtatattttgtttcaggagaaagggatttttttttttttttttttttttttgagatagggtcttactctgtcacccaggccagagtgcagtggtgcgatcgtggctcactgcagccttgaccccctgggctcaagtgatcctctcaccaga

SEQ ID NO: 536076 - DNA, 201 bp, Homo sapiens
cagtggagatgcaggacgagggtgcagaggagccccacgaggcaggagagcagctgcccccattcctgctaaaagaaggcagagatgacaggctgcactcrgcagagcaggacgcagatgatgaggctgctgatgacacggacgacaccagttcggtgacctcctctgccagctccaccacttcctcccagagcggcagcg

SEQ ID NO: 536077 - DNA, 201 bp, Homo sapiens
taaacttaaaaactttttttaattaaagacaaatattcctaagtagtcagagtatattttgtttcaggagaaagggatttttttttttttttttttttttttgagatagggtcttactctgtcacccaggccagagtgcagtggtgcgatcgtggctcactgcagccttgaccccctgggctcaagtgatcctctcaccag

SEQ ID NO: 536078 - DNA, 201 bp, Homo sapiens
tctctactaaaaatacaaaaaagttagctgggcgtggtggcgggtgcctgtagtcccagctactcgggaggctgaggcaggagaatggcatgaacctgggrggcggagcttgcagtgagctgagatcgcgccactgcactccagcctgggtgacagggtgagggcgagactctgtctcaaaaaaaaaaaataaaaaataaa

SEQ ID NO: 536079 - DNA, 201 bp, Homo sapiens
tccttcggctgggaatgctgagtcatgagacaggttcaggaaggattccttggagaggctgagttccacctcaatttcagtttctgttcccttcagtttcygtgtgtttttgctttaggacattagaggcctctttgcaccttccccatctctacttcacttttatccctgtttctctctgttttgtttgtttggtttttt

SEQ ID NO: 536080 - DNA, 201 bp, Homo sapiens
acgtgatgtggcaggatggctccgtggaatgcaacatccgctccaacgacctcttccctgtgcaccacctggacaacaacgagttctgccctggagacttygtggtagataagcgaggtagtgccagctctggaagggcagccagcagggtggtcgccaatgagggcccgggttggggcttgtggagaatgggcagtggat

SEQ ID NO: 536081 - DNA, 201 bp, Homo sapiens
ggtccttctggtctccacctgtcatggttgggcagaacagccccctgcgaggtaagggagcaggactgctgtctgtcagttcaagttcagccttcgtttcrgaggcaaagcgtttatgctttagctttcttgtgctttttcatctcttttgcattgtcttttgttttaagttgccatgacattcagggtttcaccaggttt

SEQ ID NO: 536082 - DNA, 201 bp, Homo sapiens
cttccatgaagctatggaatttgtcgtgttcctgaggcttccagccaccaaaattaagcctcttaaggactcaaaaggagctagtggccagtgtctcttayatgcttcttcctttctccagtcttctgacctgttcagcgaggtagccacttgaaactgtccatctggccatggatctccttagaggaggcttgccccttc

SEQ ID NO: 536083 - DNA, 201 bp, Homo sapiens
gacttggaaggaaaattatcagtccatttacaagagtatttggaaaatattacttttgtgcaacagaatgcttgttaaaaattacccagtattgtgtcagkaaaagagggttattgctgtatactgtgtgacaccagatgattgctggtgtctttctgtgagtttttaagaatgtttttcaccacccatctatttgagaga

SEQ ID NO: 536084 - DNA, 201 bp, Homo sapiens
tcataaacccgaaaccttgaacccgggttggtttggtggcttgttttccagaatgtgaattcctatcagtaattgacacacacacacacacacacacaccacccctgtatctcacaccccttctttctctcctacttcccctccccttcaagaaaacatttctaagcaggaatcaggcctacgctgttttaggtccttggg

SEQ ID NO: 536085 - DNA, 201 bp, Homo sapiens
gtttttgttttttcattttcctgttatactaagaggaactttttctattttttactacttaacccaccatgggggctcatggaatccagtggaacctgttsggggccagcactttttaaaagggtgcaattgtcgtgtataacatgaattgccagcacaacagtcctgggcacgtgatcagtgtcagctgccgctggtggt

SEQ ID NO: 536086 - DNA, 201 bp, Homo sapiens
aagtgcctctggtgggtgagacagtgaccacaggggccccaggaggcctgtgggcgtgacgcgctctgcctgtgggtctgggtgctggtcggaggtgtgtkcggtctgtgaagatactgctagccaaacgcttaggatttgtgcacttagcagtgtggatgtgacgctttccttcagaagctggaagaaaactgtattctg

SEQ ID NO: 536087 - DNA, 201 bp, Homo sapiens
tccctgggccatattttgaggaccactgagctagaggtggggtggaagaagtcaggtgagagagtgctggcaggcgaggctgcacaggactgtaaataacrataacaacaaaggtttgttggcacctgccgcgttctaggcacagtcactggagaaccccgtgaagtaggtgttcttacttcacagaggaggagaggttaa

SEQ ID NO: 536088 - DNA, 201 bp, Homo sapiens
tgtgtataactgttttcaggtgtaatttcatcttacctccctcatctcagtgtaagttctagaaagctaattcccattcttaattatatatttgtattctwgtcttgtcttaagtctatagaaaacactcaaaaactattcaatcagttgacctcagtcttagcacagcttctctgttgaatggcttccgtagctcatgat

SEQ ID NO: 536089 - DNA, 201 bp, Homo sapiens
ggtttgactttattaaacctcttctagaaatactcatgaacttcctacctctgttactttgtgagaaattcagtaatgcacatttaaagtaaccccggccrtcctccaggagggggatggaatgaatctgtatgtatgtatgtatgtttccagagtctgaaaggtctcttgaaattctcaagactggtaatgagattataa

SEQ ID NO: 536090 - DNA, 201 bp, Homo sapiens
cgaaagtaaaaaaattgacattgagccaggcacagtggcacgtgcctgtaatccaagctactcaggaggttgaggccagagggaggatcgcttgggtccargagttcaaggccagcctgggcattgtggtgagactgcatctcgcaaaaaagatattaacatcagccacatactgttatctaaaccatacacttttatttg

SEQ ID NO: 536091 - DNA, 201 bp, Homo sapiens
ggtgtttcctcctggggacagtgatgacaggtttgatcaagggcagtgacagatgttgcaggcatccagggcctaaccctgtaccgttctccttatctgcsgtggcctaattctgttgctcagtttctgatctgtcctggcatggggagaaacgttttcactgaggatatctgctagaggctgatgctttacttgaggcac

SEQ ID NO: 536092 - DNA, 201 bp, Homo sapiens
ggaggcggagcttgcagtgagctgagatcgcgccactgcactccagcctgggtgacagggtgagggcgagactctgtctcaaaaaaaaaaaataaaaaatwaaaaaaaaaaaagaaacaggtgaaattaattttggaggtagaggtggatggagtcttgctctgttgcccgggctggagtgcagtggctcgatcatagctc

SEQ ID NO: 536093 - DNA, 201 bp, Homo sapiens
ctgctgtcactgactcccggctatacatggcctgtcgaccacgttatagccctcaggcctgttgaacttgctctctaagagaggttgggaccaggctaggktccgggtgacgcccaggagaggtggtggccttcacacatgcacatggagttgaggaccagggagctgcagggaaagcaacagctataggtgccttgctct

SEQ ID NO: 536094 - DNA, 201 bp, Homo sapiens
ctattatttaaaaaaatacaatatgagccaagtaggtcctttaaaattttttagtgaccacatttttttcttttactttttttttttttttttttttttttgtcgaaaggaccttgagaagtgaccacattttaaaaacattaaaagaaacaggtgaaccgggtgcggtggctcacgcctgtaatcccagcacttcaggag

SEQ ID NO: 536095 - DNA, 201 bp, Homo sapiens
ctgcctgtttttgttaagccttttagtactatgttttttttttaacttaggcatgcattgttttgatacaattaagctaaactattatttaaaaaaatacmatatgagccaagtaggtcctttaaaattttttagtgaccacatttttttcttttactttttttttttttttttttttttttgtcgaaaggaccttgagaa

SEQ ID NO: 536096 - DNA, 201 bp, Homo sapiens
taaaccatacacttttatttggattagttttcttttccaggatccaatccaggatactacattgcatttaacataattgcctttttttttctttttctttytttttttttttgagatggaatctcgctctgtcgcccaggctggagtgcagtggcatgatcttggctcactgcaagctccgcctcccaggttcatgccatt

SEQ ID NO: 536097 - DNA, 201 bp, Homo sapiens
caggaggcagaggttgcagtgagccgagatcgtgccccggcactccagcctgggcgacagagtgagactctttctcgaggaaaaaaaaatatatatatattccccaactttttttgtttttggttctgaacccaagacccaactttttaataggaaaaaatattgaccataccaaaatgttgaaagccagtaattgctaac

SEQ ID NO: 536098 - DNA, 201 bp, Homo sapiens
gtgcctcctgtgaacctcttgtggggaggagatagaaggagttgttcttcaccaaaaccagggacttttcccaggatccaggaaacgggatctgacacagrtgagcggcagaggaaagtctgagttagagagacaggatggaattctgcaggagggagagagatcgacaagaaaaagacacaaagcccaaagatacctgat

SEQ ID NO: 536099 - DNA, 201 bp, Homo sapiens
aattgcttgaacccaggaggcagaggttgcagtgagccgagatcgtgccccggcactccagcctgggcgacagagtgagactctttctcgaggaaaaaaawatatatatatattccccaactttttttgtttttggttctgaacccaagacccaactttttaataggaaaaaatattgaccataccaaaatgttgaaagcc

SEQ ID NO: 536100 - DNA, 201 bp, Homo sapiens
cttgatagctccattgtgccatgtagactttgtgggtataaaatcttgtgattgtgactgcccttcccatccccaagtctgtggacttaaaaaaaaaaaaatgttctgactgggcacagtggctcacgcctgtaatcccagcattttgggaggccgaggtgggtggatcacttgaggtcaggagttcgagaccagcctggc

SEQ ID NO: 536101 - DNA, 201 bp, Homo sapiens
tgcgaccgggattgatgactcctaagtgcatatggactccttgaaaaaaataatccagaaccctgggtagaggggagtcaccaatttggaaacccgaaggktttttcttgacctgaagctgttaagcagacatctgactcccgtatggtttttggggtgatgctagtgagtatagcagttttacaaaacaaagaggcttgt

SEQ ID NO: 536102 - DNA, 201 bp, Homo sapiens
gcttacttgatagctccattgtgccatgtagactttgtgggtataaaatcttgtgattgtgactgcccttcccatccccaagtctgtggacttaaaaaaamaaaaatgttctgactgggcacagtggctcacgcctgtaatcccagcattttgggaggccgaggtgggtggatcacttgaggtcaggagttcgagaccagc

SEQ ID NO: 536103 - DNA, 201 bp, Homo sapiens
ttttgctttaggacattagaggcctctttgcaccttccccatctctacttcacttttatccctgtttctctctgttttgtttgtttggtttttttttgttgtttgtttttgttttttcattttcctgttatactaagaggaactttttctattttttactacttaacccaccatgggggctcatggaatccagtggaacct

SEQ ID NO: 536104 - DNA, 201 bp, Homo sapiens
gttgtagtgagccaagatcgcaccattgcactccagcctgggcaacagagcgagacttcatctcaaaaaaaaaaaaattactttgaaattaattatattaygattactcctcaagcctacttttctttttgaaaaattagaacattacagatcctttgagtggaaatggaagagctaaagttgcctttgaccagacctcac

SEQ ID NO: 536105 - DNA, 201 bp, Homo sapiens
tttttgctttaggacattagaggcctctttgcaccttccccatctctacttcacttttatccctgtttctctctgttttgtttgtttggtttttttttgttgtttgtttttgttttttcattttcctgttatactaagaggaactttttctattttttactacttaacccaccatgggggctcatggaatccagtggaacc

SEQ ID NO: 536106 - DNA, 201 bp, Homo sapiens
tgtccagggggcacggacagcgtcagccccccaccctctgtcatcacccaggaaaacctaggcaggtaagcatgcccttactgccagcaacccaggggcaygcgtgggacagggctctgggccctggtcacatgcctggggaggcttaagaacactgctggcctcccaggagtccagcccagctcacccccacttcttccc

SEQ ID NO: 536107 - DNA, 201 bp, Homo sapiens
tcctggggacagtgatgacaggtttgatcaagggcagtgacagatgttgcaggcatccagggcctaaccctgtaccgttctccttatctgccgtggcctawttctgttgctcagtttctgatctgtcctggcatggggagaaacgttttcactgaggatatctgctagaggctgatgctttacttgaggcactgtgatggt

SEQ ID NO: 536108 - DNA, 201 bp, Homo sapiens
ccaagtgcctctggtgggtgagacagtgaccacaggggccccaggaggcctgtgggcgtgacgcgctctgcctgtgggtctgggtgctggtcggaggtgtktgcggtctgtgaagatactgctagccaaacgcttaggatttgtgcacttagcagtgtggatgtgacgctttccttcagaagctggaagaaaactgtattc

SEQ ID NO: 536109 - DNA, 201 bp, Homo sapiens
ctgctagaggctgatgctttacttgaggcactgtgatggtgctgagcaagcactccagtggcacttggggtcttgttcgttgtgggagagtttcttgtacyacctcgggctgagttgatggtagaagacgaattgtgctatttagggcatgtgggcgcattggcatctcagaatcgcaactttttggtactcactgtgtcc

SEQ ID NO: 536110 - DNA, 201 bp, Homo sapiens
tactgctagccaaacgcttaggatttgtgcacttagcagtgtggatgtgacgctttccttcagaagctggaagaaaactgtattctgtggtggcttcagartccattctctcacacctgtattttcttttacagctgaaactagaggaccgttctgtggtgccccgagatgtggtccggcacatgcgatccaccgtgagtc

SEQ ID NO: 536111 - DNA, 201 bp, Homo sapiens
gcagatgagttgtgtcctctgtgccctcggtgtgcatggcgtcacctatgcatgcatggcgtggagtgctagaggtgctgacttctcacacaaaatgaccyggaagtgtgaacaaacatcttcattccgtattcagtggaagaagcagtgatctgttccagtgcaagaggaaacactggttatgttggtcttactgatgga

SEQ ID NO: 536112 - DNA, 201 bp, Homo sapiens
caggaccccaggaggtgtttaggggacaagctctggagccgtagccggaagggcctggagctcattcagctcagtgttgcccaaccccctgatgaggcatstggtgcccagagatgtgacatgactccagcacacacagctggggagtggcaactctgtggcccctgcaggacctggtccctgtgccctgaagcttatact

SEQ ID NO: 536113 - DNA, 201 bp, Homo sapiens
ccacatgtgaagagcagaagcctgcccctgagtcagggagaggtgccaggcaggtggaaatcaggaccccaggaggtgtttaggggacaagctctggagcygtagccggaagggcctggagctcattcagctcagtgttgcccaaccccctgatgaggcatctggtgcccagagatgtgacatgactccagcacacacagc

SEQ ID NO: 536114 - DNA, 201 bp, Homo sapiens
tacagctgaaactagaggaccgttctgtggtgccccgagatgtggtccggcacatgcgatccaccgtgagtcctgcgtccccaccccagccccgggcctgrgggcagccaccttagggacttgagcctgcccacctcgcactctgcatgtgggagaactggccagctctgcagggggtgcgctggggttgcctgggctggg

SEQ ID NO: 536115 - DNA, 201 bp, Homo sapiens
tttcctcctggggacagtgatgacaggtttgatcaagggcagtgacagatgttgcaggcatccagggcctaaccctgtaccgttctccttatctgccgtgkcctaattctgttgctcagtttctgatctgtcctggcatggggagaaacgttttcactgaggatatctgctagaggctgatgctttacttgaggcactgtg

SEQ ID NO: 536116 - DNA, 201 bp, Homo sapiens
cggggggaatattgcgaattagcttgtctgcctcgtaaggccaacctgaaaactaaatcttaatctttgtgtgtgtgtgtgtgtgtgtgtgtgtgtgtgtrtgtgtatgtgtgtgtgtgtgtatctgtatatttaaacagataatatatgcaaatatcacaacattcaaaaggtttaaacaaatatgtagtgaaatgtttg

SEQ ID NO: 536117 - DNA, 201 bp, Homo sapiens
tcactgtcctgagatgagctgcttgttgctgttgtgccttgggagagatggaggtgcaaaggtgggcagttgagggtcttaggacctaatgacccagccargaagtgacattttggtcaactcccactctccaggccagctggtgtcccagtgatgccagcatcccgggatggtattcatttcatctgccttgaaatagta

SEQ ID NO: 536118 - DNA, 201 bp, Homo sapiens
tgtttttgctttaggacattagaggcctctttgcaccttccccatctctacttcacttttatccctgtttctctctgttttgtttgtttggtttttttttgttgtttgtttttgttttttcattttcctgttatactaagaggaactttttctattttttactacttaacccaccatgggggctcatggaatccagtggaa

SEQ ID NO: 536119 - DNA, 201 bp, Homo sapiens
gggcacatgtgctgctatttatgtttggtgactttctcagtgattgtttttagtttagccttttaagaatctaatctaattttgtgagtgtgtaaagtgtkgatttatccatgcctgctgcgtgacactgacagggagtgtcttccaccctaagcctggatcagttctgactgtcatggttagatcacagcaatccatggg

SEQ ID NO: 536120 - DNA, 201 bp, Homo sapiens
atcataaacccgaaaccttgaacccgggttggtttggtggcttgttttccagaatgtgaattcctatcagtaattgacacacacacacacacacacacaccacccctgtatctcacaccccttctttctctcctacttcccctccccttcaagaaaacatttctaagcaggaatcaggcctacgctgttttaggtccttgg

SEQ ID NO: 536121 - DNA, 201 bp, Homo sapiens
gcggcggccccccgaggtctttgagcaggagatcaggcaacactttagcactggtggctggcggctggtgaaccgtatcgagtcctggctggaaacccatrccctgctggagaaggcccaggcactgcccaacggggtgcccaaggccagcagctcgccagagcccccagctgtagccgagctgtcagactccggccaaca

SEQ ID NO: 536122 - DNA, 201 bp, Homo sapiens
caggtgctgctcttcctgcgtgatctgcacagtgtcctgggaaagagcaggtgcagatgcagatgccacatgtaggacacccccttccacccctgccaacyttggcctccctccctccctccctacctaggacctcttctcagctctcatcaagggccccactcgaaccccctacgaggatggcctctacttgtttgacat

SEQ ID NO: 536123 - DNA, 201 bp, Homo sapiens
gacattttctcagtccttgtcctcattttgatccatcagccttatgctctgtcacccaggctggaatgcagtggcgtgatcacaccttactgcagcctccrcctcctgggctcaagcagtgctcccacctcagcctcctgtgcagctggaactacacactcggctttttaaaatatttttgtagaaacagggtctcaccat

SEQ ID NO: 536124 - DNA, 201 bp, Homo sapiens
cggagaccatacaatctatttcttttgagtctctctcatagtacaattatagtacttcttacacagtgggatgatgaaatatttgtggattgacaggaacrtactttgataactgagtcctttccgtagcagtttgacgggtctaagacatggttgtgccgaaatgtgcatgagagtgtcgggtgtgtgtgcctggcgata

SEQ ID NO: 536125 - DNA, 201 bp, Homo sapiens
tgtagccgagctgtcagactccggccaacaagaacctgaggatggagggccagccccaggagaggcctcccagggctcagactcagagggcggtgcccagrgcctggcctcagctagcagggaccacacagaccagacttcggagaccgcaccagacgcatcggtgccacccagtgtgaaaccaaagaagcggagaaagag

SEQ ID NO: 536126 - DNA, 201 bp, Homo sapiens
gtggcaccgataagagcatgtgcagaggttccctcgccccagctagcgctctgccttccctgcttctcagctcatcactgacctcgcccattgccctgtcrgttgagatcccacacacacgcgtgtgtgcacagatgcacgcaaatagatgcacagattccagatgtctgtggagcggtggtctcccaacctcccccatgg

SEQ ID NO: 536127 - DNA, 201 bp, Homo sapiens
caaaaccaagagcgaagcggagtctgccagccctgaggagacgcccgatggctctgccagtccagtggagatgcaggacgagggtgcagaggagccccacraggcaggagagcagctgcccccattcctgctaaaagaaggcagagatgacaggctgcactcggcagagcaggacgcagatgatgaggctgctgatgacac

SEQ ID NO: 536128 - DNA, 201 bp, Homo sapiens
gtacatgtggagatgtgaatgcctactgcttacgatatctgtataaagtgctgtgtgattaaacttttttttacttgcatttttttttttttttttttttkttggctcattagcaagacaaggtgacaccattaaacctccctctgccattcatctgggctccgttgcctttgtgtccctcacacacacccttcctgggga

SEQ ID NO: 536129 - DNA, 201 bp, Homo sapiens
ttttgataatgtgaagctccaggccgagaggatgctgttgagcacattgcagctatgtaatttttggtgtatgtatgtaatatttaaggttggaaaaaaaactcaaaagcaaagatattaactcttattagaaaaaaagacaaaaaaaaagccaaagcatgatgcgtcttgtcagccttaagtgggctccacacctgtgct

SEQ ID NO: 536130 - DNA, 201 bp, Homo sapiens
aaaaggagatggagactttcctaccaccctttttagaaagctctaacagagaaggagagaaaggagagagccgacccagttctagccccacctgctgggtsctgagcagaagggctacacgggctctccttccctcgcctcctggttggagccacacagcccagctctcctctcctggtccacacagggggcaggagtggg

SEQ ID NO: 536131 - DNA, 201 bp, Homo sapiens
cttttgataatgtgaagctccaggccgagaggatgctgttgagcacattgcagctatgtaatttttggtgtatgtatgtaatatttaaggttggaaaaaaaactcaaaagcaaagatattaactcttattagaaaaaaagacaaaaaaaaagccaaagcatgatgcgtcttgtcagccttaagtgggctccacacctgtgc

SEQ ID NO: 536132 - DNA, 201 bp, Homo sapiens
ctggtgagatctcagcgaaagcgtgaggggaaaggcaggcattccacacagcccttggtgcaggcctgcagttggcccaccagcctcgcttctcccagcartctcttcacgtccatctctgggtgcatgtagactttcacaaacctccaggattttcctggattgtcagctcactatgctacgaagaatgcaagttccctc

SEQ ID NO: 536133 - DNA, 201 bp, Homo sapiens
gcttttgataatgtgaagctccaggccgagaggatgctgttgagcacattgcagctatgtaatttttggtgtatgtatgtaatatttaaggttggaaaaaaaactcaaaagcaaagatattaactcttattagaaaaaaagacaaaaaaaaagccaaagcatgatgcgtcttgtcagccttaagtgggctccacacctgtg

SEQ ID NO: 536134 - DNA, 201 bp, Homo sapiens
gtaagcatgcccttactgccagcaacccaggggcacgcgtgggacagggctctgggccctggtcacatgcctggggaggcttaagaacactgctggcctcscaggagtccagcccagctcacccccacttcttccccaaccagggtgaagcgtctcggatgctttgaccatgctcagcggcagcttggggagcgctgtctg

SEQ ID NO: 536135 - DNA, 201 bp, Homo sapiens
gcaccaagagcaagttccgagtggtggtggaagaggtgggtccgggcccaagggtaggagatggagtccttgacctccacaccctggagctgagctgctgyccctttccttcctgctcttgagggttgagccccgctcctcagcatctggaccctgttgatctcaaagggctttggggataaagggaacccaggctctggt

SEQ ID NO: 536136 - DNA, 201 bp, Homo sapiens
acaggtgtgagccatcacgtcggctgaggaatacaatctttttttttttttgagatagcgtcgcactgtcacccaggctagagttcaatggcacaatctcrgctcactgcaacctccgcctccgggttgaagcaattctcccacctcagcctcccgagtagctgggactgcaggcatgcatcaccacgcctggctaatttt

SEQ ID NO: 536137 - DNA, 201 bp, Homo sapiens
agatgtggtccggcacatgcgatccaccgtgagtcctgcgtccccaccccagccccgggcctgggggcagccaccttagggacttgagcctgcccacctcrcactctgcatgtgggagaactggccagctctgcagggggtgcgctggggttgcctgggctgggtctcccctggtgaccagggctgctgcaccacgggact

SEQ ID NO: 536138 - DNA, 201 bp, Homo sapiens
gactgtaatcccagcacttcgggaagccgaggcaggtggatcacctgaggtcagaagtttgagaccagcctgaccaacccggtgaaaccctgtctctacttaaaaatacaaaaattagccggatgtggtggcgggtgccagtaatcccagctactcgggagactgaggcaggagaatcacttgaacctgggaggcagaggt

SEQ ID NO: 536139 - DNA, 201 bp, Homo sapiens
tgtcgctcccactctgctcccagcaccatcaggtctttggagaaatgtaactccttgtcatagaaaggtcagaagagcccctggaggcagcatcctggtgrggtggagctgctgttgtctggagaccccacgggaagaatggcatttgctgccagcctccctctcctgggagcactgggcactgcctgccctgccagcctc

SEQ ID NO: 536140 - DNA, 201 bp, Homo sapiens
gccgttgtcttgggttctaattcccagtggaagggagtgtagccaccatgttaccatcccccagccccttgtcgctcccactctgctcccagcaccatcargtctttggagaaatgtaactccttgtcatagaaaggtcagaagagcccctggaggcagcatcctggtggggtggagctgctgttgtctggagaccccacg

SEQ ID NO: 536141 - DNA, 201 bp, Homo sapiens
cctggtgtatctaaaatcccctcactgtaataatacatttaaatcctgatgtgcccatacatgaaattttgcattgtgttctgttctttgtaaatgttatygtcttctccagggaagaggtcctcgtctagggacctgccctggtgccccagccatgggggcctccttgggccatgctgcccagggatgtcgttgactttc

SEQ ID NO: 536142 - DNA, 201 bp, Homo sapiens
gagctaagttccttgtcacaagccaggtgggcatgatgtcagtcactgcagagcacaggaggggctggggagctggagcttgagctgggccccctgacttkgtcccctttgcccagcagccatcggtgggccaggtggcccgtgtggacgtcagcagcaaggtggaggtggtgtgggctgacaactcaaagaccatcatcc

SEQ ID NO: 536143 - DNA, 201 bp, Homo sapiens
caacggaaacagcaccatcatggagactgggaggagtttctgcccaattctgcaggtgcagtgagacattcatctcttcacccagacgtctcttcgcggaygctgatgcatccatgcagcatcaaacacctgctcctcttcccttcctcctgtctcgcctgggcctgcaatagctgtttcctgcccctggacatgcttagc

SEQ ID NO: 536144 - DNA, 201 bp, Homo sapiens
cattgaacctcatctgcccacttctccacctccacttctcccaaggcacaacagcagcaagcagctcctctaaatgcagtgagccaggactcaaataccarcggaaacagcaccatcatggagactgggaggagtttctgcccaattctgcaggtgcagtgagacattcatctcttcacccagacgtctcttcgcggacgc

SEQ ID NO: 536145 - DNA, 201 bp, Homo sapiens
acatccaagttctaagtctgtgtttataacatctacatgttgcaggaatgcccgagctggcaccagaccagccagcagactggcgatacccctgaagcttyttgcttgcagaacaaaggcagaacttttctagagtgacccttgcacagtacaggccttttggaatcctaggatgcccacagatgatgagcttgttctagg

SEQ ID NO: 536146 - DNA, 201 bp, Homo sapiens
ggactgtgataaaatgagtttttgtgtgaggcctggagagccctccgggaggctgtgggctcctagaagagggaagttttttgcctaatagtatagaaaamattgtcagaaggctgaggttccaggtctcacatgttggtgtctgttctctattatcccttcttcagggcgtcccagggcagtgtggggcagctatcccag

SEQ ID NO: 536147 - DNA, 201 bp, Homo sapiens
gttgtttatatgtatggaggtaaatattcaaacagctaaaaaattaaaaagtatttgcttcaaaagagcacagttgagagggtaagatgggggactgcctktttttgttaagccttttagtactatgttttttttttaacttaggcatgcattgttttgatacaattaagctaaactattatttaaaaaaatacaatatga

SEQ ID NO: 536148 - DNA, 201 bp, Homo sapiens
cattttcagagtgtggctgttgattagcagccaaggcttggcatttgggggagtgtggtgcgaagggggccactgctgcgctgggtaggggtgaggctccrgatcatgagctgtggcaggagtgaggcagcagctttctgctgccccaaggttatgtcatgcttctgtgcattcgcagttgcagggaggtgatgaaggagg

SEQ ID NO: 536149 - DNA, 201 bp, Homo sapiens
cactgggattgatctaaaatcacaggtattaggaaaacaaaacgatgcaggaagccaggaccactgtgggaagataggcccccctgcacttccatagcccyctgctcctccatagccccctgctcccacttcagtgggaacttggcccccggggaaacaactggccttggatcagggctcttgtgtgttatttttactgcc

SEQ ID NO: 536150 - DNA, 201 bp, Homo sapiens
caaagtgctgggattacaggcatgagctaccgcgcctggccgaccatgccctcttaacggtatttccttccttggggttctattataccagactataccamatgtttctcttttttgccttttgtcttcttcctcttacccatagatgtgcagcttttccaaagacctctcttttctttatctcttcctccccagtttttt

SEQ ID NO: 536151 - DNA, 201 bp, Homo sapiens
tgcccagctgcttacttgatagctccattgtgccatgtagactttgtgggtataaaatcttgtgattgtgactgcccttcccatccccaagtctgtggacytaaaaaaaaaaaaatgttctgactgggcacagtggctcacgcctgtaatcccagcattttgggaggccgaggtgggtggatcacttgaggtcaggagttc

SEQ ID NO: 536152 - DNA, 201 bp, Homo sapiens
cactgacagagagatttcctgcaggcacccttaaaaagagaggccttcatttgcatcctgcaagagagctggtcttttcacactcagcagctccgatgatrttcttcctcctccttttaattctggtcctttttgtgggagctccctctggaagagggcagttgaagatagataccttgaccggcagattcagcggactgt

SEQ ID NO: 536153 - DNA, 201 bp, Homo sapiens
gtttaaattgatagcataactatacctgggaaacagtctgactatgataattgaaagtaaaaaaaaaaattaaaacactgagtcatgcttggaaaaagaaraaaaaaaaggcagtcagtcctacccaacaatgacatgaatattcccagctagcactgacagagagatttcctgcaggcacccttaaaaagagaggccttc

SEQ ID NO: 536154 - DNA, 201 bp, Homo sapiens
tatgatcctgctcggatggaataaccagaagtgtagctgggtcaagcctaggatggccacttggttattagcagacagcattctgatgtctgtcagagagmgccagccctgtgccttcagaagatcacttccatgagaaagagggtgatgctgcaccaaagaggcaccttgggaagcaaaaggtgcacgaggcgggttgtg

SEQ ID NO: 536155 - DNA, 201 bp, Homo sapiens
acagagcggtttcctagaaaaggggcgggtgcgcgccagagggtctaaaagtttgggtataggcagaaagtattagaacttttttttttttttttttttttgagacagagtctcactgtcgcccaggctggagtgcaacggtgcgatctcggctcactgcaacctccacctcccgggttcaagtgattctttggcctcagc

SEQ ID NO: 536156 - DNA, 201 bp, Homo sapiens
tgtggctctctaaggcctgaataacagcaccatgccttctgccttcttgaagccttgccggcctgtgccagtcaccccacccagcaccttgacagctactmctccctgcttggtaagctcattccccatctcatcccgatctctggttcagcatcacctcggaggggcctttcctgaccacacatttaaaattcttcactg

SEQ ID NO: 536157 - DNA, 201 bp, Homo sapiens
ccctgtcttgaactatagtggcgccacacctgtgctggcagtggagtgggcacatggcagcgtggagctagacccttcaagctcagggacaaccaaagagycagagaggcctcagctgagacaggaggggagggagagaggctggttaggagcccctgaggtccccagcacaattggaagctctgtctctcccacaccccc

SEQ ID NO: 536158 - DNA, 201 bp, Homo sapiens
tttgaaaaatatatatgcactaacacacgtgacccctgtcttgaactatagtggcgccacacctgtgctggcagtggagtgggcacatggcagcgtggagytagacccttcaagctcagggacaaccaaagagccagagaggcctcagctgagacaggaggggagggagagaggctggttaggagcccctgaggtccccag

SEQ ID NO: 536159 - DNA, 201 bp, Homo sapiens
gtcctgtttcactgtcctgagatgagctgcttgttgctgttgtgccttgggagagatggaggtgcaaaggtgggcagttgagggtcttaggacctaatgayccagccaagaagtgacattttggtcaactcccactctccaggccagctggtgtcccagtgatgccagcatcccgggatggtattcatttcatctgccttg

SEQ ID NO: 536160 - DNA, 201 bp, Homo sapiens
tgtacatgtggagatgtgaatgcctactgcttacgatatctgtataaagtgctgtgtgattaaacttttttttacttgcattttttttttttttttttttkgttggctcattagcaagacaaggtgacaccattaaacctccctctgccattcatctgggctccgttgcctttgtgtccctcacacacacccttcctgggg

SEQ ID NO: 536161 - DNA, 201 bp, Homo sapiens
gtgtacctccttcaggactgtgataaaatgagtttttgtgtgaggcctggagagccctccgggaggctgtgggctcctagaagagggaagttttttgcctratagtatagaaaaaattgtcagaaggctgaggttccaggtctcacatgttggtgtctgttctctattatcccttcttcagggcgtcccagggcagtgtgg

SEQ ID NO: 536162 - DNA, 201 bp, Homo sapiens
aaaaaaaaaaaaaaaacaacttgggctcatgagttcccatgggactctctgcactgctggttggtggtggggttcattgcttttctttcctttttttttttgtgagtcacgttcttctactagcagagtttgttttagttgtcattgccagcatttaagtgaccttgagccagtatcttcctttttcggcgactcagttct

SEQ ID NO: 536163 - DNA, 201 bp, Homo sapiens
aaaaaaaacctgttcctccttccaagggacctgtggaggctgctccattttccacagcttcatggtcttttgctttcagcactgctgaattgaatatctaracttcctccaactgttggcttccaccattgcccttcagaggccagcacagggtgcagacagccaaatggcgcctcgcagttgctggttgtaaggcatggc

SEQ ID NO: 536164 - DNA, 201 bp, Homo sapiens
tggcgtgaacccaggaggtggagcttgcagtgagccgagatcgcgccactgcactccagcctgggtgacagagcgagactccgtctcaaaaaaaaaaaaamaaaacctgttcctccttccaagggacctgtggaggctgctccattttccacagcttcatggtcttttgctttcagcactgctgaattgaatatctaaact

SEQ ID NO: 536165 - DNA, 201 bp, Homo sapiens
tggatgacatcaagaagctacaggaaaacctcaagaagaccctggacaatgtggccattgtagaggaggagaagatggaagcagtgcccgacgtagagcgyaaggaggacaagcccgaggggcagtcacctgtgaaggctgagtggcccagcgaaaccccggtgctgtgccagcagtgtggcggcaagcctggcgtcacct

SEQ ID NO: 536166 - DNA, 201 bp, Homo sapiens
gccgggcgtggtggcgggcgcctgtagtcccagctactcaggaggctgaggcaggaggatggcgtgaacccgggaggcggagcttgcagtgagccgagatygcgccactgcactccagcctgggccagagagtgagactccatctcaaaaaaaaaaaagaaatgttagacaataaatagctcaccaactctgaggttgttt

SEQ ID NO: 536167 - DNA, 201 bp, Homo sapiens
gaggtaccaccgatggaggtggaaggactataacagaggtatttgacccagaagacctttgtgagggcagagacaaagttgtttttttgtttgtttttttwaaaaaaaaaaaaaaaaaaagcttaagtgaaaaagcatttccagaacatcgcaggtgcctttcgacttcactcctgacctttgccatgtcggaattgctta

SEQ ID NO: 536168 - DNA, 201 bp, Homo sapiens
agggctagaactctggccagctgactgggccttttgctaactgttttctgtcccctctgtgccggggtgtcactgagctttgcgggacaggctggtctgtygtgccttcagctcagggaatgtggctcccgagcatagggctggactgagaggcgttaggtgagccagagaaggcctcagacacagggcttagagagggca

SEQ ID NO: 536169 - DNA, 201 bp, Homo sapiens
gagtggggagggagattccgttttgaacacattgcaaattagatgcctggaggcatccaggcaacgagagacacctcccttcgaagcgtgtatttagcctrtcccccatcttcctttaattcttattgctgtcctatttcataacctcataattgcagtttctaaacaaacattttttagatttatagaacagtttcaaag

SEQ ID NO: 536170 - DNA, 201 bp, Homo sapiens
ggatttttcaaggataattttaatgatgttcaatttgacttagtacctaaccccccagtaaaatctgaaatctatcgaacctaagagaacagtaataaagytttcaattattagagtagtgaggtagagagaaaggtgaggtggttggagaaggtttctcagatggggcgcaaaggtgtgaaggacgtttgaggaataaca

SEQ ID NO: 536171 - DNA, 201 bp, Homo sapiens
ctcacacaaaatgacccggaagtgtgaacaaacatcttcattccgtattcagtggaagaagcagtgatctgttccagtgcaagaggaaacactggttatgytggtcttactgatggatttaagggatttttcaaggataattttaatgatgttcaatttgacttagtacctaaccccccagtaaaatctgaaatctatcga

SEQ ID NO: 536172 - DNA, 201 bp, Homo sapiens
tagagatacaatgtgagccacagctgaaaaaagtaaatagaggccaggcatggtggctcatggctataatcccaacactttgggaggccaagccaggcggwtcacttgaggccaggagttcgagaccagcctgggcaacatgatgaaaccccatctcttcaaaaagtacagaaatcatcttagcgtggcagcttacgcctg

SEQ ID NO: 536173 - DNA, 201 bp, Homo sapiens
ttgatgctgctggctgggactgtcttttgaattgcacttatatgggcccttccaaacctcgttgatgtcaatgggttcagttttagtacgtctttggttcraggctttttctctcccctctgcttattcttctagtgccagtgttaatgaaccgggaattgtccaaaggtgggctgcaggaggggcaggaaagggatgagg

SEQ ID NO: 536174 - DNA, 201 bp, Homo sapiens
cacctgtggtcgaaatgaagctgcttctggctgcatttcccctgtaagaaccccgcctaaagcacttgacaaatggcagattccacacacgtgggtttccwgaatggttatcagcacccagtcctcaccttaggaggatggctaagtacgaacgaggctctctattggaaaaagaatgccccacccgactgcaaatgaatc

SEQ ID NO: 536175 - DNA, 201 bp, Homo sapiens
agatgctgggctgccagtccagggccatgctttatatatatacatatacatacatatacacacatatatacacatatacatatacatacatatacacacayatatacacatatacatatacacacacacacgtatgtgtatataaagccacactttatatatctatacacgcacatatatgtatatatgtatacacatacg

SEQ ID NO: 536176 - DNA, 201 bp, Homo sapiens
gctccccaggcagactacgtgcattgtggactaggctagagctagctagagctggtgtcacctgtggtcgaaatgaagctgcttctggctgcatttcccctgtaagaaccccgcctaaagcacttgacaaatggcagattccacacacgtgggtttcctgaatggttatcagcacccagtcctcaccttaggaggatggct

SEQ ID NO: 536177 - DNA, 201 bp, Homo sapiens
acagagacagcaaatcctaaagcttgtgtgctatcacgcacatgcagactcttgggaaacatcttcatgaatgaccagtttgctccctcccacttactacwaatagtattcttagtcttcttccagatgccctgtggtctgtgctggagctgtatgggccccttactagaccactctgtctcccaccccccgtactaggtg

SEQ ID NO: 536178 - DNA, 201 bp, Homo sapiens
tgtcatcagttctttgagaggcctcttgcatcctgtgcctgcatttccctttcacaaccctggtttgctctctgcttgcctcatgcctgcactgtgtagcyttctccctggtctccctgcctctagtcctccttcaaccagtgaacagcgctgccgccaactgacctccaaagggctgacctcccaagtgatcgcctggat

SEQ ID NO: 536179 - DNA, 201 bp, Homo sapiens
ataccaaaatgttgaaagccagtaattgctaacccccaaccattatgagtcagcagttgttaacatcctgccatatttgccttatctgtatgcttatgtawatatatttcctcctgaattatgtctggtactaactcctgctaagttagtggcagacatgatagcacttcacccctaaatacctaagcttgaatcttctca

SEQ ID NO: 536180 - DNA, 201 bp, Homo sapiens
tccacgttgtagctttgttaggacttccttccttttgtggctgaaggatgctccattgtgtggctcaaccacattttatatttgtgccttcatctgctgaygggcgcttgtgctgttttcctgctccggctctgcagagccgtgctgccgggcacttcctgtccaggtttctgtgtggacacagtgcttcagtgtgtgaag

SEQ ID NO: 536181 - DNA, 201 bp, Homo sapiens
aatggctctgcttaccgcccccctcccttccagattgtggatccgctggcccggggccgggccttccgccacccggaggagatggacaggccccacgcccygcacccaccgctgacccccggagtcctgtccctcacctccttcaccagtgtccgttctggctactcccacctgccacgccgcaagagaatgtctgtggcc

SEQ ID NO: 536182 - DNA, 201 bp, Homo sapiens
atatatatacatattcacagaattgtgccactatcaccacagtttcagattgctttcatcaccccctaaagaaagcctgcaccctttagctgtcacccccygcccagtccccaccttcccagtcctaagaaccactaccctgcttctgtctatagatttccctcttctattccgagctttcatatgaatggactcatgcag

SEQ ID NO: 536183 - DNA, 201 bp, Homo sapiens
gtgacagagcaagactctgtctcaaaaactatatgtgtgtgttgtgtgtgtgtgtgtgtgtgtgtgtacatatatatacatattcacagaattgtgccacyatcaccacagtttcagattgctttcatcaccccctaaagaaagcctgcaccctttagctgtcaccccccgcccagtccccaccttcccagtcctaagaac

SEQ ID NO: 536184 - DNA, 201 bp, Homo sapiens
aggatttcccccgccccaccctaaaggaggaggaaatagagtctgtcccaccctaagccccagtccctctccccaggtctctttggcatctcccagctggkctggggctgaaggcccttctctggggttggccacagtgaggccaggatctggctgggcaggtggcagtgttccgcctgtgggctgggtgcggaggcgggc

SEQ ID NO: 536185 - DNA, 201 bp, Homo sapiens
gtgtttctgacagtctggtctagtgccccataaagagctcattgaaaaccggcttgtggcagcgtgggcttcctgcacagtctggagtataaagggaagcratgttaacgccccccgttcacccgagagctctgcagaagacacagcagcaggcaggagcgtcatggtgcagaggggagggactggatgaggagttaggaa

SEQ ID NO: 536186 - DNA, 201 bp, Homo sapiens
agtgctgggattacaggtgtgagcgcctgcacccggcccaaaaatatgtggttttgtttgttttttgaggcagagtctccctctgtcgcccaggctggagygtaatggcacaatctcggctcactgcaacctccgcctcccaggttcaagcaattctcctgcctcaacctcccgagtagctgggactaaaggtgtgcacca

SEQ ID NO: 536187 - DNA, 201 bp, Homo sapiens
agtccccagccccctctcccctctgctaactctgccggtggagctcacgccgcagctcatgccaaccctgcccttctgttttgcctctcatgactctccccaaattctgcccccaggcccccagccagccttcttgccactttcctgccctttactcttgccccttctacctcttgccagggcagcgtcactggctacgtg

SEQ ID NO: 536188 - DNA, 201 bp, Homo sapiens
tcagagtccccagccccctctcccctctgctaactctgccggtggagctcacgccgcagctcatgccaaccctgcccttctgttttgcctctcatgactctccccaaattctgcccccaggcccccagccagccttcttgccactttcctgccctttactcttgccccttctacctcttgccagggcagcgtcactggcta

SEQ ID NO: 536189 - DNA, 201 bp, Homo sapiens
ctgggcccgaaatatcacagggagtaaagccaggaaccgggctcactctcatcgtggtcaggggcacacaggaagggccagccccaagaaagtgcttgctrgtaaccctggggccctggctgttttcatttcaccccctaggcctggactctcagtctctcttctgagggctgggggctttctttgacatgggtgagcagg

SEQ ID NO: 536190 - DNA, 201 bp, Homo sapiens
gcctcagctctggatactgtggtggcctctccaccaaggtttctgtccttgctgtgtaaactctgccccagacaaggtgacagatgacagcagaagtcaaggagctgtgcacgcctgcccgtgagtgtgcgagtggcatggctcagctggctggtgcttccctttgggcctggcccccgcctgccgctggcacagcacagg

SEQ ID NO: 536191 - DNA, 201 bp, Homo sapiens
ggcctcagctctggatactgtggtggcctctccaccaaggtttctgtccttgctgtgtaaactctgccccagacaaggtgacagatgacagcagaagtcaaggagctgtgcacgcctgcccgtgagtgtgcgagtggcatggctcagctggctggtgcttccctttgggcctggcccccgcctgccgctggcacagcacag

SEQ ID NO: 536192 - DNA, 201 bp, Homo sapiens
gctcccagggagatgggtatggagtccctggcttcgtacaaggagaggaaaaacaaaacttgcccaggaaccttgggatgtgaaggagaggaaacagctgrgggggtttatttttatttttatttttatttttgagacgaagtttcgctcttgttgcccaggctggagtgcaatggtgcaatctcggctcactgcaacctc

SEQ ID NO: 536193 - DNA, 201 bp, Homo sapiens
tggcctcagctctggatactgtggtggcctctccaccaaggtttctgtccttgctgtgtaaactctgccccagacaaggtgacagatgacagcagaagtcaaggagctgtgcacgcctgcccgtgagtgtgcgagtggcatggctcagctggctggtgcttccctttgggcctggcccccgcctgccgctggcacagcaca

SEQ ID NO: 536194 - DNA, 201 bp, Homo sapiens
cacacacacacacagacacacacaaacagacacacagagacacacacaaacacacagacacacacagactcacacacacacacacacacacacacacacacacactctctttctctccagcccaggagggggacttttgttcctataagaggaggaataaatcacactacaaatgctttgggtgacgcacttggggcccga

SEQ ID NO: 536195 - DNA, 201 bp, Homo sapiens
gtgctgggattacaggcgtgagccaccgcgcccagccgcccagagatgtttgaaccaactttaggcaagttggttcttggtctgggctgcgtgccctggcrtcagggtcctgacactgcgccaccccgcaccgcccaccgctgctctcccggtctccattccagccctcccgcctcctgcccacaatggcctctgctgaca

SEQ ID NO: 536196 - DNA, 201 bp, Homo sapiens
ccacacacacacacagacacacacaaacagacacacagagacacacacaaacacacagacacacacagactcacacacacacacacacacacacacacacacacactctctttctctccagcccaggagggggacttttgttcctataagaggaggaataaatcacactacaaatgctttgggtgacgcacttggggcccg

SEQ ID NO: 536197 - DNA, 201 bp, Homo sapiens
cagacccagcggaaggactgctcggtgggggcaggccctccctcctacccctgccagaccctggtcccggactagctccacttgccctgtccttcaagggyagtgaccacgttccctcctccccgccccacctttcccagacccccatagatgagactgagccctggggagatgggaaaagcctctgtccttgcccactcc

SEQ ID NO: 536198 - DNA, 201 bp, Homo sapiens
ctttctcctcctacctctgccctgtgagcccatccataaggctctcagatgggacattgtgggaaaggctttggccatggtctgggggcagagaacaaggrgggagacacaagtagacctcaggtagaacgacactgggcggagccaccccagggcctgctcccagggagtgctcgaggcgcatcaggcccgttttttacc

SEQ ID NO: 536199 - DNA, 201 bp, Homo sapiens
acctcatgattcccccaccttggcctcccaaagtgctgggattacaggtgtgagcgcctgcacccggcccaaaaatatgtggttttgtttgttttttgagrcagagtctccctctgtcgcccaggctggagtgtaatggcacaatctcggctcactgcaacctccgcctcccaggttcaagcaattctcctgcctcaacct

SEQ ID NO: 536200 - DNA, 201 bp, Homo sapiens
ttacaggcgtgagccactgcacccagccccggctaatttttgtattcttagtagagacagggtttcaccatgttggccaggctggtctcgaactcttgacytcatgattcccccaccttggcctcccaaagtgctgggattacaggtgtgagcgcctgcacccggcccaaaaatatgtggttttgtttgttttttgaggca

SEQ ID NO: 536201 - DNA, 201 bp, Homo sapiens
gatcccacactcagcctcccctgtctcccccgatggggtgcaaatccctctgtgagtgctggggcagagtccctcctccaggccagccaccagcctggggrcatccccagacctcaccctggcccccaagccccttctgagcaccctggtggggtctgggagtattttggtgggggattcaggctgaaagccaccatcccc

SEQ ID NO: 536202 - DNA, 201 bp, Homo sapiens
aagtgctgggattacaggcgtgagccactgcacccagccccggctaatttttgtattcttagtagagacagggtttcaccatgttggccaggctggtctckaactcttgacctcatgattcccccaccttggcctcccaaagtgctgggattacaggtgtgagcgcctgcacccggcccaaaaatatgtggttttgtttgt

SEQ ID NO: 536203 - DNA, 201 bp, Homo sapiens
gtaatattgagaaaaataacaggggccatcttgactctaatgttctgctccaatcaggttcccagaccagaggactgttgttaggtgattggctgtgaacrccctgaggccagtgcccctcgctgcttggcactcggagatgcctgattagcacctttaatcccttaccaatgaggcaggtggaattggccccattttaca

SEQ ID NO: 536204 - DNA, 201 bp, Homo sapiens
tagaccctgggaggatactagcatcttatgcatacacaaactgaggctcagagatgttaagtggcttgcccaagatcgcacagtggttagagatgggcctrtgaccctgtcttctgccatcgggacagattttcactgtctggaggcaggtggaaaccgggtgggctcctactttgtaagcacaggacagtgccctgtctg

SEQ ID NO: 536205 - DNA, 201 bp, Homo sapiens
tctgagcctccattcaccatctacagaatggaagagacgctaatgtcaccctggaaggtgttttgaagggtaatgtgtgtaaagggccaaacaaggccccrcacagttaaggacttaatcctgcccggccccgggagggcttccggcatcttggggttcccctcaaaggatggcctgggcaggacttcttaaaaacaaaca

SEQ ID NO: 536206 - DNA, 201 bp, Homo sapiens
tcccctccctttcccttccccagattgacctgatccacctgggggccaagttctcaccctgcatccggaaggacgggcagatcgagcagctggtgctgcgmgagcgagacctggagcgggactcaggctgctgtgtccagaatgaccactccggatgcatccagacccagcggaaggactgctcggtgggggcaggccctc

SEQ ID NO: 536207 - DNA, 201 bp, Homo sapiens
cttggcaccaacccagcccagtgggttgatctctgaggacctcgtcatactcagccgggcagtctgccctggggggtggggtcaggactccccagcacttygggatggaaggaggcgaagccagcgctgctggactagccttaaagaagcgggagacatcctagctccgcctcaagatttctcctctgcacccagcattct

SEQ ID NO: 536208 - DNA, 201 bp, Homo sapiens
ccgccccacctttcccagacccccatagatgagactgagccctggggagatgggaaaagcctctgtccttgcccactccagtgggggtgacctggccccgrcatgacccaccagccttcttctgccctccaggagactttggccacttttgtcaagtggcaggatgacactgggccccccatggacaagtctgatctgggc

SEQ ID NO: 536209 - DNA, 201 bp, Homo sapiens
cccagagatgtttgaaccaactttaggcaagttggttcttggtctgggctgcgtgccctggcgtcagggtcctgacactgcgccaccccgcaccgcccacygctgctctcccggtctccattccagccctcccgcctcctgcccacaatggcctctgctgacaagaatggcgggagcgtgtcctctgtgtccagcagccgc

SEQ ID NO: 536210 - DNA, 201 bp, Homo sapiens
aaatccagaaatttccaggggagggcactgtggtgggtggggcccagcgctgtgtccagctcgaggcctggctgcactgccacctcctttggtgcccaccyctgtgtcttgccagcagctgctgcacattgggcttcggggatgcaggactccagcacccccagctcagcctgcttcctggaccaggaaccccagccgagg

SEQ ID NO: 536211 - DNA, 201 bp, Homo sapiens
gtggggcccagcgctgtgtccagctcgaggcctggctgcactgccacctcctttggtgcccacccctgtgtcttgccagcagctgctgcacattgggcttyggggatgcaggactccagcacccccagctcagcctgcttcctggaccaggaaccccagccgaggagggggcatttgtatctctgccatccctgctggcaa

SEQ ID NO: 536212 - DNA, 201 bp, Homo sapiens
atcatccactcatttgctcctccagacgcttctctggggaggaaccgttactctcccccttgtgcaggtcaggacttgggtgatgagttgtcaggtgactmacccgacagcaaatgcaagaccattggcccagtatgcgctgccggctccattgcttttgatcatgaaccccacccccggcagagcttggccagtttgaga

SEQ ID NO: 536213 - DNA, 201 bp, Homo sapiens
tatatatatatacatatacaaacacacacacacacacacacacacacacacacacattatatatatatatttccaaatgaaagcaaattggggcataaatsagggttgaagtttgttctcagggttttcagaataggaggctaaagaaaagccagcccaggacctgggctgcacacaccaccgcctgccctccctccttcc

SEQ ID NO: 536214 - DNA, 201 bp, Homo sapiens
atcactaagtggccggtgagtgtccctggcggggagtggtctgggaaggtcagggatgggggacctgcctgctgcacagcccacttccctgccggtgcccsctcctggcagatctgcacagagcaggccaggagcaaccacacaggcttcctgcacatggactgcgagatcaagggccgcccctgctgcatcggcaccaag

SEQ ID NO: 536215 - DNA, 201 bp, Homo sapiens
ctttggccatggtctgggggcagagaacaaggggggagacacaagtagacctcaggtagaacgacactgggcggagccaccccagggcctgctcccagggrgtgctcgaggcgcatcaggcccgttttttaccagtttatatcacggtcttcatttttaaaagtaacgctaactttgtacggacgatgtctcatggattaa

SEQ ID NO: 536216 - DNA, 201 bp, Homo sapiens
actgggctccagccaggggcctcacaggcagatccgccccccacctccctgtaggcacgcgggcacacacgtgccatcaccccttccacacactcaggtgyacaggcgtagacaagcgtatgcccacctgtcccttgtctgcttccgcaggggcgcagcccagtggtttggagtcagcggcgactgggaggggcagcggca

SEQ ID NO: 536217 - DNA, 201 bp, Homo sapiens
ttgccctgtccttcaagggcagtgaccacgttccctcctccccgccccacctttcccagacccccatagatgagactgagccctggggagatgggaaaagyctctgtccttgcccactccagtgggggtgacctggccccgacatgacccaccagccttcttctgccctccaggagactttggccacttttgtcaagtggc

SEQ ID NO: 536218 - DNA, 201 bp, Homo sapiens
ggttcttggtctgggctgcgtgccctggcgtcagggtcctgacactgcgccaccccgcaccgcccaccgctgctctcccggtctccattccagccctcccrcctcctgcccacaatggcctctgctgacaagaatggcgggagcgtgtcctctgtgtccagcagccgcctgcagagccggaagccacccaacctctccatc

SEQ ID NO: 536219 - DNA, 201 bp, Homo sapiens
cagaggggagggactggatgaggagttaggaaaacacacgctggccttgacggagaaaagttagacaatggcgattttaaattcagaatgaggctgggcgmggtcgcctcatgcctgtaatctcatcactttgggaggctgaggcagccagatcacttgagcccaggagttcgagaccagactagacaacatagcaagact

SEQ ID NO: 536220 - DNA, 201 bp, Homo sapiens
gccccagctcggtgagggcccaggctgggggacatcatctgagccaggagtccctgtgccctgtcactcccagctgggcaggtgggctcctcacccacccrcaggcccctcatcaggggagactctgcggggcagaggtggagtgatggacccctcccaggtctggggctcaaactcactctctcccctccctttcccttc

SEQ ID NO: 536221 - DNA, 201 bp, Homo sapiens
agtcctgtccctcacctccttcaccagtgtccgttctggctactcccacctgccacgccgcaagagaatgtctgtggcccacatgagcttgcaagctgccrctgccctcctcaaggtgcggggctccctcctgcagggcccccacctctgcccggcctcccttccttgcccctcccttccactcctcatagtagcatcccc

SEQ ID NO: 536222 - DNA, 201 bp, Homo sapiens
atggccgagccccagtccccgggccccggcgcggcaagcgcatcgcctccaaggtgaagcactttgcctttgatcggaagaagcggcactacggcctcggygtggtgggcaactggctgaaccgcagctaccgccgcagcatcagcagcactgtgcagcggcagctggagagcttcgacagccaccggtgaggtgtcgccc

SEQ ID NO: 536223 - DNA, 201 bp, Homo sapiens
gccaggacccgctgttcgtgggatgtctggggagctgtgtgaacccacaggccgttttgtttctctccatcagcagctgtgggctgaagcgtgtaccggcrgagtgggttgagatcgtgtctgcgcccacttgccaccagctccggcctctggggaggtggtgctgagagggagggagagtggctcctgtttggctcctgg

SEQ ID NO: 536224 - DNA, 201 bp, Homo sapiens
agcccaatctgaaccctgtctccaggacctgcgaggagccagcctccagcggtgcccacatctggcccgatgacatcactaagtggccggtgagtgtcccyggcggggagtggtctgggaaggtcagggatgggggacctgcctgctgcacagcccacttccctgccggtgccccctcctggcagatctgcacagagcagg

SEQ ID NO: 536225 - DNA, 201 bp, Homo sapiens
aggactgttgttaggtgattggctgtgaacgccctgaggccagtgcccctcgctgcttggcactcggagatgcctgattagcacctttaatcccttaccartgaggcaggtggaattggccccattttacagatggggagactgaggtgaggaaggttaaagcactcagtggtgggcatgccccctggagccggccctcct

SEQ ID NO: 536226 - DNA, 201 bp, Homo sapiens
gtgactcctacctgtctatacctggtgtaaccacacacacacacagacacacacaaacagacacacagagacacacacaaacacacagacacacacagacwcacacacacacacacacacacacacacacacacactctctttctctccagcccaggagggggacttttgttcctataagaggaggaataaatcacactac

SEQ ID NO: 536227 - DNA, 201 bp, Homo sapiens
cttaccgcccccctcccttccagattgtggatccgctggcccggggccgggccttccgccacccggaggagatggacaggccccacgccctgcacccaccrctgacccccggagtcctgtccctcacctccttcaccagtgtccgttctggctactcccacctgccacgccgcaagagaatgtctgtggcccacatgagct

SEQ ID NO: 536228 - DNA, 201 bp, Homo sapiens
caacactctgctcccaggtgaggcgaggcaggcctggagtagtggaggagaggacgctgggcatggcagcctgctggggccggggctcacgcactccctcycatgtcggagcctcagactcagcctgcttctggggcgctgagcaccatatgcccactcccaggtgcactgcttggacaaggtgtgtgggctgctgccctt

SEQ ID NO: 536229 - DNA, 201 bp, Homo sapiens
tgtgtgtgtgtgtgtgtgtgtgtgtgtgtgtgtgtgtgtgtgtgtgttttcagacagagtcttgctctgtcgccaggctggagtgcagtggcgcgatctcrgcttactataaccgctgcctcctgggttcaagccatcctgcctcagcctcccgagtagctgggattacaggcacgtgccaccacgcctagctaatttttt

SEQ ID NO: 536230 - DNA, 201 bp, Homo sapiens
gctcagccaggaataaaagaaacttccaactgggcgttgggtgtgtgccaggcactgtacattcatatctgctgtcatcttccctggctccctccgtggtrgggcatcaacccatctcacagcagaggaggcaggctctgcagcacccacttgcccaaagtctcccagcaggtaggtggcccaggcaggtttgagtcccat

SEQ ID NO: 536231 - DNA, 201 bp, Homo sapiens
ttcaccatgttggccaggctggtctcgaactcttgacctcatgattcccccaccttggcctcccaaagtgctgggattacaggtgtgagcgcctgcaccckgcccaaaaatatgtggttttgtttgttttttgaggcagagtctccctctgtcgcccaggctggagtgtaatggcacaatctcggctcactgcaacctccg

SEQ ID NO: 536232 - DNA, 201 bp, Homo sapiens
cagcagtggtaaatggtgtctgagtctgtgtttcgttggatgtgtctgaggtccgctgctgccagctgggttatgctgtctccaaagctatctgcagtggsggaggccctgagcctgggcaggggagggtacagaggcctcaacccatgggacctgggggtgatctgaactctgcacttcactttttttcaggatttcccc

SEQ ID NO: 536233 - DNA, 201 bp, Homo sapiens
agagggtgttaattctggtggagtcagaggggaactggggactggtggcacacgcacaggaaagccccagatggggtactgggcaacagccactgaaattygggatgtacttactcttcaacccagccattctgcttccagaacttggtcttgtaatagttaaacaagcacacgcggtgtatgcaagggtgttagttgcaa

SEQ ID NO: 536234 - DNA, 201 bp, Homo sapiens
cacccccaccccaacttctgcacgagttggaggcagttgatctcaatggtggaaagtggctggtgcaaagtcatgcttccatactccatgtttaggcttcrtgggtgtcaaagctgggccgtgaccttgtcccattccctcagagaagggaactgaggccagagggtggagctgctctcaggccgctgcccaggcctcttg

SEQ ID NO: 536235 - DNA, 201 bp, Homo sapiens
tacctcagcctcccgagtagctgagattacaggcatgcgccaccacacccagctaattttttgtatttttagtagagacggggtttctccatgttggtcakgctggtctcgaactcccgacctcaggtgatctgcccaccttggcctcccaaagtgctgggagtacaggcatgagccaccgcgcccggccacagctggggg

SEQ ID NO: 536236 - DNA, 201 bp, Homo sapiens
catatctggctaattttttaatttttttatacagatgggatctcactatgttgctcaggctggtcttgaactcctgggctcaagtgatcttcctgcctcartctctcaaattgctgggattacaggcatgaaccaccgctcccaaccttcagtgattttgatatattcacagaggctgggcatggtggctcacacctgtaa

SEQ ID NO: 536237 - DNA, 201 bp, Homo sapiens
gatgccctccaataactgtcctttgctcccctgctctggggctacccatggtgcgagctggaggaaggaagcttgctccagagtcgaaggttctggatgcrgcatcccccttcctgccagcgatgcctcctgtagccaggtgctgggctctgggcaaaggtgggcagtggttattcggcgccctgatgtcccctcttgcct

SEQ ID NO: 536238 - DNA, 201 bp, Homo sapiens
ggtgatgagttgtcaggtgactcacccgacagcaaatgcaagaccattggcccagtatgcgctgccggctccattgcttttgatcatgaaccccacccccrgcagagcttggccagtttgagacaatgaggggcccaggaaagctgggtcaggggtaagcaagggcacaggaagagacgaagagaggtcctggaagtccca

SEQ ID NO: 536239 - DNA, 201 bp, Homo sapiens
cctggccctgctgtgggtacggagccagcagggcaggagctctcagtggagccctccaaagagggctgcttcctggaccagctgcaggatgagggagaccmcttctgtccagggctgacataggctgaccaccgccagccccaccctctcactagcttcccattcagttagccattgatgagggctcactgggtgcaggat

SEQ ID NO: 536240 - DNA, 201 bp, Homo sapiens
atcttcagggcacggaacagcccacataacgaggaattatccagcccaaggtgttgggctgtgctgaggctgagaaaccctgcgcagcagctggtccatcrggttccttctcaatgatgctccctcactggggaaactacctcagttttccagagtggttaggggaggaacttggaataaacctgaatgagatgaggggta

SEQ ID NO: 536241 - DNA, 201 bp, Homo sapiens
ccccagggcctgctcccagggagtgctcgaggcgcatcaggcccgttttttaccagtttatatcacggtcttcatttttaaaagtaacgctaactttgtasggacgatgtctcatggattaaataatattctttatggcagtacattgtctttaacggagacctcaggtagcatgaaactgggatttgggggtgaggtgag

SEQ ID NO: 536242 - DNA, 201 bp, Homo sapiens
ctaggagagagatgcttggaggctcgtcttaaaagttcctctggtttgagatgagttgacggggcagaacagggagcccaggcgagccatgtgaccaggcyagggtggccctgtggccgggactgggggttgggataggagctcggctcagctgacccgaggtgtctctgcacaggccctacttcacctactggctgacct

SEQ ID NO: 536243 - DNA, 201 bp, Homo sapiens
gggagctgggtgaggtgaccttggcattgatcatattcaggaacccctgagggacccagaggcccactgctgggatgtggcatggtcctatgtggagctgctgggcccccatctttctgttgggtagggtgaagacctgcggtggggcacagtgccacccgggaaagtcaccattggggctgacgggcatgtggcttccca

SEQ ID NO: 536244 - DNA, 201 bp, Homo sapiens
gcggatgggcttgatgattccttcggtgttggggctgggggcctaggtggccaggctgtggtcctgatggctgtgcctctgcccgtgcacaggggcgctcrgtgctggatgccaccggacagcggtgccgggtggtcaagcgcagctttgccttcccgagcttcctggaggaggatgtggtcgatggggcagacacgtttg

SEQ ID NO: 536245 - DNA, 201 bp, Homo sapiens
tggccacacgcaggctcagcccttgcatcaagcctctgcctgtttccctctgggctgcacctgtcacgctctccctgccctgccccataaagcccatagakcccagggcttgtggggactgcacccttcattagcaagactcagagcttctagaaacccacttgtgtgggggtggggagtgcagggagattggtggcacca

SEQ ID NO: 536246 - DNA, 201 bp, Homo sapiens
gggggctcactgttctgccgtaggtaacagatgtacccacgtgacactttctggtcagtttcacttcccagaggggctccttcctgagccacagctgctgyctgtgcagcccttgactcgggccctaccccctccttcctgggcccgaaatatcacagggagtaaagccaggaaccgggctcactctcatcgtggtcaggg

SEQ ID NO: 536247 - DNA, 201 bp, Homo sapiens
gtactgggcaacagccactgaaattcgggatgtacttactcttcaacccagccattctgcttccagaacttggtcttgtaatagttaaacaagcacacgcrgtgtatgcaagggtgttagttgcaacatcagacccatgtctcaaattccggaaacatcctaaataaccagcagtctggacttaagtaaatcttggtgcat

SEQ ID NO: 536248 - DNA, 201 bp, Homo sapiens
ttccaaatgaaagcaaattggggcataaatcagggttgaagtttgttctcagggttttcagaataggaggctaaagaaaagccagcccaggacctgggctkcacacaccaccgcctgccctccctccttcctccccaagaggaagaacccagcctacttgaagagcgtcagcctccaggagccacgcagccgatggcagga

SEQ ID NO: 536249 - DNA, 201 bp, Homo sapiens
ggctgggggctttctttgacatgggtgagcaggggacagtgtctccctggcatcagcagcccgcctaggcagtgtccgcttcctttgggaggacgagaacrgatcggtgtttctgacagtctggtctagtgccccataaagagctcattgaaaaccggcttgtggcagcgtgggcttcctgcacagtctggagtataaagg

SEQ ID NO: 536250 - DNA, 201 bp, Homo sapiens
caggaggcggaggctgcagtgagctcagatcgtgccactgcactccagcctgggcaacaagaatgaaactcagtctcaaaaaaaaaaaaaaaaaaaaaaaaggcaggaagcgaggtgggaccggcactgctcaaggtggggcaggagggcacttgaactgcaaccaggaggctgagaagagccagcccctcctctgtgtga

SEQ ID NO: 536251 - DNA, 201 bp, Homo sapiens
ccaggaggcggaggctgcagtgagctcagatcgtgccactgcactccagcctgggcaacaagaatgaaactcagtctcaaaaaaaaaaaaaaaaaaaaaaaaggcaggaagcgaggtgggaccggcactgctcaaggtggggcaggagggcacttgaactgcaaccaggaggctgagaagagccagcccctcctctgtgtg

SEQ ID NO: 536252 - DNA, 201 bp, Homo sapiens
cccaggaggcggaggctgcagtgagctcagatcgtgccactgcactccagcctgggcaacaagaatgaaactcagtctcaaaaaaaaaaaaaaaaaaaaaaaaggcaggaagcgaggtgggaccggcactgctcaaggtggggcaggagggcacttgaactgcaaccaggaggctgagaagagccagcccctcctctgtgt

SEQ ID NO: 536253 - DNA, 201 bp, Homo sapiens
aattagctgggcatggcggtgcatgcctgtaatcccaactactcgggaggctgaggcaggagaattgcttgaacccaggaggcggaggctgcagtgagctsagatcgtgccactgcactccagcctgggcaacaagaatgaaactcagtctcaaaaaaaaaaaaaaaaaaaaaaaaggcaggaagcgaggtgggaccggca

SEQ ID NO: 536254 - DNA, 201 bp, Homo sapiens
cgtggagaaacccagtctctactaaaaaatacaaaattagctgggcatggcggtgcatgcctgtaatcccaactactcgggaggctgaggcaggagaattkcttgaacccaggaggcggaggctgcagtgagctcagatcgtgccactgcactccagcctgggcaacaagaatgaaactcagtctcaaaaaaaaaaaaaaa

SEQ ID NO: 536255 - DNA, 201 bp, Homo sapiens
cgaactcttgacctcatgattcccccaccttggcctcccaaagtgctgggattacaggtgtgagcgcctgcacccggcccaaaaatatgtggttttgtttkttttttgaggcagagtctccctctgtcgcccaggctggagtgtaatggcacaatctcggctcactgcaacctccgcctcccaggttcaagcaattctcct

SEQ ID NO: 536256 - DNA, 201 bp, Homo sapiens
gcggatcacgaggtcaggggatcgagaccatcctggctaacatggtgaaaccccgtctctactaaaagtataaaaaattagccgggtgtggtggcgggcgyctgtagtcccagctcctccggaggctgaggcaggagaatggcgtgaacccgggaggcggtgcttgaagggagctgagatcatgccactgcactccagcct

SEQ ID NO: 536257 - DNA, 201 bp, Homo sapiens
gagcctgggcaggggagggtacagaggcctcaacccatgggacctgggggtgatctgaactctgcacttcactttttttcaggatttcccccgccccaccctaaaggaggaggaaatagagtctgtcccaccctaagccccagtccctctccccaggtctctttggcatctcccagctgggctggggctgaaggcccttct

SEQ ID NO: 536258 - DNA, 201 bp, Homo sapiens
ctctcccctctgctaactctgccggtggagctcacgccgcagctcatgccaaccctgcccttctgttttgcctctcatgactctccccaaattctgcccccaggcccccagccagccttcttgccactttcctgccctttactcttgccccttctacctcttgccagggcagcgtcactggctacgtgaggcccagcttgg

SEQ ID NO: 536259 - DNA, 201 bp, Homo sapiens
accctggggccctggctgttttcatttcaccccctaggcctggactctcagtctctcttctgagggctgggggctttctttgacatgggtgagcaggggayagtgtctccctggcatcagcagcccgcctaggcagtgtccgcttcctttgggaggacgagaacggatcggtgtttctgacagtctggtctagtgccccat

SEQ ID NO: 536260 - DNA, 201 bp, Homo sapiens
taaagccaggaaccgggctcactctcatcgtggtcaggggcacacaggaagggccagccccaagaaagtgcttgctggtaaccctggggccctggctgttytcatttcaccccctaggcctggactctcagtctctcttctgagggctgggggctttctttgacatgggtgagcaggggacagtgtctccctggcatcagc

SEQ ID NO: 536261 - DNA, 201 bp, Homo sapiens
aggaggcctcagtgtcgtgggtacctaatccctcccaccgcaacaatctggccccagcagggtggtgctcaccatagcctggccccttcctggaggctctrtcctggggacagctgccccagctccccatgcccagggcccacactgttctgacgccctcctctgtgctacctccacgataggtgctgcggaacaaaggtg

SEQ ID NO: 536262 - DNA, 201 bp, Homo sapiens
ggggctttctttgacatgggtgagcaggggacagtgtctccctggcatcagcagcccgcctaggcagtgtccgcttcctttgggaggacgagaacggatcrgtgtttctgacagtctggtctagtgccccataaagagctcattgaaaaccggcttgtggcagcgtgggcttcctgcacagtctggagtataaagggaagc

SEQ ID NO: 536263 - DNA, 201 bp, Homo sapiens
acgaagagaggtcctggaagtcccagtgagacgtttggactttgggtgagaacaggaaatcctgggagagagttgagcagggaagcaacaggtgtgatctrtgcttttgggaggtgaccccagctgcggtgcggagaatgatcagtctcagggggcttgaggcagcaggtagaggaattgagagagtggagtgagcctcca

SEQ ID NO: 536264 - DNA, 201 bp, Homo sapiens
tcaccagccgcttctgcgagaagtatgagctggaccaggtgctgcactgaccgctgggccacacggctgcccctcagccctgctggaacagggtctgcctscgagggctgccctctgcagagcgctctctgtgtgccagagagccagagacccaagacagggcccgggctctggacctgggtgcccccctgccaggcgagg

SEQ ID NO: 536265 - DNA, 201 bp, Homo sapiens
gcatggatcagcgtggatgtgtaatatcaggcatgggtcagcaaggactagtaccccctggtatagaccagcaaggattgacattgcctgtcgtcgatcarcatggcctggttctaccttttacagaccagcatggtttggtatcacctggtttgatgccaattagtgcagatcagcaaggttttgtgcagcccagtttgg

SEQ ID NO: 536266 - DNA, 201 bp, Homo sapiens
tctggtactgggagacagcagcagccgagggcccgtgatgaagctggcgtgccacgactccatcagtcttctacattccaattcaaatcagactcagatcrtcacaggagtagagagaagcttacctcgacacaaccaagaagaaatgcacgtcctggtccagttcaacaggacttacccttggccagagaccagcccagt

SEQ ID NO: 536267 - DNA, 201 bp, Homo sapiens
catcacagggtgacagatatggctgattacacctactcaactgtgccccggcgctgcgggggcagccacaccctcacctacccctaccaccgcagccgccygcagcaccttccccggggcctgtatcctactgaagagatccagattgccatgaaggtcagggccctgcctggagccaccagggagggaggccctgacatg

SEQ ID NO: 536268 - DNA, 201 bp, Homo sapiens
ccggaggagcaggaggtgggcgtgcgggcgttcgatagggtgcggactgggagtatcatgaaggacgccgccgaggagctcagctttgccagggtgagcaygcacacggaggcacgcgcaggccgtctgcctcctccaggccgccctccaggcctagccgagtccccaccaccctggaggggtgagcggtggtggggacgg

SEQ ID NO: 536269 - DNA, 201 bp, Homo sapiens
agaagaaatgcacgtcctggtccagttcaacaggacttacccttggccagagaccagcccagtagtgtgcccgctagccagagtcaggtccatctaaggcyagatcgtcgtgggttagaaccaactggcatgaatcagcctggattagtgcctgctagcacttacccacatggtgtggtacccctcagcatgggtcagctt

SEQ ID NO: 536270 - DNA, 201 bp, Homo sapiens
gcaactgcccagggcacgacaggggagaggcacacaggctaggggcagtgccagcatgggcagagcgtggccgtgactggcctcactgccctgctgctgcygtctctcctgcacgcagttggacaagctcaggatgatcattgagagcatgctgacctcctcctccacgctcctgtccatgagcatggccccgcacaaggc

SEQ ID NO: 536271 - DNA, 201 bp, Homo sapiens
aatgtgcgtgtatgcatgtgtgtgtctgagtgtgagagtgtgtgtgcgcatctgtgtgtgtgtgcatgtgagtgtgcgtgtgtaggggccactgtcattcycctttcctgaactcttcttccaggtacttttacagcgggttgatgaactagagaagctattcaaagatcgggagcaattcctggtaataccagccagttc

SEQ ID NO: 536272 - DNA, 201 bp, Homo sapiens
cattctcctgcctcagcctcccgagtagctgggactacaggcacctgccaccacgcccggctaatttttcaaaatatttttagcagagacggggtttcacygtgttagccaggatggtctcaatctcctgaccttgtgatctgcccgccttggcctcccaaagtgctgggattataggcgtgagccaccgcacctggccat

SEQ ID NO: 536273 - DNA, 201 bp, Homo sapiens
ttcaaatcagactcagatcgtcacaggagtagagagaagcttacctcgacacaaccaagaagaaatgcacgtcctggtccagttcaacaggacttaccctyggccagagaccagcccagtagtgtgcccgctagccagagtcaggtccatctaaggccagatcgtcgtgggttagaaccaactggcatgaatcagcctgga

SEQ ID NO: 536274 - DNA, 201 bp, Homo sapiens
cattcatgtatacattttttttttttgagacggagtcttgctctctcgcctaggctggagtgcagtggcacgatctcggctcactgcaagctctgcctccygggttcctgccattctcctgcctcagcctcccgagtagctgggactacaggcacctgccaccacgcccggctaatttttcaaaatatttttagcagagac

SEQ ID NO: 536275 - DNA, 201 bp, Homo sapiens
caaattcagaatgacgaggaccccactcagctgaggccggccatgaccagcagccctgcggccctctccccacccccaggggttcccacagagctctcacygctgcctcagcactgacccttccctcctgtcccccatcaggctcagggacctcaaagcgcaagtcccagcagcccaggccccacgtgcacaggccgccat

SEQ ID NO: 536276 - DNA, 201 bp, Homo sapiens
gtcttggcccggatcggactgcatcaggatctggtggcacagcacacccctctgatggggtttccagtagggaacaaagcaaggtcccctctggtactggragacagcagcagccgagggcccgtgatgaagctggcgtgccacgactccatcagtcttctacattccaattcaaatcagactcagatcgtcacaggagta

SEQ ID NO: 536277 - DNA, 201 bp, Homo sapiens
catctgggttgtttccatcctttggctattatgaataatgctgctatgcacattcatgtatacattttttttttttgagacggagtcttgctctctcgccyaggctggagtgcagtggcacgatctcggctcactgcaagctctgcctcccgggttcctgccattctcctgcctcagcctcccgagtagctgggactacag

SEQ ID NO: 536278 - DNA, 201 bp, Homo sapiens
caagtattgagcaggctctggattctgccagtggtcttggcccggatcggactgcatcaggatctggtggcacagcacacccctctgatggggtttccagyagggaacaaagcaaggtcccctctggtactgggagacagcagcagccgagggcccgtgatgaagctggcgtgccacgactccatcagtcttctacattcc

SEQ ID NO: 536279 - DNA, 201 bp, Homo sapiens
tcagagctggcttggccctgccctcccacctctcatcaaaaactaggtccctcccatcatgtgtgtgtgtgtgtgtgtgtgtgtgtgtgtgtgtgtgtgtkttatgtggtgtgtgggcagggggtgggggggcggtggcgaatgtgtccaggatccagattccttatccaaagccagctctgagtccacaagtggcaaggg

SEQ ID NO: 536280 - DNA, 201 bp, Homo sapiens
ggattacaggcatgtgccaccacacccagctagtttttgtatttttagtagagacggggtttcaccatgttggtcaggctggtcttgaactcctgacctcrtgatccacccacatcggactcccaaagtgctgggattacaggcgtgagccactgcgcccagcctcagttttgttttttcttgtcacagacaggagggtaa

SEQ ID NO: 536281 - DNA, 201 bp, Homo sapiens
ctccagggaccaagggcccttctcagagctggcttggccctgccctcccacctctcatcaaaaactaggtccctcccatcatgtgtgtgtgtgtgtgtgtgtgtgtgtgtgtgtgtgtgtgtgttatgtggtgtgtgggcagggggtgggggggcggtggcgaatgtgtccaggatccagattccttatccaaagccagct

SEQ ID NO: 536282 - DNA, 201 bp, Homo sapiens
gttaggtgggtccataggtgtgttcagtctagggctgattattctccatttctgaggcaacacttttctgagtacactctgctctgtgctacttgaatgaygagtttttccaaactggttgataagaacaggcaccatttccagccccatggcaggcagggcactgcttcttcaagccctgcaggtggttctttccccaat

SEQ ID NO: 536283 - DNA, 201 bp, Homo sapiens
aggctggggtgacccctggtgggcttggggaatgtgttgagcaacctcagcacccctgtcttacagtttcttctcgtcaacagaaagatagaccttcctcygagggccgtctctcccagccgaacacagcccacccgcccagctccgccgcggtggcaaacagggggctggagaggcacgtggacatgcctcctggggagg

SEQ ID NO: 536284 - DNA, 201 bp, Homo sapiens
aagactgattcttgctctgttgcccaggctggagtgcagtggcacaatctcgcctcactgcaacctctgcctcctaggttcaaatgattctcgtgtctcarcctcctgagtagctgggattacaggcgccagccaccacgcccagctgatttttgtattttttagtagagatgggtttccccttgttggcaaggctggtct

SEQ ID NO: 536285 - DNA, 201 bp, Homo sapiens
cccgagtagctgagattacaggcgcccaccatcacgcccagctaatttttgtatttttactagggacagggtttcaccatgttgtccaggctgggctcgarcttctgacctcaggtgatccgcccgcctcggcttcccaaagtgctaggattacaggctggagccaccgcgcccggcccctcttgcaacatctttctgatg

SEQ ID NO: 536286 - DNA, 201 bp, Homo sapiens
attcctttttttttttttttttttttttttttttaagactgattcttgctctgttgcccaggctggagtgcagtggcacaatctcgcctcactgcaacctytgcctcctaggttcaaatgattctcgtgtctcagcctcctgagtagctgggattacaggcgccagccaccacgcccagctgatttttgtattttttagta

SEQ ID NO: 536287 - DNA, 201 bp, Homo sapiens
tgtcgcccatgctggagtgcagtggcgcaatcttggctcactgcaacgttcacctcctgggttcaaatgattctcctgcctcagtctcccgagtagctgarattacaggcgcccaccatcacgcccagctaatttttgtatttttactagggacagggtttcaccatgttgtccaggctgggctcgaacttctgacctcag

SEQ ID NO: 536288 - DNA, 201 bp, Homo sapiens
cctcccacctcagcctcccaaagtgctgggattacaggtgtgatccaccacgcccggcccagtcattcctttttttttttttttttttttttttttttaaractgattcttgctctgttgcccaggctggagtgcagtggcacaatctcgcctcactgcaacctctgcctcctaggttcaaatgattctcgtgtctcagcc

SEQ ID NO: 536289 - DNA, 201 bp, Homo sapiens
cagcactttgggaggccgaggcaggcagatcacaaggtcaagagatcgagaccatcctgaccaacatggtgaaaccccgtctctactaaaaatacaaaaarttagctgggcgtggtggtgtgtgcctgtagtcccagctattcgggaggctgaggcaggagactcgcttgaaaccaccggaaggcggaggttgcagtgagc

SEQ ID NO: 536290 - DNA, 201 bp, Homo sapiens
ggtttcaccatgttggtcaggcttgtctggaactcctgacctcaggtgatcctcccacctcagcctcccaaagtgctgggattacaggtgtgatccaccaygcccggcccagtcattcctttttttttttttttttttttttttttttaagactgattcttgctctgttgcccaggctggagtgcagtggcacaatctcgc

SEQ ID NO: 536291 - DNA, 201 bp, Homo sapiens
attacaggtgcccaccaccacgcccggctaatttttttgtatttttagtaaagatggggtttcaccgtgttggccaggctggtcttaaactcctgacctcrggtgatctgcctgccttggcctcccaaagtgctgggattacaggcgtgagccaccatgcctggtcatattttgtattttgtagaaaggtttttgccatgt

SEQ ID NO: 536292 - DNA, 201 bp, Homo sapiens
attctcctttttttttttaaattgagacggagtctcgctctgttgcccaggctagagtgcaatgatgcgatctcggctcactgcaacctctgccccctggrttcaagctattctcatgcctcagcctcccaagtagctgggattacaggcatgcatgttcatgcccagctaattttagtatttttagtagagacagggttt

SEQ ID NO: 536293 - DNA, 201 bp, Homo sapiens
aaccagggctcagaaacacttatgggattttctaagcacggagggttcacttccttaacatcacctgaagggactctaagcggagactctaccaagcaacmaagtattgagcaggctctggattctgccagtggtcttggcccggatcggactgcatcaggatctggtggcacagcacacccctctgatggggtttccagt

SEQ ID NO: 536294 - DNA, 201 bp, Homo sapiens
cggaggctgaaggagacaacttctgacggcccctctgagctctctctttgcagtgcccagtcctaccgcccagaagcctcccaggacagaggcatagcccrggactccctagacaaaatccattggaggggggtggagggtgagagacctccagctgtgtctgcatccccctgcgtccctgatggcccaggctctgcatgg

SEQ ID NO: 536295 - DNA, 201 bp, Homo sapiens
gatggggccggggctcaatgtggtgccctagccccgcagctgctggctctttttttctctgttcacttggcctccccagatgctgtaccagggtctggagragctcgaaaaggaaaaggccaacagggagcacctggagatggagatcgatgtggtgggtgccaggccccaggagccacgctgtgtcccagggcggtctcg

SEQ ID NO: 536296 - DNA, 201 bp, Homo sapiens
gtgccaggccccaggagccacgctgtgtcccagggcggtctcgctgactgttctttgagagactgagtggaggggagctggcgagacgagtgtgggctctsagaaacctgcctggtgataggggtcgacacccccagggaatggggcccctccatggccatctcccagatgcggggacctctgtctgtctctgggcagaaa

SEQ ID NO: 536297 - DNA, 201 bp, Homo sapiens
ttcttccaggtacttttacagcgggttgatgaactagagaagctattcaaagatcgggagcaattcctggtaataccagccagttccatgggaaagggctytccagggggctggccgtctctcagtgtggccctctctccagggcttgtccatccagggcaggcagtgtgtgccctctgcctctcaagtctctgccccagg

SEQ ID NO: 536298 - DNA, 201 bp, Homo sapiens
cctgcctcagcctcccgagtagctgggactacaggcacctgccaccacgcccggctaatttttcaaaatatttttagcagagacggggtttcactgtgttrgccaggatggtctcaatctcctgaccttgtgatctgcccgccttggcctcccaaagtgctgggattataggcgtgagccaccgcacctggccataataag

SEQ ID NO: 536299 - DNA, 201 bp, Homo sapiens
gatgctgtaccagggtctggagaagctcgaaaaggaaaaggccaacagggagcacctggagatggagatcgatgtggtgggtgccaggccccaggagccaygctgtgtcccagggcggtctcgctgactgttctttgagagactgagtggaggggagctggcgagacgagtgtgggctctcagaaacctgcctggtgatag

SEQ ID NO: 536300 - DNA, 201 bp, Homo sapiens
tgttgagttgaaagagctctttacatgttctggatgctacactcttatttgatagatgacttgcaaatattttctcccattctgtgggtcatcttttcatyttcttgacagtgtctgtctttaagccttgcaatgcaattcttggtcattttctcactaaggattgtctgaatcaggagcagccctctgagtgctcacaga

SEQ ID NO: 536301 - DNA, 201 bp, Homo sapiens
gactggcagaagatgctggacaggctgctcacagagatggacaacaaggtgaggcaggggcatggcggggctctccatcccacagccttgcccccaggatygggacagcaccaccttctcctgggtcagccccctacctgcttccttagaggtcccctggcccctctttccccgccacagctggaccgcctggagctggac

SEQ ID NO: 536302 - DNA, 201 bp, Homo sapiens
tctttacatgttctggatgctacactcttatttgatagatgacttgcaaatattttctcccattctgtgggtcatcttttcattttcttgacagtgtctgyctttaagccttgcaatgcaattcttggtcattttctcactaaggattgtctgaatcaggagcagccctctgagtgctcacagaagaaccacctaggaaaa

SEQ ID NO: 536303 - DNA, 201 bp, Homo sapiens
caaatattttctcccattctgtgggtcatcttttcattttcttgacagtgtctgtctttaagccttgcaatgcaattcttggtcattttctcactaaggaktgtctgaatcaggagcagccctctgagtgctcacagaagaaccacctaggaaaagccactgggccaagcgggttcatgtcaggaacctctttgtgcattt

SEQ ID NO: 536304 - DNA, 201 bp, Homo sapiens
gcagttcagcgtggtttggtccaacctggagtggatcagcgtggtttggttcaacctggtgcagttcagcgtggtttggtccaacctggtgcagttcagcrtggtttggtccaacctggtgcagatcagcgtggtttggtccaacctggagtggatcagcgtggtttggtgcaacctggagtggatcagcgtggtttggtc

SEQ ID NO: 536305 - DNA, 201 bp, Homo sapiens
cccgtgtgaaggggccaggggagggctgtggctgctacagtggcgacggtatctgttcacttctacagcatgatgaggtggacatcttgggcctggatggscacatttacaagggacggatggacacaaggctgccaggcatcctccgaaaagacagtgagtggagtccagaggcccccaggcacctcacgtgggtcccac

SEQ ID NO: 536306 - DNA, 201 bp, Homo sapiens
gcacagcacacccctctgatggggtttccagtagggaacaaagcaaggtcccctctggtactgggagacagcagcagccgagggcccgtgatgaagctggygtgccacgactccatcagtcttctacattccaattcaaatcagactcagatcgtcacaggagtagagagaagcttacctcgacacaaccaagaagaaatg

SEQ ID NO: 536307 - DNA, 201 bp, Homo sapiens
ttatctgtggcagccttggagtccagtttgtggattttctggggccagaggtcattgcaagggacggccagatcccttcagacattctcctttttttttttaaattgagacggagtctcgctctgttgcccaggctagagtgcaatgatgcgatctcggctcactgcaacctctgccccctgggttcaagctattctcatg

SEQ ID NO: 536308 - DNA, 201 bp, Homo sapiens
ttacagcgggttgatgaactagagaagctattcaaagatcgggagcaattcctggtaataccagccagttccatgggaaagggctctccagggggctggcsgtctctcagtgtggccctctctccagggcttgtccatccagggcaggcagtgtgtgccctctgcctctcaagtctctgccccagggttggagggaaatct

SEQ ID NO: 536309 - DNA, 201 bp, Homo sapiens
tctttttttctttttttttttttttgagacacagtctcactctgtcgccaaggctggagtacagtggcgcaatctcggctcactgcaagctccacctcccrggttcacgccattttcctgcctcagcctcccaagtagctgggactacaggtgctcgccaccacgcccggctaattttttgtatttttagtagagatgggg

SEQ ID NO: 536310 - DNA, 201 bp, Homo sapiens
ctcctggcactgagtcagtgtgtgaatgtgcgtgtatgcatgtgtgtgtctgagtgtgagagtgtgtgtgcgcatctgtgtgtgtgtgcatgtgagtgtgygtgtgtaggggccactgtcattctcctttcctgaactcttcttccaggtacttttacagcgggttgatgaactagagaagctattcaaagatcgggagca

SEQ ID NO: 536311 - DNA, 201 bp, Homo sapiens
ccaccctggaggggtgagcggtggtggggacggaggggatggggaccgaggaggtgccagacctcagtgcgactggctaaatagagtggcccatgctctaycttgcagtccacggggctgcaagacgtgaaaatcctaaaagaacgccaccaaaaggcctagggcctccccgagctggaggggcctggggaccccacctcc

SEQ ID NO: 536312 - DNA, 201 bp, Homo sapiens
tatgtatagcttggcatcctttggtgaggattcatagagaaaattcctgtctatggagtttctgggtccatgggtttgcatgtttacattttatttatttmtttctttttgagatggtgtctcgctctgttgcacaggctggagtgcagtggcgtgatctcggctcactgcatcctctgccttttgggttcaagtgattct

SEQ ID NO: 536313 - DNA, 201 bp, Homo sapiens
agcctcctgagtagctgggattacaggtgtgtgccaccatgcctggctaatttttgtatttttagtagagacggggtttcaccatgttggccaggctggtyccgaactcctgcactcaggtgatcctcccgcgttggcctcccaaagtgttgggattaccggtgtgggacaccacacccggccatatttttgtattcttat

SEQ ID NO: 536314 - DNA, 201 bp, Homo sapiens
agcctgtaatcccagcactttgagaagtcgaggggggcggatcacttgcgttcaggagttcgagcccagcctggacaacatgatgaaaccctgtccctacmaaaaatacaaaaattaggtgggtgtggtggtgcacacctgtaatcgcagttactcaggagactgaggcagaagaatcgcttgaactcgggaggcggaggt

SEQ ID NO: 536315 - DNA, 201 bp, Homo sapiens
ggcagctcttggctcctgcagaaggacgtgtttgcttatttttcattcacaagatcatgaagggtgcttcatgactgcttaggagctcagatgggcctgcrccgtgccccccggccccggcagctcccctccagcctgtgtcagcccagcatggcgaacagaactgctctcaacctccctgggcattgggcaggctggggt

SEQ ID NO: 536316 - DNA, 201 bp, Homo sapiens
aaaaaaaaaaaattataaaacaccaccaactctaagatacatcctgatttcagagatgttaaaatgtatgtgtgggtgtcggggcaggatgtccatcttaraatcagtgaatgtattttgagtcccaaatggacttcttcattttttttgagacagagtctctgtcgtcacccaggctggagtgcagtggtgtgatctcgg

SEQ ID NO: 536317 - DNA, 201 bp, Homo sapiens
ttttgtattattatttgtattattattagtagagatggggtttctccatgttggtcagcctggtcttgaactcccaacctcagatgatctgcctaccttgrcctcccaaagtgctgggattacaggcgtgagccaccgtgcccagcccccactttgtcttttaatgctaataatagcactttccatttgtattttacggat

SEQ ID NO: 536318 - DNA, 201 bp, Homo sapiens
tgccagtggtcttggcccggatcggactgcatcaggatctggtggcacagcacacccctctgatggggtttccagtagggaacaaagcaaggtcccctctsgtactgggagacagcagcagccgagggcccgtgatgaagctggcgtgccacgactccatcagtcttctacattccaattcaaatcagactcagatcgtca

SEQ ID NO: 536319 - DNA, 201 bp, Homo sapiens
gaaaattctgtctctgaagcctccctttacctgcaggaccaggtgaggattccccactctttagctccagggaccaagggcccttctcagagctggcttgrccctgccctcccacctctcatcaaaaactaggtccctcccatcatgtgtgtgtgtgtgtgtgtgtgtgtgtgtgtgtgtgtgtgtgttatgtggtgtgtg

SEQ ID NO: 536320 - DNA, 201 bp, Homo sapiens
tgtggggctaaaggagagtatgaaggatctggatgaggagcaggccggccaaaccgacttggagaagatccagttcctgctggcacagatgggtgggtgcygcttgccgatagaggagaaaccattgtctctgttttcagttggtttcatccttttcttcccctggcctcaactcctggctgctacacatctccctgagtc

SEQ ID NO: 536321 - DNA, 201 bp, Homo sapiens
acctggattgtgtctgctcttcacattgtccatgtctagttcaaggaactggtagaagttccccaggttcccaaagcaactcaggaccaggtcttggaaaygcaaaaataagcttcttagactgtgtccccagtcggaggctgaaggagacaacttctgacggcccctctgagctctctctttgcagtgcccagtcctacc

SEQ ID NO: 536322 - DNA, 201 bp, Homo sapiens
agccggaagctgagtttggttcctggtgcagaagaagtcaccatggtcacctgggaagagctggagcaggcgattacggacggctggagagcctcacaagyggtgaaccagtgggggcctgggccgtggtcttgggtggggctccccagaacttctcgctttgtacagctgcacaggattctgttctatggatattcatag

SEQ ID NO: 536323 - DNA, 201 bp, Homo sapiens
aagccgacaagagtgctctggccaccaaagtgagccgtgtccagtttgatgccaccacggagcagctgaaccacatgatgcaggagctggtggccaagatragcgggcaggagcaggactggcagaagatgctggacaggctgctcacagagatggacaacaaggtgaggcaggggcatggcggggctctccatcccacag

SEQ ID NO: 536324 - DNA, 201 bp, Homo sapiens
tggtgcggcgctatgagcaactccaagacatggtcaacagcctggccgtctcccgaccctccaagaaggccaagctccagagacaggtggggctctgctcrcctccctcctgctgcaactggacatggccccacagaggagggccaccctgctgcagacccacagaagtggggcgggtgtttgggcctcaaggtcagctct

SEQ ID NO: 536325 - DNA, 201 bp, Homo sapiens
acagatcagtgcccttcgcgtgccctggagacacaggcccaactgtaggagatgttgactccctggcacgcgagtcttccaaccccttctcaatttccctmgaaagggcaggcttgctggtgggggcgggcacagccacaaatcctgggtcctgcctcttgggctgaggaactcagatttgggccaggagaggaggggaga

SEQ ID NO: 536326 - DNA, 201 bp, Homo sapiens
acatcactcctgagcctccatcacctctaatgacccctgaccggcaggccagggtcacaaggctagtccatggggatgtaggtgactgacgcttgtgtccygtgggggtggacacccagaaagggcagacagagggcctcccgcactgttagtggaaaattgttttccattgtttttgagacagggtctccctatgttgcc

SEQ ID NO: 536327 - DNA, 201 bp, Homo sapiens
atagccgcaagtatgctatgggacagcatatgggacatatgggtccggggccagggctctggatggggaaggcaggggacagggatgactccggagggccyagcggaacgtgacagaaggcagtgctgtgggacagtgtggagagcctcctccttggaatgggacagtgggggccgcaggccgatttctgaactagctccc

SEQ ID NO: 536328 - DNA, 201 bp, Homo sapiens
tagccgcaagtatgctatgggacagcatatgggacatatgggtccggggccagggctctggatggggaaggcaggggacagggatgactccggagggcccrgcggaacgtgacagaaggcagtgctgtgggacagtgtggagagcctcctccttggaatgggacagtgggggccgcaggccgatttctgaactagctccct

SEQ ID NO: 536329 - DNA, 201 bp, Homo sapiens
gacatatgggtccggggccagggctctggatggggaaggcaggggacagggatgactccggagggcccagcggaacgtgacagaaggcagtgctgtgggayagtgtggagagcctcctccttggaatgggacagtgggggccgcaggccgatttctgaactagctccctggcagttcccaaggcatgagcgtaggaggcag

SEQ ID NO: 536330 - DNA, 201 bp, Homo sapiens
ctccaagatgctgatgaacattgagaaggtgcagatccacttcgggggctccaccaaggccagcagccagataatccgcgagctgctgcacgcccagtgcmtgggctccccctgctacaaacggtacaggagaggcgggcgaggccatgggagcaggcacccagtgaccaggcttggcttctgctcgtgcacggctgtgca

SEQ ID NO: 536331 - DNA, 201 bp, Homo sapiens
ggacagggagaggtcctcagtacccagagctgagacagctcctgggggcctggcccataggacctggcccgtggtaggcttgaattccaggattcccattygtggccgccagggggcgcccgagacttgcacagggcaccctcaggggcccatgggaagcctgctggctttgggttaggacagggaggtctgggatgtgag

SEQ ID NO: 536332 - DNA, 201 bp, Homo sapiens
agagatccagattgccatgaaggtcagggccctgcctggagccaccagggagggaggccctgacatggctccagattcctgagtcattctctaaagccacyagaaaatcagccagccctctgccttgaggcaattccttaatcagacccagtcaaagcctcaggttcttacccttttctgggaagaaagattcaccccggc

SEQ ID NO: 536333 - DNA, 201 bp, Homo sapiens
tgcgagaagctcaacatcaccaccagcaacctcatcgaggaccatcggcagaaacagaaggacattgctgtgagcggccgcagggtggctgggatggggcyggggctcaatgtggtgccctagccccgcagctgctggctctttttttctctgttcacttggcctccccagatgctgtaccagggtctggagaagctcgaa

SEQ ID NO: 536334 - DNA, 201 bp, Homo sapiens
tgcctgctagcacttacccacatggtgtggtacccctcagcatgggtcagcttggtgtgccaccacctgaaatggatgatcgggaattgataccatttgtygtggatgagcaacgtatgttgccaccatcagtacctggcagagaccagcaaggattggaactacctagcacagaccaacatggtctggtttcagtcagtg

SEQ ID NO: 536335 - DNA, 201 bp, Homo sapiens
caggcgattacggacggctggagagcctcacaagcggtgaaccagtgggggcctgggccgtggtcttgggtggggctccccagaacttctcgctttgtacrgctgcacaggattctgttctatggatattcatagttcgcaagtttcattgatatgggtgttttaaatgctttttccaatcttaagaacaaggtgtcattc

SEQ ID NO: 536336 - DNA, 201 bp, Homo sapiens
gtggatggagcatgtccgttccccatggcatgtgagcaggagcgtgtgcaagcccacccctcacagccccagagcctggggcggggcctgtgtgtcattasggtcctctgtgtgtttatggcccggctaactggcagcagcactttacgatttagctaaagaagagatgttctcatgctgagctggtgggctggctggaga

SEQ ID NO: 536337 - DNA, 201 bp, Homo sapiens
actctgacccgccccttctccctctgtccctgcccagtgccatccccgtgacccccgcgggtccaggcctacctgggcaccattccatccgcccctacacrgtgtttgaactggagcaggtccggcagcatagccgcaagtatgctatgggacagcatatgggacatatgggtccggggccagggctctggatggggaagg

SEQ ID NO: 536338 - DNA, 201 bp, Homo sapiens
ctcatgctccctccggctcctgcccacctctctgctgctccccttctcctaaggatgggagtccatagttcagaggacttcaggctgctcttggagccctrtgggttccaggtatgctaggccaggtgcgccgagatgggaaggcccggggctgccctcagctcctccacccacagctgcagacaggcagcagggctttct

SEQ ID NO: 536339 - DNA, 201 bp, Homo sapiens
aaatcatcctagtcagaacttccagatttcctttcttcccactctgatagtgaatattttgactgttattgatttccttcttcctctccaaccagggctcwgaaacacttatgggattttctaagcacggagggttcacttccttaacatcacctgaagggactctaagcggagactctaccaagcaaccaagtattgagc

SEQ ID NO: 536340 - DNA, 201 bp, Homo sapiens
tcggtacagttttcattaagggcatcagatgagactcctgtcatttctgaggatgacaggaattataaataatgagtgccggccggcgcggtggctcacasctggaatcccagcactttgggaggctgaggtgggggatcacctgaggtcaggagttggagaccagcctggccaacatggtgaaacgccatctctactaaa

SEQ ID NO: 536341 - DNA, 201 bp, Homo sapiens
gctcagggagcgccccccactctaccaggcagacgaggcggctgccatgcggaggtgaggcctgggaggcaggggaggaggctggcacgctcttcaggggrtgagggcagagggggctgggggtctccagacaaacagctcctgccagcacacagcggatcctgcccaggactgtcccatggttggagggacagaatttta

SEQ ID NO: 536342 - DNA, 201 bp, Homo sapiens
gagttgagggagagccaagacaggggcaaggctgccatggaaaattctgtctctgaagcctccctttacctgcaggaccaggtgaggattccccactcttyagctccagggaccaagggcccttctcagagctggcttggccctgccctcccacctctcatcaaaaactaggtccctcccatcatgtgtgtgtgtgtgtgt

SEQ ID NO: 536343 - DNA, 201 bp, Homo sapiens
cagctaagagcagctggtcccctggcatcacgaattctcagccaaggaggtgatggcggccagtggctcccttatgcccctgaatggaccactgtctttgrcctggattgtgtctgctcttcacattgtccatgtctagttcaaggaactggtagaagttccccaggttcccaaagcaactcaggaccaggtcttggaaat

SEQ ID NO: 536344 - DNA, 201 bp, Homo sapiens
ccgccttggcctcccaaagtgctgggactataagcataagccaccgcacctggccacaaaaattacatatttttgtacatgccattttcaaatatgcagaktctcaaaaatatggagacctagcctcccagaacgtcagtgtgtttcttttccttttcttttttttgagatggagtttcactcttgtcacccaggctggag

SEQ ID NO: 536345 - DNA, 201 bp, Homo sapiens
catcggcagaaacagaaggacattgctgtgagcggccgcagggtggctgggatggggccggggctcaatgtggtgccctagccccgcagctgctggctctytttttctctgttcacttggcctccccagatgctgtaccagggtctggagaagctcgaaaaggaaaaggccaacagggagcacctggagatggagatcgat

SEQ ID NO: 536346 - DNA, 201 bp, Homo sapiens
agctatgatcacgccatggcactctagcctgagtgacagggcaagaccctgtctctaaaaaaattttttttaaaaactgatgctcaaagctattatgattyagctgagccaaataatgagggctttgctcttttctttttttctttttttttttttttgagacacagtctcactctgtcgccaaggctggagtacagtggc

SEQ ID NO: 536347 - DNA, 201 bp, Homo sapiens
ataggaactgcaccttgggtatcatcgtgttcatttcctggatctaaaacctgatgctcaggctgggcacgctggctcatgcctataatcccagcactttrggaggccaaggcaggaggatcacttgagcccgggagctcgagaccagcctgggcaacatagcaaggacttatctctacaaaaaatttaaaaattagccag

SEQ ID NO: 536348 - DNA, 201 bp, Homo sapiens
tccatggctgctgttccagtgtagacccccaccatcaatgggagagagagcttgttccctgacatccccccagcgctgtatggttggtacccaattttttkagctttgccaacccactggatcaatagaaaaatcgtacctgagtgtagtttttatttgcttttataccttctcaaactttctttacagtctgtcctgaaa

SEQ ID NO: 536349 - DNA, 201 bp, Homo sapiens
cccggggcctgtatcctactgaagagatccagattgccatgaaggtcagggccctgcctggagccaccagggagggaggccctgacatggctccagattcytgagtcattctctaaagccaccagaaaatcagccagccctctgccttgaggcaattccttaatcagacccagtcaaagcctcaggttcttacccttttct

SEQ ID NO: 536350 - DNA, 201 bp, Homo sapiens
tcataaggcttctgctttccatagtcaaaaggaccatacctcctgaactgcaggagcagctgaagaccgtaaagacgctagccaaagaagtttggcaggaraaagcaaaagtaaggaagagtcaacccactttgtcttttttttttttttgagatggagttttgctcttgtcgccctggctggagtgcagtggcaccatct

SEQ ID NO: 536351 - DNA, 201 bp, Homo sapiens
tcgcaagtttcattgatatgggtgttttaaatgctttttccaatcttaagaacaaggtgtcattcacgtgtgaataacatgcatccctagaaagggatgtrtgttagtgatttggctagccattgataaattgccttccatggctgctgttccagtgtagacccccaccatcaatgggagagagagcttgttccctgacat

SEQ ID NO: 536352 - DNA, 201 bp, Homo sapiens
aggtcagggccctgcctggagccaccagggagggaggccctgacatggctccagattcctgagtcattctctaaagccaccagaaaatcagccagccctcygccttgaggcaattccttaatcagacccagtcaaagcctcaggttcttacccttttctgggaagaaagattcaccccggccacctgcctgcccagcagca

SEQ ID NO: 536353 - DNA, 201 bp, Homo sapiens
gagcgaagtctcgagtgaagtcctgagtgagcgacgcaattcactgcgtagaatgagttctagtttccccacggcagtggagacatttcatctgatgggasagctcagtagcctctatgtggggctaaaggagagtatgaaggatctggatgaggagcaggccggccaaaccgacttggagaagatccagttcctgctggc

SEQ ID NO: 536354 - DNA, 201 bp, Homo sapiens
gattcaatgtatcctggttatcgtggcccagggtatctaagtgctgatcagcatggccaggaaggtttggatccaaatagaacacgagcctcggaccgacrtggaattcctgcccagaaggccccaggccaagatgtcactcttttcaggagtccagactccgtcgaccgagtcttatcagaagggagcgaagtctcgagt

SEQ ID NO: 536355 - DNA, 201 bp, Homo sapiens
gccaccagaaaatcagccagccctctgccttgaggcaattccttaatcagacccagtcaaagcctcaggttcttacccttttctgggaagaaagattcacyccggccacctgcctgcccagcagcattccggcctcccaggcctcccaccgtggcccagatactgtttcacctccctccaccttctcgctccaccctagtg

SEQ ID NO: 536356 - DNA, 201 bp, Homo sapiens
caggccggtcttgaactcctgacctcaggtcattcacctgccttggcctcccaaagtgctaggattataggcatgagccactgcaccccgcttttttttttgagacagagtttcgctcttgttgcccaggctggagtccaatggcatgatttcagctcactgcaacctccgtctcccaggttcaagcaattctcctgcctc

SEQ ID NO: 536357 - DNA, 201 bp, Homo sapiens
aaggagtttggtaccaccagaaacttatcagcaaggtttgatgcatcctggcacagaccagcacagcccaataccactgagtacaggtttgggatctacayacccagatcaacagcatgtggcatcacctggcccaggtgagcatgaccaggtatacccagatgcagctcagcatggccatgctttctctctctttgacag

SEQ ID NO: 536358 - DNA, 201 bp, Homo sapiens
tgagtgctcacagaagaaccacctaggaaaagccactgggccaagcgggttcatgtcaggaacctctttgtgcattttttttttttttttttttttttttttggagacagagttttgctctgttgcccaggctggagtgcagtggcaccatctcagctcactgcattctccacctcccgggttcaagtgattctcctatct

SEQ ID NO: 536359 - DNA, 201 bp, Homo sapiens
gatccaaatagaacacgagcctcggaccgacatggaattcctgcccagaaggccccaggccaagatgtcactcttttcaggagtccagactccgtcgaccragtcttatcagaagggagcgaagtctcgagtgaagtcctgagtgagcgacgcaattcactgcgtagaatgagttctagtttccccacggcagtggagaca

SEQ ID NO: 536360 - DNA, 201 bp, Homo sapiens
gcacccctgtcttacagtttcttctcgtcaacagaaagatagaccttcctccgagggccgtctctcccagccgaacacagcccacccgcccagctccgcckcggtggcaaacagggggctggagaggcacgtggacatgcctcctggggaggggctcgaggagcccacgcgggggccgcggtccagcaccgctcagtgagc

SEQ ID NO: 536361 - DNA, 201 bp, Homo sapiens
agtctgaaattcagaatagagatttgggctagataataaacgtggaagttgaaagagtgtagatgacatttaaggcatgtaaatcactaagagatcaccartgcattcagtataaatagagaagtccgaggaccaagcattcaggcactcctggtaagacgttggggaaatgagggggaaccagcataggagactggaaat

SEQ ID NO: 536362 - DNA, 201 bp, Homo sapiens
actgcaggatgagaagtgcgagtggagagggtagggcttcaggtttggaaatagaagtttcagatgcctactagacatcagtggagatgttgagtgggcartttggacattagaagtctgaaattcagaatagagatttgggctagataataaacgtggaagttgaaagagtgtagatgacatttaaggcatgtaaatcac

SEQ ID NO: 536363 - DNA, 201 bp, Homo sapiens
ataccttttgaattttggccgtgcagttggaaggatagaattgccattagctgagataggggacactgcaggatgagaagtgcgagtggagagggtagggsttcaggtttggaaatagaagtttcagatgcctactagacatcagtggagatgttgagtgggcagtttggacattagaagtctgaaattcagaatagagat

SEQ ID NO: 536364 - DNA, 201 bp, Homo sapiens
ccatttgatgtaagcctagaaactggaaaagcaaacttttaaaaacggaatgattgaagttttctttagtaaagtttaaaagttaaagtgtaataaaaaawttttcttttgctttttaactttcattatggctactccaaggtcatcctataccttttgaattttggccgtgcagttggaaggatagaattgccattagct

SEQ ID NO: 536365 - DNA, 201 bp, Homo sapiens
tatcctctttctataaaatggacacttagtttaaaaatttctattgagaaaccacctgaatataagattaacatttaaggatgaaccaggaaaaggtaaakaacagaaacatcttgccatatattggagcctgtgagttggccttttaggttcaaagtcgaatttcctcaaatgagatcagtttatgaagtaatttctttt

SEQ ID NO: 536366 - DNA, 201 bp, Homo sapiens
ctttcagcccaggggccggcgcacggtaggtagttccctgcggctggaggcgggtctggcgcgggctgggcggtgctgcggggccgcgggacagcggagcsccgggaagggggctgccttaggggtccaggtgcgcggctgggccgaggcaaggcggccccaagcgctgggggcgccccgctttggtcgtgggcttcggtg

SEQ ID NO: 536367 - DNA, 201 bp, Homo sapiens
tagcgttccgcttcctccggaagtcggaaggagtcgctctgtccgtcccgctcgttggtggcgctgttacatagcccgtagtcagaggcctttcagcccargggccggcgcacggtaggtagttccctgcggctggaggcgggtctggcgcgggctgggcggtgctgcggggccgcgggacagcggagcgccgggaagggg

SEQ ID NO: 536368 - DNA, 201 bp, Homo sapiens
accatttgatgtaagcctagaaactggaaaagcaaacttttaaaaacggaatgattgaagttttctttagtaaagtttaaaagttaaagtgtaataaaaarattttcttttgctttttaactttcattatggctactccaaggtcatcctataccttttgaattttggccgtgcagttggaaggatagaattgccattagc

SEQ ID NO: 536369 - DNA, 201 bp, Homo sapiens
tagactgagagctggaaggacaggatgccattctggctctggtttatatgaactgtgtagtcctgggcaaatagcaaacctacaaactgcagtgttctcartagtgtatctaatgaaattatgaatatgaaacccctggccaagcacggtgactcacgcccgtaatcccagcactttggaaggctgaggtgggcagatcat

SEQ ID NO: 536370 - DNA, 201 bp, Homo sapiens
tttgttccaggcccctgccccttgtgcctaactcctaaccacaaacatttcctgccccaacttaactttccttttggtatggtatctgcgtagaaaacatwtgctgcacccttaggctaggagcctctgttacaatagtttctcctaacaaagtctctctttattaatctctagactttccctgctgcccccttcaccttt

SEQ ID NO: 536371 - DNA, 201 bp, Homo sapiens
gatcagattttgttcttgacataactttaggctggtttgactggggacagctaggccctaacttttgtgaacttcccagcaccctaatgtgtttacttcawttttgttccaggcccctgccccttgtgcctaactcctaaccacaaacatttcctgccccaacttaactttccttttggtatggtatctgcgtagaaaaca

SEQ ID NO: 536372 - DNA, 201 bp, Homo sapiens
acttaacactaagtttctagaagatcagattgtacatcatcctgagaccatgccttcagaagattattatgcttatcattttgtaccattccctaaattcyggttcattttacttgatgcatatgacttgagtgtcttgggcgtggatcagtcttctccaaaatacgagcagtgtatgaagatattgagggagcacaatcc

SEQ ID NO: 536373 - DNA, 201 bp, Homo sapiens
ttgaagtcagtgtttctacctgatctattaaattttatttgctaaagtgcttcttttagtagcaacttcttcatattaattttataatattaaataaaatrctatcattgaaaacagttcttggggccagatgtggtggctcacgcctgtaatcccatcactttgggaggctgaggtgagtgggtcactggagcctaggag

SEQ ID NO: 536374 - DNA, 201 bp, Homo sapiens
catcgcagatgttcaatttgcagacttagaagatggctttaatttccaaggaaccaggcggcgatactacagacatagtcttcttcacttacagggtgccwttgaagactggaataatgaaagcagcatgccctgttgtgtccttcagcttggagatatcatcgatggatataatgcacagtataatgcatccaaaaagtc

SEQ ID NO: 536375 - DNA, 201 bp, Homo sapiens
gaggccactgctgcccagatgcagcaaaactggtatcacagggcatgtgtgctacaggctcggctggcactgagcactgtgcaagctgtgcctcccacacrgtcacaaggaagttagatttgtattttcatatagaatcatttttgatgggtacactgccatcagagattgtaggaatccaggggtgcttaaaacatacaa

SEQ ID NO: 536376 - DNA, 201 bp, Homo sapiens
gaacttgttccagtggaaggtgtatttgagaggattttggtatcaaatgacagaaaatcaatttgatttagctttaagcccaggagaatttatgtgctgayatgtgtaactaaatgaccagtgttctagcagggacaggtgaatttaggtattcaactaatgttttcagaaatctccatctttccatcattcagaattgtt

SEQ ID NO: 536377 - DNA, 201 bp, Homo sapiens
aaaaacttgccattctcctttctattcaaaagcgaaatatttccttaggtcttctaatttttccagatttgattttctctaaagttttgaattttcttttytaaaaaaactttatgtatactttttttttttgagatggagtctcgctctgttgcccaggctggagtgcagtggcgcgatctcggctcactgcaagctccg

SEQ ID NO: 536378 - DNA, 201 bp, Homo sapiens
tataattttaaaattattttcttaacatgcgtatagtactttatggtttagagatttacagagtaatagtttactgtgatcataactcagttgaagctcaygataacctattgagggttattttgcttcaggaaacacgaggactataattcagttctgggtttttcatttcaaagggttcagcacttcataatacctctt

SEQ ID NO: 536379 - DNA, 201 bp, Homo sapiens
tcctgtgtggcttttttttcccccatgggaccgactctgagtaggagaaactcgtgctctgatgattgttggaccagagcatggttggtttgcttgttttmtatgagttagccaaactagccaactgttctgttctctaacccagtaacggaacatagtgttacctgtgtttcttgattcgcggttggactagaattttca

SEQ ID NO: 536380 - DNA, 201 bp, Homo sapiens
actcacttctgatcctatctttccctgaatatgtttctgaaatctgaaatggccccaaatcagaaatttgagcaccaacatgaagctcaaaggaaatgttmattggagcattttggattttggattttcagatcaggaatgctcaactgttaagtatattccaaaatctgaaaaagtccgaaatctaaaacacttctggtc

SEQ ID NO: 536381 - DNA, 201 bp, Homo sapiens
gcgggctgggcggtgctgcggggccgcgggacagcggagcgccgggaagggggctgccttaggggtccaggtgcgcggctgggccgaggcaaggcggcccyaagcgctgggggcgccccgctttggtcgtgggcttcggtgaccacagctagctcctcgcgccggggacacccccacctcggaagagagaacacactgcct

SEQ ID NO: 536382 - DNA, 201 bp, Homo sapiens
atatcttaatatccgcaatattaaccactccctccccgcccctacctcggtggttgctttacaaaatacagagaaataaaaaaaggaaaatcgtcctctarttatcttccttaactacagatcccgctcctgtgtggcttttttttcccccatgggaccgactctgagtaggagaaactcgtgctctgatgattgttggac

SEQ ID NO: 536383 - DNA, 201 bp, Homo sapiens
ataaacttcatgcacccatttctagcttccacaattatcctgtactcactgatttttttgtgtgtctgtatttgatggagggagggagctattttgaaaamatttcctgacattagaatgcttattaattctaagtttcctcactggaggtggctttgagtttttgatctctctgttcaccaggaccaatctttctgagct

SEQ ID NO: 536384 - DNA, 201 bp, Homo sapiens
tgctcacagaaatgataatagtcatgtcagttagtttttgtgctggatttttgttgttgtttaaaattattcctctcctttcatatctgcattgcctcccmctcacctattcagatataaaatatgagaaactgggtgacctacccaccaaggaagagaaaagattcagcctgacacaaaataacccataacaggaacctt

SEQ ID NO: 536385 - DNA, 201 bp, Homo sapiens
gctgaaactcataattaggtggattaaagagtgtatcattagtaacaacagttttaggatgaaaagaggcccctaattctcaaataagtcaaattgaagtyttatccttattccaattgtggagttgttcttttcatctcttataggagtactcttagagttgggattttacatgtccacagaggattaagtaggaactct

SEQ ID NO: 536386 - DNA, 201 bp, Homo sapiens
gttaggcgttaaagcatactaacaatatttgtgtttcgatatcctctttctataaaatggacacttagtttaaaaatttctattgagaaaccacctgaatrtaagattaacatttaaggatgaaccaggaaaaggtaaataacagaaacatcttgccatatattggagcctgtgagttggccttttaggttcaaagtcgaa

SEQ ID NO: 536387 - DNA, 201 bp, Homo sapiens
taaggaagaaagtagctgaaactcataattaggtggattaaagagtgtatcattagtaacaacagttttaggatgaaaagaggcccctaattctcaaatargtcaaattgaagtcttatccttattccaattgtggagttgttcttttcatctcttataggagtactcttagagttgggattttacatgtccacagaggat

SEQ ID NO: 536388 - DNA, 201 bp, Homo sapiens
ggggtatatgtgtgtgcgtgtgcatgtgtgtttaaaatgagtatttcttaaaaattagcaattattccagatttaaattgggctttattagcattagaatrtctatttattgataggatagtaccttttgtaaattgttactcttctgaaagagtttatcatctgttttacagaagagaaagcaagtgttttagagggtta

SEQ ID NO: 536389 - DNA, 201 bp, Homo sapiens
gggttcaagcagttcttctgcctcagcctcccgagtagctggaactacaggcacataccaccacgcctggctaatttttgtatttttagtagagacagggyttcaccatgttgtccaggctggtcttgaactcctgacctcaggtgatccggctgccttggcctcccaaagtgttgggattacaggcatgagccaccacac

SEQ ID NO: 536390 - DNA, 201 bp, Homo sapiens
aacaatattacttttttgatggatggaatggagggaacaaacacagtacgtgggcaagacagatgataaatgaaacagaaacaagattatttccacggtcrtaagtgctgccaaggaaatagagtatgatgttatagagtgttacggaaaaggattagggttgctattttagattaggtgattagggaaggtctctccaag

SEQ ID NO: 536391 - DNA, 201 bp, Homo sapiens
gaaactttagtgccagaaggcgcctacagtgttatcccttatagaccttatcacttttattactgctgtgaaaccaccaaagtcaccaaatgaggtttatrttttgttttccaagttagatatttttcttttctttcttttttttttttttttttttttgagacaaagtctccctctgtcgcccaagctggagtgtgcagt

SEQ ID NO: 536392 - DNA, 201 bp, Homo sapiens
cagcatggctgggagacttggtttggaggttgagattagaacccttggtttagagttagaattgatgtgggataacaggtgagaaggctagactgagagcyggaaggacaggatgccattctggctctggtttatatgaactgtgtagtcctgggcaaatagcaaacctacaaactgcagtgttctcagtagtgtatctaa

SEQ ID NO: 536393 - DNA, 201 bp, Homo sapiens
tacaagcgtgtatgtgcgcatgggcacgtgaaaacatacacggaactgaatttgggtttgcagcatggctgggagacttggtttggaggttgagattagarcccttggtttagagttagaattgatgtgggataacaggtgagaaggctagactgagagctggaaggacaggatgccattctggctctggtttatatgaac

SEQ ID NO: 536394 - DNA, 201 bp, Homo sapiens
tggaataatgaaagcagcatgccctgttgtgtccttcagcttggagatatcatcgatggatataatgcacagtataatgcatccaaaaagtccctagaacktgttatggacatgttcaagaggcttaaagttccagttcatcatacatggggaaaccatgaattctataacttcagtagagagtatttaacacactctaaa

SEQ ID NO: 536395 - DNA, 201 bp, Homo sapiens
ggtatcacagggcatgtgtgctacaggctcggctggcactgagcactgtgcaagctgtgcctcccacacagtcacaaggaagttagatttgtattttcatwtagaatcatttttgatgggtacactgccatcagagattgtaggaatccaggggtgcttaaaacatacaagcgtgtatgtgcgcatgggcacgtgaaaaca

SEQ ID NO: 536396 - DNA, 201 bp, Homo sapiens
ttagcaattattccagatttaaattgggctttattagcattagaatgtctatttattgataggatagtaccttttgtaaattgttactcttctgaaagagwttatcatctgttttacagaagagaaagcaagtgttttagagggttagtagtttagacctaagactgttgggctctaaagcccacgtactttttcctgtac

SEQ ID NO: 536397 - DNA, 201 bp, Homo sapiens
ttagccaggatggtctcgatctcctgacctcgtgatccgcccaccttggcctcccaaagtgctgggattacaggcgtgagccaccacgcctggcctatatrtacatttttaaacacacataaaagtagttagaataaacttcatgcacccatttctagcttccacaattatcctgtactcactgatttttttgtgtgtctg

SEQ ID NO: 536398 - DNA, 201 bp, Homo sapiens
atttatagtttcagtgtgtgatggttgataaaatactcagaaatgttattttggatcatgtatccattgtaagttagaaacaaaccagggaggaaactgargcaggggtgtatagtcctcataaggggcatatagtcctcatgagggatcttatttggccctacctgattttttttaactttttacaaggagattgtattc

SEQ ID NO: 536399 - DNA, 201 bp, Homo sapiens
ccagacagccaagcctttggcacagttcatgtctatcctgacaaaatgatgttgaaagggagaggcagagttccagatagaattatgaattacaagaaagraagagccttccattgttagtctaatttattttaacttgatagaaaatgagctttgtgtttgtccctcctaaacaaaaaaataaaaatcctctgtctcatt

SEQ ID NO: 536400 - DNA, 201 bp, Homo sapiens
cagtagagccagaccctgtctcaggaaaaaaaaaaaaaaaaaaatctctcatgcctaaggtagttttctcaaaatactggctgcttatcctgtactatgayatgataggaattttgagagcaactcttgtaaacttttctacattattctcttctattaaaatgttgcagtagtttcagttatgaggctcattagacagat

SEQ ID NO: 536401 - DNA, 201 bp, Homo sapiens
aaatgttaattggagcattttggattttggattttcagatcaggaatgctcaactgttaagtatattccaaaatctgaaaaagtccgaaatctaaaacacytctggtcccaagcattttggataaggagatactaaccttatttttaaaagccatgtatattcaacactttggatctctctttttaccccagaacacatcg

SEQ ID NO: 536402 - DNA, 201 bp, Homo sapiens
gtcttagctaccagggaggctgaattaggaggatcacttgagcccaggaagtcgaggctacagtgagccatgatcgcaccactgcactccagcttgcgcartagagccagaccctgtctcaggaaaaaaaaaaaaaaaaaaatctctcatgcctaaggtagttttctcaaaatactggctgcttatcctgtactatgacat

SEQ ID NO: 536403 - DNA, 201 bp, Homo sapiens
acattattctcttctattaaaatgttgcagtagtttcagttatgaggctcattagacagattttcagatatataattttaaaattattttcttaacatgcrtatagtactttatggtttagagatttacagagtaatagtttactgtgatcataactcagttgaagctcacgataacctattgagggttattttgcttcag

SEQ ID NO: 536404 - DNA, 201 bp, Homo sapiens
tttttgttccaggcccctgccccttgtgcctaactcctaaccacaaacatttcctgccccaacttaactttccttttggtatggtatctgcgtagaaaacrtatgctgcacccttaggctaggagcctctgttacaatagtttctcctaacaaagtctctctttattaatctctagactttccctgctgcccccttcacct

SEQ ID NO: 536405 - DNA, 201 bp, Homo sapiens
tttcttgattcgcggttggactagaattttcagaaatttctgccaaagttcttaaatgtttgttcagcacttcaagtcgttaatcaaactatttttttctrtcttatagttgcctgtgggtaggatttttgctcttttatctttgtgtatttgtttgcccagggataattttttcttgtaattgacaaaaagacataaaag

SEQ ID NO: 536406 - DNA, 201 bp, Homo sapiens
cttgttttctatgagttagccaaactagccaactgttctgttctctaacccagtaacggaacatagtgttacctgtgtttcttgattcgcggttggactasaattttcagaaatttctgccaaagttcttaaatgtttgttcagcacttcaagtcgttaatcaaactatttttttctatcttatagttgcctgtgggtagg

SEQ ID NO: 536407 - DNA, 201 bp, Homo sapiens
tgagtaggagaaactcgtgctctgatgattgttggaccagagcatggttggtttgcttgttttctatgagttagccaaactagccaactgttctgttctcyaacccagtaacggaacatagtgttacctgtgtttcttgattcgcggttggactagaattttcagaaatttctgccaaagttcttaaatgtttgttcagca

SEQ ID NO: 536408 - DNA, 201 bp, Homo sapiens
ctacagatcccgctcctgtgtggcttttttttcccccatgggaccgactctgagtaggagaaactcgtgctctgatgattgttggaccagagcatggttgktttgcttgttttctatgagttagccaaactagccaactgttctgttctctaacccagtaacggaacatagtgttacctgtgtttcttgattcgcggttgg

SEQ ID NO: 536409 - DNA, 201 bp, Homo sapiens
tatatgtgtgtgcgtgtgcatgtgtgtttaaaatgagtatttcttaaaaattagcaattattccagatttaaattgggctttattagcattagaatgtctrtttattgataggatagtaccttttgtaaattgttactcttctgaaagagtttatcatctgttttacagaagagaaagcaagtgttttagagggttagtag

SEQ ID NO: 536410 - DNA, 201 bp, Homo sapiens
agaccctgtctcaggaaaaaaaaaaaaaaaaaaatctctcatgcctaaggtagttttctcaaaatactggctgcttatcctgtactatgacatgataggamttttgagagcaactcttgtaaacttttctacattattctcttctattaaaatgttgcagtagtttcagttatgaggctcattagacagattttcagatat

SEQ ID NO: 536411 - DNA, 201 bp, Homo sapiens
agtagagccagaccctgtctcaggaaaaaaaaaaaaaaaaaaatctctcatgcctaaggtagttttctcaaaatactggctgcttatcctgtactatgacrtgataggaattttgagagcaactcttgtaaacttttctacattattctcttctattaaaatgttgcagtagtttcagttatgaggctcattagacagatt

SEQ ID NO: 536412 - DNA, 201 bp, Homo sapiens
ttccccagccagtgaatggggttggaggtcagaccacaagaactgagagtggggaattggataaatgcctagagaaaaattgggtgctgtcaccttaagarcaggaaatgaatgctgggtaggcaaaaataacagctgtccactggagagaagatccaattcattgggactaaatcccctctaggagatccacaatacata

SEQ ID NO: 536413 - DNA, 201 bp, Homo sapiens
ccagctactcgggaggctgaggcaggagaatcacctgaaaccagaaggcagaggttgcagtgagccaagatcaccccactgcactccagcctgggcaacargagtgaaactccgtctcaaaaaaaaaaaaaaaaaaaaacctttgaaaatgataggctattcagatagttgattatataaaactatatttctatctgtaaa

SEQ ID NO: 536414 - DNA, 201 bp, Homo sapiens
atgaaacccctggccaagcacggtgactcacgcccgtaatcccagcactttggaaggctgaggtgggcagatcatgaggtcaggagttcgagaccagcctrgccaacatggtgaaaccccgtctctactaaaaatacaaaaattagccgggcgtggtggcaggcgcctgtaatcccagctactcgggaggctgaggcagga

SEQ ID NO: 536415 - DNA, 201 bp, Homo sapiens
atactttttttttttgagatggagtctcgctctgttgcccaggctggagtgcagtggcgcgatctcggctcactgcaagctccgcctcccaggttcacacyattctcctgcctcagcctcctgagtagctgggactacaggcgcctgccaccacacccggctaatttttgtatttttagtagagatggggtttcaccatgt

SEQ ID NO: 536416 - DNA, 201 bp, Homo sapiens
cggtaatagacaaaaagtgatttaatgggaagatgcaacgtgagctgtacttcagagtgagaaccgtggcttgatcatagatgtgttgctgtcagaaattmgaacttctcctaactctacttccacgtatctcctgtggatgccagtataaatcttccctgttttaactcagtttttcatctgaaaagtgggtatggctac

SEQ ID NO: 536417 - DNA, 201 bp, Homo sapiens
gcgaaatatttccttaggtcttctaatttttccagatttgattttctctaaagttttgaattttcttttctaaaaaaactttatgtatactttttttttttgagatggagtctcgctctgttgcccaggctggagtgcagtggcgcgatctcggctcactgcaagctccgcctcccaggttcacaccattctcctgcctca

SEQ ID NO: 536418 - DNA, 201 bp, Homo sapiens
ggaccaagcattcaggcactcctggtaagacgttggggaaatgagggggaaccagcataggagactggaaattagtggccattgaagttggggaaaaactrgaaagacacccctgggagaaacagtggtgtcctggaatccaagtgtttcagggagaagggaacaactaatggcgtcaaatgctgcagggacttgatagat

SEQ ID NO: 536419 - DNA, 201 bp, Homo sapiens
gtcaggtgtggtggtacatgcctgtagtcttagctaccagggaggctgaattaggaggatcacttgagcccaggaagtcgaggctacagtgagccatgatygcaccactgcactccagcttgcgcagtagagccagaccctgtctcaggaaaaaaaaaaaaaaaaaaatctctcatgcctaaggtagttttctcaaaatac

SEQ ID NO: 536420 - DNA, 201 bp, Homo sapiens
tgtggcaacaggaaatcatggccctattaatatgtcctctgattgggacaaggcacctgcattcacaggcggccctgagcacctgggttctgactttgtcrcaggagctgagggaacaaaagacttgctcgctgtggggtgatggtgacaggcctattgacctgcaatgaagccctctggtgtcatttctcactggtactc

SEQ ID NO: 536421 - DNA, 201 bp, Homo sapiens
gagtctatgtccagttctttctggctgatgccctgatcctgcctgtgcccagaccctgccttcattcagcaacaccctcaacacctcagacagatcccacyggcccagagggaccccacctaggacagagccggctcttcttgctctgccacaaggaggccctcatgaagcgtaatttttgtgtccccccaggagcaagtc

SEQ ID NO: 536422 - DNA, 201 bp, Homo sapiens
tcactatgttgccaggctgatctccacctcctgagctcaagtgatccttctgccttggcctcccaaagtgctaggattacaggcgtgagccactgcgccccagcttaaattctttgcgtgcctcccagtgcatataaagtaaaatcaaacgtctcattgtgtcctgtgagatcccgcatggcctcttacctgtaacctcta

SEQ ID NO: 536423 - DNA, 201 bp, Homo sapiens
aactcaatcgccgcctggcttggtcctggctctgtctgctgccctctgccttctgcccagcccaggtaagggggaccctagcagggctcaggtgatttccytttttgtcatccttattgccacgactctagtctcggttactatctttcttcgtcattttgactacactagccttctaagcagaccacttcatctgttgtt

SEQ ID NO: 536424 - DNA, 201 bp, Homo sapiens
ccgttctgcttcaaagcttctctcgtcagaagcctggggctcactcatcccgtcaagcctacggggcctccctgtacgagcagctggtgtgggaacgtcarttaggacttcccctctacctgtgggctaccaaggccctggaggagctggcctgcaagtgaggaggctgagggcccagggcggggaggcagtgggagtagc

SEQ ID NO: 536425 - DNA, 201 bp, Homo sapiens
agtggtttggaaatatttggcatctcctgtgagagaggagagacgctaagatttagttggcagacatagggaagatggagaggtgagttgagactcacagrgggcaggtctctgagttcaaatcgtgagggaaaaggactctggcagagtggcagtgttggggtctcttgtgtcacattgcctgtctctgcacaagccagg

SEQ ID NO: 536426 - DNA, 201 bp, Homo sapiens
accctggatcttctagctccgccaggcagccctgttcggaatgcacacaatgagatccttgaagagccacatcactgtcccctccagaaagtatgaggatrtgggggaaggatggtggcagaacactggaggacacctggggcccatgggacacacacccgatttctcttccctccttgacagtacactcggctgcagact

SEQ ID NO: 536427 - DNA, 201 bp, Homo sapiens
ttgaacgaatgaatgagggtaagctcctaaatctgtgagccaaagactgcagacagcggggagggaggcatgttgggtccagggtgttggcaacctgggtkgctataggcgtttttatttcctcctgctccccataggctcctggtggaggatgggactgccgaagccgtggtgacctgtaggaatcaccatgtggcagca

SEQ ID NO: 536428 - DNA, 201 bp, Homo sapiens
caactcggaggacaagaaggatccagaaagtcttgtccggtattctagactcctatcctattcggtgagcacagggagagatcctagagcttgaggggccrgaaatgtgggtcttcaaagaggaagaaaatagtggtcaactggacctcggcctgtttgcagggagcagtcactggcgtgttgaatgagcccgctggcctc

SEQ ID NO: 536429 - DNA, 201 bp, Homo sapiens
gtatgttggggaagtggtttggaaatatttggcatctcctgtgagagaggagagacgctaagatttagttggcagacatagggaagatggagaggtgagtwgagactcacagagggcaggtctctgagttcaaatcgtgagggaaaaggactctggcagagtggcagtgttggggtctcttgtgtcacattgcctgtctct

SEQ ID NO: 536430 - DNA, 201 bp, Homo sapiens
cagacagctataagccaggccatcatcaggtgagagcacaaggcgtgcacccattgtgccatttacttatgagaccactttgtctatctgcagtttctacrttagcataattcctggctcatgagaattgcttaatattttttgaacgaatgaatgagggtaagctcctaaatctgtgagccaaagactgcagacagcggg

SEQ ID NO: 536431 - DNA, 201 bp, Homo sapiens
agaatgttttgtgaacctcccactggactagcacacactcacaggcagtcgtcttcccatttccgtgcagacaccaatgttgtttgaaaaggatggttcaycctgcatatctcggcgtcctctggagttggctggctgtgcatcctgcctcactgtccaggacaactggactctggagcttgaaagctcccaggatatcca

SEQ ID NO: 536432 - DNA, 201 bp, Homo sapiens
cagcttctaccccaatttgccttgtcttcctggtcactcactattcctcttccacttgcagatctcacaatgtttattgttgtttccggtcatccacttaygtgcaggtcctgagttttccccctgagaccaccatcaggtcagtgcccagaccccaacccctaaacttcctggcttcacatctgcatctcccacatgtcc

SEQ ID NO: 536433 - DNA, 201 bp, Homo sapiens
caagaaggatccagaaagtcttgtccggtattctagactcctatcctattcggtgagcacagggagagatcctagagcttgaggggccagaaatgtgggtyttcaaagaggaagaaaatagtggtcaactggacctcggcctgtttgcagggagcagtcactggcgtgttgaatgagcccgctggcctctatgagctggat

SEQ ID NO: 536434 - DNA, 201 bp, Homo sapiens
tgatgccctctaagtccttctagacccaccctgctttcagaacccctttgcctgttctgttatcttgacccctgtctctgtctccctgtatttatttagcrttcccctgccccacatctacctggctgaacttctgcagggtggtcagtccccattccaggccactgcctcttgccatatcgtctctgtcttcagccttca

SEQ ID NO: 536435 - DNA, 201 bp, Homo sapiens
gtggtcagtccccattccaggccactgcctcttgccatatcgtctctgtcttcagccttcagctcttctgggtgtgtgcttattgtaccagcatctgccgscaggtaagggagggaaggaacaggctgaactgagtatggagtgccagagggatgtgatgggaccaagaggacttttccaaccactgtcttcatcccaggg

SEQ ID NO: 536436 - DNA, 201 bp, Homo sapiens
tgctttcttttgagctggaaaggaaaccgtcgaagatcgtcccattaggtaaggttggagacggggggatcatgatgatagggggatcatggtgatagagrtagatgggtccctgggaggaagagggatgagggactgatggggaatttctggagttagggaggagaatggtgggtgggaactaaaagccacatgcctgag

SEQ ID NO: 536437 - DNA, 201 bp, Homo sapiens
aagtgaggccagcccacgtgggagaaattgctttccgtcttcctggaacccaggcagtggcaaagtgcggttaactctgcctgggttcattgagttggggkcttcatctctgctttttcattttctctgctttcccccagctccaggatgttcacctgctccagtcagtgggaggggggacaagaaggccagtgctcgccc

SEQ ID NO: 536438 - DNA, 201 bp, Homo sapiens
gatgggtccctgggaggaagagggatgagggactgatggggaatttctggagttagggaggagaatggtgggtgggaactaaaagccacatgcctgagacrtgtgtttttcctctcttcccacctcagaacctcctcggctacagcgattccagtgtggagagctccctttcctgactcacgtgaaccccaggctccgatt

SEQ ID NO: 536439 - DNA, 201 bp, Homo sapiens
cccagcactttgctctccatcctcccaggttcacctcattttctttggctcttcagtccgctggtttgagttcttgcacccgggacaggtgtaccgactcrtagctcctggccccgctgtgagtgtcctacttcatcatacctttccccagaaagcttttttggggttggggtctaaagagggcatgccagtgcctggtca

SEQ ID NO: 536440 - DNA, 201 bp, Homo sapiens
gggattttgccatgtttcccaggctggtctcgaattcctggacttgagtgatctgcctgcctcagcctcccaaagtgctgggattataggcatgagccacygcacctggcctgggttaatttttacactttttaatttttagagatggggtctcactatgttgccaggctgatctccacctcctgagctcaagtgatcctt

SEQ ID NO: 536441 - DNA, 201 bp, Homo sapiens
agggaaatgacgacaatgatcagaaggtaaactgggactccagggacccaggacctgacctgcgccctgagcctctggctaggatcccagcactttgctckccatcctcccaggttcacctcattttctttggctcttcagtccgctggtttgagttcttgcacccgggacaggtgtaccgactcgtagctcctggccccg

SEQ ID NO: 536442 - DNA, 201 bp, Homo sapiens
gaggaaggagggtactggatgggggctgcccgagccccagggaaatgacgacaatgatcagaaggtaaactgggactccagggacccaggacctgacctgygccctgagcctctggctaggatcccagcactttgctctccatcctcccaggttcacctcattttctttggctcttcagtccgctggtttgagttcttgca

SEQ ID NO: 536443 - DNA, 201 bp, Homo sapiens
gctggaattataggtgtgcaccaccacccccagctaattttgtgtttttagtagagacagggtttcaccatgttggtcaggctggtctcgaactcccaacctcaagtgatccgcctgcctcagcctcccaaagtgttgggattacaggcgtgagccaccgcacccggcccggatatttttttctagtcctttattcttccc

SEQ ID NO: 536444 - DNA, 201 bp, Homo sapiens
cccaagtagctgggactactggcgtgtgctaccacgccaggctaacccagctaattttgaattgttttagagtttcaccatgttgcccaggcgggtctcarccttcccaggctaaggtgatcctcccacctcagcctcccaagtagctgggactactggcatgtgctaccacgccaggctaatccagctaattttgaattg

SEQ ID NO: 536445 - DNA, 201 bp, Homo sapiens
tcacagatactctttctcttcctatttcctctgccttgtctctctgggctcgctggccgcgtccggcccatgggtgagggggttgtgagtcggtccgctcytacctcttactggttctgcgaatgtttattccctcattcacgcggcgcccgctgtgagccttaaactggtctccgttcactctctagggtttaatcctgg

SEQ ID NO: 536446 - DNA, 201 bp, Homo sapiens
gtggtggctcacgcttgtaatccagcactgtgggaggcggaggcgggcggattacttgaggtcaggagttcgagaccagcctgaccaacatggtgaaaccycatctctactaaaaatacaaaaattagccgggcgtggtggcgcgcacctgtaattccagctactcagaaggttgaggcaggagaatcgcttgaaccgggt

SEQ ID NO: 536447 - DNA, 201 bp, Homo sapiens
tcctctgattgggacaaggcacctgcattcacaggcggccctgagcacctgggttctgactttgtcgcaggagctgagggaacaaaagacttgctcgctgyggggtgatggtgacaggcctattgacctgcaatgaagccctctggtgtcatttctcactggtactcatctctggggtcccaggcctcctgactcctagtt

SEQ ID NO: 536448 - DNA, 201 bp, Homo sapiens
aggattatcctgcatcagcctcccaaatagctgggattataggggtgcacgccaccacacccagctagtttttttgtatttttagtagagacagggtttcrtcatgttggccaggctggtcttgagttcttgaccttaagtgagcctcccacctcagcctcccaaagtgctgggatttaggggcgtgagccaccttgtgcg

SEQ ID NO: 536449 - DNA, 201 bp, Homo sapiens
ctctgcctgggttcattgagttggggtcttcatctctgctttttcattttctctgctttcccccagctccaggatgttcacctgctccagtcagtgggagsggggacaagaaggccagtgctcgccccctgcctccgtggcgccgttctgcttcaaagcttctctcgtcagaagcctggggctcactcatcccgtcaagcc

SEQ ID NO: 536450 - DNA, 201 bp, Homo sapiens
tctctggggatccttgcttcctcctgttaactgaactgcaaggatggcctgagagtccttccttgctgaaaacctgaaggcctaggtcctggctcctctcyctacttgttctgtgattgaaccaaggactccagattcacaaactgctactccactataatttcccttctttggtgttctggtgccagcctgccttggcaa

SEQ ID NO: 536451 - DNA, 201 bp, Homo sapiens
agtgggatggtggttctcatagccaggggagcctgggaggaaaagcctgctgggatttactagagatgcagaagtgacacatgtcaatcaacaacttctgrgagacttgtatggcaggcagagaacaggagcaagaggacccctagccagaatttccagcatgcatttctccaccgtagctcctaacatgcactccaggat

SEQ ID NO: 536452 - DNA, 201 bp, Homo sapiens
ccaacagagtctatgtccagttctttctggctgatgccctgatcctgcctgtgcccagaccctgccttcattcagcaacaccctcaacacctcagacagawcccaccggcccagagggaccccacctaggacagagccggctcttcttgctctgccacaaggaggccctcatgaagcgtaatttttgtgtccccccaggag

SEQ ID NO: 536453 - DNA, 201 bp, Homo sapiens
gtctatgtccagttctttctggctgatgccctgatcctgcctgtgcccagaccctgccttcattcagcaacaccctcaacacctcagacagatcccaccgscccagagggaccccacctaggacagagccggctcttcttgctctgccacaaggaggccctcatgaagcgtaatttttgtgtccccccaggagcaagtcca

SEQ ID NO: 536454 - DNA, 201 bp, Homo sapiens
tcccaggttcacctcattttctttggctcttcagtccgctggtttgagttcttgcacccgggacaggtgtaccgactcgtagctcctggccccgctgtgartgtcctacttcatcatacctttccccagaaagcttttttggggttggggtctaaagagggcatgccagtgcctggtcattctctaggcctcctggaagaa

SEQ ID NO: 536455 - DNA, 201 bp, Homo sapiens
aggatatccaagatgtgctggatgcaaacaagtcattgcctgaatcctcactgaccgacctgctcagtgacaagtaaatgtccaccaagcccctctggttmatttggccactctctcttctcccaagctagctgggtttggtgaagacttcattttctgctgcaggaggtatttcttttgttattgttgtttttgtttgtt

SEQ ID NO: 536456 - DNA, 201 bp, Homo sapiens
gaccgacctgctcagtgacaagtaaatgtccaccaagcccctctggttaatttggccactctctcttctcccaagctagctgggtttggtgaagacttcaytttctgctgcaggaggtatttcttttgttattgttgtttttgtttgtttttttttgagacggagtctcactctgttgcctaagccagagtgcaatggcct

SEQ ID NO: 536457 - DNA, 201 bp, Homo sapiens
ttctatccgagagtcagagtactccagctctctggggatccttgcttcctcctgttaactgaactgcaaggatggcctgagagtccttccttgctgaaaayctgaaggcctaggtcctggctcctctccctacttgttctgtgattgaaccaaggactccagattcacaaactgctactccactataatttcccttctttg

SEQ ID NO: 536458 - DNA, 201 bp, Homo sapiens
acctgcctcctcttgctactgatgtggctctctggaatgtgcacccctgcttaactttgctgcagcgaccccttctctttcatacaggtttccatatatcwgtctgccatttgtgcccagccagtaccctcacgaggtgttgcaggctggtcctcctcctagtcttcccctagctttggtagagccatggctaggatatgt

SEQ ID NO: 536459 - DNA, 201 bp, Homo sapiens
aaaagcagaaagagtttgtgaagagctctgtggcgtgcaaatggaatcttgctgaagctcaacagaaacttggtagcttagcactgcataattctgagtcyttggatcaggagcatgccaaagcacaaacagcagtatcagaactgaggcaacgggaagaagagtggcgacagaaagaagaagctctagtacaaagagaga

SEQ ID NO: 536460 - DNA, 201 bp, Homo sapiens
ttcagcatcacactgagtcctgacaaagatttcacatgcgattttcaccgatgttgacaactgagtaaattctttaaatctcgcttttgacgctggcgtayacctctcccattcgcgtgaccatctttgccttactgttttgttttttagttttgcttcacgtcattctccagtgaaaatatatacgcatatacttgtgtt

SEQ ID NO: 536461 - DNA, 201 bp, Homo sapiens
agccttgagtcataaggatagaaagcaaaaaatttgcacatgaatcttagttgtgatatgtgaattgccactcccgcctacagtccttgctttctaggccyatgttttgctgctgaaggaaaaatagtaccatatactgattgctctttcagagcatgtactgcatctggtgaaacaacattcctcaaggtgttttcaccc

SEQ ID NO: 536462 - DNA, 201 bp, Homo sapiens
tggccactctggcctgattaattatctgaaataaaacttcctgtgaattttaggagctatttccagtctagtgagtattgctttaaagagtattgtccctyacttgctcttttaccataatctgttgctctggtaatatgaattgtctttaaagagaatcatttaaaaataccattgagagattaatgaattaagaatggt

SEQ ID NO: 536463 - DNA, 201 bp, Homo sapiens
taggaacagtgaatgattgtagttcagcatcacactgagtcctgacaaagatttcacatgcgattttcaccgatgttgacaactgagtaaattctttaaayctcgcttttgacgctggcgtacacctctcccattcgcgtgaccatctttgccttactgttttgttttttagttttgcttcacgtcattctccagtgaaaa

SEQ ID NO: 536464 - DNA, 201 bp, Homo sapiens
atattggtcatttttgataaagcttaagtgtgggtaaccatttagcttttcatttcttttttttaataattgacagcaatcgtgtgaaataagccaaatascattcattatccttagttttgagaggtctaatccaaggcctcttggatatagaaataataacagttaactttaggtttatcctgtaggctagtttttaat

SEQ ID NO: 536465 - DNA, 201 bp, Homo sapiens
gccggggacctgggacctgacgcctgatgccatcccaccccttttatggcatcttcggagggcagacggggtggccatatattaccaacctccacctccamgcacatgttttctttcgccttggctgattcctgttcactcttggaataccttcctccatctccccttcctgacagcactcagatttggggcggctcatgc

SEQ ID NO: 536466 - DNA, 201 bp, Homo sapiens
aagggcccgggacgcgcctccacagccccgccccaaccggaagtgacgcaccgcgccgactatttcttccgccgtccgccggtggcgaggcccaggctgtygccgggtgtgcagcggcgtcgcggccagtagagggattctgggtaacggcccggacccccggctgggcttctggctcggcgcagcaggttccattcacgc

SEQ ID NO: 536467 - DNA, 201 bp, Homo sapiens
cccagctactcgggaggctgaggcaggagaatggcgtgaacccgggaggcagagcttgcagtgagccgagatcgagccactgcactccagcctgggcgacrgagcaagactccgtctcaaaaaaaaaaaaaaaaaaaaaaaaatcatgtcatataggcagcatgaaaaaatttacatcaaaaaggagacatgatcagacca

SEQ ID NO: 536468 - DNA, 201 bp, Homo sapiens
ctgaaatgcaaccaaaatatgaaattttcctgaaacagttgaactttaatagcaaatgcttgacttgatattttagctaggctgcttctggtgactagtctaaacttttgtttgtttttagagataaggtcctgctctgtcactcaggctagagtgcagtggtgcaatcattgctcactgcagccttgaacttctgggctc

SEQ ID NO: 536469 - DNA, 201 bp, Homo sapiens
gagaatcatttaaaaataccattgagagattaatgaattaagaatggttggtatttcttcccttatgggaagaaagaaaatatttgacacttatggttcamttcttttttttacaggtatgttgagtcgatgggatgatagccagagatttttgtctgaccatccataccttgtatgtgaagaaactgctaaatatcttat

SEQ ID NO: 536470 - DNA, 201 bp, Homo sapiens
ccctcgggccgagggtgaggctgaggaagagagtgacttcgacgtgttccccagttctccccgctgcccgcagctgccaggcggcggcgcccaggtgagarggggcctgcgttctgcggagggatggagtggtgctgtcgccaaacccctggaatgccgcgtctcccagaccctcttctacgcctttttctacgcccacct

SEQ ID NO: 536471 - DNA, 201 bp, Homo sapiens
attaagggaatagttaaaaatacccatggtacatagaatatcatgcaccctttaaaattatatttatggaacttttgtaatgagctgaagaaatgcttacrctatgaattcacaggaagcagtacatactagatgatgttggctatgttgaagaaaaatagatgtctagaaagattaagtacctttcacactcacaagatt

SEQ ID NO: 536472 - DNA, 201 bp, Homo sapiens
gggggaatgctcttgggaactggtttctaggatcctagtaatgatccatatcctaatttctatgggtaaatagtgggggttttgctgaataaactgtgcgyatatcttttacatgctcttctgcacataggatatatttgaacatatacaattagaagttaaaaggaagtataccaaaagtttaactttggttatacttgt

SEQ ID NO: 536473 - DNA, 201 bp, Homo sapiens
gcgttctgcggagggatggagtggtgctgtcgccaaacccctggaatgccgcgtctcccagaccctcttctacgcctttttctacgcccacctcactgccrggggccggggacctgggacctgacgcctgatgccatcccaccccttttatggcatcttcggagggcagacggggtggccatatattaccaacctccacct

SEQ ID NO: 536474 - DNA, 201 bp, Homo sapiens
gtacctttcacactcacaagatttgcagtaatttaaaagctgcccaagaagtagggcaataagaatttgcgttcactgctagtggaagtataaattggaamaaccactttaaaaaatttcctagtaaagttgaacaagtgcctgccttaacacccagaaattctcctaggtgtatgcatcctagagagtagattctcaagg

SEQ ID NO: 536475 - DNA, 201 bp, Homo sapiens
ggggataggcctaaattaacaaagaagtttagaagttagttgatgaaacaaggactaagatataaaaacatgactgcagacctagaacacaggatatactrtataccaaaatattgtacagaaatcctttgaattaagaaaaattgaactgtgctgcacaaacatccattgctttcttcatttcttacaaatattgttttt

SEQ ID NO: 536476 - DNA, 201 bp, Homo sapiens
attatgcttcactgcttattcacctataccacagactgtgaatcatatgtgttgagaatgttactagatgaaaatatgggacagtcaatgaaatctaagtrtaggttaggtcgggtataccgattccttcttattttttaaagtctctgtatgatagtatcttacagttcttaggaagatgggtggatgagttttggagaa

SEQ ID NO: 536477 - DNA, 201 bp, Homo sapiens
aagctctttagggtcctcaataattttgaagactgtaaagagaactgctgcgctagagaaactcttacacatatgtactagattgccgtaatgttcatagkagattgtaatagctaaaagcctggaaacaataaataaattgtggtgtaggttgagtattcctaatccaaaatccaaaacgctccaaaatccaaaactgtt

SEQ ID NO: 536478 - DNA, 201 bp, Homo sapiens
gcagcagaatcccataaacagtgttcaattttgacagtttatgaaaggtgcttgaaaagtttatgaaagtcaaaaagtctcaaagctcttgctgtagagcygcagactccaggcagttaagtgaccagactgaaatacatatttatataaatgtactgctgaacaaatattacatatattaaaaaacattcacaagaattt

SEQ ID NO: 536479 - DNA, 201 bp, Homo sapiens
ataagccaaataccattcattatccttagttttgagaggtctaatccaaggcctcttggatatagaaataataacagttaactttaggtttatcctgtagrctagtttttaattttactaaattgtgaattttgttctccttgaggcttgctttactaaatagaggcaggattaaaactgaagcccagtgtgagtgtccca

SEQ ID NO: 536480 - DNA, 201 bp, Homo sapiens
agtagattgtaatagctaaaagcctggaaacaataaataaattgtggtgtaggttgagtattcctaatccaaaatccaaaacgctccaaaatccaaaactktttgagcatcgacatgacactcaagggaaatactcacagattttgtgttttcaatttagagatcttcactggtaagtataatgcaaatattcccagatct

SEQ ID NO: 536481 - DNA, 201 bp, Homo sapiens
gaaaagtggcaaactccaattttgtagcttctggcacagctgtatagatcttgttttagaattttttttttttttggttataaataaaattaattgacagwgcaaaccaaatggtaaagagaagcaaaagtattattatatagtgtactacctttaagacaactttatgtattccatagcctctttccatttcctaagtag

SEQ ID NO: 536482 - DNA, 201 bp, Homo sapiens
ctcaggctagagtgcagtggtgcaatcattgctcactgcagccttgaacttctgggctcaagcaatcctcctgcctcagattcccaggtagctgggactayaggcacatgccaccatccccagctaattttttgtagagacacggtctcactgtgttgcccaggctggtctcgaacttctgggctcaagctgtcctcctgc

SEQ ID NO: 536483 - DNA, 201 bp, Homo sapiens
ttggttaagactgctgaggccaagtgctattttgttacaagaaaggaagaacttggctattttcttgacacttttatgggtgctgcactttatttttgttyggtttttgatgggagggaaagagtactgaaatgttttgtaaattttttttaatgtgctgctaggttttttgttttgttttgttctgaagagaagagtggt

SEQ ID NO: 536484 - DNA, 201 bp, Homo sapiens
tggtatactcttctaaacacatctgcaataggagatgtaattaaagcttccagttggaggctttctggacttggattgcattctggactcttggttgacaygggcctggtgtgtgtgggggctgtatagggctataggggctttacacccatgtttctctgtggtcttatttgtacttatattcttcagagtttttcctaa

SEQ ID NO: 536485 - DNA, 201 bp, Homo sapiens
tataagcctattaattcacataatttttgttattttgccccactcttttttttttttaatatgtgctactattttaaatattcctgcctcagaagataackgttgaatcttacttcatgccatgttttggtgctgaatctcacctcttaagtatttagagataccagatttcctctccttttaatgtagtagtgattagtt

SEQ ID NO: 536486 - DNA, 201 bp, Homo sapiens
atgtgctgctaggttttttgttttgttttgttctgaagagaagagtggtaccatatgttgcaggaagtcaaactggactttttgtggctactaaatttgcytttaatcttattgttctcaattttggaatcaagtatgaaaatctgcacaaatgcaatgtttacaagaactggttgattctgggaggcatctgctacagtc

SEQ ID NO: 536487 - DNA, 201 bp, Homo sapiens
cctggtattgtgttttcaatccagcattcctgccttcctgcgactgaaacgtatccaaatgtgatatactattaaggatttttcagggacctatcttaggrgatacttacatactcgcatcaccttgtcctgtttttttctccgaatccgtgtgtgttttggaagtatatttcagaatcacagactaaacactaatatatt

SEQ ID NO: 536488 - DNA, 201 bp, Homo sapiens
agagttcgagaccagcctgaccaacatggagaaaccctgtctctaccaaaaatacaaaatcagcctggtgtggtggcgcatgcctgtgatcccagctactygggaggctgaggcaggagaattgttggaggcaaaggttacagtgagccgagatcacaccattgcattccagcctgggcaacaagagcgaaactcttgtct

SEQ ID NO: 536489 - DNA, 201 bp, Homo sapiens
gggaaatatataggttaaagcatatgattaaaatatctaaacttgtcaaagtgaggttttccaagcattcagagaaattgtttggctagtttaaatgactrtattatccttaaccaaaggattagctaaataaacattttgaatgggtgcttatcatttatcgagtatttactatgtctcaggcactgttctaagtgcttt

SEQ ID NO: 536490 - DNA, 201 bp, Homo sapiens
gcgggcattcatggatgtaggactttttaatattgaactggccactctggcctgattaattatctgaaataaaacttcctgtgaattttaggagctatttscagtctagtgagtattgctttaaagagtattgtccctcacttgctcttttaccataatctgttgctctggtaatatgaattgtctttaaagagaatcatt

SEQ ID NO: 536491 - DNA, 201 bp, Homo sapiens
ttgtagttattttactcatgttgccttttaatttttgttattttggtttattttttgatgtagccttttaaaaaaggagtcttaaaaatgattttttttttaaaggcaagagaaatcttgtagtgctaactgccttgagctgccaattacctatttctgagaatttggtgactcttattggtaatgatggcatttacaaca

SEQ ID NO: 536492 - DNA, 201 bp, Homo sapiens
cagcactttgggaggcctagccaggagaatatcttgaggccaggagttcaagaccagcctgagcaacataataagcctctcatctttatggagaaaaaaaagaagagaaaaaaagaaaagaaaaaaatctattcagttatgactgactggacaacattaaaaagtcaacactttgctggttccgtgatttcttggtggtat

SEQ ID NO: 536493 - DNA, 201 bp, Homo sapiens
taatgatacccttccccatggccccaagtgtcaggaaccctttcatgttatccttcctgcaaaataaaccagaatggataaggcttttggtatttcagtargtcacaatgctgccatgaagaagtaaacaagaggagcaatgctttatcgtggatggtagatagagttgaaaatattacctctccagaagtgtaagaaagc

SEQ ID NO: 536494 - DNA, 201 bp, Homo sapiens
atgtatatgattttaatgttttttttttttttgagacgaaatctcgctcttgtcccccaggctggagtacagtggtgtgatctcagctcactgcaacctcygcctcccgggttcaagcgttcctgctgcctcagcctcccgagtagctgggattacaggcgcctgctaccacgcctggctaatttttgtatttttagtaga

SEQ ID NO: 536495 - DNA, 201 bp, Homo sapiens
tcctaacttttcccttatacaatttgttgactgcctttcttgtgctgcttttacccttacaattaggtggaatttaccacctagtggtaaatggtacaatrtatcatggactattataaagcattgaaatctgactttttcctctacatttgtatttagtttattaatttagttaattcacgttttataaatataaaatat

SEQ ID NO: 536496 - DNA, 201 bp, Homo sapiens
tggttttttaaaaagtcattcaaaaatatgcctggaaggaaatacatcaaaatgttaacagtaatctcttgtggtagaattacagctaacttttattttcyggattttaaaaattcttcataataaataaactttatttttataatctgaaaaaaatttttcaaagcgtttatcctaagaatcaaaatggcttaacattag

SEQ ID NO: 536497 - DNA, 201 bp, Homo sapiens
ttaaaactagaacccacttatgactcctagtccagtatattttcccacctactgcactgcccaccagagttcgagaccagcctgaccaacatggagaaacsctgtctctaccaaaaatacaaaatcagcctggtgtggtggcgcatgcctgtgatcccagctactcgggaggctgaggcaggagaattgttggaggcaaag

SEQ ID NO: 536498 - DNA, 201 bp, Homo sapiens
agaaatgcatatggtggtagacgattggaaatagaggagatctggagtttaggaatatgggaaatgatcatacaactttcctcaagtaattcacaaactasctgggagatttttagtacacagagaaattaaaatgaattagtgtagtttgttaaaatatatcattctaagcctggcatagtggttctgcctgtaatccca

SEQ ID NO: 536499 - DNA, 201 bp, Homo sapiens
tgggactgggaatacgtgtctcaacttgagaaaccaaatagtgcgaagggactcagggtggccagacctgtgaccttggcctcatttgtatcttgttttcrctgaggtgatcagacacttagtaccctagaaatggactggaattattgaatcttcttctgtaacatcacaatcttcctggttttcagaataaacgttttt

SEQ ID NO: 536500 - DNA, 201 bp, Homo sapiens
ctcatctctacaaaaaaaaaaaaaaattcgtcaggtgtggaggcttatacctgtagtcccagctactgcagaggctgaggtgggaggatctcttgagcccrggaggttgaggctgcaatgagttgtgattgcaccagtgtactctagcctagacaacagaggaataacctgtctctcaagataaagaaataaattaattaa

SEQ ID NO: 536501 - DNA, 201 bp, Homo sapiens
gaatggataaggcttttggtatttcagtaagtcacaatgctgccatgaagaagtaaacaagaggagcaatgctttatcgtggatggtagatagagttgaaratattacctctccagaagtgtaagaaagctaaggcaaaactgcttcataggatttactttgtgggttcaagtataagaaataaggattgtgctttcttta

SEQ ID NO: 536502 - DNA, 201 bp, Homo sapiens
gctagtttaaatgactgtattatccttaaccaaaggattagctaaataaacattttgaatgggtgcttatcatttatcgagtatttactatgtctcaggcmctgttctaagtgctttatatgaattaatagcatttaattgtcatgaaaatcctgagttaggtactatttttagccctattttacagaggaggaaatggag

SEQ ID NO: 536503 - DNA, 201 bp, Homo sapiens
tttatatgaattaatagcatttaattgtcatgaaaatcctgagttaggtactatttttagccctattttacagaggaggaaatggaggcatataaagggamctgcagtagtaaaatggtgaagccagtatttgaacctgggccatttagctctagtctgtcttctcagccgctgtcttaaattgttactctccatttgtat

SEQ ID NO: 536504 - DNA, 201 bp, Homo sapiens
aggcttttttaagagatatggtcttgctctgtcacccaggctgaagtgcagtggtgaggtcatagctcactgcagcctccaccatctgggctcaaggtgtsctctcacctcagcctcccaaatagtggggattacaccacgcctagcaatattcttatactttaagaagtagttttaagtaacttccataatcattctgtt

SEQ ID NO: 536505 - DNA, 201 bp, Homo sapiens
tcatggatgtaggactttttaatattgaactggccactctggcctgattaattatctgaaataaaacttcctgtgaattttaggagctatttccagtctastgagtattgctttaaagagtattgtccctcacttgctcttttaccataatctgttgctctggtaatatgaattgtctttaaagagaatcatttaaaaata

SEQ ID NO: 536506 - DNA, 201 bp, Homo sapiens
tattgaactggccactctggcctgattaattatctgaaataaaacttcctgtgaattttaggagctatttccagtctagtgagtattgctttaaagagtaytgtccctcacttgctcttttaccataatctgttgctctggtaatatgaattgtctttaaagagaatcatttaaaaataccattgagagattaatgaatta

SEQ ID NO: 536507 - DNA, 201 bp, Homo sapiens
ttgtatgtgaagaaactgctaaatatcttattttatggtgttttcacctggaagctgagaaggtattattatgtgaaccttgagtttctgggaaccttagyggaaatctgatttcatactttattgatgttttgttttgttttctacattaagtcctttaaaagaaagcaggaaggtcattagatggaattaccatttttt

SEQ ID NO: 536508 - DNA, 201 bp, Homo sapiens
tttcttaacatagtctgggatctctcagggagtaagttttaaaagaatactaatggcttgtaagaacaaacaggaataataatctgatttttaaatttgtrgttattttactcatgttgccttttaatttttgttattttggtttattttttgatgtagccttttaaaaaaggagtcttaaaaatgattttttttttaaag

SEQ ID NO: 536509 - DNA, 201 bp, Homo sapiens
taaattctgtagattttcttgtgaaaagaaaatttatattgctaatttcttgctaatttaaacttaaaagagctatataagaggctgtactacagcatgtrtatgaaattgagacccatttaaatgaatgtgtgtattcaggaaacttacgttccatcattaattcattcagtaaatactgagtgcctaatgcaaagcaca

SEQ ID NO: 536510 - DNA, 201 bp, Homo sapiens
tgattttgtttatgtagaattaggtaacaaagccaattatgctatccttattattgaaggattaatcttatgacttaacataagctttggttatatttgggtgtagtctttggctaagtacccattaaggctagtagcaaacacttggaaggtggctaactgggactgggaatacgtgtctcaacttgagaaaccaaatag

SEQ ID NO: 536511 - DNA, 201 bp, Homo sapiens
cttccttttatgtaatttattcgtaaaatattcactttgctcatacttttcattttaaagaaagaaaaaagactgtgtttaactaaaaaatagtacccaargaaataaagacaaagtttttctacatataatcaatgtggtattatttataatggaaaaaaaatgaatacacaggcctcccttggacagatagtaaaatct

SEQ ID NO: 536512 - DNA, 201 bp, Homo sapiens
aggattatcgactagttgagggaagtaaaatgagaggccacctgaaagaccaaatcatcagtttagaggtttggaagaaaaatcttaccataataataacwtcccatttttatatcagtttatatgttgtaaagcactttcacacatattatttaattttctcaaacaccctgtgattcattttcattcatttttatagat

SEQ ID NO: 536513 - DNA, 201 bp, Homo sapiens
agtatgttaatttagtaaacatggtttttatttgtaatatgttcatgaactttttacatggcattttgaaatctttttcctgttggtgtttatttacccarcgttttttgaatttcgtttatgcttcagttatgtcaatataataaatattactttaaattttttcccttccttttatgtaatttattcgtaaaatattca

SEQ ID NO: 536514 - DNA, 201 bp, Homo sapiens
gaggtcctttccgctctcctaagagccagtatgttcgcatctttccttttccctggaagtgggagagtggacatgattcagatgcttcgatgttagtcccyttgtctccctctctttccctatgattcccataatcactttcaccctccctttccatgcccccctccccatggcctgccatcaccttcatttccacatccc

SEQ ID NO: 536515 - DNA, 201 bp, Homo sapiens
caccttgggaatttttgcaagtcttagaaccgggtgcccgaggactatggaaacccccagacattaaagggaagcttatggtttgctatgaaactttgccrcggggccagtgcctcctctacaactgggaggaagaggtattaaagttttggcctgctcccttttcttgaaggctgccctcagtttcttaggggaggcagt

SEQ ID NO: 536516 - DNA, 201 bp, Homo sapiens
agcttgacaccatcattaatcatcctgacatgctggagaccagaatattgactagaaaataagtgccatggtcctgagtctaggggagaggagatgtctasggaatctttaagtcttctttctccacccagcacctggtgaatactcagtaaacatttgcggaatgaatgaacaccctgtctgcagcaggacatggacaaa

SEQ ID NO: 536517 - DNA, 201 bp, Homo sapiens
aagaaaagggcaagataaattgaggccaacagtggggttgagggctaatgtcttaccttgaccattagactccattcgagaagcagtgttcactgtgtctccaaaaagacaataacggggcatcttcaggccaacaaccccagcacagactggccctttgagaagaaacaggttgggagagtctgggaaaggtggagacta

SEQ ID NO: 536518 - DNA, 201 bp, Homo sapiens
gaagggatattatagtcattcaacttgggatccacagagagccaccaaccacctggatcaagtcccaagcatgcaggatggctctgagagttttttcttcygacacggacaccggggactgctgactatgcaactaaagtcacccatgccctccagcaccacccagaaagactcgtaccagccaccaggaaacgtctattg

SEQ ID NO: 536519 - DNA, 201 bp, Homo sapiens
gaggaaggaatttctggtggggctgtggattctccagtggatataagggcggaaccccaaggttcttcttccttttctcaagttagtttcttctgggcctycttcttaaccagaccccaccttgcccaccccccaactctctcacagggaagcgtgaagccatgctggagatgctcctgcagcatcagatctggtaaggga

SEQ ID NO: 536520 - DNA, 201 bp, Homo sapiens
ccccagaaacaaccaccttgggaatttttgcaagtcttagaaccgggtgcccgaggactatggaaacccccagacattaaagggaagcttatggtttgctrtgaaactttgccgcggggccagtgcctcctctacaactgggaggaagaggtattaaagttttggcctgctcccttttcttgaaggctgccctcagtttct

SEQ ID NO: 536521 - DNA, 201 bp, Homo sapiens
ccgaagctctagctggaagcatcctagctcatctagggcatccttggtggtagaggagacatggatcttcagcgctggggtgggtggaatggggaggatgrtggaatgaggaatcaaagaaaaggcaatcaaataattggtgatactgtatagcaccgtgcccgaccaaccatccctgggaagctcccaatgcatatctat

SEQ ID NO: 536522 - DNA, 201 bp, Homo sapiens
attgcattagctgtcaccattaggaaacccctataaacctggatgccccacactcccaagggacatcgcattctagttctcatccttccccactctttgcraaatcctgtctagctcagatgtgtttatgagtaagttcaggactgtaaaggctgcaggcccaagctctggtttcctctgccccacagagtgcccacagcc

SEQ ID NO: 536523 - DNA, 201 bp, Homo sapiens; identical to SEQ ID NO: 348540

SEQ ID NO: 536524 - DNA, 201 bp, Homo sapiens; identical to SEQ ID NO: 348541

SEQ ID NO: 536525 - DNA, 201 bp, Homo sapiens
agaagatggttggggctgctcccccaggagttgcctgctgggccttggccacttcattcccatcagtcacacctgcagctcctcggacctgaaggtggatygaccatattcaaaggagggagctggcagaagctgggctctgatagttgttaatttcgtccttctaataacctattcatcgttcccacccaggaggaaagt

SEQ ID NO: 536526 - DNA, 201 bp, Homo sapiens
tccacctacctgcctggtccctgggtgggatccctgcctccctccctcccagcacagagcgggagacctgaacaggcctccttcccaccctatgccccctycttcctagtgcttcccttgccctgtgttcctctcgcctctgtttgtgccttcttacccccaacctctcctctgcccagggtctttgtgcccagcttcact

SEQ ID NO: 536527 - DNA, 201 bp, Homo sapiens; identical to SEQ ID NO: 348546

SEQ ID NO: 536528 - DNA, 201 bp, Homo sapiens
gccaagaagagtttaggaaatggtggtatccccaggagctgaccacattctcatctcttcctcagtgaccgcatgcccaaggctctcatacctgctctccrtcattatccccagattgcatcctatccccacctaccctgctcccaatacacctcttgccctagaagttaccatgatgcctgcagggatggggcccagtgg

SEQ ID NO: 536529 - DNA, 201 bp, Homo sapiens; identical to SEQ ID NO: 348547

SEQ ID NO: 536530 - DNA, 201 bp, Homo sapiens
tagtcttcatggcccaagtctgtagccacctctggtgggtgtcactctagataggatggagatgtgcctgatggagtctttggaaataacagccaacagarcagctggggggtggagaatgggtatcagtgagctctgggggcctggttcagtgtacaaacttaaggagacgaatgcacgtgaaaggtcacaacccctgca

SEQ ID NO: 536531 - DNA, 201 bp, Homo sapiens
ggagcaatttgtccaaagtcagagagcttgtgaatggcagtgtgctggggctagaaaaaaggtttcctaattcctatttcatactagtgtgttttttttttatccactgcaatgtatacttaatagaaaaatagacccaagtggggaaaggctcaaagcataacctcccttctccccggtctgcccacaagggtgctttat

SEQ ID NO: 536532 - DNA, 201 bp, Homo sapiens
gagtggggtctttaacaaatgttaaggatgaaaataaacaaactagcttgagcaaaatggtgagacgtagaatagtgaaaaggcagccgcttttgtttggktgtgattactcctcctctaataaaagaccctcatattgaccaccctcctcctaagcgcccttagaacctggtttgacctctgaagaagggccaggattgg

SEQ ID NO: 536533 - DNA, 201 bp, Homo sapiens; identical to SEQ ID NO: 348551

SEQ ID NO: 536534 - DNA, 201 bp, Homo sapiens; identical to SEQ ID NO: 348552

SEQ ID NO: 536535 - DNA, 201 bp, Homo sapiens
cttagttttcctgatcttcctccctgacaccctcacatcatcaacccattaaatatttggattctctgcttctctaactaggttctcacttccaactgtgmccgaatcctgaactacccactgatgaggtttttctccagttccctacattagccttcccaaaccttcccctttctcttcttgtctcctgctccctactct

SEQ ID NO: 536536 - DNA, 201 bp, Homo sapiens
tctctgggccctatatctggggtgggccatgacccttctgtttttttttgttttttgttttttggtttttttttttttttgagacggagtctcgctctgtygcccaggctggagtgcagtggcgcaatctcggctcactgcaagctccacctcccgggttcacgccattctcctgcctcagcctcccgagtagctgggact

SEQ ID NO: 536537 - DNA, 201 bp, Homo sapiens; identical to SEQ ID NO: 348553

SEQ ID NO: 536538 - DNA, 201 bp, Homo sapiens
ttcctcctcgttgccgggtcttctgggtgtcaaagaaagtctcgtgttcctcccagcgccggtcacaggccgcacagaggaaattagactcaaaacagccrcagcaacagcctggggcaaaagtgcagccaagaagagtttaggaaatggtggtatccccaggagctgaccacattctcatctcttcctcagtgaccgcat

SEQ ID NO: 536539 - DNA, 201 bp, Homo sapiens
actcatcttacagatatcagctgagaagtcattccttccaaggcttactattcctcaagcactccagataagatgccccttttttttctgctcatgcagcmgtctaggataaccttgattatagcaattattagagtgaattataattgtccttgtacttattggtatctctcattagagtgccaagtattttgtctttga

SEQ ID NO: 536540 - DNA, 201 bp, Homo sapiens; identical to SEQ ID NO: 348554

SEQ ID NO: 536541 - DNA, 201 bp, Homo sapiens
ttttctcattctccatgagaactgagagtaccccaacttctagccaagaatcctgtatgaggccccatgcagtgggactgccaggtgtaggattcttagtyccaattaaaggctcaactgaaatgtcacctccaccaaaaaggtgtccctgacttcccctgtctgtctgggcccctcctattgccatccatagctccttgt

SEQ ID NO: 536542 - DNA, 201 bp, Homo sapiens
gccccacagagtgcccacagcccggcctgctccgagccctggtccctggagctgccatgaacatgccccagtccctgggcaaccagccactgcccccagarccgccatcccttggaacccctgcggaggggcctgggaccacgtccccacccgagcactgctggccagtgcgcccgactctgcgcaacgagctggacacct

SEQ ID NO: 536543 - DNA, 201 bp, Homo sapiens; identical to SEQ ID NO: 348555

SEQ ID NO: 536544 - DNA, 201 bp, Homo sapiens
gcaggattaaaagtgagaagtaaaaaaattctaagctcccccgaagtgttcttacctatcccttgatggaggtgagggggtggggggaacttacctctccycacccccaggtatctttatctccacctggaagtcctcacctctaccccttagattttctttttcctcagggttttctcattaccccagaagtgtcttcag

SEQ ID NO: 536545 - DNA, 201 bp, Homo sapiens; identical to SEQ ID NO: 348557

SEQ ID NO: 536546 - DNA, 201 bp, Homo sapiens; identical to SEQ ID NO: 348558

SEQ ID NO: 536547 - DNA, 201 bp, Homo sapiens; identical to SEQ ID NO: 348559

SEQ ID NO: 536548 - DNA, 201 bp, Homo sapiens; identical to SEQ ID NO: 348560

SEQ ID NO: 536549 - DNA, 201 bp, Homo sapiens
agccgcagcaacagcctggggcaaaagtgcagccaagaagagtttaggaaatggtggtatccccaggagctgaccacattctcatctcttcctcagtgacygcatgcccaaggctctcatacctgctctccatcattatccccagattgcatcctatccccacctaccctgctcccaatacacctcttgccctagaagtta

SEQ ID NO: 536550 - DNA, 201 bp, Homo sapiens
tcagaagggaggccaggctggagaccgtgtgaaccagggagccccgggggactagggtgggagctgggaaggccagagggcccctgtatctgcagggcctrgaagtcagagttgctgaggatggcttctcggagcacagccatctctgcaaaaggtacatagtctgctcctgggggtgaaaaccagtgcagatgtgggatg

SEQ ID NO: 536551 - DNA, 201 bp, Homo sapiens; identical to SEQ ID NO: 348566

SEQ ID NO: 536552 - DNA, 201 bp, Homo sapiens; identical to SEQ ID NO: 348569

SEQ ID NO: 536553 - DNA, 201 bp, Homo sapiens
accacacccagctaattttttgtatttttagtagagactgggtttcaccatgttgcccaggctggtctcaaactcctggactcaactgatccgcctgcctyggccgcccaacatgttgggtttacaagtgtgagccactgtgcctggcccacagctgtttttggtttatgtcctcccatgtcttttccacattaattactt

SEQ ID NO: 536554 - DNA, 201 bp, Homo sapiens
atccccttactagtttctctgtgagagaaacttccactccattggaaggattaatggagcctggaggtgggattttctcctagttgaatctgatacacaaytctggcttctaggttgcggctcccgagtgggtggttcttttcgttcttggttcgtcctcttcaggtctggttcctattggtgcgcggggagaagggggcg

SEQ ID NO: 536555 - DNA, 201 bp, Homo sapiens
ggtgggagtctgagggtggcggtgggtggagctggaggatgtggcggcctcacttccatacctgccctccccagagctccgtgcgccaggaaaacgtgacsgtgtttggatgcttgactcacgaggtgcccttgagcctgggggatgcagcagtgacctgttccaaaggtgaggtgaggaatgggggaggagaggaagctg

SEQ ID NO: 536556 - DNA, 201 bp, Homo sapiens; identical to SEQ ID NO: 348575

SEQ ID NO: 536557 - DNA, 201 bp, Homo sapiens; identical to SEQ ID NO: 348577

SEQ ID NO: 536558 - DNA, 201 bp, Homo sapiens
gtcgcccaggcctgaactcctacccaggtccccggcccccgccccgggcccgcgaggacaccggaggccaccccccgggggtggggagcggagccgcgggycagctctgcgagcgccccgcgctggcctgtccggccccgcccccgccccgggccatggcccagcccttgtcccggcccctcgtcctatcccaatccccgc

SEQ ID NO: 536559 - DNA, 201 bp, Homo sapiens
cttaaaaccttctagtgactctcagttgccctcaggatataattctagcttttaacttggcacagaaattcctgcacaattctgcccttctagagcagagygggctcttctccccaccactctatgcatcaggcatagtgcattgctatagattcctgctgtgccttgccctgtcatgtctcatcttacagcactctttac

SEQ ID NO: 536560 - DNA, 201 bp, Homo sapiens
aattgttcggggttgaatgacatgaatttctttataaaacttcctgtttaaacaggaagatgaagaagttcaatttgaagaagaaaaagaaatacagtggscttgaggagtagggagtagacaggaggttctgagtaggggaataagaggactgaacacatcctgcatttttttttttgagacattctgtcacccaggctg

SEQ ID NO: 536561 - DNA, 201 bp, Homo sapiens
ttagccacttccaccagctctgtctgcctagcagggaacactgggcgggctgtgttacctaggatgggagaggatgagtaaccagggggaagtgagaaggycctaaaactaagagaaggggccatgtccaagagtaacccagtctcctcctcctggggcaagtcaaggacagtgaatagtagtgagaacaggacaggggag

SEQ ID NO: 536562 - DNA, 201 bp, Homo sapiens
gacgtagaatagtgaaaaggcagccgcttttgtttgggtgtgattactcctcctctaataaaagaccctcatattgaccaccctcctcctaagcgcccttwgaacctggtttgacctctgaagaagggccaggattggctttcagtttcttcctactcatttaggctcattcctactgttacttttctagaagcttgacct

SEQ ID NO: 536563 - DNA, 201 bp, Homo sapiens
aggagctgaccacattctcatctcttcctcagtgaccgcatgcccaaggctctcatacctgctctccatcattatccccagattgcatcctatccccaccwaccctgctcccaatacacctcttgccctagaagttaccatgatgcctgcagggatggggcccagtggctgcatgttcttcgtggctgtgtttgcagcgac

SEQ ID NO: 536564 - DNA, 201 bp, Homo sapiens
gtttcaggggaatgggcctctaaggggatctgggaaggggatggcaccaaaggggattcagaggtatggggctctaacggggtctcagaggtggaaggctycaagaagctttcagagatatggttctcctgtaagtcctcagcagaggggtcctttgaaggggggtgcttctctgcatccatggtgatatgaggctcttct

SEQ ID NO: 536565 - DNA, 201 bp, Homo sapiens
cgagtgtttgggtaggatctgcggagatctgtgcgtacgtccgggggagtctgggattgtgaggatagggttcctttgagacatctgtggggcggtcgttrggggctgtgaggatctgaggggacctcgggctctgtgcttggggtgagaaaggcagggtctcgggtagctgaggcgggggcggagtctgtgtgtcctcga

SEQ ID NO: 536566 - DNA, 201 bp, Homo sapiens
taaggggatctgggaaggggatggcaccaaaggggattcagaggtatggggctctaacggggtctcagaggtggaaggcttcaagaagctttcagagatayggttctcctgtaagtcctcagcagaggggtcctttgaaggggggtgcttctctgcatccatggtgatatgaggctcttctatgatctcatgtgcttccat

SEQ ID NO: 536567 - DNA, 201 bp, Homo sapiens
cctctcccttccaattttattcaagttctcatcatcttcagcctttgtgtaataactttgcccctctacttccatccacagcattttaatccattcacccrttctttcatggatttatgtaacttatacttttacaatgagcctaatctgatgcttttactgacccgctgtgctaagctctagattgagttgagtctagga

SEQ ID NO: 536568 - DNA, 201 bp, Homo sapiens; identical to SEQ ID NO: 348582

SEQ ID NO: 536569 - DNA, 201 bp, Homo sapiens
ctattgtcagagatgggaagtagggctgaggtagtgtctctaggcctcagtgacagggccgtttttcctgagagtgatgtggatgtgcaagagaactcccyatcaaggcctgtgagcctgctgaaggacagcatgttgggagctagcttggaaagggccctaggttctaggtaggccttgactctcatcagaactgagggt

SEQ ID NO: 536570 - DNA, 201 bp, Homo sapiens; identical to SEQ ID NO: 348584

SEQ ID NO: 536571 - DNA, 201 bp, Homo sapiens; identical to SEQ ID NO: 348583

SEQ ID NO: 536572 - DNA, 201 bp, Homo sapiens
tctcggctgcatctctatcactctctgaatgctgcactggtagcctctctgggttcctaggcagtgctcagcttgcaaggtgacaggttttccttcctgayagttgagactgatcatgtggtctgaactggacagactagtccttgagtgtaaccgtggcctccaatggcccccacctatgtagggcagctctctggggtg

SEQ ID NO: 536573 - DNA, 201 bp, Homo sapiens; identical to SEQ ID NO: 348585

SEQ ID NO: 536574 - DNA, 201 bp, Homo sapiens
gagggtatttcctgcttggctgaaaatgcccctccagagtagtccttattccagccccgggtctgtcctgaagctgctgagttccccaccttctcacctgycctggaggtgtcatcttgggcttcttttctggctggtccgaagtctccagagcagtcagattccctagaggtttactttgagagaccttgcctgccattt

SEQ ID NO: 536575 - DNA, 201 bp, Homo sapiens; identical to SEQ ID NO: 348586

SEQ ID NO: 536576 - DNA, 201 bp, Homo sapiens
tctctcacctgtggcccctgacctggaaccactttgttgaatgtgtcagtatagggaatctatttgttttatcggtgaagagtgacagttcttttctttckttctttcatttcctgcctcccaccccattgtctgctttcctcctctcctaattctggtcccccaggtatttccggtccggggcaccccctgtcatcaatc

SEQ ID NO: 536577 - DNA, 201 bp, Homo sapiens; identical to SEQ ID NO: 348588

SEQ ID NO: 536578 - DNA, 201 bp, Homo sapiens
caggggctgagctcagagtcagggccagtgtctggaccaggcccagaggcaggaccaggatgagagccagagccatgaccaggaccagagccaggaccagagccaggaccaggaccagagccagagccagggacagagccacagccaggaccagagccagagccagagccatggccagcacctgagctggaaccaagaaca

SEQ ID NO: 536579 - DNA, 201 bp, Homo sapiens
tcccttaccagatctgatgctgcaggagcatctccagcatggcttcacgcttccctgtgagagagttggggggtgggcaaggtggggtctggttaagaagraggcccagaagaaactaacttgagaaaaggaagaagaaccttggggttccgcccttatatccactggagaatccacagccccaccagaaattccttcctc

SEQ ID NO: 536580 - DNA, 201 bp, Homo sapiens
gccttggggtcaaaggtggcccgtctcttgagccagaactcacccacctcctctgggcgtgatgggataaagcagaacatgaagcagcggcactggcttaycttgcagggcaccgatatgtctgtgggattggggatggatggtagggttaatctgataggaccttgccttctcatgccaaccccatcctccatccccacc

SEQ ID NO: 536581 - DNA, 201 bp, Homo sapiens; identical to SEQ ID NO: 348545

SEQ ID NO: 536582 - DNA, 201 bp, Homo sapiens
gggcagtcaagtccaagcactagtgtaggaatcagtgcccagcattcagatgaagaagactggagtttgaacagggagactggcaactatacttcagattstgttacaagtgttagtgctcttaaagtgggacaattggaaggtggctgtggattccagtgggaccctctactctctgtcctgattccaaactcccttcct

SEQ ID NO: 536583 - DNA, 201 bp, Homo sapiens
agaaactgagggcagccttcaagaaaagggagcaggccaaaactttaatacctcttcctcccagttgtagaggaggcactggccccgcggcaaagtttcayagcaaaccataagcttccctttaatgtctgggggtttccatagtcctcgggcacccggttctaagacttgcaaaaattcccaaggtggttgtttctgggg

SEQ ID NO: 536584 - DNA, 201 bp, Homo sapiens
gttgagaaggcagggaagggcattccaggtggtgggagtagcatggcccaaagtttagaaggaactgaagtggctcagtgtgggctggtgttggggtggtraggaaggtagagggttgagcagaggccagatcacgaagggccttgacatttgaactgtatcctgagcgtgatagggagccctgaaaggttgtaaaaaaga

SEQ ID NO: 536585 - DNA, 201 bp, Homo sapiens
ccccaggtgactgcgagtttgtgcgcaggttcgtgcggtgccgcaacgcgacggccgaggtgcggatgcgcaccttcctgtccccatgcgtggacgactgygggccctacggccagtgcaagctgctgcgcacacacaattatctgtacgcagcctgcgagtgcaaggccggtgagcaggctggcgagggagcgggctgcg

SEQ ID NO: 536586 - DNA, 201 bp, Homo sapiens
ctttcttcctatcagccactctgtcttgtccccggcctccatctccttgcctttcctgttttggatcgtgtgttcattctaaggtgcccagttgccagtcygctctggggggctggcctttgggttgtggataccatttggcacccaaatggctcatgaggggaaagtactcccaaatgtctagagtgcaggttctcatcc

SEQ ID NO: 536587 - DNA, 201 bp, Homo sapiens
acggttccctgcatcttccctggtctccactgactaaacactccctctgcatgaagaggggggactggctgtgcacgttacacagttgaaggaaggagcaygtcttaaccaaacaggtcatgtccactgatctttcattgaatcaaacgcaagtaaaactccaaaacgtggagcaaagtgttccttccctggactgtctag

SEQ ID NO: 536588 - DNA, 201 bp, Homo sapiens
cccaaatgtctagagtgcaggttctcatccttcctcttcctgtgtctaagatttgaaaaagtaggtaaaataatgaaagcaactacgaggaaagtgaagargtcgactgtacaggagaaaggattctgttgaatccaccgactaggaccacacgtgactcaatatctcagctgaggtggttagaatctgctaatagtgcag

SEQ ID NO: 536589 - DNA, 201 bp, Homo sapiens
tgcctggccttctgactacagaccctggaatggccccctgtcccaggtttctgcctcaccgcgaggccttcctcctcgttgccgggtcttctgggtgtcaragaaagtctcgtgttcctcccagcgccggtcacaggccgcacagaggaaattagactcaaaacagccgcagcaacagcctggggcaaaagtgcagccaag

SEQ ID NO: 536590 - DNA, 201 bp, Homo sapiens
tgatcttcctcaggaaattgtactgtcatccacccattgctcaagccccaaattaaatgccccaaatccttgatttttcttgtctccttattcctcacaascaatcgtaaagaaaaagtcttgttgacgctacttctgaggcatgccctgaaggcttctccagctcttcatttccacttctagcacagcttctctgctttc

SEQ ID NO: 536591 - DNA, 201 bp, Homo sapiens
ttgcctctcctagtttcttgagcttccttgcctgtgccctgggcctccccgactgctgatgttcttctggcctcttggctcagctgggactctctcacctrgtgtctgccctggcagctcttgaggacctgacttccggtgctctttctctggtcccatcactgggtgacggttccctgcatcttccctggtctccactga

SEQ ID NO: 536592 - DNA, 201 bp, Homo sapiens
gcacgttacacagttgaaggaaggagcatgtcttaaccaaacaggtcatgtccactgatctttcattgaatcaaacgcaagtaaaactccaaaacgtggarcaaagtgttccttccctggactgtctagcaaggaaatgggccaccactggagcatgagcccccacccttgggactcattcactacaagattattgtggtg

SEQ ID NO: 536593 - DNA, 201 bp, Homo sapiens
gcaggaaggacctggaatttagagagacctgggttagaggcctgggagtggtggccggggcgggggtttctccccagcccgcccagcaggttctgtttgcyttggtttagtcacacccctgctgtctctccctctcctgccacccctgcttttgtcccagggtctccaggatgagtgtcagtacctccttcagccgcagct

SEQ ID NO: 536594 - DNA, 201 bp, Homo sapiens
ctggagctggcactgcccccctgggggcactgggtctacgtgcgtgtggaaacatcatcccggggccctggtaggaccatccgcttccagctgtgtgtgcrgttgcaaggtcagaacccctgcatttgccccagtctgtgtagacatctgtggttgggaagtgacttgggtggctgtgttcagtggccctctgccatatcc

SEQ ID NO: 536595 - DNA, 201 bp, Homo sapiens
tgccagttgctgacagtgtctgtccctggaggaagaaagagcagaggtgaaagggtcaggtatgggggtcagaagggaggccaggctggagaccgtgtgarccagggagccccgggggactagggtgggagctgggaaggccagagggcccctgtatctgcagggcctggaagtcagagttgctgaggatggcttctcgga

SEQ ID NO: 536596 - DNA, 201 bp, Homo sapiens
ccagtgtggtattgcattagctgtcaccattaggaaacccctataaacctggatgccccacactcccaagggacatcgcattctagttctcatccttcccyactctttgcgaaatcctgtctagctcagatgtgtttatgagtaagttcaggactgtaaaggctgcaggcccaagctctggtttcctctgccccacagagt

SEQ ID NO: 536597 - DNA, 201 bp, Homo sapiens
gagagagcagctttggcgtggagagcgccgggaggaatgggctgtccttggaaggtgtgggttaacaggggtgggagtctgagggtggcggtgggtggagmtggaggatgtggcggcctcacttccatacctgccctccccagagctccgtgcgccaggaaaacgtgacggtgtttggatgcttgactcacgaggtgccct

SEQ ID NO: 536598 - DNA, 201 bp, Homo sapiens
atactaatattctcagacgctaggtaagttttagtctgatatcacataggacaagttaccactgtttctttggtttttctttttttcttttttttttttttaaacacatgacctgatacatataggtggtcagtaattgttgaatgaataacatttggtgtttcctgtctttttttcataatatgtaatatgtattgcata

SEQ ID NO: 536599 - DNA, 201 bp, Homo sapiens; identical to SEQ ID NO: 348571

SEQ ID NO: 536600 - DNA, 201 bp, Homo sapiens; identical to SEQ ID NO: 348572

SEQ ID NO: 536601 - DNA, 201 bp, Homo sapiens; identical to SEQ ID NO: 348573

SEQ ID NO: 536602 - DNA, 201 bp, Homo sapiens; identical to SEQ ID NO: 348578

SEQ ID NO: 536603 - DNA, 201 bp, Homo sapiens
atgaggctgttgccagtgctggacagtggaggcgtcctcagcctggagctccagctcaatgcggtactctttatggagagtggggaggttgctctgccagsgagcttgaaggggaaggtgtcaggggtgttggggtgtttacctcctccaggaagcctgtccaggttgctcccacccatcctgacaattagggaccatggc

SEQ ID NO: 536604 - DNA, 201 bp, Homo sapiens; identical to SEQ ID NO: 348580

SEQ ID NO: 536605 - DNA, 201 bp, Homo sapiens
agcttgaaggggaaggtgtcaggggtgttggggtgtttacctcctccaggaagcctgtccaggttgctcccacccatcctgacaattagggaccatggctyagcccaattctggtcaacaaacatgtcctgagtattcactctgctacagatgggcgggtcaaccaggtcaactcagtgtctggggtttcccagttttgta

SEQ ID NO: 536606 - DNA, 201 bp, Homo sapiens
gatgggcgggtcaaccaggtcaactcagtgtctggggtttcccagttttgtaggctcacttcctgctcattactggcctttcactacggtagttgttaacsttttcttgcaaatctcctttgatggggagtttaccacctcttgaggccacacagttcatgtttggatagcgctgattgccaaaggcattcctgacatccc

SEQ ID NO: 536607 - DNA, 201 bp, Homo sapiens
ctttcactacggtagttgttaaccttttcttgcaaatctcctttgatggggagtttaccacctcttgaggccacacagttcatgtttggatagcgctgatwgccaaaggcattcctgacatcccatcaaaatctgtctccatgaattttttacccactcatctttgattcagtgggtaaaagccatatccagaagccattt

SEQ ID NO: 536608 - DNA, 201 bp, Homo sapiens; identical to SEQ ID NO: 348587

SEQ ID NO: 536609 - DNA, 201 bp, Homo sapiens
gtgtttctagggtccttctcagctttggggatgagctcagatctccctttagccttagtcctttagtacctgctttgtgccaggccttgggttgtgtgctkgggacacagagaaaaataagatgcatgtcggatataggaaatgttttaggaggataaaggggagatggctaactcagcttgctagcgtggtggaggtggt

SEQ ID NO: 536610 - DNA, 201 bp, Homo sapiens; identical to SEQ ID NO: 348590

SEQ ID NO: 536611 - DNA, 201 bp, Homo sapiens
gagcgatcggatcctctggacagtgctagatgccattgatcagatgcggctgccagtagtgaggacttggtgcctcaaggagtggcattacgggagtctgrctggcctcaataaagcagaaacttctgcgaagcatggtgaggcccaggtgaagatctggaggcactcctgtgatgtgccaccacctccgatggagcccga

SEQ ID NO: 536612 - DNA, 201 bp, Homo sapiens
aacctggagaatcacttcagcagctggtacaatgccaatctaatcctggtaggccacaaggaggcaaagcgcggcaggcaggctctgcgagatgctggctrtgagtttgacacctgcttcctctcagtgcagaagagagcgatcggatcctctggacagtgctagatgccattgatcagatgcggctgccagtagtgagga

SEQ ID NO: 536613 - DNA, 201 bp, Homo sapiens
atttcactaggcctcagtttccttacctggaagatgaagctcaagtcatttctaagtctctttgctctggtgtcctgagactcattgcttttcctccagcmggtgtggcattggtctgctctatgcaggggcctatcctggggctctgagatggaactggcaagctgtgaccttttttccttttttcaccagagctgccaa

SEQ ID NO: 536614 - DNA, 201 bp, Homo sapiens
tagaatatttctagctggcaggagaagggagagggagctggcctcagggaaaggtgatcttcctaaacaggtcctccatttccctttgggtctgggtctargccggggccttgtctgaataggcttaaacatgaaagcgagcgttcttgagttctggtttctctctctgatgctggcccccacaggtttggcccttactac

SEQ ID NO: 536615 - DNA, 201 bp, Homo sapiens
tttcactaggcctcagtttccttacctggaagatgaagctcaagtcatttctaagtctctttgctctggtgtcctgagactcattgcttttcctccagcakgtgtggcattggtctgctctatgcaggggcctatcctggggctctgagatggaactggcaagctgtgaccttttttccttttttcaccagagctgccaaa

SEQ ID NO: 536616 - DNA, 201 bp, Homo sapiens
aacaaaactttgtgttcagtctgagttatcttgtattatgttttaatggtttagttttatttttcagtgtttttcatataaactgcctccaatcttttctstaaaggagtagaggtataaacatacacatagaggactgagtgatggtaggaccttgggtgaggagagggaggattagaagaaaacaattctgaaagaaag

SEQ ID NO: 536617 - DNA, 201 bp, Homo sapiens
atcacgccattgcactccagcctgggcaacacagtgagactctgtctcaaaaaaaacaaaaacaaaaacaaaaaacccaaaaaacagaatttaccaccgamggtttttttttatgttctttggggtgaaacacaccacaccttctccttcctaagtggcttgttctctaggcttggaggagcttcttcccccttttttttt

SEQ ID NO: 536618 - DNA, 201 bp, Homo sapiens
ctagtctattatgtcctataacggaggggccgtcatggccatgaaggggaagaactgtgtggccatcgctgcagacaggcgcttcgggatccaggcccagwtggtgaccacggacttccagaagatctttcccatgggtgaccggctgtacatcggtctggccgggctcgccactgacgtccagacagtgtaagtttcaag

SEQ ID NO: 536619 - DNA, 201 bp, Homo sapiens
tttaatatatgtgctgctggccaggcgtagtggctcacgcctgtaatcccagcactttgggaggccaaggtgggcagatcacgaagtcaggagatcgagaycatcctggctaacaccgtgaaaccccatctctactaaaaatacaaaaagttagccgggagtggtggcgggcgcctgtagtcccagctacttgagaggctg

SEQ ID NO: 536620 - DNA, 201 bp, Homo sapiens
agcttgcagtgagccgagactgactgcgccactgcactccagcctgggcgacgagtgagactccgtctaaaaaaaaaaaaaaaaatatatatatatatatrtatgtgtgtgtgtgtgtgtgtgtgtgtgtgtgtgtgcgctgccaaagcaagcaccagttgctacttcctaacacatgtaagactacagttttccctgggc

SEQ ID NO: 536621 - DNA, 201 bp, Homo sapiens
cttgcagtgagccgagactgactgcgccactgcactccagcctgggcgacgagtgagactccgtctaaaaaaaaaaaaaaaaatatatatatatatatatrtgtgtgtgtgtgtgtgtgtgtgtgtgtgtgtgtgcgctgccaaagcaagcaccagttgctacttcctaacacatgtaagactacagttttccctgggcag

SEQ ID NO: 536622 - DNA, 201 bp, Homo sapiens
ctatggctggtaactggcagcctacccagcttcctctggcctcttgtcaggtgaggttctgtgaccccgtgctcacaagagacatttcttccttaacaatrtctccgaagtctcagggatccgtgttggggtgagccacaacaaagctactgcagatggattgaaattctaggtggctcgcatcctctctccagcccagat

SEQ ID NO: 536623 - DNA, 201 bp, Homo sapiens
tgcagtgagccgagactgactgcgccactgcactccagcctgggcgacgagtgagactccgtctaaaaaaaaaaaaaaaaatatatatatatatatatatrtgtgtgtgtgtgtgtgtgtgtgtgtgtgtgtgcgctgccaaagcaagcaccagttgctacttcctaacacatgtaagactacagttttccctgggcaggg

SEQ ID NO: 536624 - DNA, 201 bp, Homo sapiens
ggctggagctcagtggcatgatctcagctcactgcaacctccacctcccaggctcaagcgattctcgtgcctcagcctcctaagtagctgggactacaggsgcgcaccaccatgcctggctaatttttgtatttttagtagagacagggtttcaccatgttggccaggctagtttcgaactcctgacctcaagtgatccac

SEQ ID NO: 536625 - DNA, 201 bp, Homo sapiens
tccagcctgggcgacgagtgagactccgtctaaaaaaaaaaaaaaaaatatatatatatatatatatgtgtgtgtgtgtgtgtgtgtgtgtgtgtgtgtgygctgccaaagcaagcaccagttgctacttcctaacacatgtaagactacagttttccctgggcagggactgagatgagatgtctccttatgtttccctga

SEQ ID NO: 536626 - DNA, 201 bp, Homo sapiens
ataagttgagctctctttttcttttttttttgagacggagtcttgctctgtcacccaggctggagtgcagtggcgtgatctcggctcactgcaacctccasctcccaggttcaatcgattcttctgcctcagcctgccatgtagctgggaccacaggtccatatcaccacacccggctaatttttgtattttcagtagaga

SEQ ID NO: 536627 - DNA, 201 bp, Homo sapiens
gaagtgggtttgtggttggacaggttgggttttgaggtacctgttaagatatccaggatcagagcccatcagacagctgctaaagcacactggagctaaayagggattcttctccctattttacagagaaactgaggctcagtgaagagagacatactatttgcccaatgtcacactgctgattagtaaaagaaattcagg

SEQ ID NO: 536628 - DNA, 201 bp, Homo sapiens
gcttgaagtctctttcactttcctttacataattctgcttccttccaaggaaggagctgagaggggcttcccacatcctgggaatcatcccttacttcagkcatgtcttggggccagagctgggaatcttgagcctagaaaaaagagagttaagggaccagaccaaatcagagccagaggctgtggtttgaaggggttcca

SEQ ID NO: 536629 - DNA, 201 bp, Homo sapiens
ggcttgagggcttggtgctgagggccaggagagctagtcacagtcacggtccagatgggtagagatgttttcttgtgattttctccctctgcagcgagaargacaaaatcaccaccaggacactgaaggcccgaatggactaaccctgttcccagagcccacttttttttctttttttgaaataaaatagcctgtctttca

SEQ ID NO: 536630 - DNA, 201 bp, Homo sapiens
tcttgtgattttctccctctgcagcgagaaggacaaaatcaccaccaggacactgaaggcccgaatggactaaccctgttcccagagcccacttttttttytttttttgaaataaaatagcctgtctttcactcctgcttttgtctttgatgctttcctgcagatctctgccctagctgggcagctacagccagccactca

SEQ ID NO: 536631 - DNA, 201 bp, Homo sapiens
acaaaataaaaaaagaaagaataaaagaaaatgttctcatttctcttaaaactccctgagtctcaagaacataacacttactgagatctcacccagcctgyccttttttcctgtctggtagagtcagagaatgacatcctggggttcctgtcagtgaagtctcccgtgagccttcccttctgcagtcactgctgttctcac

SEQ ID NO: 536632 - DNA, 201 bp, Homo sapiens
gaaacggtgagtgcaagtgtagctagcactgagggaatgcagacatctttgaatgtagtatggagtaggtactgaggaagaggactctccttgtttttccrtctcttatttgcaggataatatccttattttatgggtgtgttttctttgggcctgtctggcaaccagataggaaagaaaatacttatgttggaagaaggc

SEQ ID NO: 536633 - DNA, 201 bp, Homo sapiens
gtaggaggtatccttccaaccactttcctacattgcaggataagcatttggacccttttgggggatagcctgcttaattaccgtgaaatagtatttggccrggcgcgttggctcacgcctgtaatcccagcactttgggaggctgaggtgggcagatcacttgaggtcaggagtctgagaccagcctaacatggcgaaacc

SEQ ID NO: 536634 - DNA, 201 bp, Homo sapiens
aaatacaaaacattagctgggcatggtggcgggcacctgtagtcccagctactcaggaggctgaggcaggagaatggctcgaacccaggaggcagagcttscagtgagccaagatcgcaccactgcactccagcctgggcgacagagcaagactgtctcaaaaaaagaaagaaagaaagaaatgactgtgatccaataaga

SEQ ID NO: 536635 - DNA, 201 bp, Homo sapiens
acgtgtgaccaatagaaagcccagatgtccaggaagagtccgcctatcagccaatgaagagacagcagtgagagcggttgcgcagtgaaggctagacccgrtttactggaattgctctggcgatcgaggggtcctagtacaccgcaatcatggtgagatggggagttaaagcaaaggggcatggggaaggattgagaagcg

SEQ ID NO: 536636 - DNA, 201 bp, Homo sapiens
gtttaaaatattgtaagttgaaatgggtattttgtagacataggatgcaaatacacaaaacactatatccaaaaattgctcacagcagaacagtgtaaagyatctgttgtttcctctggtgattgtgtggctgactgggagctgcggctcattgtcactgcccagcatcaggagtgggtttggtaccacatattgctagcc

SEQ ID NO: 536637 - DNA, 201 bp, Homo sapiens
ttttttcttttcttttctttttttctgagatggagtctcgctctgtcgctcaggctggagtgcagtggcgcgatctcggctcactgcaagctccgcctccygggttcatgccattctcctgcctcagcctcctgagtagctgggactatagtcacccgccaccatgcccagctaatttttttttgtatatttagtagagag

SEQ ID NO: 536638 - DNA, 201 bp, Homo sapiens
ccccacaggtttggcccttactacactgagccagtcattgccgggttggacccgaagacctttaagcccttcatttgctctctagacctcatcggctgccmcatggtgactgatgactttgtggtcagtggcacctgcgccgaacaaatgtacggaatgtgtgagtccctctgggagcccaacatggtacgttggtggcat

SEQ ID NO: 536639 - DNA, 201 bp, Homo sapiens
agggaccagaccaaatcagagccagaggctgtggtttgaaggggttccactctgttggcaggatccggatcacctgtttgaaaccatctcccaagccatgmtgaatgctgtggaccgggatgcagtgtcaggcatgggagtcattgtccacatcatgtgagtatgggctgggagaagtctagaagctctgcagacaccctg

SEQ ID NO: 536640 - DNA, 201 bp, Homo sapiens
agagacaggggtctcactttgttgcccaggttggtcttgaatgcctaggctcaagcagtcctccagccttggcctcctccctaagtgctgagattacaaaygtcagccatcatgcctggcctaaaaaagttattttcatggtggctcatgcctgtaatcttgaactgtgcgtgtgtatgtgtgtgtgtttctatttagagc

SEQ ID NO: 536641 - DNA, 201 bp, Homo sapiens
cagtgtaaagtatctgttgtttcctctggtgattgtgtggctgactgggagctgcggctcattgtcactgcccagcatcaggagtgggtttggtaccacawattgctagcctgggaaaagatcaaatttcaaagcatagtttccactgaatgcctgttgcttttgcaccatcataaagttgaaaaattttaagttgaacca

SEQ ID NO: 536642 - DNA, 201 bp, Homo sapiens
aggaagagtccgcctatcagccaatgaagagacagcagtgagagcggttgcgcagtgaaggctagacccggtttactggaattgctctggcgatcgagggrtcctagtacaccgcaatcatggtgagatggggagttaaagcaaaggggcatggggaaggattgagaagcggagggggtcaggagaggcttggggacgaaa

SEQ ID NO: 536643 - DNA, 201 bp, Homo sapiens
agtagaggtataaacatacacatagaggactgagtgatggtaggaccttgggtgaggagagggaggattagaagaaaacaattctgaaagaaagaaggagsacaagagggtcagaggtgagaaggatagaaaggtaagtgttgaagaaaagaaagtggaaaagtcttagaatatttctagctggcaggagaagggagaggg

SEQ ID NO: 536644 - DNA, 201 bp, Homo sapiens
ccctgcctctctcccttctccacgagcatacaccccattttcccagccccctggtcaggtgtgagataagaaaggtgcttttggcagtcctgggtgagcaraagtccatgcctccctatggctggtaactggcagcctacccagcttcctctggcctcttgtcaggtgaggttctgtgaccccgtgctcacaagagacatt

SEQ ID NO: 536645 - DNA, 201 bp, Homo sapiens
aactcttggactcaagcaatcctcctgcctaagcctcccaaagtgctgggattacgggctagagccactgtgcctggcaatcgtttttgttttttttttttaagcctcctactctcatttgaatgctctaatatctttcatttattatctgaagcagatttttaatagtaaattgtttttcgtttggaggtttttattttt

SEQ ID NO: 536646 - DNA, 201 bp, Homo sapiens
gcaggagaatggcgtgaacctggaaggtggagcttgcagtgagccaagattgcgccactgcactccagcctgggcgacatctcaaaaaaaaaaaaaaaaaattggccaggcgtggcggcgcatgcctgtaatccctttacatggcttataaggcccttattctgctcctttctcacttggcttcttcttgcgtccctgcac

SEQ ID NO: 536647 - DNA, 201 bp, Homo sapiens
ctctgcctccggggttcaagtgattctcctgtcccagcctcccgagtagctgggactacaggcacatgttgtcacgcccagctaattttttttttttttttctgagatggagtttcattcttgttgcccaggctggagtgcaatggcccaatctcggctcaccacaacttccgcctcctgggcccaagtgattctcctgcc

SEQ ID NO: 536648 - DNA, 201 bp, Homo sapiens
ccaagattgcaccactgcactctagcctgcgtgacagagcaagacctcgtctcaaaaaaaaaaaaaaaaaagttaaaaaaaaagttggagtcaggctgggygtggtggctcacacctgtaatcctagcactttgggaggccaaggcgggcagatcatgaggtcaggagatcgagaccatcatggctaacacggtgaaaccc

SEQ ID NO: 536649 - DNA, 201 bp, Homo sapiens
tgtgatgtttatcatgccacttccttcttacctgtgccaacagacctatttcactgcctcagcgtacaccagacccttcagaaacctctctggtgtcaccyagatagattgtgcttactgagacaaatgaacgtttacttgatttagaagataatgtgacagaatgatgtcaggttaggtcaaagccaagggagtgacaga

SEQ ID NO: 536650 - DNA, 201 bp, Homo sapiens
tgaggagctgggggtgcgcttgtgtgtagggaattgcagagctgtcctgagatgcatcatccagtgttgtataatggctgagtgcttaagggcatgggttktaatgccagactcacctggattctaaggttggctttgcatgtactagctgtggaactgtgatcaaatttgagagacttggttacttcagtaggaccaggg

SEQ ID NO: 536651 - DNA, 201 bp, Homo sapiens
cctgggttcaagcgattctcctgcctcagcctcccgagtagctgggattacaggcatgcgccaccacacccggctaattttgtatttttagtagagacagsgtttctccatgttggtcaggctggtctcgatctgccgacctcaagtgatccgcccgcctcggcctcccagagtgctaggattacaagggttagccacagc

SEQ ID NO: 536652 - DNA, 201 bp, Homo sapiens
cctgtcttgtcatcaccaactctgatttaggtatggctagtggaaggatgacttgtatgcttttaaggttaaaactgtttgaagggaattcaggaaggacycgttctatcctgaagctttcttgttcttgttcttgttgttttgagacggagtcttgctctgtcgcccaggctgtagtgcagcagcgcagtttcggctcac

SEQ ID NO: 536653 - DNA, 201 bp, Homo sapiens
cctctgcctcctgggttcaagcgattctcctgcctcagcctcctgagtagctgggattacaggcacctgccatcacacctggctaatttttgtatttttartagagacagggtttctccatgttcgtcaggctggtctcaaactcctggcctcaagctatccgcctgtctcggcctcccaaagtgctgggattataggcgt

SEQ ID NO: 536654 - DNA, 201 bp, Homo sapiens; identical to SEQ ID NO: 338682

SEQ ID NO: 536655 - DNA, 201 bp, Homo sapiens
tttttctcacacttagattatacctctaagaccattagctcatcttgcattgtttgagggattcagtgtaagcccctggaccaaaaaggctttttcctctytgccttctgtgtctgctacaggcacaactctaaggtgaacaggagagagacaggccaaactaggagcccatcacctaaaaaagaggtctaccaaaggcga

SEQ ID NO: 536656 - DNA, 201 bp, Homo sapiens
agaaaggaaaagttagctgggcatggtggcatgtgcctgtagtcccagctacttgggaggctgaggtaggaggattgcttgagcccaggagttcgaggctrcagtgagctatgattttgccactgacttcggcctgggtgacagagtgagactctgcctctaagtaaataaataaataaataaataagtaaaaattgattt

SEQ ID NO: 536657 - DNA, 201 bp, Homo sapiens
tgacgtcaggtgatctgcccgccttggcctcccaaagtgctgggattacaggcgtgagccaccatgcctggccctatttattattttctgaggctaagttattccttcagcttctggcttctagcttagtcctaaagtagtgtactcatgggctgtgtcatgaatttctagtctccaatgggtagttagatggtagatgtt

SEQ ID NO: 536658 - DNA, 201 bp, Homo sapiens
gtcacccaggctggagtgcagtggcgtgatcttactgcaacctctgcctcccaggttcaagtgattttcctgcctcacccttctgagtaggtgggattacwggcgtccgccaccacgcctggctaatgttttgtatttttagtagagatggggtttcatcatgttggccaggctggtctcgaactcctgacctcaagtgat

SEQ ID NO: 536659 - DNA, 201 bp, Homo sapiens
tctggcttctagcttagtcctaaagtagtgtactcatgggctgtgtcatgaatttctagtctccaatgggtagttagatggtagatgttaacagttacatkgataacctagtcttctgttcttctgtcaattgttgagcaaaccattgggatataattgctacaagtttaggttcctgatgagttcccaatttatttcata

SEQ ID NO: 536660 - DNA, 201 bp, Homo sapiens
aagttattctcccacgtcagcctcccgagtagctaggactgcaggtgcgtgctgctaccatgcccggctaatttttttgttttgttttttttggtagagaygaggtttcaccatgttggccaggctggtcttgaacttctgacctcaagtgatccgcctgccccagcctcccaaagtgctgggattacaggtgtgagatga

SEQ ID NO: 536661 - DNA, 201 bp, Homo sapiens; identical to SEQ ID NO: 338642

SEQ ID NO: 536662 - DNA, 201 bp, Homo sapiens
ctgggattacaggcgtgagccactgagcccggccgcgttttctcctgaatagctggattttccatgtgaataacttctcttttccttaatgatgtaggtcmggaactctgaccgtaaccagggtcttcagggtcctctgacagcagagcaaaagagagggcatgggatgaagaaccattccagatccagaagctcctccca

SEQ ID NO: 536663 - DNA, 201 bp, Homo sapiens
cctctagccactagactggagctatccactaacacccgtctccaccagttgtgacagccaaaaatgactccagaagattttctccctggggagcaaaatartctatgcttgaggcagggaggacaagatgggaagggttagagggagaaagagggagggagtgagggaggaaggacggaaggatggacggatggtcagacc

SEQ ID NO: 536664 - DNA, 201 bp, Homo sapiens
gttagccacagcgcccggccctggggtcctttttaagcctgaagggatcttcctgtccatctttctgacttccacacctccttcagtgctggattctgatstgtagtggcagagcttgcttttgaattcataccacttaatataagttatgtggcaatgtctcttaaactgaaacgttcatttgtaaagcgctaaggcccc

SEQ ID NO: 536665 - DNA, 201 bp, Homo sapiens
actttcagctttttcagtagtttcttttcatagctacatattcctaaaaatacaaatatgttgctgcctcttcatccattaattttagatattagatattktcttttttctttctttgttttttttggagacagcatcttgttgtatctcccaggctggagtgcagtgccacaatcttggctcactacaacctctgcctcc

SEQ ID NO: 536666 - DNA, 201 bp, Homo sapiens
cttgaacaagctccccttcccctctagatgtgtgagagattattggaagaaaaccttgccattgttgaagacatcttgccctcacacgcctgccttgggtrtggaagggtgggtgaggcagggctagttatacccaccactcagtcaccccccgaattatcatcaccttctttttatttaccacagaatctgaagaagagc

SEQ ID NO: 536667 - DNA, 201 bp, Homo sapiens
cggagtctcgctctgtcatccaggctggagtgcagtggtgcgatctcagctcactgcaacctccacctcctgagttcaagcaattctcctgcctcagcctyctgagtagctgggattacaggtgcccaccaccacgcccagctaattttttaattttcagtagagacagggtttcaccatgttggccaggctggtctcgaa

SEQ ID NO: 536668 - DNA, 201 bp, Homo sapiens
caggtgatcccccccgcctcggcctcccaaagtgctgggattacaggcgtgagccactgagcccggccgcgttttctcctgaatagctggattttccatgygaataacttctcttttccttaatgatgtaggtccggaactctgaccgtaaccagggtcttcagggtcctctgacagcagagcaaaagagagggcatggga

SEQ ID NO: 536669 - DNA, 201 bp, Homo sapiens
tttttttttttttttgagacggagtctcgctctgtcatccaggctggagtgcagtggtgcgatctcagctcactgcaacctccacctcctgagttcaagcrattctcctgcctcagccttctgagtagctgggattacaggtgcccaccaccacgcccagctaattttttaattttcagtagagacagggtttcaccatgt

SEQ ID NO: 536670 - DNA, 201 bp, Homo sapiens
tttcttttttttttttttttttttgagacggagtctcgctctgtcatccaggctggagtgcagtggtgcgatctcagctcactgcaacctccacctcctgrgttcaagcaattctcctgcctcagccttctgagtagctgggattacaggtgcccaccaccacgcccagctaattttttaattttcagtagagacagggtt

SEQ ID NO: 536671 - DNA, 201 bp, Homo sapiens
tccttatgtaacatttcctgtttcactgccttttcttttttttttttttttttttgagacggagtctcgctctgtcatccaggctggagtgcagtggtgcratctcagctcactgcaacctccacctcctgagttcaagcaattctcctgcctcagccttctgagtagctgggattacaggtgcccaccaccacgcccagc

SEQ ID NO: 536672 - DNA, 201 bp, Homo sapiens
tctcagcttaggattccttcaagactgaagtgggctttatataggctttttttaatggactgatggctgatgtgggcccattttgcatgtcttcctgtggragcagtcagctccgccgctgctgagtcactatttgtccctggaatagcagcatgaagtgagaggagaaggtgttcaggcgttggggcttagaagcgaggc

SEQ ID NO: 536673 - DNA, 201 bp, Homo sapiens
agtgagctccttatgtaacatttcctgtttcactgccttttcttttttttttttttttttttgagacggagtctcgctctgtcatccaggctggagtgcartggtgcgatctcagctcactgcaacctccacctcctgagttcaagcaattctcctgcctcagccttctgagtagctgggattacaggtgcccaccaccac

SEQ ID NO: 536674 - DNA, 201 bp, Homo sapiens
tgatattggtgtgctcagtgagctccttatgtaacatttcctgtttcactgccttttcttttttttttttttttttttgagacggagtctcgctctgtcawccaggctggagtgcagtggtgcgatctcagctcactgcaacctccacctcctgagttcaagcaattctcctgcctcagccttctgagtagctgggattac

SEQ ID NO: 536675 - DNA, 201 bp, Homo sapiens
gaaaaagaagcacaagaaacataagcacagaagctcgagtagtgatcgttccagcagcgaggatgagcacagtgcagggaggtgagcatgtggcgactggmctcccttctcgttgattcacttgctcattcactcattcattccacagacatgaacacctgccctgtgctggaagctgccaggtactgggcattcagtgat

SEQ ID NO: 536676 - DNA, 201 bp, Homo sapiens; identical to SEQ ID NO: 338705

SEQ ID NO: 536677 - DNA, 201 bp, Homo sapiens
acagggtttcaccatgttggcctggatggccttggtctcttgaccttgtgatccgcccatctttgcctcccaaagtgctgggattacaggcgtgagttacygtgcctggcctaatttttttgtatatttagtagagatggcatttcaccatgttggccaggctggtcttgaattcctgacctcaagtgatctgcccgccta

SEQ ID NO: 536678 - DNA, 201 bp, Homo sapiens; identical to SEQ ID NO: 338653

SEQ ID NO: 536679 - DNA, 201 bp, Homo sapiens
ccaaagtgctgggattacaggcgtgagccactgagcccggccgcgttttctcctgaatagctggattttccatgtgaataacttctcttttccttaatgaygtaggtccggaactctgaccgtaaccagggtcttcagggtcctctgacagcagagcaaaagagagggcatgggatgaagaaccattccagatccagaagc

SEQ ID NO: 536680 - DNA, 201 bp, Homo sapiens
ctctaccctgcttctcagcatatgttgaggatgcagtcctgcctttgttaatgtatttcaggcttgcttgggtcggcggggacagggggcagggagtgagstcccatgagagaaggtggatggtatgcttgtcaataaaagctgagtgattacggccaatgccactagattttaccctgcttcaatttcctgttgtataat

SEQ ID NO: 536681 - DNA, 201 bp, Homo sapiens
cggggtttcactgtgttagccaggatggtgtcgatctttgacctcatgatccgcccgcctcggcctcccaaagtgttgggattacagatgtgagccacagygcccggctggttttatttttgttatttattttattttattttttgagatggagtctcattctgtcgcccgggctggagtgcagtggtgcgatcttggctc

SEQ ID NO: 536682 - DNA, 201 bp, Homo sapiens
cctcaggaatgtggagaaagtgtggaaggccgagcagaagcatgaggctgagcggaagaagattgaggagcttcagcgggagctgcgagaagagagagccmgggaagagatgcagcgctatgcggaggatgttggggccgtcaagtaagtgaggagctgggggtgcgcttgtgtgtagggaattgcagagctgtcctgaga

SEQ ID NO: 536683 - DNA, 201 bp, Homo sapiens
tgctgtgagccaagattgcgccattgcactccagcctgggcaacaagagcgaaactctgtctcaaaaaaaaaaaaataaggcttctagggcccacttaccrttcacatgacatattatgtaattgtgtcttggatcagttggtaaggaaagttaaagattgaccttatagttcctgactgctttcagtggaattggagttc

SEQ ID NO: 536684 - DNA, 201 bp, Homo sapiens
cactgtaatgcttgaaacccgatctttccctagagaatgtaacatacgtttttattcatttaatcacttcattatgccggggttaattatgtttattttataattggtaataaaggccacatttatttttgtaactgtttaaagagcgaccacctgtggagtaccgtgtttacgaatttccatgcagaaagaacaacgttg

SEQ ID NO: 536685 - DNA, 201 bp, Homo sapiens
gggttgtaatgccagactcacctggattctaaggttggctttgcatgtactagctgtggaactgtgatcaaatttgagagacttggttacttcagtaggascagggagtaataatacccaacgccttcttaaggtttgttgagaatcaaatgagataacacgtaaggacttgctgtaagccgagctcacagtagatggctg

SEQ ID NO: 536686 - DNA, 201 bp, Homo sapiens
atatggttacatcagaatttttggttcagtgagtatgtggattcatacttgtatgatatataaatattgtttactgatacttttcattcctaagccaagcwgaatatggaggttacatttcctttcttgtatgatttgtatattttttcctagtgtcagtatttgcttcctgcaatctaaaccatgtctttgagttctagg

SEQ ID NO: 536687 - DNA, 201 bp, Homo sapiens
cagctggttcccgttccagtgtttctgtgtttgcacatggagcccagccttcagaccaccttggctactactcttcctttctgaccacacagtgggatgtktttcatttgaggggaggagaagtgaatttggtattttctaaatcattgaaattccttgaccttcctttttaataagaattcatggcccaggaagcctttt

SEQ ID NO: 536688 - DNA, 201 bp, Homo sapiens
agtgtttctgtgtttgcacatggagcccagccttcagaccaccttggctactactcttcctttctgaccacacagtgggatgtttttcatttgaggggagragaagtgaatttggtattttctaaatcattgaaattccttgaccttcctttttaataagaattcatggcccaggaagcctttttccaatgaggctttgac

SEQ ID NO: 536689 - DNA, 201 bp, Homo sapiens
ctttgtgggacactcagtaactttgggttttgactctttaacgggtgggcactggaccatctcggtgggagtgcttgtgccactctggaaggctgttcccyggggttgtgatgtttatcatgccacttccttcttacctgtgccaacagacctatttcactgcctcagcgtacaccagacccttcagaaacctctctggtg

SEQ ID NO: 536690 - DNA, 201 bp, Homo sapiens
atcaaaccctatacctttgtttttctcacacttagattatacctctaagaccattagctcatcttgcattgtttgagggattcagtgtaagcccctggacyaaaaaggctttttcctctttgccttctgtgtctgctacaggcacaactctaaggtgaacaggagagagacaggccaaactaggagcccatcacctaaaaa

SEQ ID NO: 536691 - DNA, 201 bp, Homo sapiens
aggagttcgaggctacagtgagctatgattttgccactgacttcggcctgggtgacagagtgagactctgcctctaagtaaataaataaataaataaatawgtaaaaattgattttagactgaatacccattagtcataagccgaggtactatccaaaggtaaaaattgttttgacatttttattcaccaaagcattacac

SEQ ID NO: 536692 - DNA, 201 bp, Homo sapiens
gccaacacggtgaaaccccatctctactaaaaaaaaaaaaaaaaaattaactgggcgtggtagcatgcatttgtagtcctagctactcgggaagctaaggmaggagaatcgcttgaacccagaaggtggaggttgcagtgagctgagattgcgccagtgtactccagcctggcgacagagcgagactccgtctcaaaaaaa

SEQ ID NO: 536693 - DNA, 201 bp, Homo sapiens
agatcatgccactgcactccagcctgggcgacagattgagactccatctcaaaaaaacgaacaaacaaaaaaaaaatagaggctgggtgcagtggctcacrcctgtaatctagcactttgggaggccgaggtgggcggatcacctgacgtcaggatttcgagaccagcctggccaacacggtgaaaccccatctctactaa

SEQ ID NO: 536694 - DNA, 201 bp, Homo sapiens
aggagaatggcgtgaacccaggaggcggagcttgcagtgagccgagattgtgccaccgcactccagcctgggtgacagagcgagattccgtctcaaaaaayaacagcaacaaaacaaaaccctcgaggggccactctcctgtctttactccttttcccttctctattctttcaccagaagccctcatttgaccagtgaact

SEQ ID NO: 536695 - DNA, 201 bp, Homo sapiens
gcctttgagcttgttcgtatctgcacggggtaagaacaagtgtcgaactgaagggtcaagggatggttagcctgagtcacattgatgacaagatgaccttmtgttggaaagaaaaggaaaaatagacaagtgattattaagccctttttagggttagtttggtaggggtgggtcccggggtgacagcccatttttccctgt

SEQ ID NO: 536696 - DNA, 201 bp, Homo sapiens
gcagttatgagcatatgttttagttcttcaacctggtggatttcttcagaggtccacagaagagggtcaggcttttcttgggcaagctttaggtataaagrttttgtttttagggcatatgagtcaatccgtaagcggcaatatccaaccaatcctaggaatgttacgagttcctgcttagttttaggcaaagttaagaag

SEQ ID NO: 536697 - DNA, 201 bp, Homo sapiens
gcggtttccagagctgttcccacattcaggctcccgcaagccgctccacagccctgggggaggccgagaagggggcatcccgcacggtggaatcacctgcygagggagtgggtggcagagatgagtgcagcagagacgggtgatgcgagggacttgctgtcccccagtgtctggggccctgcctattttctaggtttttta

SEQ ID NO: 536698 - DNA, 201 bp, Homo sapiens; identical to SEQ ID NO: 270499

SEQ ID NO: 536699 - DNA, 201 bp, Homo sapiens
ccccacagatctgaccgaagcaggggttcttggtcttgcttggaacccagattcagccccctttgggaatctaatcaagggtgtggaccctttcccagagraaatggtgtgttcactcctgagggtccatgggcccttgaagctgctcatggctcccctgctgcaggattcccctgggtgcccgtcaaactacagcttccc

SEQ ID NO: 536700 - DNA, 201 bp, Homo sapiens
tttgagtcagtgagccatctccctgctttctggtttaagatagttctaacttgatgaggcgtgctcacaactaaatctcccccaaaggtcagctttctgcyttcttcagttaacaaagccgtagccgcaatggattgaatacattcaagccatccacaggttactggatctaaaactttcgacaggaacaccacaggttgc

SEQ ID NO: 536701 - DNA, 201 bp, Homo sapiens
gggcgtggtggtgcacacctgtaattccagctactcgggaggctgaggctggagaatcacttgaacccaggaggcggaggttgcagtgagccaagatcgcrtcactgcactccagcccgggtgacagagtgagactttgtctcccaaaaaaaaaaaaaaaaaaaaaaagaaaatgggatgacagtagtactacccaacaga

SEQ ID NO: 536702 - DNA, 201 bp, Homo sapiens
ttcctggactcaatgtctgccatctgcccacctctctttctagggatgtctgacttccagtacttggctgtgcatacggaagcaggcggcaagcatacgtyaatgtatgacaaggtgctcatgctccggcccgagaaggaggcctttttccaccaggagctgccgctctacatccccccacccatcttctcccggctggac

SEQ ID NO: 536703 - DNA, 201 bp, Homo sapiens
cgggaaggggccttgccaccctatcggcagatgttctaccagttatgcgacttgaatgtggaagagtacgtatgggaggggccctgagacactgagggggscccgtgggacccagggaccaaagcggtctctgaactcttccacttcacgtcggccttcatctccggcaagagcactcgcctgtctgggagtttggtgctg

SEQ ID NO: 536704 - DNA, 201 bp, Homo sapiens
ctcatgctccggcccgagaaggaggcctttttccaccaggagctgccgctctacatccccccacccatcttctcccggctggacgccccggtggactactwctaccgaccagagacccagcaccggtaaggcccccctccatgcagcctcggttctctatcctgaaaatgggatggtccgggcacggaggctcacacactg

SEQ ID NO: 536705 - DNA, 201 bp, Homo sapiens
ggagaagcaggacctggggtcccatgggttgggcatttttaatggcagtcattctggtgggtcatggcattcaccaaagagggctgttcttttgggacaasgtttcccaagtgattcataaaacataacacctcatatttttcatcgaattgaaccagcatcttgctgctctgtgtgtgtctctggactggcagcatcagc

SEQ ID NO: 536706 - DNA, 201 bp, Homo sapiens
tatgatacaacatcctacgagaataaacacgtttattacaatggcaagggacataaggatcgaggacataagtcctttccacctgccgaacaatcttcccrttagatcagtgaagagatcgtttatcccagaattttaagctagctcattggataaagcagtaagaccttgcagtgcctttgttatggttccgtcaggaac

SEQ ID NO: 536707 - DNA, 201 bp, Homo sapiens
tttttttttttgagacggagtctggctccgtcgcccaggctggagtgcagtggcgcgatctcggctcactgtaacctccgcctcccgggttcaagcagttytcctgcctcagcctcctgagtagctgggattatagacacccaccaccacgcccggctaatttttgtttttttttttttagtagagttggggtttcaccat

SEQ ID NO: 536708 - DNA, 201 bp, Homo sapiens
atgacaaggtgctcatgctccggcccgagaaggaggcctttttccaccaggagctgccgctctacatccccccacccatcttctcccggctggacgcccckgtggactacttctaccgaccagagacccagcaccggtaaggcccccctccatgcagcctcggttctctatcctgaaaatgggatggtccgggcacggagg

SEQ ID NO: 536709 - DNA, 201 bp, Homo sapiens
tactgtgaaaacaaaatgaagaaaacaagtttgacagtatccaactggggatgaataacattgaccagccacactgccagttatttcacgtccctgtgcarcagcgctgtgagtgcatctcacccaagcctgggagcaattccccagggttcctgacacccccatcgtacacatgaggaagccgagacatggggtcagcgc

SEQ ID NO: 536710 - DNA, 201 bp, Homo sapiens
agggtttcattctgtcaccaaggctggagtgcagtagagcaattatggctcactgcaacctcaacctcctaggctcgggtgatcttctcacctcaccctgmcaggtagctgggactataggcatgcaccaccacgcccagctagtttttggtattttttgtagagacgtggtctccctaagttgtccaggatggtctcgaa

SEQ ID NO: 536711 - DNA, 201 bp, Homo sapiens
gaatgtctaccatgagttaggcaccaggagctgtgctttatagatatttaatcataacagtcgtatgacatagatgctattcttggggtttttaaggagarggaccaaaaagagtgttggtattcagtttcatgtgcttggaaagctagaggtaacagcaagtcagagcccaaatggttgttactgattgatttaatctca

SEQ ID NO: 536712 - DNA, 201 bp, Homo sapiens
gccactccaccccgcaccaagcctgagttacctccaagattgtgggtggcaagccacccaggtgctgaggcaagagaccgagggcatgagctgttccagtwtaataaaatacataaaacaacaagttatactagatctagatcatagacatgattatatatgaatatcattaatcattagtttgtaggaattactctttat

SEQ ID NO: 536713 - DNA, 201 bp, Homo sapiens
agataggagctgaggggacatggtgagaagtgaccagaagacaagagtgcgagccttctgttatgcccagactgggccaccagagggctccttggtctagyagtaacgccagtgtctgggaagacgcctcttgccaagcggaccatggtctagcggtagcatcagtgtcaaggaaaaacacccgctacttagcagacctgc

SEQ ID NO: 536714 - DNA, 201 bp, Homo sapiens
agtttggagaagactctactcctccacctcttgtggagggcctgacatcagtcagacctgcccgcagttatccgggggactgtctccctgtgatgctgtgyttcagtggtcacgctcctagtccaccttcatgttccgtcctgtacgcctggctctgccttttagatagcagtagtaaattagtgaaagtactaaaagtct

SEQ ID NO: 536715 - DNA, 201 bp, Homo sapiens
caccagaaaaacatagactcaaatcccgcagctatttgattacaagccttaaattcatcaggtacccctcggggaactccagtggcatctgtataaacacragggtcaaaggaaccacggggggcatctcttactctacggtgtcttgtttttacttcttctggttgatgaaatgccagagtgaaagggatggccaattgg

SEQ ID NO: 536716 - DNA, 201 bp, Homo sapiens
gtactaaaagtctctgatatgcagaagtaatggcataagctgtctctctctctccctctctgtctgcctcggctgccaggcaggtaagggccccctgtccmgtggacacataacccacgtgaccttacctatcattggagatgactcacactctttaccctgccccttttgctttgtatccagtaaataacagtgcagcca

SEQ ID NO: 536717 - DNA, 201 bp, Homo sapiens
tctgtgaagtcttgggggagaactgtccgtcgatactgttgcttccgtccggaatggggatctttccattcgcaagcaaaaatgtctcggctgtcctcagrcaaggggcatgcccaaaaagcatcttaaatatattactgtaaaccactgatggtcgtatggaattttgctgaggagggtgtaaggattagggacaacagg

SEQ ID NO: 536718 - DNA, 201 bp, Homo sapiens
ggaccgcacaatctaagctgatctcgattggctatttcaaatagaacagggatgtgggttacagtggctggatgagcggtttcgccaggaagaatagtttyggcgggaagggcagttacagagcgggtaactaagggcaaggaggcgcaaagaacaaggaagttagactttgaagatggagaacaaagaagaagggagttg

SEQ ID NO: 536719 - DNA, 201 bp, Homo sapiens
tcattacccggggtagaaaactgaggcacggggagatgaagctctgttgacttacctgagagggatagactgttatgttgttaggattagaggtagtgatkgttgacatcttattctctgccacgtacggctctaggtgccttacttagagtccgtcctctttagaaccctaccaggtaggaactgtcagagtctgtattt

SEQ ID NO: 536720 - DNA, 201 bp, Homo sapiens
ggtgaccgcagtggcgtgcttggcagtctggggttgccctctcaggagctggccccatggacccaactcccatctccagtgtgaagccagtgttgtgtgcygacgggccctgtgcccgcccacctgacttgcccgccctcgcctacaggttacgcccccagtgacttgccggtcaaagcaaagcgcagcacctacaactac

SEQ ID NO: 536721 - DNA, 201 bp, Homo sapiens
acctgtaattccagctactcgggaggctgaggctggagaatcacttgaacccaggaggcggaggttgcagtgagccaagatcgcgtcactgcactccagcscgggtgacagagtgagactttgtctcccaaaaaaaaaaaaaaaaaaaaaaagaaaatgggatgacagtagtactacccaacagacgtattgggattgaat

SEQ ID NO: 536722 - DNA, 201 bp, Homo sapiens
cagctgtggagccccaggccacaggccagtctcgcttggctctcatgactgtggtggtggagatagtgtggggagcctcgcccatggtctcacgtggcaaraagtgcctttagctctggatcccaaccgtttggcacagctttggccacagccaggcccctctggaattgtccttattaaaccagtttcccgagaagtctt

SEQ ID NO: 536723 - DNA, 201 bp, Homo sapiens
actgggcgtggtggtgcacacctgtaattccagctactcgggaggctgaggctggagaatcacttgaacccaggaggcggaggttgcagtgagccaagatygcgtcactgcactccagcccgggtgacagagtgagactttgtctcccaaaaaaaaaaaaaaaaaaaaaaagaaaatgggatgacagtagtactacccaac

SEQ ID NO: 536724 - DNA, 201 bp, Homo sapiens
tccccagtttgagagctgcaggccccagggtttctctgagttgtcataggcagttgtggctgcgtctcttcctctgtgaatacaggttcctttagcagccractctggggtcctttcccagcacagatgtccagagagaggcacacggtggctgtgggccttggggggttctgggctccctgcctggtctggcccagcggg

SEQ ID NO: 536725 - DNA, 201 bp, Homo sapiens
atttgacatggagatccttggcatcatctccaccatttacaaatttcagggtaactgaaatctgctcttgcaatgtctggttatttcagggctggccatcytagctgcctgcaggagctgtgtgggtcatctgcaccagtggagggggccaggatatgcccaggggctgtggggacacagcagggcacaggccccatccag

SEQ ID NO: 536726 - DNA, 201 bp, Homo sapiens
aggtgcctggcatattactaacaaggcttagagatggctaagttacatctgcagttctaggcagaatctgaagagtataaagattgagaagggcaaagagkactagaaagaaaagaggggaagaagaaagtgaaatgaaggagaagcaggacctggggtcccatgggttgggcatttttaatggcagtcattctggtgggt

SEQ ID NO: 536727 - DNA, 201 bp, Homo sapiens
ggtccgggcacggaggctcacacactgggcgtggtggtgcacacctgtaattccagctactcgggaggctgaggctggagaatcacttgaacccaggaggyggaggttgcagtgagccaagatcgcgtcactgcactccagcccgggtgacagagtgagactttgtctcccaaaaaaaaaaaaaaaaaaaaaaagaaaatg

SEQ ID NO: 536728 - DNA, 201 bp, Homo sapiens
tgcccgtcaaactacagcttccctggggggcctccaccccatacttacccaccagcttcttaagagctcgagctcggacccttatagtagtaaacaggctycccagagcctggtggcctttctggggccacccggcagcctgcatgggacacccatggccttgtctcctccggccccagctctcttttccagctcagccaa

SEQ ID NO: 536729 - DNA, 201 bp, Homo sapiens
tatcattggagatgactcacactctttaccctgccccttttgctttgtatccagtaaataacagtgcagccagacatttggggccactaccggtccccgcrttttggtggtagtggtcccccgggcccagctgtcttttcttttatgtctttgtcttgtgtctttatttctgcagtctcgtctccacacacagggagaaaa

SEQ ID NO: 536730 - DNA, 201 bp, Homo sapiens
aggctggagaatcacttgaacccaggaggcggaggttgcagtgagccaagatcgcgtcactgcactccagcccgggtgacagagtgagactttgtctcccaaaaaaaaaaaaaaaaaaaaaaagaaaatgggatgacagtagtactacccaacagacgtattgggattgaatttaaaaagtgtgtgcagttctcagcacag

SEQ ID NO: 536731 - DNA, 201 bp, Homo sapiens
tctgtctctacaaaaaaaactaaaaaagttagctgggcatggtggcgtgcacctgtatagccctagctactcgggaggctgaggtggaaagattggttgarcccaggattttgaggctgcagtgaatatgatcacaccactgcactccagcctgggtgacagaacaaaaccctgtctcaataaacaaaacaaaaaacaaac

SEQ ID NO: 536732 - DNA, 201 bp, Homo sapiens
gctatttgggaggctgaggcaggagaatggcgtgaacccgcgaggcggagcttgcagtgagccgagatcgcgccaccgcactccagcctgggcgaccgagygacaccccatctcaaaaaataataatatacaaaaaattagccgggcgtggtggcgcatgcttgtaatcccagctacttggggggctgaggcaggagaatc

SEQ ID NO: 536733 - DNA, 201 bp, Homo sapiens
ggggggctgaggcaggagaatcgcttgaacccaggatgtggaggttgaggtgagctgagatcgtgccattgcactccagcctgggcaacaagagtgaaacyccatctcaaaaaaaagaaaacagcacttgtcagcactgccgcccctggcactagatggcagcagcatctgagttactgctctgccctgtgggccagtggg

SEQ ID NO: 536734 - DNA, 201 bp, Homo sapiens
ctctccctacagggttgggcacaggtgggctgctcttgcaggtgaccacccggttttcctggggaacatctttgaaaacgcgatagtgctgacctgtcccrtgcggtttctaacgcaggcactttaaaaagaaggcccaggctcgatcccgtctttctagttttgtttcacaatgtgaaaattactgctattctttgtaag

SEQ ID NO: 536735 - DNA, 201 bp, Homo sapiens
cgtgaccttacctatcattggagatgactcacactctttaccctgccccttttgctttgtatccagtaaataacagtgcagccagacatttggggccactrccggtccccgcattttggtggtagtggtcccccgggcccagctgtcttttcttttatgtctttgtcttgtgtctttatttctgcagtctcgtctccacac

SEQ ID NO: 536736 - DNA, 201 bp, Homo sapiens
tggcctgcctgcttttgtgtcagtttggtgtccaaccttaaagacgtaactactacaaatattttgagaaatacctacctaagggtgttctgtgccaacayacagaggtagttctagaatctctgctttgtatgtgtgtgtatgtgttttaagactttatttttttagagcaattttagaatcacagcaaaataaggcgca

SEQ ID NO: 536737 - DNA, 201 bp, Homo sapiens
gttgtccccacgcagccagccagcttgtcaccatgcatgacctgaagcagggcctgggcccgtcggggacgagtggtgctcggaaaccagcttccagcaartacaagctcaaggtgggcgcccctggaggccaggaatggaggggaggacttccctcttggggccgggcaccttgtgggtgacacctggggggctgtgatt

SEQ ID NO: 536738 - DNA, 201 bp, Homo sapiens
gcgacctgtgctgcttggcgttggcattttattttattttatttattttatttattttgagatggagtctcactctgtctcccaggctggagtgcagtggygtgatctctgctcactgcaacctccgcctctgggattcaagtgattctcctgcctcagcctcctaagtagctgggagtacaggcgcacgccaccatgccc

SEQ ID NO: 536739 - DNA, 201 bp, Homo sapiens
gatgagaccagtaaatgccggaggtggagctgggcagctgtggagccccaggccacaggccagtctcgcttggctctcatgactgtggtggtggagatagygtggggagcctcgcccatggtctcacgtggcaagaagtgcctttagctctggatcccaaccgtttggcacagctttggccacagccaggcccctctggaa

SEQ ID NO: 536740 - DNA, 201 bp, Homo sapiens
ggtggactacttctaccgaccagagacccagcaccggtaaggcccccctccatgcagcctcggttctctatcctgaaaatgggatggtccgggcacggagrctcacacactgggcgtggtggtgcacacctgtaattccagctactcgggaggctgaggctggagaatcacttgaacccaggaggcggaggttgcagtgag

SEQ ID NO: 536741 - DNA, 201 bp, Homo sapiens
acttatacttgtttgactgtctgcgatatggacatggatacttaactacatcggatagctgcctttgagcttgttcgtatctgcacggggtaagaacaagkgtcgaactgaagggtcaagggatggttagcctgagtcacattgatgacaagatgaccttatgttggaaagaaaaggaaaaatagacaagtgattattaag

SEQ ID NO: 536742 - DNA, 201 bp, Homo sapiens
actcccacctgcagcccgggcagctctcagccccggcccagtcgcgcaccgtcacctcctcctttctgatcagggacatccttgccgactgcaaaccactygcggcctgtgcaccctactctagcagcgggcagccggcagcccctgagcctgggggccgccttgcggccaaggccgcggaggactttagagacaagctgg

SEQ ID NO: 536743 - DNA, 201 bp, Homo sapiens
aagttatttattcgtgacccatgagcccgtgaccgtgtccgtggattagtgagtctgtggcctgtgccctccccactcccaggcggggcaggaaggggccragggggcttgcccacccaccccgaccccagcccccagcctcagccccggtccgggggcagccaggcctctcgggttctctcttttttaaatgtcgaaata

SEQ ID NO: 536744 - DNA, 201 bp, Homo sapiens
aatcttcgttgttgtttgttccattttcatcccatcgtaaccaaggagatgagatcagggttaaaaggaaagggagaaggaaggaaggaaggaaggaaggraggaaggaaggaaggaaggaagggaaagggaagaagaaaaaaaaagaattccctaattttgtttctgacccccagtcactacctcgactttagctgtttt

SEQ ID NO: 536745 - DNA, 201 bp, Homo sapiens
cccagaaatcttttcaagagacaaaatttccctgtaagggcaacttctttattgtcttgccccctcccccaacacccccaccccacccccagcgccatacytcctggtccctatttggaccaagtcttcccaaaattttaggaaggctcatttaacactctcctcccaaccaagaattcgtttgtggatatgtcctgactc

SEQ ID NO: 536746 - DNA, 201 bp, Homo sapiens
aggggcaacgccaggcggggcacaatgatctgtccttgaggacaaagagtgattccggagagagcaggtttttgtccctccacgcaggtttctctccccasaccccagccttcggcttcctcccttcctgtcacggacgcagccggagaaactggggcccagacgcggagctcactccgccagaaaccctgggtcccttcc

SEQ ID NO: 536747 - DNA, 201 bp, Homo sapiens
ggaatcaatcgcattcccttccctgaagagcacccccccatcccctcaggcctctccagggtgatcctaccttcataaagaggcacgcgcagggaggagcmccccctacccagctccaagggttcgttctgcgatctcctgggcagggtaaggcgcagttagagccgggctttggggtcagacagcagggcttaaaaccca

SEQ ID NO: 536748 - DNA, 201 bp, Homo sapiens
tccccacccgccgggtgtacatacgcgtctctgccactccccacccccagcctctgccggctcccctaggcaacccctttctccccaggagcgggtgcggmtgattcccaggcttcgctctctcccacgccccttctacgctccaggtggagaacagcccctctccccgcgcccccgccagggagagaaggggagtgcgga

SEQ ID NO: 536749 - DNA, 201 bp, Homo sapiens
acaccacaaactgaatacctcccgacctccaacgcagacctcgtccctgagaagcgggggattttcattaagtagcccaggcaatttggtcaaaaagtaakagttctatgatatcaagtttgagatttggatgatcgtttcctcaaacttatttaaactatctgtctgcacagacagaactcaagtccccctattccaaca

SEQ ID NO: 536750 - DNA, 201 bp, Homo sapiens
gagcagtggttctcctcagaacatttcagccagtcctgtggttatgcctttgagcaacaaagagtctggtggagacagtgtgggcaggggagggatactgygtgcccgagaggagatttccccaaaatgcacaaagcaaactttctaaacttcgactgggacccctgcccttccagcagtgctggtggacaggagcaggtc

SEQ ID NO: 536751 - DNA, 201 bp, Homo sapiens
gggctgagcctatccaagaggaggccaaggcagagtgggcacagaacctgcattcaaaggctccagtccacgctggagggggaacagaagaaaagccccartagctgacccattcttcctgacaccacaaactgaatacctcccgacctccaacgcagacctcgtccctgagaagcgggggattttcattaagtagcccag

SEQ ID NO: 536752 - DNA, 201 bp, Homo sapiens
gcccagacgcggagctcactccgccagaaaccctgggtcccttcccctacgctggcaggctgggtccggttccatcgtcgcggctccgtttatccctccarggagcgcgggcagagcgccgagcgcggcgcagggactggagttctcgccagcttcgggttctttctccccggagctgcccggggggtctcggcctcgggc

SEQ ID NO: 536753 - DNA, 201 bp, Homo sapiens
cctcagggttcatgtcctgttcccggggccccagaggtcccgtctgagagcggcccccgcgagcttgggtgtcgcggaaccaccgctgtcggaagccgagrttacacaaacgccacgggcaggagcgggagggcaccggcggcggctgcgaggccgggccctgacatgccgctgtgtccgcagtgaaggaggagggcgacc

SEQ ID NO: 536754 - DNA, 201 bp, Homo sapiens
ctcaacccaaatagccacacaccgacacacacatcaatacaacttgcagtcacacacgcacgcacgctcagccccacagtcactcgcacgctcttagcagrggcaggaatggtgcttttcataaacaagcctcagaacacatcgccccattaataataaatactgattactgctccgggcatcaataattaaggcctgtta

SEQ ID NO: 536755 - DNA, 201 bp, Homo sapiens
tatatgaagcacctactgtgtgctggcccttttctaggcatttaatataatttgatgaaaaaaagcaaaaaaaaaaatccctgccctcctgggcctccgtyctagtcggagagtcagacagtaacactagacgtcataagcaggtacggtagatgtgacgccctcacggcctcctctagatacggctgcatcctcccctat

SEQ ID NO: 536756 - DNA, 201 bp, Homo sapiens
aacaggatccagctccctcacaaactctagagctggagccagctccagcaccagttccatcattacagccttcctggccttcacctgtggttgcagagaaygggctgagtgaggagaagcctcacctcttggtgttccctccagatctggtggcagagcagtttacactgatggatgcggtgagcagctcagcttggcagg

SEQ ID NO: 536757 - DNA, 201 bp, Homo sapiens
gtgggccccaggaggcccccagaggtcccccagctgttccaagtgagaccagttggggctgggggctgagaaagccttcaggggaggggccttgctcatcytcctaccccaatgtcacagggcatcatccagggcaccgttccctacctgggcacgttcctcaccgacctggtgatgctggacactgccatgaaggactat

SEQ ID NO: 536758 - DNA, 201 bp, Homo sapiens
gcagatagagacttgaggggtccttccccccaaccccagccccagaccctgcctcaggggagctgggatgcctgaggtggtcctgctgctcctggtggggktcagcacagcccctcagaggcgcctttgatatacaaaggggcgaggcagtgtggggctgaggagcaggggtcaggtccccgccatggagctgctcacatg

SEQ ID NO: 536759 - DNA, 201 bp, Homo sapiens
agtgcacagcgggccgctggcccaggagtggaatgagtggaagccattcctttattttattattattattattattattattattgttgttgttgttgttrttattattattattattattattattattattattattattgagacagggtcttgctctgtggcccaggctgcagtgcaggggccagatcacggctcact

SEQ ID NO: 536760 - DNA, 201 bp, Homo sapiens
cagcgaaagggagcggagtgcacagcgggccgctggcccaggagtggaatgagtggaagccattcctttattttattattattattattattattattattgttgttgttgttgttattattattattattattattattattattattattattattgagacagggtcttgctctgtggcccaggctgcagtgcaggggc

SEQ ID NO: 536761 - DNA, 201 bp, Homo sapiens
tcagcgaaagggagcggagtgcacagcgggccgctggcccaggagtggaatgagtggaagccattcctttattttattattattattattattattattattgttgttgttgttgttattattattattattattattattattattattattattattgagacagggtcttgctctgtggcccaggctgcagtgcagggg

SEQ ID NO: 536762 - DNA, 201 bp, Homo sapiens
atcagcgaaagggagcggagtgcacagcgggccgctggcccaggagtggaatgagtggaagccattcctttattttattattattattattattattattattgttgttgttgttgttattattattattattattattattattattattattattattgagacagggtcttgctctgtggcccaggctgcagtgcaggg

SEQ ID NO: 536763 - DNA, 201 bp, Homo sapiens
tacgaacatctgaatatgacgaagtagcaaaggtggatattcactcattcatttcgtatctgtctcctgggcccaggccatgccggggcggggggtgggggtaacaagaatccggggagttgccaggggaaggggaagtgctcatctggggagtgcgtgggcacagagagattccagaaggaggtgtcctgtggtcgtggt

SEQ ID NO: 536764 - DNA, 201 bp, Homo sapiens
aatcacttgaacctgggaggtgatgagtgcagtgagccaagatcatgccactgcactccagcctgggcgacggagccagaccctgtctcaataaacaaacgaacaaacaaacaaacaaacatcatgggagccattggaaggtgttcccattggaagatgctcccatatgccacagggggccgatatctgatttttgcttca

SEQ ID NO: 536765 - DNA, 201 bp, Homo sapiens
ccagggcctgacctgagtcagggtacctggctgccattcctcccggccttggccaagcccaggttggaaaaggtgatggccaaaggccacagtcacccagwcactgccctgtgcccagttcccgctctgaactgctgtgtgtccggcagcccccagaactgcaccccaggcccaaagcccactgtctggggccctgcgtta

SEQ ID NO: 536766 - DNA, 201 bp, Homo sapiens
agcagctggacagacacttttcctgtgagatcttgggcaagtccctgctctctctggggctcagtctttccacttgtcagacgggtgtgttggatgcgtcygatggcttccaatgtctggtttgcagcaaaatgagaaaaacagggacaaggtagtaagttgttgtattgttgtggtggtggtggtggttgtttacaactc

SEQ ID NO: 536767 - DNA, 201 bp, Homo sapiens
tggggtgatactaaatgctctcccagatggctgtggtgaatggagtactggcaactgtcccagcactttgcacagtccttgggcgcagggtgcaggggctrtggggttgggatgtgtccttggggagcccccttaactaagccaactcttcacccagccgccaggcccccagcactgagctcagtaccagtggcagctccc

SEQ ID NO: 536768 - DNA, 201 bp, Homo sapiens
ttgggattctcttctgggtgggacagaaatggtggagggattttagtggaggtgacttgttctggccacagggtgagtacagggaggtaggtttcagggcycccctgaaaccctctagctccatttctctgatgctcccccaccccagcccagcccacccccacatgcccacccacatcccctgagagtctccaccctgag

SEQ ID NO: 536769 - DNA, 201 bp, Homo sapiens
gtacagaaatgaagaaggtagtgatcagggacaaggctggcctgagggcagagggggaggaaaggagcagccgtgcaaagcccccaggagctgaaggggckgtgctgtaggggaggtgaggtcagggaagtatccagggcctggccacataggccctgagccctgccaggacctcgactttctcggggaggaagacaggag

SEQ ID NO: 536770 - DNA, 201 bp, Homo sapiens
gagctttgtgccatctctgagcttcatcctcaaactcacctgcaaaacctgcgtcacatatcatgatggtgaaatgatacccgcattggcatggcagtgcrtagtagaaattatcagagggttgttgactctggtttaggcgccaggttggaggcagcagtgatcagcagaaatggaagtcagagtccccagcctaggcct

SEQ ID NO: 536771 - DNA, 201 bp, Homo sapiens
attcaaaataagaactctggttcttccctgcagaggatgccaccttggggtgccatttttttgacacggagcatgtgccaggccctatcttgagtgcttcycatccagtgtttcatttcagcatgcagtctttttgaggcagagatgttccctgttgatgggctagaaccaaggctcagcaagggaaaggaacctgcctgg

SEQ ID NO: 536772 - DNA, 201 bp, Homo sapiens
ggagagccagctgtgtgctagatgctgttctaggcatcaggaccctggggaacagagtccctgctctcaaggagcttacaaactccccgccatggggggcrtgaaaggaccccgtggtaggtgaattgtgttgttttgttttgagacggagtcttgctctgtcgcccaggctggagtgcagtggcacgatctcagctcact

SEQ ID NO: 536773 - DNA, 201 bp, Homo sapiens
ctgagcccaactttgagaacaggaaggcctggatgggagtagaggggaggaagggaccccaagaacaaagacccagagactggcccctgtgctgcccgggrggccttgtcaccgccctgtgcttccctctggccccaggagttcgaggtgatcgcccagatcaagctgctgcagtcggcctgcaacaactacagcatcgcg

SEQ ID NO: 536774 - DNA, 201 bp, Homo sapiens
actggatcgaggtggccagggtatgccagaggaggggcctgggcccccactttggcttcatctgttctcaggttgtggtctgcagtccaaggccctgtacrggccccagtctacccttcccaggggcatgctggccttgactctcccagcccactgcctggatgctcacgtcttccttacactctttccttgggttgagct

SEQ ID NO: 536775 - DNA, 201 bp, Homo sapiens
aaatggggtgatactaaatgctctcccagatggctgtggtgaatggagtactggcaactgtcccagcactttgcacagtccttgggcgcagggtgcagggrctatggggttgggatgtgtccttggggagcccccttaactaagccaactcttcacccagccgccaggcccccagcactgagctcagtaccagtggcagct

SEQ ID NO: 536776 - DNA, 201 bp, Homo sapiens
gtaccagtggcagctcccactccaagtcctgtgaccagctcaggtgtggcccctacctcagcagcggggacatcgctgacgcgctcagcgtgcactcggcyggctcctctagctccgacgtggaggagatcaacatcagcttcgtcccggagtctcctgatggccaggaaaagaaggtgactgcctgcccttctccccaat

SEQ ID NO: 536777 - DNA, 201 bp, Homo sapiens
cgggagccgaggtgagaacatggatgaggggtgtccagcctggaaggagcgaggtggagccccagaccctgggagagggtggggcagtagaatggtgggaraaggcaggtggggccacactgcccagtgggttggactttggggatgggaaggctatgagacctggttgcctcagatgttctctctggggatggcagtgag

SEQ ID NO: 536778 - DNA, 201 bp, Homo sapiens
ctgccctccctcaggctcctctccagcctcatcacctcttccaaggagctctcctggtgatcttcccacaagaacctccgaatattttagagtctggcccrtcgagctcacttgttcatctaggcatttatggagagccagctgtgtgctagatgctgttctaggcatcaggaccctggggaacagagtccctgctctcaa

SEQ ID NO: 536779 - DNA, 201 bp, Homo sapiens
gccaaggaaggagccaagcccagggattaacgggacagtgggtggcaggagggtgggacacagcagtgtccctcagacccagggccctagagtcccaaggrattgcgcttctctagccctggggaacttcttgcaggcaaaggactgtgagaaagagggcagcgggcaccagccctgccacctcctggcagccagccaagg

SEQ ID NO: 536780 - DNA, 201 bp, Homo sapiens
gggcaggtgctgggggaaggccggagcatggcccctggttgtcacaccactgcccctctgctcatagctacaacctgtcgtgcgagctggagcccccatcygagtcagccagcaacaccctcaggaccaagaagaacacagccattgtcaagcgctggagcgagtaagggcctggccaagggtggtaggggcagctgcctt

SEQ ID NO: 536781 - DNA, 201 bp, Homo sapiens
cctgatcacccctctgcccctccccaccagagctgaagatccctgaaaacgccaacgtcttctatgccatgaactctactgccaactatgactttgtcctsaagaagcggaccttcaccaagggagtgaaggtcaagcacggagccagctccaccctccctcgcatgaagcagaaaggactcaagattgccaagggcatct

SEQ ID NO: 536782 - DNA, 201 bp, Homo sapiens
aagtatccagggcctggccacataggccctgagccctgccaggacctcgactttctcggggaggaagacaggagcaatgatggctggcttctctgtctggygtgggctggtaccagagccgcaggggtgttggttaggaggccgctgtggcaaccaggctgggagccctggaaggggccagcagggtcagagtctagacag

SEQ ID NO: 536783 - DNA, 201 bp, Homo sapiens
aagagggaaatgtgggtttttatgtgaagtcgcctgaccttttactgttggcttaaaattttaaaaacacttcgcaagccaaacaaaacacatgtgtgggygggatctggctgccagctgtcagttcacagcctgccttttaaagttcctctgcgagcagcgtcccgacttccgaaaggtctgtgcagccgtgctctccag

SEQ ID NO: 536784 - DNA, 201 bp, Homo sapiens; identical to SEQ ID NO: 348907

SEQ ID NO: 536785 - DNA, 201 bp, Homo sapiens
gaggctgggcgcggtggctcacacctgtaatctcagcattttgggaggccgaggcgggtggatcacctgaggtcaggagttcaacaccagcctggccaacrtggtgaaaccccgtctctacaaaaaagaaatacaaaaattagctgggtgtctcggcaggtgcctataatcccagctactccggaggctgaggcaggaaaa

SEQ ID NO: 536786 - DNA, 201 bp, Homo sapiens
gcccaggccatgccggggcggggggtgggggtaacaagaatccggggagttgccaggggaaggggaagtgctcatctggggagtgcgtgggcacagagagrttccagaaggaggtgtcctgtggtcgtggttgattcgtggaggggaggtgtggtgatggcacagagggtgatgactgggaccagtgtctatcgggtcagc

SEQ ID NO: 536787 - DNA, 201 bp, Homo sapiens
tgggaatgatccccctcccaaaggccgggtacccgcgtgcctacggggactaggggagcagcggggagtcggaagacatcgcaggaacccagcccccagcyagggggtgtgggggcgtgagcggagcccgcctgctcctcagcttggcgcgctctggcggcagcaccagcaggtggcgctgtgccctcccgtgcggccgcc

SEQ ID NO: 536788 - DNA, 201 bp, Homo sapiens
ccagctcaggtgtggcccctacctcagcagcggggacatcgctgacgcgctcagcgtgcactcggccggctcctctagctccgacgtggaggagatcaacmtcagcttcgtcccggagtctcctgatggccaggaaaagaaggtgactgcctgcccttctccccaatatcctttcccatctccccactccaaatccatgca

SEQ ID NO: 536789 - DNA, 201 bp, Homo sapiens
ggcaggagcagaagccagttactaggggattggaagcctggtggactcatcataatcacgtcccaggtcgtggctggccgggttggggaagtggagtgccrggacagtggctctcgagctgtgatctcattccaccccaggctgtaggtctgtgcagccgccagtctgtgccctatctgggaaacaggttacacaggtgca

SEQ ID NO: 536790 - DNA, 201 bp, Homo sapiens
tacccgcgtgcctacggggactaggggagcagcggggagtcggaagacatcgcaggaacccagcccccagccagggggtgtgggggcgtgagcggagcccrcctgctcctcagcttggcgcgctctggcggcagcaccagcaggtggcgctgtgccctcccgtgcggccgcccagcccggcgcggagctgccgcagacaaa

SEQ ID NO: 536791 - DNA, 201 bp, Homo sapiens
ggggatatgatgtcaggtgttgtccggtaccacgccatcaggtcccagtgccggtcaccgagctgtgtgcattctctcttgacccccactgttgcctgtgrcaggtagtgctgccctccccagatgacacaccaaggccgagggccaggggctgggcagagccagcgagagacagggagctgctgtctggtgggccagaac

SEQ ID NO: 536792 - DNA, 201 bp, Homo sapiens
gggttgtcacatgttgaattggtggcccctccggggtggcagtgactccccagggtgtcgggcactgggcacggcgggagtgggggacagttgtcagagcrgtccccacacatgccctggctacagggggcagctgcagtcagcttccggcggcacttgggaacacagacccggtgtggtcaggtcacccagagttacagg

SEQ ID NO: 536793 - DNA, 201 bp, Homo sapiens
ctcttcctcctctgcttccctccacttcgggttgtcacatgttgaattggtggcccctccggggtggcagtgactccccagggtgtcgggcactgggcackgcgggagtgggggacagttgtcagagcggtccccacacatgccctggctacagggggcagctgcagtcagcttccggcggcacttgggaacacagacccg

SEQ ID NO: 536794 - DNA, 201 bp, Homo sapiens
ctccgtctgcctgctgcctccctctcccgctgtccctcgctgtggtcctcaggctcactcttggttcttgggctcagtttccatctgtgtgtccccctccrtctcttcctcctctgcttccctccacttcgggttgtcacatgttgaattggtggcccctccggggtggcagtgactccccagggtgtcgggcactgggca

SEQ ID NO: 536795 - DNA, 201 bp, Homo sapiens
acatgtacaagagcatcctggtaagccggcgggggtggcctgggtgcctccctccactggcggcaaatgcaccctgaacacagtgcaccatccctgccctyccggggtctaccttgtagttggcggggaaggacagatgtcagccaggtacagaaatgaagaaggtagtgatcagggacaaggctggcctgagggcagagg

SEQ ID NO: 536796 - DNA, 201 bp, Homo sapiens
actggagggtgagggtaggaggttataatccaggaccacctcctggggagtggctgagcccaactttgagaacaggaaggcctggatgggagtagaggggrggaagggaccccaagaacaaagacccagagactggcccctgtgctgcccggggggccttgtcaccgccctgtgcttccctctggccccaggagttcgagg

SEQ ID NO: 536797 - DNA, 201 bp, Homo sapiens
cacagtgccaggcagcgagcactgcaggagtgggggacagctgtccgagcggcccccgatttgcagcccatggatgcatttatcacgtttgttcctctgcrtgcctccccctcaatatgccgggggtgtacccatttccaagggatgacagcagggccccacagcgagccccaggctgatccggagccctctgcatccccg

SEQ ID NO: 536798 - DNA, 201 bp, Homo sapiens
cacaggaaagaatggccccttggggctggctcatcccaaggccccctgtgctgtgacatttccagctggcactttgtggagcatttccaaggagtccgggrccaggatggcggctgaccaccctccaggaggggagatcatggatgccggggcccctcggggtgtgatgtgccccacctatcacagctgtgggatagacgt

SEQ ID NO: 536799 - DNA, 201 bp, Homo sapiens
gcactgcttcactgtctgctcccctgagaagcctgagagctggtgctatgacggttactgtccccattttactgatggagaaattgaggccccaggaggtraaactaaggctaggaagacacagagcaggcactggaacccgaatctgcactccagatcttaaaagagttccccaaacccacaggaaagaatggccccttg

SEQ ID NO: 536800 - DNA, 201 bp, Homo sapiens
ctggccttggctcagtgggccctgatctaggggcccctggcaagaggtggggtgagcctctgctctcacattgcctcacccctcaatagtgagtgctcagygggcaggctgcaccccaccctctgggagaacaggattagtgggaagatgagacccacacacagctctgagagagtaaggcagctcaccagcactgagcta

SEQ ID NO: 536801 - DNA, 201 bp, Homo sapiens
tcgggtgctccactccactagggcacgcaggcgacgagcacactggcagagggcctcccgcagggcccactccccacctggctctcgccccaccatggccygggaagcaggccaggtttgtgccaggcctgccgtgcccagggggaggaagggctctgtgttctttgcctgtgtctctgtggtgaccgccaggagaagggc

SEQ ID NO: 536802 - DNA, 201 bp, Homo sapiens
cgggaattcctggtcctgcctgtcacagcagcaggtatgacagccacgcgggtgacaccaggcccaggcactcgggtgctccactccactagggcacgcargcgacgagcacactggcagagggcctcccgcagggcccactccccacctggctctcgccccaccatggcccgggaagcaggccaggtttgtgccaggcct

SEQ ID NO: 536803 - DNA, 201 bp, Homo sapiens
catccctggggttcctccaggttgagagccggggcctgactcagctgcataatattccagaagggaggctggagccactgccccagttcagctcctcatgrctgtggggccactgtgagtcctctgaggacacttcaacagtgctgcaggagccaggcgcagtggctcatgcctgtaatcccagcattttgggaggccaag

SEQ ID NO: 536804 - DNA, 201 bp, Homo sapiens
tgtgtggtggtttccaggcccccgacacagggggaatgggagtggggacttggagaattaagggagaaagctaggctagcttggggcagcctctccactcrtcctcggctggcccatggcctggtacaagcgggaattcctggtcctgcctgtcacagcagcaggtatgacagccacgcgggtgacaccaggcccaggcac

SEQ ID NO: 536805 - DNA, 201 bp, Homo sapiens
ccgcccctccccggccccaccctcttcccctccggccccgccccccagcctgacatcagcagggccgggccgcgggctcacagcggtggcaaagcccagcmgcgcgggccgcgccgccgcccccgccgcgcgccgggccggccccgcgcccgcgctgcgagccttccatggtgcagcgcatgtgggccgaggcggccgggc

SEQ ID NO: 536806 - DNA, 201 bp, Homo sapiens
ctgtaaggggatagtgtggggctttgccccaaaaatggtagggccccactctctgaccctttcccccactgcacacacagccccacactcaggatttccarttgcactgacagggtcactgaacacatggtcagcctctccaaactccgcctgagcctgtagtcaggtgcaggtgctcagtgctgagtgcttcatgtccat

SEQ ID NO: 536807 - DNA, 201 bp, Homo sapiens
aagccagttactaggggattggaagcctggtggactcatcataatcacgtcccaggtcgtggctggccgggttggggaagtggagtgccgggacagtggcyctcgagctgtgatctcattccaccccaggctgtaggtctgtgcagccgccagtctgtgccctatctgggaaacaggttacacaggtgcatcccctgcacg

SEQ ID NO: 536808 - DNA, 201 bp, Homo sapiens
ctggcggcagcaccagcaggtggcgctgtgccctcccgtgcggccgcccagcccggcgcggagctgccgcagacaaaggtctcgctttcgggtcgcgaggrgcttgcgcacagctgtaaacaggccaggggcacggccacctcatgggtgacacacacgggaggaaatcaaaccaggcggggccgaggcggggtgactggg

SEQ ID NO: 536809 - DNA, 201 bp, Homo sapiens
ctgtcacctccctacccgcacaaggccctcccaccacctcctcgctcaccgagctaccaggcccgcccctgaggctgctggtccttgacagttggttcagygattgattcacacagcagatactggcctctgtacacctggctggcgctgggtgcctggcctgtgggaagcaccctggcttctgtggaaggctcaggggta

SEQ ID NO: 536810 - DNA, 201 bp, Homo sapiens
caatggcgcctccccgtgtgcacacaagcctgggaagggccaggcaccaggaccacattccttccaattacagtggccttccaacggtcagggctgggccyggctgctgggcagggcggggctgggaggccctaggccccaagtggtggttaatggcggcaaggagacataaacagagctaatgagcccctttcatcgtct

SEQ ID NO: 536811 - DNA, 201 bp, Homo sapiens
tacagtggccttccaacggtcagggctgggcccggctgctgggcagggcggggctgggaggccctaggccccaagtggtggttaatggcggcaaggagacrtaaacagagctaatgagcccctttcatcgtctccctgctctaatgaaggccttggactctgggctttgcattttgggggttcttgattctggagcctcaa

SEQ ID NO: 536812 - DNA, 201 bp, Homo sapiens
tgtggttgggctgggtacagcccttggaacaggggactgtggttctgggccaactttgataccgactgactatgtgaccttagtgtgtcccttctcgctgrcctcagtttccccattggtggcccatctacccctctgcctgtgtgtttaccgttcagtgcataaacattgccctgtgaattatgtcacctactggggcct

SEQ ID NO: 536813 - DNA, 201 bp, Homo sapiens
tggggggtgggcaggcgtgagccgcctgttggagctggggcttggtgaggctgcgcgaggcggtgctcctcttcttcccaccagcgttctgtcccgggtcrcttgtgtgctgggcaccctgcatggacacgggataaaacccagagatccccacaaggctcaagctgcatcctcagcttccccagcaccagcccagactgc

SEQ ID NO: 536814 - DNA, 201 bp, Homo sapiens
cctcacatgtcggcatccacctcggccatcaggcccctggtcctcaggtgaggcaggtggctttggagcaggacacctgggtccaaattccagctcagcgyttattgctgggcatcctagaagcagcacaggtcccctctgagcctccctgtctgccctgaggtccccgcagttgctgtgagggtgtaagaaagccctgcc

SEQ ID NO: 536815 - DNA, 201 bp, Homo sapiens
cagtccttgggcgcagggtgcaggggctatggggttgggatgtgtccttggggagcccccttaactaagccaactcttcacccagccgccaggcccccagyactgagctcagtaccagtggcagctcccactccaagtcctgtgaccagctcaggtgtggcccctacctcagcagcggggacatcgctgacgcgctcagcg

SEQ ID NO: 536816 - DNA, 201 bp, Homo sapiens
gatggagtcaggctatggcactcctggcacaggggcagcatccaccaacattgatcaaatgtctgttatgtgcctggcaccggggcaggcatgtaaccctktggcacctgaactcctcaatccccactggaaatgatcattgcacatccgccaagcacggccatgagccgagcccatgctgagttcttgtggaatcctcca

SEQ ID NO: 536817 - DNA, 201 bp, Homo sapiens
tcagcaaacatttccaagctatctgctaggatccagttacaagccacactctgagcactgggcagaccccggactgccatctggaccttgctgccagggayggagtcaggctatggcactcctggcacaggggcagcatccaccaacattgatcaaatgtctgttatgtgcctggcaccggggcaggcatgtaaccctgtg

SEQ ID NO: 536818 - DNA, 201 bp, Homo sapiens
gtgtctgggtatgggagcagggagaagagggaccacagagattcagcctgaacacaccttttccctaaacgagacagctgctcaggggccggagagtgacktaagatgcccaaggaatcgctcctcgcctccgtctgcctgctgcctccctctcccgctgtccctcgctgtggtcctcaggctcactcttggttcttgggc

SEQ ID NO: 536819 - DNA, 201 bp, Homo sapiens
tgagcgcttctttccagggcctctttaagccccccacccaaccaaacatgcgcacactgtaggaaacaccttctcggccactgagcccttctacggggctrggctgcgaggtcacactttgcagacaaggaaaccgaggctcagggaaagccctccccaccccctcaaaccacgtggtaagctccctgttaaacctggagt

SEQ ID NO: 536820 - DNA, 201 bp, Homo sapiens
actggccgcggtgtctgggtatgggagcagggagaagagggaccacagagattcagcctgaacacaccttttccctaaacgagacagctgctcaggggccrgagagtgacgtaagatgcccaaggaatcgctcctcgcctccgtctgcctgctgcctccctctcccgctgtccctcgctgtggtcctcaggctcactcttg

SEQ ID NO: 536821 - DNA, 201 bp, Homo sapiens
cgccactgcactccagcctgggtgacagagcgagactccgtctcaaacaaaaaaaaaagaaaaaaagaaagttgagcgcttctttccagggcctctttaarccccccacccaaccaaacatgcgcacactgtaggaaacaccttctcggccactgagcccttctacggggctaggctgcgaggtcacactttgcagacaag

SEQ ID NO: 536822 - DNA, 201 bp, Homo sapiens
ctcctagcgacagctgcacagtgtttgtaaacaatgggcctcacacccagccagggcctgcccctacctagaaaggtgcctgtgggttgggttttgctagyctgggcttgtgtgtgtggccaggtgcattatcccaggccacccggcgtgctgggcagagcatcgtgggaccactggtaggtcgtgtgtcctgggagaagc

SEQ ID NO: 536823 - DNA, 201 bp, Homo sapiens
atgctggcatggagacctgaacagctcttggagggtccctgggcaggggagggcagctggtaccttgctgtcctttgtcaggcatcccaggtgaggcagayaggagaggcccttgagcctcgccttccaggggagaagccaaggaaggagccaagcccagggattaacgggacagtgggtggcaggagggtgggacacagc

SEQ ID NO: 536824 - DNA, 201 bp, Homo sapiens
agtaaacagcttcgcgaggagtcactgctctggctctgagtcacagctcctagcgacagctgcacagtgtttgtaaacaatgggcctcacacccagccagsgcctgcccctacctagaaaggtgcctgtgggttgggttttgctagcctgggcttgtgtgtgtggccaggtgcattatcccaggccacccggcgtgctggg

SEQ ID NO: 536825 - DNA, 201 bp, Homo sapiens
gtgggaggagggaacagtctcttacaggagaagcagggtaggcactgctgggacagacccctcctcattccatggaggcctcacatggggaacagaaggayggaggcctcacttggggagtaggagaatgtgacaaggccctctccggacccagcacctggccagaggctgtgagtgcctgtgcttggtgctgaggggact

SEQ ID NO: 536826 - DNA, 201 bp, Homo sapiens
gatgtggtgccgagtaaacagcttcgcgaggagtcactgctctggctctgagtcacagctcctagcgacagctgcacagtgtttgtaaacaatgggcctcrcacccagccagggcctgcccctacctagaaaggtgcctgtgggttgggttttgctagcctgggcttgtgtgtgtggccaggtgcattatcccaggccacc

SEQ ID NO: 536827 - DNA, 201 bp, Homo sapiens
cactacctagcagagccggctgggcctgaatgtgtgttgagcgacttgacggggcctcaggttcccagaagccagggggaggggagctggagtgtcccccsagctggacaccgagtctggccagcagctccctgagtcaagttagcagcaggaaagaggagcaaaagccaggcctcggcctctgctatctgcttcctggac

SEQ ID NO: 536828 - DNA, 201 bp, Homo sapiens
aggctgtctggaaaagtgctttgtccccattgaggtgtgctaaaggcggcgccagactaggctctagggtacgaaggggtgtcaggagttgatcctgcctsccaggcttctgaacgtggcaagaatttgcctctgggctgcacagtgacaggtgtcagtgatgcccccgtccctgggagtctcctagtcagagccaaagag

SEQ ID NO: 536829 - DNA, 201 bp, Homo sapiens
gccttaggtgccttctgctctctggaaccagaggactagctgacttttgccaaggagcagtgccaacgggcatggcatggtgccctgcctgcccccgggcrccacctctgtacacttccctgacaccttcccaggtgtgggtcactgccacctgtgcccatgggcaccccagagcacccactgtgaccactgcagttctct

SEQ ID NO: 536830 - DNA, 201 bp, Homo sapiens
tgcagggcccccaggagcatccctgatcacccctctgcccctccccaccagagctgaagatccctgaaaacgccaacgtcttctatgccatgaactctacygccaactatgactttgtcctgaagaagcggaccttcaccaagggagtgaaggtcaagcacggagccagctccaccctccctcgcatgaagcagaaaggac

SEQ ID NO: 536831 - DNA, 201 bp, Homo sapiens
ccgcgcccggctgccgggcgttgtcttcacagagctccacgcaggagatcggtgaggagctgatcaacggagtcatctactccatctccctgcgcaaggtkcagctgcaccacggaggcaacaaggggcagcgctggctcggggtgagtgcgctcggggtctccactgggagacgcagctggggatccctcccaggacttt

SEQ ID NO: 536832 - DNA, 201 bp, Homo sapiens
ggtgaggagctgatcaacggagtcatctactccatctccctgcgcaaggtgcagctgcaccacggaggcaacaaggggcagcgctggctcggggtgagtgygctcggggtctccactgggagacgcagctggggatccctcccaggactttttcacttgagggcccccagttctgatcccaaaggaaacggccttcactcc

SEQ ID NO: 536833 - DNA, 201 bp, Homo sapiens
aggtagtgatcagggacaaggctggcctgagggcagagggggaggaaaggagcagccgtgcaaagcccccaggagctgaaggggcggtgctgtaggggagrtgaggtcagggaagtatccagggcctggccacataggccctgagccctgccaggacctcgactttctcggggaggaagacaggagcaatgatggctggct

SEQ ID NO: 536834 - DNA, 201 bp, Homo sapiens
atggcttgagggtgggtctgtcctgggcaggagcagaagccagttactaggggattggaagcctggtggactcatcataatcacgtcccaggtcgtggctrgccgggttggggaagtggagtgccgggacagtggctctcgagctgtgatctcattccaccccaggctgtaggtctgtgcagccgccagtctgtgccctat

SEQ ID NO: 536835 - DNA, 201 bp, Homo sapiens
aaggacagatgtcagccaggtacagaaatgaagaaggtagtgatcagggacaaggctggcctgagggcagagggggaggaaaggagcagccgtgcaaagcycccaggagctgaaggggcggtgctgtaggggaggtgaggtcagggaagtatccagggcctggccacataggccctgagccctgccaggacctcgactttc

SEQ ID NO: 536836 - DNA, 201 bp, Homo sapiens
agtcggcctgcaacaactacagcatcgcgccagatgagcaatttggggcctggttccgggccgtggagcggctcagcgagactgagaggtgaggccggggsagcaaatggggacagtgggggcaggctgtcctagggggccagctccagagggccagcagctatgacccatggtcagcctcagcccctgttgcctgaggat

SEQ ID NO: 536837 - DNA, 201 bp, Homo sapiens
cccaggaccccacactagtgagtattgatacagggtcagccctggaacccgaccacactggcagcaccccaggtcagggtgcctgagggctgaggggatasggccttgctgaccctgtcctctaccctggcaggagggcacctccaagtttgccaccctggagatgaaccccaagagagcccagaaacggccgaaggagac

SEQ ID NO: 536838 - DNA, 201 bp, Homo sapiens
tgaaatggcatctagggcccccctcctgcgtggacacacacagagttccctacaggggagcatcgcagggggctcctgggacacctgtccctctccctccrtggcacagctccactgggggccctggcatgcacgagaagcccagaggacggtaccctgatcagtgaccaaacgggtaaaggcagatggggcagagcctct

SEQ ID NO: 536839 - DNA, 201 bp, Homo sapiens
ggtgtgtcctggagcctatggcagacactggacaaagcccttagttgtagcgcccacagcagatgtgcgtctggatggggagcagactgaggcggggggayggggggtgggcaggcgtgagccgcctgttggagctggggcttggtgaggctgcgcgaggcggtgctcctcttcttcccaccagcgttctgtcccgggtca

SEQ ID NO: 536840 - DNA, 201 bp, Homo sapiens
ggcacttggtgtgtcctggagcctatggcagacactggacaaagcccttagttgtagcgcccacagcagatgtgcgtctggatggggagcagactgaggcrgggggatggggggtgggcaggcgtgagccgcctgttggagctggggcttggtgaggctgcgcgaggcggtgctcctcttcttcccaccagcgttctgtcc

SEQ ID NO: 536841 - DNA, 201 bp, Homo sapiens
acacgaagaggaggctccagggtctggtgctgggtcaggggcccagatgagcctcagaccacacaggcagggaccacaggcaggagagtggcctggtacaygttttgtgggttcggggagagaggcttctctggaagccggggctgttctgtgtctttggaaaggcacaggaaaggctggcatgttgttgaacttttctcc

SEQ ID NO: 536842 - DNA, 201 bp, Homo sapiens
ggcatcctagaagcagcacaggtcccctctgagcctccctgtctgccctgaggtccccgcagttgctgtgagggtgtaagaaagccctgcccttgggctcycataggggctgccttagtttgtgggcacccaccctgcacccagacttgggcactgcgggagccgaggtgagaacatggatgaggggtgtccagcctggaa

SEQ ID NO: 536843 - DNA, 201 bp, Homo sapiens
gagcagcgtcccgacttccgaaaggtctgtgcagccgtgctctccaggggcttgtggttgtagcccccaaggaaaggcaggtgcacgtcccggggggaggytgggaacctgggaaggctaggtgggggtgtgggggggcgtgagctggggcaggagggaggaagggatcaatgccgattcataagaaccccccacttccgg

SEQ ID NO: 536844 - DNA, 201 bp, Homo sapiens
cacacaggggccctcctgtgaactggaggtcattgagatacttgcaccctgaacttagaagggcaccgtgaggataaaatcacctttgactctttatgaaragtcataaagagtcttcctgctaggagtttgcaggaaggagtgactgggagcgcaaacctgagagtcagacaggattggaagccctgctctgctgtgtgg

SEQ ID NO: 536845 - DNA, 201 bp, Homo sapiens
tgtcacgatgttcaccaggaacagcagccgcagggaagttcgggctgtctagaggtcaaggggagagaagcctgggaggtgggatgggagccctggcttgrcctcaggggacccagacaagtgggttccttaactcctctgtacccccattgcctcctctgtgggcctacggatgtgggggagtatgagatgttcctgagg

SEQ ID NO: 536846 - DNA, 201 bp, Homo sapiens
ccgggtctccctagcctggagcaggggaaaggtcctccccactggggtgtgtagccttccacaagtcattctgcggctctgcctccccaccacacacaggrgccctcctgtgaactggaggtcattgagatacttgcaccctgaacttagaagggcaccgtgaggataaaatcacctttgactctttatgaaaagtcataa

SEQ ID NO: 536847 - DNA, 201 bp, Homo sapiens
ctgtgggcctacggatgtgggggagtatgagatgttcctgaggcccctggcaccgcatgggcaggccctccgcagatggcagccaatgtctgctccgcttygcagaagggagatggccgatggcccaccagctcccgctgcccttggggagccagggtgtgggtggagggcagggacacttgcaggccctaagttgaatcc

SEQ ID NO: 536848 - DNA, 201 bp, Homo sapiens
taggccccagctcccagccactgcttggatccttacagttagacgttgggttcctcctggagctggacctgggggcaggcagggttggggaggggagctgyggtgcccttggcagggctgggtcctgctgggctcaaagccaatgggagcggctggggcagggcctggattcttggatcctcagcttcttggcaacctgcg

SEQ ID NO: 536849 - DNA, 201 bp, Homo sapiens
ggcccaccagctcccgctgcccttggggagccagggtgtgggtggagggcagggacacttgcaggccctaagttgaatccacaggtttttttcaggtaggrgaactacggccccgaggaggcgagtaagttgcccaggccacgcatcccactctcccccgacccccttcttccctgaggccaagttccaggccctgctgcc

SEQ ID NO: 536850 - DNA, 201 bp, Homo sapiens
cgagctcacttgttcatctaggcatttatggagagccagctgtgtgctagatgctgttctaggcatcaggaccctggggaacagagtccctgctctcaagragcttacaaactccccgccatggggggcatgaaaggaccccgtggtaggtgaattgtgttgttttgttttgagacggagtcttgctctgtcgcccaggct

SEQ ID NO: 536851 - DNA, 201 bp, Homo sapiens
gggtgtgtatccagggcctctgggcctgcaggggcagcggctgtgtgctgtgggatgcggtggggcacatgtgcattctagcacgtgtgttgggggcaggkgcatctctctgcctttgggtgaccctgtatgtctgcagcatgcatgtgctcagatgtgacaagcttgacagtggctgagggagcacatatatgaaggggt

SEQ ID NO: 536852 - DNA, 201 bp, Homo sapiens
cagccccttcaggcaggcagcaggctggtggcggcaccgggcacacagtgtccctggcacggcaggcagcctcccaaccacaagggcccgtttgtcctggytcccctggcccgagcgcactgggcgaccagggcctgctggacacaggggcctgactgtgggctcagcccccatcccccatcctcaccagccacggctgtg

SEQ ID NO: 536853 - DNA, 201 bp, Homo sapiens
ttcattgaacaaatatatatgaagcacctactgtgtgctggcccttttctaggcatttaatataatttgatgaaaaaaagcaaaaaaaaaaatccctgccytcctgggcctccgttctagtcggagagtcagacagtaacactagacgtcataagcaggtacggtagatgtgacgccctcacggcctcctctagatacggc

SEQ ID NO: 536854 - DNA, 201 bp, Homo sapiens
ccacctggctgcgggtcttggcaatgctgattcacctctctgagcctcgctttgctcatatgaaagagaaactggagtgctaagaggacctcatggggttktcaccatgcctgggcgggatgaggcgtggaaagtgctccctcaacgcctggccctgtagggaatgggctgcggggctgtggtgctcgtttttatgatttt

SEQ ID NO: 536855 - DNA, 201 bp, Homo sapiens
gaggactggggtgggtgccagagggtgaatgaggaggggtcggtgctgggccacacgaagaggaggctccagggtctggtgctgggtcaggggcccagatkagcctcagaccacacaggcagggaccacaggcaggagagtggcctggtacacgttttgtgggttcggggagagaggcttctctggaagccggggctgttc

SEQ ID NO: 536856 - DNA, 201 bp, Homo sapiens
taggcgtgaacaggcagttcaaagctcacatcagtgaggagcaaagagaaaaggcatttttcactgggacaggttagccacgtggcccactggaagggackctttctggctaagacaagaaaacatgtgctctacaaagaatggtgacagctgtggaccaaagtgtcaagtgttaaaatccatgagtgtgtgattctaaaa

SEQ ID NO: 536857 - DNA, 201 bp, Homo sapiens
cctcctctgtcccaccccagtatgagaatgagtcggccctgaacctttatgagacttgcaaggtgcggaccgtgaaggctggcacgctggagaagctggtrgagcacctggtgccagccttccagggcagcgacctctcctacgtcaccatcttcctgtgtacctatagagccttcaccaccacccaacaggtcctggacc

SEQ ID NO: 536858 - DNA, 201 bp, Homo sapiens
aggaggactggggtgggtgccagagggtgaatgaggaggggtcggtgctgggccacacgaagaggaggctccagggtctggtgctgggtcaggggcccagrtgagcctcagaccacacaggcagggaccacaggcaggagagtggcctggtacacgttttgtgggttcggggagagaggcttctctggaagccggggctgt

SEQ ID NO: 536859 - DNA, 201 bp, Homo sapiens
gacttccagccttgcaggcccagaatcactgtgttcccagatatacagcaacagcagagcagtgctccccatttgattgttaaggggcagacactgatgcmtgcagcctcatgcaggacaagctgagctttgagcagacccaattctcccagttccgcacaccttggctgcccacgggcgggggaggcagtgggatggcag

SEQ ID NO: 536860 - DNA, 201 bp, Homo sapiens
taatttttgtattttttagtagagatggggtttcactgtgttggccaggctggtcttaaactcctgacctcaagtgatccacctgccttggccttccaaartgctgggattacaggcgtgagccaccgcaccatgcagcaggcggagttctcatccgcactttccagagggggaggcaggctcaggaaggccaggccaccg

SEQ ID NO: 536861 - DNA, 201 bp, Homo sapiens
ttccctgcctcaagcagctggtggcctacgtgcagctcaacatgccaggctcagacctggagcgccgtgcccaccttctcctggcccagctggagcactcrgaacccattgaggcagagcctgagggtgaggaggactggggtgggtgccagagggtgaatgaggaggggtcggtgctgggccacacgaagaggaggctcc

SEQ ID NO: 536862 - DNA, 201 bp, Homo sapiens
gtgccaccatgctgtggccacccagtcccagggttggacttccagccttgcaggcccagaatcactgtgttcccagatatacagcaacagcagagcagtgytccccatttgattgttaaggggcagacactgatgcatgcagcctcatgcaggacaagctgagctttgagcagacccaattctcccagttccgcacacctt

SEQ ID NO: 536863 - DNA, 201 bp, Homo sapiens
gctgctacacaccaagtaaccaggtcgttccttaaccccaagtcctcagtttacctctggacagtagagatgaggtcacccctatcctccagagtgactgygcagattctagatggaacagacaggaagctcagcaggcctggcctgtgggagcggagggtgctcaccaaggtgcatccatgggtcacccccatctgttca

SEQ ID NO: 536864 - DNA, 201 bp, Homo sapiens
ggaggctgacaccagcccagcgctcatctggctttcattacctctggcagcagctcgggctttgtgtgctgggagggtccggcggagcgctcacagtggcygtgcaggttccctctctccgtccctgaggaactgagggagaggcagagctgagccccacccctgcctgggggtcttgtcttccctctctctggccctggc

SEQ ID NO: 536865 - DNA, 201 bp, Homo sapiens
tcagccccaaccttggtgccttccgctctcccccacctccctggcttcccctcctctgagggtgtctgtaaggggatagtgtggggctttgccccaaaaatggtagggccccactctctgaccctttcccccactgcacacacagccccacactcaggatttccaattgcactgacagggtcactgaacacatggtcagcc

SEQ ID NO: 536866 - DNA, 201 bp, Homo sapiens
ccagggctgctggcagcaattgctggcctccatgaagactgaaggctgaggccagggcaggcccagtgatgagtgaggcatgaggaagggtcccattcatycatccattctcctggccctgctgttaagccccaggctgtcttccttcctcactggcttccagaaagagtagttgaggatgtccctgtccctgcttcccct

SEQ ID NO: 536867 - DNA, 201 bp, Homo sapiens
acggaccagacctggggaggttggcatggccagggctgctggcagcaattgctggcctccatgaagactgaaggctgaggccagggcaggcccagtgatgrgtgaggcatgaggaagggtcccattcattcatccattctcctggccctgctgttaagccccaggctgtcttccttcctcactggcttccagaaagagtag

SEQ ID NO: 536868 - DNA, 201 bp, Homo sapiens
tgggactagaatcggctccagcgccagctctggaactagagccagctccagaacaggatccagctccctcacaaactctagagctggagccagctccagcrccagttccatcattacagccttcctggccttcacctgtggttgcagagaacgggctgagtgaggagaagcctcacctcttggtgttccctccagatctgg

SEQ ID NO: 536869 - DNA, 201 bp, Homo sapiens
gctgcgggtcttggcaatgctgattcacctctctgagcctcgctttgctcatatgaaagagaaactggagtgctaagaggacctcatggggttgtcaccakgcctgggcgggatgaggcgtggaaagtgctccctcaacgcctggccctgtagggaatgggctgcggggctgtggtgctcgtttttatgattttcctgtcc

SEQ ID NO: 536870 - DNA, 201 bp, Homo sapiens
gcggcagcaccagcaggtggcgctgtgccctcccgtgcggccgcccagcccggcgcggagctgccgcagacaaaggtctcgctttcgggtcgcgaggagcytgcgcacagctgtaaacaggccaggggcacggccacctcatgggtgacacacacgggaggaaatcaaaccaggcggggccgaggcggggtgactgggtgg

SEQ ID NO: 536871 - DNA, 201 bp, Homo sapiens
gatggatgcggtgagcagctcagcttggcagggcaggggtgggcctgccttctggcagcatctgctgtcccagacctaccatttgctgatccagagctgaygttctggtcaaatcccagctctgctgctacacaccaagtaaccaggtcgttccttaaccccaagtcctcagtttacctctggacagtagagatgaggtca

SEQ ID NO: 536872 - DNA, 201 bp, Homo sapiens
agggtgaggaggactggggtgggtgccagagggtgaatgaggaggggtcggtgctgggccacacgaagaggaggctccagggtctggtgctgggtcaggggcccagatgagcctcagaccacacaggcagggaccacaggcaggagagtggcctggtacacgttttgtgggttcggggagagaggcttctctggaagccgg

SEQ ID NO: 536873 - DNA, 201 bp, Homo sapiens
cctgagggtgaggaggactggggtgggtgccagagggtgaatgaggaggggtcggtgctgggccacacgaagaggaggctccagggtctggtgctgggtcaggggcccagatgagcctcagaccacacaggcagggaccacaggcaggagagtggcctggtacacgttttgtgggttcggggagagaggcttctctggaag

SEQ ID NO: 536874 - DNA, 201 bp, Homo sapiens
gtctgaggattggcacttgggaagggggcaagatgtgctcgtggaatgtgctgtctggtcccgccctctcagtttacagatggagaaactgaggcccaatrgtacggaccagacctggggaggttggcatggccagggctgctggcagcaattgctggcctccatgaagactgaaggctgaggccagggcaggcccagtga

SEQ ID NO: 536875 - DNA, 201 bp, Homo sapiens
atctctactaaaaatacaaaaattagccaagcatggtggtgtgtgcctgtaatcccaactacttgggaggctgagacatgagaattgcttcagcccaggasgctgaggttgcagtgagccgagatcacaccactgcactctagcctgggtgactgtctcaaaacaaaacaaaacagtgccacggggaagatgctgtgcgtc

SEQ ID NO: 536876 - DNA, 201 bp, Homo sapiens
ataatttttgtgaagtaggcccttctagtcgtgtgcacatgggggtcttgttctgaacggatgaactgccgcctcactccagtcacagtggaagtgtttcrtgggtgtctgaggattggcacttgggaagggggcaagatgtgctcgtggaatgtgctgtctggtcccgccctctcagtttacagatggagaaactgaggc

SEQ ID NO: 536877 - DNA, 201 bp, Homo sapiens
gaggccaaggcaggaggattgcctaaggtcaggagtttgagaccagcctggcccacatggtgaaaccccatctctactaaaaatacaaaaattagccaagyatggtggtgtgtgcctgtaatcccaactacttgggaggctgagacatgagaattgcttcagcccaggaggctgaggttgcagtgagccgagatcacacca

SEQ ID NO: 536878 - DNA, 201 bp, Homo sapiens
agggaggaagggatcaatgccgattcataagaaccccccacttccgggcagtgcttagtgatctcgagagtccttagttcctcccagcagaggctccaacygccaagcacagggttgtcattggccttgagtgtcaaacccacccaagttcacctggactgcccccagccatctctgatagccccatgtgggcatccggac

SEQ ID NO: 536879 - DNA, 201 bp, Homo sapiens
acgggtgggcgcttgttcccaggcccatcactcagcgaaggagataaagagagcagaggagataaagtcagtggcaggcagcttctggactttcagtttcyggaggcattgggagcttggccccagaagaaagggatgggaggaggagcttagggccgagggcagtgtctcggtcacctctttgtggccctgtggggacct

SEQ ID NO: 536880 - DNA, 201 bp, Homo sapiens
gcaggagccaggcgcagtggctcatgcctgtaatcccagcattttgggaggccaaggcaggaggattgcctaaggtcaggagtttgagaccagcctggccmacatggtgaaaccccatctctactaaaaatacaaaaattagccaagcatggtggtgtgtgcctgtaatcccaactacttgggaggctgagacatgagaat

SEQ ID NO: 536881 - DNA, 201 bp, Homo sapiens
ttatagttgttttttttaaacagttgtcttgctgacatcatgatccaaaatccacacattgcatttgttagacgtctctgacccttcttttagtctagttycccctttctttttcctctgaaatgtatttgttgaagaaactgggttgtttgtcccatagaggttcccacagcctggatttgtggattgcacccttgtggt

SEQ ID NO: 536882 - DNA, 201 bp, Homo sapiens
cccaggttcaagcgattctcctgcctcagcctcccaagtagctgggattacaggcacgcgtcaccatgccaggctaatttttttgtatttttagtagagaygaggttttaccacgttggccaggctggtcttgaactcctgacctcaagtgatccacccagctcaacctcccaaagtgctggaattacaggcgtgagccac

SEQ ID NO: 536883 - DNA, 201 bp, Homo sapiens
ctgaggcaggagaatcgcttgaacccgggaggcagaggtgcagtgagccgagaccatgccactgcactccagcctgggtgacagagtgagacgatgtctcmaaaaaaaattagccgagcatggtggcatgtgcctgtaatcccagatacctgggaggctgaggcaggagaatcacttgaaccgggaggtagaggttatagt

SEQ ID NO: 536884 - DNA, 201 bp, Homo sapiens
tttccttgggttgagctaaaatcctcctgtcacccccgggtcgcaggcgtgccctctggggactccctgggtgtctgtctcattaggaggggaggcttggycaagggggactgaggccaggcaagctgggagctccagccccacctcatgcctcctgctcttcccgccccaggagtgccggatcctcaagaacttctcgtc

SEQ ID NO: 536885 - DNA, 201 bp, Homo sapiens
caagtggctgagtgtggtggctcacgcctgtaatcccagcactttgggaggctgaggcaggcatatcacgaggtcaggagtttgagaccagcctggccaaygtagtgaagccccatctctactaaaaatacaaaaattagctgggtgtggtggcatgcgcctgtagtcccagctacccaggaggctgaggcaggagaatcg

SEQ ID NO: 536886 - DNA, 201 bp, Homo sapiens
gacccaccagggtaggacatttcaactcctaccctctccttagattcatgggacatgggacatttggacacagagagaagggggtcccctcccactggagrgtgagggtaggaggttataatccaggaccacctcctggggagtggctgagcccaactttgagaacaggaaggcctggatgggagtagaggggaggaaggg

SEQ ID NO: 536887 - DNA, 201 bp, Homo sapiens
gcacctggccagaggctgtgagtgcctgtgcttggtgctgaggggactccagagggtccttggccactgcactctgggggagccgctccagggtcttttcyctgatggtccatcccccgccgcgatgcaggtgaccagccaagataaggctccggctgtaatccgcaaggccatggacaaacacaacctggaggaggagga

SEQ ID NO: 536888 - DNA, 201 bp, Homo sapiens
ctgatggtccatcccccgccgcgatgcaggtgaccagccaagataaggctccggctgtaatccgcaaggccatggacaaacacaacctggaggaggaggarccggaggactatgagctgctgcagattctctcagatgaccggagtaagtcagaagaccagagggcgatggcagagggggcaggtccacaccactccccag

SEQ ID NO: 536889 - DNA, 201 bp, Homo sapiens; identical to SEQ ID NO: 348920

SEQ ID NO: 536890 - DNA, 201 bp, Homo sapiens
agcgaaagggagcggagtgcacagcgggccgctggcccaggagtggaatgagtggaagccattcctttattttattattattattattattattattattrttgttgttgttgttattattattattattattattattattattattattattattgagacagggtcttgctctgtggcccaggctgcagtgcaggggcc

SEQ ID NO: 536891 - DNA, 201 bp, Homo sapiens
ctcttcccgccccaggagtgccggatcctcaagaacttctcgtcactgtatgccatcctctctgccctgcagagcaactccatccaccgtctgaagaagaygtgggaagacgtttccaggtgggcatgcctctgtaggagctcctggtgcaccagggacctcccacagggctggcatcacccccttagtgagcccatggga

SEQ ID NO: 536892 - DNA, 201 bp, Homo sapiens
gatgacactgcggtttgcagatagctctcctgttactgcaggcccaggtctgcgggtgctcggaaggcagccctgggcacgggtgggctgtctgtgcagayagagacttgaggggtccttccccccaaccccagccccagaccctgcctcaggggagctgggatgcctgaggtggtcctgctgctcctggtgggggtcagc

SEQ ID NO: 536893 - DNA, 201 bp, Homo sapiens
cctgaggtcaggagttcgaaccagcctggccaacatggcaaaaccccatctctaataaaaatacaaaaaaattagccaagtggctgagtgtggtggctcaygcctgtaatcccagcactttgggaggctgaggcaggcatatcacgaggtcaggagtttgagaccagcctggccaatgtagtgaagccccatctctactaa

SEQ ID NO: 536894 - DNA, 201 bp, Homo sapiens
caggctggagtgcagtggcacgatcttggtcactgcaacctctgcctcccaggttcaagcagttctctgcctcagcctcccgagtagctggggttacaggygccgccaccacgcctggctaatttttgtatttttagtagaaacagggtttcaccatgttagccaggctggtcttgaactcctgacctcatgatccacccg

SEQ ID NO: 536895 - DNA, 201 bp, Homo sapiens
actgggcgaccagggcctgctggacacaggggcctgactgtgggctcagcccccatcccccatcctcaccagccacggctgtgccttggggaggggtctcygcccacagcagagcaacttctacttacctgtgaacagagacccattccccaagaattgttcctgggccaggaatttaggaagggaaaaccccctaggtta

SEQ ID NO: 536896 - DNA, 201 bp, Homo sapiens
ggcaagctgggagctccagccccacctcatgcctcctgctcttcccgccccaggagtgccggatcctcaagaacttctcgtcactgtatgccatcctctckgccctgcagagcaactccatccaccgtctgaagaagacgtgggaagacgtttccaggtgggcatgcctctgtaggagctcctggtgcaccagggacctcc

SEQ ID NO: 536897 - DNA, 201 bp, Homo sapiens
tagacctggacaggtgcggtggctcatgcctgtactcccagcactttggaagtcgaggcaggtggatcacctgaggtcaggagtttgaggccagcctggcyaacacggtgaaaccccatctctactaaaaatacaaaaattagccgggcgtggtggtgcacacctgtaattccagctactcgggaggctgaggcaggagaa

SEQ ID NO: 536898 - DNA, 201 bp, Homo sapiens
gttgccacagtgagtgtgggagggagtgggggtttgcattttgcctttttaaagcactagacctggacaggtgcggtggctcatgcctgtactcccagcaytttggaagtcgaggcaggtggatcacctgaggtcaggagtttgaggccagcctggccaacacggtgaaaccccatctctactaaaaatacaaaaattagc

SEQ ID NO: 536899 - DNA, 201 bp, Homo sapiens
agccattcctttattttattattattattattattattattattgttgttgttgttgttattattattattattattattattattattattattattattgagacagggtcttgctctgtggcccaggctgcagtgcaggggccagatcacggctcactgcgtcctcgacctcctgggctcagacctccagagtagctgg

SEQ ID NO: 536900 - DNA, 201 bp, Homo sapiens
aagccattcctttattttattattattattattattattattattgttgttgttgttgttattattattattattattattattattattattattattattgagacagggtcttgctctgtggcccaggctgcagtgcaggggccagatcacggctcactgcgtcctcgacctcctgggctcagacctccagagtagctg

SEQ ID NO: 536901 - DNA, 201 bp, Homo sapiens
gaagccattcctttattttattattattattattattattattattgttgttgttgttgttattattattattattattattattattattattattattattgagacagggtcttgctctgtggcccaggctgcagtgcaggggccagatcacggctcactgcgtcctcgacctcctgggctcagacctccagagtagct

SEQ ID NO: 536902 - DNA, 201 bp, Homo sapiens
cagcgggccgctggcccaggagtggaatgagtggaagccattcctttattttattattattattattattattattattgttgttgttgttgttattattrttattattattattattattattattattattattgagacagggtcttgctctgtggcccaggctgcagtgcaggggccagatcacggctcactgcgtcc

SEQ ID NO: 536903 - DNA, 201 bp, Homo sapiens
gcacagcgggccgctggcccaggagtggaatgagtggaagccattcctttattttattattattattattattattattattgttgttgttgttgttattrttattattattattattattattattattattattattgagacagggtcttgctctgtggcccaggctgcagtgcaggggccagatcacggctcactgcg

SEQ ID NO: 536904 - DNA, 201 bp, Homo sapiens
tggaaagtcattatctggaaagaggaaaacggcacctgggagaagacccacgacccctcaggatatgactcctccgtgaactctgtatgctaggtcccccrtgactacggcctgatcctggcctgtaggagctcagatggggccatcttcctgctgacttatacaggggaaggccaatgggaagtgaaaaagatcaacaac

SEQ ID NO: 536905 - DNA, 201 bp, Homo sapiens
aaaaggtggtaaggaatggggaggcaccaccaggagctgccacgtccctagagcagtcacgctggtatcatggtgtcagtaattaacactgtggatacctsccataaggatatgattcatgatgcccagatggactactatggcacccgcctggcaacctgctcatcagaaaaatccgtcaaaatcttcaaagtgcacaac

SEQ ID NO: 536906 - DNA, 201 bp, Homo sapiens
tctcaaactggtaaaataattatgccaggagactgtgatgtttggtgtatataatgtaatacctacagcagctactaaaaaagctatacaaggagatgcaytaaaacgtactacagataaatcgagatggaatccttaatgtatgttggagtaaccacatggggcaggaaagagaagacagatgaacaacagaatacaaca

SEQ ID NO: 536907 - DNA, 201 bp, Homo sapiens
agcacagattcaagacatatcaacaatttagaaggtaagtacattgaaaaatgttactatatattatacatttttgtgtttctctgttttcatattatttrtataattctgttatagcagagactattaatgcttgctttgttattcagttcttaggattctctaatttaatcagacaattccgaatctgaagggctcttt

SEQ ID NO: 536908 - DNA, 201 bp, Homo sapiens
taataaaatgagactggaggcattctgaaatgaaagaaactcctttatatatccaaccacaatcaaacatataaataagcctggaaaaccaactacaaccwgcaatttaagattactattactttaagaaaatcaatttcatagtattggttttaaatctttttaagtttttttaatacgatctatttttataggttcttt

SEQ ID NO: 536909 - DNA, 201 bp, Homo sapiens
ccagggctccatggagaaatggcgattccagagctgggcagggaaggtacagatgagcctcatactatggcagagaggaaggaagggctgagaaaaaaaargggggacacatccagcttgaaggggtgcccattggaaaaatctaggacagtctgaggatctcaataaggatagtaatagatggtgtgaataatgtaaaaa

SEQ ID NO: 536910 - DNA, 201 bp, Homo sapiens
atctaaattgaacagcataaaaacagaaaacactgaacagagtttgagatatgaggagcacaaccagcaagtttaacataattggagtcccgataggataraacaaagaatgagcagaaagaatatttgaagagagaatgtttgagaattttcaaaactgaaatacatcaatctagattcagaaacctcagcaacctacaa

SEQ ID NO: 536911 - DNA, 201 bp, Homo sapiens
tgtttttctccaggcaaattccctcagtaatacactttttaaaactgtctttacaccaaaaattctaccatcttaagcttgtacaaattaaaaaaaaaaaaggtacctagctcttatattccttagtgaaactacaggttagtttttgaaattcctgtttcagttttacaggcatattagtagggcttgaattaaatagga

SEQ ID NO: 536912 - DNA, 201 bp, Homo sapiens
gtaccaagaagcaagagagacctatcttgatctggatagtaaagtgaggactttaaaaaagtttattaaattactgggagaaatcatggagcacagattcmagacatatcaacaatttagaaggtaagtacattgaaaaatgttactatatattatacatttttgtgtttctctgttttcatattatttatataattctgt

SEQ ID NO: 536913 - DNA, 201 bp, Homo sapiens
agcctgtccaaggtaagctgacaattgctggacgttttctttcctgggagtgtttgctgattctggactttgagtagtctagtagtagtaggagggctgayaagacagagtagaaacttgggaagggaactgctaggcacctaactaatatttcagttagtcaattcctgagttctgatgttgtgcacagttggcccaagg

SEQ ID NO: 536914 - DNA, 201 bp, Homo sapiens
tttaagatttaaattgttccatctttggtcaaatggaggctcttcaagctggttcctgcattttcttaacatgctttccttcttgttttttttttttttttaatagcatttttaaactttgtgacataacaaaatatttcaagctcattctatacctgacccagccttggagtcagtaacttctccaaagagccctggttc

SEQ ID NO: 536915 - DNA, 201 bp, Homo sapiens
ataagagtattatcttacataaccacaatactgttataaagtacaggaaacttaacattgatacctgtagtccagttccaatgttgacggttctccacgtytttcctacgatatcagatgcagtctagggtcgtgtatttcatttgtcatgctcttttacagaatgctctttgttttgattttatacgatattttttctta

SEQ ID NO: 536916 - DNA, 201 bp, Homo sapiens
aagtgattcctgtgcctcagccacctgagtacctgggagtacaggcaagtgccaccatgcccaactaatgtttgtggagacagggtttcaccatattgacmaggctggtctcaaactcctggcttcaagtggtctacccacctccacctcctaaagtgctgagattacaggggtaagccaccgcacccagcctggcaattt

SEQ ID NO: 536917 - DNA, 201 bp, Homo sapiens
aggtgatttatattgtctcgttatttaaaacaaatctgtaatcaagacaaaagtcttttttctcattgatagatgctaagaagggtctagataactcaaakgtgtgtgtgtgtgtgtgtgtgtgtgtgtatatatatacatatacatatgttcatattgtaattatttgtgggttctactcatattttagaatggtacttg

SEQ ID NO: 536918 - DNA, 201 bp, Homo sapiens
aagcatagtgtggggcaagagagtgacgagtatactattttagataggctgtcaggaaagatgtattcatcccacacaaacaactcacatactcagctcargcttaatatatttttcattaggtaacatgttctctatgtaaaaactcagtaaaaaaaactaaggaggaacactgtatgaaaatgtataggaattagtttt

SEQ ID NO: 536919 - DNA, 201 bp, Homo sapiens
atccttattgtcttcacattgaataagctgaggaaaaggagtggttggtcttactgtctcaggggcggcagaggcagaagaaaatctgtgtataagtggacccacatatttcaaaccctgcattgttcaagagtcaactctacttgttaaggaaataagtaaaacttgattcctgtttagaatgttttttgaaatgtctgc

SEQ ID NO: 536920 - DNA, 201 bp, Homo sapiens
aaatgaagtagagtataccaaatgcataaactttcattagctaaggaactcatgtctgaattttgttgtagttttgaatgttgtgctctttcatacagaaygggaaacataatcctcaggtatcccagcatctcttgttgaattgaagattattcattgctttggcctcacaaagttttgatttcaactatcataagtgaa

SEQ ID NO: 536921 - DNA, 201 bp, Homo sapiens
atgaatgggcacagatgtcaggatcatcttttagtcagttctagttggtgtcttgttttttttctttttttcaaatcagtatttttcattttaattcaacrcattttttactgtaatctttttttcgggaatctgtttatgacacttagctttttctgagttgcagtaaacagtgaattagataaatggcacagttgtgtt

SEQ ID NO: 536922 - DNA, 201 bp, Homo sapiens
tgatgtgtttcactattgtacttttacctgataggaaaatctgtaggataatatagaaactggttgatttgtacgttttctgccccatggaactttataaytttcagctgttctttataaaatcatttcacaaatgcatattattcttttggtgcatggtgctataactttttttgttcatttttgtttggctgccaaatt

SEQ ID NO: 536923 - DNA, 201 bp, Homo sapiens
ccctgattagaatttgtctccattttttactagtagtcttttcactttctgctttttatttttctgctttaattcctttttttgatagactaaatttttgtattattattattattattattattattattattattttgagacggagtatcactcttgttgcccaggctgaagtgcagtggtgcaatcttggctcactgc

SEQ ID NO: 536924 - DNA, 201 bp, Homo sapiens
atagcaaactgcaaatcccaggtcatgctcagcaaataaaaaacattctcagcaaataaaaaacatcgtcatcacgtagtgtttgggtgtactgtcttctrtatagaatctcacattccttgtgagaagcgtatcacattttccctagtgcgttatccattagcttatgtctgagtgcttgctaactgcatgatcatgtgt

SEQ ID NO: 536925 - DNA, 201 bp, Homo sapiens
cctgattagaatttgtctccattttttactagtagtcttttcactttctgctttttatttttctgctttaattcctttttttgatagactaaatttttgtattattattattattattattattattattattattttgagacggagtatcactcttgttgcccaggctgaagtgcagtggtgcaatcttggctcactgca

SEQ ID NO: 536926 - DNA, 201 bp, Homo sapiens
ctgattagaatttgtctccattttttactagtagtcttttcactttctgctttttatttttctgctttaattcctttttttgatagactaaatttttgtattattattattattattattattattattattattttgagacggagtatcactcttgttgcccaggctgaagtgcagtggtgcaatcttggctcactgcaa

SEQ ID NO: 536927 - DNA, 201 bp, Homo sapiens
ttctcaaactggtaaaataattatgccaggagactgtgatgtttggtgtatataatgtaatacctacagcagctactaaaaaagctatacaaggagatgcwctaaaacgtactacagataaatcgagatggaatccttaatgtatgttggagtaaccacatggggcaggaaagagaagacagatgaacaacagaatacaac

SEQ ID NO: 536928 - DNA, 201 bp, Homo sapiens
ttaactgaaaaggattttgcacataacttactataaataaggctttctttgtaaaggtctaaagtatttgtaatattgagaaaaagatttaaagtattttytatcttctcctttcctatcaagtgacttggagaatgaggttgaaaataagacggcccagatattaaatcttcagcaacatttatctgcccttgaaaaaga

SEQ ID NO: 536929 - DNA, 201 bp, Homo sapiens
aggagtggttggtcttactgtctcaggggcggcagaggcagaagaaaatctgtgtataagtggacccacatatttcaaaccctgcattgttcaagagtcawctctacttgttaaggaaataagtaaaacttgattcctgtttagaatgttttttgaaatgtctgcaatagattttcatgattaatagcttggtaggattat

SEQ ID NO: 536930 - DNA, 201 bp, Homo sapiens
ctagaggttacagaagttgagtgttgagtaaaggcagtcattctctgttgaggctttccatgtggaccctttaacattcagcagatccactctttatactyactctttctgttttgaacagctttattgagatatcattcatataccacataattcacccatttaaagtgtataattcactgggttttagtatactcacaa

SEQ ID NO: 536931 - DNA, 201 bp, Homo sapiens
tttttgaagcttcacttattctcaactttatttttttgttaggcacagtatcgttaacgttatgctgtagtgaacaatcagtgtcagctgttgatgtaaakctaatttgcaaatgaattggccaaattatttggtggttttgaaaaatttgaaaactgtggcaacctagtattgtaattacactgtatcttcatgtaactt

SEQ ID NO: 536932 - DNA, 201 bp, Homo sapiens
accttgtagcctcactagggtggaagtccagactacccacttggattttgcttgcatgggtaggggagccaggtatatacatggtatggagagggttgctrtggtctaatatttgggggatttcagtacattgagcctagaactgttcctcatattcttatatcttagaaatttttgattatgttagagatttttgtctcc

SEQ ID NO: 536933 - DNA, 201 bp, Homo sapiens
atttaagcccaacccagctttctcccttattgactgtgagccctatcatacctcaagcctaatataaggaaagggggcccctctttagtgaaatattgtaygtttggagacgccattgttcttttacacaaaatatcaagcataaggtaataaagactgcgtgcttacccctaagatcaggaagaaagcagttctgtccac

SEQ ID NO: 536934 - DNA, 201 bp, Homo sapiens
gcattacaagattctaatatctgtaatctagtatttaatatttgaattgcatgaccaactggtagcatggaataaaaaaaaatcactctatttcagaaagyattgcttggtataatagaaagaacataaatttccatcttaaaggacttaagaatccacttccagttaaaacaaaaacaagtcctttgatgtaaccatatg

SEQ ID NO: 536935 - DNA, 201 bp, Homo sapiens
ctctgttttaaacatgataggtctctgatttgcgtttcttttaaaaatacacctctcctaggggagactgcattcactcatagacttaccactcttggttyctaaatgttaattgcattctccagttatttccttgttgccgaatccagttgatatttaccttctctcaagcattagatactattaaatacaccttccttc

SEQ ID NO: 536936 - DNA, 201 bp, Homo sapiens
gcagaaaatgcttaaatttcccaatttccatttagatgagtatatattcatataaagactggtaaatggtgaaaactatttcaatgcaagattatattttragggatttaccacataatctcagtaactaatgctgttctttaaaattattttttcaattttattttcatatgaatttagcctaaacgttgaggcatactt

SEQ ID NO: 536937 - DNA, 201 bp, Homo sapiens
cagaaaatgcttaaatttcccaatttccatttagatgagtatatattcatataaagactggtaaatggtgaaaactatttcaatgcaagattatattttargggatttaccacataatctcagtaactaatgctgttctttaaaattattttttcaattttattttcatatgaatttagcctaaacgttgaggcatacttc

SEQ ID NO: 536938 - DNA, 201 bp, Homo sapiens
aggaagctgactcgaagtctgcttaagatacaaaagcctagtggctgcaggatttttcactaataatgtttctttagagatgtgagtggagggagagtctrtactgttagataaacattagagttttttagagtgggtaggtactgcagaaagggaaaagggaagcagttgagtgttttgttgacaaactagtttaaagaa

SEQ ID NO: 536939 - DNA, 201 bp, Homo sapiens
ctgcgacctccgcctcctggattcaattgatccttgtgactcagccacctgagtagctgggattacaggtgtgcaccaccatgcccggctaatttttgtaytttttgtagagactgggttttgccatattggccaggctgatctcgagctcctggcctcaagtgatccacctgcctcaatctcccaaagtgctgggattaa

SEQ ID NO: 536940 - DNA, 201 bp, Homo sapiens
atttcagtacattgagcctagaactgttcctcatattcttatatcttagaaatttttgattatgttagagatttttgtctccttttagcaaacaattaaaktagatacctatcattttaggtcttaaatgtactctaaaggaaaaaatgaaagcagcagtcaaagaggtcataaagtttaattttaatcataaactatcag

SEQ ID NO: 536941 - DNA, 201 bp, Homo sapiens
cttaaacgaatataaagcattaaagaaagatgatgagcagctttgtaaacgaattgaagagctgaaaaaaaggtagggtagttactttgaaattttcatgrctatcccattttgtaataaagtaaggtagatgcattggagtattatattttatgtattgttgttaatggaattttattacatcggtttgtgttctttaaa

SEQ ID NO: 536942 - DNA, 201 bp, Homo sapiens
attcagttattgtccccgaagagtttctcttttttcccttagagatgggctttcactctgtcattcaggctagagtacaatggtgcgatcatagcttactrtacccttgagttcctgggctcaagtgatcctcctgcctcggcctcccgagtagctaggatgacaggcatgcaccaccatgcccaactttttttttttttt

SEQ ID NO: 536943 - DNA, 201 bp, Homo sapiens
ttctggggcagaattttcaaataattacctactactcttagttaccataaatcttatcctttcattttaatacttacaataaatgttaaatttttggaacrtcttttttgtttaaaagctctgcattttaaccatattagaaagttaacttttactctctctttaatttctactggtagatcatgggtaactcctctttac

SEQ ID NO: 536944 - DNA, 201 bp, Homo sapiens
tcaaagtattgctggtttaagtacaatgaagactaatttagagtccttgaaacatgaaatggcttgggcagtggtaattatcacttaattacttgttcacstatctatgtgatatgcagaatgtatttggttattattgttaatctgatcaatttgctatataatttctttcttaggtcaatgaaattgaaaaacaattga

SEQ ID NO: 536945 - DNA, 201 bp, Homo sapiens
agatgcaagactaatttactttaatttttaaggtaaaaatggatggacatagtacctaaagtttaattagccttgttagatttattttgttgagtttaatrtatatggaacttgatttacctcattgttactataaatatttgttcagacctgatggccaaaagaaaggaagaaaatttttcctctcctaaaaatgccaaa

SEQ ID NO: 536946 - DNA, 201 bp, Homo sapiens
tttatatctgaatcccctaccagattgtaaccattttgaggttatcagctatgtctgagatgtttatgtctcctaatgcctagtctataatgaccgtttartaagtgtgtattcgtgaatcagaatttatacctgtgagtgctgtataatagttcagtgtcaatttttttctatgatactattgctgaaaatgggttagat

SEQ ID NO: 536947 - DNA, 201 bp, Homo sapiens
atttgttggataactaactgtgggttaagatcaaattatattatagtattttatataatgttatgttatgtttatttgcctgatgtcttgagtgaagttamatttattattggtatatgaactatagataattattttttaaaattctctctattgaagaaaaaatatacttcaataatgttattttcttaaaggtcagac

SEQ ID NO: 536948 - DNA, 201 bp, Homo sapiens
cacaatgaggaacttcttaaaaggtgccaactacattataaagaactaaaggtaaaaaaataataataataaaccttcttttgtttttttcaacttactaytacgaagttgattttaagatcccattattgactccaagcaattctcaaaccttttggcctcaagcccctttacactcatcaaagagctttcatttatgtg

SEQ ID NO: 536949 - DNA, 201 bp, Homo sapiens
acatatgaagttcagaaactgttaagagtgattttgggtgattaaaatcagaataatagttaccttttcagggatggtaatatacaaatagtttgcttagrtgctggggatattcttgtgtcttgatctcagtagtggttacccaggtgtgtgtatgtattcatgtaaaaattgagttgtacacttttgtgttctttataa

SEQ ID NO: 536950 - DNA, 201 bp, Homo sapiens
acagtatatttgtctatatttgaattgattgcttaggtgaaatagacctaagcttgttttcaaggcctgttgtggtgactctcttttgaaaagagtactckatccttgataaacctgtcagaggctagggctctagaactcatgcatattgtcagtggaactttgttactgacaagacatagaagaagagcatgaagcttt

SEQ ID NO: 536951 - DNA, 201 bp, Homo sapiens
tcttgaacttattattttattgataatcttcattgttcctgcttgtatcctgtaagggagaaatgaggtgttctttaattctgttttttttaaattataartaagtaaagaaatattaaaaactatgacgagctttatggataaattgaaaatcccagaggaggcttttttctcctttttttattccagcataattaaaat

SEQ ID NO: 536952 - DNA, 201 bp, Homo sapiens
taatgttagcatttttgattcactatttaaacaagttaacatcttttctctctgagcatgcttttcttggtcaccaaattcaaactacttccagtagcttycttagctccacccacaaatctttctccattgcagagtatcctttactactgactggcctctatctcaaaataccttaggagcacttgaaactcagtgttt

SEQ ID NO: 536953 - DNA, 201 bp, Homo sapiens
cggtgagccaagattgtgccactgcactccagcctgggcaacaagagtgaaactccatctcaaaaaaaaaaaaaaaagaatttattaattcaacacaggaytgtcaatacataatataacacctttaatttgatagaccagtcaagagcatttagtctatactgctctaggctaaaatttatcttaataaggatgtcaggt

SEQ ID NO: 536954 - DNA, 201 bp, Homo sapiens
ggtgggtggatcatctgaggtggggagtttgagactagcctgaccaacatggagaaaccccatctctactaaaaatacaaaattagctgggcatggtggcrcatgcctgtaatcccagctactcgggaggctgaggcaggagaatcgcttaaacccgggaggcggaggttgcagcgaaccgagatcacaccattacactcc

SEQ ID NO: 536955 - DNA, 201 bp, Homo sapiens
ctttaccactgatttgtaaaatttcatcaagccactttaatttctgtctaggtattagttctaggcattagagaaacatagataaatactccctaccattraagttcttatatgtgggagacattacagggaaacagatgtagtatggcttagaaattacaccagtgaggaaaatgatatgaccaatttaagagggagggg

SEQ ID NO: 536956 - DNA, 201 bp, Homo sapiens
agaagggaatttatagctctaaatatatacattagtaaaaatggagggctgaacattaatgatctaagttctatctcaggatgctaaaaggaaaaaagccyattataaattcaagtagagagaaggatacagtgatataagagcagaaattggagagtagaaagcaaatgtacaatagcaatgaaacaatagacacctgag

SEQ ID NO: 536957 - DNA, 201 bp, Homo sapiens
cctttcagacctgtgactcaagaagaagatgatgaccaaaggtgatttgtaacttaacatgccttgtcctgatgttgaaggatttgtgaagggaaaaaaawttctggactctttgatataataaaatgagactggaggcattctgaaatgaaagaaactcctttatatatccaaccacaatcaaacatataaataagcctg

SEQ ID NO: 536958 - DNA, 201 bp, Homo sapiens
attggaaagagttaaaacacttttaatgttaatcatatctttaccactgatttgtaaaatttcatcaagccactttaatttctgtctaggtattagttctrggcattagagaaacatagataaatactccctaccattgaagttcttatatgtgggagacattacagggaaacagatgtagtatggcttagaaattacacc

SEQ ID NO: 536959 - DNA, 201 bp, Homo sapiens
tagatcccccagatttacttggggcttcatttattaaattggtgcaaaatacagtgtgggggcaagattgcatcttggtatttagttcttgcttttttatrtgggaatttttatttgcttgattgttggtttggtttgtttagacttatgataggtgtaaaattttagagtatgtttagaattggaatatttaccttagaa

SEQ ID NO: 536960 - DNA, 201 bp, Homo sapiens
gatagagaacagggcagtatcttacatacttatcctctgatagtatgactaatgggttccacaataaggtatggtagtttaagtagtttaaaacctataastagtttaaaaactgcaatatttcttctgctgggataataagcacaagcttcaagctgtttttaaacatagtatgcatttataattatataccgtaatcta

SEQ ID NO: 536961 - DNA, 201 bp, Homo sapiens
ctctgttgaaatatttaaagattcctagtccttttcttgcatggtttacttaatgcataacaaaagattcaggttcattgtttaaaatgcagaaagtctasagctgtgtggagcacttgaagagtgggtagctcaaattgagatatgcagtaatgtgaaatacccagcagattttgaaaacttaatataaaggaataactt

SEQ ID NO: 536962 - DNA, 201 bp, Homo sapiens
gcaccaccttacatcaactcataatatatattacttttatacttttatttaagataaaaatataaaaatgctttatattattatataatattttatactgktttttattctgttgcagttgcccatttttatatctgaatcccctaccagattgtaaccattttgaggttatcagctatgtctgagatgtttatgtctcct

SEQ ID NO: 536963 - DNA, 201 bp, Homo sapiens
cttttaaaagaaatttaaaattatttaaattttaaaagattttatttagaattcaaaataaatacaatacaaaagaaatttttttttttttttttttttttgagacggggtctcgctctgtcgaccaggctggagtgcaatggcatgatcttggctcactgcaacctctgtctcccaggctcaagcaatcctcccacctca

SEQ ID NO: 536964 - DNA, 201 bp, Homo sapiens
agtgctgggattaccggtgtgagccactgtgctgtaaatcttaaactattaaaaattttaaaaactaacaaaatacttgactatactgctaaatattctgkgtagccttttgagtgagttttggtatttcttactctaaaaatttaagatgtactaagaccaacgatgccagtcttttcagctgtttttgcttaaagaatg

SEQ ID NO: 536965 - DNA, 201 bp, Homo sapiens
gggaggcggaggttgcagcgaaccgagatcacaccattacactccagcctgggcaataagagcgaaactctgtctcaaaaaaaaaatttaaaaaaaaaaawttttttttaaataataaacagtaagcaaagtttgaccccctaactttatatacaaaaagtaatttagaagttgatcatagacctaaatttaaaacaagct

SEQ ID NO: 536966 - DNA, 201 bp, Homo sapiens
tttaaagtattttctatcttctcctttcctatcaagtgacttggagaatgaggttgaaaataagacggcccagatattaaatcttcagcaacatttatctrcccttgaaaaagatattaaacacaatgaggaacttcttaaaaggtgccaactacattataaagaactaaaggtaaaaaaataataataataaaccttctt

SEQ ID NO: 536967 - DNA, 201 bp, Homo sapiens
tcgcttaaacccgggaggcggaggttgcagcgaaccgagatcacaccattacactccagcctgggcaataagagcgaaactctgtctcaaaaaaaaaattwaaaaaaaaaaatttttttttaaataataaacagtaagcaaagtttgaccccctaactttatatacaaaaagtaatttagaagttgatcatagacctaaat

SEQ ID NO: 536968 - DNA, 201 bp, Homo sapiens
tgcaatatttcagactttttcattattattaatctgttgtagtgatctgtcatcagtgatctttgttactgttcaaattgttttcgggtgccacagactgyccatataagacagcagacttcatcaacaaatgttgtgtgtgttcttcctgctccactgactggctattgattccctcatctctctgtccccttgggtctc

SEQ ID NO: 536969 - DNA, 201 bp, Homo sapiens
tcttataaaatattaggaaatactcaaaaagaattagatgactgctggtattgattgaactatcttccttgtaacatgattggttgtgtgcatatatatayacacacacacacacacacgtgcatatgttacacatggttgttttaccccaggatattatagcaccaaaagcatgattagcagaattggggattatttgaa

SEQ ID NO: 536970 - DNA, 201 bp, Homo sapiens
tagatgcaagttaccgtggcaacctaatagcaaactgcaaatcccaggtcatgctcagcaaataaaaaacattctcagcaaataaaaaacatcgtcatcaygtagtgtttgggtgtactgtcttctatatagaatctcacattccttgtgagaagcgtatcacattttccctagtgcgttatccattagcttatgtctgag

SEQ ID NO: 536971 - DNA, 201 bp, Homo sapiens
cagatgttgtagtggacatggagaagtaaagttaagacagaggcatcaaaggtgactgaatgacctccagattaattactttagtagtacagtaagtttaktgagataggaagtttgggaagaaaagccagtttttctttttttttcctttcttttcttttttttttttttaagaaagctgaattatattttgaacacatt

SEQ ID NO: 536972 - DNA, 201 bp, Homo sapiens
acttagttttttatattgattacatgttacaatgataatattttggttatatttgattaaaaatatgttattaaatttcacctatttctctatatttttartgtggctactagtacatttaaaattgtttgtgtgggctgggtgcagtggctcacatctgttatccccacactttgggaggctgagacgggtggatcacat

SEQ ID NO: 536973 - DNA, 201 bp, Homo sapiens
ataaaaagaacaattaggggtctgggtctcttttccagtttggtttagaacagagggtacagaactttctgtgatggtggaagtgtcctgtatctatgctrttcagtggggtaaccactagccacatgtggttcttgactaacttgaaattgtgactaagaaattgaatttttaatggtttttttgtaagtagaaaaagcc

SEQ ID NO: 536974 - DNA, 201 bp, Homo sapiens
gcatcagcacagaccatatcagtgtaaaggggaagactgcagagctagtacccagctcagttgtctctgtcttcctgcagaagtggttttttttttgtttstttagcagtaattatgaggcttttttataaatgttattttttagaagtattttgctttcttgtatttattagattcatatagcaggccaggcactgtggc

SEQ ID NO: 536975 - DNA, 201 bp, Homo sapiens
cttagtgcaagatgcaagactaatttactttaatttttaaggtaaaaatggatggacatagtacctaaagtttaattagccttgttagatttattttgttragtttaatatatatggaacttgatttacctcattgttactataaatatttgttcagacctgatggccaaaagaaaggaagaaaatttttcctctcctaaa

SEQ ID NO: 536976 - DNA, 201 bp, Homo sapiens
cgggacccagcagcttcggccaagcgcaagcggccggagaacgcgcagctttcccgaggcggggtgacgcagggccctcgcgagtggaaaacaggggccargtcgcggcctggcggctcggttcggacttcctactttattcaaagggagtcattgaaggcgttttcggaggagcagcgaacaaagagctcgtccgtaagc

SEQ ID NO: 536977 - DNA, 201 bp, Homo sapiens
cctttactactgactggcctctatctcaaaataccttaggagcacttgaaactcagtgttttctttctttcttttttttcctcttttttttttttttttgkttgagacagagttttactcttgtcgccgaggttggagtgcagtggtgcaatcctgcctcccgggttcaagcgattctcctgcctcagcctccggagtagc

SEQ ID NO: 536978 - DNA, 201 bp, Homo sapiens
ttattgactgtgagccctatcatacctcaagcctaatataaggaaagggggcccctctttagtgaaatattgtacgtttggagacgccattgttcttttamacaaaatatcaagcataaggtaataaagactgcgtgcttacccctaagatcaggaagaaagcagttctgtccacgctcaccatttatattcagaagtaga

SEQ ID NO: 536979 - DNA, 201 bp, Homo sapiens
taccgtggcaacctaatagcaaactgcaaatcccaggtcatgctcagcaaataaaaaacattctcagcaaataaaaaacatcgtcatcacgtagtgtttgsgtgtactgtcttctatatagaatctcacattccttgtgagaagcgtatcacattttccctagtgcgttatccattagcttatgtctgagtgcttgctaac

SEQ ID NO: 536980 - DNA, 201 bp, Homo sapiens
cattctgtgataacttaaaatcaagaaaaagtaatatgattttttaaaagttgaggtaaaatctgttctgggtaattttgaagcttatgttaattattagaaaaattaatagagaaaataaagaactgaatgtatagaaatgtgaataaaattgacaaacttttagtaagaccaagaaatgcaaaaagagaaaagacacaa

SEQ ID NO: 536981 - DNA, 201 bp, Homo sapiens
gcctgctgcttttcttttgataaaacattgataaactttaacctgttgtctttgatttttaagttaaggatggtctttgccaaggtgttgaatttaaatcratcttactaaataaagctgctagcgtagattttatttttagacaaacacattattttcttagggtgataattgggaagtttttttcagtgacaagtattt

SEQ ID NO: 536982 - DNA, 201 bp, Homo sapiens
agcaaagttataggataaggtatttttaaaatgctttacttttatatactggcgttgaacacatggacgttaaaattcaaaataccattttcaatcactcaaaaaaaatgaaccactttgggacgatgcaaattaaaacaacattgagataccaacacacctgataaaatggcaatagttcaaaccactgagagcaccaaa

SEQ ID NO: 536983 - DNA, 201 bp, Homo sapiens
ttaattttttttttctttttgagacggagtatcgctctgtcacccaggctggagtgcagtggcacagtctcggctcactgcaacctccgcctcctgggttyaagccattcttctgcctcagcctcctgagtagctgggactataggcgcgcgccaccacgcctgactaatttttgtatttttagtagagacggggtttcac

SEQ ID NO: 536984 - DNA, 201 bp, Homo sapiens
atggcatgatcttggctcactgcaacctctgtctcccaggctcaagcaatcctcccacctcagcctcccaagtagttgggaccacaggagtatgccaccawggccagctagtttttgtatttttgtgtgtgtgtgtgtggagatgaggtttccccatgttgcccaggctggtctcgaacttctaggttcctttaaaggatt

SEQ ID NO: 536985 - DNA, 201 bp, Homo sapiens
gttctcaacaaaggggattcttctctctcccttttgcgccccccagggacatttagcaatgtctggacatatttttggttgtcacaacttaggggcaggtrtgtgttgccggcatctagtgggtagaggctggggatgccactaaacattctgcaatgcacaagacaaaccccctccactaacaaaaaattatcagaccca

SEQ ID NO: 536986 - DNA, 201 bp, Homo sapiens
tccagtttctgttttaacacaagaaatgagcaagcagttcttacagtctaaaaatgaaggagacaaatacaaagtaagtggcaccaaagtaaatataaacycatttaaaaagaatacctttaggcatattgtaaacaatattattgctcacataatggaggctgagttttttttttccttaaagccatctatttaaagtaa

SEQ ID NO: 536987 - DNA, 201 bp, Homo sapiens
ttcacctaaaaaacttcatgtgtcattcaatgcttggaccttttaagtttggttctaatgtcaactttgttgttggcaacaatggaagtaagtgttttttsccttctcgtttgactttgagcagtactttgagattagagtacgttaactttttgaaataggtgactattagtgctaataagtattttttctatagatgta

SEQ ID NO: 536988 - DNA, 201 bp, Homo sapiens
ttctctaatttaatcagacaattccgaatctgaagggctctttatggtgagcttatccaacttttccactctgttagatattctttatgcttaataggtcytttatgcttaaataggtcctttgaaagggaactcattggttctaaaatagcttattttacccttgactattgcatgtttttaatggatacaagcatttgg

SEQ ID NO: 536989 - DNA, 201 bp, Homo sapiens
accactgtgcccggccagcctgcttaattttattttttgtagtgaccaggtgtttctctgttgctcaggctggtctctctggtctcagatgagcctcccayctcagcctcccaaaacgctgggattacaggtatgagccaccatacctagccctcagcttgtaatattttagatctgttagggtataaagaagtacacttc

SEQ ID NO: 536990 - DNA, 201 bp, Homo sapiens
atcttttctctctgagcatgcttttcttggtcaccaaattcaaactacttccagtagcttccttagctccacccacaaatctttctccattgcagagtatmctttactactgactggcctctatctcaaaataccttaggagcacttgaaactcagtgttttctttctttcttttttttcctcttttttttttttttttgt

SEQ ID NO: 536991 - DNA, 201 bp, Homo sapiens
ggttcaagtgatcctgtgcctcaccctcctgagtagctgggaccacaggcacatgccaccatacctggctaatttttattttattatttgtagaaacagartcttgctatattgtccaagctggtctctaattcctggactcaaacgatcctctcatcttggcctcccaaagtgctgggattataggtgtgagccaataca

SEQ ID NO: 536992 - DNA, 201 bp, Homo sapiens
attagaaataactgagttggactgtgtttagttggagtaactgacttatccaaggctacataggaagttagcaacagagctcaaacaagaacccgaggtgrctgactccttaccatgctaggactcttcccattctgctgtcccatgattaaccagtggcatgagggtgatattctatacagcaggtaagaagtgaaaaac

SEQ ID NO: 536993 - DNA, 201 bp, Homo sapiens
ggtgctgctgctgcgaacattcatgtacaagtttttgtatagatatgtattatcatttgtctcagatacctaggaatggaattactaagctatgtgcttayacttcattttgaagaactttgaaacttttccaaagtgactgtaccatttaatgttctcaccaacagtgtttgaatgtcccaatttctccacatccttatc

SEQ ID NO: 536994 - DNA, 201 bp, Homo sapiens
gaggtgttctttaattctgttttttttaaattataaataagtaaagaaatattaaaaactatgacgagctttatggataaattgaaaatcccagaggaggsttttttctcctttttttattccagcataattaaaatatttttctttgcatctgtaaatatgtttctttagccttttggaaacaattttactattttaatc

SEQ ID NO: 536995 - DNA, 201 bp, Homo sapiens
ttggcttttaattcttaatctttaaggaaatacagggtaacagttgctcctacatacataataacttgtaaatctttttttttttttttttttttttttttaagacagagccttgctctgtcttccaggatagagtgcagtggtgcaatctcggctcactgcagcctccacccctcaggtttaagtgattttcgtgcctca

SEQ ID NO: 536996 - DNA, 201 bp, Homo sapiens
atgatttttcatgtattcagagttgtgtaaccatttccaccattttagaacattttcatcgcctaataaagaaacccgtactgattaacagacactcccarttctctcctgttcccatcccctggcaaaaacaaatctactttctatctctatagattgcctattccagatatttcatatgagtagaatcatatagtatgt

SEQ ID NO: 536997 - DNA, 201 bp, Homo sapiens
ccaacttctacacatgccttttttgcagtcctttaactgtccaccctaccaagagcttataaccagtatcagaactggataatgacgcagtttttcactcygacctccatcatgcttgcctgatttaaaagccctcagtttgcagtccagggactgttcaggcttgtcctcagctgagaggacacaggctagagggactgt

SEQ ID NO: 536998 - DNA, 201 bp, Homo sapiens
tgcaactttggtaaaatactttttttcaatttaaatgtaatattaaagggtaaagccaccatttaggttaatggcatcaactcagcttttttagaaagttyttttaattgaagctactctttatgattgctgtctccattcaccaagaaggtaaaaactacctggtatacagccttcatattttttaatgttttgtgtata

SEQ ID NO: 536999 - DNA, 201 bp, Homo sapiens
cacaaacaactcacatactcagctcaggcttaatatatttttcattaggtaacatgttctctatgtaaaaactcagtaaaaaaaactaaggaggaacactrtatgaaaatgtataggaattagttttacccagtaaaaacaaagttgtaaaatttattagttttattaaagttacattgattgcttaaatttattctatat

SEQ ID NO: 537000 - DNA, 201 bp, Homo sapiens
taaagttacattgattgcttaaatttattctatatgttcagaaaaattgtataatgacaatattgtcttgcttattttgttggttttcatttttggcttargctgtagtttccgaagtttgtttacttggcaattttttttgtttttttgagacagggtctcactctgtcacctaggctagagtgcagtggcaggatcttg

SEQ ID NO: 537001 - DNA, 201 bp, Homo sapiens
gacattcgaatctgtgtttgaaaatccatcatcattaaattacaaagtgattcctattttaaaaggtaggatccttcagtgtctgttagatgcaagttacygtggcaacctaatagcaaactgcaaatcccaggtcatgctcagcaaataaaaaacattctcagcaaataaaaaacatcgtcatcacgtagtgtttgggtg

SEQ ID NO: 537002 - DNA, 201 bp, Homo sapiens
tagactttatgcaagaaatattactagaggccaaaagggccatttcatggttataaaagttattttaaaaaatttttaatttgtatatacctaataacatagcttcaaaatacataaaaattgggagaactaaaaggcaaagtaaaagaattgacaattacagttggaaattttaataaacttttctcaataatggataga

SEQ ID NO: 537003 - DNA, 201 bp, Homo sapiens
agtagaaaaatctgcatcaattctggacaaagaaattaatcgattaaggcagaagatacaggcagaacatgctagtcatggagatcgagaggaaataatgmggtaagtagctggtagcttttctgctttaccacattattcatgcatatcatcaagacaaaaaatgaaaaacatatacatgtcttaaatttgaatgaagtg

SEQ ID NO: 537004 - DNA, 201 bp, Homo sapiens
aaaggtgactgaatgacctccagattaattactttagtagtacagtaagtttattgagataggaagtttgggaagaaaagccagtttttctttttttttcytttcttttcttttttttttttttaagaaagctgaattatattttgaacacattaattttgaggtgcttataataaaagcatccaagtggaaatgtgaagt

SEQ ID NO: 537005 - DNA, 201 bp, Homo sapiens
gaggacatttgttatcatgtctttgtatcccaagaggataacacatttgttggataactaactgtgggttaagatcaaattatattatagtattttatataatgttatgttatgtttatttgcctgatgtcttgagtgaagttaaatttattattggtatatgaactatagataattattttttaaaattctctctattga

SEQ ID NO: 537006 - DNA, 201 bp, Homo sapiens
aaatgtttctgtaaaactatcacatatatgttctgtttttctgcttttgttttttaggagagaagaattagatgtgaagcatgcactgagctacaatcagrggcaactgaaagaattgaaagatagtaaaactgatcgactcaaaagatttggccctaatgttccagctcttcttgaagccatagatgatgcttatagaca

SEQ ID NO: 537007 - DNA, 201 bp, Homo sapiens
ggacatttgttatcatgtctttgtatcccaagaggataacacatttgttggataactaactgtgggttaagatcaaattatattatagtattttatataatgttatgttatgtttatttgcctgatgtcttgagtgaagttaaatttattattggtatatgaactatagataattattttttaaaattctctctattgaag

SEQ ID NO: 537008 - DNA, 201 bp, Homo sapiens
gggaagcaaaatcttatagaacttcctcaataattgatagagcaactataccaaaaatgaacaaggatatagaaaaactcaacaggatctaatcattattwatatattgttcagtaaaatttatccatttaaagtgtataattcaatgatttttcatgtattcagagttgtgtaaccatttccaccattttagaacatttt

SEQ ID NO: 537009 - DNA, 201 bp, Homo sapiens
gacatttgttatcatgtctttgtatcccaagaggataacacatttgttggataactaactgtgggttaagatcaaattatattatagtattttatataatgttatgttatgtttatttgcctgatgtcttgagtgaagttaaatttattattggtatatgaactatagataattattttttaaaattctctctattgaaga

SEQ ID NO: 537010 - DNA, 201 bp, Homo sapiens
acatttgttatcatgtctttgtatcccaagaggataacacatttgttggataactaactgtgggttaagatcaaattatattatagtattttatataatgttatgttatgtttatttgcctgatgtcttgagtgaagttaaatttattattggtatatgaactatagataattattttttaaaattctctctattgaagaa

SEQ ID NO: 537011 - DNA, 201 bp, Homo sapiens
cttgagaacatagaagaacaccagtctgtagatattgcaactttggtaaaatactttttttcaatttaaatgtaatattaaagggtaaagccaccatttasgttaatggcatcaactcagcttttttagaaagttcttttaattgaagctactctttatgattgctgtctccattcaccaagaaggtaaaaactacctggt

SEQ ID NO: 537012 - DNA, 201 bp, Homo sapiens
catttgttatcatgtctttgtatcccaagaggataacacatttgttggataactaactgtgggttaagatcaaattatattatagtattttatataatgttatgttatgtttatttgcctgatgtcttgagtgaagttaaatttattattggtatatgaactatagataattattttttaaaattctctctattgaagaaa

SEQ ID NO: 537013 - DNA, 201 bp, Homo sapiens
ttaatactaatgtacccctttcattaattatggaatccttctgtatcatcattatagagctttgtagattaatgaatcctttccaaggttttcggtttaawtttttttttatgttactaaaatccaaatacttttcttttagatgaaaataagaaaaaatatttctgaaattcgggaacttgagaacatagaagaacacca

SEQ ID NO: 537014 - DNA, 201 bp, Homo sapiens
tggtcttgaactcttggcctcaagtgatttacctgcctcagcctcccaaagtgctgggattacatgtgtgaacctctgcacccagcctcttctattttttwaattattatttttctgagacagagtctcaccctgtcacccaggctggagtgcagtggcgcaatctcagctcactgcaacctctgcctcctgggtttaagc

SEQ ID NO: 537015 - DNA, 201 bp, Homo sapiens
aggatatcagaaacccccacagcttacttggatcatattttgaaaaccactggattagaataatcattccataacttgagactttggatgtttcagaaaartttttctcgttggactcaacagtgccatcatttaaaatgctaagatggattacttacatctcttttgcatgggaatggattagtatataagaatgatatg

SEQ ID NO: 537016 - DNA, 201 bp, Homo sapiens
aggggcgtgccaccacgcccagctaatttttcgtatttttagtagagacggggtttcaccatgttagccagggtggtctagatctcctgacctcgtgatcygcccaccttggcctcccaaagtgctgggattacaggcgtgagccacagcacctggccttctattttttaaagtagagattttgtacctgagttgaaatta

SEQ ID NO: 537017 - DNA, 201 bp, Homo sapiens
tgagaaaatgctaataaaagtggcaaataatgtctaattgtttttatgaaaatagttttggcttcacagaccatctgaaggatatcagaaacccccacagsttacttggatcatattttgaaaaccactggattagaataatcattccataacttgagactttggatgtttcagaaaaatttttctcgttggactcaacag

SEQ ID NO: 537018 - DNA, 201 bp, Homo sapiens
ggagaatcgcttgagcctaggaggtggaggttgtagtgatacagcgagccaaggtcatgccactgcactccagcttgggtgaagaatgagactgtgtctcaaaaaaaaaaaaaacaaaaaaaacaaaaaatgaatgtatatatctattcccagatgacattttaaaatttcttttctctcccatctccactttttaaaata

SEQ ID NO: 537019 - DNA, 201 bp, Homo sapiens
ccagaccagggaaaagttgttcttaactgcaaaggtagttctcttccaccaagcacaaagctttggaagacagatacttggattagtgaggaaaagatcasttctgaagccagttgactctgctgtatggagactcatttttatgaatttggaatctggtactttatttattctccatatcttcttattgtcgtcctcttc

SEQ ID NO: 537020 - DNA, 201 bp, Homo sapiens
aagatcaaattatattatagtattttatataatgttatgttatgtttatttgcctgatgtcttgagtgaagttaaatttattattggtatatgaactatasataattattttttaaaattctctctattgaagaaaaaatatacttcaataatgttattttcttaaaggtcagacttaatgaggcagaacaaaagtacaag

SEQ ID NO: 537021 - DNA, 201 bp, Homo sapiens
gagaccctgtttcagaaaaaaaattgttttattaacattttttaaattagcctttggaattttggtctgttagattcagttatggtgaaaaaggttttcakttttattctcttgcagtagagcaagaagtaccattatacgtataactgttttactgtaaaattttttgaaaggaatgggtatttccaaatcactaagtca

SEQ ID NO: 537022 - DNA, 201 bp, Homo sapiens
aaccccgcaactgcgcaggcgcgggcggagcccgaagggagggagggcggggcgcaggcgcggttagtaccgcggtgggcgccggggctcccgggaatctrccttctcctgcggccggcacgcggttcccagggggccagcggcggtcagccgaggtcgagacgcccgcagggtggccttagcggccggtcgtaccacggc

SEQ ID NO: 537023 - DNA, 201 bp, Homo sapiens
agagaactttggaaaaggaaaagtaatcatagagttgaatgatttgattcttgtttttctgaataaatgaatgaataagtaaatgaactaatgtaatatarttgattattcagaaaaaaccagtaacatcaagatatagttgaaggagcagttaactgaattttggtaatctttttaaaatgacttttctttcttagtttc

SEQ ID NO: 537024 - DNA, 201 bp, Homo sapiens
gggaggaggagcgagcgttgggtgcggtggccgctgcgttggcagccctgtccctgagcggaacgcaggtcgtctctgggaggaggagcgagggttggackcagtggccgctgcggtggcagccctgtccccaggcgtggactctgccctcagcttcacagtcaccgaagaaatgaagttacaggaggggcacaccgtcct

SEQ ID NO: 537025 - DNA, 201 bp, Homo sapiens
ccttatcttgttttctgctaaatcatggaggtttggggagttccttctccacttgtttgtggaggcctggggagttttttcagacccccagtaaaacttgyttaatcctaaacgggtcctggtctcgtcatgcttcaaggcccaagaaagccctgggcaaaactcttgatgggcttttgttacgtcccagccctcgtgtga

SEQ ID NO: 537026 - DNA, 201 bp, Homo sapiens
tttccagagcttacacaccttctaagctctgtgtctccgtgtcagtgtgcattcgtctaaagacgtacgtgattcaattcttctcatctctaactgaggtytggtcctgaagatcttcctctgaagactcagtaaatttacttgatctaaatgggcccaggtgtttacccttatcttgttttctgctaaatcatggaggtt

SEQ ID NO: 537027 - DNA, 201 bp, Homo sapiens
gttgccttggagaccgtgttgggtgtggtgccagagggcagctgtgggtacccctctttgtcattcacagggagggacagagcctccctgcctggcaggaygtgatccctggctgccaggggctcagcgggtaaagggggtgcactcgccgggaccagccgatgcctggggcacccaggaaacgcagctactctgcagcat

SEQ ID NO: 537028 - DNA, 201 bp, Homo sapiens
ttgctcattcccgaggcccgatagcgagatgcagatgaactggggaagaagagggattttatttctgtaactggttacagggagaaggcctggaaatgatygccagaccaactccagattacagtttttccagagcttacacaccttctaagctctgtgtctccgtgtcagtgtgcattcgtctaaagacgtacgtgattc

SEQ ID NO: 537029 - DNA, 201 bp, Homo sapiens
aacccccaaaatctgagacaggtctcggttaatttagaaagcttactttgccaagggtgaggacgcgcacccatgacccagcctcaggaggtcctgatgaygtgtgcccaaggtggtcagggcacagtctggctttatacattgtagggagacatgagacatcagtccgcatatgcaggacgaacattggttcggtctgga

SEQ ID NO: 537030 - DNA, 201 bp, Homo sapiens; identical to SEQ ID NO: 349437

SEQ ID NO: 537031 - DNA, 201 bp, Homo sapiens
acgagggtggggagtgggggatgctggaccacagggcagcacctgcccggcaggatgcgcgtgcctgtgagccccgggactccccagggtcctgggcactkgggctgtggatcctcggaggaactcagagtggttcccctgaatttcccggccctggcgacgaggtgctggtcccagagacaggtgcaggcacaggcagtg

SEQ ID NO: 537032 - DNA, 201 bp, Homo sapiens
cctcaagaacatcccgttcctgggggcgtagaggggccgggccggggacgaggcctcctgcggacaccagctcctctctccgccgtcaccggggaggccgrggatccttgcagggcttctggggcgttgggaaacccaggcccgccggccacggctctaaaatgaagagggcggagaccccagtgaagagcaccccccgca

SEQ ID NO: 537033 - DNA, 201 bp, Homo sapiens; identical to SEQ ID NO: 349440

SEQ ID NO: 537034 - DNA, 201 bp, Homo sapiens
aagtcttcaaaataatgtttgcaatttttttcatttgtttgccccaccccccatttttctgttttcttttcttttctttctttcttttttttttttttctsagatggagttttgctcttgtcgcccaggctggagtgcagtggcatgatctcggctcactgcaacctctgcctcctgggttcaagcaattctcctccctca

SEQ ID NO: 537035 - DNA, 201 bp, Homo sapiens
ccggcacccagtgggtttgaggacaagacgttacagaggtgaggggaggcccagacctgtgtggcccaaggcctggacttggctgcaggatgggaggtggrggtggggctggcacgacccggactgggcactcatggcctgccctttccacagatacttccgggtcatcctcctcctcctcctggccctgactctgctcct

SEQ ID NO: 537036 - DNA, 201 bp, Homo sapiens
tttctacagagagatggcacaactgctcacaagaccagggttctagccggagcccaggtcgagctcagctccacgacccctgctggtcagcccctgatgcytcgtgaaggagaggagtctcacttgccaaaggaggctggagtggttgggggtacacacacccttggttgccttggagaccgtgttgggtgtggtgccaga

SEQ ID NO: 537037 - DNA, 201 bp, Homo sapiens; identical to SEQ ID NO: 349441

SEQ ID NO: 537038 - DNA, 201 bp, Homo sapiens
tttcgctgcaggaggtttggttctgatggaaggatgttttctacagagagatggcacaactgctcacaagaccagggttctagccggagcccaggtcgagytcagctccacgacccctgctggtcagcccctgatgcctcgtgaaggagaggagtctcacttgccaaaggaggctggagtggttgggggtacacacaccct

SEQ ID NO: 537039 - DNA, 201 bp, Homo sapiens; identical to SEQ ID NO: 349442

SEQ ID NO: 537040 - DNA, 201 bp, Homo sapiens
cttctcatctctaactgaggtctggtcctgaagatcttcctctgaagactcagtaaatttacttgatctaaatgggcccaggtgtttacccttatcttgtyttctgctaaatcatggaggtttggggagttccttctccacttgtttgtggaggcctggggagttttttcagacccccagtaaaacttgtttaatcctaaa

SEQ ID NO: 537041 - DNA, 201 bp, Homo sapiens; identical to SEQ ID NO: 349444

SEQ ID NO: 537042 - DNA, 201 bp, Homo sapiens; identical to SEQ ID NO: 349445

SEQ ID NO: 537043 - DNA, 201 bp, Homo sapiens
tgccacggtagtttactgcacctattagcccgtcatctaggtttcaagccccgcatgcattaggtatttgtcctaatgctttccttccccttacaccccayccccgacaggccctgggatgcgctgttcccctctctgtgtccacgtgttctcattgttcaagtcccacttatgagtgagaacatgcggtgtttggttttc

SEQ ID NO: 537044 - DNA, 201 bp, Homo sapiens
ggggccgaggcggtgggacctcgggggagctcaagcctcgactgtcccctcgctggaggccagaggccaagatgatgtccatgctgggcggcttgcagagrtaaggggggcagttggaccccccaggtggacaaagcgcttcatctgtggctattctgagagacggacaggagtgggttttgtttgtctttcgaaggaagt

SEQ ID NO: 537045 - DNA, 201 bp, Homo sapiens
cacttctgctggccctgttctggggcagggagggcgcctgctactccagccccactgggtgggtgtcatgatgggattctaggagtgggcccagccctacrtctggccgctggtctcggctttggggtccttccttttcctggtgtgaagggacaagaagcactgcacgtgtggctgaggtcacaaagccagctgcatgtg

SEQ ID NO: 537046 - DNA, 201 bp, Homo sapiens
cgtgtatgtatgtactgtgtatgcgtgtgtatgtgtatgcatgtgtattatatgtacatattgtgtatgtgtgtgtatatgtatgtgtgtattgtgtttatatgtatgtgtgtatatgtatgtatgtgtatatgtgtgcgtatatgtgtatgtatgtatatgtgtatatgtgtgtgtattgtgtgtgtacatattgtgttt

SEQ ID NO: 537047 - DNA, 201 bp, Homo sapiens
gctgtcacaacagacaccacagacaggctggccccagcagcagacatgtgcttctcaccgttctggaggccggaaggcatgcgatctcgagccagcatggsgggttcctggggagggccctcctcctggcctgcagatgccactttctctctgtgcccctatatggggagcgagggtggggagtggaagctgcactctggt

SEQ ID NO: 537048 - DNA, 201 bp, Homo sapiens
gtgtatgtatgtactgtgtatgcgtgtgtatgtgtatgcatgtgtattatatgtacatattgtgtatgtgtgtgtatatgtatgtgtgtattgtgtttatatgtatgtgtgtatatgtatgtatgtgtatatgtgtgcgtatatgtgtatgtatgtatatgtgtatatgtgtgtgtattgtgtgtgtacatattgtgtttg

SEQ ID NO: 537049 - DNA, 201 bp, Homo sapiens
cactggcttgttgtgctcctatgtaccctgtaaagccccatgcaaaggccccagtccaagcaggaagctcaccccttgtgtcctctccagatgctgagctygccgagtgcaggtgtggtgtctggttccctcgtagcctgtgcctgacctgcactgagacgctacggcccacgtggcaaccccccatcactgaggggacac

SEQ ID NO: 537050 - DNA, 201 bp, Homo sapiens
tgtatgtatgtactgtgtatgcgtgtgtatgtgtatgcatgtgtattatatgtacatattgtgtatgtgtgtgtatatgtatgtgtgtattgtgtttatatgtatgtgtgtatatgtatgtatgtgtatatgtgtgcgtatatgtgtatgtatgtatatgtgtatatgtgtgtgtattgtgtgtgtacatattgtgtttgt

SEQ ID NO: 537051 - DNA, 201 bp, Homo sapiens
gagggctgccccgtttgctgttagcatgcacctggccgccctggcgcagccatccttgaaacactctgacagcaatgttttaagaatgtagagatggggtytcactgtattgcccaggctggcctcaaactcctaggctcaagcaattctcccacttccgcctcccaaaatgttagggtcacaggcgtgagctgccgcgcc

SEQ ID NO: 537052 - DNA, 201 bp, Homo sapiens
gtatgtatgtactgtgtatgcgtgtgtatgtgtatgcatgtgtattatatgtacatattgtgtatgtgtgtgtatatgtatgtgtgtattgtgtttatatgtatgtgtgtatatgtatgtatgtgtatatgtgtgcgtatatgtgtatgtatgtatatgtgtatatgtgtgtgtattgtgtgtgtacatattgtgtttgtg

SEQ ID NO: 537053 - DNA, 201 bp, Homo sapiens
ctgcctgatcaggaaccatcagccccaccaacctgcccagagctggaaagccagaccttctgggcgctcccagtgaggcagcaggtcagtggcctccaagycccgaggctccaacagcaggaagtttgaggctctttgggaacgactgagctactctggcaacccccagagcaaaggcagcagggcctggccgcagtcccc

SEQ ID NO: 537054 - DNA, 201 bp, Homo sapiens
tgtaacaaattagcttcgtatggtggtgggtgcctgtaatcctagctacttcgaggctgaggcagaagaatcgcttgaacccgggaggcagaggttgcagtgagccgagattgtgccactgcactccagcctgggcaacaaaagtgaaactccatctccaaaaaaaaaaacccacacaaaaaaagtttaatctcaattttt

SEQ ID NO: 537055 - DNA, 201 bp, Homo sapiens
tagctatggatcattaaacaaatattaatgtcttcttttttttttttttttgagatggagtcttgctctcttgcccaggctggagtgcagtggtgcaatckcagctcactgcaacctccgtctcccgggttcatgccattctccagcctcagcctcccgagtagctgggactacaggtgctcaccaccacgcccggttaat

SEQ ID NO: 537056 - DNA, 201 bp, Homo sapiens
ctctaaaatgaagagggcggagaccccagtgaagagcaccccccgcaatccgcgcagatccctcccagagaaggccctgagcccaggcggcagccacccgccccccttccgaggctgtgtctctgtttagaactgaacacgagggtggggagtgggggatgctggaccacagggcagcacctgcccggcaggatgcgcgtg

SEQ ID NO: 537057 - DNA, 201 bp, Homo sapiens
tggggagcccagagccggcaggggccgaggcggtgggacctcgggggagctcaagcctcgactgtcccctcgctggaggccagaggccaagatgatgtccwtgctgggcggcttgcagaggtaaggggggcagttggaccccccaggtggacaaagcgcttcatctgtggctattctgagagacggacaggagtgggtttt

SEQ ID NO: 537058 - DNA, 201 bp, Homo sapiens; identical to SEQ ID NO: 349464

SEQ ID NO: 537059 - DNA, 201 bp, Homo sapiens
tacccctggctcttcctggcgcgctacgtggaaggcgtggggtcgcagcagcgcttcaacatcatgtgcaaccacctgaggttcaacctgcctcaggtacygcgggcctgctggggaggagggcgggctgcagccgtgcctgtggctgtgggtctgggtggtgtagcctggaggctggagagaaggagtgtaaggcttggg

SEQ ID NO: 537060 - DNA, 201 bp, Homo sapiens
gctgtgttccccctccctagcaggcctagggggggtctggggcaggggtctcccttggggagtggcgtctgccagctgctgtgcagggaggctctcctgcycataccctcttctgggcacagggaaaagcttggtccttcttctggagggccctggaaaccgtatcccatagggccgggaagggcctgggctttggggtcc

SEQ ID NO: 537061 - DNA, 201 bp, Homo sapiens
cctcttctgggcacagggaaaagcttggtccttcttctggagggccctggaaaccgtatcccatagggccgggaagggcctgggctttggggtccgctccrggacccccaaatggctctgtcagttacttcagttggtctcagtgacactgaggaagtcactcagtgtgtgagttggtttcttcttctgtaaaataagcag

SEQ ID NO: 537062 - DNA, 201 bp, Homo sapiens
cctttgctgaggaaggtcgtgagccaagcccaacggatgtccctgtgttaaatgaaaccacagcaaagtgctgctttaacggccaaaagcatttgaattcyggagatttcatgtggttcaagtagacacattcttactcgattttcgcttcagcctcaagatgtaggtcaggttacctccattgtacagctggagagactt

SEQ ID NO: 537063 - DNA, 201 bp, Homo sapiens
gctttcctgaatgtgctgtctcctctctcgccgcacagagagaaggggttcaggattcagtgggtggatgatactcacgcactcggcatctttccctgcckggcctcaggtaaggcacccccagtgggcccagcccttgctcggatccctgttgagagggaggacccttggttccctgggtagaggccaccatctcctggg

SEQ ID NO: 537064 - DNA, 201 bp, Homo sapiens
ggcaggcgcctgtagtcccagctactcgggaggctgaggcaggagaatggtgtgaacccgggaggtggagcttgtagtgagccgagattgtgccactgcayttcagcctgggtgacagtgcgagactccctctcaaaaaaaataaaaataaaaacaaaaagaaacccctttccacgtggcccttgttaactctgcttccta

SEQ ID NO: 537065 - DNA, 201 bp, Homo sapiens
agtgggcccagcccttgctcggatccctgttgagagggaggacccttggttccctgggtagaggccaccatctcctgggcgcaggctcagctgagccagtrggctctgggggttttgttcccagcctaaaacccagggggagctgagcggtctctggcccatagtaatgcgccttaatgaagaagcccttcctattgtgtt

SEQ ID NO: 537066 - DNA, 201 bp, Homo sapiens
cttggttccctgggtagaggccaccatctcctgggcgcaggctcagctgagccagtaggctctgggggttttgttcccagcctaaaacccagggggagctragcggtctctggcccatagtaatgcgccttaatgaagaagcccttcctattgtgttagtgctttcaatgaaaaggcatcagattcaggcgacctttgctg

SEQ ID NO: 537067 - DNA, 201 bp, Homo sapiens
aaggtaccagataaccgttatagcgcctccttttccccttctacttccagaaaccatggtgagagattttagacacgagttttccatgacttcaaagtagyaactagtaaaatggacctgcaagaggcctgccgaggccagctgtgctctcgtgggtggttacgtagccaacatggtccagggtttcttggaacaataaat

SEQ ID NO: 537068 - DNA, 201 bp, Homo sapiens
cctgacttgatacccctcccaaaggaccctaaaaagcagggaggtgtgcaggatgaacccctcagccccctcactgtagagacagagaaacaagggcatgkagaggcgacaagtttgggtcagcatcccctggggggccaggatccctaagttggccccctctcatgagcatccggccacaccacgggcacagctgggccg

SEQ ID NO: 537069 - DNA, 201 bp, Homo sapiens
tagtaaatcattttcctttgggcccctacacactctgattacctcctcccattcctgctccagggtacccagttcggatggcctctctggcccctgccgcrctcctgcctcctgccccagcaggtaccacggtcctcggcccatctccaaccaaggagcagctgcggttccccgaggtgcccgggctggccggtggtatcg

SEQ ID NO: 537070 - DNA, 201 bp, Homo sapiens
ataaatatcctgtccgtaggtctgtgagctctgggtgttccatcctgacttgatacccctcccaaaggaccctaaaaagcagggaggtgtgcaggatgaayccctcagccccctcactgtagagacagagaaacaagggcatgtagaggcgacaagtttgggtcagcatcccctggggggccaggatccctaagttggccc

SEQ ID NO: 537071 - DNA, 201 bp, Homo sapiens
cttgcctgccccacacccagtgcctaatgcttcagcaagagagacagaaagtgggtgtgttgcctgggctctgtattcctgggcagttctccctgccggcygtccctcgggaaagagagcactgatttgttggttgtagacacaccctgcaggccctagacctgggctgcccccctgcatggccacacgcctgccaggatg

SEQ ID NO: 537072 - DNA, 201 bp, Homo sapiens
aagctccccttgctaagggtccgatctctcctagatcacagacaacctgacgaagaaggagattcagatagagaagatccatttggacacatcctccttcrtggaggagctgcctggagagaaggaccttgcccacgtggtagagatctatgactttgaaccagcgctcaagacggaggacctgctggcaacgttttctga

SEQ ID NO: 537073 - DNA, 201 bp, Homo sapiens
ctgcgtgtccaagctccccttgctaagggtccgatctctcctagatcacagacaacctgacgaagaaggagattcagatagagaagatccatttggacacrtcctccttcgtggaggagctgcctggagagaaggaccttgcccacgtggtagagatctatgactttgaaccagcgctcaagacggaggacctgctggcaa

SEQ ID NO: 537074 - DNA, 201 bp, Homo sapiens
cgtctcttgcccatccagggcggtgtcggagcagccctgccctgagctttgaataggtgcacaacacggctgcaggggttcggggtggtgggtgtgccgckgggtcctgaggaggagggagtggctccacgcctgctttctttccacagctgcggaagccctgacccgggagttctcggtgctcaagatccggcccctcac

SEQ ID NO: 537075 - DNA, 201 bp, Homo sapiens
tctccagtcgcctccggtacctgatccatagaacagcagagaattttgatctcttgagcagcttctccgttggggagggctggaagaggaggacggtcatytgtcaccaggacatcaggtgtgtagcctcccaccttgaagtgcctgcagcggtggtgtgtgggtggccagctagctggtcagcctttggaagggcagggc

SEQ ID NO: 537076 - DNA, 201 bp, Homo sapiens
cttggacttgcccagctctgcctcttactgactttgcactttgggaaaaattacttaactcttgggccttcagtttccccatctgtaaaacagctttctaraatatagttttcaggattctatggaacattatgtgtgtaattgccagtcacttagtggggactccatacaagtaagtgccctcccgtaaaacccatgcgt

SEQ ID NO: 537077 - DNA, 201 bp, Homo sapiens
ccccagcagctgctcggaggacgattacagtgagctgctgcaggaggtgatgaggctcttgagcccgaaaagggagggcggaggtgaggtgggtgtggccstgggtggatggggaccaagggttatggtgtggagagcaggggatgtgcaaggggaggtagggctgggtgttgggtgacagggattccttagggaactcag

SEQ ID NO: 537078 - DNA, 201 bp, Homo sapiens
ggtatcgtggacgcaagcctgaccagcctttgtatgtgccccgggtgctgcgcaggcaggaagaatgggggctgacctctacctcggtgctcaagagagakgccccagctggcagggacccagaagagcctggagatgttggtgctggagaccccaactctgatcagggactccctgtgctgatgactcagggaacagagg

SEQ ID NO: 537079 - DNA, 201 bp, Homo sapiens
agattgtgccactgcacttcagcctgggtgacagtgcgagactccctctcaaaaaaaataaaaataaaaacaaaaagaaacccctttccacgtggcccttkttaactctgcttcctaaagccttccgctgtgctctgctcctgagcaggagagccgaaggggtggctaggggcaacacgttctgctcttctgttctctacc

SEQ ID NO: 537080 - DNA, 201 bp, Homo sapiens
aggaagaggacgaagaggaggtggaagaggatggccccagcagctgctcggaggacgattacagtgagctgctgcaggaggtgatgaggctcttgagcccraaaagggagggcggaggtgaggtgggtgtggccgtgggtggatggggaccaagggttatggtgtggagagcaggggatgtgcaaggggaggtagggctgg

SEQ ID NO: 537081 - DNA, 201 bp, Homo sapiens
aaccaaggagcagctgcggttccccgaggtgcccgggctggccggtggtatcgtggacgcaagcctgaccagcctttgtatgtgccccgggtgctgcgcargcaggaagaatgggggctgacctctacctcggtgctcaagagagaggccccagctggcagggacccagaagagcctggagatgttggtgctggagacccc

SEQ ID NO: 537082 - DNA, 201 bp, Homo sapiens
cctgtagtcccagctactcgggaggctgaggcaggagaatggtgtgaacccgggaggtggagcttgtagtgagccgagattgtgccactgcacttcagccygggtgacagtgcgagactccctctcaaaaaaaataaaaataaaaacaaaaagaaacccctttccacgtggcccttgttaactctgcttcctaaagccttc

SEQ ID NO: 537083 - DNA, 201 bp, Homo sapiens
gctgtgctctgctcctgagcaggagagccgaaggggtggctaggggcaacacgttctgctcttctgttctctaccttgatggtgcagccaggctggggccsctgtgcctttctctgcccgggtggggccacactgccttaggcctctcacaagctgcagggtaggtggcaccttcctgagcaataggaataaagctgacag

SEQ ID NO: 537084 - DNA, 201 bp, Homo sapiens
ggttccctgggtagaggccaccatctcctgggcgcaggctcagctgagccagtaggctctgggggttttgttcccagcctaaaacccagggggagctgagyggtctctggcccatagtaatgcgccttaatgaagaagcccttcctattgtgttagtgctttcaatgaaaaggcatcagattcaggcgacctttgctgagg

SEQ ID NO: 537085 - DNA, 201 bp, Homo sapiens
gggtcctgaggaggagggagtggctccacgcctgctttctttccacagctgcggaagccctgacccgggagttctcggtgctcaagatccggcccctcacrcagggaaccaagcagtcaaagctcaaagccttgcagaggccaagtaaggaaagcgcatgtccctgaatagggaggctgtgtgtgtgtgtgtgcgtgcgag

SEQ ID NO: 537086 - DNA, 201 bp, Homo sapiens
ttctccccttccccttctttgttcctgctcaggctttctttctcctctttttttttgagacaggatcttgctcttttgtccaggcaggggtgcagtggtaygatcacagcttgctgcagcctcaacctcctgggctcaagtgatcctcccaccttcgtctcccaagtagctgggactacaggcatgtgccaccgtgcccag

SEQ ID NO: 537087 - DNA, 201 bp, Homo sapiens
cgcagggaaccaagcagtcaaagctcaaagccttgcagaggccaagtaaggaaagcgcatgtccctgaatagggaggctgtgtgtgtgtgtgtgcgtgcgmgcatgtgtgtgtgtgcgtgtgtgtgtgtctggtttgggcagggtcttcccctctgttaattcttcccgcttgacttctctgctctttgggagccctgggc

SEQ ID NO: 537088 - DNA, 201 bp, Homo sapiens
tttgtttggctgagtctcagtttcctcatctgaaactaaaaccagttgataatacagccttcactaggtcatggagatggactctgtgtgcaagtacatcrtcttgtgttacggatgccagtcatggaaattactctttagcctgaagttttatcttataaatcttgttttcttgggaccgtgcgactgcccctgagactg

SEQ ID NO: 537089 - DNA, 201 bp, Homo sapiens
cagacaacctgacgaagaaggagattcagatagagaagatccatttggacacatcctccttcgtggaggagctgcctggagagaaggaccttgcccacgtkgtagagatctatgactttgaaccagcgctcaagacggaggacctgctggcaacgttttctgagttccagtgagtggtggctggggaggtgctgccttcag

SEQ ID NO: 537090 - DNA, 201 bp, Homo sapiens
atgactttgaaccagcgctcaagacggaggacctgctggcaacgttttctgagttccagtgagtggtggctggggaggtgctgccttcagagaggagctargatacttctctgtagctgggggtgcttgcctgccccacacccagtgcctaatgcttcagcaagagagacagaaagtgggtgtgttgcctgggctctgtat

SEQ ID NO: 537091 - DNA, 201 bp, Homo sapiens
ctcaaaccccagagagggagattgtggaaaggaaggcagggagggaggccaagaggctgccctgtgctgcgagaggaatgagctgtggctggggttggccrtggcgttctgatctccacagactatggtgagagcaggttcccttgcttcagtttcctcttctgtagaacagtgggcagcttggacctgaagcctctccca

SEQ ID NO: 537092 - DNA, 201 bp, Homo sapiens
gcgaccccgcgccagggtcctcattctcctgtttctttggacagatcattggatttggttctgcacttcttgaagaagttgatcctaatcctgcgaatttygtgggagctggaatcatccacacgaaaaccacccagattggatgcctgctgcgcttggagccgaacctgcaagcccaggtcaggccctcaggaaatggtg

SEQ ID NO: 537093 - DNA, 201 bp, Homo sapiens
agtttgctagagaggctcacagaactcagggaaacacatttatttgatcataaaagctagtatgaagggtgcaggtgacgtgatgcgtagggcatggtacygggccatggccgctccatgtccctccagggatccccatgtgttcagttatctggacgttccccaaaccctgtcctcctgggccttttgtgcagacttcat

SEQ ID NO: 537094 - DNA, 201 bp, Homo sapiens
gcctggcttgtgacatacatgcaagtgtttgttgagcgaggtccctttagcaatagatttagcgtgtactgaaagtttgattgtcacacatctaatgtgcrttttccctcttttgtacaatggagaattcccacatttcatgggtgtgagctgaaaaaaagacttgaagctaacattcctctgctgtcccactacaacaca

SEQ ID NO: 537095 - DNA, 201 bp, Homo sapiens
tgttgcagtgagccgaggtcatgtcactgtactccagcctgggtgacagagtgagactgcatctcaaaaaaaaaaaaaattgatgaagtattaaaatatayatttcttccaaatagatttacgaatgttcaataagcatataaaagctatcagaaaaatgcatatcaaaatcacaatgagatactgcatcacacttaccca

SEQ ID NO: 537096 - DNA, 201 bp, Homo sapiens
gtggaggcagggagggtgggtggccacatgtgcttgagggttttcaccctggccctcagttgcctgctgtgcgggtccctggggcagctgcaggggctcayggacccatcagggtctccacagctcccctgcagtgtgtgcaccccacaatgtctgcggctcttcttccggcgtgtcgggctttgatcacagcatagccac

SEQ ID NO: 537097 - DNA, 201 bp, Homo sapiens
agtctggagtgcagtggtgtgatctcggctcactgcaacctctgcctctcgggttcaggcaattcttccacttcagcttccccagtagctgggattacagrcgcacgccaccatgcccagctaatttttgtgtttttactagagacaggatttcaccatgttgcccaggctggtctcaaactcctgacttcaagtgatcca

SEQ ID NO: 537098 - DNA, 201 bp, Homo sapiens
ggccacctttctcgctcgcctccacagcctgctggaggctggctctgagggacactccctcacctctcaggtgggatagaaactcctggcaatgtagaacrgcctttttttttttttttttttttttgagatggagttttgctcttgttgcccaggctggagtgcaatggtgtggtcttggctcaccgcaacctccgcctc

SEQ ID NO: 537099 - DNA, 201 bp, Homo sapiens
attacgtgagtgaagaggtgtggtaccgagtcattcagatcgtcatcaaccgggacgacgtgcagggctacgcggccaagactgtgttcgaggtatggccsgcaggatggcaggaaggatggggtggagggcagttgcagaaggtgagcagtgagtggttccagcctgcctgcgtggaggtgccgagggccgttgctgacc

SEQ ID NO: 537100 - DNA, 201 bp, Homo sapiens
tcagcttaatcattcaccatgacaggtgtgtcggctgcctgtggagaggcttcgtctcgcgcacacacacacgttccttctcgttggcacgagactgggcrgatcatgtctggtttgtccactccatgggcctccccttcgtcctgcctctgtgctccctgccggatgctttttttctttctgtgcagcccggcccctcct

SEQ ID NO: 537101 - DNA, 201 bp, Homo sapiens
taggtggggcagcccctcctggtgtctggtcttttcctggagctggaacagcactggtctagtgcccagctgcatgtcgcagtattagccaccaggccagygtgctgggggttcagaggacagacaccaagtacgggaagtgctctgtgtaaggcgccaccgaacgcctcctgctgacggtcaacagggacctgacctgcg

SEQ ID NO: 537102 - DNA, 201 bp, Homo sapiens
ggagggacaggcagaacacagcttggggacaactggagtttcatgggatgggtgcttttgagggcttgagaatggatatccagtagtttcttttcttttcttttttttttttttgagatggagtcttgctctgtcgctcagtgtggagtgcagtggcacgatcttggctcaccgcaacctccgccttccaggttcaagcgg

SEQ ID NO: 537103 - DNA, 201 bp, Homo sapiens
gccttgttccccagactgagcgggacgtgagcgtgcggcagcgggccgtggacctcctctacgccatgtgcgaccgcagcaacgccccacagatcgtggcygagatgctgagctatctggagacagctgactactccatccgagaagagattgtgagttctggtggcctctgagtcctctcctgccacaggcgtgaatctc

SEQ ID NO: 537104 - DNA, 201 bp, Homo sapiens
agtcttgctctgtcgctcagtgtggagtgcagtggcacgatcttggctcaccgcaacctccgccttccaggttcaagcggttctcctgcctcagcctcccdagtagctgggattacaggcgtgtgccaccacatgcctgtaattttatttagtagagacgagatttctccatgttggccaggctggtctcaaactcctggc

SEQ ID NO: 537105 - DNA, 201 bp, Homo sapiens
tattcagaagcgcaagagctcagagatgggtgaccccacagtaggatggacaggagcagaaccaccgagccgggggagcaggcgcagtgcctgaaggcacygttgctcctcaggccattcagtcataggtggcagagcatgtgggcgccccgaaaacagggtgcccaagatggaaggaaggctcgaatgatcacagggcgc

SEQ ID NO: 537106 - DNA, 201 bp, Homo sapiens
gctgatttttgtacttttagtagagacggggtttctccatgttggtcaggccggtctcgaactcccgacctcaagtgatccacctgcctcagcctcccaamatgctgggattacaggcgtgagccactgtgcctggcctggctgatttttgtacttctagtagagatggggtttctccatgttggtcaggctggtcttgag

SEQ ID NO: 537107 - DNA, 201 bp, Homo sapiens
ctgatttttgtacttttagtagagacggggtttctccatgttggtcaggccggtctcgaactcccgacctcaagtgatccacctgcctcagcctcccaacrtgctgggattacaggcgtgagccactgtgcctggcctggctgatttttgtacttctagtagagatggggtttctccatgttggtcaggctggtcttgagc

SEQ ID NO: 537108 - DNA, 201 bp, Homo sapiens
gcagagagaccgcagcataaccacgagaagacagatattcagaagcgcaagagctcagagatgggtgaccccacagtaggatggacaggagcagaaccacygagccgggggagcaggcgcagtgcctgaaggcactgttgctcctcaggccattcagtcataggtggcagagcatgtgggcgccccgaaaacagggtgccc

SEQ ID NO: 537109 - DNA, 201 bp, Homo sapiens
gaaaagtaaagggcagaagcagatggagatgtgggtctgacagtcaccaccaccagtgaaaagtaaagggcagaagcagatggagatgtgggtctgacagycgccaccactagtgaaaagtaaagggcagaagcagatggagatgtgggtctgacagagtcgccaccaccagtgaaaagtaaatggcagaagcagatggag

SEQ ID NO: 537110 - DNA, 201 bp, Homo sapiens
tttttggttgtcacagtgggtagagaccagggtgctgcaccccacaccactcaggatgctccacaacagagaatgaggcagccttctatcagctgtgaggygaggacgtcccacaatagagaatgaggcagcctcctgtcagctgtgaggcaaggaggagcccggctggcagagagaccgcagcataaccacgagaagaca

SEQ ID NO: 537111 - DNA, 201 bp, Homo sapiens
gtaaagggcagaagcagatggagatgtgggtctgacagtcaccaccaccagtgaaaagtaaagggcagaagcagatggagatgtgggtctgacagtcgccrccactagtgaaaagtaaagggcagaagcagatggagatgtgggtctgacagagtcgccaccaccagtgaaaagtaaatggcagaagcagatggagatgtg

SEQ ID NO: 537112 - DNA, 201 bp, Homo sapiens
ggttctcccacactctgtggaagggtagaggaccatctaacccttcctgtactctgttaaaaaaaaaaaaaaaaagcatagagctgggtgcggtggctcamacctatagtcccagcattttgggaggctgaggcaggtggatcttttgagcccagaagtttgagaccagcctgggcaatgtggtaacaccctgtctctaca

SEQ ID NO: 537113 - DNA, 201 bp, Homo sapiens
gggcagaagcagatggagatgtgggtctgacagtcaccaccaccagtgaaaagtaaagggcagaagcagatggagatgtgggtctgacagtcgccaccacyagtgaaaagtaaagggcagaagcagatggagatgtgggtctgacagagtcgccaccaccagtgaaaagtaaatggcagaagcagatggagatgtgggtct

SEQ ID NO: 537114 - DNA, 201 bp, Homo sapiens
agtaaagggcagaagcagatggagatgtgggtctgacagtcgccaccactagtgaaaagtaaagggcagaagcagatggagatgtgggtctgacagagtcrccaccaccagtgaaaagtaaatggcagaagcagatggagatgtgggtctgacagtcgccaccaccagtgaaaagtaaagggcagaagcagatggagatgt

SEQ ID NO: 537115 - DNA, 201 bp, Homo sapiens
caccacgcccggctaattttttgtattttttagtagagacagggtttcactgtattagccaggatgatctcgatctcctgacctcgtgagccaccacgccyggccaggttcaagtgattcttgtgcctcagtctcccgagtagctgggattacaggtgtctgccaccacgcctagctaatttttgtggagacgtggtttca

SEQ ID NO: 537116 - DNA, 201 bp, Homo sapiens
ttagtagagacagggtttcactgtattagccaggatgatctcgatctcctgacctcgtgagccaccacgcccggccaggttcaagtgattcttgtgcctcmgtctcccgagtagctgggattacaggtgtctgccaccacgcctagctaatttttgtggagacgtggtttcaccaagttggtcaggctggtctcgaactct

SEQ ID NO: 537117 - DNA, 201 bp, Homo sapiens
accgtggaggggggcgcgcaggtgcagcaggtggtcaacatagagtgcgtgtccgacttcacggaggcgccagtcctcaacattcagttcaggtaagagcygcctgtgcgccccgggccaaggggtgtgtgggcgcctgagctgtgtgcctgggctccatgactgtgcctccgtgtccttcctgaggggacccggggcgtg

SEQ ID NO: 537118 - DNA, 201 bp, Homo sapiens
aatgtagctgaaatagcaagtacgtgtttcttttcttttcttttttttttttggagatggagtctcattctctcacccaggctggagtgcagtggcgcaaycttggttaaccgcagcctctgtctcctgggttcaagcgattctcctgcctcagcctccggagtagctgggattacaggagcgcaccaccatgcccggcta

SEQ ID NO: 537119 - DNA, 201 bp, Homo sapiens
atattaataccataaaggacgaaaaaatgcctggtcatctccatagatgcaaaaaagaacaggattggaggattcacatgctgattccaaaacttaatacrcaaatgattaagatagtataatactggtataaggacagatacgtagatactgagataataatattgagagtacagaagtaaacctttacatttgtggtga

SEQ ID NO: 537120 - DNA, 201 bp, Homo sapiens
ctcactgcaagctccgcctcccgggttcacaccattctgctgcctcagcctcccgagtagctgggactacaggtgcacgccaccacgcccggctaattttytgtatttttagtagagacggggtttcaccgtgttagccaggatggtctcggtctcctgacctcgtgatccaccggcctcggcctcccaaagtgctgggat

SEQ ID NO: 537121 - DNA, 201 bp, Homo sapiens
ctggccctgcactgcatcgccagcgtgggcagccgggagatggccgaggccttcgccggggagatccctaaggtcctcgtagccgggtatgtgccgggctygtgccgggctcctgctgaagatgtgctgctttcatgccaaatacatcaaatatggagctgcttagcctaggaaatgttttactctccccatcttatggga

SEQ ID NO: 537122 - DNA, 201 bp, Homo sapiens
agatgtgggtctgacagtcgccaccactagtgaaaagtaaagggcagaagcagatggagatgtgggtctgacagagtcgccaccaccagtgaaaagtaaakggcagaagcagatggagatgtgggtctgacagtcgccaccaccagtgaaaagtaaagggcagaagcagatggagatgtgggtctgacagagttgccacca

SEQ ID NO: 537123 - DNA, 201 bp, Homo sapiens
ctagtctctttttattatttatttatttatttatttattttgagatggagtctcactctgtcgcccaggctggagtgcagtggcacgatcttggctcactrcaagctccgcctcctgggttcacgccattctcctgcctcagcctctcgagtagctgggactacaggcgcccgccaccatgcctggctaattttttgtatt

SEQ ID NO: 537124 - DNA, 201 bp, Homo sapiens
agtgaaaagtaaagggcagaagcagatggagatgtgggtctgacagtcgccgccaccagtgaaaagtaaagggcagaagcagatggagatgtgggtctgayagtcgccgccaccagtgaaaagtaaagggcggaagcagatggagatgtgggtctgacagagtcgccgccacgagtgaaaagtaaagggcggaagcagatg

SEQ ID NO: 537125 - DNA, 201 bp, Homo sapiens
gtgagggaaactcagagtgggtgttgagatgcgggtgccgagcctgtccccagcctgtccccaagcttgtgccttgctcctgcgacctcttactctgtgcmttgttccccagactgagcgggacgtgagcgtgcggcagcgggccgtggacctcctctacgccatgtgcgaccgcagcaacgccccacagatcgtggccga

SEQ ID NO: 537126 - DNA, 201 bp, Homo sapiens
ggagtctcactctgtcgcccaggctggagtgcagtggcacgatcttggctcactacaagctccgcctcctgggttcacgccattctcctgcctcagcctcycgagtagctgggactacaggcgcccgccaccatgcctggctaattttttgtattttttagtagagatggggtttcactgtgttagccaggatggtctcga

SEQ ID NO: 537127 - DNA, 201 bp, Homo sapiens
gggtctgacagagtcgccgccacgagtgaaaagtaaagggcggaagcagatggagatgtgggtctgacagagtcgccgccaccagtgaaaagtaaagggcrgaagcagatggagatgtgggtctgacagagtcgccgccaccagtgaaaagtaaagggcagaagcagatggagatgtgggtctgacagtcgccaccactag

SEQ ID NO: 537128 - DNA, 201 bp, Homo sapiens
tggaaacttgatagctggagacccgagatccaggtgagaggccctttgcgagtcggggctgtgtgcgctccggcgggcctctcggtggtcggtggcaagargcgaggcaccagctggccctgccgtgaggcctcgcagagccgcttctgctccccatcggcgtctttttgttttccttcagttgatagaaaaagcagggat

SEQ ID NO: 537129 - DNA, 201 bp, Homo sapiens
tagtagagatggggtttcactgtgttagccaggatggtctcgatctcctgaccttgtgatccgcccgccttggcctctcaaagtgctgggattacaggcgkgagccaccgcacccggcctagtctctttttaaacgcttgagatgaatttttgttgcttttctctttatatttgtttcaaatatatacagttaaggctgta

SEQ ID NO: 537130 - DNA, 201 bp, Homo sapiens
gtgggtctgacagagtcgccgccaccagtgaaaagtaaagggcagaagcagatggagatgtgggtctgacagtcgccaccactagtgaaaagtaaagggcrgaagcagatggagatgtgggtctgacagtcgccgccacctgcccatcagggagctcgggagcccagattgccggctggaggtggtggcactgggttgaaa

SEQ ID NO: 537131 - DNA, 201 bp, Homo sapiens
ggagtttggaaacttgatagctggagacccgagatccaggtgagaggccctttgcgagtcggggctgtgtgcgctccggcgggcctctcggtggtcggtgscaagaggcgaggcaccagctggccctgccgtgaggcctcgcagagccgcttctgctccccatcggcgtctttttgttttccttcagttgatagaaaaagc

SEQ ID NO: 537132 - DNA, 201 bp, Homo sapiens
tggcactgggttgaaagggctgcgccctggcaccctcttgctcagccgtggctctcaacctgggggagccggaccatgacaaagccagccttactcttggygtcactgggccttcactgaatgggatctgcgtctgctgtgctcattgtgaggaaatgaggaaatgcatagaaattgcttgaaaggaaaccagcacccagc

SEQ ID NO: 537133 - DNA, 201 bp, Homo sapiens
ctgtgctcattgtgaggaaatgaggaaatgcatagaaattgcttgaaaggaaaccagcacccagccagtgtgaatccattttgttattgtgaaaagagttmatggccttcagaatggtgaagatgaaattcgaatgggaggtttttataggtttcagaagaatcatctaatgtgttgaggtgtaacttcaaagactttgct

SEQ ID NO: 537134 - DNA, 201 bp, Homo sapiens
tgaggcgggcggatcgattgaggtcgggagttcgagaccagcctggccaacatggtgaaaccccatctttactaaaaatagaaaaattagctgggtgtggwggcgcgtgcctatagtcccagctacttgggaggctgagtcaggagaatcgcttgaactgggaaggcggaggttgcagtgagccgagatctcgccattgca

SEQ ID NO: 537135 - DNA, 201 bp, Homo sapiens
aaattagctgggtgtggaggcgcgtgcctatagtcccagctacttgggaggctgagtcaggagaatcgcttgaactgggaaggcggaggttgcagtgagcygagatctcgccattgcactccagcctgggagacacagcaagactctgtctcaaaaaaaaaaaaattttgttttataaattctgtataaatgttttgggac

SEQ ID NO: 537136 - DNA, 201 bp, Homo sapiens
atcgcttgaactgggaaggcggaggttgcagtgagccgagatctcgccattgcactccagcctgggagacacagcaagactctgtctcaaaaaaaaaaaawttttgttttataaattctgtataaatgttttgggactaaaggagacttcatgcctgtctggctgtcctagatagggaaggtggcccctcctacacagtga

SEQ ID NO: 537137 - DNA, 201 bp, Homo sapiens
tatacagatgttcacaaagattttttactgtgatataaataaaaacagcgacacatcctaaatgtgcacctgtgccgtggctgagccgctgcagtgagggytagtgtgcaacaccgatgctgtgctggacgcgtgcccagccgggtcccctgacaggaggcagccggggccggtgcgtgtgtttgcatgttgcagtcatgg

SEQ ID NO: 537138 - DNA, 201 bp, Homo sapiens
gcgattctcctgcctcagcctccggagtagctgggattacaggagcgcaccaccatgcccggctaatttttgtatttttggtagagatggggtttcaccatttttttttttttgagactgagtcttcctctgttgccaggctagagtgcagtggtgcgatctctgctcactgcaacctctgcctcccaggttcaagtgatt

SEQ ID NO: 537139 - DNA, 201 bp, Homo sapiens
ctcctgacctcaagcaatccacccacctcggcctctcaaagtgctgggattacaggcatgagccactgtgcctgggcggttttgaatttttagtagagacrgagtttcgccgtgttggccaggctggtcttgaactcctgacctcaagtgatgcgcctgccttgggcccccaaagtgttgagattacgagtgtgagccact

SEQ ID NO: 537140 - DNA, 201 bp, Homo sapiens
caggagaagtgctagaacccgggaggcggtgttggcagtgagccgagatcacgccactgcactccagcctgggtgacagagagagactgtctcaaaaaagaaaaaaaaaaaaaacaggtttatacaccagattcgagtgagaattgtcccaggaatgcaaggttggcttaacatctgaaaatcaatccatgtaatacttca

SEQ ID NO: 537141 - DNA, 201 bp, Homo sapiens
ttttagtagagacggagtttcgccgtgttggccaggctggtcttgaactcctgacctcaagtgatgcgcctgccttgggcccccaaagtgttgagattacragtgtgagccactgtgcccggccagtttttttttttttttttttgagatagagtctcgctgtgttgcccaggctagagtgcagtggtgtgatctcggctt

SEQ ID NO: 537142 - DNA, 201 bp, Homo sapiens
cctaccttacactatgcacaagaaataactccatggatcataaacccaactgtaagagctaaaactatgagactcctaccaaaaaaacaggagtaagtttytgtgactttggaatatggttttttttttttttttttgacagagtttcgctctgtcaccaggctggagtgcagtggcgtgatcttgtttcactgcaatctc

SEQ ID NO: 537143 - DNA, 201 bp, Homo sapiens
tcataacgtgtgctacaaaatactatttagaaggtgaaatggcaacctgagaatgagagaaaatatttgaaaaccgtgtacctgataaagggctcgttatytagaatatataaaaaacttcatgaagacaactaaattaaaaaattgatgaagtgttaggggctgcgggtgtggtggccatacctgtaatcccagcatttt

SEQ ID NO: 537144 - DNA, 201 bp, Homo sapiens
gcgcctagcctgaatgcgtatttttatgtgaaattagttttcctgaactgtcagaggaggcatggtctgggtggcttttctaccgtaagagcccccccccmccattgtcttcacacagtggcctgcctggcagctgcagttggaagtccctggctccgtcctggctccgtctgcctccgtctgcctccgtctgcctgctgt

SEQ ID NO: 537145 - DNA, 201 bp, Homo sapiens
gattatgtgaattgctctcagcgcagttttagtcctgaggatggaagaccaggctcgtgtgtcttgtgttgtcttcgtctgtgccgtttgtcttcgtggcyatcctgcagatgagcaccgtgtccagtgccacagcacaaggcgcctccccgccccgccgccccacacctctcccctttgggctggacgggaacacacgtg

SEQ ID NO: 537146 - DNA, 201 bp, Homo sapiens
ggcctgcctggcagctgcagttggaagtccctggctccgtcctggctccgtctgcctccgtctgcctccgtctgcctgctgtccctgcacctccccttttycctgcttttgcgtcgtctctgctcagtaggggcgctgggccaggtcactccatccctggttcttgcatcatgctcagccctctgtggatactggggctgc

SEQ ID NO: 537147 - DNA, 201 bp, Homo sapiens
agctgcagttggaagtccctggctccgtcctggctccgtctgcctccgtctgcctccgtctgcctgctgtccctgcacctccccttttccctgcttttgcrtcgtctctgctcagtaggggcgctgggccaggtcactccatccctggttcttgcatcatgctcagccctctgtggatactggggctgcttaggctctcct

SEQ ID NO: 537148 - DNA, 201 bp, Homo sapiens
gcgcttggagccgaacctgcaagcccaggtcaggccctcaggaaatggtggaacacacttgagttgctttttattctggcacaatgtacgtggtgagatgygtagctctttagtgcagttcagtcagttttgacagatgttgtttaaccaccaccctgtcaatacatggttgcctcccagcctccccgcagctggccaccg

SEQ ID NO: 537149 - DNA, 201 bp, Homo sapiens
gtgtgtcttgtgttgtcttcgtctgtgccgtttgtcttcgtggccatcctgcagatgagcaccgtgtccagtgccacagcacaaggcgcctccccgccccvccgccccacacctctcccctttgggctggacgggaacacacgtgtgtggctcaggaggaaaagctcagcctggactgtggcagccacggcagaaggtgga

SEQ ID NO: 537150 - DNA, 201 bp, Homo sapiens
cctgtaatcccagcactttgggaggctgaggtgggtgatcatttgaggtcaggagttcaagaccagcctggccaacatctctactaaaaatgcaaaaattrgatgagtgtggtggcacgcacctttagtcccagccacttgggaggctgaggcaggagaatcgcttgaaaccgagaggcggaggttgcagtgagccgagat

SEQ ID NO: 537151 - DNA, 201 bp, Homo sapiens
ttctctagaaaagtcacacttactgagcttgtcattatttgagttctaccaaacacttaaagaattaataccagtcctggccgggtgcagtggctcatgcytgtaatcccagcactttgggaggctgaggtgggtgatcatttgaggtcaggagttcaagaccagcctggccaacatctctactaaaaatgcaaaaattgg

SEQ ID NO: 537152 - DNA, 201 bp, Homo sapiens
gcgcgcaggtgcagcaggtggtcaacatagagtgcgtgtccgacttcacggaggcgccagtcctcaacattcagttcaggtaagagccgcctgtgcgcccygggccaaggggtgtgtgggcgcctgagctgtgtgcctgggctccatgactgtgcctccgtgtccttcctgaggggacccggggcgtgcgggtgctcacgg

SEQ ID NO: 537153 - DNA, 201 bp, Homo sapiens
tgggcaacatagggagatcccatctctacaaacagttttaaaaaattagccagttgtggtggcgtgctcctgtcgtcccagctacttggtaggctgaggcrggaggattgcttgagcccaggaagtcaaggctgcagtgagccgtgttcatgccttggagactccagcctgggcgacagagcgagaccctgtctccaaagc

SEQ ID NO: 537154 - DNA, 201 bp, Homo sapiens
aggtggtgcctggcagtggcctgggcgtgcgagcgcagggctgaaagggcagtggtgtttggcagggcgggagctccctcgtggcgtcttcctgggagccrtgggaggctgggtacatctttaaccggggtgctcagtgatgggcctggagaaaaccactgtttccctccaggtggggagggtgtcaccttcgaggatggc

SEQ ID NO: 537155 - DNA, 201 bp, Homo sapiens
acccaggaggcggaggctgcagtaagttggagattgcaccactacacaccagcctgggcaacagaataagactctgtctcaaaaaaaaaaaaaaaaaaaagaaagaaagctgggcatggtggctcatgcctgtaatcccagtactttgggaggctgagacgggcagatcatgagttcaagagctcgagaccatcctggcca

SEQ ID NO: 537156 - DNA, 201 bp, Homo sapiens
gctgacgtcggagagtagtggtggggtcctcggtctccctcttacgagccgacattagtgagtagcagtggggtcctcggtctcccttgtgtgagccgacstcggagagcagcggtggggtcctcggtctccctcgtgtgagccgacctcggagagtagcggtggggtcctcggtctccctcgtgtgagctgatgtcggcg

SEQ ID NO: 537157 - DNA, 201 bp, Homo sapiens
ttctgcctaaaagaggaggcggatcctcctcctctctgaggagtgtggcatgctgggcgccctcgtgtgtcggcatttgtagccacaagcatggaacctgrttggctcttctatgttgaaggactgctgggggcccagtcatggggtcctgaagccgcctggcaaggacagccctgctggcgcctggaacacacccctgac

SEQ ID NO: 537158 - DNA, 201 bp, Homo sapiens
gcacccagaaggggaattttttattcaaagtaattttttggaatagtatagggggagatttaggaataaaaaagccaaaaggtaaatggtacaggtagtcyctatacccttttctgccttccatgtggggcagcagattccagctgattctgttaagcgcttggagaagagactggccctttttcagctgtgcctccacag

SEQ ID NO: 537159 - DNA, 201 bp, Homo sapiens
aggagagccatggccggctcccttcccaccgtgtctgtagggacccgaagccctttgctccaggggcaagggcatgtgtggcccagcccactgttcagggyggggcgtggtggggtgagggtgggcgtggggcaggggaagatcatcaagcagatgtggagctccatggcggtgcagggccctccaagcatttctgttgtg

SEQ ID NO: 537160 - DNA, 201 bp, Homo sapiens
gctggacgggaacacacgtgtgtggctcaggaggaaaagctcagcctggactgtggcagccacggcagaaggtggatcttgggatcaatttttataaaaaycgagacagttctgtggttaaatctacaaattaaagggaaattagaagttggcgtgaacgtggcgtttgtgggagtgtcactgagatggcccgtgctgccg

SEQ ID NO: 537161 - DNA, 201 bp, Homo sapiens
tcctgtggccaggcattggctgaagccctcgggtagcacagaggctctgcagacacccccagctgagacacgtgtctcctggaaacacctatctagtatgsggagctcctgcctggtgtcccggctgcctgtgccctcatctaggctctaacgtgcagtcttactaatcctcgtgcctactccacgggccaggcccccatg

SEQ ID NO: 537162 - DNA, 201 bp, Homo sapiens
cgtgcctactccacgggccaggcccccatggtataggcatacaccaagggtggaggtttccagcgatttggtgatgtgtgttcaggtgctgtgagaggcasgtatgggggaggggctgtgctagtgtgtgagcgtcaggggcttgagggtcacagagccgtccaccgcatccagcaggggtggatgtgggcagaatgtgct

SEQ ID NO: 537163 - DNA, 201 bp, Homo sapiens
gcctactccacgggccaggcccccatggtataggcatacaccaagggtggaggtttccagcgatttggtgatgtgtgttcaggtgctgtgagaggcaggtrtgggggaggggctgtgctagtgtgtgagcgtcaggggcttgagggtcacagagccgtccaccgcatccagcaggggtggatgtgggcagaatgtgcttgt

SEQ ID NO: 537164 - DNA, 201 bp, Homo sapiens
ctacatcctgggggagtttggaaacttgatagctggagacccgagatccaggtgagaggccctttgcgagtcggggctgtgtgcgctccggcgggcctctyggtggtcggtggcaagaggcgaggcaccagctggccctgccgtgaggcctcgcagagccgcttctgctccccatcggcgtctttttgttttccttcagtt

SEQ ID NO: 537165 - DNA, 201 bp, Homo sapiens
gattaataatgcacccgagtaagttatttgctttttcatctttggaagcttactttcttattggacagttggcagtaacatgcatgatcttagttctttcttttttttttttttttttgagatggagtctcgctctgtcgcccaggctggagtgccgtggtgcgatctcggctcactgcaagctccgcctcccgggttcac

SEQ ID NO: 537166 - DNA, 201 bp, Homo sapiens
ggaaaggggctgtaggattgtcttcagtctctctttggttcttatttgatgtttctttttaatgtgggtcctgagaagtgaggtgtgcccataccccaggyctttgatcacacccaggtttgtccggctaggctcagggtggactttggagggcctggccttgactgtgtggcttagggatcagatggaagcttctggacc

SEQ ID NO: 537167 - DNA, 201 bp, Homo sapiens
gtgtagtggtgtgtgcctgtggtcccagctacttgggaggctgaggcaggagaatcacttgaacctgggaggcggaggttgcagtgagccaagatcatgcsactgcactacagcctgggcaacagagtgagactctgtaaataaataaataaacagactggcctggtggcctggtgacttaggcctataattccagcactt

SEQ ID NO: 537168 - DNA, 201 bp, Homo sapiens
ggccttggccttccaaagtggtgggattacaagcatgaaccaccatgcccggcctctcatgcttaaatgaagtagtaatacctgaccttttattttttatytatttatttttgagatggagtctcgctctgtcacccaggctggagtgcagtagcgtgatcttggctcactgcaacctccgcctcccaggttcactccatt

SEQ ID NO: 537169 - DNA, 201 bp, Homo sapiens
ttgaggacatggtgctcagtgacacgggccagacacctggacaaatcctgtgtggctccactcatgcggtccctagagcagtgacttcgtagagacagaaygtagctgggggatgccagggcctaggccagggggatggggaattggtgtttaatggggacagagttccgtttgggaagatgagaacgttctggagatggt

SEQ ID NO: 537170 - DNA, 201 bp, Homo sapiens
ccttccaaagtggtgggattacaagcatgaaccaccatgcccggcctctcatgcttaaatgaagtagtaatacctgaccttttattttttatctatttatwtttgagatggagtctcgctctgtcacccaggctggagtgcagtagcgtgatcttggctcactgcaacctccgcctcccaggttcactccattctcctgcc

SEQ ID NO: 537171 - DNA, 201 bp, Homo sapiens
cacactcccggctaattttttgtatttttattagagacggagtttcaccatgttgaccaggctggttttgaacccctgacctcaactgatctgccctcctyggcctcccaaagtgctgggattacaggcgtgagccaccgtgcctggcctgtttattgatgccttactctagaagatgagtcttttaactcttgctcaagt

SEQ ID NO: 537172 - DNA, 201 bp, Homo sapiens
ggcatgtccaggttactcattagccaccagagctcctaagttcactgcgagaattccctgatgcaagtacagtacccttagtgctgatgggctggctgcakttcagacaggaatagtgcaggatgactgtggccagcgtctctttaacaaagatcagactgtgtgtggggctgggcttgttgctgtgggtcagttactctt

SEQ ID NO: 537173 - DNA, 201 bp, Homo sapiens
gagatggagtcttgctctgttgcccaggctgtagtgcaatggcgcgatctcggctcactgcaacctccgcctcctgggttcaagcgattcttctgcctcarcttcctgagtagctgggattgcaggcgcctgccaccatgcctggctaatttttgtatttttagtagagacggggtttcaccatgctggccaggctggtct

SEQ ID NO: 537174 - DNA, 201 bp, Homo sapiens
cctgggttcaagcgattcttctgcctcaacttcctgagtagctgggattgcaggcgcctgccaccatgcctggctaatttttgtatttttagtagagacgrggtttcaccatgctggccaggctggtcttgaactcctgacctcaggtgatccgcccgcctcagcctcccaaagtgcagacgtgagtcactgtgcctggcc

SEQ ID NO: 537175 - DNA, 201 bp, Homo sapiens
tgtgcatctgatgagtcagtgaaagatggtgctcatgaacctgtgttgtgaccttacgttgcctcagacacctgatgctccgtccgtgctgtgctgtttcrttttatttttttattttattttatttttttgagatggagtctcgctctgtcacccaggctggagtgcagtggcgcgatctcggctcactgcaacctctgc

SEQ ID NO: 537176 - DNA, 201 bp, Homo sapiens
cctgaagtccccaccaaacccctatacgatactgaggttttaaagcttttgaaattatgtttatcccgttaaccccttgtagtttattttcttgtgagatrggtctccatcattcctcgcatcgattaccaaatatgttctagaacatttatgaggtaatgcttttttctccttgcaatgcatcgtcaactgtattctcaa

SEQ ID NO: 537177 - DNA, 201 bp, Homo sapiens
tcgtcatctgcccgccttggcctcctgaaatgctgggattacaggcatgagccgctgtgcccggcccaaatgtttgtatgtttttacagactccttctgtrctttctagtctgttctatgaaaatgttgatatgtttatttttagttattaggaagtaactgggcaggtcttcctaatagcgtttattcttgtgactttct

SEQ ID NO: 537178 - DNA, 201 bp, Homo sapiens
tgggttctgctcactccctgagcaggtgccgtgggtcttcctgtgaaggctgggggtacgcagtgcctcctgactccccgcagagatggaggtggtgctgrtgctgctggcctccgcctgtcacctactcttgggaggtcacaccactgttgagggccatgctgcctggagatggccgggttggccctgctgtcctggtta

SEQ ID NO: 537179 - DNA, 201 bp, Homo sapiens
ccacccgcgcgctgctcctgtccacctacatcaagttcgtgaacctcttcccggaggtgaagcccaccatccaggacgtgctgcgcagcgacagccagctsaggaacgcagacgtggagctgcagcagcgtgctgtggagtacctgcggctcagcaccgtggccagcaccgacattctggtaggaggcccccgcccttcgg

SEQ ID NO: 537180 - DNA, 201 bp, Homo sapiens
taggcatacaccaagggtggaggtttccagcgatttggtgatgtgtgttcaggtgctgtgagaggcaggtatgggggaggggctgtgctagtgtgtgagcstcaggggcttgagggtcacagagccgtccaccgcatccagcaggggtggatgtgggcagaatgtgcttgtcctgcctgaactctgctctatgaatgagag

SEQ ID NO: 537181 - DNA, 201 bp, Homo sapiens
gcagttttctttgtgggaaactttttttttttttttgagatagggtctcgctcttggtgcccaggttggagtgcagtggtacgatctcggctcaccataayctctgcctcccaggttcaagcggttctcctgcctcagcctcccgagtagctgggattaacaggcgcccgccagcacgcctggctaattttgtatttttag

SEQ ID NO: 537182 - DNA, 201 bp, Homo sapiens
ccaccatcccgtggaccgtgggaggtcatgggattttcccgctttgcagtcaaggaggccgaagctgggaaagaggaaatgccctctgacagccccaggcytgtacccagagttggcgtgttggggtcttgggcgtcagagagtgtgcgggtgaagcagctatgtgggagctgtgagtcggcagggcctggtcagggaggc

SEQ ID NO: 537183 - DNA, 201 bp, Homo sapiens
gcgtcagagagtgtgcgggtgaagcagctatgtgggagctgtgagtcggcagggcctggtcagggaggcaggccccgggctcctgctgcacatggcagccsgtcactgggctgctgagggaccggggctgcctgctttcccctgggccttctgcagacaggatctgtgcacgctctgtgggactggccgggactgctgtca

SEQ ID NO: 537184 - DNA, 201 bp, Homo sapiens
ggcctctggtgcaggccagggggtctcgccgccgtcccccccccgcgggggcgtgctgcagcctgcgaggggacgacggtgtccctgtgttgtgcctcccsgtccccagcccgctgatccagttccacctgctgcactccaagttccacctgtgcagcgtccccacccgcgcgctgctcctgtccacctacatcaagttcg

SEQ ID NO: 537185 - DNA, 201 bp, Homo sapiens
cccaaactgctggaattataggcgtgagccaccgcacccggcctctttgagatttaaatctacattttccagattatcaatgaggttgagcaactttgcaygttgattggctgtttgggtgtcttgttttgtgaagtgcctgagtcttttacccatttttaccctgggttgtccgttttttgtgttgaatatttcaccatt

SEQ ID NO: 537186 - DNA, 201 bp, Homo sapiens
aggagacatcgggctgtatgtcagtggaaatgcgaggtagtcgtgattgtcacttgttcaggaggttgacggaggatctgccaagccaaaggccgcattgracacagagatgggatgtgagtgaggtgggcagtctccctgcctccgtgagctcaccatctgggttggcctgtggtcggggggccctgtggggttgtgggg

SEQ ID NO: 537187 - DNA, 201 bp, Homo sapiens
ctgctttgtgtttgtgcctttcagccttgtctttgacagcctagagcttgcctccttgcagcaggagtccgtgacccaagtctgggctggcatcttgcagyttagggtaggagtcagggtgaacttttctgaatgggttcacttacggcctaaaagtgtcacatgtgagctttgtaggaagggaggaactaccctgacctc

SEQ ID NO: 537188 - DNA, 201 bp, Homo sapiens
ttttagtagagacggggtttcaccatgctggccaggctggtcttgaactcctgacctcaggtgatccgcccgcctcagcctcccaaagtgcagacgtgagycactgtgcctggcctctctaccttctcttgcacagacatgatgccgtgaggttgtacggccgttggtggctttccttttgagggagctggagctcagagg

SEQ ID NO: 537189 - DNA, 201 bp, Homo sapiens
ttcgagacggtttgcttcttaatttgtcttccctcctgcaggtagctggggtgcagcttgctctccttggctgagtcagttactgcttgaccattgcttgrcaatgtccaggattgtgataactctattgtccttgatgactgattgtttctacacacatgccccggcccccatttatgacttctgatatattcttgattt

SEQ ID NO: 537190 - DNA, 201 bp, Homo sapiens
agggccgggtggtgtggctgccctcgacccgtagctggtggtcctagagtgtggtgagtgtgctcgcctccacgggtcctgctggggctctagcccggccygtttccgcttctgccactgggacttgctcagctggattccttaacgcacgcacacctgaacctgcagaccaagcccgtggacccgaccgtggaggggggc

SEQ ID NO: 537191 - DNA, 201 bp, Homo sapiens
cgcccggctaatttttgtatttttagtagacatggggttttgccatgtggctaggctggtgttgaactcctgatctcaagtgatctggtggccttggcctyccaaagtggtgggattacaagcatgaaccaccatgcccggcctctcatgcttaaatgaagtagtaatacctgaccttttattttttatctatttattttt

SEQ ID NO: 537192 - DNA, 201 bp, Homo sapiens
aaatcaaatttgggcaggtggttctgagagcttgtgtggcatgtatttctcagtggaattttaaatagaatggtgactcggcatttattccttgtctgaastaagcaagtaggaaggaccttgttccccattcaagggaatgaacggtgtggtatgtactttgcaaacctacgtatgggattagtctgtagtgctctgaaa

SEQ ID NO: 537193 - DNA, 201 bp, Homo sapiens
ctggtctggagaggatgatggtgcagaggctactgggagggcagagcatccgttcgtggaggggtgggaggtaccttagcacaggctggggagcagggcaygcgaggcaggggtggaagcagacatggggaccctgccagtgaggcctgagggcccctggtgcacagccgtgagctgagggtagggctcagaggcagtaca

SEQ ID NO: 537194 - DNA, 201 bp, Homo sapiens
gtgattacgtgagtgaagaggtgtggtaccgagtcattcagatcgtcatcaaccgggacgacgtgcagggctacgcggccaagactgtgttcgaggtatgkcccgcaggatggcaggaaggatggggtggagggcagttgcagaaggtgagcagtgagtggttccagcctgcctgcgtggaggtgccgagggccgttgctg

SEQ ID NO: 537195 - DNA, 201 bp, Homo sapiens
ataactgattaggtcaggggtcgatctttaactacgaggcccagggtgtggcaccgggctgtctgcttgtggatttcatttctgccttttagtttttgctkcttctttctttggaggcagaaattgggaataagacaatgtgaggggtggtctcctcccttaatgccagcttctctgtggaaagtaggttggaggtgagtg

SEQ ID NO: 537196 - DNA, 201 bp, Homo sapiens
aaggggcgtctttgcggtgggatctggagctggaagagggtcccgaccagcggcctctggtgcaggccagggggtctcgccgccgtcccccccccgcgggrgcgtgctgcagcctgcgaggggacgacggtgtccctgtgttgtgcctccccgtccccagcccgctgatccagttccacctgctgcactccaagttccacc

SEQ ID NO: 537197 - DNA, 201 bp, Homo sapiens
tagaaaacaaacaagcagcctgtgcagtggctcacgcttgtaaccccagcatgttgggaggccgaggcaggcagatcacttgaggccaggagttcgagacyggcctggctaacatggtgaaaccctgtctctaataaaaatacaaaaattagctgggtgtagtggtgtgtgcctgtggtcccagctacttgggaggctgag

SEQ ID NO: 537198 - DNA, 201 bp, Homo sapiens
acgtgatctttaaacccctcctctccgaagcctcacagagctgctgcttgcagagtgtgggaggcgccagtggggactggagcgcggtgcgcaccccagcygagcttgtgtgtgcttctggcagagcttttagactgaagattttcccttcgtaatgccagaagcgttcctagaacttccccagctaaaacagggagacgc

SEQ ID NO: 537199 - DNA, 201 bp, Homo sapiens
agttgagcaagtgagaaacctgtttcctgtaggggtcaggggtggggacggggctcatttgaaaaggtgggttttggtctctggcctggctgagaacactygcctttgctgtttctcacagtccacagcaggaagtgcagaacatcttcaaagcaaagcacccaatggacacagaagtcaccaaagccaaggtaacacgtc

SEQ ID NO: 537200 - DNA, 201 bp, Homo sapiens
cggccccgggggacacgcagcccgcgacccagcgccagggtctggaggggcggccccgggggacacgcagcccacgacccagcgccagggtctggaggggmggccccgggggacacgctgcccgcgaccccgcgccagggtcctcattctcctgtttctttggacagatcattggatttggttctgcacttcttgaagaag

SEQ ID NO: 537201 - DNA, 201 bp, Homo sapiens
ggcgaggcgagtgccaccacgcctggataatatttgtatttttagtagagatggggtttcaccgtgttggccaggctggtcttgagctcctgacctcaggkgatccgcctgcttcggcctcccaaagtgctgggattacagcataagccaccgtgcccacgcaagtagacacttcctgagctcactgtttacatcttcaga

SEQ ID NO: 537202 - DNA, 201 bp, Homo sapiens
gtgctcccctccatcctttcagccgggcacgatgctccccccaccccgtcctttcagccgggtatggtgctcccctccgtcctttcagccaggtatggtgstcccctctgtcctttcagccgggtatggtgctcccctccatcctttcagccgggcatggtgtttccctctgtcctttcagtcgagcatggcagggcgtgt

SEQ ID NO: 537203 - DNA, 201 bp, Homo sapiens
tgcccggtgccgtgtcctggagcggtgacagggtgcccggtgccgtgtcctggagcggtgacaggctgcccggtgccgtgtcctggagcggtgacaggctrcccggtgctttggggaggactgcttgtgccctgggatctgaatctgttctcactgagggccaggaggagcggggagggaggactcgcgtgctgggcctag

SEQ ID NO: 537204 - DNA, 201 bp, Homo sapiens
gctttcgtggagcagttattgcagagcctacagttttgttagtgtttgggtctatttgtgcttttatagtatcagatttgtgcaggttttctttttgagayggagtctccctttgttgcccaggctggagtgcagtgacgcgacctcagctcactgcaacctctgcctcccgggttcaagcgattctcccacctcatcttc

SEQ ID NO: 537205 - DNA, 201 bp, Homo sapiens
gaggccgcctgactgagtgcctggagaccatcctgaacaaagcccaagaaccgcccaagtcgaagaaggtccagcactccaacgcgaagaatgccgtgctyttcgaggccatcagcttaatcattcaccatgacaggtgtgtcggctgcctgtggagaggcttcgtctcgcgcacacacacacgttccttctcgttggcac

SEQ ID NO: 537206 - DNA, 201 bp, Homo sapiens
tttgctggatgtggagccgcacttggtgggtccagggtcgcagggcagtgctggaaacgtctgtgcccatccacgaagcgcagaggcgcagggtggcggtygctccacacagcctggagggtctgcctcctctgctcccacgccttctctgctcagcagttgcggcgcaccacatgtggtctggcgtgggtcttgcgtgtg

SEQ ID NO: 537207 - DNA, 201 bp, Homo sapiens
gcaccacatgtggtctggcgtgggtcttgcgtgtggggccatgctttagggtcctgtgagaatgagatcgcagttctcaccaggctcccaataatgagggmacgtgccaggctgtgggcagacgctctctacagcttgtgaacaccacccatttgctactacagcatttttacaaatgatgaaaactcagtctgagagtca

SEQ ID NO: 537208 - DNA, 201 bp, Homo sapiens
aacgtgtctgtgcagctgcccatcactctcaacaaattcttccagccgacagaaatggcttctcaggatttctttcaacgttggaagcagttgagcaagtragaaacctgtttcctgtaggggtcaggggtggggacggggctcatttgaaaaggtgggttttggtctctggcctggctgagaacacttgcctttgctgtt

SEQ ID NO: 537209 - DNA, 201 bp, Homo sapiens
ttaactacgaggcccagggtgtggcaccgggctgtctgcttgtggatttcatttctgccttttagtttttgcttcttctttctttggaggcagaaattggsaataagacaatgtgaggggtggtctcctcccttaatgccagcttctctgtggaaagtaggttggaggtgagtggaaggtgaaagctgcgaagagtcccaa

SEQ ID NO: 537210 - DNA, 201 bp, Homo sapiens
tgtttctcacagtccacagcaggaagtgcagaacatcttcaaagcaaagcacccaatggacacagaagtcaccaaagccaaggtaacacgtctggagggayggccccgggggacacgcagcccgtgaccccgcgccagggtctggagggacggccccggggaacacgcagcccatgaccccgcgccagggtctggagggac

SEQ ID NO: 537211 - DNA, 201 bp, Homo sapiens
tgcccccctggcctgtcccgggggccactgtccctgctggacgccccgttgtcctgtcccgggggccactgtccctgctggacgcccccctggcctgtccygggggccactgtccctgctgcacaccctgctggcctgtcccgggggccactgtccctgctggacgcccccctggcctgtcccgggggccactgtccctgc

SEQ ID NO: 537212 - DNA, 201 bp, Homo sapiens
caggaagtgcagaacatcttcaaagcaaagcacccaatggacacagaagtcaccaaagccaaggtaacacgtctggagggacggccccgggggacacgcakcccgtgaccccgcgccagggtctggagggacggccccggggaacacgcagcccatgaccccgcgccagggtctggagggacggccccgggggacacgcag

SEQ ID NO: 537213 - DNA, 201 bp, Homo sapiens
ccaggcacttcccaggattctgggactatggcagggaaaaaacaactccgtgttcacatggagcttgcattctagtggacagagatcgaaaagaaaaacakagtttagtgggatgttagaagatgataaacacaacagagaaatatcattctagtggatagagatcgaaaataaacacgaaatttggtgagatgttagaag

SEQ ID NO: 537214 - DNA, 201 bp, Homo sapiens
tggagagtgtagagccagcagtgcctctggctggtgaccagatggctggtggccagtcagggcactgtcccttttcccaactttcaggtcaagagaaggcstggaggctctggttcctgactcactctccagtttatcttattctacttgatattttgttataaaaaaataccaggccaggcgtggtggctcacgcctgta

SEQ ID NO: 537215 - DNA, 201 bp, Homo sapiens
ctcagagattatgtgaattgctctcagcgcagttttagtcctgaggatggaagaccaggctcgtgtgtcttgtgttgtcttcgtctgtgccgtttgtcttygtggccatcctgcagatgagcaccgtgtccagtgccacagcacaaggcgcctccccgccccgccgccccacacctctcccctttgggctggacgggaaca

SEQ ID NO: 537216 - DNA, 201 bp, Homo sapiens
ctccgagttgtgatggttttgtgttcatctctgtgcttggcttcaggatactccccatttacctttcttctcacccaccctaagctttggtgtctgtctaygggtttgcttagaagtgtagagaccaacagccaacatggggtgcctggcttttgtttttgcgttgtggggtgtttttcttacctttaaaatccctctgat

SEQ ID NO: 537217 - DNA, 201 bp, Homo sapiens
atgcttctgtattcagacatgactttctgccagctttgcacgctttttcctgaaacattgttggcagaggggaacttgtatcttctgttcagttgattctygattttaaacgtttgttgccttttggagcctgcacttccccttacctggtgattggagtgtgggaatggttgggggtatcaaggcttcagcaggctggga

SEQ ID NO: 537218 - DNA, 201 bp, Homo sapiens
tgctgccccctaggcggcctcggcaggcggccctgagtgctgtcttggcccctgcgccagccccacccccgcgtctcctgctggctctgggggggtgctcygtgcagctctgcgctgtcttcagcctgttgcgagtgactcttgacgtctgtctttcagagacactatggacagcgtgaagcagagcgcggccctgtgctt

SEQ ID NO: 537219 - DNA, 201 bp, Homo sapiens
gaagggggataagcggagcatggaacacgtctgtgccctggacaagcatgttggcagcagagcaggagagccatggccggctcccttcccaccgtgtctgyagggacccgaagccctttgctccaggggcaagggcatgtgtggcccagcccactgttcagggcggggcgtggtggggtgagggtgggcgtggggcagggg

SEQ ID NO: 537220 - DNA, 201 bp, Homo sapiens
agttcaagaccatcctgggcaacgtggtgaaaccctaaaaatctctactaaaagtacaaaaaattagccgtgtgtggttgcacatgcctgtggtcccagcyacttgggaggctgaggtgggaggatcacttgagcctaggaggttgaggctgcagtgagctgtggtcatgccactgcactccagtctgggtggcagaggga

SEQ ID NO: 537221 - DNA, 201 bp, Homo sapiens
cacccacctcaagtgaatcctcccaaaagtgctgggattacaggcgtaagccactgcacctgactgggaatttcttatgactgatcatctccaggagtttyccaggttgtgcacattaatttgctaaataggccaggcgcggtggctcgtgcctataatcctagcactttgggaggccgaggcaggcagatcacttaagct

SEQ ID NO: 537222 - DNA, 201 bp, Homo sapiens
gtccctgttgccttcccagctgcttagcagaatctggtggcaggagggcgaagggggataagcggagcatggaacacgtctgtgccctggacaagcatgtyggcagcagagcaggagagccatggccggctcccttcccaccgtgtctgtagggacccgaagccctttgctccaggggcaagggcatgtgtggcccagccc

SEQ ID NO: 537223 - DNA, 201 bp, Homo sapiens
tctttcttttttaaagagacagggtcttgttctgttgcccaggctggagtgctgtggcatgatcctaactcactgcagccttgacttcctgggctcaggtsatcctcctgcttccacctcccgagtggctagggctacaggtgtgcaccaccacgcccagcaaattgtaaaacttgtagagatggggtctcgctgtgtttc

SEQ ID NO: 537224 - DNA, 201 bp, Homo sapiens
gtgccctgggatctgaatctgttctcactgagggccaggaggagcggggagggaggactcgcgtgctgggcctagtggcctcatccagcctatggtggttsagtgactgccagggccactttccaaaaaggagaatggaaaaggacttctccagttgctcttttctatagtctcacttctgggttgtaaagattcagatca

SEQ ID NO: 537225 - DNA, 201 bp, Homo sapiens
gcacccaccaccaagcctggctaatttttgtatttttagcagagatgaggtttcaccatgttggccaggctggtcttgaactcctgacctcaagcaatctwcctgctttggcctcccaaactgctggaattataggcgtgagccaccgcacccggcctctttgagatttaaatctacattttccagattatcaatgaggtt

SEQ ID NO: 537226 - DNA, 201 bp, Homo sapiens
aattttccagagagatttgtttaaaccctgaactgaaatgttttttctcatgtattttttgatgactttaaaaaataatttcagcctttattttagattcygggggtaaatgtgcaggtttgttatgtgggcatattgtgtgacaccaaggcagtttatcatggtggatgataaaaggggactcccttaggtcgagtgttg

SEQ ID NO: 537227 - DNA, 201 bp, Homo sapiens
ctggacgggaacacacgtgtgtggctcaggaggaaaagctcagcctggactgtggcagccacggcagaaggtggatcttgggatcaatttttataaaaatygagacagttctgtggttaaatctacaaattaaagggaaattagaagttggcgtgaacgtggcgtttgtgggagtgtcactgagatggcccgtgctgccgc

SEQ ID NO: 537228 - DNA, 201 bp, Homo sapiens
tggcacatgaaacaaaaccatttttccagctcaggcgtgacccgaggagtgagtatggcttttctttgggtccccgcagtaggggctcgtgtccggcagcrtgtctcattgcctgtgctgtcttacagatcgtgacgtctgcatccacagatctccaggattacacttactattttgtcccggctccctggctgtctgtca

SEQ ID NO: 537229 - DNA, 201 bp, Homo sapiens
ctgtaatcccagtactttgggaggctgagacgggcagatcatgagttcaagagctcgagaccatcctggccaacatggtgaaaccccgtctctactaaaamcagaaaaattagctgggcatggtggcgccctcctgtagtcccagttactcaggaggctgaggcaggagaatcgcttgaacccgggaggcggaggttgcag

SEQ ID NO: 537230 - DNA, 201 bp, Homo sapiens
cgggggacacgcagcccgcgacccagcgccagggtctggaggggcggccccgggggacacgcagcccacgacccagcgccagggtctggaggggaggcccygggggacacgctgcccgcgaccccgcgccagggtcctcattctcctgtttctttggacagatcattggatttggttctgcacttcttgaagaagttgatc

SEQ ID NO: 537231 - DNA, 201 bp, Homo sapiens
taaaaccagaaaaattagctgggcatggtggcgccctcctgtagtcccagttactcaggaggctgaggcaggagaatcgcttgaacccgggaggcggaggytgcagtgagccgagattgctccactgtactccagcctggcgaaagagcgagactctgtctcaaaaacaaaaacaaaaacatgctcgggaaggaggtgctg

SEQ ID NO: 537232 - DNA, 201 bp, Homo sapiens
atggctatgaagtggcagataatttagactgtgttcatatgcctaaattaaactgatttcaaagacaagcttgatggttgaaggcagggtttgcaagttcyatcacagcagggccctctgtgggattttggctggtcggagtgaggccctgtgagggccagctgggctgcacctgcccagggttgtcgtgggagggtagaa

SEQ ID NO: 537233 - DNA, 201 bp, Homo sapiens
ctacccacagctgacgtgagccacgtgggtctgctgcagatggagacgcgtgcccagtccttgttagcacctgctgccaacaccctgcgggcccccttccygcccaagctgggtgttcttcaggaagccctgatgccctcacagggttcctcctcctgcatgcggttttcctgatgaggtggccatgccttttcctccttt

SEQ ID NO: 537234 - DNA, 201 bp, Homo sapiens
cagctgacgtgagccacgtgggtctgctgcagatggagacgcgtgcccagtccttgttagcacctgctgccaacaccctgcgggcccccttcccgcccaakctgggtgttcttcaggaagccctgatgccctcacagggttcctcctcctgcatgcggttttcctgatgaggtggccatgccttttcctcctttcttcgca

SEQ ID NO: 537235 - DNA, 201 bp, Homo sapiens
caagctgggtgttcttcaggaagccctgatgccctcacagggttcctcctcctgcatgcggttttcctgatgaggtggccatgccttttcctcctttcttygcaacctcccttacggcgagtttcaggactgcccggttggtctggagagtgccgcacgcggcccagcgtttgatgtggttggtgctctgtgcccatgagg

SEQ ID NO: 537236 - DNA, 201 bp, Homo sapiens
tgggcgctgcctgccctgtctccatacggctgtgctgggagctgcacatggcccttgtgcacgcctcacattgggtggcgctgtctgcagctggccaggcytcggggctcttgtgcatgcggccgtcttggctttgatctggctacagagggtcatcaggtgtctgcgtgtgtttggtgtaggatggaggcacagagtgcc

SEQ ID NO: 537237 - DNA, 201 bp, Homo sapiens
ctggattgttttaagttaaggtgctagttggctgggcgcggtggctcacacctgtaatcccagcgctttgggaggccgaggtgggcggatcacttgaggtygggagttcgagaccagcctggtcaacatggcaaaaccccatctctactaaaaatacaaaaattagttgggcatggtggcgtacttggagacaggccagat

SEQ ID NO: 537238 - DNA, 201 bp, Homo sapiens
ggaatggccttttggccccccattttgaagactgtaatagagttctggtgtttttcagttctttgtattcatgttgcacgtgagttctgtttcctgttacrtgttgggaaaggacttaggagaggcaggccggcgtggtggtgggtgcaggtcgccgcttgggctgaaaacagtcttactgctcttagagtcgctgtgttt

SEQ ID NO: 537239 - DNA, 201 bp, Homo sapiens
tttgggaggccgaggtgggcggatcacttgaggtcgggagttcgagaccagcctggtcaacatggcaaaaccccatctctactaaaaatacaaaaattagytgggcatggtggcgtacttggagacaggccagatgtagtggctcacgccgcctgtaatcccagcgcttttgggagaccaaggtgggagggtttcttaaag

SEQ ID NO: 537240 - DNA, 201 bp, Homo sapiens
cccaagaggcggagcttgcagtgagccgagatcgcgccactgcactccagcgtgggcgacagagcgagactccgtctcaaaaaaaaaaaaaaatttcagarttggaagagcccagttgaggttggccattgccagcctttgcgagtctccagagcgaccccgagggttcgttccacataggggaccctgcggtgtgtccac

SEQ ID NO: 537241 - DNA, 201 bp, Homo sapiens
cgcctgtaatcccagcgcttttgggagaccaaggtgggagggtttcttaaagccaggagttcgagagcctgggcaacaaaagtgagacccccgtctctacaaaaaaaattagccaggcccagagatgtgcccttatagtcccagttacttgggagactgagacaggaggattgtttagcctgggagtttgaggtgcaatga

SEQ ID NO: 537242 - DNA, 201 bp, Homo sapiens
gtcaacatagagtgcgtgtccgacttcacggaggcgccagtcctcaacattcagttcaggtaagagccgcctgtgcgccccgggccaaggggtgtgtgggygcctgagctgtgtgcctgggctccatgactgtgcctccgtgtccttcctgaggggacccggggcgtgcgggtgctcacggtgcatggatgcggcctgagc

SEQ ID NO: 537243 - DNA, 201 bp, Homo sapiens
cacgtctgcgtgcagctcacagatattccgggtggtgtgcaaggggctcgtggtgggcatttggtattctggattcttcttggtcctggttttggtgtttrttttagtcaatccctattgtcagaagggctggacactcatttgcacacggccagtgctagcgctggtggtgcccactctcctgcctttgttgggagcaga

SEQ ID NO: 537244 - DNA, 201 bp, Homo sapiens
ctattgtcagaagggctggacactcatttgcacacggccagtgctagcgctggtggtgcccactctcctgcctttgttgggagcagagctcgggctttctsgtgctgcagagcctcctgggggcccatcagcacgggctctggggtggggcgtgaggacctgccttggggcagctccgtgtccgaggcagtggggtctttg

SEQ ID NO: 537245 - DNA, 201 bp, Homo sapiens
tcggatcacttgaggtcaggagttctagaccagtctggccaatttggtgaaaccccgtctctacgaaaaatataaaaattacccaagtgtggtggtgcacrctggtaatcccagctacttgggaggctgaggcaggagaatctcttgaacccaggaggtagaggttgcagtgagccaagatcgcaccattgcattcaaacc

SEQ ID NO: 537246 - DNA, 201 bp, Homo sapiens
tgtaccggctcacgctgcgcacaagtaaggaagccgtttctcagagattatgtgaattgctctcagcgcagttttagtcctgaggatggaagaccaggctygtgtgtcttgtgttgtcttcgtctgtgccgtttgtcttcgtggccatcctgcagatgagcaccgtgtccagtgccacagcacaaggcgcctccccgcccc

SEQ ID NO: 537247 - DNA, 201 bp, Homo sapiens
ctgagtgctgtcttggcccctgcgccagccccacccccgcgtctcctgctggctctgggggggtgctctgtgcagctctgcgctgtcttcagcctgttgcsagtgactcttgacgtctgtctttcagagacactatggacagcgtgaagcagagcgcggccctgtgcttgctgcgcctgtacaggacgtcccccgatcttg

SEQ ID NO: 537248 - DNA, 201 bp, Homo sapiens
gaagacaccatggtgcgccttctcgggatgcccaggagaggctgtcacaggggctgctgtggctgcgtgctgaggccacgggggcccttcctggggctggrtgagtaagactccgcctctgctcatcctgtggccaggcattggctgaagccctcgggtagcacagaggctctgcagacacccccagctgagacacgtgtc

SEQ ID NO: 537249 - DNA, 201 bp, Homo sapiens
ggacctggagctagtgaggcagtggccacgtagaagttagtggggagggcgtcttggcagagggagtggtaagtgcagaggcctttgtcggggaggatgamtgctgcacagaagaaacagcaggaggcgcatgtggctttaggacagcaatcctgggtggaaaggcagtagggggttaggttggggggaatgaaggtgggg

SEQ ID NO: 537250 - DNA, 201 bp, Homo sapiens
gctagtgaggcagtggccacgtagaagttagtggggagggcgtcttggcagagggagtggtaagtgcagaggcctttgtcggggaggatgaatgctgcacrgaagaaacagcaggaggcgcatgtggctttaggacagcaatcctgggtggaaaggcagtagggggttaggttggggggaatgaaggtgggggacaggtgg

SEQ ID NO: 537251 - DNA, 201 bp, Homo sapiens
ccgcctcggcctctcaaagtgctgggattacaggcatgagctaatgcatccagcctcactttctgttttgctggtagaatagtcattttgaggccaggcayggtggctgaggtctgtaatcccagcactttgggaggccaaaactggaggatctcttgagttcaggagttcaagaccagtgtgggcaacttagtgagacct

SEQ ID NO: 537252 - DNA, 201 bp, Homo sapiens
cagaggcatgcatgctaaacattcttcattcgtgacagctttgagtctgcatcagaaatgccacttagccggaatggtggagtgaggcctctgtaatccartcctccataaaagcagtgaaaacactggcaaaaatggtcaaaatcaactgtcagaacgcgaaattaaccaacggttgcgacactctgaggagcttttatc

SEQ ID NO: 537253 - DNA, 201 bp, Homo sapiens
gcgaaattaaccaacggttgcgacactctgaggagcttttatctgtgaacaactgtggcacctctaactcaacctcctcccattctcttctccccagctcygtggtaaccatggaaaccagctgccttataaccatggtagctgggaaagccagcagcctagcagctactggaggggacacatgaaggctggagctcctca

SEQ ID NO: 537254 - DNA, 201 bp, Homo sapiens
ggagagtagtggtggggtcctcggtctccctcttacgagccgacattagtgagtagcagtggggtcctcggtctcccttgtgtgagccgacgtcggagagyagcggtggggtcctcggtctccctcgtgtgagccgacctcggagagtagcggtggggtcctcggtctccctcgtgtgagctgatgtcggcgagtagctgt

SEQ ID NO: 537255 - DNA, 201 bp, Homo sapiens
cctatggggagacactcctggcgaagttttcttgctcagggtcttctgtatgggccgtgaaggggcctcagggtggcatcagcacatgtgcctttcccacragagacagtggctttatcttggtgtcacattggccaaaatgtcttttatttaacatcatagatgaggccaggacattttacttcttccgagcatcctctt

SEQ ID NO: 537256 - DNA, 201 bp, Homo sapiens
aggagcctggggcccttgtaggcaaaaccttcacccctcaagttgtcctgctattggagggaggaggtgaactggtgtggcccaggagccaggcctgctcyctgaggagggtctcccaggcctgagaggataaggaagatgaagaacctgaagtgggtgttaggaccctactgtcctggggccttgcatctggcctcgctg

SEQ ID NO: 537257 - DNA, 201 bp, Homo sapiens
ggtggctcacacctgtaatcccagcactttgggaggctgaggtgggcggatcacttgaggtcaggagtttgagaccagcctggccaacatggtgaaacccygtctcttctaaaaatacaaaaattagccaggtgtggtggtgtgtgcctgtaatcccagctgctcgggaagctgaggcaggagaattgcttgaacccagaa

SEQ ID NO: 537258 - DNA, 201 bp, Homo sapiens
agccaccgtgccaggctgggtgtcctttttatagggagcatctgagtccctctggtgcacaggctgctgtggggcaggacccgtggagcccagagcaggtmtgagctcccaaagtcaggctgctggggcattgctggggagcctgctgccctgttggatgggtgagcatgcgatggactgagctgctgcttgtgccctgtt

SEQ ID NO: 537259 - DNA, 201 bp, Homo sapiens
ggccatgctttagggtcctgtgagaatgagatcgcagttctcaccaggctcccaataatgagggcacgtgccaggctgtgggcagacgctctctacagctwgtgaacaccacccatttgctactacagcatttttacaaatgatgaaaactcagtctgagagtcacacttcagaactgagagttattaaaactgaaatttc

SEQ ID NO: 537260 - DNA, 201 bp, Homo sapiens
gcagagagcaggggccaggaggcggctctcacgctggactgtccaccctccaggacagtgggcctgggaagttgagggggacagggacggggtgggctgaytcccggcaggaggccccaagggcaggcaccgtggtgtagggcagggctgtctgtagaggggccaggcaggtgctcgttgactgtagccagtggtccctct

SEQ ID NO: 537261 - DNA, 201 bp, Homo sapiens
gccgggcatggtgctcccctccatcctttcagccgggcacgatgctccccccaccccgtcctttcagccgggtatggtgctcccctccgtcctttcagccrggtatggtggtcccctctgtcctttcagccgggtatggtgctcccctccatcctttcagccgggcatggtgtttccctctgtcctttcagtcgagcatgg

SEQ ID NO: 537262 - DNA, 201 bp, Homo sapiens
cgggtggatcacgaagtcaggagatggagaccagcctggccaacatggtgaaaccccatctctactaaaaatacaaaaattagctgggtgtggtggcatgygcctatagtcccagctactcaggaggctgaggcaggagaagtgctagaacccgggaggcggtgttggcagtgagccgagatcacgccactgcactccagc

SEQ ID NO: 537263 - DNA, 201 bp, Homo sapiens
ccccatctctactaaaaatacaaaaattagctgggtgtggtggcatgtgcctatagtcccagctactcaggaggctgaggcaggagaagtgctagaacccrggaggcggtgttggcagtgagccgagatcacgccactgcactccagcctgggtgacagagagagactgtctcaaaaaagaaaaaaaaaaaaaacaggttt

SEQ ID NO: 537264 - DNA, 201 bp, Homo sapiens
tcaggaggctgaggcaggagaagtgctagaacccgggaggcggtgttggcagtgagccgagatcacgccactgcactccagcctgggtgacagagagagaytgtctcaaaaaagaaaaaaaaaaaaaacaggtttatacaccagattcgagtgagaattgtcccaggaatgcaaggttggcttaacatctgaaaatcaatc

SEQ ID NO: 537265 - DNA, 201 bp, Homo sapiens
ttatacaccagattcgagtgagaattgtcccaggaatgcaaggttggcttaacatctgaaaatcaatccatgtaatacttcatattaataccataaaggaygaaaaaatgcctggtcatctccatagatgcaaaaaagaacaggattggaggattcacatgctgattccaaaacttaatacgcaaatgattaagatagtat

SEQ ID NO: 537266 - DNA, 201 bp, Homo sapiens
actcaacctcctcccattctcttctccccagctccgtggtaaccatggaaaccagctgccttataaccatggtagctgggaaagccagcagcctagcagcyactggaggggacacatgaaggctggagctcctcagcaagtcccggctgcagagcatgtcactctcggacctgtcccacttactgagcttgccatcgtatg

SEQ ID NO: 537267 - DNA, 201 bp, Homo sapiens
ttggtaagcacccttggctttggttctccccgctcccccaggtgacctttgggatggccgttgtgaagacaccatggtgcgccttctcgggatgcccaggwgaggctgtcacaggggctgctgtggctgcgtgctgaggccacgggggcccttcctggggctggatgagtaagactccgcctctgctcatcctgtggccag

SEQ ID NO: 537268 - DNA, 201 bp, Homo sapiens
gccatcgtatgagctagctcagtgtgaaaaccctgtttctgaaagagagactgtcagttgagaattctgtgtccagtaaaactgtcctttgaaaatagagraattggctgggtgtggtggctcatgcctgtaatcccagcactttgggaggccaaggtgggtggatcatctgaggtcgggagttcgagaccagcctggcca

SEQ ID NO: 537269 - DNA, 201 bp, Homo sapiens
gctggaaaaagaaaatctgcatgtgccatctgggagaacattgtaggtttctcggagtaggcctgaggccgaggtggctgtgggctgccactgtgctgctrgttggtttaaggttttctttggaagatgagtgaacacaagtggttagcttcaagtgttctgactcttgtgtgtgtgttttctttcagggtgtggtaactg

SEQ ID NO: 537270 - DNA, 201 bp, Homo sapiens
tgtgtgctgcgcctgcaggctgcgtgtgctgccgtggatctcctgcatcccttgacccctcccgccatcagaggaaaggctgctccccgaggcaccgcttccctgtgcggcgctgcagaggggccctcagtgtggcactcctcgtcaaagaaaaataaaggctagaactgcaccccggatcacgcgctttctttgggggga

SEQ ID NO: 537271 - DNA, 201 bp, Homo sapiens
gtaagtgcacttttgtaacttttagtctcctgtctttttttcttttcttttttttttttttttgagacggagtctccctctgtcgccaaggctagagtgcrgtggcgccgatctcggctcactgcagcccccacctcccggactcaggtgattctcctgccttagccttttgagtagctgggattacagactcccgccacc

SEQ ID NO: 537272 - DNA, 201 bp, Homo sapiens
gggggtaccaagcagtgtcagacactcttggcacatgaaacaaaaccatttttccagctcaggcgtgacccgaggagtgagtatggcttttctttgggtcsccgcagtaggggctcgtgtccggcagcgtgtctcattgcctgtgctgtcttacagatcgtgacgtctgcatccacagatctccaggattacacttactat

SEQ ID NO: 537273 - DNA, 201 bp, Homo sapiens
tgaagcccaccatccaggacgtgctgcgcagcgacagccagctcaggaacgcagacgtggagctgcagcagcgtgctgtggagtacctgcggctcagcacygtggccagcaccgacattctggtaggaggcccccgcccttcgggctggcttggctgagggttggaggccaggagctctgaccagtcccaccctgtgttct

SEQ ID NO: 537274 - DNA, 201 bp, Homo sapiens
agtggcgcgatctcagctcactgcaacctctgcctctgggttcaagtgattctcctgcctcagcctctgaagtagctgggattacaggcgcccgccactaygcctgcctaatttttggatcttgagtagagacggggtttcactatattggccaggctggtctcgaactcccgaccttaggtgatccgcccgcttcggcct

SEQ ID NO: 537275 - DNA, 201 bp, Homo sapiens; identical to SEQ ID NO: 500296

SEQ ID NO: 537276 - DNA, 201 bp, Homo sapiens; identical to SEQ ID NO: 500297

SEQ ID NO: 537277 - DNA, 201 bp, Homo sapiens; identical to SEQ ID NO: 500298

SEQ ID NO: 537278 - DNA, 201 bp, Homo sapiens; identical to SEQ ID NO: 350057

SEQ ID NO: 537279 - DNA, 201 bp, Homo sapiens; identical to SEQ ID NO: 500300

SEQ ID NO: 537280 - DNA, 201 bp, Homo sapiens; identical to SEQ ID NO: 500301

SEQ ID NO: 537281 - DNA, 201 bp, Homo sapiens; identical to SEQ ID NO: 500302

SEQ ID NO: 537282 - DNA, 201 bp, Homo sapiens; identical to SEQ ID NO: 500303

SEQ ID NO: 537283 - DNA, 201 bp, Homo sapiens; identical to SEQ ID NO: 500304

SEQ ID NO: 537284 - DNA, 201 bp, Homo sapiens; identical to SEQ ID NO: 500305

SEQ ID NO: 537285 - DNA, 201 bp, Homo sapiens; identical to SEQ ID NO: 500306

SEQ ID NO: 537286 - DNA, 201 bp, Homo sapiens; identical to SEQ ID NO: 500307

SEQ ID NO: 537287 - DNA, 201 bp, Homo sapiens; identical to SEQ ID NO: 500308

SEQ ID NO: 537288 - DNA, 201 bp, Homo sapiens; identical to SEQ ID NO: 500309

SEQ ID NO: 537289 - DNA, 201 bp, Homo sapiens; identical to SEQ ID NO: 500310

SEQ ID NO: 537290 - DNA, 201 bp, Homo sapiens; identical to SEQ ID NO: 350061

SEQ ID NO: 537291 - DNA, 201 bp, Homo sapiens
tgtgaagttcccctcaggcctccttgtcagccaggacctgggctgctgtgggggacatgggaggggctgcttgagccagggccggctcggctctgtaccckccacaggcactcggccctgatgccctcgtgtccacttgtgtccacacaggccctgggaggagcggggacactgaggacctctctccaaattggcctctca

SEQ ID NO: 537292 - DNA, 201 bp, Homo sapiens; identical to SEQ ID NO: 350113

SEQ ID NO: 537293 - DNA, 201 bp, Homo sapiens
gggggatgggacaggggcctgcctgcctgtgggatgcctgctgagccacgcctcctggcaggtggactggcctctcaacattgtcatcaccgagggctgcstgagcaagtacagcggcgtcttctccttcctgctgcagctgaagctcatgatgtgggcgctcaaggacgtctgcttccacctcaagcgcacaggtgaggc

SEQ ID NO: 537294 - DNA, 201 bp, Homo sapiens
ccaggaggctctgcacaactgcagcaacgagcactaccctgtactgctgtccctgctgaagaccagctgcgagccctacacccggtgggcagtgggctggkcaggcgcggcgggcgcgcactcccaccaggcagacacttgagagcggtcccttgtcagacacctgctgaatgtgggggtcacacaggaaggggagggcag

SEQ ID NO: 537295 - DNA, 201 bp, Homo sapiens
ctgagtgcactgagtggtgagtggccccaagtcctcccttctgcagttccggggggccttgctggggcctccttgtgacagtgcgccccttactgtcccartgtagaccggcagatgtcagaacggatggccttggatgcccggaagcgtgagcagtttcagaggctgaaagaacaatttgtgaaggaccaggaggtgggt

SEQ ID NO: 537296 - DNA, 201 bp, Homo sapiens
ggctgtgaagggtgcgagttgtggcagatgcttggtaccactgtgtggatgggaggggctctcaggtgcagcccccagaagtgggaggatcagggtgattygtgtgttggccagatcctgggagggagggcctgctgggtgtgggtacttcagtggggtgtgtgtggacagcgcaggggcacagggctgcacacgagtcct

SEQ ID NO: 537297 - DNA, 201 bp, Homo sapiens
agaggcgaccttccaggctgaggagcagagtgtggcagcgctgaggagacccaagggctgagacactgtggggcaggggagctgggctgtgaagggtgcgrgttgtggcagatgcttggtaccactgtgtggatgggaggggctctcaggtgcagcccccagaagtgggaggatcagggtgattcgtgtgttggccagatc

SEQ ID NO: 537298 - DNA, 201 bp, Homo sapiens
ccaacgccagcatcagggttggggagaacgtgtcggacgtggctcccacccggccacggtggaacacccatggacacgtgtccgatgccagcatcagcttrggggagtctgtgtcagacatggctcccgcccggccacggtggaacacccatggacacgtgtctgatgccagcatcagcttgggggagtctgtgtcagaca

SEQ ID NO: 537299 - DNA, 201 bp, Homo sapiens
tgaggccagcaagcggaggtgctgggagcgagttggctggtgtgtgcccttctttgccttggcatgcagtgcccctacccctgcatgagcgtggccttggrtggggtgtgtggggggcgttgtgtactcaggggtccaggcagttgtgatgggttagtaacctaagctagtgtccaaaattgactgagtcctgggagttaa

SEQ ID NO: 537300 - DNA, 201 bp, Homo sapiens
aggtggcgtggggttgggtgcaagggtggagggagacggcaccttactgggggtctgggtgcctggcctctgtgaccagtgtcctctgcccctgtgcagcyggcccaggcctttgtggtgaagcggggcgtccacgtgtcaggagcgtctcccgagagcatcagcagcctgctctcggaagtggccgagtatgggacctgc

SEQ ID NO: 537301 - DNA, 201 bp, Homo sapiens
aacctctccctcgctctcaagtacctgcccgaggtgtttgcccccaacgccccggatgtgctgagctgcctggagctcaggtacaaggtcagcagcagccytggccgcgggggatgggacaggggcctgcctgcctgtgggatgcctgctgagccacgcctcctggcaggtggactggcctctcaacattgtcatcaccga

SEQ ID NO: 537302 - DNA, 201 bp, Homo sapiens
gagcaggcctacctggcaggcctggcagggcagtaccacttggagcggtacccggacagttacgagtccatgtgtgagtgcagcagttgctgctggcaggragccctgggctggctggttcccagcacgtgctccacctcctgtgggttggggcggagccctgggctagccagttcccagcacgtgctccatctcctgtgg

SEQ ID NO: 537303 - DNA, 201 bp, Homo sapiens
tgttgccgtggacgggggtgtggatgctgctgtggacaggcatgtggatgttgccgtggacaggcatgtggataggcatgtggatgttgccatggacaggsatgtggataggcatgtggatgttgccgtggacaggcatgtggataggcatgtggatgttgccgtggacagggatgtggatgctgccatggacaggagtgt

SEQ ID NO: 537304 - DNA, 201 bp, Homo sapiens
tccctcgctctcaagtacctgcccgaggtgtttgcccccaacgccccggatgtgctgagctgcctggagctcaggtacaaggtcagcagcagccctggccrcgggggatgggacaggggcctgcctgcctgtgggatgcctgctgagccacgcctcctggcaggtggactggcctctcaacattgtcatcaccgagggctg

SEQ ID NO: 537305 - DNA, 201 bp, Homo sapiens
ggtggcagctgattgcggggcaggggtccgtgcctgtgggcctgggttcagggccatggccatgccggccaccgtggtgttcaccctaccttagataagtygtactggacacatggctacgtgctcatctccaaagaggtggaggactgtgttcccgtgtttctgaagcacattgcccacgacatatacgtctgcggaaag

SEQ ID NO: 537306 - DNA, 201 bp, Homo sapiens
tgcccctgcccctgcgccagtctgcccacccagcccgtcctggcccgccctgactccagctccctcctgccagcatctccttggtgaacaaggccgctgtygactacttcttcgtggagctgcacctggaggcgcactatgaggcactgcggcacttcctgctgatggaggacggcgagttcgcccagtccctcagcgacc

SEQ ID NO: 537307 - DNA, 201 bp, Homo sapiens
ctcccccagctcgggctgcggggaggggagcatcagcgtgggggagaacgtgtcagacgtggctcccacccaaccatggtggcccaacaccccgggagacwgtgtctctgaagaactaggtcagagtagggtggctggtggtcaggagtgggactgtgggacgcacagagcctgggaggtaggcgggcagtggggttggtg

SEQ ID NO: 537308 - DNA, 201 bp, Homo sapiens
ttggagctgggcaaacgcccggagagctgctcaacccgctggtgctgaactctgtgctgagcaaggccctgcagtgcagcctgcatggggacaccccgcaygcctccaacctctccctcgctctcaagtacctgcccgaggtgtttgcccccaacgccccggatgtgctgagctgcctggagctcaggtacaaggtcagca

SEQ ID NO: 537309 - DNA, 201 bp, Homo sapiens
tacccacgggcacgtgtccaacgccagcatcagggttggggagaacgtgtcggacgtggctcccacccggccacggtggaacacccatggacacgtgtccratgccagcatcagcttgggggagtctgtgtcagacatggctcccgcccggccacggtggaacacccatggacacgtgtctgatgccagcatcagcttggg

SEQ ID NO: 537310 - DNA, 201 bp, Homo sapiens
ggattacaggcgtgagccactgcgcccggccaggatgctttgattaccagttgtctttctcaggaattacgtatggaaattgcaaaacaagaattaatcgytcatgcccgggaagcagcatccagggtcctgagtgcactgagtggtgagtggccccaagtcctcccttctgcagttccggggggccttgctggggcctcc

SEQ ID NO: 537311 - DNA, 201 bp, Homo sapiens
gtgtggctcacagaggcccattgcttggaaatggagcccagagctgaggcaagaaacaaagcgctgttcccagcactggtgcccctcaggccctgggcacrgctgcgtccatgtgcctggccgccctcctcccagcctctttgcccacaggccttcaccagtggcctgaggaggtacctgcagtattaccgggcctgcgtc

SEQ ID NO: 537312 - DNA, 201 bp, Homo sapiens; identical to SEQ ID NO: 350123

SEQ ID NO: 537313 - DNA, 201 bp, Homo sapiens
ggcactgcggcacttcctgctgatggaggacggcgagttcgcccagtccctcagcgacctgctctttgagaaggtggcctccggacacggggtggggccaktggtagaggggaggccgtgggaaaagagagactggctgcacgcccacagccccctgctgctctggcacagccccatggggtgccggcgagtgccaggcat

SEQ ID NO: 537314 - DNA, 201 bp, Homo sapiens
ctgggcaaacgcccggagagctgctcaacccgctggtgctgaactctgtgctgagcaaggccctgcagtgcagcctgcatggggacaccccgcacgcctcyaacctctccctcgctctcaagtacctgcccgaggtgtttgcccccaacgccccggatgtgctgagctgcctggagctcaggtacaaggtcagcagcagcc

SEQ ID NO: 537315 - DNA, 201 bp, Homo sapiens
tcactgtgtcagccaggaggctggagtgcagcggctcgaacatggctcactgcagcctccacctcccaggctcaagggatcctcctgcctaagctcccctkacccccgccaaatagttgatactacaggcacctgccactacacctggctaatttttgtatttttagtagggatgggtttttgctatgttgtccaggctgg

SEQ ID NO: 537316 - DNA, 201 bp, Homo sapiens; identical to SEQ ID NO: 350130

SEQ ID NO: 537317 - DNA, 201 bp, Homo sapiens
tctctttatttatcttctttctgaacatccttccttatttatttttaagtctgttattggtctgacagagacagggcgtttttttttttttttttttttttggaaacagagtcttgctctgtcacccaggctggagtgcagtggcacaatctcggctcactgtaacctccgcctcccaggttcaagcaattctcctgcctc

SEQ ID NO: 537318 - DNA, 201 bp, Homo sapiens; identical to SEQ ID NO: 350131

SEQ ID NO: 537319 - DNA, 201 bp, Homo sapiens
aactgcagcaacgagcactaccctgtactgctgtccctgctgaagaccagctgcgagccctacacccggtgggcagtgggctgggcaggcgcggcgggcgygcactcccaccaggcagacacttgagagcggtcccttgtcagacacctgctgaatgtgggggtcacacaggaaggggagggcaggataggtggactgggc

SEQ ID NO: 537320 - DNA, 201 bp, Homo sapiens
ctggggctgagtatgaggctggggctgagtgctggtggctgtgcttgcatcccctttggcagcattacctctgttggtccgacgtccctgtcccccggatstcggtgattttctcccttgaggagttgaaggagattgagaaggactgtgccgtctacgttgggcgcatggagagggtggcccgccacagctctgtcagca

SEQ ID NO: 537321 - DNA, 201 bp, Homo sapiens
tgcagcaacgagcactaccctgtactgctgtccctgctgaagaccagctgcgagccctacacccggtgggcagtgggctgggcaggcgcggcgggcgcgcrctcccaccaggcagacacttgagagcggtcccttgtcagacacctgctgaatgtgggggtcacacaggaaggggagggcaggataggtggactgggcagg

SEQ ID NO: 537322 - DNA, 201 bp, Homo sapiens
atggcggctgagcaggggactttgcgggagcggtgtggggcttgctgggtggtggagggtttgccctgctccctggcaaggagggcctgtgagaacagccytcagcaggcgaccggatggcccttggccggccgagttcaccaggtgcccggtgctgagcgggtgtgtctgccgtgggcccaccacagctggccccatcca

SEQ ID NO: 537323 - DNA, 201 bp, Homo sapiens
cactcgcctgcctgggatggctggaacaggccaggcctgctgaccccacagccccttaagcctctagcagtgggggctggtggcagggggctgcagcaggyggagggggccagacccttctctgacagcctcagcattggagacttcctacctgtgggcccaggggctgagccgtccgtgcagactggcatggtccctctc

SEQ ID NO: 537324 - DNA, 201 bp, Homo sapiens
agtgtgtcagcctggtgggctccaggaaacgggggtggctgagcgtgtccctggagggctgctgccggcagggctgcgcctcactcccagcgctgggtgcrctgagctgccccccaccccctttgcggtctgcagggcgtgaagctgctgtcctacctctaccaggaggctctgcacaactgcagcaacgagcactaccct

SEQ ID NO: 537325 - DNA, 201 bp, Homo sapiens
cacaaggccgtcttcaggtgaggcctgggcagcggctgcgtccctgtggtcacggctcagcccacccagcagcactgcttccccccaggggcctgctcacrgagaaggcggcgcccgtcatgaacgtcatccacagcatcttcagcctcgtgctcaagttccgcagccagctcatctcccaggcctgggggccccctgggg

SEQ ID NO: 537326 - DNA, 201 bp, Homo sapiens
ggctggtcttgaactcccaccgtcaggtgatccacccgcctcggcctcccaaagtgctgggattacaggcatgagccaccgtgctggctgtatttcatttrttaactcccccttttctaggttcattttttcgggttgctgatgaggagacatggtcactcactctcctcatcaccctgttctgaatacgctggagactgc

SEQ ID NO: 537327 - DNA, 201 bp, Homo sapiens
ggcggcgcccgtcatgaacgtcatccacagcatcttcagcctcgtgctcaagttccgcagccagctcatctcccaggcctgggggccccctgggggcccgyggggtgcagagcaccccaactttgcactcatgcagcagtcctacaacaccttcaagtactactcccactttctcttcaaaggtgaggcccaccctggctg

SEQ ID NO: 537328 - DNA, 201 bp, Homo sapiens
atccagtccactggtgatcctgtgggtatcggtttggggagtgttgggtgaaagggtcagggctggctgggagctgagtgctctgggatgcagtggctggrctctggcagcctggacaggagcatgtgcccccgggtgggcgagctttcctgacatcatgaagattccctcagggttggctgtctccctgcttcccagcac

SEQ ID NO: 537329 - DNA, 201 bp, Homo sapiens
gcttcagatggcagctcttcccctgggctttgggggtctggaaaccccctgagactgcacacaaacctacatgctcttctaggagagggctggtggctttygcgtttgcggcagagcactctctctccccgtgtgccaccaaattgcacagatacaggtggtgaggagctcgtggttttggagtactttttgcaggcccag

SEQ ID NO: 537330 - DNA, 201 bp, Homo sapiens
gtctcccgagagcatcagcagcctgctctcggaagtggccgagtatgggacctgctacacgcgcctgagtcatttctctctgcagcccgtcctggactctytgtacagcaagggcctcgtgttccaggtatggcctttgcctcatggttgtcacacacctttgtgagaacggtgcacacgacctggaagagagaatctcag

SEQ ID NO: 537331 - DNA, 201 bp, Homo sapiens
cccctccctgtgccagtaaccagatcacacctgtcgggcagagctcccctccccgtgccagtaaccagatcacacctgccaggcagagcagttggggcagmtaagttatgtccttaagagcaagagagctgcctggcaggctgtgtgattagtgccaggaagaaatgctcactgggcatggggtgctgatgaaggagcctt

SEQ ID NO: 537332 - DNA, 201 bp, Homo sapiens
gagtccatgtgtgagtgcagcagttgctgctggcagggagccctgggctggctggttcccagcacgtgctccacctcctgtgggttggggcggagccctgrgctagccagttcccagcacgtgctccatctcctgtggatgggggcggagccctgggctggccggttcccagcacgtgcgtgctccatctcccgcagccga

SEQ ID NO: 537333 - DNA, 201 bp, Homo sapiens
agggtggggagcaggcctacctggcaggcctggcagggcagtaccacttggagcggtacccggacagttacgagtccatgtgtgagtgcagcagttgctgytggcagggagccctgggctggctggttcccagcacgtgctccacctcctgtgggttggggcggagccctgggctagccagttcccagcacgtgctccatc

SEQ ID NO: 537334 - DNA, 201 bp, Homo sapiens; identical to SEQ ID NO: 350141

SEQ ID NO: 537335 - DNA, 201 bp, Homo sapiens
gcgctgttatttattggatacaaggcaaaaggggcagggtaaggagtgtgagtcatctccaatgataggtaaggtcacgtgggtcacgtgtcaactggacrgggggcccttccctgtttggcagccgaagcagagagagaggagacagcttacaccattatttctgcatttcagagacttttagtactttcactaatttgc

SEQ ID NO: 537336 - DNA, 201 bp, Homo sapiens
tgtggctcccacccagccacggtggaacacccacggacacgtatccaatgccagcatcagcttaggggagtctgtgtcagatgtggctcccactcggccayggtggaacatccatggacatgtgtccaacgccagcatcagggtcggggagaatgtgtcagatgtggctcccaccaggccacggtggaatacccacgggca

SEQ ID NO: 537337 - DNA, 201 bp, Homo sapiens
tgtttttgctgtctgtcgcctgaggctttaccatggtacgctgtagctcctcatttgagttttgtattttattgctttatcagtgttgccaaaaggatacrttgttactagtcgttctattcttatgcgatagctagatgatttagaaacatacataatgctacagcaaatgtcttggtgtacagcagttttgttttttgt

SEQ ID NO: 537338 - DNA, 201 bp, Homo sapiens
ggcagtaccacttggagcggtacccggacagttacgagtccatgtgtgagtgcagcagttgctgctggcagggagccctgggctggctggttcccagcacrtgctccacctcctgtgggttggggcggagccctgggctagccagttcccagcacgtgctccatctcctgtggatgggggcggagccctgggctggccggt

SEQ ID NO: 537339 - DNA, 201 bp, Homo sapiens
gcagcctgggggtcccacagcaggcagggagggctctgtccctctaggttgtcacgcgggtgggtcccacatgcgattttcctttttttggcacaagctgsttgtggggacagcgtgcagtggggaggtggttctgaggctggtgttttgttaggaagacacagctgcccagagcagcccaggccgtggtgaggaggcgga

SEQ ID NO: 537340 - DNA, 201 bp, Homo sapiens
tgtggatgttgttgccgtggacgggggtgtggatgctgctgtggacaggcatgtggatgttgccgtggacaggcatgtggataggcatgtggatgttgccrtggacaggcatgtggataggcatgtggatgttgccgtggacaggcatgtggataggcatgtggatgttgccgtggacagggatgtggatgctgccatgga

SEQ ID NO: 537341 - DNA, 201 bp, Homo sapiens
ttcaccaggtgcccggtgctgagcgggtgtgtctgccgtgggcccaccacagctggccccatccaggccctccaggtccggtggctcctgcctaattggcrcacagggtccctggagatgtggcgtccggtacacacaagctggttagtgagcaaccaggctcgggggctattggcaggtgccatcagagaaggaagagtg

SEQ ID NO: 537342 - DNA, 201 bp, Homo sapiens
gtacacatgcgcttgagaaaaacagaagaaacattttgttaggtctttgcataaagttcctgaaattctcatcgcccttggatgaaacgtggacacagcartaagtggcggtttgcccttccctgtgtctccaggtcccaccgagtgtggatcagtgggaagacgaaggattccagtcagcgtccaacttgactcctgatt

SEQ ID NO: 537343 - DNA, 201 bp, Homo sapiens
cctcagcctcccaagtagctgggactacaggcatggactaccacgcctggctaatttttgtatttttagtagagatggggtttcaccatgttgaccaggctggtctcaaactcctgacctcaagtgatttcacccaccttggcctcccaaagtgttggtgttacaggtgtgagccactgtgcttggcctactctgtattta

SEQ ID NO: 537344 - DNA, 201 bp, Homo sapiens
ggtggcatgtgaagttcccctcaggcctccttgtcagccaggacctgggctgctgtgggggacatgggaggggctgcttgagccagggccggctcggctcygtacccgccacaggcactcggccctgatgccctcgtgtccacttgtgtccacacaggccctgggaggagcggggacactgaggacctctctccaaattgg

SEQ ID NO: 537345 - DNA, 201 bp, Homo sapiens
ttgagccagggccggctcggctctgtacccgccacaggcactcggccctgatgccctcgtgtccacttgtgtccacacaggccctgggaggagcggggacrctgaggacctctctccaaattggcctctcaactcacaggttaggtggatgcagcctgggggtcccacagcaggcagggagggctctgtccctctaggttg

SEQ ID NO: 537346 - DNA, 201 bp, Homo sapiens
ggcgctcaaggacgtctgcttccacctcaagcgcacaggtgaggccccgctggagcccggcgccccgcacccctggctggaggctgcgctcacctctgccytctgccttctgccctccgccagccctgctgagccacatggccggctctgtgcagttccgtcagctgcagctgttcaagcacgagatgcagcatttcgtga

SEQ ID NO: 537347 - DNA, 201 bp, Homo sapiens; identical to SEQ ID NO: 350151

SEQ ID NO: 537348 - DNA, 201 bp, Homo sapiens
atgactaataaccatgcccaagtgggagtgcggcttataaacagcgtcaatcactacggtaagtaaaataaataccatgtggaagaccagctctccgctckgaaagagagaagccatgttattttgctaactgtggcttaaccaaatgcagtgtctttgatactgacacccccttctgcgccaggaatgtttatttgccta

SEQ ID NO: 537349 - DNA, 201 bp, Homo sapiens
ttttgctaactgtggcttaaccaaatgcagtgtctttgatactgacacccccttctgcgccaggaatgtttatttgcctatgtcagaacaagagaggccaygttcatttttaacttcagcacagagttgggctcaaagctctggacttaacttgtcaagtgtgaatttcaaagtcttaatcctaggtcctgcaatatattt

SEQ ID NO: 537350 - DNA, 201 bp, Homo sapiens
ttgaatgccattacacctatctctgtgtaagtcataatgatgactctttaggataagtttagaacttgaatatttgcatgcttaaggcactgttttagaarcttacttagttttataaacactgctcatttttggatgtttgtagataacaatgaattgttacccatcagcattgtagaatagtgtcttcaaaggtagaag

SEQ ID NO: 537351 - DNA, 201 bp, Homo sapiens
tgttcctaagttttcaaatgtggaagctgagactgttaatttgaaacctctcttcttttctaatataagcacttaatgctataaattttcctctaaacacygctgtagttgcatcccacaaattttgatagatgatttttttttatttaattcaaaatatattttttaaatttctctgtaatttcctctttgaaggaaata

SEQ ID NO: 537352 - DNA, 201 bp, Homo sapiens
cagaaaacatattcacataaattcctatcaagttttagcattttgccatcagcttcataacactgcatgtcatgctgtattatatcctttgtattgtatcrtatcatataggtctctgctttttagcattcactttctttggctcactgtatcacagctgtgatatatgttccttttacagggtcccctaaaaggctttct

SEQ ID NO: 537353 - DNA, 201 bp, Homo sapiens
atgaaggtgtttcgtgctataaactcccctcttaacagtgttttagctatgtcccagagattctggtatgttgtatctttattatcattagcttcaaatamtttcttgatttctgccttaatttcattgtttacccaaaagtcattcaggagcaggttggttgtttactttccatgtaattgtatggttttgagatagagc

SEQ ID NO: 537354 - DNA, 201 bp, Homo sapiens
attcactgctgacaactttatttttaattttcacattattttatctatccttttggaaatacttgcatgatcttcccatgataagaagtctgccctctccmaattgggagtaacaggaaatactgcttatcaataagccatttctacataataaattctcaaaatagtagggtcatttccaatagattagagtaagcattt

SEQ ID NO: 537355 - DNA, 201 bp, Homo sapiens
ctggtgaaagaaaggggtcccatttcaatctttggcatatagctagccagttatcccagcaccatttattgaatacagagtcctttccccattgcatgttyttcttgacttggttgaagatcagatggttgtaggtgtgtggctttatttctgggttttctaacctgttccattggtctatgtgtctgtttttataccggc

SEQ ID NO: 537356 - DNA, 201 bp, Homo sapiens
tatatactcaacagtgggattactgaatcatttggtagttgttctattcttagtttttggaaaaacttccattctgttttctacagtggctataccatttkacatttctgcccacagtgtataagggttccacattctctacatactcccccagcatttggtatctttgttttgttttgtcttctataataaccatcttga

SEQ ID NO: 537357 - DNA, 201 bp, Homo sapiens
tttaagggagatatgagatattaatcaacatatgtaacatgaacattggttcggtctggaaaggcaggacagcttgaagcaaaggtaggaagactccaagygggtttgagtttctgattagcctctccaaaggaggcaatcagatatgtagttatctcagtgagcataggggtgactttgaatagaatgggaggcaggttg

SEQ ID NO: 537358 - DNA, 201 bp, Homo sapiens
tggtatgttttatgccaagaatatggtctatcttgatgaatatgtcatgtgtatttgaaaagaatattctgttgtcattaagtattctataaatgtcaatyagattatgtaaattaattcaggtcatattgcttgggttttctatattgtcagtaattttctgtctacttgctttatgtactattgagaaggcaatgttga

SEQ ID NO: 537359 - DNA, 201 bp, Homo sapiens
atagtatttcttaggcccaggtggtgtgaatacttcaactttgttaaaattaacatatatatatatatatatatatatatatatatatatatatatatatmcacacacacagagagaaagagagagagagtacagtctgattcccttgcactttcatatagatttaagaagtttatttctgggggaaaaatttttacaaga

SEQ ID NO: 537360 - DNA, 201 bp, Homo sapiens
agatccttgaccggagatgggcaggcaggcctcgacttcagacgcccattgtcttgctgcagctccccagcagctccacgagctcccggactccatccacytccccaagcctgcatgactcctcaccgccgccgctgtccgggcagccctcgctccagccacccgcgtcgccccagctgccccggtcgctggactcgcggc

SEQ ID NO: 537361 - DNA, 201 bp, Homo sapiens
tcaaatcagggaggggagggggtctggccatggcattgaccactttctgcacaatctttcagatgaggcgtgcagtcaatccgaatcactcgctgagatgytgccccttccagggtcactcgtcgtgtagacgctgcctttgtgcagctgagggaacagcccttggcccctgccacacaatacgtatttatattcacatgt

SEQ ID NO: 537362 - DNA, 201 bp, Homo sapiens
aagacatggcttactgtgacactcagctccgtgtagcctttgatggggatgctgtcctcttctctgatgagtctgaacattttaccaaggagcatgggctsgacaaattcttccagtatgatacattatgtgaaagtaagcctcttgctcaggtaggttcaatgagtgctaattaatttttatgtacttatttattttcta

SEQ ID NO: 537363 - DNA, 201 bp, Homo sapiens
tcccggactccatccacctccccaagcctgcatgactcctcaccgccgccgctgtccgggcagccctcgctccagccacccgcgtcgccccagctgccccrgtcgctggactcgcggcctcccacgcccccagagcccgatcctggctcccggcgcagcaccaaaatgcaagagaatccggaggcctgggcccaaggcatc

SEQ ID NO: 537364 - DNA, 201 bp, Homo sapiens
tgttccacattgaaggggcacagaggttaggttccatcgcagcttatggctttaataaaaaattcagtagttaggggcagggaggagaaataaagtggtgrtagtctggtgttacagaagccacttcttttggctctctaggataattagataggtatttcagaaaattggaccttaaaactttgcttctttggaaaggtt

SEQ ID NO: 537365 - DNA, 201 bp, Homo sapiens
atttgcctctgcaaaggctctgcaatgatcaaataatttcagataatggcttcaggtagaggaaaagagaagggagagaataaaggcaatggaaagagtasagaaaagggaagaaggagaaatttaaaagaaattaagacagcaaagaaagagattaaaaaacgtgtagtatataaatgattccaataagtcagtattcat

SEQ ID NO: 537366 - DNA, 201 bp, Homo sapiens
ttgttgaaaagggtgattttctgccttgttcctttaatacagatattcatccctttatcaatattacattgtcttgattattgtagttttatagtagttcttttttttttttttttttttgacagagtctcgctctgtcgcccagtctggaatgcaatggcatgatctcggctcactgcaaccttcgcctcccgggttcaa

SEQ ID NO: 537367 - DNA, 201 bp, Homo sapiens
ccaagaacgccatcaccattgctctctcatcctgcgcgctcttcaacatggtggacggcaggaaaatctacgagcaagagggtctggaaaagtacatggartatcagctcaccaatgagaacgtcatcctgaccccgggcccggcgttccgcttcgtcaaggtattctgcaagctgtctttggcccgccaggacactcgat

SEQ ID NO: 537368 - DNA, 201 bp, Homo sapiens
gtcttgctgcagctccccagcagctccacgagctcccggactccatccacctccccaagcctgcatgactcctcaccgccgccgctgtccgggcagccctmgctccagccacccgcgtcgccccagctgccccggtcgctggactcgcggcctcccacgcccccagagcccgatcctggctcccggcgcagcaccaaaatg

SEQ ID NO: 537369 - DNA, 201 bp, Homo sapiens
tgttgaaaagggtgattttctgccttgttcctttaatacagatattcatccctttatcaatattacattgtcttgattattgtagttttatagtagttcttttttttttttttttttttgacagagtctcgctctgtcgcccagtctggaatgcaatggcatgatctcggctcactgcaaccttcgcctcccgggttcaag

SEQ ID NO: 537370 - DNA, 201 bp, Homo sapiens
tgctgggattacaggcatgagccactgcacctggctatagtatttcttaggcccaggtggtgtgaatacttcaactttgttaaaattaacatatatatatwtatatatatatatatatatatatatatatatatatacacacacacagagagaaagagagagagagtacagtctgattcccttgcactttcatatagattt

SEQ ID NO: 537371 - DNA, 201 bp, Homo sapiens
cctcttgctcaggtaggttcaatgagtgctaattaatttttatgtacttatttattttctaatatataaatatcaatattggtccattctgatgaatgttyaagttattctaggcagggcactccttcttactgtcttatctttggagctttctctctttctttcatgaatggctcactttgatgcattcactgctgacaa

SEQ ID NO: 537372 - DNA, 201 bp, Homo sapiens
tgaaggtgcatattttataaacctcttacaaacagccagtgtttttttgtaattgttactgatttaaaaaagcatttgatgttatattaatgttgaatgaygataattcactgttatatggctaaatcacatgtcatgagggtttggtgtagagattacttcattacctaggtaataagcgtattacccaataggtagttt

SEQ ID NO: 537373 - DNA, 201 bp, Homo sapiens
catgaggtcgttctacgagaagaacccgagctgctcgcgcccctggccggtgagccagcccgccgcccctggcagccggggcgcccttccttgcagcctcytccagccgccctcctctccactgcgcagggaggtcctcccgcttctcctccccaaacttcggggagtcccagcctcagctgtctccagcatcccgcttct

SEQ ID NO: 537374 - DNA, 201 bp, Homo sapiens
gaataataacaatggttaacatttattgatgctttctacgtgccaggccctgtttatgtgctttacatgtgttagctaatttagcccttgggagaactccmttctgcccgtaaatcccattttgccactgagaaacctgaagtacagagggaacttgtttaaggtttcacattaataagtggtagagctagcattaaaacc

SEQ ID NO: 537375 - DNA, 201 bp, Homo sapiens
actgcttgagtccaggagtttgaggccagcctaggcaaaatagggagaactcggccgggcgcagtggctcacgcctgtaatcccagcactttgggaggccraggcgggcagatcatgaggtcaggagatcgagaccatcctggctaacacagtgaaaccccgtctctactaaaaatacaaaaattagccagacacggtggc

SEQ ID NO: 537376 - DNA, 201 bp, Homo sapiens; identical to SEQ ID NO: 350583

SEQ ID NO: 537377 - DNA, 201 bp, Homo sapiens
tgggcgtacccatgggcgcgggtgacagtgcaagtgcttgggacgacaacccgggctcctcatcgcggccggaatccaagaggctgcggcgcgaggtctgsgtattcgggggcggaaccctgggagggaaggggagcaaagggagacgccgcagcgtaagcccgcctggccccagcgccggcgaggctccttccgacgccg

SEQ ID NO: 537378 - DNA, 201 bp, Homo sapiens
cactggaaagacacgttggctgcgtggtgaccacagaggacagggtgaggacggtggcaatggcagccacacagcagagcacctggggtgagactggaccragccaggaagaggcagggactggctctgaaggccgagggagggttcacaggagggtggggagtgggcaggaagctgacatccatggtgacgcagggtggg

SEQ ID NO: 537379 - DNA, 201 bp, Homo sapiens
tcggatagatatgtttataaagttatattaaaattaactttaggggccgggcacgatagctcacacctgtaatcccagcactttgggaggccaaggtgggyggatcacctgaggtcaggagttcgagaccagcctggccaacatggtgaaaccctgtctctactaaaaatacaaaaattagccaggcattaaggcaggcac

SEQ ID NO: 537380 - DNA, 201 bp, Homo sapiens
ctggctgcggtgaggtctccccgcgtgcttgggagccgcgcgacgcctgcgcagggccccctcccctaagggctggccctggggccctgccgggggagccsgagcaggtttccggctcccaggatgggatccttgagggtggctgcgccccgaggcctgtcctgccctggaggaatctggctcgccagggctctccaggac

SEQ ID NO: 537381 - DNA, 201 bp, Homo sapiens
gttttggaggtggctgacagcagtggtctgcagtgagtgttaattacacagggggctgtgcagttttggaggtggccaacagcagtggttcacagtgagtgtgtgtgtgtgtgtgtgtgtgtgtgtgtgtgttgttttgttttgtttgagacggagtctcgctgtgtcgcccaggctggagtgcagtggcacgatctcagc

SEQ ID NO: 537382 - DNA, 201 bp, Homo sapiens
ttttggaggtggctgacagcagtggtctgcagtgagtgttaattacacagggggctgtgcagttttggaggtggccaacagcagtggttcacagtgagtgtgtgtgtgtgtgtgtgtgtgtgtgtgtgtgttgttttgttttgtttgagacggagtctcgctgtgtcgcccaggctggagtgcagtggcacgatctcagct

SEQ ID NO: 537383 - DNA, 201 bp, Homo sapiens
acctgcctgcctctgcagcggtgaaggagacctgtgcttggttcactgacaactacgagcaggcccggaagtgaagctggaagacaggatcaggtgccagyggaccatcggctggcagagcccagcggccaccacccgtcaaccctgccaggagctgagggcaccacccagcaacctgggcctgcattccatccgctctgc

SEQ ID NO: 537384 - DNA, 201 bp, Homo sapiens
tccccagggcctctggagcctctggctcccaggactgtgctggcccagctccccttagccgggcccaccacacactctggggtgcaggggtgtgaaccgcrctctgtgcatctgctgcctgtgtctgggggaagggggcgtggtgtaagggccctgccgtggctagctgtgttccggagggttggccccaccagtcactgg

SEQ ID NO: 537385 - DNA, 201 bp, Homo sapiens
agaacctgccctattgagccctgggctggcccctgctgggctgtcggggaggtggtgcaggagggaggctcctaccagcagagaatctgggctgagctccragaggagccatctctggtcctcgtggaggccccataggctcctgtctccaggagtcactggcgtagctctgagctccaagggagaaaggagggacccctg

SEQ ID NO: 537386 - DNA, 201 bp, Homo sapiens
cctcagagcctgtactgccctggaggtgggacaccaaagctctgaggggtgacttccctgtccctgggcctcctccccccacttcctcccatgcggccccraccctccctgtccatggccctcacctgcctgcctctgcagcggtgaaggagacctgtgcttggttcactgacaactacgagcaggcccggaagtgaagct

SEQ ID NO: 537387 - DNA, 201 bp, Homo sapiens; identical to SEQ ID NO: 350593

SEQ ID NO: 537388 - DNA, 201 bp, Homo sapiens
cagcggaccatcggctggcagagcccagcggccaccacccgtcaaccctgccaggagctgagggcaccacccagcaacctgggcctgcattccatccgctytgcagccccaagcatctttccagtggggcccccattcacgttggtcctcagggaaaccagggtcccgggcaggcccggcgctttgctccccacaccagcc

SEQ ID NO: 537389 - DNA, 201 bp, Homo sapiens
ccacccagcaacctgggcctgcattccatccgctctgcagccccaagcatctttccagtggggcccccattcacgttggtcctcagggaaaccagggtccsgggcaggcccggcgctttgctccccacaccagccccctgcgcgtgtccactctgatcctgcatcccactccctgggagccaataaagtgcattttcacag

SEQ ID NO: 537390 - DNA, 201 bp, Homo sapiens
gagtagctgggattacaggcgcccctcaccatgcctggctaattttttttttgtatttttagtagagacagggttttaccatgttggccaggatggtctcraacccctgacctcaggtgatctgcccacctcagcctcccaaaatgctgggattacaagggttagccaccgtgcctggcctctggctaattttttattttt

SEQ ID NO: 537391 - DNA, 201 bp, Homo sapiens
ccccaagcatctttccagtggggcccccattcacgttggtcctcagggaaaccagggtcccgggcaggcccggcgctttgctccccacaccagccccctgsgcgtgtccactctgatcctgcatcccactccctgggagccaataaagtgcattttcacaggcctggccttggcagctctgtgctgagccgtcccccacac

SEQ ID NO: 537392 - DNA, 201 bp, Homo sapiens
gccgattgggtttttttgtttgatttgagacagggcctcactctgtcgcccaggctggagtgcagtggtgtaatcatagctcactgcagcctcgacctcargtgatcctcccacctcagcctcccaggtagctggacccacaggcatgcagcaccatatccagctaatttttttttttgaaacggagtcccactctgttgc

SEQ ID NO: 537393 - DNA, 201 bp, Homo sapiens
gagtgcagtggcacaacctcagctcactgcaacctctacctcccgggttcaagcaattctcatgcctcagcctcctgagtagctgggattacaggcgcccstcaccatgcctggctaattttttttttgtatttttagtagagacagggttttaccatgttggccaggatggtctcgaacccctgacctcaggtgatctgc

SEQ ID NO: 537394 - DNA, 201 bp, Homo sapiens; identical to SEQ ID NO: 350599

SEQ ID NO: 537395 - DNA, 201 bp, Homo sapiens
ggtctttcctgtgctgttctcgtgatagtgagtatggctcacaggatctgatggttatataaaggggagtttccctgcacaagctctcttgcctgccaccrtatgagacatgcctttcaccttccatcatgattgtgaggcctccccagccacatggaactctaagtccaataaacctctttcttttgtaaattgcccagt

SEQ ID NO: 537396 - DNA, 201 bp, Homo sapiens
aagaagacagccagtaacagcaagctgaggacctacctgcccgacttccggttcacacccttcaagcagggtgagccctgaccccacagccctccacttgrtggaggcctgccccagcccctccctcatgctcgctaccagggcagaggtgaggtgccccctcagagcctgtactgccctggaggtgggacaccaaagctc

SEQ ID NO: 537397 - DNA, 201 bp, Homo sapiens
caggaacattgaacccatttctctgcagtcagtgtctcctaggtagctattcccagctttttgcttgaataaactctttaaaactaattctgggttgggcwtggtgggtcagtcctgtaattccagcactttggaaggccaaggcaggaagactgcttgagtccaggagtttgaggccagcctaggcaaaatagggagaac

SEQ ID NO: 537398 - DNA, 201 bp, Homo sapiens
ttttttctttctttttttttttaaatatattaatgagatgagaaaggataatctacttggtgaaggaaaaaagatagtttggaaaaatagccaaatacagacttaggagccagtgagtaatataggcaagagatagttcttgtatttgttggtggtggctgtagaaaggagccatgtgttttggttttgtttttcatggtg

SEQ ID NO: 537399 - DNA, 201 bp, Homo sapiens
tttttttctttctttttttttttaaatatattaatgagatgagaaaggataatctacttggtgaaggaaaaaagatagtttggaaaaatagccaaatacagacttaggagccagtgagtaatataggcaagagatagttcttgtatttgttggtggtggctgtagaaaggagccatgtgttttggttttgtttttcatggt

SEQ ID NO: 537400 - DNA, 201 bp, Homo sapiens
ctctgtgagtttctgagttgtaatagagatacaatattatgcaatgatattctaaattattatttgacttgaaacttctgaactactcagctttgaattayttgatttctgtgaatctgatcttcagatttatggtataagctttatatctgccatgtaagcttctttaaaacatgccaaggtagagatgtagttgtgttc

SEQ ID NO: 537401 - DNA, 201 bp, Homo sapiens
aataaaaatttgtttttgcacactaaaacagctaatgaaaatagatcaatactaatttaatggttttttaagtactttttttctttctttttttttttaaatatattaatgagatgagaaaggataatctacttggtgaaggaaaaaagatagtttggaaaaatagccaaatacagacttaggagccagtgagtaatatag

SEQ ID NO: 537402 - DNA, 201 bp, Homo sapiens
gaaattgaaggtgagtatattgtttattgtatgattgtcttgagtcagataatacagttgtttagtaaagtcagctggctttaatgttctccttgctcccytcatcaagcccttctcagctgtcttgactcaaagatccagttccaaggagaatagtacctactaataccttccatctggcttgctgccttttatattttt

SEQ ID NO: 537403 - DNA, 201 bp, Homo sapiens
atgtggacttcgctttgccttaggatggaagcagttctttttaatatatttttaagataaagagaatctgttcagtaataaaacaaactttaaattacgcytttttttttttttttttttttttggagacggagtctccctctgttgcccaggctggagtgcagtggtgcgatcttggctcactgggcaacctccacttcc

SEQ ID NO: 537404 - DNA, 201 bp, Homo sapiens
tccactcacttcagctttgaaattgtttaactttttggtccatgatttaaaaaattaaggtgctaaaggctcacaacgatcatgtagactgactttaaackgatacgttttctgctgagtttatttaagctaatttgtttttaattatttttaaatcacaggttctaaattagttccattctggagctggctacaaatggg

SEQ ID NO: 537405 - DNA, 201 bp, Homo sapiens
ttaggtgtcatagtggtactatgattgacattatatgaatttgtaacatatgatatctagaatttttttcaaaataatcccaggttgggtgggatggtggkgggggggctttacatagaacaagattggcaatgtgttgctaattattgaagctaggtagtaggtatgtggtgcttcattttccccttgtttctagttttg

SEQ ID NO: 537406 - DNA, 201 bp, Homo sapiens
aagctctgagctatctagagaagagacaggtatcatgttttctcttttaatatgatatctccaattaaaactagaccaggtcaccaattgtggaccccaarccagatgcactgtgagaggcagtcctggcagcaccccgatcgctgggccacctgctgcttgcttgttgctatccataagcccggcacgtagcatgctacc

SEQ ID NO: 537407 - DNA, 201 bp, Homo sapiens
tttaatattttcagtccatgattggttgaatttgcgaatgtggaacccatggatatggagaaccaactatgtatatagcttcatcttcagagctgtacttsacctaaattctttccatttatggaagttaaaatacttgggccaggtgtagtggttcacacctataatcctagctctttgggaggctgagttgggcagatc

SEQ ID NO: 537408 - DNA, 201 bp, Homo sapiens
tcccgagttcaagcaattctcatgccttagcctcccaagtagctgggaatacaggtgtgtgccaccatgcctggctgatttttgtatttttagtagagacrgggtttcaccatgttggccaggctggtcttgaactcatggcctcaagcgattcccctgcctcagcctcccaaagtgctgggagtataggcatgagccact

SEQ ID NO: 537409 - DNA, 201 bp, Homo sapiens
cgtctcaaaaaaaaaaaaaaaacaaaggtggggcgcagtgactcatgcctataatcccagcactttgggaggccgaggcgggtggatcatgaggtcaggaratggagaccatcctggctaacatggtgaaaccccgtctctactaaaaatacaaaaaattagccgggcatggtgccacgtgcctgtaatcgcagctactcg

SEQ ID NO: 537410 - DNA, 201 bp, Homo sapiens
attgtactctgttgatgtcttgagtctcttaatcagttgacagtttctcctccccctttttttcttttccttgtcttttttttttttttttttttgagacrgagtctggctcttgtcacccaggctggagtgcagtggtgtgatcttggctcactgcaacctctgccctcaagcaattctcctgcctcagcctcctgagta

SEQ ID NO: 537411 - DNA, 201 bp, Homo sapiens
gactgcggctcctcaggcgtcccctcctccgcgctaccagttctcggagaagtcccttttcccctagattcccccaaattcctgacctcggagtttcctgkagtttcactctccttttcttcggttctttaattttcccttggaatcttatctctttgtgtgctcagagacttgtaagttttttcacactggagcgcaccc

SEQ ID NO: 537412 - DNA, 201 bp, Homo sapiens
ctgtattaataatgttttacaccaggccctagaagtttgaactgtgctctgtgcagcctagaaagtggggactgactcatggatgaaggcaaaacagtcarggactttagacagtttcaatgacgatgaagaagatttaacaggtagtagtgcttttcttcctgagctttaataccagtgagagaagcaactagttcagag

SEQ ID NO: 537413 - DNA, 201 bp, Homo sapiens
tagtaggtacccagtaaatactgttgaaagaactaatacttagtcatgggttctgtgtgaatcctgttcatgttgggtatctgcatgattatgccagtatrtgtccatttttatactctctacaatttttgtgcatctgttttcaaagacctgttgtcttcctagaaatatatgccatataacccccaaaatactacttta

SEQ ID NO: 537414 - DNA, 201 bp, Homo sapiens
gctgaggtctgccatttttcaggactgtaagctgaattggggacacagatccatgtgactagatcctttcctggatggagtgtaccttgttcaagacactygacaaaatctcacaagaccagggaacccaagtaaccaacaaagccacgtagagctccaggggagggtccctcctccctgccttcccaccgtctaccctca

SEQ ID NO: 537415 - DNA, 201 bp, Homo sapiens
gttttaccttgatgaaggtatgctgttatgcatggtagcatgaactaagatgaatttgacttgggtctgtcctgatgaaatgtgcagtctaataggaaagrtaagcatttgcataagtaaaaaagaagattataattatgagagacatgcagataaagtgctaagaaatttcaaaaaagaggttactgtcagctgaggcat

SEQ ID NO: 537416 - DNA, 201 bp, Homo sapiens
tcaatggcaccaagatttctacagctcctccaggtcatcagaatgtacagtgggtgtaacctagtcacaagaagggataaactgcaatagcagtgtttgarccaaagcaagaaacacagcttatataattctctttaatccaaattaattttattctgatttttatataatttcataggtagcttttaaatattgccagaa

SEQ ID NO: 537417 - DNA, 201 bp, Homo sapiens
aatgaccattgggaaagtaccagaggggcttgttagattattgggacttttttctgtatgtaagctgaatgtgccgggcttggaaaatcattttcaaaagygatttttaatatatttttttcttcaagtgcctgtgatgatggatgaagctctgagctatctagagaagagacaggtatcatgttttctcttttaatatga

SEQ ID NO: 537418 - DNA, 201 bp, Homo sapiens
gattcagaactgcagagttgagtataggtatgttaagtatatatattcaaatattaatataaattaaatgggtatgttaaaaacaaaaatagattaaaaarttttaagtaatgtaaatttggccttcaaattcagatacatatatatacagttgtctcttggtatccacagtaaatgaattctaggaacatcacccacaga

SEQ ID NO: 537419 - DNA, 201 bp, Homo sapiens
caggtatcaagggatcaatcgcaggaaccacatatttataattcatcttgtctccatccatccattctttcagctctaaaaccaagtgtttggtttagtgytcttgattcccacagaattggctgccattctatagaaagaagggataacctttgatactcactagagatcattggttgtccgctgcagatgctatgacaa

SEQ ID NO: 537420 - DNA, 201 bp, Homo sapiens
ccatcatccatccccatcccttgtatttctagctgttttttttgtttttttctaggtgttttttgtttttttaagcttctaagtgaatcaactaatataaytcttaagagaattagctgtaaagatattcataccattgctcttcagacaagtagcactagctgcatgtgtctatttaaatttaaataaaatgaaaattta

SEQ ID NO: 537421 - DNA, 201 bp, Homo sapiens
gtcaatattctcattagttaagtatcaactgcaggcttatatctgtgctttgttttgtcaatacatcctggaaactgacagcttttttgaaactgaaatayatgtggggcaaagcagcataaaatatgtaagtaaacaagacgttctccttgctcacagcagcagccccaaacctgtttctcctggtaggctaaagccctg

SEQ ID NO: 537422 - DNA, 201 bp, Homo sapiens
cctcgacctctcccagactctccgggacctgcagccgctgcagttctgctccacccagggaggtctcgagcccccagaaggggtgtgctccctagcctgcycccttggctgatgtggttaagcaaataggggtgacggagccttgacggcagccatctgttacaaatgggaataaatgcgtggatcgatgagacccactag

SEQ ID NO: 537423 - DNA, 201 bp, Homo sapiens
cacattattattaactataatcactacattgtataatagatctccaaaaaaaaaccttattccccctgtctgaggctttgtaccctttgaccatcatctcmccatctccccacccagcctcaggaaaccaccattctactctctgcctctatgtgtttgatggttttagattccacataaaagtgagaggatatgcaacat

SEQ ID NO: 537424 - DNA, 201 bp, Homo sapiens
caaaaattaaccaggcatggtggcacagagatgaaaattcaaaaagagggctagataataaaattgaggaaatctcaaaagaacaaaactagaaaagaagrtaaaattataggactagtaaggaatatctgggcctatgctcccagatgttcaggaggcaaaggtgggaggatcacctgagtccagggaggttgaggctgc

SEQ ID NO: 537425 - DNA, 201 bp, Homo sapiens
taagggtccagtttcgtccttctgcatagggatatccagttttcccaacaccatctattgaaaagtcatgtcctttagttctgagaaatgtttcttaatcytttttttttttttttttttttttttcacaatctctgttcattttctctgctctcttacaaacagatgtggaacctccttactagtcctgtaattttatct

SEQ ID NO: 537426 - DNA, 201 bp, Homo sapiens
actttttgaaaaaatgtttagattaattctacctgatagtgagattggtatcagggattcagctcttacatcagaattcttcagatacacaaaactcttaraagctcttggggacttatgctgagataaaaacgagatttgtaaaagaaagttttttggattttgatttgtttttagttaaattacatggtattttaactc

SEQ ID NO: 537427 - DNA, 201 bp, Homo sapiens
ctttggcacacttcacaggccctgactatctgcttgatagttttgaaaagtcctggtccagtaaataacgatttggccatctgatgggtgctatcaatgcytaagtgaaaggtctggtgaagggttttaagtaatttccattggttagctgcaggcaaaagtatttttccttcttcggtggctagccatcctgaggggagg

SEQ ID NO: 537428 - DNA, 201 bp, Homo sapiens
tcctttctgatgatcccagcagtgtaagactgccacctcttaaagctcagctcgagccgtaacaaacacggaccagaggagtgtgcagttgcaagatgtawtagagtgaaaacagagctcccatacaaggggaggggacccaaaggaggttgcccaaggctgaataatatttcattgtgtacatataccacattttccttc

SEQ ID NO: 537429 - DNA, 201 bp, Homo sapiens
tcgactcttcctgaggattgtggcctccaggcgcagtgtaagtgatattgtatgcctaacgcctgggatacttcctgggttaccgcagccttgaaagcggygccattgtcactctgtaagcctcagggaagtccgaatctgggaattatttcatgaattagtgcctttattgcctcttgggccttttctgtcctacaaggg

SEQ ID NO: 537430 - DNA, 201 bp, Homo sapiens
acttgaacccgggaggtggagattgcaggcaagactccatctaaaaaaaaaaaaaaagcaaattattagctaggcgtggtggcacatgcccatagtcccasctactcaggaggctgaggcaggaggatagcttgagccctgaggtcaaggctgcagtgagcacttgattgcaccactgcactccagcctgggtgatagaac

SEQ ID NO: 537431 - DNA, 201 bp, Homo sapiens
agcagtgtaagactgccacctcttaaagctcagctcgagccgtaacaaacacggaccagaggagtgtgcagttgcaagatgtaatagagtgaaaacagagytcccatacaaggggaggggacccaaaggaggttgcccaaggctgaataatatttcattgtgtacatataccacattttccttcccagtttttctgttgac

SEQ ID NO: 537432 - DNA, 201 bp, Homo sapiens
ctctcaacaggaaaacccaagtgctgctggggagaccaccgctctaaccgcttcctgctgaattggggcgtagtaggggtcatgcagttgagatttcctcrggaggggtgccttcgatgccatcaacatcggagcatgggctagcaggccagtccaggggtccatggtagatcttagtcatgcactgcatctggggctcca

SEQ ID NO: 537433 - DNA, 201 bp, Homo sapiens
agaatcatagctgtctcacaaaaggttgtctccaagaaggcacaagacatgcatccgcctcatgtctagaaaactgcagcatggctttccatttcccttcrtgtgctgtcagtaataaacccctgcatggtgatcaatctgtggacaatgagaaaattataaaagaactaatcaagatagcaaatgacaacttcggtagct

SEQ ID NO: 537434 - DNA, 201 bp, Homo sapiens
gcccatgttaatcatgacaaaataaaagaaagaaatggcaatcacaccaacatataattacacaaaaaagaattaaagttgcatacaaaagatttaagacwgtaatccaaggaaaaggacaaaattacatgcaagtattctggctaaagaaataaaacaatgaaaataagaatttagcaacacaggtcttcaaaggtaaga

SEQ ID NO: 537435 - DNA, 201 bp, Homo sapiens
tttttgatgaaacaaacaaaatcacaagcagcaatcactcaaaaaggattatttgaaacttcacaccataacttcaaaaagtggaggttgaggaaagaaakaaaatcctagtaccattcctaccttttaaaagccatttagagaaataagatgaatttggcaaacgctcaggatcctgagcgtttgccaaatacttcccaa

SEQ ID NO: 537436 - DNA, 201 bp, Homo sapiens
ttgcagaaacgagatcctgcgttcacttatgaagtgatagtagttgatgatggcagtaaagatcagacctcaaaggtaaatacacttgcttttagaattgmcaatagttagaaaatagagaataattttgcacatgtgaaatctcactttcattcaccaggggaccctaaagctgtgcctaacactctccattgttatagt

SEQ ID NO: 537437 - DNA, 201 bp, Homo sapiens
tctatttaagcaaaatttagtgtcctcttagtatgattaggcttctcaaagttgtacatattctgaacttttcaataaacctttaaaagatttttaatgtsaacttttttaaaatcagtttctaaaaatgagatattctcattgaaaataaatatttttattagtgatatttaaatattgaaaaactatctctgctttttc

SEQ ID NO: 537438 - DNA, 201 bp, Homo sapiens
ttcagttgctattctttgattttcaaggtatataattatgtcatctacagataacccttttctttctcataccactaatttttctctcaaataatatagtrttttcacacagaaaatatcatttaaagttacgaattttaacataacgcatgccccttatatttagctctatttaagcaaaatttagtgtcctcttagtat

SEQ ID NO: 537439 - DNA, 201 bp, Homo sapiens
ctttaattatcatttatatatgtaaatttatatacttgcaaattttttataatgagcacttttaaatttatttttgttagtcattcaaaattcaaatggtrtaagaaagatatacagtgaaactagctctacttttcatctctcagttaccctcagatataactagtgttactcatttcttttattgggaagatgcatact

SEQ ID NO: 537440 - DNA, 201 bp, Homo sapiens
ggatttggtttccacattacattgttacttcgtacaggtattgccaactctttttcctgttcattgcctttgaactttgtctctccatctctatactggtrtggatttctttctgtgttcttttgctttgttttcaggaatggaattgtggctagttatctcaacttcaacttgttagatttctgtgtctaaaagtgtagg

SEQ ID NO: 537441 - DNA, 201 bp, Homo sapiens
aaagtgctgggattacaggcatgaaccactgcgcctggcccagttcttacagtttttaaacatagcatatttttttcttataattttccactgaagatgtktctgttcgtgtggatttggtttccacattacattgttacttcgtacaggtattgccaactctttttcctgttcattgcctttgaactttgtctctccatc

SEQ ID NO: 537442 - DNA, 201 bp, Homo sapiens
ctttgtgaagtatatttctcccccaccatcatccatccccatcccttgtatttctagctgttttttttgtttttttctaggtgttttttgtttttttaagmttctaagtgaatcaactaatataattcttaagagaattagctgtaaagatattcataccattgctcttcagacaagtagcactagctgcatgtgtctatt

SEQ ID NO: 537443 - DNA, 201 bp, Homo sapiens
gcgatatatgatttgactatttctttacctcctgctttagcctaatttgtatttcagtgagccctctttacaacctgattggttgggtgtgagctgagttrcaagccccatgtttaaaggtagatgcggtcacctttcccagctaggctaaggaattcttagtcggcctaggaaatccagctagtcctgtctctcagttcc

SEQ ID NO: 537444 - DNA, 201 bp, Homo sapiens
gcacctgtaatcctagctactcagggcactgaggcagaagaatcacttgaacccgggaggtggagattgcaggcaagactccatctaaaaaaaaaaaaaaagcaaattattagctaggcgtggtggcacatgcccatagtcccagctactcaggaggctgaggcaggaggatagcttgagccctgaggtcaaggctgcagt

SEQ ID NO: 537445 - DNA, 201 bp, Homo sapiens
gtgacatggagagattgagtcaatattcactctccacctctacccaggatctctctctctctttttacttagcctttttattttatgcggtttgtgcactratatttatattcaaatttatatgtatcaacactaaagcagttgttttttaaattactggtgatttgattagaatactttatggcagttatgccaaattgt

SEQ ID NO: 537446 - DNA, 201 bp, Homo sapiens
tgaagataaataaagtgagtgcctagtgttacctttagtttcctttttaacctcttcaaaatatgcttcattcatgaatggctatgcttctctgatagcayaaataattatttaaggtagacatatatcattgtgacttgttttccaattaccttgtgttatagaaatgtggatgttgaatcatgaaaattttagaagcta

SEQ ID NO: 537447 - DNA, 201 bp, Homo sapiens
tctagagattggctatcttggcacaaatattatacaggtcagacaggagccacatggtacctgccagtataaacaaatgtcctgtgaggacatctggtcaygggctagacattaggcagtccgtcaggataaagaagtatctgggaaaggcacactgaacttctataaccaaatccctggggtcttcatcaggatagggct

SEQ ID NO: 537448 - DNA, 201 bp, Homo sapiens
tttggccaaattatgatttactggaagaactggcttgccctcaggaaagaaccatccattttgatatcatccagcaattggaacttttctgtagacatgargacagatggtctgaggcccatatgtgcaggctttctataccttgcaaggcaattcagccctttgccgacaatgtagggttgatccagccctcctgtttgt

SEQ ID NO: 537449 - DNA, 201 bp, Homo sapiens
ctttttatattgtacatagtcttttatgtaatttactggcatatgttttgtagactgtttaatgactggatatcttccttcaacttttgaaatacaaaacyagtgttttttacttgtacactgttttaaagtctattaaaattgtcatttgacttttttctgttaacttacattgtttaaggtatataatttttaagtctt

SEQ ID NO: 537450 - DNA, 201 bp, Homo sapiens
tgtttagagaaactgtacagttcgtaatcagaaaggtaaatcttctggtatcttaacatgatatggagaaggaagtgtttaatagtgctctgtatgttgtrtttctctaggggatggaaaaataagaatgggttattagctggcagaaatgatgacagatttgagtgcttactgtaggtcagctgctttacatatgttacc

SEQ ID NO: 537451 - DNA, 201 bp, Homo sapiens
tgctgtagacttcccagatcttccagatcctcaagcgatgtttgatattgaatatttcagaaaagatccaagaccattcttcaagtttgcaaaggtactaygaactcttctggttgtttctttggccttctctcatgaaaaagtattttgttcacatacagccaccttaaggttatcgttcattgtttagtaaagtgaatg

SEQ ID NO: 537452 - DNA, 201 bp, Homo sapiens
ggtatatatatttgaaagagtcattttattttattttactttaagtgccgggatacatgtgcagaatgcgcagatttgttaacataggtatacatgtgccrtggtggtttgctgcatctatcaacctgtcatctaggttgtaagccccacattcattaggtatttgtcctaatgcttttccaccccttgccccccacctcc

SEQ ID NO: 537453 - DNA, 201 bp, Homo sapiens
cagtatggaaaatacaaagtatttcattagttttattcatcaaatattaaacaaatattggtttttatatggaaaaaatacttaaaattaattttgaattmttttgaaatacttttgatattgggttaaataaaatgtattttgggctgtgcgtgttgcctcatgcctgtaatttcagcactttgggaggccaaggtggga

SEQ ID NO: 537454 - DNA, 201 bp, Homo sapiens
ggccaggttggtcttgaactcctgaccttgtggtccgcccatctcagcctcccaaagtgctgggattacaggtgcgaggcaccgcgccccgcgccctgcckatgaacctaaattttaactaaacagtggccttatctactttcagaccatgtggtatatttacatgactacaggagaagctttgctaattcagaataaatt

SEQ ID NO: 537455 - DNA, 201 bp, Homo sapiens
ctacaggagaagctttgctaattcagaataaattatgttacttaaattggcgactgtctttaaaaaaaaagtgattttttggatgcagtagctcgtgcctrtaatcccagtgctttgggaagctgagataggaagatctcttgaactccggagtttgagaccagcctgcgcaacacagtgagaccctaatcactacacccc

SEQ ID NO: 537456 - DNA, 201 bp, Homo sapiens
taatatttataggttggtaaaatagattgtttttcatggataatttttaacttcattatttctgtacttgtacaaactcaacactaacttttttttttttwaaaaaaaaaaggtactaagtatcttcaatcagctgttggtcaagactaacttcttttaaaggttcatttgtatgataaattcatatgtgtatatataatt

SEQ ID NO: 537457 - DNA, 201 bp, Homo sapiens
taaatttatttattattattattttttgagatggagtcttgctctgttgccaggctgtagtgcattggcgcgatctcggctcactgcatcctccacctccygggttcaagcaattctcttgcctcagcctcccaagtagctgggactacaggcacgtgccatcacgatcagcacttttagtagagacggggtttcaccatg

SEQ ID NO: 537458 - DNA, 201 bp, Homo sapiens
aatatttataggttggtaaaatagattgtttttcatggataatttttaacttcattatttctgtacttgtacaaactcaacactaacttttttttttttawaaaaaaaaaggtactaagtatcttcaatcagctgttggtcaagactaacttcttttaaaggttcatttgtatgataaattcatatgtgtatatataattt

SEQ ID NO: 537459 - DNA, 201 bp, Homo sapiens
aactttcctgtgcgttgtaggatgtttggcaatgtccctggccggccaggtgcagcggctcacacctgtaatcccagcactttgggaggctgaggtgggcrgatcacttgaggctgggagttcagaagagaccagccaacatggtgaaaccctgtctctactaaaaatacaaaaattagccgggtgtggtgacacacatga

SEQ ID NO: 537460 - DNA, 201 bp, Homo sapiens
agttgcatttgctttaatttgttggctaaatgcttaaaaggcttaaaattggcctgacttaaaaattccttatctgtgttaaagatggaatatgaggtatrtttaattttactcagttatttgggagttttatttctgaaataagggtagggttgtatttttatttcttaaaagaagtttcagactaaaattttctttctc

SEQ ID NO: 537461 - DNA, 201 bp, Homo sapiens
tgattatacagttccaaagtaataagatgttaattgtaattcagccagaaagtacatgtctcccattgggaggatttggtgttaaataccaaactgctagccctagtattatggagatgaacatgatgatgtaacttgtaatagcagaatagttaatgaatgaaactagttcttataatttatctttatttaaaagcttag

SEQ ID NO: 537462 - DNA, 201 bp, Homo sapiens
acctctgcacaccagcctgagtgacagagcaagacccatccctgaaaagaaaaaacttggctgttttactttgctttcaatttgtagtatattctacttartataataaacttactttctgtgaggtgcttgaatactttttaatggttatttatgaagtggtgaactgtaattctgtatttgtacatttggatgtacaaa

SEQ ID NO: 537463 - DNA, 201 bp, Homo sapiens
atgaggaggatagagcctcacatgcaagctctagtgactggactccaaggccacggataggtatggctcagagctgttaattttagagagtaaatgtacgktttttggtttgtttgttttgagacagagtttcgctcttgttgcggaggctggagtgcaatggcgcgatctcggctcaccgtaccctccgccttccaggtt

SEQ ID NO: 537464 - DNA, 201 bp, Homo sapiens
gaaacaataacttctgaaatctctatttgaaatgtcaggatttttttgtacgattagtgggcacgtctcaaagaaatgaagaattgaaatattatacaccttttttttttttcttttttttggatacagggtcttgctgtgttgccctggctggagtgcagtggtgtcatcatggctcactgcagtctcagcctctcctgg

SEQ ID NO: 537465 - DNA, 201 bp, Homo sapiens
ttaggttccataccccatgaagtgcctcagatattaattaatagagaacctttgcctcatctgcattttgatgtagagcttcttggagactgtgatgtcayaattaatgaattgtgtcataggttaggtggtgaatatgccaaactttgctgtaaccctgtaaagctttcagaaattactgaaaaacctccacgaacacaa

SEQ ID NO: 537466 - DNA, 201 bp, Homo sapiens
tttttaatacttgataaatgattgccaacagaatcaaaaacaccttgttttctatcttttttcaccatataatattcttgagaataatttcgtaacagcasttaacagatataccttatttttcaaagaaggctgtgtagcattctattttaaagttgtttcacagtatatgagtctcctattgataggtatctgcatttt

SEQ ID NO: 537467 - DNA, 201 bp, Homo sapiens
ccggaaaggttaaggccataatgagccatgatggcaccactgcactccagcctgggcgtcagagcgaaactgtctaaaaagaaaaaaaacaaaaagccggrcgcggtggctcacacctgtaatcccagcactttgggaggctgaggcctgcggatcacgaggttaggagatcgagaccatcttggctaacatggtgacacc

SEQ ID NO: 537468 - DNA, 201 bp, Homo sapiens
cccatgaagtgcctcagatattaattaatagagaacctttgcctcatctgcattttgatgtagagcttcttggagactgtgatgtcataattaatgaattrtgtcataggttaggtggtgaatatgccaaactttgctgtaaccctgtaaagctttcagaaattactgaaaaacctccacgaacacaaaaagaattggctt

SEQ ID NO: 537469 - DNA, 201 bp, Homo sapiens
atgaagtgcctcagatattaattaatagagaacctttgcctcatctgcattttgatgtagagcttcttggagactgtgatgtcataattaatgaattgtgwcataggttaggtggtgaatatgccaaactttgctgtaaccctgtaaagctttcagaaattactgaaaaacctccacgaacacaaaaagaattggcttatt

SEQ ID NO: 537470 - DNA, 201 bp, Homo sapiens
cttagtcttgagggactgcatttacacctatgccttttactctagggtcttttattcatattgctagaaatttggagaagaaagaaaggcataatctctgsagaaaagccattatttctgcagatagttctttttttttttgagatggagtctttctttgtcacccaggctggagtgcagtggtgtgatctaggctcacta

SEQ ID NO: 537471 - DNA, 201 bp, Homo sapiens
tttaaaataagtttctctccccctcttactcttttagcatattgcttttgttagagctttttttttctttttctttattttttattttcattgcttttctyctctaccccccagcacacttaagtctgcaactttttggctgtcccgttggtctgcgttttcaattgctttttgcaaactgacacctgtgcagtttgcttt

SEQ ID NO: 537472 - DNA, 201 bp, Homo sapiens
catgtctctgaagtatttcttcttttgcctcaaaatccttttttacccctttaaagtatatatggtacagaaagattcaggaagaaaatagttagcatttkggaattttggtaaaatacacgagaacctttcaataccttatatagaaaacagccctataaaggctcttcaaattatgaaattggcttcttagtatctaag

SEQ ID NO: 537473 - DNA, 201 bp, Homo sapiens
tccagccatctctctgtcacaaattcatagccttgtcagataaggaaggaaaactacttcgcaactatacccagaacatagacacgctggaacaggttgcrggaatccaaaggataattcagtgtcatggttagtaaacttcagagtggttttctgtaatttattttagttttataggaagatatttcctataaagctgac

SEQ ID NO: 537474 - DNA, 201 bp, Homo sapiens
atactttaaaatgctcatctatttcatttttaaaattatgtgtgtgggattatcagtatttttttgttaaacatatgacatctgtagtttatttcactaaygtaaattttttctaccatttgcttgatacaggaaatatatcctggacaattccagccatctctctgtcacaaattcatagccttgtcagataaggaagga

SEQ ID NO: 537475 - DNA, 201 bp, Homo sapiens
caagatttctacctacattatatcatagctcctaaaggagatgcagggaattgaaactctgcttttgttaagggatgtcagtctgatggagaaattgggtrtttgttagatctttatgagaaactggaaacctaattggtattcacaagtgaaaagcttagtgttgggaagagtaacagattcctaccttccctccatatt

SEQ ID NO: 537476 - DNA, 201 bp, Homo sapiens
tcattgggatatagcattaattctgagtgtaccgagaatgaaataccattaaattgcattttcttactttgcaaaaaaccctcacagaatgctaactcatwacttcagaaaataaatgagattttgaattacttgataagttgactttaagccttttcccccttattgtaggtccatatacttttgttcagcaacatctta

SEQ ID NO: 537477 - DNA, 201 bp, Homo sapiens
gtagtttatttcactaatgtaaattttttctaccatttgcttgatacaggaaatatatcctggacaattccagccatctctctgtcacaaattcatagccytgtcagataaggaaggaaaactacttcgcaactatacccagaacatagacacgctggaacaggttgcgggaatccaaaggataattcagtgtcatggtta

SEQ ID NO: 537478 - DNA, 201 bp, Homo sapiens
atcttagaggagttttcaaaagcgtcttagactgtatgtgtatatacacacacattctgaagcagtaggtgggtcttggggcctgagatctcgggtgaatstaaatttaggttcacaggtgatactgtagattcacagtgtctacagagtacactatgaatttgtggtgactacattattgacaaaatattttaggtttat

SEQ ID NO: 537479 - DNA, 201 bp, Homo sapiens
cctgggtagtagaacctagaagttgcagtgggaatttttttttaatttgaaagattaaataggtaaaaagtcatctttaatctctattaaacttttttgtrtaatgtcagaagtgaaagttccccacatctgcttacagcctgtttgtatccttcctgacttgattgattaaatggacatctctatatacatatgcatata

SEQ ID NO: 537480 - DNA, 201 bp, Homo sapiens
attctacaatggcttagaagatgagcctgatgttccagagagagctggaggagctggatttgggactgatggagatgatcaagaggcaattaatgaagctrtatctgtgaaacaggaagtaacagacatgaactatccatcaaacaaatcatagtgtaataattgtgcaggtacaggaattgttccaccagcattaggaac

SEQ ID NO: 537481 - DNA, 201 bp, Homo sapiens
ccaaagtgttgggattacaggtgtgagccacaatgtccagctgataaatttaattttgcttttctgagttttcatttatggtaatggttaaatcagctagsctttacagttgttactcacatataattctttgtccatcctttaattctcacattgggaactgactaaaaaaagaaagcttccagtctgggcacagtggct

SEQ ID NO: 537482 - DNA, 201 bp, Homo sapiens
attttattagagattgtaaaggttataacatcactttggtgtttcgtagtcaagttttaacataaggatgtgcctgaaaaatcatttgtaattagagaatrggaagattcttgggttgcatttttgtcagcaaattgcagaggatcattattctgctctagagttgcaccgtccagttcagaagccactagccacatgtgg

SEQ ID NO: 537483 - DNA, 201 bp, Homo sapiens
agttagcattttggaattttggtaaaatacacgagaacctttcaataccttatatagaaaacagccctataaaggctcttcaaattatgaaattggcttcwtagtatctaagccgaacataaaatgtcagatcataagcaagttgttgttgtagtagtttttctccttcctctccctttttgtgcctgtcagatttggacc

SEQ ID NO: 537484 - DNA, 201 bp, Homo sapiens
tgtctttacttttaaaagtaatacttggtgctaagaatttcaggattattgtatttacgttcaaatgaagatggcttttgtacttcctgtggacatgtagyaatgtctatattggctcataaaactaacctgaaaaacaaataaatgctttggaaatgtttcagttgctttagaaacattagtgcctgcctggatcccctt

SEQ ID NO: 537485 - DNA, 201 bp, Homo sapiens
tgcctcggcctcccaaagctctggaattagaggcgtgagccaccgctcccggctatcttttctgttttttaagtagacttaatttatttttagattttggytgaaactgagtgagcagaattcctaaagatgaagaaactgttccaatgaacagtgcaagctgaccccataggcatgctttacacacgccgtgtaaatgtt

SEQ ID NO: 537486 - DNA, 201 bp, Homo sapiens
taaggcaggagaatggtgtgaacccaggaggcggagcttacagtgagccgagatcgcaccactgcactccagactgggcgacagtgtgagactctgtctcaaaaaaaaaaaaacaaaaaaaaaaagaaaaaattcttccctacttaaaataatttgttgaaatggtttattttcttctcaagttgcatttgctttaatttg

SEQ ID NO: 537487 - DNA, 201 bp, Homo sapiens
ggggagaattgcttgaagccaggaggtggaggttgcagtgagccgaaagcgcttaaggagaaataagtaaggacaaagagtgcaggatagtatcctgacayggaggatggggagggtatgtaaatattgtcgatattttactgaatttctaaatattacaagaatagaatattcataggataacctaagcttttctgtgag

SEQ ID NO: 537488 - DNA, 201 bp, Homo sapiens
acacctggctaatttttgtatttttagtagagatggggtttcaccatattggccaggctggtctgaaactcctgaccttgtgatccgcctgccttggcctmccaaagtgccaggattacaggcgtgatccaccgtgcctggctatacattgttttttttaatgaaaatagagaattgttgtagtattgaggtaatagaatc

SEQ ID NO: 537489 - DNA, 201 bp, Homo sapiens
actctgtcgagccatcacagctcgttgcagccttgaactcctgggctccttgaacaggaggctcctgcctgagcctcctgagtagctgagaccataggcaygtaccatatacctagctaaatgtgtttttgactttcttttttctttgtagagtcaagttctcactatgttgtccaggctggtcttgaaatcctgggttcc

SEQ ID NO: 537490 - DNA, 201 bp, Homo sapiens
actcctaacctcaggtgatccgcccaccttggcctcccaaagtgctgggtttataggtgtgagccgccgcgcttggctcaacatcttattgtttgagacagggtctccttctgttatccaagctggagtgtagtagtgtgatcttacagctcactgcagcctccaactcttgggctcaaatgattctcctgtctcagcctc

SEQ ID NO: 537491 - DNA, 201 bp, Homo sapiens
atttttatttcttaaaagaagtttcagactaaaattttctttctcaactcttacctaattatatggtaagagagctagctagttcctataaaggtagaagrtttaattttacaaattatgccatgcacattttaggtgtctgtttcatgtggaatacctgacttcaggtcaagggatggtatttatgctcgccttgctgta

SEQ ID NO: 537492 - DNA, 201 bp, Homo sapiens
actgcagcctccaactcttgggctcaaatgattctcctgtctcagcctcccaagtagctagtactacaggtgtgcaccaccatgccctgctgtttctttgttttttttatatggacagtcttgctatgttgcccaggctggtctcaaactcctgagctcgagtgattctgctgcctcagctactcaaagtgctgggattgt

SEQ ID NO: 537493 - DNA, 201 bp, Homo sapiens
aaattgcagaggatcattattctgctctagagttgcaccgtccagttcagaagccactagccacatgtggctgttgagtacttgaaatgtattgatatgtrcaataagtgtagaagacatattggattttagagatccagtatggaaaatacaaagtatttcattagttttattcatcaaatattaaacaaatattggttt

SEQ ID NO: 537494 - DNA, 201 bp, Homo sapiens
tttaataaatatgtgaatgaaatgggaaagtatttcgatgtagaaagcattatcagttttttataccaaaggtataaccatcttgaaagtggatctttttrtgttctcactcttacaaatggcttgattatttaaacatagtgaagatcagtttctctttggtgtctgtaatttatttatttatttatttttgttttctca

SEQ ID NO: 537495 - DNA, 201 bp, Homo sapiens
gcagtggctcatgcttgtaatcccagcactttgggaggacgaggtgggtcgatcatttgaggtcagaagtgagaccagcctggccaacatggcaaaacccygtctctcttaaaaatacaaaaattagcctggcatggtggcatatgcctttaatctcagctgcttgggaggctgaggcaggagaattatttgaactcggga

SEQ ID NO: 537496 - DNA, 201 bp, Homo sapiens
tcatgttatctcatttatcgataacctcagaaaagtagaaaacaaaaataataaaaacagaagtattggccttgacagttaattatagaaaacctcagatrttaatttgcttttgatttcaaaagatgctgcagttgcatgcattcaattattttaaataatcttttctggctgagtgcagtggctcacgcctgtaatcct

SEQ ID NO: 537497 - DNA, 201 bp, Homo sapiens
aagagtgtttccaaaatatatgtatgttttttgaagtttactttttttttttttctttttttgagaagtagtcttcctttgtcccccaggctggagtgcartggcatgatcttggctcatagcaacctctgcctcccaggttcaagtgattctcctgcctcagcatcctgagtagctgggattacaggcgcccgctaccat

SEQ ID NO: 537498 - DNA, 201 bp, Homo sapiens
attttaggttccataccccatgaagtgcctcagatattaattaatagagaacctttgcctcatctgcattttgatgtagagcttcttggagactgtgatgwcataattaatgaattgtgtcataggttaggtggtgaatatgccaaactttgctgtaaccctgtaaagctttcagaaattactgaaaaacctccacgaaca

SEQ ID NO: 537499 - DNA, 201 bp, Homo sapiens
tggtaaggattaaaactttagctttaaacttccagcaggttgatattctaatgaatgataaatcaaaaaaaaattttaaatattcttgtattgacagtgcttttttttttaaatcaccctaccttgatatctgtaattttagtttaaactttcccatttttctttaaagaaaaaaatctgaatttgcagccaacaaaaatt

SEQ ID NO: 537500 - DNA, 201 bp, Homo sapiens
tcatgcttgtaatcccagcactttgggaggacgaggtgggtcgatcatttgaggtcagaagtgagaccagcctggccaacatggcaaaaccccgtctctcytaaaaatacaaaaattagcctggcatggtggcatatgcctttaatctcagctgcttgggaggctgaggcaggagaattatttgaactcgggaggtggagg

SEQ ID NO: 537501 - DNA, 201 bp, Homo sapiens
aattacaaaatttgttattgttaaacttggaggtatatatatttgaaagagtcattttattttattttactttaagtgccgggatacatgtgcagaatgcrcagatttgttaacataggtatacatgtgccatggtggtttgctgcatctatcaacctgtcatctaggttgtaagccccacattcattaggtatttgtcct

SEQ ID NO: 537502 - DNA, 201 bp, Homo sapiens
tcgcttgaactcaggaggcagaggttgcaatgagccgagaatgtgccactgcactccagcctgggtgacagagtgggactctgtctcaaaaaatcaaaaasaaacccagaagtaatgctaaactctacttctaatttatgtgaaaaattaagacaaaggtagagttcaacttagactttttggtggaatgtgtttttaatg

SEQ ID NO: 537503 - DNA, 201 bp, Homo sapiens
acttggaggtatatatatttgaaagagtcattttattttattttactttaagtgccgggatacatgtgcagaatgcgcagatttgttaacataggtatacrtgtgccatggtggtttgctgcatctatcaacctgtcatctaggttgtaagccccacattcattaggtatttgtcctaatgcttttccaccccttgccccc

SEQ ID NO: 537504 - DNA, 201 bp, Homo sapiens
gttcattcttgtagtaacagccatgccataacggtgatatgtcgatatagtttacccaaaagggtgtgtatataaaagtgttcacataaaatttaaatccytattactctcaggaaaatttctttgtcatatatattctcatactgtctgtttcctcctctagtttagaatcagaggaggagagagagagatttcagttgc

SEQ ID NO: 537505 - DNA, 201 bp, Homo sapiens
aaactcaggaccatagaggttaaatacctcatgcacagtaactactaagaagtggaagaaccagattaaaatccagtctatttatgcttagagcctgcccscttaactactatgcggtgttgtctcagatgtagaacacatctttgttttctctgaggacttagaaaaaacacgcgtgattcttctccactgaatatagga

SEQ ID NO: 537506 - DNA, 201 bp, Homo sapiens
ggtagattttttttttttttttttttttttgtgacggagtctcactctgtcgcccaggctggagtgcagtggcacgatctcagctcactgcaacctctgcstcccaggttcaagagattctcctgcctcagccttctgagtagctgaaattacaggcatgcgccaccttgctcggctgattcttgtatttttagtagagac

SEQ ID NO: 537507 - DNA, 201 bp, Homo sapiens
accagaaaggtgtaatatttataggttggtaaaatagattgtttttcatggataatttttaacttcattatttctgtacttgtacaaactcaacactaacttttttttttttaaaaaaaaaaaggtactaagtatcttcaatcagctgttggtcaagactaacttcttttaaaggttcatttgtatgataaattcatatgt

SEQ ID NO: 537508 - DNA, 201 bp, Homo sapiens
agttcgagagccactttggagagaacttgagataggccacctaccagtgtggtaaccaggcttttgagaattcgtctgggatacggtacaataaatactayatctattatgtgtgaagagatgttaagttagggacatactgtgaattcaaggatagaaaacttttccatcagtttttagggatcctactctttcacttaa

SEQ ID NO: 537509 - DNA, 201 bp, Homo sapiens
atgtgtgaagagatgttaagttagggacatactgtgaattcaaggatagaaaacttttccatcagtttttagggatcctactctttcacttaaaccccaartggccaagctaggattgatttggtgtgctgtagaaagaacttcattggtattcatggattcacattacatcttagaggagttttcaaaagcgtcttagac

SEQ ID NO: 537510 - DNA, 201 bp, Homo sapiens; identical to SEQ ID NO: 224687

SEQ ID NO: 537511 - DNA, 201 bp, Homo sapiens; identical to SEQ ID NO: 224689

SEQ ID NO: 537512 - DNA, 201 bp, Homo sapiens; identical to SEQ ID NO: 224652

SEQ ID NO: 537513 - DNA, 201 bp, Homo sapiens; identical to SEQ ID NO: 224776

SEQ ID NO: 537514 - DNA, 201 bp, Homo sapiens; identical to SEQ ID NO: 224723

SEQ ID NO: 537515 - DNA, 201 bp, Homo sapiens; identical to SEQ ID NO: 224668

SEQ ID NO: 537516 - DNA, 201 bp, Homo sapiens; identical to SEQ ID NO: 224784

SEQ ID NO: 537517 - DNA, 201 bp, Homo sapiens; identical to SEQ ID NO: 224672

SEQ ID NO: 537518 - DNA, 201 bp, Homo sapiens; identical to SEQ ID NO: 224719

SEQ ID NO: 537519 - DNA, 201 bp, Homo sapiens; identical to SEQ ID NO: 224802

SEQ ID NO: 537520 - DNA, 201 bp, Homo sapiens; identical to SEQ ID NO: 224660

SEQ ID NO: 537521 - DNA, 201 bp, Homo sapiens; identical to SEQ ID NO: 224726

SEQ ID NO: 537522 - DNA, 201 bp, Homo sapiens; identical to SEQ ID NO: 224685

SEQ ID NO: 537523 - DNA, 201 bp, Homo sapiens
ggaattgtgggtaaccatcctggccttcctttccttctttagtgacagccccaatgctgttcatgaggtggagaagtggctgccccggctgcatgctcttrtcgtaggacctggcttgggtagagatgatgcgcttctcagaaatgtccaggtaatgtgtatactcactcacttccctcatgacaggcttagccttaggcg

SEQ ID NO: 537524 - DNA, 201 bp, Homo sapiens
ttctgcccagcctgtccctgtggacacacctgcaagtaatcgctgtgcctctcccagcggatggcgcgtcttcccattaatgcgcttggattggatgaacratggtgtagtgggcttgggacaggcagggactcgggtcagtcagcccctcctgcagtgcactctggacaggtcactttgtctgtgtcctgagtgcctcat

SEQ ID NO: 537525 - DNA, 201 bp, Homo sapiens
cccagcctgtccctgtggacacacctgcaagtaatcgctgtgcctctcccagcggatggcgcgtcttcccattaatgcgcttggattggatgaacgatggygtagtgggcttgggacaggcagggactcgggtcagtcagcccctcctgcagtgcactctggacaggtcactttgtctgtgtcctgagtgcctcatctgta

SEQ ID NO: 537526 - DNA, 201 bp, Homo sapiens
agccgcgcggaggcggtcgggaaaccggaaaacgcttccaatggctgtgtttccggcgacggcgcgggggcagctgggaatccggaatgctgcccgatggycctgggtcctcgctgtggggcaatccgggcttgcagacgaggtaaggtcgattccatttggcccggggatggtcacacgcgcgggggccggaactgccgt

SEQ ID NO: 537527 - DNA, 201 bp, Homo sapiens
ggtttactcctacatgttaagagccttattgttttggttgttactttagctctgcggtgcatgtcgagctgatgctggtgtggtaggaggaggctccagcrtcagtcttttgcttgtgggtgtccagctgttgcagcaccatgtgctggagagactcctttttcctcccaacttgtcatcctccctgacaatccgttgacc

SEQ ID NO: 537528 - DNA, 201 bp, Homo sapiens
ccagttcccgctcgcgcctctccctccacacctccctgcaagctgagggagtgggctccagccttggccagcccagaaaggggctcccacagtgcagtgghgggctgaagggctcctcaaatgccgccaaagtgggagcccaggcagaggaggtgctgagagcaagcgagggctctgaggactgccagcatgctgtcacct

SEQ ID NO: 537529 - DNA, 201 bp, Homo sapiens
atgcaagccctgttcgtcctgaagagggtgaaggacgagctccatgcttctgcccagcctgtccctgtggacacacctgcaagtaatcgctgtgcctctcscagcggatggcgcgtcttcccattaatgcgcttggattggatgaacgatggtgtagtgggcttgggacaggcagggactcgggtcagtcagcccctcctg

SEQ ID NO: 537530 - DNA, 201 bp, Homo sapiens
cacccgtggctactgtcacattcacacacatggccatgctgacacctgctctcacttctgccctgtgcagtgcttgtgtgcagccaggaaggcagcagccrcaggtgtggagggcaaggggacctcctgtcgggctccctgggcgtcctggtacactgggcgctccttgctggaccacagaaaacaaatgggtaaggccac

SEQ ID NO: 537531 - DNA, 201 bp, Homo sapiens
attttcaacttgagcataaattggttgccattgagaatttaagaatctggaatattgcagcttttggttaaacttaatgcatggttggagatgttatggcracactaaacaaagtattcctgaactttccttagctccttggtagtaactgggaagacagaaatgaagaaaatcacatgagaatgaagaattctttagcag

SEQ ID NO: 537532 - DNA, 201 bp, Homo sapiens
ctatggacagcgatgacagccatggatctgtgctaagactcagccaagccctgggcaacgtgacggtggtccagaaaggagagcgcgacatcctctccaayggccagcagggtgagtggcggctgccctctgtgcatgggccagtgccaggtcagtcagcatggccacaccgagcatgagccctggaagacctctcccgtg

SEQ ID NO: 537533 - DNA, 201 bp, Homo sapiens
acattgatataaatgttgatttttaacatccgtaagttgaagtctgactaaattgtttttctctgtgatttcataagtcacaatttatattttatatgacyttaaatatttaatttgaagtactggtatatttaaaggtgctaaaactacacgcatgcatctctactagtggttcttaacccaggctcattttgccccatc

SEQ ID NO: 537534 - DNA, 201 bp, Homo sapiens
aaagtattcctgaactttccttagctccttggtagtaactgggaagacagaaatgaagaaaatcacatgagaatgaagaattctttagcagctcaacagartttctcggcctgctcccagatcggcgaagtttctacttgttactctctctgccggcgcccttcgttcctcctctgcttcccttccctagtctttcctccg

SEQ ID NO: 537535 - DNA, 201 bp, Homo sapiens
tgcaggtagctcagcaagcttcattgtgtctctccttggcccacagtttatagtgattctgtgccgggtcttgtgtgttggtctggaagaaggtgaaaagrtttggggttgggctgagcgcggtggctcacacctgtaatcctagcactttgggaggccgaggtgggcagatcacaaggtcaggagatcgagaccaccctg

SEQ ID NO: 537536 - DNA, 201 bp, Homo sapiens
aagaaaatcacatgagaatgaagaattctttagcagctcaacagagtttctcggcctgctcccagatcggcgaagtttctacttgttactctctctgccgrcgcccttcgttcctcctctgcttcccttccctagtctttcctccggcagggagctgggcaggggtccccgggtgtctccctgagtcccgactgcactgac

SEQ ID NO: 537537 - DNA, 201 bp, Homo sapiens
caaaaaaaaaaaaaaaaaaagaatttgggttgatggggattcataggatctttttatcttggggaatcccagcatctgctctatcagctaaggcagttacwtctactcataaagaaaattccttcaaaagttttgttgagtaaaaagtaaaactgtaagagttaaaagacaaagctcttttgctgtgaaacgctcagtgag

SEQ ID NO: 537538 - DNA, 201 bp, Homo sapiens
caggtcactttgtctgtgtcctgagtgcctcatctgtaatgtgatgatggcatcagcttcacggggttgtgaggatgagatgaggaaacctatgtaaagcygtgagtccccacatggtaagtgtcccatcaatgttagtgcccagtacgactggaatttgtattactcctgcaaagctctcagaacccagtcttgggtggt

SEQ ID NO: 537539 - DNA, 201 bp, Homo sapiens
aggcctgaaaacaacccgattaggtagattcctattcatagccccattcttctgatgacagattgagtcctggcaaggattcaagacgcccgtgggatctkgtagcaaagaaactgcagagatggttttttaaaaacgactttatttagatgatttacctaccatacccctcacccatttaaagtgaactatgcggtggct

SEQ ID NO: 537540 - DNA, 201 bp, Homo sapiens
tggaggacttgaggcatgctgggcctggtgcagtgatggcgctaaggagacccggggaaagacagtatcgtggtcacgtatgcttaggaagcagcacagcygtgtccttagggatgttcgcgtccagtaaagacactggtaactgcggtttcagccaacactcttcatggcagtgtcgacctcgggttagcttctgttgtc

SEQ ID NO: 537541 - DNA, 201 bp, Homo sapiens
caggcagtgcaaccaccaagccttccagaagcacggtcgctccaccaccacctccgacatgatcgccgaggtgggggccgccttcagcaagctctttgaamcctgagcccgcgcagaccagaagtaaacaggcaccttggacgggggagagcgtgtgtgtgatgggaaaatccggacccacgcgtgtgctgaaggcgtacg

SEQ ID NO: 537542 - DNA, 201 bp, Homo sapiens
ggtctttctgcttctctattttattcatttacttgattattttccatttattgtttgatggcctgatgttgcattttattaagagtctgctcaattttctktcactcttgggaaaagtgtcttagtcggttttgcgctgctgtagccgtaccacagactgggtaattgataatgaacaggcgtttactggctcacagttct

SEQ ID NO: 537543 - DNA, 201 bp, Homo sapiens
agccctgttcgtcctgaagagggtgaaggacgagctccatgcttctgcccagcctgtccctgtggacacacctgcaagtaatcgctgtgcctctcccagcrgatggcgcgtcttcccattaatgcgcttggattggatgaacgatggtgtagtgggcttgggacaggcagggactcgggtcagtcagcccctcctgcagtg

SEQ ID NO: 537544 - DNA, 201 bp, Homo sapiens
ggactcactgcaggtgatatcctgggcatcctcccacctacatggcctttaacaggtgcctgggtgatccctttagacacgagagcatgagtctcatggcrgatgggacagggctatctgtcgtcgtgtgtctgaggaagactttgctttttctctgtcttcctgtgttgtcatagctcagaggccctatggacagcgatg

SEQ ID NO: 537545 - DNA, 201 bp, Homo sapiens
gaagaattctttagcagctcaacagagtttctcggcctgctcccagatcggcgaagtttctacttgttactctctctgccggcgcccttcgttcctcctcygcttcccttccctagtctttcctccggcagggagctgggcaggggtccccgggtgtctccctgagtcccgactgcactgactgggtccatcagagggctg

SEQ ID NO: 537546 - DNA, 201 bp, Homo sapiens
gtatgtttacttaaaatttctttattgggatttttctggtagagagtttgattatttaaatatgattaaagcaaatgttttctgatagaaatctaaataayatcttagggtaatcatagctaatagaaacaccgttaagtctatcctgacatctgtgcataaacaagatcacttcagttgaagctcatttttttttgagac

SEQ ID NO: 537547 - DNA, 201 bp, Homo sapiens
tctcctgaaatgcatgaaggttttatgtaaaagatcgacatttctggctgggcgcggtggctcatgcccgtcatcttagcattttgagaggccgaggcggrcggatcacctgaggttgggagtttgagaccagcctgaccaacatgcagaaaccctgtccctactaaaactacaaaattagccgggtgtggtggcgcatgc

SEQ ID NO: 537548 - DNA, 201 bp, Homo sapiens
gctgggcgcggtggctcatgcccgtcatcttagcattttgagaggccgaggcgggcggatcacctgaggttgggagtttgagaccagcctgaccaacatgsagaaaccctgtccctactaaaactacaaaattagccgggtgtggtggcgcatgcctgtaatcccagctactcaggaggctgaggcaggagaatcgcttga

SEQ ID NO: 537549 - DNA, 201 bp, Homo sapiens
agtagggaaatgaaggagcccgttcttctggggtcagaataagacagagacggaggggtggagaggtgggtgggggagcttgggcctgttggaaatggccrgggcccagctccagaggcagggaggccctgtgggctgtgtgtgacaggtttgcagaaggtggaaacgaagggcctctgagcaataacaagacccttcctg

SEQ ID NO: 537550 - DNA, 201 bp, Homo sapiens
caacctcttggtttactttgtcaatttaaagatgttactgaaagtcatttatgaaatttgacaaatccctagcttgcttctgttctgttttgctgctgtgkttggtacgtagctgtttgtaagttgtccttgggtgtgaaggataccttctgcctctgacggaaagcctgccgtggctcctctgtttctgcttgctttctg

SEQ ID NO: 537551 - DNA, 201 bp, Homo sapiens
tgcagaaagccccgaagctgatgctggtagtggaatctcaggcactgagtgtggcgagtctcaactggccactcccacggagcctggggaggcttcagcargagccaagtgagagcagggcagaggccgggcccagcgccagcgaggcatctggggagccgtgcccttgttagcgctgaaaatggaagcccctccattcag

SEQ ID NO: 537552 - DNA, 201 bp, Homo sapiens
agcatctccatttctcttctgtgagcccatcaaggtggtggctgcaggtgctaggtgtggcagacccgggcttctggagggtgggcagggctgtcatccaktggcctcatgtgtcctcattgccgggatggcagagtctgggaccatcccccaaactaggtgtgtccacatgaatttgagagccgaggaggtaggggtgtg

SEQ ID NO: 537553 - DNA, 201 bp, Homo sapiens
aacaaatacatgacagtaagtaaatgaggaattgtgggtaaccatcctggccttcctttccttctttagtgacagccccaatgctgttcatgaggtggagragtggctgccccggctgcatgctcttgtcgtaggacctggcttgggtagagatgatgcgcttctcagaaatgtccaggtaatgtgtatactcactcactt

SEQ ID NO: 537554 - DNA, 201 bp, Homo sapiens
aggtgctaggtgtggcagacccgggcttctggagggtgggcagggctgtcatccagtggcctcatgtgtcctcattgccgggatggcagagtctgggaccrtcccccaaactaggtgtgtccacatgaatttgagagccgaggaggtaggggtgtgggcaggagtcttactgttcattctgctgtgttcactcgagttgcc

SEQ ID NO: 537555 - DNA, 201 bp, Homo sapiens
acatgagaatgaagaattctttagcagctcaacagagtttctcggcctgctcccagatcggcgaagtttctacttgttactctctctgccggcgcccttcrttcctcctctgcttcccttccctagtctttcctccggcagggagctgggcaggggtccccgggtgtctccctgagtcccgactgcactgactgggtccat

SEQ ID NO: 537556 - DNA, 201 bp, Homo sapiens
agaatgaagaattctttagcagctcaacagagtttctcggcctgctcccagatcggcgaagtttctacttgttactctctctgccggcgcccttcgttccycctctgcttcccttccctagtctttcctccggcagggagctgggcaggggtccccgggtgtctccctgagtcccgactgcactgactgggtccatcagag

SEQ ID NO: 537557 - DNA, 201 bp, Homo sapiens
agctctgagacgcctcctgtcccacgctctccggtgtccgtgtctacacaggggtccccatgatacccaccggccccagcagggcagaccggaccggggamgggcacggtgaagggctgcagcctggggtctgacgtggcccctagtgctgtctcaggagaaggctctggaggacttgaggcatgctgggcctggtgcagt

SEQ ID NO: 537558 - DNA, 201 bp, Homo sapiens
tcatcatctggtgtaggcctgaaaacaacccgattaggtagattcctattcatagccccattcttctgatgacagattgagtcctggcaaggattcaagaygcccgtgggatctggtagcaaagaaactgcagagatggttttttaaaaacgactttatttagatgatttacctaccatacccctcacccatttaaagtga

SEQ ID NO: 537559 - DNA, 201 bp, Homo sapiens
gatgactttgtttggaaacccttttggaggcaccatgggaacagaaggaaacatgagtgacgctgacccttgagtgtgtgggtggggagctctgagacgcmtcctgtcccacgctctccggtgtccgtgtctacacaggggtccccatgatacccaccggccccagcagggcagaccggaccggggacgggcacggtgaag

SEQ ID NO: 537560 - DNA, 201 bp, Homo sapiens
ctcggactcccggaaggcctgtgcagtgagcacggctccttgttctgtgcaggatggcctgtggctggtcgctcagcagccggccctcatccatggctacyggaaggctgtgctcactcccaaccacgtggagttcagcagactgtatgacgctgtggtgagtcagtggaccccctggagggtagatgcaagccctgttcg

SEQ ID NO: 537561 - DNA, 201 bp, Homo sapiens
actgtgtgccctagccctggacctgtctccgagtacatagacgtttcctgtgtgcctcctgccagggagtagtggagggttaatggtggttttcgctgtgrtaaacctgctttctcctcaggggcatatcagacttgaaattgacaatttggggtcctgagattgaaacaggagtcaaaaccagagcccagggtagctgcg

SEQ ID NO: 537562 - DNA, 201 bp, Homo sapiens
gagccactgcacctggcctcaattgaagcccatttttaaaacctaaagcgtgatttgtattgtactccaccaaagtgcacctgggatgcctttgtaggtcscagctgaagccgctgatcctgcagtttcccatgagctgagcaagtgctaacggccggcctcttcctgtgacccttcctcctggagggtgaccagaccgag

SEQ ID NO: 537563 - DNA, 201 bp, Homo sapiens
gagctagtacgtttctcatgcacgtcaccagggctgagtaatgagcgctggacgcctgtgtctggcgggtgggcagcgatgccggagcgatccctgagtcrgcctcttgtgctccttcatcagggcgcagacttgtcccacgtgttctgtgccagtgcggccgcacctgtgattaaggcctacagcccggagctgatcgtc

SEQ ID NO: 537564 - DNA, 201 bp, Homo sapiens
acagccacatcagaatttatggatctactacagtgtatttagttcatttacactgttttcagctttttcttcatgttaacatcagtggtgtcctgaatctrtgtgttttgtgcactcttttgggtgaagttccattgctgaatcagagtaaggacgtttaaatttttgagagatgcccccagatttctccctagtgtacca

SEQ ID NO: 537565 - DNA, 201 bp, Homo sapiens
atatctgtttacctttctgaattattcatttttcttgtctttcagttttagaaagagcgttttcgctacgtaaagcacattcgataaaggatatggaaaawactttgcagctggtgagaaatatcatacctcctctgtcttccacaaagcacaaagggcaagatggaagaataggcgtagttggaggctgtcaggagtaag

SEQ ID NO: 537566 - DNA, 201 bp, Homo sapiens
gacgcaggagaattgcttggaccagggggtcgtaggttgcagtgagccgagattgtaccactgcactccagcctggcgacagagtgagactctgtctcaaaaaaaaaaaaaaaaaaagaatttgggttgatggggattcataggatctttttatcttggggaatcccagcatctgctctatcagctaaggcagttacatct

SEQ ID NO: 537567 - DNA, 201 bp, Homo sapiens
taaggccacgtcttcatttattctactttgaaaccgtctgatttttctaagctgtttcagtagctcatgcgttgaataagtagccctggaaacactgacartgaactctaggcttcactggagagatctcggcacagacgaaccctcttggcagaagcttccaccccacacttgggcctgggcctgtccatcattcactgt

SEQ ID NO: 537568 - DNA, 201 bp, Homo sapiens
ctggctgggtgtaatccgagctagtacgtttctcatgcacgtcaccagggctgagtaatgagcgctggacgcctgtgtctggcgggtgggcagcgatgccrgagcgatccctgagtcggcctcttgtgctccttcatcagggcgcagacttgtcccacgtgttctgtgccagtgcggccgcacctgtgattaaggcctaca

SEQ ID NO: 537569 - DNA, 201 bp, Homo sapiens
ctcagtatttttcagtgatccactttttgattaactaggaaataactctgaggagccctgactgaattactccctcgtgtgtgtcagtgttaagttttgtygtagtggggaaatgagcctgttttttccactttctgcttttctgtatttaactggacttcataccacaagcatgttttttgtatttaggatagaaacact

SEQ ID NO: 537570 - DNA, 201 bp, Homo sapiens
ttccaaatgcagcctgataggacactcagtatttttcagtgatccactttttgattaactaggaaataactctgaggagccctgactgaattactccctcrtgtgtgtcagtgttaagttttgtcgtagtggggaaatgagcctgttttttccactttctgcttttctgtatttaactggacttcataccacaagcatgtt

SEQ ID NO: 537571 - DNA, 201 bp, Homo sapiens
agttcgtctcaaaaaagaaaaaaaaaattgcatgtgttaatgtaattttgaacatcatatttgcttacagaaatccattgggtaaaaatctatagcattcrtaataactttggagagggttttggttaatgggctattatgtgtactaacaatatctgtttacctttctgaattattcatttttcttgtctttcagtttta

SEQ ID NO: 537572 - DNA, 201 bp, Homo sapiens
gctgtacgggccgccactggacgcaggtacccgaccgctgaccgcctctgctggctcgcgggggggaagcgccgccgaggggcagcccgcgcgcggggccrgggcgccgtgtggcctgcggggcggagtagggagaggacggaggcctcctggaacggcgcggcgacggctgggcgcggcttgggtgatgggagcctccgt

SEQ ID NO: 537573 - DNA, 201 bp, Homo sapiens
ggccctcctggggcccagggacgcggcgggcgtgcaggcgagctggccggctgagcgggcttcgcgcacaccaggagcagggccgtgtctgcatccccaayttgaagtcccagtgcgactgggcaagtacagaccctgcacgtccttggacgagagggactggatattgcgacgcctgggccgcagaaaaggactccacca

SEQ ID NO: 537574 - DNA, 201 bp, Homo sapiens
gttttcaatactttaaattattcttagcatgtatttttatgtccagaattggtgggttcttggtctcactgacttcaagaatgaagccgtggaccctcgcrgtgagtgttacagctcttaaggtggcgcgtctggagtctgttccttctgatgttcagatgtgttcggagtttcttccttctggtgggttcgtggtctctg

SEQ ID NO: 537575 - DNA, 201 bp, Homo sapiens
tttgttgctgtagtcattagatagattttaccttgtgtgtatgttgggcatcgtcagagagtttggctttttgttttcatcagcacacactgagaatgcaytgggtggcgctgagagggtactctacactgcacctcactcacaccagcagggaggcttcttaacactttatttagagatttatttgtagctctttacctt

SEQ ID NO: 537576 - DNA, 201 bp, Homo sapiens
taaagggaaattgaaatgaagtgatagtttattaagtaataatgcatttttttacttgataaaactttctggaaaattaaatggtcttccaaaatttcagrtacatttcaaaaataaacctgatagaaatagcatatgttgtcctggtggggtggctcatgcctgtaatcccagcactttgggaggctgaggcgggcagat

SEQ ID NO: 537577 - DNA, 201 bp, Homo sapiens
gttaacatttgaaatgttaagttcaaatggtgacgtcagtaagccagctggaacttgcttcactgccaagtgctgggaagtttagttgacctgctttggcycttttgctaacagaagctgtttatcttaggtgaatgctggtgagcagcctggattttactttgtgttaatacaattctattcaagtgaaaatgctatact

SEQ ID NO: 537578 - DNA, 201 bp, Homo sapiens
aagatgatgaaaatacattaaatgccactttgaacccaatttaagaggtgtgccatatttagaatgccatttctaggttatttaattaatacccagttgartgttggaatacagttgggagtaatatgatgaatctgtcagacttctgagcaccccagcggattacaggtgggagcttgctttccagtttgtgaggagaga

SEQ ID NO: 537579 - DNA, 201 bp, Homo sapiens
atcatggccagggaactgggaatctcacaaagtcttaagatttcacaacggaacaggagcaggaggaggcgactcccgctggtgggttgatcaagttgctrtgaaggtggtttgcacattttgggcttcaaaacactaccttctgtataagataaaggaatagctcagaacaggattccccccgtgttttcttcctagcta

SEQ ID NO: 537580 - DNA, 201 bp, Homo sapiens
gggcgtggtggcatgcgcctgtagtcccagctactcaggaggctgacgcaggagaattgcttggaccagggggtcgtaggttgcagtgagccgagattgtrccactgcactccagcctggcgacagagtgagactctgtctcaaaaaaaaaaaaaaaaaaagaatttgggttgatggggattcataggatctttttatctt

SEQ ID NO: 537581 - DNA, 201 bp, Homo sapiens
tgatggattttccatcctcagagtttctcagcaggtgctgtagaggaagtagggaaatgaaggagcccgttcttctggggtcagaataagacagagacggmggggtggagaggtgggtgggggagcttgggcctgttggaaatggccggggcccagctccagaggcagggaggccctgtgggctgtgtgtgacaggtttgc

SEQ ID NO: 537582 - DNA, 201 bp, Homo sapiens
catgtagttttttttttttaatagaaaacctttgaaaccttcactgtaatcctatcagggaaaaatgattccctgtttattattgttgttattttaaaacrtgtaagtaaagtgatatgaaaaatacataatgactaatgatttggggaattctcaggaattcagatttcctgcctccgaatgctgcgtattagtatctgt

SEQ ID NO: 537583 - DNA, 201 bp, Homo sapiens
ggaggatgtcaggtggtgaaggaaccgtagagagcggcagcagggagggggctgtgagagtgggcagaggggcagttggggcggcagcacagtgtgatgaygcctgggtcgagcccggcctctccacaccagagaggagccggcgcggagctccaggtgcggtgctgtgatgtgtcgggtgaccaagaggtgcagggctgg

SEQ ID NO: 537584 - DNA, 201 bp, Homo sapiens
tgtgttttgtgcactcttttgggtgaagttccattgctgaatcagagtaaggacgtttaaatttttgagagatgcccccagatttctccctagtgtaccamggtttgctttcccatgggtggggacacccttctgcgctgggtgctctgatgctgcaaacctttctaggagacccatgtaacattgcattttccagggttt

SEQ ID NO: 537585 - DNA, 201 bp, Homo sapiens
aaaaatacataatgactaatgatttggggaattctcaggaattcagatttcctgcctccgaatgctgcgtattagtatctgttggagaactggatgccctygctggggcgggggctgtcttcatgggttagcctaggagcccagctgttgttcatagcgtttccagtgggcttcgcctttcagagttcccagtgtcctgcc

SEQ ID NO: 537586 - DNA, 201 bp, Homo sapiens
gtgcagggctgggccccacagggtgtggggctgctgtcagggctgtggctctggccctgagtaagcagggcagggccagtgtgggtcataaaggctcctasgcggctgtggggctgggccggaggctgtggtaaggacctgtgggagggaagggtgcagtcagatggtgagaggggccggattctgggtatgtttggaaag

SEQ ID NO: 537587 - DNA, 201 bp, Homo sapiens
gggagcttgtcggggaggaaaggggacagaagccttaacagtgggctctaggagaggtcacaccgaacaggaaggagttctgaaaaagcaaacccctgccytgttctgaatgagaaactgcagcagggtcagtgcgttgtgtggggcctggtctataagcacacaaagtaggctttacagccacacatgtatgtgatggaa

SEQ ID NO: 537588 - DNA, 201 bp, Homo sapiens
actactaatttgacgcctaacttcagaagcttcactgtctacatgtgaacttttccagaaaaactgtgccatggacatttttcctctggggaattaacatytaaattctggtaactattaaaagacagatctggttaatttaaattgagtattgtatttttttccttaaacagctaaagctcacctttcaactttcttagg

SEQ ID NO: 537589 - DNA, 201 bp, Homo sapiens
tgatcgtccacccagttctgtgagtcgctctgcgccggcttctcgtaggttctctttccctcctgcatcatttggggttttggcactgacaccgaaagcgycctgatggattttccatcctcagagtttctcagcaggtgctgtagaggaagtagggaaatgaaggagcccgttcttctggggtcagaataagacagagac

SEQ ID NO: 537590 - DNA, 201 bp, Homo sapiens
tgttcgaggtgattgagtcccacatggaagcagtcagtgctgcagcttgcggatggtgccacattcctcgtgggcaggcagtagtagggtgctgattctcygccagtccagacataagaacttccttcttatgtccaggtcagcccctaccatgtaggttgtctgtgtgctcgaaaggtttcagaaccccacatgtaataa

SEQ ID NO: 537591 - DNA, 201 bp, Homo sapiens
caggagttctagaccagcatggccaacatgatgaaaccctatctctactgaaaatacaaaaattagccaggtgtggtagtagacacctataatcccagctrctcaggaggctgaggcaggagaattgcttgaacctgggaggcagaggttgcagtgagctgagatcacgccactgcactccagcctgggtgacagagtcag

SEQ ID NO: 537592 - DNA, 201 bp, Homo sapiens
ggagttctagaccagcatggccaacatgatgaaaccctatctctactgaaaatacaaaaattagccaggtgtggtagtagacacctataatcccagctgcycaggaggctgaggcaggagaattgcttgaacctgggaggcagaggttgcagtgagctgagatcacgccactgcactccagcctgggtgacagagtcagag

SEQ ID NO: 537593 - DNA, 201 bp, Homo sapiens
atcttagggtaatcatagctaatagaaacaccgttaagtctatcctgacatctgtgcataaacaagatcacttcagttgaagctcatttttttttgagacrgagtttcgctctttttgcccaggctggagtgcaatggcgggatctcggctcacagcaacctccgccgcctgggttcaagcgattctcctgcctcagcctc

SEQ ID NO: 537594 - DNA, 201 bp, Homo sapiens
ggtaaccatcctggccttcctttccttctttagtgacagccccaatgctgttcatgaggtggagaagtggctgccccggctgcatgctcttgtcgtaggamctggcttgggtagagatgatgcgcttctcagaaatgtccaggtaatgtgtatactcactcacttccctcatgacaggcttagccttaggcgtgaagttgg

SEQ ID NO: 537595 - DNA, 201 bp, Homo sapiens
gtatactcactcacttccctcatgacaggcttagccttaggcgtgaagttggaacagaggcatttctcttgcattttgtgtagtgttccgtgtgcctcttygtggcatgattgagataagatttgagggacggaggagaaactgagtgcaaaggtggggaggaactgtgctgagatgtgcttctctccgggcccgactgtt

SEQ ID NO: 537596 - DNA, 201 bp, Homo sapiens
tgtgtagtgttccgtgtgcctctttgtggcatgattgagataagatttgagggacggaggagaaactgagtgcaaaggtggggaggaactgtgctgagatstgcttctctccgggcccgactgttttctcatggagcagctgcaggaggtgtgtgtgtggagttgctcagttgttttatgtctgatgtgaggagagggtga

SEQ ID NO: 537597 - DNA, 201 bp, Homo sapiens
actgaggaggtgacagaggtttggggtcaggcctgggtgtatctcccaggccacccccttcttgctgggggatcctggggttccctcagcctcctgggccrttgttcccacacagccctggcgccatgctctgctgacatcaggctgtgaggtgacacgggcctgcttgtccgtgcccacatgcatatgcgcatggactct

SEQ ID NO: 537598 - DNA, 201 bp, Homo sapiens
gcttcctgtccagctctgcatcctgggggtgcggatgaattagaggtgaacgagccagagtgctctgcttcaggttattttctttgtgaatttaagttcayaatttaaaaactggtatcttaaaaaaccactgtactgcgtggaagtgtgaaaggtgggaagtgagggtgtgcgtcgctgcccctgcagcccagactctgg

SEQ ID NO: 537599 - DNA, 201 bp, Homo sapiens
gaaacctgagcccgcgcagaccagaagtaaacaggcaccttggacgggggagagcgtgtgtgtgatgggaaaatccggacccacgcgtgtgctgaaggcgyacggtgcttgccagattttcaacttgagcataaattggttgccattgagaatttaagaatctggaatattgcagcttttggttaaacttaatgcatggtt

SEQ ID NO: 537600 - DNA, 201 bp, Homo sapiens
tgggctgccgcctcctcgtcagcttccagctcgtgtctggtgcggagcagaggcttcctacttcgtcgacgttcctgaatgaggtcatcatctggtgtagkcctgaaaacaacccgattaggtagattcctattcatagccccattcttctgatgacagattgagtcctggcaaggattcaagacgcccgtgggatctggt

SEQ ID NO: 537601 - DNA, 201 bp, Homo sapiens
tttttagtagagatggggtttcaccatgttggccaggctggtctcgaactcctgaccttaggtatccgcccgcctcagcctcccaaagtgctggggttacaggcgtgagctaccatgcctggcctctttgggtatcttctttggagaagtgtctattcataccctttccccactttgaaaactgttttttgcctttttttt

SEQ ID NO: 537602 - DNA, 201 bp, Homo sapiens
tttattgtttgatggcctgatgttgcattttattaagagtctgctcaattttctgtcactcttgggaaaagtgtcttagtcggttttgcgctgctgtagcygtaccacagactgggtaattgataatgaacaggcgtttactggctcacagttctgaaggtggatgtccaacatcaaggtgccggcatctggcgagggcag

SEQ ID NO: 537603 - DNA, 201 bp, Homo sapiens
cacattttgggcttcaaaacactaccttctgtataagataaaggaatagctcagaacaggattccccccgtgttttcttcctagctatgataaagattgcygtgtgaatgcagtgggttttacacactcagaattgatatttttggcttgtggtaaatgggactttaatgcttaacctgctgtagaaaaatccgccttaga

SEQ ID NO: 537604 - DNA, 201 bp, Homo sapiens
gggcccgactgttttctcatggagcagctgcaggaggtgtgtgtgtggagttgctcagttgttttatgtctgatgtgaggagagggtgagcaggactgagraggtgacagaggtttggggtcaggcctgggtgtatctcccaggccacccccttcttgctgggggatcctggggttccctcagcctcctgggccgttgttc

SEQ ID NO: 537605 - DNA, 201 bp, Homo sapiens
cgtctttgagctttaaggtcttacccgctcaccgggaaggaggaggtggccatgtttaggagcagtagaaccctctgtcatccccggggagaggctctcartggggagtcccatctgcaggctgcgggtctgcggtgcacggctgctgcttcctgtccagctctgcatcctgggggtgcggatgaattagaggtgaacgag

SEQ ID NO: 537606 - DNA, 201 bp, Homo sapiens
cccagacacgcttccttaaaacaaaagccaaacaaatttaacctgttcttccagactcagaattgtctgaagagttaccgaatgggatacatcttaagtcrcctattgtcaaggcctttttatccttcagaactttgatctttatatgtaaatgtttctgtgttaacatttgaaatgttaagttcaaatggtgacgtcagt

SEQ ID NO: 537607 - DNA, 201 bp, Homo sapiens
gcattctggttcctgtacactgttgccgtggtcttgagagccctcaggtcatctagcgtgggctgccgcctcctcgtcagcttccagctcgtgtctggtgyggagcagaggcttcctacttcgtcgacgttcctgaatgaggtcatcatctggtgtaggcctgaaaacaacccgattaggtagattcctattcatagcccc

SEQ ID NO: 537608 - DNA, 201 bp, Homo sapiens
aagattgccgtgtgaatgcagtgggttttacacactcagaattgatatttttggcttgtggtaaatgggactttaatgcttaacctgctgtagaaaaatcygccttagaaagtggcccttattcgtatattgtattcgatgtttgagccccctgatatcttatcattttaacaaagcttaccttgaagtgcaggaaaaatt

SEQ ID NO: 537609 - DNA, 201 bp, Homo sapiens
gctgcaaacctttctaggagacccatgtaacattgcattttccagggtttgaatattcacttttgagtactatttgcaaatacattaaaagaaaacacagmaacagatgaaaatgtcagattgttgccaaatactgcaacatgaaatcagaaactgatctaaaatctgaattagcaaaagcctgccagttttaacagtaaa

SEQ ID NO: 537610 - DNA, 201 bp, Homo sapiens
cctgacgttgacgtgttctctggtcccatgtcttagcggggcatggtacggtttcgtgcctgacgcgtgcattagggtgttctcttatactttcagtagcrtctttccacagcaagggccaaaccctcctggttcccttcagagtctttttggcctgatgatgactcttgagtgataccctgtgatgcagacatgccccag

SEQ ID NO: 537611 - DNA, 201 bp, Homo sapiens
ggactttaatgcttaacctgctgtagaaaaatccgccttagaaagtggcccttattcgtatattgtattcgatgtttgagccccctgatatcttatcattwtaacaaagcttaccttgaagtgcaggaaaaattgtatgtgttcttgtcattatttgaataacaacaaaaatcagtattagctttaaagcctgtaggtttt

SEQ ID NO: 537612 - DNA, 201 bp, Homo sapiens
taccttgaagtgcaggaaaaattgtatgtgttcttgtcattatttgaataacaacaaaaatcagtattagctttaaagcctgtaggttttaagcgtatccwtgcctggactagcatatctcctctttctcaaccaaaaagatcagaaaggtgctatcccagtaccaaaagtactgggaggactttcagcagagtgtgacgc

SEQ ID NO: 537613 - DNA, 201 bp, Homo sapiens
cctgatgttgcattttattaagagtctgctcaattttctgtcactcttgggaaaagtgtcttagtcggttttgcgctgctgtagccgtaccacagactggrtaattgataatgaacaggcgtttactggctcacagttctgaaggtggatgtccaacatcaaggtgccggcatctggcgagggcagaagggcaggagagag

SEQ ID NO: 537614 - DNA, 201 bp, Homo sapiens
aaattgtatgtgttcttgtcattatttgaataacaacaaaaatcagtattagctttaaagcctgtaggttttaagcgtatccttgcctggactagcatatytcctctttctcaaccaaaaagatcagaaaggtgctatcccagtaccaaaagtactgggaggactttcagcagagtgtgacgcagaagggaagcttttccg

SEQ ID NO: 537615 - DNA, 201 bp, Homo sapiens
catggatctgtgctaagactcagccaagccctgggcaacgtgacggtggtccagaaaggagagcgcgacatcctctccaacggccagcagggtgagtggcrgctgccctctgtgcatgggccagtgccaggtcagtcagcatggccacaccgagcatgagccctggaagacctctcccgtgcacacccgtgttcacacaca

SEQ ID NO: 537616 - DNA, 201 bp, Homo sapiens
tttctcaaccaaaaagatcagaaaggtgctatcccagtaccaaaagtactgggaggactttcagcagagtgtgacgcagaagggaagcttttccgctctgrggagcagatgcggagaggacaagcacttggaacacagcatccctgggagctctggtgctgcagttgtgaccccgaggcggccctgctgtgccctcctggg

SEQ ID NO: 537617 - DNA, 201 bp, Homo sapiens
agaggctgcctccaacccttggaacaaacagggaagagccgtagcaggcaggatgtgagtggagcctcaggctgctcctggagggtgtggctctgcctgcygtgcggccttccacacccgtggctactgtcacattcacacacatggccatgctgacacctgctctcacttctgccctgtgcagtgcttgtgtgcagccag

SEQ ID NO: 537618 - DNA, 201 bp, Homo sapiens
cagatgcggagaggacaagcacttggaacacagcatccctgggagctctggtgctgcagttgtgaccccgaggcggccctgctgtgccctcctgggagtgstgggcgacactggttgcagaggggcattggtgctcccctccacctgacaggtgctccacctggactcgtggctgcagcttaattttgtgtcagatccttt

SEQ ID NO: 537619 - DNA, 201 bp, Homo sapiens
ccagctggcccgcaagcgctgcaggcagccccagttcccgctcgcgcctctccctccacacctccctgcaagctgagggagtgggctccagccttggccakcccagaaaggggctcccacagtgcagtggtgggctgaagggctcctcaaatgccgccaaagtgggagcccaggcagaggaggtgctgagagcaagcgagg

SEQ ID NO: 537620 - DNA, 201 bp, Homo sapiens
ggtaggggtgtgggcaggagtcttactgttcattctgctgtgttcactcgagttgcctccacccctcccccaggagatggagccctggtagcaggaatccmcattctcagacctcagatgccctctgcacctgggcactgagagcacagtcaaacagggctaagcagcttgtgccgcctggctttccccgggaacacctgg

SEQ ID NO: 537621 - DNA, 201 bp, Homo sapiens
aaccaccaagccttccagaagcacggtcgctccaccaccacctccgacatgatcgccgaggtgggggccgccttcagcaagctctttgaaacctgagcccrcgcagaccagaagtaaacaggcaccttggacgggggagagcgtgtgtgtgatgggaaaatccggacccacgcgtgtgctgaaggcgtacggtgcttgcca

SEQ ID NO: 537622 - DNA, 201 bp, Homo sapiens
gctgtgctgctctggagacaagggagaggaggatgtcaggtggtgaaggaaccgtagagagcggcagcagggagggggctgtgagagtgggcagaggggcrgttggggcggcagcacagtgtgatgacgcctgggtcgagcccggcctctccacaccagagaggagccggcgcggagctccaggtgcggtgctgtgatgtg

SEQ ID NO: 537623 - DNA, 201 bp, Homo sapiens
gacccacgcgtgtgctgaaggcgtacggtgcttgccagattttcaacttgagcataaattggttgccattgagaatttaagaatctggaatattgcagctyttggttaaacttaatgcatggttggagatgttatggcgacactaaacaaagtattcctgaactttccttagctccttggtagtaactgggaagacagaaa

SEQ ID NO: 537624 - DNA, 201 bp, Homo sapiens
caccaccacctccgacatgatcgccgaggtgggggccgccttcagcaagctctttgaaacctgagcccgcgcagaccagaagtaaacaggcaccttggacrggggagagcgtgtgtgtgatgggaaaatccggacccacgcgtgtgctgaaggcgtacggtgcttgccagattttcaacttgagcataaattggttgccat

SEQ ID NO: 537625 - DNA, 201 bp, Homo sapiens
gaccctttctcaagttccgggggacccctgttagagctcctgggggaagacacagtgtgccagatggcttggtgccacagggtgctcacatgtgcaaggcktggtgactgcatggggatcagaggccgggcattagtgagggactacgcttgaagcccttagaaggtgcctggccattttgtgttccccagatcagcagtc

SEQ ID NO: 537626 - DNA, 201 bp, Homo sapiens
tccctccacacctccctgcaagctgagggagtgggctccagccttggccagcccagaaaggggctcccacagtgcagtggtgggctgaagggctcctcaartgccgccaaagtgggagcccaggcagaggaggtgctgagagcaagcgagggctctgaggactgccagcatgctgtcacctctcattttgtttaatgtttt

SEQ ID NO: 537627 - DNA, 201 bp, Homo sapiens
tcctcgctgtggggcaatccgggcttgcagacgaggtaaggtcgattccatttggcccggggatggtcacacgcgcgggggccggaactgccgtcgccggygcggtcgttgtcgcattgctctcggccgcactcgcgctgtacgggccgccactggacgcaggtacccgaccgctgaccgcctctgctggctcgcgggggg

SEQ ID NO: 537628 - DNA, 201 bp, Homo sapiens
cctgttagagctcctgggggaagacacagtgtgccagatggcttggtgccacagggtgctcacatgtgcaaggcgtggtgactgcatggggatcagaggcygggcattagtgagggactacgcttgaagcccttagaaggtgcctggccattttgtgttccccagatcagcagtcaccctgaaaatgccagccatctgcat

SEQ ID NO: 537629 - DNA, 201 bp, Homo sapiens
ttacatgctactgcagtgtataatcttgtcacaatgtattggctcataataataaaaaccaccaaatattacatatatgtgtgtgtatctatacatgtagttttttttttttaatagaaaacctttgaaaccttcactgtaatcctatcagggaaaaatgattccctgtttattattgttgttattttaaaacgtgtaagt

SEQ ID NO: 537630 - DNA, 201 bp, Homo sapiens
gggtcgtaggttgcagtgagccgagattgtaccactgcactccagcctggcgacagagtgagactctgtctcaaaaaaaaaaaaaaaaaaagaatttgggytgatggggattcataggatctttttatcttggggaatcccagcatctgctctatcagctaaggcagttacatctactcataaagaaaattccttcaaaag

SEQ ID NO: 537631 - DNA, 201 bp, Homo sapiens
aatcccctggctcgagggagcctgttgctgctgtaggcagctctggttactagaaggctccatttagttagcaaactctgatctgtggtccaaatctgccrcaccacctgtttatgcaaagttttaatagatcacagctgtgctcatctgtttacagagtaattagaacagggaccatatgtcctccaaagcctaaactac

SEQ ID NO: 537632 - DNA, 201 bp, Homo sapiens
cccagatggtgcctggcggctcctcactgtcttgtcagcccctggatgcctttaagaaaacatccttttattttgtcagcatttttggtacttctcagtgkgagggctggtccaagtatttggcttatcatagttttacaaaaagttggtttctatgaaatcttaagtcacctcttttttaaaaatgtaacttttagtctg

SEQ ID NO: 537633 - DNA, 201 bp, Homo sapiens
ggtgtggctgcgtttgtcggttgtgtaggagccctgggtgaagctctggctggtctctgtgcatagaacccatgagcagccttgaagatgtaaacaagatsccctggcccctccttactgtgctgagctcctcattagcagtgtgtggcgttgatcatcaaccagttgtgaacatttaaacaggccaaacatcatggagga

SEQ ID NO: 537634 - DNA, 201 bp, Homo sapiens
aaagatgcttcctccaaactaggtttacgcttccttctgccaggtacctcagggcgctgtcagcctaaagccaatttaaactaaatccatcaactgtgagsttttggaatcttctcactggtgtgaatttgggccataagtcctgtgagggctgtcctatgatcactgctctgtggggtggggaccagccttagagttctc

SEQ ID NO: 537635 - DNA, 201 bp, Homo sapiens
taataataagggtattaagacattttaaaaactcagcatggttaagaaggaaaggggttgctcagaaaaatgccccagagggtgtggctgcgtttgtcggdtgtgtaggagccctgggtgaagctctggctggtctctgtgcatagaacccatgagcagccttgaagatgtaaacaagatcccctggcccctccttactgt

SEQ ID NO: 537636 - DNA, 201 bp, Homo sapiens
tgtggttacttttgactgcattactcattgtcctggaaaaatgactttgtgggaatttttcagatctaggataaagatgcttcctccaaactaggtttacrcttccttctgccaggtacctcagggcgctgtcagcctaaagccaatttaaactaaatccatcaactgtgagcttttggaatcttctcactggtgtgaatt

SEQ ID NO: 537637 - DNA, 201 bp, Homo sapiens
caatctcacgggaccttcttctttcagtcctttcaggggagccagggacgcgcctacctcttcaattccgtgtgagtaccctggttcagcccggggggagyggcacgggccctgggacggcctggatggcacctacacagtgccctgtgtagaatcacctgggtctttaggggtcctgaaagaacccaccatccccccgcc

SEQ ID NO: 537638 - DNA, 201 bp, Homo sapiens
cttgctcatggggcattgtttctgtgaatgtgtggttacttttgactgcattactcattgtcctggaaaaatgactttgtgggaatttttcagatctaggrtaaagatgcttcctccaaactaggtttacgcttccttctgccaggtacctcagggcgctgtcagcctaaagccaatttaaactaaatccatcaactgtga

SEQ ID NO: 537639 - DNA, 201 bp, Homo sapiens
gcctcaatggactcacctggaacagaccctcccagcgccggatgagtgcaccgctcagggaacatctgggtatatagttcatagtatagacttgggggggktttttgccaaaagagtgatgaaattgaaaagtgaaaccttctgtcctgaaacctttgtctcttctttttcaaggagcatgcctttgagagcagtcagaaa

SEQ ID NO: 537640 - DNA, 201 bp, Homo sapiens
cagtggtgcttgtaatcccagcactttgggaggccaggcttggtggcgtgttcctgtaatcccagctactcagaggctgaggtaggagaatcgcttgaacscaggaggaggaggttgcagcgagctgagattgcgccactgcactccagcctgggcaacagagtgagactccatctcaaaaaaaaaaaaaaattctagtcc

SEQ ID NO: 537641 - DNA, 201 bp, Homo sapiens
tctgtccttgctcatggggcattgtttctgtgaatgtgtggttacttttgactgcattactcattgtcctggaaaaatgactttgtgggaatttttcagayctaggataaagatgcttcctccaaactaggtttacgcttccttctgccaggtacctcagggcgctgtcagcctaaagccaatttaaactaaatccatcaa

SEQ ID NO: 537642 - DNA, 201 bp, Homo sapiens
catacaatatttgtcctttgtgactggcttacttcactgagcatagtgtcctcagggttcctccatgctgtagctgtgacaggagccccctcctgttaaargctggataacattccactgtatgcagacgccacattttgatcatgagaatgcccgtttgtggagggacacactgttgcttccccctcgtggctgttgtgg

SEQ ID NO: 537643 - DNA, 201 bp, Homo sapiens
ggcgtgagccgccatactcagccatgctgtgacttttaaaacatttcagtgggaaaatatggacacctccccctaccccctaatatctggcagcgtgagcrcatctgaactgctgcagaagaggcggcgaggagagcattttgaggatctgtgggttttcgggtagagaaaatcattcgtgatcccctctcagaactcctc

SEQ ID NO: 537644 - DNA, 201 bp, Homo sapiens
tgctcttctgtttggcctgaaagaaaatccggtgtgcctgactctctgcaggccccttgtcacaggccaggctggggtggtgccaccaggaaaacttggcrcacgtcctgttgctgatgatggcagcatcagtcatggacttaaccttcttttgttaatgagaccttagaaatgtaaaaatgatacactcttctttaaaat

SEQ ID NO: 537645 - DNA, 201 bp, Homo sapiens
tcatcccatggaagggcacaggacaggctgctgccggagcagaggtcacatggggtggggggcggtggggggtgcatctcaggaggagcaggtgtgaggayactgctggcgcttggctcttcttcccagccccgtgctctcgaatttggggaaacccttgctcttctgtttggcctgaaagaaaatccggtgtgcctgact

SEQ ID NO: 537646 - DNA, 201 bp, Homo sapiens
atttttctgtagagacaggatctcactctgttgctggtctcaaactcctgagctgaagcgatcctccccccttgcctcccaaagtgctgagattataggtktgagccaccacccccagttagttttgttttgttactttatttgtttattttttgagacagagtctcgctctgtctcacccaggctggagtgcagtggcat

SEQ ID NO: 537647 - DNA, 201 bp, Homo sapiens
gaagcaccaagtccaagttaggcagcatctcaggccggggcaccaaggaagggcacagcagcgccgtggtgaccgggtcccagtaccatcctgggtggccrccaccggccgtttgtgtcttccgttcacacgattacaaacgctgcgttctgcccacacacatcttcagtcccagatgtgagaaggtgaccctctaatgca

SEQ ID NO: 537648 - DNA, 201 bp, Homo sapiens
aaaaatacaaaattagctgggtgtggtggcgcatgcctgtaatcccagtgctcgtgaggctgagacaggagaatcacttgaacccgggaggtggaggttgyggtgagccaagatcgtgccattgcactccagcctgggcaataagagcgaaactctgtctcaaaaaaaaaaaaaaaaaaagaaaagaaaaagaaaaattag

SEQ ID NO: 537649 - DNA, 201 bp, Homo sapiens
tcaaagacaatggctgggagtaatgtgcgaactttcccttctccttcgaatgctgttttgtgaaagaaactgtgaatgtaatggaaacgtaggagcatctrgtgacagcctttcttgccctctgacctcaaaggctagctgcgcatagctcttgacactcccggccatctctgtgggtaaggtgtccctcggatctgtcct

SEQ ID NO: 537650 - DNA, 201 bp, Homo sapiens
tgaggcttgaacccaggaggcggaggttgcactgagctgagattgtgccactgcactccagcctgggcaacagtgcgagactctgtcctcccctccccccsccaaaaaacccaaaatgttggccaggtacagtggctcacacctgtaatcccagcactttgggaggctgaggcagacagatcacttgaggccaggagtttg

SEQ ID NO: 537651 - DNA, 201 bp, Homo sapiens
cgattccgccagcaaatgccaggacgttacacctgctatacagatgctgagtaccaaaaacctgttggcaggtgagagtaaaatggaaatcctggagccarccactgttgcccacaccccagaaaggggttaggagccgttattcaccccattgctcagtaggccctctggcacctgcagggccttgggccggggccggga

SEQ ID NO: 537652 - DNA, 201 bp, Homo sapiens
tggcgcaatcttggctcactgtagcctccacctcccgggtttaagtgattctcctattttagccacccaagtagctggggttactggtgcccgccaccacrcccagctaacttttgtatttttagtagagacagggtttcaccatgttggccaggctggtctcaaactcctgacctcaggtgatctgcccacctcagcctt

SEQ ID NO: 537653 - DNA, 201 bp, Homo sapiens
gggtttcaccatgttggccaggctggtcttgaactcctgaacttgtgatctgcctgcctcagccttgcaaagtactgggattacaggcatgaaccaccgcrcccagcctttcttaaaattttttttgaggcagagtttcactctagtcgcccaagctggagtgcaatggcgcgatcttggctcactgcaacctccccctcc

SEQ ID NO: 537654 - DNA, 201 bp, Homo sapiens
ttgcttcacaacacatgaatcccatatgtacctgcttcacacgcatgttctctctgtaacccaccactttgtctgattggttggcaggttacgtttttctstcgtcccagctgtgtggacagtgccacacgccctcctggacaacgacggctcttgcgtgcattttccagtgttgcttttgtcagagaggccagcagagcc

SEQ ID NO: 537655 - DNA, 201 bp, Homo sapiens
gcagagctcctctgtgctgtctgtatccacctgtggtctgtttccgggctctctttcatgtcacattgacctgtttttgtatcttatgccagtcttttttyttttatttatttatttatattattatttttttttgatggagcctcgctctgttgcccaggctggagtgcagtggtgcgatctcagctcactgcaagctcc

SEQ ID NO: 537656 - DNA, 201 bp, Homo sapiens
gcttgaacccaggaggtggaggttgcagtgagccaagatcacgccactgtactccagcctgagtgacagaacgagactctgtctcaaaaaaaaaaaaaaaagaaaaaaaggctgggcatggtggctcactgctgtaatctcagcactttgggaggctgcggcgggcagatcacgaggtcaggagatttagaccatcctggc

SEQ ID NO: 537657 - DNA, 201 bp, Homo sapiens
agagcagtcagaaatataaggaaggaaaattcatcattgagcttgctcatatgatcaaagacaatggctgggagtaatgtgcgaactttcccttctccttygaatgctgttttgtgaaagaaactgtgaatgtaatggaaacgtaggagcatctggtgacagcctttcttgccctctgacctcaaaggctagctgcgcata

SEQ ID NO: 537658 - DNA, 201 bp, Homo sapiens
gaggcagaggttgcagtgagctgagatcacaccactgcactccagcctgggtgacagagtaagactctgtctcaaaaaaaaaaaaaaaaaaaaaaggcagragcctgctcagaagtcatttggtgccaaatgagcatttcaggatgaaaaaaagtgctgagaactaagctctctgagcacacaggccaccaggaaggatca

SEQ ID NO: 537659 - DNA, 201 bp, Homo sapiens
cgaccccttgggctcaagcaatcctcccacttcagcctccctagtagctgggaccacagacacgtgacgccacacttggctaattgaaaaacactttttttgcgtagagacagggtctcactgttgcacaggctggtctcaaactcctgggctcaagcaatcctcctgccttggcctcccaaagtgctgggatgacaagtg

SEQ ID NO: 537660 - DNA, 201 bp, Homo sapiens
aatatccaatataggcagactttttcagaaattctttaacataatattggagaaagaaatggacttcatttagaagatggtgtgtgtgtgtgtgtgtgtgkatttacacgtgtatacctttgtacagaaatttcctccacaaaattcctgctagatgaagtcatctctgttgataaatgtgatgaactgttgattttgtta

SEQ ID NO: 537661 - DNA, 201 bp, Homo sapiens
gcgagctgagattgcgccactgcactccagcctgggcaacagagtgagactccatctcaaaaaaaaaaaaaaattctagtcctgccacccccccaccccgygtgttgcttcacaacacatgaatcccatatgtacctgcttcacacgcatgttctctctgtaacccaccactttgtctgattggttggcaggttacgtttt

SEQ ID NO: 537662 - DNA, 201 bp, Homo sapiens
tggcctcccaaagtgctggaatgacaggtgtgcaccactgcgcccagcctccagatgtctttgacctgtttatgtcactctccctgtatttgccttcacgytagttatgcacggaattcctggagtgtagtcttttgcatctcttcaagcctcttaaattgtcccacatgtagtaaatgttcagtaaacagatctgcattc

SEQ ID NO: 537663 - DNA, 201 bp, Homo sapiens
cagcgagctgagattgcgccactgcactccagcctgggcaacagagtgagactccatctcaaaaaaaaaaaaaaattctagtcctgccacccccccacccygcgtgttgcttcacaacacatgaatcccatatgtacctgcttcacacgcatgttctctctgtaacccaccactttgtctgattggttggcaggttacgtt

SEQ ID NO: 537664 - DNA, 201 bp, Homo sapiens
aacagagtgagactccatctcaaaaaaaaaaaaaaattctagtcctgccacccccccaccccgcgtgttgcttcacaacacatgaatcccatatgtacctrcttcacacgcatgttctctctgtaacccaccactttgtctgattggttggcaggttacgtttttctctcgtcccagctgtgtggacagtgccacacgccc

SEQ ID NO: 537665 - DNA, 201 bp, Homo sapiens
agttacaggctttgagcaaatagagaacagttacagcatggaggaccctggggtaacacaggaccctgatggggacgcaccgcttcctcctgcctggaacrctggtggtcagagggtcccctccctcctggggactggactgtcctccgctgatgctcctccctctcaggccaggtgggaccgagagcggagagcacctgt

SEQ ID NO: 537666 - DNA, 201 bp, Homo sapiens
aggaggcttaggcaggagaatcgtttgaacctgggaggcagaggttgcagtgagtccagcctggggaacagaatgagactccgtctcaaaaaaaaaaaaaaattaattaaaataaaataaaattccagctaggcacagtggctcacacctgtaatcctagcactttgggaggctgaggtggtggatcacctgaggtcagga

SEQ ID NO: 537667 - DNA, 201 bp, Homo sapiens
gggagggctggtccaagtatttggcttatcatagttttacaaaaagttggtttctatgaaatcttaagtcacctcttttttaaaaatgtaacttttagtcygggcgcggtggctcactcctgtaatcccagcactctgggaagccggggcaggcagatcacttgaggccaggaatttgagaccagcctggacaacatggtg

SEQ ID NO: 537668 - DNA, 201 bp, Homo sapiens
gcagtcctcccacctcaacctcccaagtacctgggactacaggcacaccacacccagctaagtttttgatttttgtagaagaaaatcactgtgttgcgtargcttgtctcaaactcctggactcaagtcatcctccttccttggcctcccaaagtgctggaatgacaggtgtgcaccactgcgcccagcctccagatgtct

SEQ ID NO: 537669 - DNA, 201 bp, Homo sapiens
agctactcagaggctgaggtaggagaatcgcttgaacccaggaggaggaggttgcagcgagctgagattgcgccactgcactccagcctgggcaacagagygagactccatctcaaaaaaaaaaaaaaattctagtcctgccacccccccaccccgcgtgttgcttcacaacacatgaatcccatatgtacctgcttcaca

SEQ ID NO: 537670 - DNA, 201 bp, Homo sapiens
tatttgccaatagatcttgtaaaagcccatttacattggttgtttccaaacttggccatgggttccccagtgcaacagtggatctgtcatttaaagccaarttaaaacttaacatgacatgcctctcagtgaccacaaatacagccctggccactactgccaggacccctttgagggctagtgacaagggttgccatcagg

SEQ ID NO: 537671 - DNA, 201 bp, Homo sapiens
ggctggtccaagtatttggcttatcatagttttacaaaaagttggtttctatgaaatcttaagtcacctcttttttaaaaatgtaacttttagtctgggcrcggtggctcactcctgtaatcccagcactctgggaagccggggcaggcagatcacttgaggccaggaatttgagaccagcctggacaacatggtgaaacc

SEQ ID NO: 537672 - DNA, 201 bp, Homo sapiens
tttacaaaaagttggtttctatgaaatcttaagtcacctcttttttaaaaatgtaacttttagtctgggcgcggtggctcactcctgtaatcccagcactytgggaagccggggcaggcagatcacttgaggccaggaatttgagaccagcctggacaacatggtgaaaccccatctctactaaaaatacaaaaattagtc

SEQ ID NO: 537673 - DNA, 201 bp, Homo sapiens
ctcccctcccccaggccacctgagattccatggttttgaccccctggccatctgccttctgttggatgctcccatgccttccccagttgttgttgttgttkttttgtttgttttttgagatggtctcaaactcctgacctcaagtgatccacccacctcagcctcccaaagtgctgggattacaggcgtgagccaccgcgc

SEQ ID NO: 537674 - DNA, 201 bp, Homo sapiens
ggggttgctcagaaaaatgccccagagggtgtggctgcgtttgtcggttgtgtaggagccctgggtgaagctctggctggtctctgtgcatagaacccatragcagccttgaagatgtaaacaagatcccctggcccctccttactgtgctgagctcctcattagcagtgtgtggcgttgatcatcaaccagttgtgaaca

SEQ ID NO: 537675 - DNA, 201 bp, Homo sapiens
tcaatccagtcttctgggtgtggtacccactctttcaacctaacaaggctagtgttgcacatagttcctacacctccccttttctttctttttttttttttgacacagggtctcactctgtcatccaggctggagtgcagtggcgatcacctcagcctcccgagtagctgggacgacaggcacgtgccaccacacctggtt

SEQ ID NO: 537676 - DNA, 201 bp, Homo sapiens
ggcccgctgagcagagcctggtgtgggaggaggccgaggaggctgcagggggctgcgggaggctgtgcccactgtcagggacaagtctagaagacctcagygccagacctgctggagtcagagacagagagctgccccatgagctctttaccccaaatccctctttctcagggaccttgaattgaaggttgcaatcgccac

SEQ ID NO: 537677 - DNA, 201 bp, Homo sapiens
ttcggaagcatgccaggtgtgttccttgctacatggtcaaaaggaatttgagatgcttctgttgaacagcctggaggtcatcaatgagctgttttaaaaaytgtatcagctgggcgtggtggctcacccctgtaatcccagcactttgggagaccgaggtgggcggatcacttgaggtcaggagtttgagaccagaccagc

SEQ ID NO: 537678 - DNA, 201 bp, Homo sapiens
caccatttaaaaactgatcttgccatgattcccaataatagtcacttgcagaatgttgacgcagcagaatcagccactcctgtctacaatgaaaaacagcytgcagctccgttaagtggctgttattagaagtggagttctggaggggggacgccggtgtctgctcccggtgacgcgtcccggcgcagctaacagccgcgg

SEQ ID NO: 537679 - DNA, 201 bp, Homo sapiens
agcggcacgggccctgggacggcctggatggcacctacacagtgccctgtgtagaatcacctgggtctttaggggtcctgaaagaacccaccatccccccsccgggagtttctgaaacgcgctaaggatcttgccccctagcctgtcccatcactgatctttcccattgatggtggtggcgggcagggctgggggagaggc

SEQ ID NO: 537680 - DNA, 201 bp, Homo sapiens
agtcctagctactggagaggctgaggcaggagaattgcttgaaccctggaggcagaggctgcagtgagtccagatggtgccactgcactccagcctgagtracaaagtgacactccatctcaaaaccccaactccccccaaaatttttgatttggtttgcatttctttgattatgtttgaggtcgattgagacttgaggct

SEQ ID NO: 537681 - DNA, 201 bp, Homo sapiens
tgaaagaaactgtgaatgtaatggaaacgtaggagcatctggtgacagcctttcttgccctctgacctcaaaggctagctgcgcatagctcttgacactcycggccatctctgtgggtaaggtgtccctcggatctgtcctcttcgtgtacacagttgtttctgaaaattttcaatgagctttttctaacttctcaagttc

SEQ ID NO: 537682 - DNA, 201 bp, Homo sapiens
aaaaatacacacaaaaaaaattagccgggcgtggtggcacacgcctgtaatcccagctactcaggaggctgaggcttgaacccaggaggcggaggttgcastgagctgagattgtgccactgcactccagcctgggcaacagtgcgagactctgtcctcccctccccccgccaaaaaacccaaaatgttggccaggtacag

SEQ ID NO: 537683 - DNA, 201 bp, Homo sapiens
ctgaatgtaatggcctgcacctgtaatcccagctactctggaggctgaggcaggagaatggcttgaacccaggaggcagagactgcagtgaaccgagatcrcgccactgcactccagcctggatgacagagtgagtgagactctgtttcaaaaaatattaactaaaatcccccaccaggtgcagtgtgcacttctgtagtc

SEQ ID NO: 537684 - DNA, 201 bp, Homo sapiens
cagcgctggcagggccctggcttgtgcactgctctttggggaccatggtcctagaccctggggacatgtgggtctgggtgaggtgaatctgcagctgcccscaccccacggcccctgcccgcagagactccttggtgcccatgggtccatgtttttaacaagcttaccagtgtttagtggccatttctcatatcaagtact

SEQ ID NO: 537685 - DNA, 201 bp, Homo sapiens
tgtttgcttcctcagtgtgtttgtctttagaagtgtgctaccggcaccatatggacatgggcctgattcacattctcttaaaataattttacaggcttatkttaggagagaaatttctggattccagaaaattgtttttgctctaaaaacataccccacattaatgtctatttggggggatggatggcagctgccctccaa

SEQ ID NO: 537686 - DNA, 201 bp, Homo sapiens
ctgtggtccaaggtggggagactctggctttgaatccagcttcacaggtcactggctgtgcaaccttgggtgctcaggtaacctttttggacttcggtttycccatgtgcatcgtggggctaataaggacacgcatctcttagaactgctgttaatcgtgcgattcttgtatggtgagcagtgtaggacagggctggtgtt

SEQ ID NO: 537687 - DNA, 201 bp, Homo sapiens
gcctaacttttaaaaaaatcattgccaacctgctaagtgttagacagtatgagtgtgccttcagagttgaacatctacttgcatgttccaccttggacacygtggtccaaggtggggagactctggctttgaatccagcttcacaggtcactggctgtgcaaccttgggtgctcaggtaacctttttggacttcggtttcc

SEQ ID NO: 537688 - DNA, 201 bp, Homo sapiens
tgtggaggggagcttttcctcctgtaatgcaagtagggaggaagtggatgtgtgtggatggaagctggaattgccaaaggcaaattgtacccatgctgttkccctttgttgtaaatttttccagacctttccacacctgtgacttcatgtactatgtgagagtttgaatagtcagtgtgggccagatgctgtagctcacgc

SEQ ID NO: 537689 - DNA, 201 bp, Homo sapiens
gatcttggtcaggcgcagtggtgcttgtaatcccagcactttgggaggccaggcttggtggcgtgttcctgtaatcccagctactcagaggctgaggtagragaatcgcttgaacccaggaggaggaggttgcagcgagctgagattgcgccactgcactccagcctgggcaacagagtgagactccatctcaaaaaaaaa

SEQ ID NO: 537690 - DNA, 201 bp, Homo sapiens
aaaccccgtctttactaaaaatacaaaattagctgggtgtggtggcgcatgcctgtaatcccagtgctcgtgaggctgagacaggagaatcacttgaaccygggaggtggaggttgtggtgagccaagatcgtgccattgcactccagcctgggcaataagagcgaaactctgtctcaaaaaaaaaaaaaaaaaaagaaaa

SEQ ID NO: 537691 - DNA, 201 bp, Homo sapiens
cagtggctcacgcctgtaatcccagcactttgggaggccaaggcaggtggatcaactcaggttgggagtttgagaccagcctgaccaacatggagaaaccycgtctttactaaaaatacaaaattagctgggtgtggtggcgcatgcctgtaatcccagtgctcgtgaggctgagacaggagaatcacttgaacccgggag

SEQ ID NO: 537692 - DNA, 201 bp, Homo sapiens
tgagtacctgacttccaggttaaatttttttttcttttttttttttttgtgagacggagcctgactcggtagcccagtctggagtgcagtggcgcgatctyggctcactgcaacctctgcctcccgggtcccggttcaagcaattctcctgcctcagcctcctgagtagctgggattataggcacgcaccaccatgcccag

SEQ ID NO: 537693 - DNA, 201 bp, Homo sapiens
acaaaaattagtcaggtgtagggccaggcgcagtggctcacgcctgtaatcccagcactttgggaggccaaggcaggtggatcaactcaggttgggagttygagaccagcctgaccaacatggagaaaccccgtctttactaaaaatacaaaattagctgggtgtggtggcgcatgcctgtaatcccagtgctcgtgaggc

SEQ ID NO: 537694 - DNA, 201 bp, Homo sapiens
ctggagcgcggtgtgggtggctgcacttggctggaggcccccgcgcgtgccttcgcctgcgccgtggagcgcgacgcccgggccgccgtgggccccttctyccgccacggcctgcggtgaggctccccgccccgtctcctaccatagctgcctctgtccctccgcactggctgttcacctggctagctgtgtccgtttctc

SEQ ID NO: 537695 - DNA, 201 bp, Homo sapiens
agcagccttcttggctgcaggcaggcctagcctgtggcagcgggctagggcccgcagagcatttggtgcccctccatgttgcaatgcaaacaccttcaccmctggggcagtggggagagatggctatattaataaaataacgtgtgtctttcaaacttgggtggtttatcagctgtgcccaggagaccctcagagaaacaa

SEQ ID NO: 537696 - DNA, 201 bp, Homo sapiens
ccatgtcccgccctcgcatgcgcctggtggtcaccgcggacgactttggttactgcccgcgacgcgatgagggtatcgtggaggcctttctggccggggcygtgaccagcgtgtccctgctggtcaacggtgcggccacggagagcgcggcggagctggcccgcaggtgaggggagggcctctagcagggcggcgatcggc

SEQ ID NO: 537697 - DNA, 201 bp, Homo sapiens
ggaaggtaccctagcgggccacaccctgacagccgagctgatggcgcaccccggctaccccagtgtgcctcccaccggcggctgcggtgaaggccccgacrctttctcttgctcttgggagcggctgcatgagctgcgcgtcctcaccgcgcccacgctgcgggcccagcttgcccaggatggcgtgcagctttgcgccct

SEQ ID NO: 537698 - DNA, 201 bp, Homo sapiens
gcctgcgccgtggagcgcgacgcccgggccgccgtgggccccttctcccgccacggcctgcggtgaggctccccgccccgtctcctaccatagctgcctcygtccctccgcactggctgttcacctggctagctgtgtccgtttctcaacccggaagcgagtctggcgtcgaccgctgccgccaccccagttaccccctcc

SEQ ID NO: 537699 - DNA, 201 bp, Homo sapiens
atgctcgcgaggacccccagagctccgcccggagggtactgtgaggccgttaggagctggcggtggatgacttccgcattcaaacactggagccatcacayggaagcacgaggagggtatcctcggcagctactcccggtcgctcaaggtgtctctcgctcgccctctaggtgcgggaggagctcgaggcccaactaagct

SEQ ID NO: 537700 - DNA, 201 bp, Homo sapiens
ttcttccttggcaagatgggattccgggaggcggtggcggccggagacgtggatttgcctcaggtgcggagccgcagctacaggaggatgctcgcgaggayccccagagctccgcccggagggtactgtgaggccgttaggagctggcggtggatgacttccgcattcaaacactggagccatcacacggaagcacgagga

SEQ ID NO: 537701 - DNA, 201 bp, Homo sapiens
agcgagtctggcgtcgaccgctgccgccaccccagttaccccctcccaccccgccgtcccttccctagcctacctagcccttggccatggcccggcctggkcccacctctgatgtcccgccccccacaggtggacagacgccttcgtgggcctgagcacttgcggccggcacatgtccgctcaccgcgtgtccggggccct

SEQ ID NO: 537702 - DNA, 201 bp, Homo sapiens
aaaaaaaaaaaaaaaaaaaaaggccaggcacagtgactcacacctgtaatcccagcactttgggaggctgaggcaggtagatcacctgaggtcaggagttygagatcagcctggccaacatggtgaaaccctgtctctactaaaaatacaaaacattagccaggcgttgtggcaggcgcctgcaatcctagctactcgaga

SEQ ID NO: 537703 - DNA, 201 bp, Homo sapiens
tgggaggctgaggcaggagaattgctccaacccaggaggcagaggttgcagtaagctatgaccataccactgtatactagcctgggtgacaaagtgagataaaaaaaaaaaagaaatgaaaaaaatccttatgcttatccatggacaaaagtgctaaggctaaagaagaacatgttaagtataagaaatttagactctagc

SEQ ID NO: 537704 - DNA, 201 bp, Homo sapiens
aaacagattatttactacatggagctaggatagctgcccctctgtgaggccaagagaaatatgtgtgtgtgtgtatgtgtgtgtctgtgtctgtatatacrcacatatacacacacaaatatatgtatatatgtatatgtacagatagacacacatacactttttgcacatatcacaccatacaccaaaagaaactccaag

SEQ ID NO: 537705 - DNA, 201 bp, Homo sapiens
gtgcactggctttcacaacatgctcttctttcagccccgaatacacagacacattgggctccatatccacatcagcttcttccacaattcgggtgcttctyactgtgggaagaatgcccatcaactccagaagaagctgccttctcatctgccaaaggacagaactgctggtctctctttttctctgaaagaaatatggat

SEQ ID NO: 537706 - DNA, 201 bp, Homo sapiens
cgtgcccagccagatgagaagtattttgatagagctcacacaataagtgaatgacaaaatcaggaattataactccagtactttttcctcccaggctcctrattcacaaactaccttgctcaacaaaatgtttttatttttatatcactcatacccaaacaacaaccttcaatcactgtaagttttaaatagaggtgaaaa

SEQ ID NO: 537707 - DNA, 201 bp, Homo sapiens
aatcactttaacccaggaggcagaggttacagtgagccaagactgcaccactgcactccaacctgggtgactgagcaagactccatctcaaaagaaaaaawatatatatataaaaatgtaggggcatgcttttattttgttttatttgtaggggcatacttttattgacactttgtgcttggtaaaggaacggctcctgag

SEQ ID NO: 537708 - DNA, 201 bp, Homo sapiens
tttcctgtgtgaagattgtcttcatcctgctcaaggagcttggcttaattacaatctaaaattaccaaaagaattccaacagcatgtaaaaatatatgaarcacaatttattctagggaacttatctaaaatggctatgatacacataaatgttcaaatgttcaagtactctactctgttttagaagtgctttcccaaacc

SEQ ID NO: 537709 - DNA, 201 bp, Homo sapiens
acatgaattatgaatcagtaaaactcactattaacttttggcagttccaaatatattatctagtatcataactgcctttgattttaaaatatgaactaccwttatatctgtatcatcttaggtgcaccctccactagaagcttgcctttcggtttaatctattagtttttaagtagtgggaaaaacattttaagtccctac

SEQ ID NO: 537710 - DNA, 201 bp, Homo sapiens
ttgaggttacagtgagctatgacagcctgggcgacagagtgagaccctgtctttaaaattaaaaaaaaaaattagaaaatggcagtttctaagttttaatraaatagccatgtgccactattgagaatttaaatggagtattatgcattttgaaaatcttacattgttttaaaaatctgaaattactgtataattatataa

SEQ ID NO: 537711 - DNA, 201 bp, Homo sapiens
ctctgaatttcacgagtgcttttttttttcttgatagtaaaagaatcaaaatagactattcagcattgctgctcctaactcaggtaaaacaggagaaatgytgctgtgtgtgtattaaactcaaaaaaacaacatgaaatctgagatggcatgagagatgaaaggcaacatgcttaagtggtctttaagataagacaaaga

SEQ ID NO: 537712 - DNA, 201 bp, Homo sapiens
aaaaagtaagaagtttctaagaagttaaaaaacaaatcagattttattttcacatgaacagatatgataaaataactaatttcttaaacacacatacacamagaggtacttctaagagcagaactgagcaatctgtagagcagtggttctcacctttttaggattatgaaccccttaagaatctaaagaaaactatgtacc

SEQ ID NO: 537713 - DNA, 201 bp, Homo sapiens
agaatggctgaacccaggaggcagagcttgcagtgagccgagattgtgccactgggcgacagagcaagactctgtctaaaaaaaaaaaaaaaaaaaaaaawtcatataagacacaaacaaatggaaaaacattccaagctcatggattggaagaatcattatctttaaaatggccatattgcccaaagcaatctacagatt

SEQ ID NO: 537714 - DNA, 201 bp, Homo sapiens
attcaaggctctggaggccacaacactatcctatgtcccctgtgttaccgggtaaaaagcagatgtgtgggtgctatgtgagaaagacgcgtctcattagmgcacttctctgtctccaggaatcatccaaggcacaaaaagtaaacaaaaaggcagtgagctggcagccaaagcagtcccctctcaaggccgaccgactag

SEQ ID NO: 537715 - DNA, 201 bp, Homo sapiens
aatacgcaattccgttctcatagaaacagcttaaaattgatgtttctgtgtttgaaaagacatcgtaacaatcaaaaatggcattactttaacatttaaayttctaaatgcatacaggagtatatatacagttaaaactatacccaaccatcacaaaaaagactgcttacaaaagtgtaaactaatcaacatttcatactc

SEQ ID NO: 537716 - DNA, 201 bp, Homo sapiens
cttgaaaatgagcacgacacttttgccccaataattccattttcccatgttctaatgaaatactcagcatggggaaatgcacataatcaccaaagcactaytgataaaagcaaaaagtagaaataaaatatcctaggggattgggttaagcatagctctataaaatggaataccatatagccaattaagataagaatataa

SEQ ID NO: 537717 - DNA, 201 bp, Homo sapiens
ctttgggaggccacagagggcgcatcacgaggtcaggagatccagaccatcctggctaacacggtgaaaccgtgttactactaaaaatacaaaaaaattasccgggcgtggtggtggcgggcgcctgtagtcccagctactcgggaggctgaggcgggagaatggcgtgaacacaggaggcggagcttgcagtgagccgag

SEQ ID NO: 537718 - DNA, 201 bp, Homo sapiens
tacccagccaggaatttttttttttaaatggtaaaactaatatttttatagtactctaattgaaaatattagaaacattgggaattaaactgttttctttstttcttttttttgagacagagtctcaccctgtcgcccaggcgggagcgcagtggcacaatctcggctcactgcaaactctacctcctaagttcaagcaat

SEQ ID NO: 537719 - DNA, 201 bp, Homo sapiens
aatcccagcactttgggaggctgaggcaggcagaacacctgaggtaaggagttcaagacaagcctggccaacatggtgaaaccccgtctctactaaaaatmcaaaaaaaaaaaaaaaaaaattagccgggtgtggtgaggcaggagaatcgcttgaatccgggaggcagaggttacagtgagccgagatcacaccactgca

SEQ ID NO: 537720 - DNA, 201 bp, Homo sapiens
tgtgttgagagaccagcattatttaaataaactggcgtaactgaaactcatgcatattggagacatgcaaatgaggactgtatgtacaattattaagaacmctattcaaaaggattttgtatggtgactaagcaacattgtactggccaggcacagtggctcatgcctgtaatcccagcactttgggaggctgaggcaggc

SEQ ID NO: 537721 - DNA, 201 bp, Homo sapiens
gtatctcctgttctgtgactggctgatttgtggcttctggattagatttcgacgcaggagtaagtatagaatttatgtacacatcaatcaaaggaagtaaytgaggatgaagtggagtagaggtttcacacagctgtctataaatccaatcctaagaaagaatgttatagacactgaattaattgtggcaaaaagaaaaac

SEQ ID NO: 537722 - DNA, 201 bp, Homo sapiens
attcacaaaatgaaaaatacaatttgcctacctattcattcccactacactataaatcacatttgtaaacagaagtttccaaaagaagaattcaaaagacrgcataagttaaactagtatttaacacatattgtatcatactgtctcagagtgacagaaaaaacatattgcatcactaaatgcagaaaatataggaactat

SEQ ID NO: 537723 - DNA, 201 bp, Homo sapiens
aattttaaattcagaactacctagaagtcctctgataggaaaataaaaatatgggttaagtaagaagaactaaaagaaaaataagttaatagatataaaaraaccactattttaccccaatgactccttggaaaatattgagtatctcctgttctgtgactggctgatttgtggcttctggattagatttcgacgcaggag

SEQ ID NO: 537724 - DNA, 201 bp, Homo sapiens
taaattctctccaaattaatctataagtttaacataattcttatcaaaatcccaacataattttcatttgtgaaatttaacaaaattattataaagttcayggaaaagattaaatatgtgagaatatacagaaattccaaacaagaactgtatcaaagacacagaaaatgtcaaaacataaaaaagaaaatccaggccggg

SEQ ID NO: 537725 - DNA, 201 bp, Homo sapiens
tggtggtgtgcacctctaatcctagctacttgggaggctgaggcaggagaattgctccaacccaggaggcagaggttgcagtaagctatgaccataccacygtatactagcctgggtgacaaagtgagataaaaaaaaaaaagaaatgaaaaaaatccttatgcttatccatggacaaaagtgctaaggctaaagaagaac

SEQ ID NO: 537726 - DNA, 201 bp, Homo sapiens
aggttgaggcaggagaatcactttaacccaggaggcagaggttacagtgagccaagactgcaccactgcactccaacctgggtgactgagcaagactccayctcaaaagaaaaaaaatatatatataaaaatgtaggggcatgcttttattttgttttatttgtaggggcatacttttattgacactttgtgcttggtaaa

SEQ ID NO: 537727 - DNA, 201 bp, Homo sapiens
ggtaacttctcaaccctcacccccttcccaccctcccaacatttggagtctatgatgtgtattatcccactcgcttatgtccatgtgtacacatgattagyacccactcataattgagaatatgcaatatttgactttgtttatgcgttatttcacttaatataatggcctccagttccatccatgttactgtcagacatg

SEQ ID NO: 537728 - DNA, 201 bp, Homo sapiens
ttcacttgaggtcaggagttcgagactagcctaaccaacatgatgaaaccacatctctacttaaaaaaaaaaaaagattatacaaagatataagtaaatamatgctgcagacatccggttaacgatgagcaatgaaggctcatgtttctccttgaaaccaaccataataaagaaaaaattccggccaggcacagtggctca

SEQ ID NO: 537729 - DNA, 201 bp, Homo sapiens
tgagtagggctcttcacttgaggtcaggagttcgagactagcctaaccaacatgatgaaaccacatctctacttaaaaaaaaaaaaagattatacaaagayataagtaaataaatgctgcagacatccggttaacgatgagcaatgaaggctcatgtttctccttgaaaccaaccataataaagaaaaaattccggccagg

SEQ ID NO: 537730 - DNA, 201 bp, Homo sapiens
tgtacttttgctgctatcctaattcagtgcctactcaccttttgtttaaatatcttctatggcccactttccctgcctccaatttaatccatccttcaacytgcggccatagtcatcttatttaaatagagatttggccaccttcagtgaatcctcagatcacacagagtaaaggtccttgccagtcaatagtatctttct

SEQ ID NO: 537731 - DNA, 201 bp, Homo sapiens
aagaccacatctctacaaaaagtaaaataattagctggatgtggtggtgtacctgtaataccaggtactcgagaggaagatcccttatgcccaggagacaragtttgcagtgagctgtgttcctgccactgcactccaaccttgagactgggcaacagaccctgtctccaaaaaaaaaaaaaaaaaaaaaaaacactttac

SEQ ID NO: 537732 - DNA, 201 bp, Homo sapiens
ttttgtatttttagtagagagagggtttcaccatcttgaataggttgtcctcgaactcctgacctcactgatccacaagccttggcctcccagagcgctcrgattatgggcgtgagccactgtgcccggtcttaaagtttttttatttcttcgtaaagactttatcaagagtagtttaaacagcctttgcctccttttttt

SEQ ID NO: 537733 - DNA, 201 bp, Homo sapiens
atggtaaaactaatatttttatagtactctaattgaaaatattagaaacattgggaattaaactgttttctttctttcttttttttgagacagagtctcaycctgtcgcccaggcgggagcgcagtggcacaatctcggctcactgcaaactctacctcctaagttcaagcaattctcctgcctcagactcctgagtagct

SEQ ID NO: 537734 - DNA, 201 bp, Homo sapiens
cacttccactgatggtggcttgctactagattcacaatgggcagggaaggacatagcacctgcccagaatctttgggaatatctaagctttaaaagcctcycaagaggctgggcccagtggctcacacttgtaatcccagcactttgggaggccaaggcaggtggatcacctgaggccaggagttggagaccagcctggcc

SEQ ID NO: 537735 - DNA, 201 bp, Homo sapiens
atggtgaaaccctgtctctactaaaaatacaaaacattagccaggcgttgtggcaggcgcctgcaatcctagctactcgagagactgaggcaggagaatcmcttgaacccggcagacagaggttgcagggaggaggaggttgcagtgagctgagatcgcgccactgcactccagcctaggcaacaagagtaaaactccatc

SEQ ID NO: 537736 - DNA, 201 bp, Homo sapiens
tgggcgacagagcaagactctgtctaaaaaaaaaaaaaaaaaaaaaaaatcatataagacacaaacaaatggaaaaacattccaagctcatggattggaaraatcattatctttaaaatggccatattgcccaaagcaatctacagattcaacactcttcatatcaaactaccaacatgattttccacaaaattagaaact

SEQ ID NO: 537737 - DNA, 201 bp, Homo sapiens
aagcattaatttaggttgttctttgaaatataaatgtaggccaggcacagtggctcacgcctgtaatcccagcactttggtcggttgagacaggcatatcrcttgaggtcaggagttcgacaccagccagccaacacggtgaaaccctgtctctactaaaaatacaaaaattagccgggcatggtggcacacacctgtagt

SEQ ID NO: 537738 - DNA, 201 bp, Homo sapiens
attgtatcatactgtctcagagtgacagaaaaaacatattgcatcactaaatgcagaaaatataggaactataataatttatgtcagatgtttgttgatgktgattggctacatacctgttaacaaagttcccatgacattgacagctaaacgagccacactaagtgactttggtaatgcatattgtatacacaagtgaga

SEQ ID NO: 537739 - DNA, 201 bp, Homo sapiens
gtatcactaatataccacagcagaatatgcagtattcaatcaatttcaaccaatttaaccacacacagcagtcatgttaattattattcagatatagcagyatcaatctcaagaactgatttctatctaaatatttggagacaactggaattaaaggataaggcaagccaaagaaatgaactacaaatgcagcctacataa

SEQ ID NO: 537740 - DNA, 201 bp, Homo sapiens
aatagctggctcatattggatgttaacacttccgcatatggtataagttcactggcagagagtagagtcaagtgttctataatctgcatcacttgtgtgtkatttactgggacagctgaaaatgctaaaaagaaaatttagcaatcataacctaaattctgtacagtttatcaagcaggaagtagtagtgttctctcagac

SEQ ID NO: 537741 - DNA, 201 bp, Homo sapiens
aggcgtgagccatcatatctggcctctttttaaattaagtcaggcaatacgaatttgacttccttctctcacaactcctaccctcaaccagccatgtccamcctttttttcttctaagtccattttaatttctgtacttttgctgctatcctaattcagtgcctactcaccttttgtttaaatatcttctatggcccactt

SEQ ID NO: 537742 - DNA, 201 bp, Homo sapiens
tgcactccagcctggatgacagagtgagccactgtctcaaaaacaaaaacaaacaaacaaacaaaagaggtagtgtacaatactattcagagttaaaaaawtttttttttttttacctctgttaagtgtctgttaggttcaaccacaagaacctgctgtttctgtagctctaaattagctgaatatctgcaatttcataca

SEQ ID NO: 537743 - DNA, 201 bp, Homo sapiens
tttacacattttatttacatcatcaacaaatctgatgaaaaagagcatatgtgattattttaacacagcaggttatgaccagtctttgaatattgatccargaatgtgcactgcatttaattagaaaacatacttttaactttttctgaactcctagggcatatctattcacacaaaatatcgcaaggcctcagtttaaaa

SEQ ID NO: 537744 - DNA, 201 bp, Homo sapiens
aaaaaaaaaaaaaaaaaacactttactgacccgaagactaatcttattttcttggtgattcagactgatcttattttttaatttattttttttcattttaragatgggagtcttgctatgttgcccaggctggtctttttttttttttttttttttttttttttccctcttgcctttaccaatcaagagcccaggatggtt

SEQ ID NO: 537745 - DNA, 201 bp, Homo sapiens
ccactgcactccaaccttgagactgggcaacagaccctgtctccaaaaaaaaaaaaaaaaaaaaaaaacactttactgacccgaagactaatcttattttyttggtgattcagactgatcttattttttaatttattttttttcattttagagatgggagtcttgctatgttgcccaggctggtctttttttttttttttt

SEQ ID NO: 537746 - DNA, 201 bp, Homo sapiens
aaaaaaaaaaaaaaaacactttactgacccgaagactaatcttattttcttggtgattcagactgatcttattttttaatttattttttttcattttagaratgggagtcttgctatgttgcccaggctggtctttttttttttttttttttttttttttttccctcttgcctttaccaatcaagagcccaggatggtttt

SEQ ID NO: 537747 - DNA, 201 bp, Homo sapiens
tatatagtagagcaccaaaagctgtgctgtgatactgaaacgctgattaaggcggatgttgtcaccctggaggtaatattacaaatactctgaaatactcygaatttcacgagtgcttttttttttcttgatagtaaaagaatcaaaatagactattcagcattgctgctcctaactcaggtaaaacaggagaaatgttgc

SEQ ID NO: 537748 - DNA, 201 bp, Homo sapiens
actgatcttattttttaatttattttttttcattttagagatgggagtcttgctatgttgcccaggctggtcttttttttttttttttttttttttttttyccctcttgcctttaccaatcaagagcccaggatggttttgaattcccggcctcaagtgatcctcctgctttggccttccaaggtgctgagataacaggcg

SEQ ID NO: 537749 - DNA, 201 bp, Homo sapiens
cccacaataaatgcctacaaactgaaatacaactggggagaaagcattaatttaggttgttctttgaaatataaatgtaggccaggcacagtggctcacgyctgtaatcccagcactttggtcggttgagacaggcatatcacttgaggtcaggagttcgacaccagccagccaacacggtgaaaccctgtctctactaaa

SEQ ID NO: 537750 - DNA, 201 bp, Homo sapiens
cagcctgggtgacagagagaaagacacacaaacacaaaaggaaaggaaagggaaaagggggaaagggggaaaggagtaaaaggggaaagggggaaaggagkaaaggggggaggggaagggagcataaaattccttaaacgcaaagagtattttatatacttaaaatacattcaccaaaacattgttatatccatgggaaaa

SEQ ID NO: 537751 - DNA, 201 bp, Homo sapiens
agcactttggtcggttgagacaggcatatcacttgaggtcaggagttcgacaccagccagccaacacggtgaaaccctgtctctactaaaaatacaaaaaytagccgggcatggtggcacacacctgtagtcccagctacctgggaggttgaggcaggagaatcactttaacccaggaggcagaggttacagtgagccaag

SEQ ID NO: 537752 - DNA, 201 bp, Homo sapiens
ctcatagaaaatgcagaacaagtataaatgagagaaaatgataattaagagaaggactttaaggcagacttataatatcctttcaggctttgaaaggaaamcaaatatatagaaataaaagtagagaaggccgggcacggtgacccatgcctgtaatcccaacactttgggaggctgaggcgggtggatcacctgagttca

SEQ ID NO: 537753 - DNA, 201 bp, Homo sapiens
ggaattcaagccagtgggctatgatcctgccactgtactccagcctgagcaacagagcaagactctgtctctaaaaaaaaataagtattttattttaattmatcaagggtattgttcttgaacttttaacaaaactgggattatagtctacttaacactttgccctttgcttttttcacttaacatattgtaaacattttc

SEQ ID NO: 537754 - DNA, 201 bp, Homo sapiens
ctaagtgaaataagcaacatacaaaaggagaaatattgtataattccatttacttcaggtagccagaaagggtaaattcatacagacagaaagttgaatakaggttaccagaggatgggatgatagggggaatggggagttatttaatggatacagagtttctgtttgggatgatgaaaaagttctggaaatgggccaggc

SEQ ID NO: 537755 - DNA, 201 bp, Homo sapiens
acatggtgaaaccccatctctactaaaaatataaaaattagctgggtgtggtggtgcatgcctgtaatcccagctacttgggaggctgaagcacaagaatygcttgaacccaggaggcggaggttacaatgagtcaagatggcgccactgcactccagcctgggcaacagagtgatactctcgtctcaaaaaaaacaaaag

SEQ ID NO: 537756 - DNA, 201 bp, Homo sapiens
taacggcaaaacgaaactcttcggccaggcgcagtggctcacgcctgtaatcccagcactttgggaggccgaggcaggcggatcacgaggttaggagatgragaccatcctggctaacatggtgaaaccccatctttactaaaaatacaaaaaaattagccgggcgtcgtagcaggcgcctgtagtcccagctacgccgga

SEQ ID NO: 537757 - DNA, 201 bp, Homo sapiens
aggtgcctgtaatccctgctactcgagaggctgaggcatgagaatcacttgaacccaggaggcagagtttgcagtaagctgagatcgtgtcactgcactcyggtcggggcaacagagtgagactctgtctcaaaaaaaaaaaaaaaaatccccctaaatgaatgtaggtgtatcttagattcccaggatgctaaacaaacc

SEQ ID NO: 537758 - DNA, 201 bp, Homo sapiens
tgaggcatgagaatcacttgaacccaggaggcagagtttgcagtaagctgagatcgtgtcactgcactccggtcggggcaacagagtgagactctgtctcaaaaaaaaaaaaaaaaatccccctaaatgaatgtaggtgtatcttagattcccaggatgctaaacaaacctatgctgaatatcttgatatcccacacagta

SEQ ID NO: 537759 - DNA, 201 bp, Homo sapiens
ccaaggcctggcaagtgacattcttccacctagcacagaaaagaaaacaaactgaattcagtatcataagcaaaaaggccagtgatgcttccaaatctaamgtatctaaagtttagaggaagaactcctacaaaacataaaaacccagagaggaaggtaacatatccagtatataaataaaattccccacctctacaggac

SEQ ID NO: 537760 - DNA, 201 bp, Homo sapiens
tgggatgaagaagaaaaagtgaatttttaaccttttagttacaaattttaaactttataatggtatcttgctatttataaaatctttaacatctcaagttrccaaatgcaaaactgttgagaaattacaactacagtgttttactgtggacacaaatacaggcaggtcctccctttgccctgtagtgtgagaccataaaaa

SEQ ID NO: 537761 - DNA, 201 bp, Homo sapiens
aaccttgagactgggcaacagaccctgtctccaaaaaaaaaaaaaaaaaaaaaaaacactttactgacccgaagactaatcttattttcttggtgattcaractgatcttattttttaatttattttttttcattttagagatgggagtcttgctatgttgcccaggctggtctttttttttttttttttttttttttttt

SEQ ID NO: 537762 - DNA, 201 bp, Homo sapiens
accattgcaccatgggcaacaagagcaaaactctgtctcaaaaattatatttatatatgtatatgaacaattaatattggctgggtgtggtggctcacacytgtagttacagcactctgggaggcaaaggcaggaggatcaccttaggccaggagttcaaaatcagcctgggcaacaaaagtgagaccccatccctacaaa

SEQ ID NO: 537763 - DNA, 201 bp, Homo sapiens
ctttgggaggccaaggcaggcagatcacctgaggtcaggagttcgagaccagcctgaccaacatggagaaaccccatctccactaaaaatacaaaacttasctgagggtggtggcacatgcctataatcccagctactcgggaggctaacacaggacaatcacttgaacccgggaggcagaggttgcggtgagccgagatc

SEQ ID NO: 537764 - DNA, 201 bp, Homo sapiens
agtcttaaatatgaacaatcggccagacgtggtggctcacacctgtaatcccagcactttgggaggccaaggcaggcagatcacctgaggtcaggagttcragaccagcctgaccaacatggagaaaccccatctccactaaaaatacaaaacttagctgagggtggtggcacatgcctataatcccagctactcgggagg

SEQ ID NO: 537765 - DNA, 201 bp, Homo sapiens
agtaattctagagctcaagaatgaggacctttgctttttttcatggatcccctctcaaagtcttagttactgccttcacaggttggaaagagtaagattcytcacattccttagaaaacaaaggccccttgggattaacttgttaaaacaactacacaacagctgatatttatttcatatagaaaaaaatctagtgttaac

SEQ ID NO: 537766 - DNA, 201 bp, Homo sapiens
aagaacagacatcagaatattaatagtagtatactaggtatctctgaatcatggaattataagatatctttcccttttctgtgctttccaaggtttttgcrtgagtatctattattttagtaaatacaggtttcaaaatgcatttttctaagcgctcttgataaaacttctattaaacaattaaaattacttaaatgaaaa

SEQ ID NO: 537767 - DNA, 201 bp, Homo sapiens
ccaagaaaggaaaacatttctaagcataagagcaaaatagaaaacacaaaaagaacatttacagccaggtgcagtggttcacgcctgtaatcccagcactwtgggaggccgaggagggcagatcacaaggtcaggagatcgacaccatcctggctaacacagtgaaaccccatctctactaaaaatacaaaaattagccgg

SEQ ID NO: 537768 - DNA, 201 bp, Homo sapiens
gcttaggttgattccataacattgctactgtgaatagtgctgaaataaacatacaagtgtaggtacattttttatataatgatttctctacccagcagtargattgctggacagaatggcagttctactctaagttcacaatggaatattattcagcctttaaaaaggaaatcctgacacatgttacaacatagatgaacc

SEQ ID NO: 537769 - DNA, 201 bp, Homo sapiens
gagctgagctccggacccacggccgaggctttgcatgtgagccggggccaggatggagggagggatggagaaagctgcccacccgctgactgggagttcckgagtcctgcctcagaccctcacctgcctgagcctccgctgaaggactcttaattataaaggggatcccaactgacaactgacgacccccaacagattttt

SEQ ID NO: 537770 - DNA, 201 bp, Homo sapiens
aagtgattctcctgcctcaacctcctgagtagctgggactacaggcgcctgccaccacacctggctaatttttgtattttagtagagatggggtttcaccrtgttggccagtctggtctcgaattcctgacctcaagtgatccacccacctcagcctcccaaagtgctgggactacaggtgtgagccactgtgcccagcca

SEQ ID NO: 537771 - DNA, 201 bp, Homo sapiens
tccctctctgagctactgaagtcctgggcagagtttttctgtcttacaacatagggttttactgtaggcaatacctgattgaacctttaaatttaaaatcrtacagctgacttcctgccgagaagcttaggaggaagaaggaagtaatgtttttacagtttttggttaagaacttgcttcgaactaaaatagtccttcaaa

SEQ ID NO: 537772 - DNA, 201 bp, Homo sapiens
gatgtaagaaatccacaaaaatggataaaatgttttaagaattaacactcagtagatatttgcgttctcaaagaagcacgtaaatgcagatatacctctcstttcagttgcatgtaaaatttatagaagtatttgtatttcctttttttttttttttgagacagtctcactctgtcacctagggtggagtgcatggcacca

SEQ ID NO: 537773 - DNA, 201 bp, Homo sapiens
atgtaagaaatccacaaaaatggataaaatgttttaagaattaacactcagtagatatttgcgttctcaaagaagcacgtaaatgcagatatacctctcckttcagttgcatgtaaaatttatagaagtatttgtatttcctttttttttttttttgagacagtctcactctgtcacctagggtggagtgcatggcaccat

SEQ ID NO: 537774 - DNA, 201 bp, Homo sapiens
ctttttttcttactttccaaaactcatcttttcagatacatatcaagcccctccctctctgagctactgaagtcctgggcagagtttttctgtcttacaayatagggttttactgtaggcaatacctgattgaacctttaaatttaaaatcgtacagctgacttcctgccgagaagcttaggaggaagaaggaagtaatgt

SEQ ID NO: 537775 - DNA, 201 bp, Homo sapiens
ttttcttttttgagatggagcctcactcagtcgcccaggctgaagtgcactggcgtgatctcggctcacagcaacctccatctcccaggttcaagtgattmtcctgcctcagcctcccaagtagctggggttacaggtgcctaccaccacacctggctattttcttgtggttgtatttttattagagacagggtttcacca

SEQ ID NO: 537776 - DNA, 201 bp, Homo sapiens
aaatctaacttgattttgaagccataggacacctcaactgttagcttgaatgactggagtgtagttgttttttgggttttcttttttttattgggtttttrttttgttttgttttgtttttgagacagaggctcgctgtgtcatcaggctggagtgcagtggcgctatctcagctcactgcaaaatctgcctcctgggtac

SEQ ID NO: 537777 - DNA, 201 bp, Homo sapiens
ggacccacggccgaggctttgcatgtgagccggggccaggatggagggagggatggagaaagctgcccacccgctgactgggagttccggagtcctgcctmagaccctcacctgcctgagcctccgctgaaggactcttaattataaaggggatcccaactgacaactgacgacccccaacagatttttagagtcccggag

SEQ ID NO: 537778 - DNA, 201 bp, Homo sapiens
ttggttaagaacttgcttcgaactaaaatagtccttcaaatatgtgtctcttgtagctctcggttatcccagcaaaaccatctaaagatttttttttatcwatttattattttttagagataggatcttgctctgttgcccaggctagaatgcagtagcatgatcatagctcactgtaacctccaacttctgggctcaagg

SEQ ID NO: 537779 - DNA, 201 bp, Homo sapiens
ctgcaagggctgcccacagagcccaaaaggcatgcgaccggaagcagctttttcagaaatctccagtcaaggtgggtccaaatatggaattcctagctcckctgaaatgaagtgctgaattcaataataggttagcatttgtccagcacgctggtttacagaatattttcagatgcattgccacactaatcttccagttct

SEQ ID NO: 537780 - DNA, 201 bp, Homo sapiens
agcacgctggtttacagaatattttcagatgcattgccacactaatcttccagttctctgggttttttacatgaagaaactcaaactcaaggtggttgagygacttgtttaaggttcctgacaagaattatggaaactcgagattgaactaaaacctactgatgctaaacctcatgtcattttatgctgtccctttttaag

SEQ ID NO: 537781 - DNA, 201 bp, Homo sapiens
gtcttggcaccagacataaggcagttcaacatcaagcccttgccctgaacagttccaaatgccaagaactggcgaattactactttggtttcaatgggtgktccaaaaggatcatcaaggtaaaccttgtagattttttttcacttaccacactctcctttcaacattgaaatcctagattttagacagaagtattgaact

SEQ ID NO: 537782 - DNA, 201 bp, Homo sapiens
gggaggatggcggagttggtaccttttgcggttcccatcgagagtgacaaaaccttgctagtgtgggagctgagctccggacccacggccgaggctttgcrtgtgagccggggccaggatggagggagggatggagaaagctgcccacccgctgactgggagttccggagtcctgcctcagaccctcacctgcctgagcct

SEQ ID NO: 537783 - DNA, 201 bp, Homo sapiens
aaagtttaggattttaagaggaaaacctgttgattaagtgggaagtgttttgaatcgcatccttcgcgaagagaggtttggggaatatgagggcatgtgcrgttttgttttctgggcgtgagatttcatgcatttacttgtcccacccccacagcattctctgttcacagcattttctcagtttggccttctgtattcagt

SEQ ID NO: 537784 - DNA, 201 bp, Homo sapiens
aaagcctgaagttcttctgtgctttagaagtggtgttgccatcctgtgattgcaggagtcctggcattggcttggtggaggagcctatggataaggtggargaaggtctgttttcactgggagtggaggagggtagggatttggagtggaaaggatctttctttttttcttactttccaaaactcatcttttcagatacat

SEQ ID NO: 537785 - DNA, 201 bp, Homo sapiens
atgactggagtgtagttgttttttgggttttcttttttttattgggtttttgttttgttttgttttgtttttgagacagaggctcgctgtgtcatcaggckggagtgcagtggcgctatctcagctcactgcaaaatctgcctcctgggtacaagcaattctcctgcctcagcctcccaagtagctgggactacaggcgcc

SEQ ID NO: 537786 - DNA, 201 bp, Homo sapiens
ctattaaccacattacacattttgttctaattactggctttttttcctcttttggtgtcttaaggctttttgaagcttattttactgtgagtttattgggmgtatatagattattttcgattaaaaagtggaattattggtccccttccaattgtaattatcttgaatttttatacattagtttctcaaatatatagaatg

SEQ ID NO: 537787 - DNA, 201 bp, Homo sapiens
aagcctttaaaatgtaaagagcactttggatttttaaaggttaacttatttgataagtgtacctttgtattagtaaatgtactacttcaaagtagcaaatkaaagtataatgccttggttagaaattcaagttcccttcgaagccaataattctgttatttttaatatctttaggacacagagtctgggatctaataattc

SEQ ID NO: 537788 - DNA, 201 bp, Homo sapiens
cgccaccacgcctgactaattttttgtattttcaatagagacaaggttccaccatgttggccagactggtctcgaactcctgacctcaggtgatctgcccrcctcggcctcccaaagtgctgggattacaggtgtgagccactgtgcctggcctaacatctagatattttttaaaaatcattttatatttggtttgtttct

SEQ ID NO: 537789 - DNA, 201 bp, Homo sapiens
ttataggcacatgctactatacccagctaattttttgtagagatgaggttttacagtgttaccagtctggtctcgaactcctgggctcaagggattctccygcttcagtctcccaaagtgctgggattacaggcatgacccaccgcactggccatcaggctaattaaaaagtttttttgatcacttctcggccttttggct

SEQ ID NO: 537790 - DNA, 201 bp, Homo sapiens
agaaaatataaacttctgtgaaggcagctgtcaaataattgagatgctattgtgaagcctttaaaatgtaaagagcactttggatttttaaaggttaactkatttgataagtgtacctttgtattagtaaatgtactacttcaaagtagcaaatgaaagtataatgccttggttagaaattcaagttcccttcgaagccaa

SEQ ID NO: 537791 - DNA, 201 bp, Homo sapiens
agcctttaaaatgtaaagagcactttggatttttaaaggttaacttatttgataagtgtacctttgtattagtaaatgtactacttcaaagtagcaaatgraagtataatgccttggttagaaattcaagttcccttcgaagccaataattctgttatttttaatatctttaggacacagagtctgggatctaataattca

SEQ ID NO: 537792 - DNA, 201 bp, Homo sapiens
gacaagctgcaagacaagacaaagactcagaagaattattgagaaaaggatttgtccaggatgcagagactacaagcctagaaaatgaacagctttctaaygatgaccaggccttgtatcagaatgaagtggaagatgatgatggtgcctgtagttcattatatctagaggaggatgacatttctgagaatgacgacttac

SEQ ID NO: 537793 - DNA, 201 bp, Homo sapiens
atgatgacttcagaggtcacctcttcagtcaccctcaacagagcatgttgcaaaatgatggtaaatgctgtccctttatggaaagcatgttgagatatgamgtgtatggtggagaaaatgaggtaattcctgaagtcttgaggaaaagtcattcccactttgacaaattaggggagaccaaacagactccgcatagtctgc

SEQ ID NO: 537794 - DNA, 201 bp, Homo sapiens
ctacaggcgtaagccaccaggcttgtcttaattttattttttgtagagacaggatctcactatgttggccaggctgatcttgaacttctgtcctcaagcartcctcccacctgggcctcccaaagtgctggaattacagatgtgagccactgtgcctggcagaattttatattagacaaagctatctgaagatgaagtagg

SEQ ID NO: 537795 - DNA, 201 bp, Homo sapiens
attttttgtagagacaggatctcactatgttggccaggctgatcttgaacttctgtcctcaagcaatcctcccacctgggcctcccaaagtgctggaattrcagatgtgagccactgtgcctggcagaattttatattagacaaagctatctgaagatgaagtaggtagctttggaaaagaatgaatttcccattgtttag

SEQ ID NO: 537796 - DNA, 201 bp, Homo sapiens
ggattcaaccatcctcttgccttggcctcccagttgtgggattgcaggcatgagccctgtaccagggcttaataaaagtatttttaacaacaaatcatacrgagccatggctttcttttttcatgtaacttatgtatatcctgttattgataaatgtagcttaagcttggtgtttgtttgcttatttgttttttgagatgt

SEQ ID NO: 537797 - DNA, 201 bp, Homo sapiens
gtctcaggtgcttaaaagaaatgaatgctacaaacccactgggctgcatgctaccccaggtgaaagccaagaacctaacctctctgctgaaagttgtggcytaaattcaggggcccagtttggttttaactacgaagaagaacccagtgttgctaaatgtgtacaggcctcagcacctgctgatgaaagaatctttgatta

SEQ ID NO: 537798 - DNA, 201 bp, Homo sapiens
tctgagaagagatgtttttcagaaaatataaacttctgtgaaggcagctgtcaaataattgagatgctattgtgaagcctttaaaatgtaaagagcacttyggatttttaaaggttaacttatttgataagtgtacctttgtattagtaaatgtactacttcaaagtagcaaatgaaagtataatgccttggttagaaatt

SEQ ID NO: 537799 - DNA, 201 bp, Homo sapiens
taattcgaagttgctgaactgcattacctcttaaattacttactgccttgagctcggattagaaactgttttctaggagtataggtagattgttggggtcytgaatcatcgagttcatcgtttgagttcttttgttagaacctggaggtggcatgcacatccacagccctttctagcctgaacacatgaatcaacagtcta

SEQ ID NO: 537800 - DNA, 201 bp, Homo sapiens
accgccttctggtaatcttgagggtgcttttttgtgtgattccccaacatgaagggagtcagaccagtattgtgttccttgtctgctggatgctggaacaygggatagtccctccattctgtctcagttcctcatcttgtaattcgaagttgctgaactgcattacctcttaaattacttactgccttgagctcggattag

SEQ ID NO: 537801 - DNA, 201 bp, Homo sapiens
cgtccggctgccagcccgcgtccctctaccattgtttctcctggtgcggaagggagccccaggcgcgtggtcttggtcccttgcccaccctctgtgggctyctggcccctcctaactccgttagagagggcgaggccaccacacgcccccccagctcagcacgttggattcaacattcctgcgaggccaatcccggaagtc

SEQ ID NO: 537802 - DNA, 201 bp, Homo sapiens
cctggttccatattctaagtttcagaatcatgatctttttctgcactaacgtcccacagtcctcagagtttctcacagttcattgatgtgtactgagtatrtaatttatacttagcccccacggcggggtggttctcagaagtggaagacaggtgggtctttggagaacacggtgggaatcttggtgcactgactaacttg

SEQ ID NO: 537803 - DNA, 201 bp, Homo sapiens
cacgtccccagcccgccttcctttcccgcagggtccacacgggtcgggccgggcgcgctcccgtgcagccggctccggccccgaccgccccatgcactccyggccccggcgcaggcgcaggcgcgggcacacgcgccgccgcccgccggtccttcccttcggcggaggtgggggaaggaggagtcatcccgtttaaccctg

SEQ ID NO: 537804 - DNA, 201 bp, Homo sapiens
gtggcggtgcgagggctgctgcacagcgagcggagccgcggtccggacggcagcgcgtgccccgagctctccgcctccccccgcccgccagccgaggcagstcgagcccagtccgcggccccagcagcagcgccgagagcagccccagtagcagcgccatggccgggtggaacgcctacatcgacaacctcatggcggacg

SEQ ID NO: 537805 - DNA, 201 bp, Homo sapiens
gcggaagggagccccaggcgcgtggtcttggtcccttgcccaccctctgtgggctcctggcccctcctaactccgttagagagggcgaggccaccacacgcccccccagctcagcacgttggattcaacattcctgcgaggccaatcccggaagtcccctcgccctcccttcccgccatccggcggggcctggagcagggg

SEQ ID NO: 537806 - DNA, 201 bp, Homo sapiens
gcccccagggctggacagctgctgaacagctggcagggggtggaattgtgacacctggatcctagcctcctttctctttcctcctcctccagcgctagtcytgctgatgggcaaagaaggtgtccacggtggtttgatcaacaagaaatgttatgaaatggcctcccaccttcggcgttcccagtactgacctcgtctgtc

SEQ ID NO: 537807 - DNA, 201 bp, Homo sapiens
ctcctccagcgctagtcctgctgatgggcaaagaaggtgtccacggtggtttgatcaacaagaaatgttatgaaatggcctcccaccttcggcgttcccartactgacctcgtctgtcccttccccttcaccgctccccacagctttgcacccctttcctccccatacacacacaaaccattttattttttgggccattac

SEQ ID NO: 537808 - DNA, 201 bp, Homo sapiens
ttcaccgctccccacagctttgcacccctttcctccccatacacacacaaaccattttattttttgggccattaccccataccccttattgctgccaaaaycacatgggctgggggccagggctggatggacagacacctccccctacccatatccctcccgtgtgtggttggaaaacttttgttttttggggtttttttt

SEQ ID NO: 537809 - DNA, 201 bp, Homo sapiens
ggtgaaagggggaggggggaaaggttcccggggtacctagacccgagagctggcctgccgggtctggcccctgtccaccttcaaaagttttccaactttcscggaaagcccccaggggtctgcttcctcatctcagagcagagatacctggagctaaactctaggttacttggagacccaggcgtccgggccctaacagct

SEQ ID NO: 537810 - DNA, 201 bp, Homo sapiens
gaaggtgtccacggtggtttgatcaacaagaaatgttatgaaatggcctcccaccttcggcgttcccagtactgacctcgtctgtcccttccccttcaccsctccccacagctttgcacccctttcctccccatacacacacaaaccattttattttttgggccattaccccataccccttattgctgccaaaaccacatg

SEQ ID NO: 537811 - DNA, 201 bp, Homo sapiens
ttgattttcctcttttgaaaagccttattgtttcagggtgactgacagcctgcctgtgtgtggtgggggggcgggttgggagagatgaggttgggttacarcccccagggctggacagctgctgaacagctggcagggggtggaattgtgacacctggatcctagcctcctttctctttcctcctcctccagcgctagtcc

SEQ ID NO: 537812 - DNA, 201 bp, Homo sapiens
ttatttcctgggtttactttccccattaacactgacatctaaatctctagaggagtatgtcatcccttcctccctggttccatattctaagtttcagaatsatgatctttttctgcactaacgtcccacagtcctcagagtttctcacagttcattgatgtgtactgagtatataatttatacttagcccccacggcgggg

SEQ ID NO: 537813 - DNA, 201 bp, Homo sapiens
ggtctttggagaacacggtgggaatcttggtgcactgactaacttgatgggcgcttggttcctcttccagccagctgaggtgggtgtcctggttggcaaakaccggtcaagtttttacgtgaatgggctgacacttgggggccagaaatgttcggtgatccgggactcactgctgcaggatggggaatttagcatggatct

SEQ ID NO: 537814 - DNA, 201 bp, Homo sapiens
aattcctcctgctttctccttccttccttcttctggctcactccctgccccgataccaaagtctggtttatattcagtgcaaattggagcaaaccctaccyttcacctctctcccgccaccccccatccttctgcattgctttccatcgaactctgcaaattttgcaatagggggagggatttttaaaattgcatttgcaa

SEQ ID NO: 537815 - DNA, 201 bp, Homo sapiens
gtgctccagcctgggcgacagagggagtccctttctcaaaaaaataataataaaaataaagatggcagtaggaaggtttcagcttgagatgctgtcttttcttctgtttttatgcataaatacaacgaagacgggagaggagatggaaagcaaagatgattaagtgaaataattgtgggaaacaatagagggacagacttt

SEQ ID NO: 537816 - DNA, 201 bp, Homo sapiens
gacttaccaaagagcaactgaaacagattcctacacatgactatcagaagggtgagggggttaggggagaagagggcttttcccacagtttacctggttcwgaaggactttgagcccagaagatagggtatacaaagatggcagtggccgggcacagtggctcacgtaatcccaagtgcctctaatcccagtactttggga

SEQ ID NO: 537817 - DNA, 201 bp, Homo sapiens
tctgtttttatgcataaatacaacgaagacgggagaggagatggaaagcaaagatgattaagtgaaataattgtgggaaacaatagagggacagactttgyttataggggatgtggacagagcagaaaaatgggaggaatggggaggattcagttagagaaggaagaaaccggtaccaaggggctggggctttaggccctg

SEQ ID NO: 537818 - DNA, 201 bp, Homo sapiens
ttcccacctcctttggttccttagccccagctccccttgtttttcctgggccttcaacagatcccccactgtcccctccctcttcccctgttatcctggtytaataaccccccacacatacacctctggtgacctatttgcacagaccgtcgtcttccctccagtcttctgagggataggggacattccatcccaagcttc

SEQ ID NO: 537819 - DNA, 201 bp, Homo sapiens
ttagccccagctccccttgtttttcctgggccttcaacagatcccccactgtcccctccctcttcccctgttatcctggtctaataaccccccacacatamacctctggtgacctatttgcacagaccgtcgtcttccctccagtcttctgagggataggggacattccatcccaagcttctcccttacccacacctatcc

SEQ ID NO: 537820 - DNA, 201 bp, Homo sapiens
cagcctgggcgacagagggagtccctttctcaaaaaaataataataaaaataaagatggcagtaggaaggtttcagcttgagatgctgtcttttcttctgyttttatgcataaatacaacgaagacgggagaggagatggaaagcaaagatgattaagtgaaataattgtgggaaacaatagagggacagactttgcttat

SEQ ID NO: 537821 - DNA, 201 bp, Homo sapiens; identical to SEQ ID NO: 353175

SEQ ID NO: 537822 - DNA, 201 bp, Homo sapiens
gtcttttcttctgtttttatgcataaatacaacgaagacgggagaggagatggaaagcaaagatgattaagtgaaataattgtgggaaacaatagagggayagactttgcttataggggatgtggacagagcagaaaaatgggaggaatggggaggattcagttagagaaggaagaaaccggtaccaaggggctggggctt

SEQ ID NO: 537823 - DNA, 201 bp, Homo sapiens
ggcctccagtgcccgtataaggctgtggcagaagccctgcccatttccgttccttccactccctatctccaccctcacacctccccaaaaacccacttccyttcttacctctgcttctctttgcttgtcccttctagccctaaattcttccatgttctgccctgaccttatcctgcctacctgtcttatctcttccactgg

SEQ ID NO: 537824 - DNA, 201 bp, Homo sapiens
ggtaggacatgtgcctccttcccattcttccttcagcaagcagttccatgccaacctggagcccaggcctcctcattacccgaaccattcagcctcctgtmcttccttccctgcctctttgactttcttcccattcctgtccccacctatgggctttgtccagagccagttactttgtccctctttttttctccctttgcc

SEQ ID NO: 537825 - DNA, 201 bp, Homo sapiens
actccgcttctgctccttgctaccaggacgcgcggcctcctcagcctctttcctcccgctgccatgcaccctgcagccttcccgcttcctgtggttgtggycgctgtgctgtggggagcggccccgacccgggggctcattcgagcggtgagtctgagggacggatggggaaagggcgctgaaaggaagggttgcaggctg

SEQ ID NO: 537826 - DNA, 201 bp, Homo sapiens; identical to SEQ ID NO: 353177

SEQ ID NO: 537827 - DNA, 201 bp, Homo sapiens
aatctctctgagccttagtttgttttactgtaaaatgggatattagaagttttcctagggttattgtgaagatcaaagtagatacgcaattttggtagtayttcatcccaaagactgccacatagcaagaactcagttgggccttagtagcagtcgagttgtttgtgagatgggtaattagaaaattgaagaggccgggcg

SEQ ID NO: 537828 - DNA, 201 bp, Homo sapiens
tggtgtggaatagtggtaaggctgggggaatctatacagctgggctttcagtaggacccagagatggtgggaaggctgaaggcctcaggaaaagaagccartcctttaggtggggtggggccaaagtgcaagatgccagggttcccagaggatttgagtagaaggttgtgagtccccagagtaacaccttgatccctgcag

SEQ ID NO: 537829 - DNA, 201 bp, Homo sapiens; identical to SEQ ID NO: 353169

SEQ ID NO: 537830 - DNA, 201 bp, Homo sapiens
tataggagaaattatttcccgggttttctcttttctaaagacacagaaaagttttctttggctttcctctgggctggggttacagccactgacaaaaactyacatcccctcgtttcctttaagaaattcctctgttctggaacagagcttcctgagagccatcctcgcagagttccgtcgatcaggactggaggaagccac

SEQ ID NO: 537831 - DNA, 201 bp, Homo sapiens
tatttatcatggtaactcagagtttggactcttccacagaagccatggcacactaccccacaaggctgaagaccagaaaaacttattcatgggttggcagscccttgttggatcgaaaactgcactaccaaacctataggtgagtgatggggtcctttggttgtcctggaaatacagcttctcaagctaaacagtcaactt

SEQ ID NO: 537832 - DNA, 201 bp, Homo sapiens
atctgaaaaatgagaagacactctttgtgaaactatcctggaatgagaagaaattcaggccactttcctcagaactatttgcggagttgaataaaccacamgagagtgcagccaagtgccagaaacccgtgagagccaagagtaagagtgcagagagcccttcttggaccccagcagaacatgtggccaaaaggattgaat

SEQ ID NO: 537833 - DNA, 201 bp, Homo sapiens
gagtccctgctattcaccacacaaagtgcctcttcaccaggctgtacaggtggtaatgggaggggaggagaactgacgaagcaggaagggctacaggacayccttaccagttcaatactggggattagaggaagggaaaaatgtaagccgatagtcatgtttgtgtcctgggttacttggaaagtgatttttttttttaga

SEQ ID NO: 537834 - DNA, 201 bp, Homo sapiens
tcttctttttttttttttttttctttttttggagacagagttttgctgttgttgtccaggctggagtgcaatggcacgatctcggattactgcaacctccrcctcccgggttcaagcgattctcctgcctcagcctcccgagtagctgagattacaggcacctgccaccatacccagctaattttttgtatttttagtaga

SEQ ID NO: 537835 - DNA, 201 bp, Homo sapiens
aggtgcatgtacatctccggtgtccctgggacagggaagactgccactgttcatgaagtgatacgctgcctgcagcaggcagcccaagccaatgatgttcstccctttcaatacattgaggtcaatggcatgaagctgacggagccccaccaagtctatgtgcaaatcttgcaggtaagcagagctgtttaggctttttgg

SEQ ID NO: 537836 - DNA, 201 bp, Homo sapiens
tgaccagcttccaaggatggtccctactgcccccacctccacatttcaagggtctcggtccttccctcagtatacattcccacactcctaactgattatarcgtgtagtggctggctgagacctaccccacgggttttcctctcttgctctaggtgcatgtacatctccggtgtccctgggacagggaagactgccactgt

SEQ ID NO: 537837 - DNA, 201 bp, Homo sapiens
acttttaaactgcaccaaaccatggaggtttaattatttaaaaaaaaaatgttttaggctgggcacagtggctcacgcctgtaatcccagcactttgggakgccaaggcaggtggatcacctgaggtcaggagttcgagaccagcctgaccaacatggagaaaccccatctctactaaacagacaaaaattagccaggtgt

SEQ ID NO: 537838 - DNA, 201 bp, Homo sapiens
ccgggcgtggtggctcatgcctataatcccagtttaggccgggcgtggttgctcacgcctgtaatcccagcactttgggaggccgaggcaggtggatcccraggtcaggagatcgagaccatcctggctaacacggtgaaactctgtccctactaaaaatacaaaaaaattagctgggcgtggtggtgggcaccagtagtc

SEQ ID NO: 537839 - DNA, 201 bp, Homo sapiens
aagcaattctgcacccgagggtcacctcaggaaaccaccgtcctgcttgtggatgaggtgaggtgcccatgggcggacaggagaagaaacagggctgtacytcaggagcaagtgctggatgggagggaggaaagtcctggctcccttctccattcatatgagcccattttctggtgctgagaggcgtgtgtcaatggattg

SEQ ID NO: 537840 - DNA, 201 bp, Homo sapiens
aggattgtatttcctcttaacctttgccttgctatttgtgtctagatatatagtcaacatgtggcactgtgcagaatggagggactgccgtaccccaccaygtcagagaccatggccgtgtgttctcacctgggctcctgtcgcctcctgcttgtggagcccagcaggaacgatctgctccttcgggtgcggctcaacgtc

SEQ ID NO: 537841 - DNA, 201 bp, Homo sapiens
acgatcatggctcactgcagccttgacttctcaggcttaggtgaccccccaacctcatcctcccaggtggctgaaactacaggcacatgccaccatgcccrgctgattttttgtagagacagggcttcaccatgttgccaagctagtctacaaagcatctgattttggaagtacatggaattgttgtaacaaagtatattg

SEQ ID NO: 537842 - DNA, 201 bp, Homo sapiens
agtggcacgatcatggctcactgcagccttgacttctcaggcttaggtgaccccccaacctcatcctcccaggtggctgaaactacaggcacatgccaccrtgcccagctgattttttgtagagacagggcttcaccatgttgccaagctagtctacaaagcatctgattttggaagtacatggaattgttgtaacaaagt

SEQ ID NO: 537843 - DNA, 201 bp, Homo sapiens
ttctagtgccttttgtacactctggtatccaaaactgcttcccgtgacctcgctgtggtttcttgcagggatgcaaaagaagcaaaagcccagaatgaagygacctctactccccatcgtatccgcagaaagagttctgtcttgactatgaatcggattaggcagcagcttcggtaagactactccttggcaggcagagaa

SEQ ID NO: 537844 - DNA, 201 bp, Homo sapiens
agtggtagtctaggtatgaaatgtgtaatttgttatatgggacctgggaattgggtttgggggcccaagggtgactttccacctggataatcactgggcartcaaccaacttattcctctgtcattttggctccccagggtcttaccaggatgtgcttccagccctatacatatagccagctgcagcagatcctaaggtcc

SEQ ID NO: 537845 - DNA, 201 bp, Homo sapiens
aagacatctacaattttgtggaaagcaaactccttgaccataccggagggtgagtcatgtgaggcaggcagggtagtttggggaataaggcccctgctagyggaatgccttgggtgttacagttcagccatacaggctttctccagtatcagcagactagaccaaatcgttgctgaagcccaaagcttctgaaacatttgt

SEQ ID NO: 537846 - DNA, 201 bp, Homo sapiens
ggattctctagcatttgaaattgagttttcaggtagaaacatagacaagaaaccataatcattttccattgattaatgagtagatggttggggaatgttcstaaagtcttccttttctcccgtttaccaccaatggtaggctgcatgtttctgctgtacctgagtctcttccctgtcgggaacaggaattccaagacatct

SEQ ID NO: 537847 - DNA, 201 bp, Homo sapiens
gaattccaagacatctacaattttgtggaaagcaaactccttgaccataccggagggtgagtcatgtgaggcaggcagggtagtttggggaataaggcccytgctagtggaatgccttgggtgttacagttcagccatacaggctttctccagtatcagcagactagaccaaatcgttgctgaagcccaaagcttctgaaa

SEQ ID NO: 537848 - DNA, 201 bp, Homo sapiens
agcctttgtatttctgttttatccttgtgtgcattttataagcgtcatgaagacatttacaacccctgtatcactgtcttttaatttcactttgttagatrttttacacctattgttctgccttattcctagtatttctaaatgttacagtttcatttcttaggaattgacctttctgttttcctggatggaaagagatac

SEQ ID NO: 537849 - DNA, 201 bp, Homo sapiens
tacccacagagcaaattgaaatccttcacatcacgtgaagtatgtgagtcatagtcaaaaaagttagaacagtagttgaaaaacctatgtcacagaagtaytggggagctttcttaaaatacagatttctaggcctcttcccacacctagtgagtcagactccaagcactggccctaggaatctgtatttggaaatgctct

SEQ ID NO: 537850 - DNA, 201 bp, Homo sapiens
acatctccggtgtccctgggacagggaagactgccactgttcatgaagtgatacgctgcctgcagcaggcagcccaagccaatgatgttcctccctttcartacattgaggtcaatggcatgaagctgacggagccccaccaagtctatgtgcaaatcttgcaggtaagcagagctgtttaggctttttggaaaatgctgt

SEQ ID NO: 537851 - DNA, 201 bp, Homo sapiens
catcacgtgaagtatgtgagtcatagtcaaaaaagttagaacagtagttgaaaaacctatgtcacagaagtattggggagctttcttaaaatacagatttytaggcctcttcccacacctagtgagtcagactccaagcactggccctaggaatctgtatttggaaatgctcttcagatggttccagtataccgagctgtt

SEQ ID NO: 537852 - DNA, 201 bp, Homo sapiens
tttactcttttcaaagtatatataaaaagactgggagccaatcaggccacttgactatcttctagtgccttttgtacactctggtatccaaaactgcttcycgtgacctcgctgtggtttcttgcagggatgcaaaagaagcaaaagcccagaatgaagcgacctctactccccatcgtatccgcagaaagagttctgtct

SEQ ID NO: 537853 - DNA, 201 bp, Homo sapiens
aaagagattctgccagcagcagagatttcagactctagcagtgacgaagaagaggcttccacaccgccccttccaaggagagcacccagaactgtgtccakgaacctgcgatcttccttgaagtcatccttacataccctcacgaaggtgccaaagaagagtgtaaggttcttctaggtttacttcccattgaagcatccc

SEQ ID NO: 537854 - DNA, 201 bp, Homo sapiens
tactaaaaatacaaaaattagccaggctaatttttacttaggaagctgaggcaggagaattgcttgaactccggaggcagagtttgcattgagttgagatygtgccactgcactccagtctggcaacgaagcaagagtccatcccaaaaaaaaaaaagttctgcaaaaatgaatactaaaataaattgggatgttaagaaa

SEQ ID NO: 537855 - DNA, 201 bp, Homo sapiens
cgaagaagaggcttccacaccgccccttccaaggagagcacccagaactgtgtccaggaacctgcgatcttccttgaagtcatccttacataccctcacgraggtgccaaagaagagtgtaaggttcttctaggtttacttcccattgaagcatccctctcttagtttaaaagttacaaatgctgaagtcacagattagta

SEQ ID NO: 537856 - DNA, 201 bp, Homo sapiens
taaaggcctttgaagatgatgccatccagctggtagccaggaaggtaagtcaccagctgcacccataaatcagtcagcacatctttgctgagtacctgctsggtatgaggccctatgctggtgctctgaggttggagagaaatttagaaagtcgtgtaaaaatatcaaaaaagacaagattatgagaaattccttagcctt

SEQ ID NO: 537857 - DNA, 201 bp, Homo sapiens
cagatcagcacaaatcacatttgctggtgtgtcctggatggtgttttgctttttccttgtgaaatatgttctttgttttcaatacagctcaagcctagaaygccacgttgtgccgctcctcagatccgtagtcgaagcctggctgcccaggagccagccagtgtgctggaggaagcccgactgaggtactgctgctgttga

SEQ ID NO: 537858 - DNA, 201 bp, Homo sapiens
tcttgtaggtagcagcactgtctggagatgcacgacggtgcctggacatctgcaggcgtgccacagagatctgtgagttctcccagcagaagcctgactcmcctggcctggtcaccatagcccactcaatggaagctgtggatgagatgttttcatcatcatacatcacggccatcaagtaagatgctccacttcctgagc

SEQ ID NO: 537859 - DNA, 201 bp, Homo sapiens
accagcttccaaggatggtccctactgcccccacctccacatttcaagggtctcggtccttccctcagtatacattcccacactcctaactgattataacktgtagtggctggctgagacctaccccacgggttttcctctcttgctctaggtgcatgtacatctccggtgtccctgggacagggaagactgccactgttc

SEQ ID NO: 537860 - DNA, 201 bp, Homo sapiens
acaaatcacatttgctggtgtgtcctggatggtgttttgctttttccttgtgaaatatgttctttgttttcaatacagctcaagcctagaacgccacgttrtgccgctcctcagatccgtagtcgaagcctggctgcccaggagccagccagtgtgctggaggaagcccgactgaggtactgctgctgttgattccccttc

SEQ ID NO: 537861 - DNA, 201 bp, Homo sapiens
gcatttgaaattgagttttcaggtagaaacatagacaagaaaccataatcattttccattgattaatgagtagatggttggggaatgttcctaaagtcttscttttctcccgtttaccaccaatggtaggctgcatgtttctgctgtacctgagtctcttccctgtcgggaacaggaattccaagacatctacaattttgt

SEQ ID NO: 537862 - DNA, 201 bp, Homo sapiens
agacagaattcttaccctaagagacttcaaagtctaggagctggataatgattacaagccaggaagccagtacttacccacatggtgaaaactgtgagctyacaggtagcagtgtggcaacatggaaaaggggtccgtggcaggccagaggttaagccttgctctttgtccatgggctgttattttggagcaggtaacatc

SEQ ID NO: 537863 - DNA, 201 bp, Homo sapiens
atgattaaaaatatagataattcctgttttacatataactcagtggctgaatttggctgtgatgagattgtgggtttgtatattgttaggtaaaaaatttrcacattgtgatgatttctcttagacttaggtaaccctcagatgtcccagcagacttcatgtgcctccttggattctccaggaagaataaaacggaaagtg

SEQ ID NO: 537864 - DNA, 201 bp, Homo sapiens
gaggctttttcttttctttgaatgatcctttttttatgccacccttttttttttttttgaaacagcatctcactcggtcgcccaggctggagtgcagtggygtgatctcagctcactgcaacctccgccttctaggttcaagagattctcctgcctcagcctcctgagtagctgggattacaggcgtgtgccaccatgccc

SEQ ID NO: 537865 - DNA, 201 bp, Homo sapiens
cctgggagtagcatattttggtctctagttggggagttggtgagtctaatttaaataaggttaaggcagactttgaactctgggtttgagtcaagcttcarttataactttttagttataattttttgccaactttttagcagaaagaaagttttactcttttcaaagtatatataaaaagactgggagccaatcaggcca

SEQ ID NO: 537866 - DNA, 201 bp, Homo sapiens
tggagtgcagtggcacgatcatggctcactgcagccttgacttctcaggcttaggtgaccccccaacctcatcctcccaggtggctgaaactacaggcacrtgccaccatgcccagctgattttttgtagagacagggcttcaccatgttgccaagctagtctacaaagcatctgattttggaagtacatggaattgttgt

SEQ ID NO: 537867 - DNA, 201 bp, Homo sapiens
gaaactatcctggaatgagaagaaattcaggccactttcctcagaactatttgcggagttgaataaaccacaagagagtgcagccaagtgccagaaacccrtgagagccaagagtaagagtgcagagagcccttcttggaccccagcagaacatgtggccaaaaggattgaatcaaggcactccgcctccaaatctcgcca

SEQ ID NO: 537868 - DNA, 201 bp, Homo sapiens
aggtgaccccccaacctcatcctcccaggtggctgaaactacaggcacatgccaccatgcccagctgattttttgtagagacagggcttcaccatgttgcyaagctagtctacaaagcatctgattttggaagtacatggaattgttgtaacaaagtatattgaatggaaatggctctcatgtattttggaattttccatt

SEQ ID NO: 537869 - DNA, 201 bp, Homo sapiens
gtatgtgagtcatagtcaaaaaagttagaacagtagttgaaaaacctatgtcacagaagtattggggagctttcttaaaatacagatttctaggcctcttmccacacctagtgagtcagactccaagcactggccctaggaatctgtatttggaaatgctcttcagatggttccagtataccgagctgttatttggggatc

SEQ ID NO: 537870 - DNA, 201 bp, Homo sapiens
caggcttaggtgaccccccaacctcatcctcccaggtggctgaaactacaggcacatgccaccatgcccagctgattttttgtagagacagggcttcaccrtgttgccaagctagtctacaaagcatctgattttggaagtacatggaattgttgtaacaaagtatattgaatggaaatggctctcatgtattttggaatt

SEQ ID NO: 537871 - DNA, 201 bp, Homo sapiens
acctctactccccatcgtatccgcagaaagagttctgtcttgactatgaatcggattaggcagcagcttcggtaagactactccttggcaggcagagaaayattgctgccatctctgatatctataatcttatctcctaatgcctcttatactgtttatttgccaatccattgaaattgaccttttacctagcatgtctgg

SEQ ID NO: 537872 - DNA, 201 bp, Homo sapiens
tgccccagcagagccatgccccagacagggccccgggtagctttgtgcttctctgaggctgctccctgcccctcccatgctgtctctctcccacaggattyccccccatccctggcctggagtccactatgggtgttgaggaggacgcagtggcagcgacattggcagctgcagagaaactggcctctgcagaggattcag

SEQ ID NO: 537873 - DNA, 201 bp, Homo sapiens
ggtgttcagcattgccttctttgggagtttactatccacaccttaccacgggtagcactgttgggggcgtggcttatgggctactccagcctgaatctctrtaactcttccataggtatctaggctgccatgatgccagggccaagacctcggaagggccctcaggccagaggccaaggggtggccgctgccaagcaggta

SEQ ID NO: 537874 - DNA, 201 bp, Homo sapiens
ttcttctgtgaccctcatgtgctctctggggactgtttgtttccttatagacaacccctcccaacctgagaccagcctccctggcatttctgcccagcccrtttcagacttagacccagacccgcgggccctgctgtcatcccgacagagagagtacaaagtggctgccctcagtgccaagcgggctggagagctagaccg

SEQ ID NO: 537875 - DNA, 201 bp, Homo sapiens
catgggctcagccagcacattcctgccttccctgcccagtccaatcctctgctgcctcttgactccccaggtccttcttcagaagcgacaagctggttggyacagcacacctgaaactggagcggctggagaatgagtgtgagatcagagaaattgtggaggtaggggctggggtgtgggcaagccaaaggggttggtacg

SEQ ID NO: 537876 - DNA, 201 bp, Homo sapiens
tgtacagagaaaaaacttgcccaaggacacccagctaggaaatagcagaactaggattcaaaccaaggtctttctgaacccagagccccggctccatcccyattaccctgcagtctctctcctgctggggaggttagatgtgagagcttctgaggctgcttctagctctcagatcttttaggacccaggaagagaagccac

SEQ ID NO: 537877 - DNA, 201 bp, Homo sapiens
ttctccctcctcactgcttaggaccaggctcaaaaaagcaaaacagctgtggtgaagaacacaaactctccaggtgagggccacacgtgggcctctttctyctccctcagagtgtgtgggcagcactggtgtttccagagtgggttcccatctatgcccttacttgatccaccccacttgggagataaaggtgctgttaac

SEQ ID NO: 537878 - DNA, 201 bp, Homo sapiens
gtgctgttaacatgcttcttctgtagttggagaaacacgcagagaggtacagggacttgcctggggcctcatggcaaggaagtggtagaaatgggatatgracacaggaattctgtatcccaattccaagtctttcctactttgttacaatctatgactaaaaagagtacaaaaactcacttccaaggccaggaccgcgat

SEQ ID NO: 537879 - DNA, 201 bp, Homo sapiens
cctcctaacagcctcctgggcacctgcagggtgagcccccagcacaggccccagtggccaagaaacctgcacggcccacagtcccttcatcccagcgcctkcctgagcccagggcctcaagttctaaggagtcaccgagtccatctggtgagttggggacaagcagggtgaagaactgagggcctagagagggcaggtgtg

SEQ ID NO: 537880 - DNA, 201 bp, Homo sapiens
ggtcacacagcgatgtagtacagtgttaggaagacagcccaagtctgggagccgccatgactatgctagggaacacatcccctcctaacagcctcctgggsacctgcagggtgagcccccagcacaggccccagtggccaagaaacctgcacggcccacagtcccttcatcccagcgcctgcctgagcccagggcctcaag

SEQ ID NO: 537881 - DNA, 201 bp, Homo sapiens
ggaggagagggcagtggagaggaggctgggggtgcccctgtattctctgactctgagtgagtgcttgcccctcctggctgtacagtgggtggcgtgtctcyttgacttctggtctaagctctgcagttggggattctcagatttggagtaattactattttcaaggctatcctcggtcagattaaagaaatgttttggtga

SEQ ID NO: 537882 - DNA, 201 bp, Homo sapiens
tacagggacttgcctggggcctcatggcaaggaagtggtagaaatgggatatgaacacaggaattctgtatcccaattccaagtctttcctactttgttayaatctatgactaaaaagagtacaaaaactcacttccaaggccaggaccgcgatgctctaccaccctttggaggcagtaccccaaaatgcaggtggagaga

SEQ ID NO: 537883 - DNA, 201 bp, Homo sapiens
ccagtgggccagtggtagcctgtcccagacaactccgtcaccccagctctgcctgtgcctttatccctgacagctgctgcactagccttcctgcttccctraggacttagtggagggggaaagttgtttttggtactacttggtgggaagtaaggggaaggttggatcttgggtttggtctacccacccaagagaaaagac

SEQ ID NO: 537884 - DNA, 201 bp, Homo sapiens
gggctgagtttctgatgttcctcagtagaactgggaagagaaggtaaccttccaaggtttaactatctatctatctatctatcttcaggaaaccctttctmaaatctttgtgttttcactgcagtttagactgacttcttgtgctttgcacccctgtgtagccgatggccagcaccaggagaggagtcaggccgcgactgt

SEQ ID NO: 537885 - DNA, 201 bp, Homo sapiens
atgtttcttccagaagttgccgtggggattgaggagaaaatgaacagagctctaggatgcttgtctggatttatttattacttttttaataagactcacckaaaaccaccaccacctcctcctccaaatactgggagggtagggttttcatgaatggagattcctgtgttcatgccacaggacatcttagctcctctcact

SEQ ID NO: 537886 - DNA, 201 bp, Homo sapiens
aaggttggatcttgggtttggtctacccacccaagagaaaagactgttaactggaagaaaaaatatatatataaaattttatgtagacacgtttatttatytaggaaactaagtctaactcattgtagggattttatactcaactatacagagtatccaccaaagtcctaatctaaagtcctgctccctgtcactttttaa

SEQ ID NO: 537887 - DNA, 201 bp, Homo sapiens
gagaggaaagggggttctgtaagctcatatggtgtgtccttggcagagctacgaccagctccttactgataacctatgtaggctggggctcttcccactgyagcacacctggccctactgcctgcctggggaagttgttcttatgcgggccctggtctctattggagccactgagggtggttggacttcttgggcctattg

SEQ ID NO: 537888 - DNA, 201 bp, Homo sapiens
ggcctagggaaacaggggctccaggcagggaggggcaggaggctgggagcccaggccagagactgctacccctttagtgaggcttcccaagcctggccccrctgtgggcactggggctgctgaggacgacagggtgcatgctagtggagagcgcacagctgtctgggtgctgtggaaagagctctggaccagaagtcagag

SEQ ID NO: 537889 - DNA, 201 bp, Homo sapiens
cgcagtggcagcgacattggcagctgcagagaaactggcctctgcagaggattcagccccggctgataaagacgaggacgaggtttggttgagggctcaaytccagggctggtggggagaatagcaggtgaggggtaaacccagaccctgttgtccatactaacaagcccaataaggtacatattctttcctccactgtac

SEQ ID NO: 537890 - DNA, 201 bp, Homo sapiens
aactggagcggctggagaatgagtgtgagatcagagaaattgtggaggtaggggctggggtgtgggcaagccaaaggggttggtacgacaagagccaataygcactgaatgccacaccttgttgtaggttttcgtgctcattacttaatttgaaattctccacaagtgtgcttagagtaggtggaatcctcatttcacaga

SEQ ID NO: 537891 - DNA, 201 bp, Homo sapiens
cctttggctttgtttttctgaatggatggagactatgaaggggtttgtagttgtaagagatttaatattcaaaactgaaatattctgcatttcttagaaakaccccatcttcccccaccccctttttgaattattaattcaagatcaacaaagcattcctcaagatcacttttaaaaaaggttagaagtgaagcaaataca

SEQ ID NO: 537892 - DNA, 201 bp, Homo sapiens
atcccagccatgccccagcagagccatgccccagacagggccccgggtagctttgtgcttctctgaggctgctccctgcccctcccatgctgtctctctcycacaggatttccccccatccctggcctggagtccactatgggtgttgaggaggacgcagtggcagcgacattggcagctgcagagaaactggcctctgca

SEQ ID NO: 537893 - DNA, 201 bp, Homo sapiens
aaactggatcacatgtagttcccccattagttcagagacttggagcagtgcctcctggaggtggcagagcccttagacaccctcctactagtctcttccayatacaagtggggagagggttcaggaatcaccaaagtttaggatgttctgatgggacctcagtgctctcaaaggttccttagatagggtcacaactttgct

SEQ ID NO: 537894 - DNA, 201 bp, Homo sapiens
ctggctctggagctggaccctaccctgcttgttgtgtggttcctaagagtcctgctctgctctcagatggggctctttatggagtttggccctgaggacaygctgctgggcatggatgaggctgaagatgatgaggacctggaggctgagctgctggctctcacaggggaagcacaaaccacaggcaagaagccagcaccc

SEQ ID NO: 537895 - DNA, 201 bp, Homo sapiens
tctgtaactcttccataggtatctaggctgccatgatgccagggccaagacctcggaagggccctcaggccagaggccaaggggtggccgctgccaagcargtatggaacttagccttctaggctactgggtcggtttggggatgggggtccctagacaacttaggcaaactggatcacatgtagttcccccattagttca

SEQ ID NO: 537896 - DNA, 201 bp, Homo sapiens
cccgagagctcatgaggattgggaaggtatggcatctggctcagggcacccaccctcattttatagataggggaaacaggctcagaaagggagctagactragattgagtgagattggcctaagtgggggttgtttcagcccaggctcttggggtcccctgtctttcacccacacctgcttttccaacttctgcagagatt

SEQ ID NO: 537897 - DNA, 201 bp, Homo sapiens
gggctggagagctagaccgtgcccgagagctcatgaggattgggaaggtatggcatctggctcagggcacccaccctcattttatagataggggaaacagrctcagaaagggagctagactgagattgagtgagattggcctaagtgggggttgtttcagcccaggctcttggggtcccctgtctttcacccacacctgct

SEQ ID NO: 537898 - DNA, 201 bp, Homo sapiens
gcctaccatatgatcagtacaggttgaacactcctaattccaaaatctgaaatgtgaaatgccgcaaaatccaaaacttattaagtactgacataacaccrtagtggaaaattccacacctcatataatggatcaaagtcaaaatgcaggtgcacaatacacagttcattcagcatccctgagggaaaaaaccaaaattac

SEQ ID NO: 537899 - DNA, 201 bp, Homo sapiens
tataactcaatgctgttttcttagtccatctcatttgtggtttcttctttaagccttcttttcaaatggacacctatttttacttcctattttcacaaatygcctgtaatcaaaaactatttctttagtgcctaccatatgatcagtacaggttgaacactcctaattccaaaatctgaaatgtgaaatgccgcaaaatcc

SEQ ID NO: 537900 - DNA, 201 bp, Homo sapiens
ccgggatcccaaccttggggacccccgaagcgccccgggcgggaatcgggtgggacgcggcacgcaggagggaacgggtgtactgggtggggtgggcgtgrcgctgtcaccgcaggagatcgggcgggtagggcggacctgggatgcgggatagagggggcgcggcattcgcgctagagggacgcggtgcgcaaccggctg

SEQ ID NO: 537901 - DNA, 201 bp, Homo sapiens
cgggtgtactgggtggggtgggcgtggcgctgtcaccgcaggagatcgggcgggtagggcggacctgggatgcgggatagagggggcgcggcattcgcgckagagggacgcggtgcgcaaccggctgactaggggccgcaacgcctagcgcgcgcgacaaactacgcagcggcggagacaactctcaagggatagggccat

SEQ ID NO: 537902 - DNA, 201 bp, Homo sapiens
gagctggggcaacccaagaaatcactttgcttgtttcctgtctctaagggatcactgtactctgatgcctgatgtccagtgtcttgaaaaccattgttctstatgctttacctgagttttcttggttgtttcaagtagaagcataaatctaatctctgttactccatcttggctggaagatgacagctcttcccattttca

SEQ ID NO: 537903 - DNA, 201 bp, Homo sapiens
gggatagagggggcgcggcattcgcgctagagggacgcggtgcgcaaccggctgactaggggccgcaacgcctagcgcgcgcgacaaactacgcagcggcrgagacaactctcaagggatagggccatcagccctgcggccctggcaggtccctaccaaagatcttggaagatgccgtttggggcactaaggggacctgaa

SEQ ID NO: 537904 - DNA, 201 bp, Homo sapiens
cgtttggggcactaaggggacctgaagtcctccccaggctcattcccgcctgggggccttggctctgggaaggcacgcaaggtaaagggagcgcaacggamactcaccgtccatggtctcccgcaccgcattcagattcgccgccgcggccgccgccgccgccccagcaccgccgctactcgccatggctaaggccgaggg

SEQ ID NO: 537905 - DNA, 201 bp, Homo sapiens
cacgcaaggtaaagggagcgcaacggacactcaccgtccatggtctcccgcaccgcattcagattcgccgccgcggccgccgccgccgccccagcaccgcygctactcgccatggctaaggccgagggaggcgggagaagggcctgacccggaactggagcgccttcctctctccgaggcaatcacacagcgcgtctcggc

SEQ ID NO: 537906 - DNA, 201 bp, Homo sapiens
ccgccgccgccgccccagcaccgccgctactcgccatggctaaggccgagggaggcgggagaagggcctgacccggaactggagcgccttcctctctccgrggcaatcacacagcgcgtctcggcccacgccgggcaggctccgcccctcgcgctcgccgccggcgtgaggctgcgttgatttgaatttggagccacgttc

SEQ ID NO: 537907 - DNA, 201 bp, Homo sapiens
gctattaatgatttctgacagaagagttgcagttcaaaatagtatctacttttacacattctcagttgaatgacattacacttatgctggtatatagatawaattgcgtactgggacttgtgttttgaatccaatgtgtgttggtggtgggggtgttatgtaaatagatcctttatattaggggtaacaaatcacagttta

SEQ ID NO: 537908 - DNA, 201 bp, Homo sapiens
cctttactgctatttctgaagacttctttatatcttaaaaatatccatgtattacaggcaaactaaaggttcatgggcattttaatagcactctattgttyagacacatgccagtttttttaacatcatttattgctaacatgaattcaaagcaagtatacagtttattgatactagaacaaatcaggacatcaagacatg

SEQ ID NO: 537909 - DNA, 201 bp, Homo sapiens
taagagaaaaacagtcaaatcttcactacttctataaaacgttattaggagtggaatgagttctgccttgaatgacactcatctttgaacacagaaattaygcaattcagaaactatcatctagttataacaagttttatgaaagaatcaatatatttgctgtaagatgaatcactaacatacttggctcaagagacttaa

SEQ ID NO: 537910 - DNA, 201 bp, Homo sapiens
tgttttgaatccaatgtgtgttggtggtgggggtgttatgtaaatagatcctttatattaggggtaacaaatcacagtttaaggattggtttgacctacakatttttttttttaatgcttttcagttcttgcccaaagaggttacttcaaagacaaagcttttgttaattatcttaaatacttgctttactggaaagaccc

SEQ ID NO: 537911 - DNA, 201 bp, Homo sapiens
atactttattatataatagatttcttagtttcacattggcaaaaatgtatttggaatctctccacttctttttgttatcaccgtcttaatacaagacaccytcatctctaacttgtaacactgcagtaatctactccctggttatctgtgcttccacttttaccttcctgcccccatctccaccccaacccaaaccaagca

SEQ ID NO: 537912 - DNA, 201 bp, Homo sapiens
tggttaaaaaaaaaaaacaaaaaaaacaaaaaaaaccaacccaccttgaactcacacccctgctttgtcttaagcaggtagaaagcaataatgaacctttaaaaaaaaaaaaaagtttgagaggaaaatgtttcaaacttctctcaaagtcacttttctgtgtccaataacaattgactcacgaagcacatacgtcttatg

SEQ ID NO: 537913 - DNA, 201 bp, Homo sapiens
ccttaattgtaagttgttaagcacctcattaaattgagtagctattaatgatttctgacagaagagttgcagttcaaaatagtatctacttttacacattytcagttgaatgacattacacttatgctggtatatagatataattgcgtactgggacttgtgttttgaatccaatgtgtgttggtggtgggggtgttatgt

SEQ ID NO: 537914 - DNA, 201 bp, Homo sapiens
ttgcctgcaggaccgtttgcaccttttctggctttttatccatttaataatccaaagaacagacttttaagaaaagtagacttcaacgaatattgtatgtmtgtagatttacagactcagtgttggaagccttagccaccaacaagtttaatcttacccacaacgttgccgagagatggtcatctacactctggaggtttc

SEQ ID NO: 537915 - DNA, 201 bp, Homo sapiens
ctatttctgaagacttctttatatcttaaaaatatccatgtattacaggcaaactaaaggttcatgggcattttaatagcactctattgtttagacacatsccagtttttttaacatcatttattgctaacatgaattcaaagcaagtatacagtttattgatactagaacaaatcaggacatcaagacatgattgccatc

SEQ ID NO: 537916 - DNA, 201 bp, Homo sapiens
attctccgtttgtgttgctgttttctttgatgatttctctttaactttagagaaacttctaacttactccttttaatcagggctccgcttttcttagattycgaaggaaggtttatctcctcccactcctagtttaggaagaccatctcaacattagtcaggtttctttattgctctttccttactacaaatcagtattat

SEQ ID NO: 537917 - DNA, 201 bp, Homo sapiens
aaacgtgagcaaaggaatctgtatcatgaataagttcaaggaaaggtactgtgcctggatgtgcacataggctagatttatgtttcactttacacaaatayctaactagcagagagcaacaaagcagtattgctgccagcatatctcgcctccagccacagggcggttttctcctatctcagaatagaacgaatgggaatg

SEQ ID NO: 537918 - DNA, 201 bp, Homo sapiens
tcaggtcgttcagcagacactttcatgttaaggcttactaagttgcaagaaacatattataaccacaaagcaattcccttttaatggttaaaaaaaaaaaacaaaaaaaacaaaaaaaaccaacccaccttgaactcacacccctgctttgtcttaagcaggtagaaagcaataatgaacctttaaaaaaaaaaaaaagtt

SEQ ID NO: 537919 - DNA, 201 bp, Homo sapiens
aggtcgttcagcagacactttcatgttaaggcttactaagttgcaagaaacatattataaccacaaagcaattcccttttaatggttaaaaaaaaaaaacaaaaaaaacaaaaaaaaccaacccaccttgaactcacacccctgctttgtcttaagcaggtagaaagcaataatgaacctttaaaaaaaaaaaaaagtttg

SEQ ID NO: 537920 - DNA, 201 bp, Homo sapiens
atgattgccatcctaaaatcttaatcttcagagaacaacatttccaccaggttggcctgaagacactcagattctaccagtttttgaggctgtaagagaaraacagtcaaatcttcactacttctataaaacgttattaggagtggaatgagttctgccttgaatgacactcatctttgaacacagaaattacgcaattca

SEQ ID NO: 537921 - DNA, 201 bp, Homo sapiens
gaaaactgaggtttggacggggtgagtaacttgcctgtggttacacagctagtaagtggtagagtcagtgtgactgactcccagcttggagttcttcccasaactgggttatagagtctttccggccgctctccgccacctgcctcatcccaagtaaagcacattgagacagctgcaaaacaaactgcttctagtgctcag

SEQ ID NO: 537922 - DNA, 201 bp, Homo sapiens
aatgtattttaattgtctgttagcttttatgtcttttcaacttgaaataatttcacttacaaaatagctggaaaaatagtaaagataattcctgtattttsttcacccacgtattccaaatgtgtaacactacaatcagcaaaaatcagcacattaatattattacctaatctacagacctcattcacattttgccagttg

SEQ ID NO: 537923 - DNA, 201 bp, Homo sapiens
cagcatctcaaagcagaacaatttttcttagtacagatcaaaatggagtttcttatgtcttccttttctacgtagacacaggaacaatctgatctcttttycccacacttcctatatgttaatgtattttaattgtctgttagcttttatgtcttttcaacttgaaataatttcacttacaaaatagctggaaaaatagta

SEQ ID NO: 537924 - DNA, 201 bp, Homo sapiens
aatagcatggtttgtccctaaattttcactctgcttaccagttactgtgttgtgtggtcttgagcaagttaatttaatctttctgaacttaaaccttctcrttttcgaaaatattgaacactgacctttgatgactaatcggggaaaaaaccctatgctaccagagtgtactaagttactgttatagaaatggtaggctac

SEQ ID NO: 537925 - DNA, 201 bp, Homo sapiens
aatgaaagttgtctttttatccctattgaaggaaaaatgagtaactatcaattaaacacataattactaaaatatgttcatgttcttcacgttggaaaccrctagaagggaatagcatggtttgtccctaaattttcactctgcttaccagttactgtgttgtgtggtcttgagcaagttaatttaatctttctgaactta

SEQ ID NO: 537926 - DNA, 201 bp, Homo sapiens
ttgggggaaacctggacaatacccaggcttttctgggcaggggtccctgcggccttccgcagtgcattgtgtctctggttaatcgagaatggagaatggcratggcttttaccaagcatactgcctgcaaacatattgttaacaaggcacatcctgcacagccctaaatccattaaaccttgattcaatatagcacatgtt

SEQ ID NO: 537927 - DNA, 201 bp, Homo sapiens
ccaggggaccggcacactcagcatgcgaggacctgcaccagtgccggtctctgagttccttcagtatttattgatcattatttttactgtcttggcgaggygagtgtagcagggcaacaggtggcgagaaggtcagcagggaaacgtgagcaaaggaatctgtatcatgaataagttcaaggaaaggtactgtgcctggat

SEQ ID NO: 537928 - DNA, 201 bp, Homo sapiens
ccttttctccaaggaaacctgctccttggaaaccacagtctggtcattgtgtgttcattagtaccacagtgtcattgcttctaggccctgtcagtacacaragctcaagaactatatatatatgtatgtatgtgtatacatgcacacacatatacatgtttattctatgtctatattaaaagccgtaagtacatactgatg

SEQ ID NO: 537929 - DNA, 201 bp, Homo sapiens
ctcatcttgtacttttcctgtcttatccctgaatcacccttttctccaaggaaacctgctccttggaaaccacagtctggtcattgtgtgttcattagtaycacagtgtcattgcttctaggccctgtcagtacacaaagctcaagaactatatatatatgtatgtatgtgtatacatgcacacacatatacatgtttatt

SEQ ID NO: 537930 - DNA, 201 bp, Homo sapiens
ggaagttactatcttagaagcatggtattaagccctctattcaatgtggtgttcacatcagtagcattggtttcatttgggagctttttagaaatgcagarctcaggccccactccaggcctaaggattcaatctgcattttaagaagtgacccatatacacattaaagttttagaagcattgctgtagtatcctattttc

SEQ ID NO: 537931 - DNA, 201 bp, Homo sapiens
gattcttatttttagtagaattatgaattagaattatgtattttcttgcgctaagtattccagatttggccattgggaggcccttcaagttggctcctgamtacttttgatcctcccaggaatttttagcactttttcttctggcactacgtaatgttccaggctcatcttgtacttttcctgtcttatccctgaatcacc

SEQ ID NO: 537932 - DNA, 201 bp, Homo sapiens
cctgcttcattgatagccagtaggtgccactataacatctctcttccatctatttttctcaactaccctctgccattgtgccatggtgtccagagttctcrtgagttgaggttccctcctttggatatttggcagttgtactttatgcagttcagccaagaactaaacacaggccttcaggtgtggtcagagtacagtggg

SEQ ID NO: 537933 - DNA, 201 bp, Homo sapiens
tctccatattaagttgctatttttccttgtgtatttaataagtatcttatagggaaatcctttgagactatgtaaatatcatattacatgtattttgcctrttttagcatcttttgaagataattgcctgaaacattttttactgtgatgattttctaattctatcattctgcatttattagtttggaattcgattgtaag

SEQ ID NO: 537934 - DNA, 201 bp, Homo sapiens
tagcatcttttgaagataattgcctgaaacattttttactgtgatgattttctaattctatcattctgcatttattagtttggaattcgattgtaaggaaktatattcccttgtttcctattattttattaaagaaatttacatccatttagtgtggacttttggattcttatttttagtagaattatgaattagaattat

SEQ ID NO: 537935 - DNA, 201 bp, Homo sapiens
ggcgttttattcagtctgcagaagattttagtttttttaatacttgccaacatttaaagatcagaaagttgtatataacaaatgcagatttccagctactytttcaaatctggaagatctagtaaccatagatcttaattctcccaagtcaacaactgggctgaagctgagagcagctgtcactactagctgctttccacc

SEQ ID NO: 537936 - DNA, 201 bp, Homo sapiens
tggtatatagatataattgcgtactgggacttgtgttttgaatccaatgtgtgttggtggtgggggtgttatgtaaatagatcctttatattaggggtaasaaatcacagtttaaggattggtttgacctacagatttttttttttaatgcttttcagttcttgcccaaagaggttacttcaaagacaaagcttttgttaa

SEQ ID NO: 537937 - DNA, 201 bp, Homo sapiens
tgtatgtagtgcaggatccagtctaggcccgtatgttgcattttgctgtcatgtcttcttagtctcctttcatctcagtggtcttttcttttccatgactrtgacagaaatgatttgtatccttcatatatctgcagtcacatgaagtctatttgtcccactactggtgacgtaaattttggtaacttggttgagggtggt

SEQ ID NO: 537938 - DNA, 201 bp, Homo sapiens
tgaatgacattacacttatgctggtatatagatataattgcgtactgggacttgtgttttgaatccaatgtgtgttggtggtgggggtgttatgtaaatasatcctttatattaggggtaacaaatcacagtttaaggattggtttgacctacagatttttttttttaatgcttttcagttcttgcccaaagaggttactt

SEQ ID NO: 537939 - DNA, 201 bp, Homo sapiens
agccaagatcatgccactgcactccagcctgggcgacagagcaagactctgtctcaaaacaaaaaaaaaagttgctatacatattcaaaacaatcataatmatgatagtaagaatgacaatattaatgatcattgcccaaaccccactctgtcctgcccatggacggggcaggggaaactgtttgcatggctgcctggcca

SEQ ID NO: 537940 - DNA, 201 bp, Homo sapiens
ccatagcaggcgaggacagcattatgtgtctttttgctacattctgctgtagaacatttaggctccatctgaccagcacctgagccaaccagtctgccctrcccttctctcatctttgcattctccagttttaaaaagtcctggggctgcgggctagagagcaagaaaaacgagaaggctgccctcaaggtgctgcaggag

SEQ ID NO: 537941 - DNA, 201 bp, Homo sapiens
gtaaactttagctaatttataagtaggagatggtacctcattgtccttattagctttattcccccttgattagatttcttttgtcttctaatgctgctctggtgtgtgtgtgtgtgtgtgtgtgtgtgtgtgtgtgtgtgtgtgtgtgtttctttttcttcccagaaaggaaaactccattttatccccctcccctgctgg

SEQ ID NO: 537942 - DNA, 201 bp, Homo sapiens
tggggtggggattctctggctttcctccctgcccctcctctgcaggctgatgctgggcttcatgggcgtcacagccctcctgtccatgtggatcagtaacmcggcaaccacggccatgatggtgcccatcgtggaggccatattgcagcagatggaagccacaagcgcagccaccgaggccggcctggagctggtggacaa

SEQ ID NO: 537943 - DNA, 201 bp, Homo sapiens
tttagctaatttataagtaggagatggtacctcattgtccttattagctttattcccccttgattagatttcttttgtcttctaatgctgctctggtgtgtgtgtgtgtgtgtgtgtgtgtgtgtgtgtgtgtgtgtgtgtgtttctttttcttcccagaaaggaaaactccattttatccccctcccctgctggattgga

SEQ ID NO: 537944 - DNA, 201 bp, Homo sapiens
tttgcggaggtgaacaaatccatccatctagtcacctctccatccatcatccatgcatctattcatgtcttcatccatccatccgtccgtccatccgtccrtccatccatccatccatccatccatccatccatccatccatctgtccatccatccacccatctatctatccacccatctatctatccatccatccatcca

SEQ ID NO: 537945 - DNA, 201 bp, Homo sapiens
ctctggcacatagtaggtgcccaagaaatacatgtcgaatgaattgagggggtaaggccttctagggcaggtggcctctgacctcagccttcagtgttccrtaggtggaattatctgccagagacgtggcaaaagggagaggaaccaagactgaggcacagaggttcaaacgtacccggcacattcagagaatccttttca

SEQ ID NO: 537946 - DNA, 201 bp, Homo sapiens
tttctcccaggcaggtcatcttttctgggagatgcttcccctgccatccccaaatagctaggatcacactccaagtatgggcagtgatggcgctctggggrccacagtgggctatctaggtcctccctcacctgaggcccagagtggacacagctgttaatttccactggctatgccacttcagagtctttcatgccagcg

SEQ ID NO: 537947 - DNA, 201 bp, Homo sapiens
ctcaccgactgtctccagttttcctgtctccacctggattccctcctggcctcatctctgctccactctctctatccttcctctgggtctttttttaattraaaaaaaatttaatgaaataaatgatagatttcttgtatcacttattttattaaaatgtaaaaggtttcttttttgcaaatctgtaagatataaagtaaa

SEQ ID NO: 537948 - DNA, 201 bp, Homo sapiens
gtaaggccttctagggcaggtggcctctgacctcagccttcagtgttccgtaggtggaattatctgccagagacgtggcaaaagggagaggaaccaagacwgaggcacagaggttcaaacgtacccggcacattcagagaatccttttcagaatcacgtccccaagagcttctgtgttctgtacggtgatgttgcagtgct

SEQ ID NO: 537949 - DNA, 201 bp, Homo sapiens
gagatgacctctgttaatttctcaaatatttttctggatattttacacactcacacactttttttgagacagagtttcactcttgtcacccaggctggagygcaatggtgtgatcttggctcactgcaacctccacctcccgggttcaagagattctcctgcctcagcctcccgagtagctgggattacaggtgcctgcca

SEQ ID NO: 537950 - DNA, 201 bp, Homo sapiens
acagtctccagctttacttcggactcagactattcctgctcagccttcgttgctgacttctctgttctccctgaaacaggagtgtctgcccaggctctgtmcttggcctctcctctttttacacttcattctctccctggacaatctcttctcagcccaaagccctaaatctaaaccttcaatttctggttgaaatcattc

SEQ ID NO: 537951 - DNA, 201 bp, Homo sapiens
ttgatcacaataatctctgctttgatttgtctgagggaaatctttctttccaatccttgtcaatattgtttgctactacttttggtccttctactggctayttaacatggtagctacttcaaaatttttctttagctaagtatgtagcagcgtaggaggtgaggaacatgttggaaaacacacaaaaatataactttcttt

SEQ ID NO: 537952 - DNA, 201 bp, Homo sapiens
gggtgagacaaagtaagtcttggattcaatagaaatcgctggcttagggccaggcgcgttggctcacacatgtaatcccagcactttgggaggctgaggtsggtgggtcacttgaggtcaggagatcgagaccatcctggccaacatggtgaaaccctgtctctactaaaaatacagaaaattagcgaggcatggtggcac

SEQ ID NO: 537953 - DNA, 201 bp, Homo sapiens
ctcagccttcagtgttccgtaggtggaattatctgccagagacgtggcaaaagggagaggaaccaagactgaggcacagaggttcaaacgtacccggcacrttcagagaatccttttcagaatcacgtccccaagagcttctgtgttctgtacggtgatgttgcagtgctgtttttccgcagtctcgctccatcggcctca

SEQ ID NO: 537954 - DNA, 201 bp, Homo sapiens
caccaaatgcaggctctggctcctgggccactagtaataccaaggtcaccccttatgctggaaacctgaagcccctggctgagccccagggtctctaggaygacagttggcagcagagaggtgcttggtagagcacaaactttactaagccaagggtgtggcagcagagaggccctgtcttacaccagcagagccatccct

SEQ ID NO: 537955 - DNA, 201 bp, Homo sapiens
gtattttttagtagagatggggttttgccatgttggccaggctggtcttgaactcctaacctccggtgatccgccctccttggcctcccaaagtgctggcrttacagatgtgagccacctcgcctggcccaagcactcttaaacttaattaattttcacaacaacctgcgaggtcagcactattattattattcccaattt

SEQ ID NO: 537956 - DNA, 201 bp, Homo sapiens
gtggctgacggcctgattgccagaccctgggcaaggtcctggggcttacagagaggaatcgggcacatccctgccagcaactcttatggagcccagtgggrcagctaaatcagcagagctgggatttcccaatcctcaggtcagcagcagagtcaggacctggggctgggtgggcagcccccatgactggctcagctaaca

SEQ ID NO: 537957 - DNA, 201 bp, Homo sapiens
ccaagttcaagtccttcgtgatcttgttcgtcaccccgctcctgctgctgccactcgtcattctgatgcccgccaaggtcagttgcatctccaggcagccyttcggacacccggcgtcctgtgcccactaacgggcaccgatcccgggagccctgagctggagcgcacggatttcgcggggagcacagctctcccggggcg

SEQ ID NO: 537958 - DNA, 201 bp, Homo sapiens
gcaaacaacccctgcccgtgggccaatctacttgaagttactcggacaaagaccccaaagtggggcaacaactccagagaggctgtgggaatcttcagaagcccccctgtaagagacagacatgagagacaagcatcttctttcccccgcaagtccattttatttccttcttgtgctgctctggaagagaggcagtagcaa

SEQ ID NO: 537959 - DNA, 201 bp, Homo sapiens
acagcagagtgaggacggggatgaaaatggtgggaatggatgaggtcacctatgaggtgtagagagagagggtcgggaggggaggatgggccaagcttgcyctggccctgaaggaactgcaagctgggagcgctgagatgactgccctcctggtgcttcccaggcctcggggctgtccgtgtggatggggaagcagatgga

SEQ ID NO: 537960 - DNA, 201 bp, Homo sapiens
aactcctcctgtggccaccaccaaaggatgaggaatctgagttgccaacttcaggacgacacctggcttgccacccacagtgcaccacaggccaacctackcccttcatcacttggttctgttttaatcgactggccccctgtcccacctctccagtgagcctccttcaactccttggtcccctgttgtctgggtcaacat

SEQ ID NO: 537961 - DNA, 201 bp, Homo sapiens
ggatcaggatgcaggctgctgtacccgctctgcctcaagcatcccccacacagggctctggttttcactcgcttcgtcctagatagtttaaatgggaatcrgatcccctggttgagagctaagacaaccacctaccagtgcccatgtcccttccagctcaccttgagcagcctcagatcatctctgtcactctggaaggga

SEQ ID NO: 537962 - DNA, 201 bp, Homo sapiens
gttttggggttcacaccccaaaatgacccaacgatgtccacacaccaccaaaacccagccaatgggccacctcttcctccaagcccagatgcagagatggwcatgggcagctggagggtaggctcagaaatgaagggaacccctcagtgggctgctggacccatctttcccaagccttgccattatctctgtgagggaggc

SEQ ID NO: 537963 - DNA, 201 bp, Homo sapiens
tgaacctggactcacggaacactgggctctgtgaccgtttccctgaatggcctaagctgttgcctcctgtcacttctctgaggtcattttccaaatgcgcrcgggcatagagaacccatccactctgcctacttcccagggatgccttgagcactgaggatacctgggggacatgaagtcgcactgtcctgggggtcggga

SEQ ID NO: 537964 - DNA, 201 bp, Homo sapiens
tagtgaagcgatggttagtgaccatgagggaagcttgcagagcaggcatcagaaagagcctgaggaggtccacagggaagctggcacgtccttgtaggatrgttaaggcactggggtgagcaatgaacctggactcacggaacactgggctctgtgaccgtttccctgaatggcctaagctgttgcctcctgtcacttctc

SEQ ID NO: 537965 - DNA, 201 bp, Homo sapiens
cagagacttttccctagtacattctgggatggaagaacaggagagggaaagaggcaggaagggcctttctccaggccccatagcaggcgaggacagcattrtgtgtctttttgctacattctgctgtagaacatttaggctccatctgaccagcacctgagccaaccagtctgccctgcccttctctcatctttgcattct

SEQ ID NO: 537966 - DNA, 201 bp, Homo sapiens
gcctcccaaagtgctgggattacaggcgtgagccactgcgcccggccattcatcttaatttttaaaaaatctaaccatgaagccttggttatcttggagakctttcctgattagcacaaaaagaaaaaaaaatccaattctttacagctgcatactattccattatttgtatgtgtcatattttatttaaccatcctgcta

SEQ ID NO: 537967 - DNA, 201 bp, Homo sapiens
tcttctgaaggaggaactgttttgaaaactcccattaaaaagttgctatacaggccgggcgcgatggctcacacctgtaatcccaacatttttggaggccraggtgggcagatcgcctgaggtcaggagtttgtaaccagcctggccaacatggtgaaaccccgtctctactaaaaatacaaaaattagccgggcgtggta

SEQ ID NO: 537968 - DNA, 201 bp, Homo sapiens
agctgctgagtgccaggctaaggcattctgttctatggactagcatgtttttgagttgggagtgagaagaaagcagagcttataggaaaatcagtggctayggttttttttttttttttttttttttttttttttttgcatttccttctgtcatccattgcaaagacgtaccagcttcagggtagtatggaaagatccctg

SEQ ID NO: 537969 - DNA, 201 bp, Homo sapiens
caaaggtgatcaggccacaccaggatagaaagtactcagctctgagttaagtgcctgtgctctgtgcctccatccacaggaagttcgagccaagtcaaacyaggggaatttgtgaccagagggaagagactgcagagctcagaggcaaaagtgcccacggaaacctgtgattttgtggggaaaatagggaattttcctaag

SEQ ID NO: 537970 - DNA, 201 bp, Homo sapiens
aagctgtgctgaccagggctggggaacaagatgactttgaggggaatccctctgagatcagcactgtgtcttgacaatccatgccagccgccgtccggagygttctgggggtggggagagggaggcggcaacacgctgaggcctcaggactgtctcttcagtttgtcaggtgtgcctacgtcatcatcctcatggccattt

SEQ ID NO: 537971 - DNA, 201 bp, Homo sapiens
ggacaagcttcctctttgccgtgtgggtccatcaggccaggtcaccgcaaacctgtgacttagctctgagctgagcgcatacgctctgtgcctcaatgcayggggagtttaagtcgagtaaaaccagcagtgattatgaccaaatccatccaaacccagacatttactgaatacctctggtgttcccagcagtgtacaggt

SEQ ID NO: 537972 - DNA, 201 bp, Homo sapiens
ctggggacgggccatatttgacttggatcatttccctgactgggctaatgtgacacatattgagacttaggaagagccacaagaccacacacacagccctyaccctcctcaggactaccgaaccttctggcacaccttgtacagagttttggggttcacaccccaaaatgacccaacgatgtccacacaccaccaaaaccc

SEQ ID NO: 537973 - DNA, 201 bp, Homo sapiens
tgcaggaggagtaccggaagctggggcccttgtccttcgcggagatcaacgtgctgatctgcttcttcctgctggtcatcctgtggttctcccgagacccyggcttcatgcccggctggctgactgttgcctgggtggagggtgagacaaagtaagtcttggattcaatagaaatcgctggcttagggccaggcgcgttgg

SEQ ID NO: 537974 - DNA, 201 bp, Homo sapiens
gggaatggatgaggtcacctatgaggtgtagagagagagggtcgggaggggaggatgggccaagcttgccctggccctgaaggaactgcaagctgggagcrctgagatgactgccctcctggtgcttcccaggcctcggggctgtccgtgtggatggggaagcagatggagcccttgcacgcagtgcccccggcagccatc

SEQ ID NO: 537975 - DNA, 201 bp, Homo sapiens
cccacctgcctcggcctcccagagtcctggaattacaggcgtgagcccctgcgcccggccacaaagttgtatttttctggagggatgggccataacttccmtgagactcttagcaaggcctggacacacagaagagtcagtgggtcatttctcggccttgtcttgtgctgtggccatgttctgaggctcccactcgattag

SEQ ID NO: 537976 - DNA, 201 bp, Homo sapiens
ctcctcgagcagctcaaatccttccactctctgctcccataggtctggggcttggcgtcccatgcttgcttccctgctaggtgcgaagctcagggaagacragtcagcatctaccttgccgtctgccgtgttcccttaccatccccagcccagtgcagtagagtcagggtctgtggctgacggcctgattgccagaccctg

SEQ ID NO: 537977 - DNA, 201 bp, Homo sapiens
tggggcttacagagaggaatcgggcacatccctgccagcaactcttatggagcccagtggggcagctaaatcagcagagctgggatttcccaatcctcagrtcagcagcagagtcaggacctggggctgggtgggcagcccccatgactggctcagctaacagcgctgtgcccaccacagggagtcaagtgatttttgaag

SEQ ID NO: 537978 - DNA, 201 bp, Homo sapiens
tgaggcacccttggtgccttgagatatcatgtagaagccttggttcttctcagacaactccattcatgcaaactctccccctcctcctagcctgggtcccrggctttgtttttttttgggtccataatgtctgcctgtgtggacagcagcttgggccctggtgcagaacagctcctaggtcccttcttcaggctcctaccc

SEQ ID NO: 537979 - DNA, 201 bp, Homo sapiens
atataatcataatcataaccataatcaatcatgatcataatgggtatattgagtgtctacaaggccccaggcatgataccaggagcttatgaattgcctcrtttaattcttaccacaactctgagagctgagtattcttactgcccacattctgtggatgagggattggaggcagagagggataaagtgatttgctcatgg

SEQ ID NO: 537980 - DNA, 201 bp, Homo sapiens
agttgtgatgggtttgttgagtgactgtctctgtcgcagatgagctgtgcttttccccacctaggtatgtctccgatgccactgtggccatctttgtggcyaccctgctattcattgtgccttcacagaagcccaagtttaacttccgcagccagactgaggaaggtaagtctcctgttctgatcgcccagtcatcaggac

SEQ ID NO: 537981 - DNA, 201 bp, Homo sapiens
cccctcagtgggctgctggacccatctttcccaagccttgccattatctctgtgagggaggccaggtagccgagggatcaggatgcaggctgctgtacccrctctgcctcaagcatcccccacacagggctctggttttcactcgcttcgtcctagatagtttaaatgggaatcggatcccctggttgagagctaagacaa

SEQ ID NO: 537982 - DNA, 201 bp, Homo sapiens
gttgcagtgagcccagatcgtgccactgcactccagcctgggcaacagagagagactccgtctcaaaaaaagagaaagaaagacaccactggcttagtgcmctagtgcctaaatgctgctggtctcggctacaggtggcaagaggaatgtgggccaggcactcatgcttggtcaagacttttcctcttttgggagctgggt

SEQ ID NO: 537983 - DNA, 201 bp, Homo sapiens
gagcgtgggcgtgcgtgtcagtgtgcattctgcaatgggatggcatcttgtccagggctggtttccaccttgtaccctgagctgccgggacaggatctggkcacccaagaccctgacctgctgtaactgggtaaataattatctaacttgttttcaatgtttcttaagtatatgtatagctcacattcccttcagtgttta

SEQ ID NO: 537984 - DNA, 201 bp, Homo sapiens
cacaccttgtacagagttttggggttcacaccccaaaatgacccaacgatgtccacacaccaccaaaacccagccaatgggccacctcttcctccaagccyagatgcagagatggtcatgggcagctggagggtaggctcagaaatgaagggaacccctcagtgggctgctggacccatctttcccaagccttgccattat

SEQ ID NO: 537985 - DNA, 201 bp, Homo sapiens
cagctcagcacagtctccagctttacttcggactcagactattcctgctcagccttcgttgctgacttctctgttctccctgaaacaggagtgtctgcccrggctctgtccttggcctctcctctttttacacttcattctctccctggacaatctcttctcagcccaaagccctaaatctaaaccttcaatttctggttg

SEQ ID NO: 537986 - DNA, 201 bp, Homo sapiens
tgggaagatggagcagcacaaggaaaggcaatggtgcacatgactgaggactcctggaagcctggcttggtgagcacagggataagggatcctggggagtkgagagaggtagctgtcggttgtgggaaaagctgctgagtgccaggctaaggcattctgttctatggactagcatgtttttgagttgggagtgagaagaaa

SEQ ID NO: 537987 - DNA, 201 bp, Homo sapiens
gcagcaatgtccaggccagactcagaccaggctttggagacccaggtctgactgtgacgtggatttgtggaccctggatgcctctgcccctgaggcctccrctgctttgccactcctctttgtacccctcctgctgaccaaagcaccaaccatggaccaagtgctcaaatttattttataaatctaattggattatttttc

SEQ ID NO: 537988 - DNA, 201 bp, Homo sapiens
ccatctttgcctccatggtaagtaacctgacagtggggaggagcccttccatttcacaggaacacatggccatattgtgggtccctgacgaggcagcaatrtccaggccagactcagaccaggctttggagacccaggtctgactgtgacgtggatttgtggaccctggatgcctctgcccctgaggcctccactgctttg

SEQ ID NO: 537989 - DNA, 201 bp, Homo sapiens
agccctaaatctaaaccttcaatttctggttgaaatcattctcctgagcttccaaaactgtggagcactgaagaggaggagatggatgtgagacatttggrtgacttggtgactgactgggtataaggaaggaggggaacagagaccggcagcatgactcccagcctgctgggctggatggctggtggatggtgagtccat

SEQ ID NO: 537990 - DNA, 201 bp, Homo sapiens
catccacccatctatccatccatccatccatccatccatccatccatccatccatctatccatccatccatccaacattcctattatgtccctagtgttakgccaggcacagagattacagaggagattgagatacggtccctgttcgtggcagacttcacagactagggaggggcacatatatgaaagggcatttcagga

SEQ ID NO: 537991 - DNA, 201 bp, Homo sapiens
caatccttgtcaatattgtttgctactacttttggtccttctactggctacttaacatggtagctacttcaaaatttttctttagctaagtatgtagcagygtaggaggtgaggaacatgttggaaaacacacaaaaatataactttctttacctccttctttccctcctggggaagaaatgagccagagggagggatgag

SEQ ID NO: 537992 - DNA, 201 bp, Homo sapiens
ctcctggatccctaatcctgcacctccaactccagggaacacaaggacccattctgcccctgactagccctgtctgccagggttcatactcactccctgcrtctccctgagccaccttggtgatgggggttggcatcccaacaccatcgaaggcagctccaggctgaggtggaaggaggaagacttgggaagcatgtgagg

SEQ ID NO: 537993 - DNA, 201 bp, Homo sapiens
ccgtgtagacctgaggtcccatcagtgttgcctccttttctgacccctgagcaccccagaaagctgtgacctgatgtcctggtgtccccatgttccaggcyaagccaccatcacaccaacacttggccctcacactctccaaggctgttcacatccagcactggcttcaggaatgagctcctattccatcaaccccttccc

SEQ ID NO: 537994 - DNA, 201 bp, Homo sapiens
agcgcatacgctctgtgcctcaatgcacggggagtttaagtcgagtaaaaccagcagtgattatgaccaaatccatccaaacccagacatttactgaatayctctggtgttcccagcagtgtacaggtcctagaaagtttaccttcctgttcctagcacacaggcaagttcatcaggggtcacctttgatggcagccagac

SEQ ID NO: 537995 - DNA, 201 bp, Homo sapiens
agcctctctacagagacttttccctagtacattctgggatggaagaacaggagagggaaagaggcaggaagggcctttctccaggccccatagcaggcgargacagcattatgtgtctttttgctacattctgctgtagaacatttaggctccatctgaccagcacctgagccaaccagtctgccctgcccttctctcatc

SEQ ID NO: 537996 - DNA, 201 bp, Homo sapiens
tgtggccacccctccaaatgccatcgtgttcacctatgggcacctcaaggttgctgacatggtaacacagctgtttttatttactcccgtcggactataaygctgttgtcataagggatgccccatttatgaatgacagagtttcaaaacgatgtcatgtgacttgggaatgccacggaacatccagacctgtagccattg

SEQ ID NO: 537997 - DNA, 201 bp, Homo sapiens
aattatctgccagagacgtggcaaaagggagaggaaccaagactgaggcacagaggttcaaacgtacccggcacattcagagaatccttttcagaatcacrtccccaagagcttctgtgttctgtacggtgatgttgcagtgctgtttttccgcagtctcgctccatcggcctcaatccgctgtacatcatgctgccctgt

SEQ ID NO: 537998 - DNA, 201 bp, Homo sapiens
aaaggatgaggaatctgagttgccaacttcaggacgacacctggcttgccacccacagtgcaccacaggccaacctacgcccttcatcacttggttctgtwttaatcgactggccccctgtcccacctctccagtgagcctccttcaactccttggtcccctgttgtctgggtcaacatttgccgagacgccttggctggc

SEQ ID NO: 537999 - DNA, 201 bp, Homo sapiens
aaacacacaaaaaacacaaacacacacatacacatacacacacacacacacacacaccctgaactggaaaccctaactcagtgtgtgtgtatgtgtgtgtrtgtgtgtgtgtgtaagagagagagagagagagattaagctgtcctttgagtgaggaccagggaggggaagaagagaacccagggagagtccttccaaagg

SEQ ID NO: 538000 - DNA, 201 bp, Homo sapiens
tgggacatctggatggacatttccagaaggcatatgggtatgtaaatccacatagtaggccagctggctggaaatacagatttaggagacagcagagtgargacggggatgaaaatggtgggaatggatgaggtcacctatgaggtgtagagagagagggtcgggaggggaggatgggccaagcttgccctggccctgaag

SEQ ID NO: 538001 - DNA, 201 bp, Homo sapiens
ccctgccttgttaatgttgaacttttctaacatccgcttcccatcctgccctctcccttgacactgtggaggcattctagactaggggggtcaagcctgtygacttcagggatgaggcacctcctgggcttctaaatagtggcgcggaggtgagggggcagttaaccttgtgtctcgtcctctttcctagtgggtctgctt

SEQ ID NO: 538002 - DNA, 201 bp, Homo sapiens
ttttctgggagatgcttcccctgccatccccaaatagctaggatcacactccaagtatgggcagtgatggcgctctgggggccacagtgggctatctaggycctccctcacctgaggcccagagtggacacagctgttaatttccactggctatgccacttcagagtctttcatgccagcgtttgagctcctctgggtaaa

SEQ ID NO: 538003 - DNA, 201 bp, Homo sapiens
cagtggctcatgcctgtaatcccagcactttgggaggccgagacaggtggatcacgaggccaggagatcaagaccatcctggccaacatggtgaaatcccmtctctactaaaaatacaaaaattagccgggcgtggtggcgcttgtctgtagtcccagctactcaggagactgaggcaggagaatcgcttgaacctgggag

SEQ ID NO: 538004 - DNA, 201 bp, Homo sapiens
aaaaaaggaaggatcccttgagcccaggagatggaggttacagtgagctgtgaccgtgccacttcactcccacctgggcaacagagccagaccctgtctcaaaaaaaaaaaaaaagaaataaaagagcgagagagaaagaaaagaaaatgattactggctggggccactgtctgtgtggagcgtgcacattaccctcgtgt

SEQ ID NO: 538005 - DNA, 201 bp, Homo sapiens
tgcactatttggctttccattgctgagtcacttctcttagaacaatggcctcctaggcggcaagagcgacactccatctcaaaaataaaataataataaamccaaaaaaaccaggtattttattcttcttctccttctcctcttcctcctttcttttcttccttctccatcccccttcctctctttcttctatcccctcct

SEQ ID NO: 538006 - DNA, 201 bp, Homo sapiens
ccttgtcctattcttgatcttttcttttgagaggcagctaatccaaggtttgagaagatgaaagaacgtgcctagaaccacacagctgggaaggagggagscagggaggaggggtgggaatggggcaggagtcctttgcgaatagatccctggcctgacccgggaaagctgtgctgaccagggctggggaacaagatgact

SEQ ID NO: 538007 - DNA, 201 bp, Homo sapiens
tagaaccacacagctgggaaggagggaggcagggaggaggggtgggaatggggcaggagtcctttgcgaatagatccctggcctgacccgggaaagctgtrctgaccagggctggggaacaagatgactttgaggggaatccctctgagatcagcactgtgtcttgacaatccatgccagccgccgtccggagtgttctgg

SEQ ID NO: 538008 - DNA, 201 bp, Homo sapiens
gttgaacttttctaacatccgcttcccatcctgccctctcccttgacactgtggaggcattctagactaggggggtcaagcctgttgacttcagggatgargcacctcctgggcttctaaatagtggcgcggaggtgagggggcagttaaccttgtgtctcgtcctctttcctagtgggtctgcttgactcctccaggaac

SEQ ID NO: 538009 - DNA, 201 bp, Homo sapiens
gaggcggggcctgtggtggaagtgaccctcctccagcctccgctctgggaagcttttgagatttcctttgctaagtggggggaccgttctttgcagaaacscacagagcgagattgctgaggtctctgcagatccccaaagatgtcagccaaattacatgcatgtgtataaaaggtgtatttttcttttttttctttttga

SEQ ID NO: 538010 - DNA, 201 bp, Homo sapiens
ttctttttgagacaagtctcgctctgtcgcccaggctggagtgcagtggcgcgatgttggctcactgcaacctctgcctcctgggttcaagcgattctccygcttcagcctccctattagctgggattacaggcgcccgccaccatgcctggttaatttttgtatttttagtggagacggggtttcaccatgttggccagg

SEQ ID NO: 538011 - DNA, 201 bp, Homo sapiens
gaggggattattgcacacaacttagatcctttaatagagctttgaacaaagtctcaccctcagttcccatcagttgcagaaatcagtgtgttcacctgatyattcatttgggcatctttcgagcacttagggatgcccctcactccttgctactcctgctcatcctcaaggaggccttttctgacctcctcgagcagctca

SEQ ID NO: 538012 - DNA, 201 bp, Homo sapiens
aactcactgcaacctccacctcccagcaattctcctgcctcagcctgccgagtagctgggattacaggcgcccgccagcatgtctggctaattttttgtayttttagtagagacggggtttcactatgttggccaggctggtcttgaactcctgacctcgtgatccgcccgcctcagcctcccaaagtgctgggattacaa

SEQ ID NO: 538013 - DNA, 201 bp, Homo sapiens
atagagaaaaaaaaatagaaaatactgttgtcctaagttttaggaggggattattgcacacaacttagatcctttaatagagctttgaacaaagtctcacmctcagttcccatcagttgcagaaatcagtgtgttcacctgattattcatttgggcatctttcgagcacttagggatgcccctcactccttgctactcctg

SEQ ID NO: 538014 - DNA, 201 bp, Homo sapiens
ccttctccctgtctgcttcccggagccctcctttaaacacgcatagagaaaaaaaaatagaaaatactgttgtcctaagttttaggaggggattattgcayacaacttagatcctttaatagagctttgaacaaagtctcaccctcagttcccatcagttgcagaaatcagtgtgttcacctgattattcatttgggcatc

SEQ ID NO: 538015 - DNA, 201 bp, Homo sapiens
ggcctcaacacctgtgcatccctgcaggggtggacccagtccccagttgcttcccagggagtacgggggtggggtggggattctctggctttcctccctgyccctcctctgcaggctgatgctgggcttcatgggcgtcacagccctcctgtccatgtggatcagtaacacggcaaccacggccatgatggtgcccatcgt

SEQ ID NO: 538016 - DNA, 201 bp, Homo sapiens
tcctcaggtcagcagcagagtcaggacctggggctgggtgggcagcccccatgactggctcagctaacagcgctgtgcccaccacagggagtcaagtgatytttgaaggccccactctggggcagcaggaagaccaagagcggaagaggttgtgtaaggccatgaccctgtgcatctgctacgcggccagcatcgggggca

SEQ ID NO: 538017 - DNA, 201 bp, Homo sapiens
gaggctctaaaaccgtcatccctattccaatatctgatcttgaattggcctcaacacctgtgcatccctgcaggggtggacccagtccccagttgcttccyagggagtacgggggtggggtggggattctctggctttcctccctgcccctcctctgcaggctgatgctgggcttcatgggcgtcacagccctcctgtcca

SEQ ID NO: 538018 - DNA, 201 bp, Homo sapiens
ctcaaaaaaaaaaaaaaagaaataaaagagcgagagagaaagaaaagaaaatgattactggctggggccactgtctgtgtggagcgtgcacattaccctcrtgtccacatggcttttctttggctagtatggtttccttccacatcccaaacccgtgcacgttaggtgaattggagtgtctgtatggtccctgtctgagtg

SEQ ID NO: 538019 - DNA, 201 bp, Homo sapiens
gtacagagacattttttgctgtccaacctggagacagtcttactggcatctcataggtggaggccagcggtgctctaaacaccctgcagtgcacagctccyacaacaaagcatcatttagcccaaaatgtcagtgtgccgaggctgagggaccctgcctcccagtagggaggtgccctggtttgctcgtgggatgctgaaa

SEQ ID NO: 538020 - DNA, 201 bp, Homo sapiens
aataaagagaatctgctctcttcagccctgtgtctgtgcttgagtgggggcgagcacggggctgagactagaggtcggcctctgcctggaaagtcccgatstctgagcggaagtggagcgaagtgtggcgcggaagtgaggcgaaggctttccccatcgactgggcgcgccgagcggtctaagcgactgcgtctgatgggg

SEQ ID NO: 538021 - DNA, 201 bp, Homo sapiens; identical to SEQ ID NO: 354232

SEQ ID NO: 538022 - DNA, 201 bp, Homo sapiens
tggcatccggcccccgtggagagggctgaggctggggggctgttccgtctctccacccttcgctgtgtcccgtatctcaataaagagaatctgctctcttmagccctgtgtctgtgcttgagtgggggcgagcacggggctgagactagaggtcggcctctgcctggaaagtcccgatctctgagcggaagtggagcgaag

SEQ ID NO: 538023 - DNA, 201 bp, Homo sapiens
gctttgggaagcttggggctgggggagaggctgtcaggggaacctagaacctagcttatgcccccttcccagatgtgacactcagtgctctgaacgactcygatgccaacagtgacgtggtggatattgaagggctaggagaaactcctccagctaagaaactcaacttcgaccagggtaggagtcctcctcctcccacac

SEQ ID NO: 538024 - DNA, 201 bp, Homo sapiens
tcacccaagaaagggcccaagaaggtggcatctggtgtcttgtcacctcctccagctgcccctcctcccagcagctccagtgtccctgaggccgggggtcyccccataaagaaacagaaggctggtgagggctgtggagttgctgcctaggggttaaaggtcccatctgaggtttagtgagagaattgggcctgggtcaaa

SEQ ID NO: 538025 - DNA, 201 bp, Homo sapiens; identical to SEQ ID NO: 354250

SEQ ID NO: 538026 - DNA, 201 bp, Homo sapiens; identical to SEQ ID NO: 354252

SEQ ID NO: 538027 - DNA, 201 bp, Homo sapiens; identical to SEQ ID NO: 354237

SEQ ID NO: 538028 - DNA, 201 bp, Homo sapiens; identical to SEQ ID NO: 354239

SEQ ID NO: 538029 - DNA, 201 bp, Homo sapiens
atgtggttaggagccagggagtcagacctcagcggccatcccaaacccaccaccttaggtgtgacctctttaggtattttacttttctgtgcttctcagtmcacctctgcaaaatggctatgacagatctcaccccataggatggtcaagaagattgaataaagtaatacacgtaacagcgcctaaacaggtgtcgggcac

SEQ ID NO: 538030 - DNA, 201 bp, Homo sapiens
aaaaagaaaaaagggaactggagcggagggccctggagtgggaggagccagggctggtaaaggtggagacccctcaaggtaggagaaacaagagcggggtkcctgagaggtgcttgagttgaatggaggacatgggaggaaaagagagtgcttgttccagaaatgtgtagctgggccttgttttcccagtaatccacccac

SEQ ID NO: 538031 - DNA, 201 bp, Homo sapiens
tcaatccacctgtaaatcaccaagctctacctgatgtctctcccagaagagaattaggagatgggcctttcccactactcagttcagggactccactctcyacactccatccatcctgagtgagtgtaaaacttcgagaaagtgagaaccctaccaatgggttggggccccgacctggattcttatgaagggactcccaga

SEQ ID NO: 538032 - DNA, 201 bp, Homo sapiens; identical to SEQ ID NO: 354197

SEQ ID NO: 538033 - DNA, 201 bp, Homo sapiens; identical to SEQ ID NO: 354229

SEQ ID NO: 538034 - DNA, 201 bp, Homo sapiens
ccccataggatggtcaagaagattgaataaagtaatacacgtaacagcgcctaaacaggtgtcgggcacatagtgctcagaaaatgttggctcctattaawgtttgacccctttgcttcattcccacccccaggaatggcccccagaacatatacaacctttacgagcaagtcagctacaactgtttcatcgctgcaggcc

SEQ ID NO: 538035 - DNA, 201 bp, Homo sapiens
tctccaactccatcatttaagtttctcagtccaaaagcttgaaatcacccttacctctgtctcaaccctgcatccaacccttcagcaaatcataatgattstaccttcaaactataacccaaatgcaactacttcttatcaacatcacagctggtcagaagaacaatagacatataattatttcaggttacttcctagcaa

SEQ ID NO: 538036 - DNA, 201 bp, Homo sapiens
aaaaataaaaaaaaaaatcacatggtcatgcgtgttgttcatccagcatttcttctggggtgctcccctcccatccttatttcctaacttcatgtttcagrtgtgactgattcagtcccttctcattccaaactctaggggtggagacatggcccaggtctgaccaatcaaagtatgccatccctttggccacagtgatgg

SEQ ID NO: 538037 - DNA, 201 bp, Homo sapiens
cttggctcactgcaacctccactgcccgggttcaagtgattctcctgcatcagcctcccaggcagctgggattacaggcacgtgccaccacacccaagtatttttttttttttttttggtatttttagtagacacagggtttcaccgtcttggccaagctggtcttgaacttctgacctcatgatccacccacctcggcct

SEQ ID NO: 538038 - DNA, 201 bp, Homo sapiens
gaaacatccgtaatgtctgcctccacgtcccatagtcagccagtctccaacaactcacacctggtcattacctcagcctcacagttgcccagcttcactcrgacttccttcccagaccacatcactcccatgtccacccttctaaacacagccaatgcttttagcagtttttgagtggaagcagagagcattggtggttca

SEQ ID NO: 538039 - DNA, 201 bp, Homo sapiens
acatcactcccatgtccacccttctaaacacagccaatgcttttagcagtttttgagtggaagcagagagcattggtggttcagttcttgggctataggtygtggaggaaatacatgggctatgctctgcctggaaagtgagcagtaatattacatgggagaaggcctattcttatacctgtatcttcctaccagcaaatc

SEQ ID NO: 538040 - DNA, 201 bp, Homo sapiens
gaggcaggagaatggcatgaacctgggaggcagagcttgtagtgagctgagatggcgccactgcactccagtctgggtgacagagcgagactccatctccaaaaaaaaaaaaaaaaacaccgtgttttagaagagatccattaaatttcccactccaaatagcagaggaaatataaaatcacacaaaaattatttcttgtc

SEQ ID NO: 538041 - DNA, 201 bp, Homo sapiens
gcaaatcctgcagagctttaaatgaaactcattccagaaaatcattttaaccctgttaggcctgtgtctccttaagtatttgtatgaaagttcaattaaastttaattatgtcaatggatgaacaagaaggaaaacttttatattatttttaaaatccatattccttaaactgagggtaaagatcactggacaggagcaag

SEQ ID NO: 538042 - DNA, 201 bp, Homo sapiens
ccttaaactgagggtaaagatcactggacaggagcaaggtttgaaacaatttctgagaaagctgatcagtaacaacatcacccatcatgaccttgtatcartggagctcagaaatgcagttcttttcctacctctccagtcagaagtatgtaagaacgtggctatgggtaagttatgatacatttaaaagcagattgcttc

SEQ ID NO: 538043 - DNA, 201 bp, Homo sapiens
agtagagagtagcatgatacatttaaagtgctgaaggaaaaagcttttatcctaaaatagaataaccagcaaaaatatccttcaaacatgaaggagaaatrtagactttcccagacaaacaaaagtggacggatttaataaatgtcacacttgtcctacaagggaaaaaaaaaggaattaaaaagttaatttaaaaattaa

SEQ ID NO: 538044 - DNA, 201 bp, Homo sapiens
ttcagtacaaagaaagttatttaacctccctgtgcattggtgtcttaacagctctgtgcttcggtttcctcatctgtaaattgcagtaataacagtacctwtcatatagtgtttttataataattaaatgaattaaaagcctgccatttgtctctgtacactgagaacagcattggtatatgattagcacatgtaagtatt

SEQ ID NO: 538045 - DNA, 201 bp, Homo sapiens
aaaactgatgactagttttggttaagcaagcatatgaaatgaccacagatttaacatatgctatttgtcaaaaaggaataatgaggtttctctacttttcyccatgccaccttgatgtctgttttcatgttcttttgctttatcataaatactttaaaaaatgatattgatataggaaaaagtttgggctctagccttccc

SEQ ID NO: 538046 - DNA, 201 bp, Homo sapiens
acaggcatgagccaccgtgcctggccagatgatcacccttcttaaatcccagaggcattggctttcctctaaacactccacagtgatttcactacattctygaggagaagcagtatccctgtgtgggtcctgtctttcaatgcctcatttcttaaagagagattgaggactcccaagagtcccattcatcctggggaagga

SEQ ID NO: 538047 - DNA, 201 bp, Homo sapiens
cagtcggaaatttctgtattaaaaaaaaattcccttattatgcatgtgataaaatatacaacattataaagatttatgaaatggataggacaataatgatyaaatgaactacagcagaaatttactggccttgtcaaataagcaggtagtaggaatgtagacatttttccctttcagtgtttgctcagatgacttaacaat

SEQ ID NO: 538048 - DNA, 201 bp, Homo sapiens
tcttaaagagagattgaggactcccaagagtcccattcatcctggggaaggaaagactgatgagcttattactacacagccttaacgttgtttaggggtgrtgatgggatacctaatcaactcacttctgtgcactgaatcacgctgctgcaactgtgcttgtttttacccctttcctgacagcagactcactcttctgga

SEQ ID NO: 538049 - DNA, 201 bp, Homo sapiens
cttgaacaggtacgctggcaatacaattattgacatttacaatttgtagactatttgccttatttgcctccaacttggaaagcttctccttctaacttgarcaaacagtttcttcagttaattctctgggattctgacctattgctgttcctgattcctaaccaactcccatcaccataatcctggctctcctgggccggg

SEQ ID NO: 538050 - DNA, 201 bp, Homo sapiens
agttaattctctgggattctgacctattgctgttcctgattcctaaccaactcccatcaccataatcctggctctcctgggccgggcacctgcccccatamtctactgcttcttatggccctagcactacactttacaaagaatctaattttgtttatcttctctaaaaaacaaattaaattgtgtctaaagataaagccc

SEQ ID NO: 538051 - DNA, 201 bp, Homo sapiens
aaataaaaatcacaggtttgagaaaacaagcacaaatcagatgatttccaaaggagactaaaatgagaataaatgcaaatgggaaacgtggcttttagtgragtagtatgtgagaaagagaaattcataggataaatgtggttttgttctgctcttataattagccccttcatctagtacataaaaaaagcaaaggctagt

SEQ ID NO: 538052 - DNA, 201 bp, Homo sapiens
gagaataaatgcaaatgggaaacgtggcttttagtggagtagtatgtgagaaagagaaattcataggataaatgtggttttgttctgctcttataattagycccttcatctagtacataaaaaaagcaaaggctagtaaaatatgtaaaataatatttaacttaagaaattagtaggtttatgtttcagtaagttaccctc

SEQ ID NO: 538053 - DNA, 201 bp, Homo sapiens
taaaagcaattaaattgtgtaaagaccaagtttttatcaaaataaggaaagaaaactggcctctagagagcaagcacaatctgttctgaaatattgcttayaaaggtacattaagttagtatcttctaatttattgaggagcagaagatctcaaaatagcgatgtttactttaaggatgatattttaataagttgtatctt

SEQ ID NO: 538054 - DNA, 201 bp, Homo sapiens
agtcaatcactcatcactaacatgctcagatgcaaaaaatcctaactataaaaggaaggaaaacattagggggataatattcatagaatattatctgtgaygaaacactttgctcttcagaggtagggtcttgctgggaactgctggtagcaaaaagccacagcaaaacagtcacctgatggaaactaaacatttcaaaat

SEQ ID NO: 538055 - DNA, 201 bp, Homo sapiens
acttttatatgacctgttccctacttctctcaaaattagaagttatcggctttatttctttatccatggggttctaaaatttcaagtggacatgctttgatgtgtgtgtgtgtgtgtgtgtgtgtgtgtgtgtgtgtgtgttccatttgttatactgtatatctggttctttagttcagtgaaattcttaaatatagatgc

SEQ ID NO: 538056 - DNA, 201 bp, Homo sapiens
ttttatctgcactctgaaaactagctttccagcttggtaaattttaggcattcaacatgacctaatttctttgcagtaacatcattttcctttttcctgamtaaaaagaaagacagtgtgcaggtcccttatttgaacagaaaaacacattttctaatcatttttttgaaaaaaaatggaagaatgaaataaggataaaaa

SEQ ID NO: 538057 - DNA, 201 bp, Homo sapiens
cttttatatgacctgttccctacttctctcaaaattagaagttatcggctttatttctttatccatggggttctaaaatttcaagtggacatgctttgatgtgtgtgtgtgtgtgtgtgtgtgtgtgtgtgtgtgtgtgttccatttgttatactgtatatctggttctttagttcagtgaaattcttaaatatagatgct

SEQ ID NO: 538058 - DNA, 201 bp, Homo sapiens
taagagccttttaaaagtcacgtggaaaggcaagcactccaaggattttttgattccttttggctttggccaagaaaatgaaattattgagaacagccagmctttcataagatattgctgttggagggactttttggtgggttaaatattataaaatcattgttttctggtcaatacagagcagggagaaaataaaaataa

SEQ ID NO: 538059 - DNA, 201 bp, Homo sapiens
ttttatatgacctgttccctacttctctcaaaattagaagttatcggctttatttctttatccatggggttctaaaatttcaagtggacatgctttgatgtgtgtgtgtgtgtgtgtgtgtgtgtgtgtgtgtgtgtgttccatttgttatactgtatatctggttctttagttcagtgaaattcttaaatatagatgcta

SEQ ID NO: 538060 - DNA, 201 bp, Homo sapiens
ttgctctgtcgcccaggctggagtgcagtggcacaatctcagctcactgcaagctccgcctcccaggttcatgtcattctcctgcctcagcctcccgagtwgctgggactacaggcacctgccaccatgcccggctaattttttgtgttttttagtagagacggggtttcactgtgttagccaggatggtgtcaatctcct

SEQ ID NO: 538061 - DNA, 201 bp, Homo sapiens
aggatgtggaagcacagcatgtaatgtaataccagatgttctacgtgggaggaatttcataactcatacattttagcatgcttttttctaactgcgcccakctcctttcatgcagcacaaaaatgtaaatctgtttcccaaactactaccaggtcctggaatctaaaaggaaatactggtggttctttggtatttttcact

SEQ ID NO: 538062 - DNA, 201 bp, Homo sapiens
ttgttaacattgtctgtaagcccagagaaaatgtgacctttagaattctaccttttggtaaagagtttgttactcaagttctctgggacttagagtgcaartggaaatagctgaaaacaatagtatgtgaacattttgtaccccacaagtctttctggttatctattttcagaaatcttctggattacttttctaaaagtt

SEQ ID NO: 538063 - DNA, 201 bp, Homo sapiens
tttatatgacctgttccctacttctctcaaaattagaagttatcggctttatttctttatccatggggttctaaaatttcaagtggacatgctttgatgtgtgtgtgtgtgtgtgtgtgtgtgtgtgtgtgtgtgtgttccatttgttatactgtatatctggttctttagttcagtgaaattcttaaatatagatgctac

SEQ ID NO: 538064 - DNA, 201 bp, Homo sapiens
cacgtggacacaggaaggggaacatcacactctggggcctgttgtggggtggggggaggggggagggatagcattaggagatatacctaatgctaaatgaygagttaatgggtgcagcacaccaacgtggcacatgtatacatacgtaacaaacctgcacgttgtgcacatgtaccctagaacttaaagtataataaaaaa

SEQ ID NO: 538065 - DNA, 201 bp, Homo sapiens
cgtggcacatgtatacatacgtaacaaacctgcacgttgtgcacatgtaccctagaacttaaagtataataaaaaaaagaaataaaaaaaaataaataataaaaaagaacatcaggaagaaatgtgtttaaaatgtgtttagcattgtgttaccgattcaccagtaattggtatgtacatttataaaaaacaaattaacaa

SEQ ID NO: 538066 - DNA, 201 bp, Homo sapiens
tgtgttaccgattcaccagtaattggtatgtacatttataaaaaacaaattaacaatccaactcaatctttaagtatgactagaatttttattatgtaaawctcttcctccctgtcttcttcccccacaatcatgccatgttgtaatagtacatgatgcagctgttgttattgttgtgtttgtctctctctttttaaagac

SEQ ID NO: 538067 - DNA, 201 bp, Homo sapiens
cctagaagaaaactaggaaataccattctggacatcagccttggcaaagaatttatgactaggtccccaaaagcaattgcaacaaaaacaaaaattgactyataaaaacaaacacacacacaaagggagaagagaacacactctgttaccttagaatgccaactaataaatgtcaaaggaatactggaatcagaaaaatca

SEQ ID NO: 538068 - DNA, 201 bp, Homo sapiens
aaattaacaatccaactcaatctttaagtatgactagaatttttattatgtaaatctcttcctccctgtcttcttcccccacaatcatgccatgttgtaayagtacatgatgcagctgttgttattgttgtgtttgtctctctctttttaaagacaatctcagttttaaaaataatttaactgcaacaatcctaaaattgc

SEQ ID NO: 538069 - DNA, 201 bp, Homo sapiens
aactgcaacaatcctaaaattgcaaagaagcagtatcatgcatggcagcaggctggaaaccaggtgacttgagttttagttctagttctaccacttatgakctatgaaacctcatacaagattcaaaccctcaaaatcttggtgttctattctcttaaatggtaataggtacattcgcccccatggagtggtgaggttcaa

SEQ ID NO: 538070 - DNA, 201 bp, Homo sapiens
taaaattgcaaagaagcagtatcatgcatggcagcaggctggaaaccaggtgacttgagttttagttctagttctaccacttatgagctatgaaacctcayacaagattcaaaccctcaaaatcttggtgttctattctcttaaatggtaataggtacattcgcccccatggagtggtgaggttcaaagaagaaacaaacc

SEQ ID NO: 538071 - DNA, 201 bp, Homo sapiens
agcagtatcatgcatggcagcaggctggaaaccaggtgacttgagttttagttctagttctaccacttatgagctatgaaacctcatacaagattcaaacmctcaaaatcttggtgttctattctcttaaatggtaataggtacattcgcccccatggagtggtgaggttcaaagaagaaacaaaccagtgtgtgactcta

SEQ ID NO: 538072 - DNA, 201 bp, Homo sapiens
acgctgctgcaactgtgcttgtttttacccctttcctgacagcagactcactcttctggaaaccaacttcagatcctgctgccttgctcacttgaacaacrtagaaattttgcaacactttaacttattttatctattcatcaaaggaaagagtattagggattaagaaatggcatgagaatctctgagaattgggtttct

SEQ ID NO: 538073 - DNA, 201 bp, Homo sapiens
tggaaaccaacttcagatcctgctgccttgctcacttgaacaacatagaaattttgcaacactttaacttattttatctattcatcaaaggaaagagtatyagggattaagaaatggcatgagaatctctgagaattgggtttctttttttttttttttgagacggagtctcgctctattgccaggttggcacgatttcgg

SEQ ID NO: 538074 - DNA, 201 bp, Homo sapiens
ccataaaagcctacatcaaaaaagtagaaaaacttcaaataacctaacaatgtatcttggaaaactagaaatgcaggagcaaaccaaacccaaaattagtmcaagaaaagagataataaacatcagagcagaaacaaataaaatttaaattaaacatgcaaaggataggctgggcgcagtggctcacgcctgtaatcccag

SEQ ID NO: 538075 - DNA, 201 bp, Homo sapiens
gggtttcaccatgttggccaggatggtctcaatctcttgatcttgtgatccgcccacctcagcttcccaaagtgctgggattacaagtgtgagccactgcrcctggccaagaattcagttttctgttatcaattaaagagcatctaaaaggatctttcttactgcttgccacgaagctgaaaattatttggctgctcagaa

SEQ ID NO: 538076 - DNA, 201 bp, Homo sapiens
agttttatagtaaatcttaaaattaggtagcatgatttctccaactttattcttcttttaaaaattattttggttcatttagttcatttatcttcccatawaaattttagagttggcttgtttatagctataaacaaaatcctgcagagattgaattggaattgtgttaaatctgtaggccaatttggagagaactgacat

SEQ ID NO: 538077 - DNA, 201 bp, Homo sapiens
aaattaggtagcatgatttctccaactttattcttcttttaaaaattattttggttcatttagttcatttatcttcccatataaattttagagttggcttktttatagctataaacaaaatcctgcagagattgaattggaattgtgttaaatctgtaggccaatttggagagaactgacatcattattaggttgagtttt

SEQ ID NO: 538078 - DNA, 201 bp, Homo sapiens
tagggacagttttatttcttccttcctaatctggatatcttttatttatttttcttttcttattgctccttttcttttttaaatttttttattttattatkattatactttaagttttagggtacatgtgcacaacgtgcaggtttgttacataggtatacatgtgatgttgaataggaatggtgagcatggtcattgcct

SEQ ID NO: 538079 - DNA, 201 bp, Homo sapiens
tggtgccagctgtggtgattttacagatgccctttatcgggttgagaaaatttccttctattcctagtttcctgagagtaccacttcaatttccaagctgycttgaatcaaaaccagaagactctggaggaaaaatgagaaactcatagctgattaccatttaggtagttcaaattctggtcttcttcctcaatccatatg

SEQ ID NO: 538080 - DNA, 201 bp, Homo sapiens
ctcctgctggtaggcatttcagcaatggcaccttttagagatatcacacagcttaggtcatgtgggaccaaaaagttctctcatctcctgggaaatctacyacttcaggatgaacacgaggatgtggttcatttgtcccgttttctcatctgagtttaggtatcactgcaatttatttaagattacccaaaacatcttcaa

SEQ ID NO: 538081 - DNA, 201 bp, Homo sapiens
tagtagctcatgcattctgtccaggttttatagctgcattcagtgggagagacaaggtgagtgcttgttccactgtattcagaactggaatccttgagtcrttttaaagtcaaagaaagaaaattaaccagcttattcagttacataaaaaaaaagtactgttttaagtttcaaggatccaaagatgagttaaatttaatc

SEQ ID NO: 538082 - DNA, 201 bp, Homo sapiens
ggttatggcccattccttaaacactcagctcaaatgtcacctcctcttagaagcattccttatttctcactgttatcctcccagctgaactattgttctayagaaagcactttacagttaagaaacttttcagttgttcacatgagtatctccttgacaaggcatactgtctatagacaagggtataacatttttttatgt

SEQ ID NO: 538083 - DNA, 201 bp, Homo sapiens
tagaactagaaataccatttgacccagagttgtttttatttgtattacaaataaggactaaatttttaaaaaatccctcttccatcagaatatcactgatytcatcatagaaataatgattttcttaataaaattttgctttacaagtgaaaaaaaaaggattaaaaagttataacctaaatttataatagtgatcgactt

SEQ ID NO: 538084 - DNA, 201 bp, Homo sapiens
ttatgaactgtccaggtgacggaacagaaaacaaggctattaaatttactgatgacactcctcaaaggaggtgtgattgagcatcaaagtaagtgtaatawtccagcgaagtgaaatttaataaggatatcactattgacaaaaatggaattaatatggaataactggctgaaaaatgtggaaaaatactttgggatcaag

SEQ ID NO: 538085 - DNA, 201 bp, Homo sapiens
gctagctgtgtgaccttggccaaattgtttaacctctctgtgtctcagcagcctcaattgcaagacagagacagtaatggtattgatctcatagagctgtrgtgagcagtaagaagttacagtttgaaaacagcttagaacagtgcctggcacacagtagctgctatgcaaatgttaaataaaaaaaaaatacaaaaattt

SEQ ID NO: 538086 - DNA, 201 bp, Homo sapiens
atttctattgaccaattttcctgctttttttgtatgtctagtcatttcctattgaatgcttgactcaatgaatgctatgttgctgagtgtttggattttgyggtcttcttggttgagtgttaagttttgttcaggtatgaagtcaatttactgttgaatcacctgattttttcaaggtattcctccctccctccccaaata

SEQ ID NO: 538087 - DNA, 201 bp, Homo sapiens
gtgggttacacattaatgctatatcaatgttaacttcctgattttgaggtctgtgttgttggttacgttaggagaatgctcttgtgaggaaaaactgaaatttttttttttttttttgagacagagtctcgctcgtggcccaagatggagtgcagcggcatgctcttggctcactgcaacctccgccccctgggttcaagc

SEQ ID NO: 538088 - DNA, 201 bp, Homo sapiens
tggatttcagtttctgcatctacagaatgaagggagttgcatgcagacataaccccttatgacatttccagcttgaaacctgtttatatctacgtaaagayggtttgaaaaaatgtaaactagcattcaaacatatgatgcattaaagaattactttaaataaaacagaagaaatggagaactcattctatttttctacta

SEQ ID NO: 538089 - DNA, 201 bp, Homo sapiens
gctactcgggaggctgaggcaagagaatcgcttgaacctgggaggcggagactacagtgagccgagatggcgccattgcactccagcctgggtgacagtgygggattccgtctcaaacaaaaaaaaaaagaaaaagaaaaaaagaaaaattaaaaagaaaatgcagaatcttttgaattttgaaacaaaaagtccaaactt

SEQ ID NO: 538090 - DNA, 201 bp, Homo sapiens
gccattaatggcaaaaagggatactgccatacaaggggattttttctccatcctatctccatatgctactgataaaaacatattattgttgtaatttaggyctcctttaatgtgcctgtccccatgttacataactttatgtacgtaaaggaggaaaaaaattttttttttttttttttgagatagtctcactctgtcacc

SEQ ID NO: 538091 - DNA, 201 bp, Homo sapiens
gcttgaacctgggaggcggagactacagtgagccgagatggcgccattgcactccagcctgggtgacagtgcgggattccgtctcaaacaaaaaaaaaaagaaaaagaaaaaaagaaaaattaaaaagaaaatgcagaatcttttgaattttgaaacaaaaagtccaaacttttgaccaggcgtggtggctcacacccgta

SEQ ID NO: 538092 - DNA, 201 bp, Homo sapiens
tgaacaagaaggaaaacttttatattatttttaaaatccatattccttaaactgagggtaaagatcactggacaggagcaaggtttgaaacaatttctgakaaagctgatcagtaacaacatcacccatcatgaccttgtatcagtggagctcagaaatgcagttcttttcctacctctccagtcagaagtatgtaagaac

SEQ ID NO: 538093 - DNA, 201 bp, Homo sapiens
aaagtcaaagaaagaaaattaaccagcttattcagttacataaaaaaaaagtactgttttaagtttcaaggatccaaagatgagttaaatttaatctctayttctgaggaattgtttcatgcccaccctcattcctcttttccatctggtaaattcctacttgttattattttgacttgttattattttgaagtaattttt

SEQ ID NO: 538094 - DNA, 201 bp, Homo sapiens
attgtaaggtatacatttacatttaagtaagtacttaatgtaagtaattaagtacattaagtaagtacttaatgtaagtacttaaatgtaagtgtataccyaacgagctcagaaccgtaacagttctagagtcattgactgtcaacctattaattgcatttcacattcaggtttatagccagtatattgcagaattaattt

SEQ ID NO: 538095 - DNA, 201 bp, Homo sapiens
gtaaggtatacatttacatttaagtaagtacttaatgtaagtaattaagtacattaagtaagtacttaatgtaagtacttaaatgtaagtgtatacctaaygagctcagaaccgtaacagttctagagtcattgactgtcaacctattaattgcatttcacattcaggtttatagccagtatattgcagaattaatttgtt

SEQ ID NO: 538096 - DNA, 201 bp, Homo sapiens
cattgcttctgtccctatcaccatcttactgcctcatttctgaaagccttgctgttaggtaactgccataattctctttggggagttagatgataaagccmtaaataagcaagtggcatgatagagctaaactatatcagcctatgagagataactgctaaatacttaggaatttttcaagctgattgttaacctttggta

SEQ ID NO: 538097 - DNA, 201 bp, Homo sapiens
tactgcctcatttctgaaagccttgctgttaggtaactgccataattctctttggggagttagatgataaagccataaataagcaagtggcatgatagagytaaactatatcagcctatgagagataactgctaaatacttaggaatttttcaagctgattgttaacctttggtagcttgaaatcatggtgggggtgtttg

SEQ ID NO: 538098 - DNA, 201 bp, Homo sapiens
ttgtgttgagccatttaagtgttgaataaagggtttggtaatctctgctctcacattattatcaattaaaaattgagagtatactttaaaaattcctaatktatttaacatttatatcaaatttctaactgcagttttatcttgcaaaaaaaaaggggggcggtgaagatatgaagcacattcccctagttaccatggtta

SEQ ID NO: 538099 - DNA, 201 bp, Homo sapiens
atttattcatagtcctagaaaattctctttaaaagggggaatagactaatagtgctaaacataaattagttatcttttccatgtatttctttctatgcctyactcctttttattttcaaatgctggttgtgtgcttattgtgtaccagacactgtcttcactataatgatgaaaaagttccagtctcacactgtatttcag

SEQ ID NO: 538100 - DNA, 201 bp, Homo sapiens
aaattgagagtatactttaaaaattcctaatgtatttaacatttatatcaaatttctaactgcagttttatcttgcaaaaaaaaaggggggcggtgaagayatgaagcacattcccctagttaccatggttatacagtttaagagtacacctcgaaggggttgttcatattaacatgattagtaatacttcagcttaaaaa

SEQ ID NO: 538101 - DNA, 201 bp, Homo sapiens
aagtccatctggccactagatggagatcaggttactctgtcagtgatggggaagctgcttgcagccagcaagtgttaagtaagcagggtatggagaacctrttctcttttttcaatacttctatgaaaggcattttccaagctctgaagttaggagcagatctgtgctgaataaagagtatataaatgaagaatagcttga

SEQ ID NO: 538102 - DNA, 201 bp, Homo sapiens
cagtcagccaacagtctattattgctggcaattgagtctaataattttgttagatggacctttcaaaatttcaaattggctactgctgttacacttcgcawaactgttggtttctgtactggagggcagtagtcataaatatttgatagggatatgaaagagggggaggaggaggaaaaaagaaaagaggaggaggaagga

SEQ ID NO: 538103 - DNA, 201 bp, Homo sapiens
ttatagtttttattgtggtagggctaatctggtaccactaccctgtcatgggcagaggtataaatcccaaaaggcagtttttcaccatatctcagctttcsctgagtcctttcctctttctcctttgacccactaactctgccctttattctcttataattctctctcaagaactgatcacttagtgaaaagacccagacc

SEQ ID NO: 538104 - DNA, 201 bp, Homo sapiens
tgtaatagctgagctttattttatttttttttagagacagggtcttgttttgttgcccaggctggggggcagtggctcgatctcagctcctgcaacctccrcctcccaggttcaagcaattcttgtgcctcagcctcccaagtagctgggattacaggcatgtgccaccatgcccagcttatagctgaactttaaactgga

SEQ ID NO: 538105 - DNA, 201 bp, Homo sapiens
gagagaagagataagagcaagaagaacagaaataaaactggtttataaaatgggcctctaagaaagtatttttaaattgtaccaggagggaaacaaatgaytaaatgagatttttaagaggttgtgggtctaatagtcttacctgtgtagctgaatatattctcggggtctgttgagcaggtgaaggaatctgtcaacaat

SEQ ID NO: 538106 - DNA, 201 bp, Homo sapiens
tatatgctttagtatatatgggcatatagccttcctcattcttcaaattagttccagacagcaactagattgattagatgatgactgagtcatttctggasttatcaggtttcttttcactttggtggcctgttcccatatttttctccagtgcagggttgggtctacttattgttgactactaaatttgcattacttgga

SEQ ID NO: 538107 - DNA, 201 bp, Homo sapiens
gtgcacacagtcacatacaggtaattctagtgaaacgaggactcacatccaggtaattctagtgaaaccaggactcacatccaggtctatatgattctgakgctcataattatagtccctgcattatggaatatctttctttcagtttgaaattgattttggtaatctgggccttaagttatctcctttctcacttctagg

SEQ ID NO: 538108 - DNA, 201 bp, Homo sapiens
tggatctaaaataggaaaaaaaatgaaaaaaaataacatatctttcatgtaagaaatcagatcatggtaactaaagtctaggcaacgttagggctatcatrctgttaataatgtcaatgttatcatccaaaggattagctttgaaaaaaacaaagtcaggacattctaagaacctaagatcaaaacaaacaatcacctact

SEQ ID NO: 538109 - DNA, 201 bp, Homo sapiens
gaagcaggtatttttactggtatttttactacatacgcaaacatcttgtgaagaaaagcattctacaagcatcaaggatagaaattcaaatcaattgaaayggtatttattgagcgccacagggggtagaaaccacatctgttttgcttatcactatatccccagagctcagcacagtgcctgagagtgcgttcaataaat

SEQ ID NO: 538110 - DNA, 201 bp, Homo sapiens
agagttagaactgtttcctcaaagcaccaagaagccactgaagtaaaggaataatacgatcagattttcagttttagaaaattgctctgatggaatggtayggtggagtctggtagagagcagaagagaaagcaaaggaaagcagtttgaaattcctttaaaattcaagcaggagatgatggtggtctaaactacgggata

SEQ ID NO: 538111 - DNA, 201 bp, Homo sapiens
actgagaactgacagatgagaatgagtttgggggttggggggaaggggtgcagcagaaagttgggaagaattttgtaaattcaaattaactgaaagaagtyggagagttatgtaatggacaaaccacgctgcatcttttaagccaagttaaaatttctaaactttatcctaaggacaatgtgacctgagttgtgttttaaa

SEQ ID NO: 538112 - DNA, 201 bp, Homo sapiens
acacagatgacatagtatttaccttgtgtaactccaaaccctgtgctgggcggctcctctttcagcacatacaactggcaaaccccactaccctcagattygatgtgtgcaggcttagttaaaagatatttcctgcaaacaaacaaaacatctagcttaagtgaaatttttctttttctaatagtaataaggccagactaa

SEQ ID NO: 538113 - DNA, 201 bp, Homo sapiens
cactgcagcctccgtctcccaggttcaagcgattctcctgtctcagcctccgaagtagatgggactgcaagcgcatgccacttcacctggctaatttttgyattttttaaagtagagacagggttttgccatgttggccaggctggtctcaaactcctggcctcaactgatccactcaccttggcctcccaaagtgctggg

SEQ ID NO: 538114 - DNA, 201 bp, Homo sapiens
gagccaaattctgactgttaactgatcttcatcttcccactctggtatataggttcatcttttactgttcagtgaagaaaaataggtaggacttttcaaayagtgggaattaaagggtcataaataatttattgttctagttttaattcttgttttaaaaaatgaaacaagagaatattacttttaaactatacagtgata

SEQ ID NO: 538115 - DNA, 201 bp, Homo sapiens
atgcagaggaatcaggaggcatggggatcttttgtggtggatggcatggcaggttatttgcccagccctcactgctgacctaaaggcgcctatcttgctcracaggaaccatacaagacaagagtgtataagcctttcattgccagcaggcctgttaatttccatgatgtaaaaagtaagtccatctggccactagatgga

SEQ ID NO: 538116 - DNA, 201 bp, Homo sapiens
gaccagagcagagataagtaactgaatagataaggaactgcagagtgcctcaagccaacacagtgagagaaagaaggggccatggcttaggaatagagggrtgggcagagagtgaatcctgtacactgtactgaagactcagactatacctaacagaaatggggagccaatttcagcaaaaaagagaggctcaatcagatt

SEQ ID NO: 538117 - DNA, 201 bp, Homo sapiens
atcacatgctagagaaaaaggaactaggggttaactgttttgtacaatcaaggttaaataagaaagttaactataaagatatctttatagaatataaatayctattataataaacaattatcaatcgatttgatataacccaaaattaaatctgtggttataagtaaattatataaccatttaggtcactgatactgaaaa

SEQ ID NO: 538118 - DNA, 201 bp, Homo sapiens
aagaagagaaggtacgtttggagacagcttaagaaaagtccctcagggccactgtgtaaagttcatggcagccctgagtcctaaatgtccatgtcacaaamaccatggcaacagacattgtgttcaagggcacaatggtctttgctgctactgtatttcctacattcttatatcctgtgaagtcttttcaatctttgccac

SEQ ID NO: 538119 - DNA, 201 bp, Homo sapiens
ccggactccaagaagtcctaacttagaggaaagatcattagctatcacttggaaggagctggctcttgctgtcaaaaccactaaaaaataaaaataaaaawaaaaatcacatggtcatgcgtgttgttcatccagcatttcttctggggtgctcccctcccatccttatttcctaacttcatgtttcaggtgtgactgatt

SEQ ID NO: 538120 - DNA, 201 bp, Homo sapiens
gatatatcggagtttctttgattgaagatcagtgacttctatataaccagatgtttgtggaggagtaacatctacaaacaagtcatgacatgagccaagtwttaaattactgcaagataccaaaatggtgctaaaagtggaatcaagttatctgtagcctagggtagaacgctgggatctacttgacaaggtactgggtca

SEQ ID NO: 538121 - DNA, 201 bp, Homo sapiens
gcgcacctgtagtcccagttactcgggaggctgaggcacgagaattgcttgtacccaggaggcagaggttgcagtgagccgagatcatgccactgcactcyagcctgggtgacagaacaagactccatctcaaaaaaaaaaaaaaaaaaaaaaaaaatatatatatatatatatatacacacatatatatttgcatacata

SEQ ID NO: 538122 - DNA, 201 bp, Homo sapiens
attaacattggctatctgacagattacaccttaattacaagtgaaatccattttatattattatataaaagtagaggttaggccaagggcggtggctcagscctgttaatcccagaactttgggaggccaaggcgggcggatcagagggtcaggagatcgagaccatcctggctaacacggtgaaaccccgtctctactaa

SEQ ID NO: 538123 - DNA, 201 bp, Homo sapiens
tgtctctattgtcctgtactgtttacttgcaggatgtggaagcacagcatgtaatgtaataccagatgttctacgtgggaggaatttcataactcatacaytttagcatgcttttttctaactgcgcccatctcctttcatgcagcacaaaaatgtaaatctgtttcccaaactactaccaggtcctggaatctaaaagga

SEQ ID NO: 538124 - DNA, 201 bp, Homo sapiens
aagcagattggagatattagttactgctgcctaagggggctgagagagacttaagagaagagagaaactaagggacaactggatgtagggaaagcacattctaggcattatctaaggcagagacatttgagtataagcggtattagaaaatagcaagaagctaagtgtgggaagagctgaggatgcttcaagagagtttgt

SEQ ID NO: 538125 - DNA, 201 bp, Homo sapiens
agcaaataatgaagtcttgttcatacctcatgcttctgaacatattgtttaaactgccaaaaatgttctatccactcctgagccactggaaaaatcctatrttattcttgcaggcttagctcaagcttcatcttctctctgaagctttccctattccgtctcctgaatcccagtattactttcttctccatatccccagtc

SEQ ID NO: 538126 - DNA, 201 bp, Homo sapiens
gcattacttggaaataaggaagttgataaaaaacgttctattggatgcatatttttgctcaccttctctagtttagaggtcctggccttgtaataatctgytgtattctagttcctaaatgtttctgtttcctaggtagcatgtagagatgctgacactgaagatggtaaaagtgagaacagatgcaaaggtgctactgga

SEQ ID NO: 538127 - DNA, 201 bp, Homo sapiens
ctactctgctagagcttctagccaagacttcaaccactgtgttgtgagggctcagtggcaatgtgagggagtacatgagaggagcagatgtgattgcaatmtaggtcaaaatagagtagaaagattagaggaagaaggctttggcatggagggcaaagaaagggaaaaagaggaacctaggataagtaggccaaagcaggt

SEQ ID NO: 538128 - DNA, 201 bp, Homo sapiens
ggtatgcaagaagtcagaagctagagaaaagtgagaaagggagtggtaagaaaccaggctagaaaggtaggtggggtttaagtctggctaagccctggaarccacttaaaagagttagaactgtttcctcaaagcaccaagaagccactgaagtaaaggaataatacgatcagattttcagttttagaaaattgctctgat

SEQ ID NO: 538129 - DNA, 201 bp, Homo sapiens
tacgtgaaactttaaggaaaactcctgtaaaacttggaaaggctcggggatgcatttaaaacaccgtgaactatgggttctttggcaagaatgttcccttmtaagccgccacaagccctggctagaacatgacacagaccggcttccaggcccttgaggctcagagagcaaggtcaaatccagctttcaataattccatag

SEQ ID NO: 538130 - DNA, 201 bp, Homo sapiens
tataatacaactgcaataggtcaacaatatataatacaacttgcaaatatatgtcaagtgtcatgaaagcagattggagatattagttactgctgcctaarggggctgagagagacttaagagaagagagaaactaagggacaactggatgtagggaaagcacattctaggcattatctaaggcagagacatttgagtata

SEQ ID NO: 538131 - DNA, 201 bp, Homo sapiens
ctcctctgttcaagtggttctcgtgcctcagcctcccaagtagctgggattataggcacccgccaccaaacccagctaatttttgtatttttagtagagayggggtttcaccatgttggccaggctggtcttgaactcctgaccccaagtgatctgcctgcctcggtctcccaaagtgcagggattacaggtgtgagccac

SEQ ID NO: 538132 - DNA, 201 bp, Homo sapiens
aataaaaggtttgacccttacaagagtagattaggatgggatggaccaggatcccctttatgctactggaacacctttggtaattctgctcctaaatatgytccctacagactcaacatatacacaagcagactggtgcaaggctattcatagcaccattatttgtaatagcaaaaacctggaaagaacctaaatttgcac

SEQ ID NO: 538133 - DNA, 201 bp, Homo sapiens
gttttagagtttcatcatgaattaacaaataacttctcaacactgtgttaaagagcagtgcacaacagcaatacagtaatgaatgtgaggcaaaaatccartgcttcctataagagaaagggttgtggggaggggaagcaactctaatggggtgcactcttattatcatgtaaccctctcttgataaaactctttgatcag

SEQ ID NO: 538134 - DNA, 201 bp, Homo sapiens
ttttaaattgcagtcttattccctcttgtttctcaccttctaatttaagatataattatttattttgcttattgtctatcttcctggatcagaatgtaagyttttgagaacaagaatttgtgggtatttttggtcactgcagtatccccaataggaggcacatgatatatatttgttgaatgaataatatgcttagtgtag

SEQ ID NO: 538135 - DNA, 201 bp, Homo sapiens
aaatgctacctttgaaatggttacataaatcttatgtcaaagaagaaatgttatctgatttatacaaattggctttatacacactgaggaagactctcacrgcataaagtgaggcatgtttgtaagaacaaagggtttcattgagtacccatggacacaaagaagggaacgatagacgatggagcctacttgagagtcggc

SEQ ID NO: 538136 - DNA, 201 bp, Homo sapiens
ttgccgcccacgtgaggcatgttgtctgggtcctccttcccgtgtttgggggagcttacatcttcaccactgtctctgttgattgttatctaaaaatgaasaattgagacatttttactatcctgtgacaaacaccagggactgcatgacagaaaaaaaaattattttctcctaagtccttaaggtatcacataacctcag

SEQ ID NO: 538137 - DNA, 201 bp, Homo sapiens
aaaaccctccaaatgatgaggatagctgggcacagtggtgcatgcctgtagtcccagctactcaggacactgaggcaagagaatggctcgagcccaggcgytctgggttgtaatgcactatactgactgggtatctgcactaagttcagcatcaatatggtaatctcccaggagcggggaaccaccaggttgcctaaggaa

SEQ ID NO: 538138 - DNA, 201 bp, Homo sapiens
agaacttgagcatcattagatactgatggatctcactgtattccctttggtgtatttacatgactgtctctaccaaaaaacgtcattcgggtctcagatamaatgtcgtctcctaaaaggaaatatctcagcactctttttaataccattcacctcaattcctcctaccccatctacatcactcccttggacattactctg

SEQ ID NO: 538139 - DNA, 201 bp, Homo sapiens
acattactctgtttctatatgtaacaattatcattacctgaaactggcatgttcatttgttggtttacttgtctatctccccaaaatgagtgtaagcttcrtaacaaagaatcatctgacctcagatgtcaatagtgtcgaggttgaaaaaccctgacttacctgtttctagaggtataggtcatgttgaagtctctagag

SEQ ID NO: 538140 - DNA, 201 bp, Homo sapiens
ggtgagtatcataattatgactcaggtcaaattatagtatttgagcaagttacagaaagaacaaaaaaggttttctttttttaaaaaacacacatacaatycataacatgatgcatatggacaccaaagccaagtactatatagtctgaatgacatgcaacagatttgtctaagattgcttccataaagaggtgagctggg

SEQ ID NO: 538141 - DNA, 201 bp, Homo sapiens
cctggaatatctcttctattatgtcaaaaagaaagactcaagaaaataaaaataattagaaagaaatatttttcagtgcatgaaataacacatacagtcayaggaaaaagtctagaaggatcatcaatggctatttctggatggtaacattacaggagtttttattttctttttgctgattaattttaaaaataaatggga

SEQ ID NO: 538142 - DNA, 201 bp, Homo sapiens
cgtggttactcttcactttgaactatggctaaaatccaagcatctgaatctgttataattccttgaagaataagaatttgtatattgtatgtacatgacawcacggtcaatgatgagttccaagttggttacttaaaatcccaaggtccttttaagccaaaactattgataattttcagtatctaaataactactctgatc

SEQ ID NO: 538143 - DNA, 201 bp, Homo sapiens
gataattttcagtatctaaataactactctgatctagaaattccctgcaatctacatatcaatctgtttatatcatccttagaattggaattaatattacwtatagcccagctgtacccctgctttctaacctccagcaagttacataacttctctgtgcctcaaattcctcatctacaagatgcaataatattatatata

SEQ ID NO: 538144 - DNA, 201 bp, Homo sapiens
tggtacggtggagtctggtagagagcagaagagaaagcaaaggaaagcagtttgaaattcctttaaaattcaagcaggagatgatggtggtctaaactacrggatagagagaaatgaatatatttaagagatatttaggaaaaggaaccaacaggacttaatgagggcctggagttaaggatgaggagatgaagaagtcaa

SEQ ID NO: 538145 - DNA, 201 bp, Homo sapiens
aggaaatagcctgattgcagatgggaataatgtaaggagagggaagctgctgatacaggagagggagggcagaacagctagagcagcaaccttcaaaaggygggatctggtgctcatctggagggactccctctagatgggaatgtgaacagtttacctgcaacaagtgggaaagcagggcatcataggtggaagacttgg

SEQ ID NO: 538146 - DNA, 201 bp, Homo sapiens
gcagagattccttccactgaaggaaaggagaggggagagcaaagaggactttgtcttacaatttgggtaccagctcagccaaagtaaaataaagcactaarcaaattgctaaagtccccaattccaggacttagctcctggatgacattttgacacccaccctgggccagaagggaacccactgccctgaagggagattcc

SEQ ID NO: 538147 - DNA, 201 bp, Homo sapiens
atggtccacgcaataatacgagccaaacatgagaaaggaaagacagaatatggaacaaagacagcactgaaaaaatgtttgctcgatattttttcttttctttttttttttttttttttgacagagtctcgctttgtcacctatgctggagcgcaatggcatgatcttggctcgctgcaacctccgcttcccaggttcaag

SEQ ID NO: 538148 - DNA, 201 bp, Homo sapiens
ttttctcagtgcagtaggaagacaggagaaaataacagaaatctaaaagaaagtcagtaaactgaatcctggttagcaatggggaaggaatgagactggtrggaaaatgaaagagaatttccctttcccctccataagcccttctatatttcaatctcttgcagtaagtgaatgttcaagtattgtataattttaaaacaa

SEQ ID NO: 538149 - DNA, 201 bp, Homo sapiens
aggagaaagtatttggaatgaggccccagagggggattaagtatttggaatgaggccccagaggggacctgtgacagccagaaagtgaccacccttatccycccaaaaatccacatcctaatctctggaaactgtcaatgttactttctatggcaaaattgactttgcaaataagattaagataaggattttgagatgtgg

SEQ ID NO: 538150 - DNA, 201 bp, Homo sapiens
tggtccacgcaataatacgagccaaacatgagaaaggaaagacagaatatggaacaaagacagcactgaaaaaatgtttgctcgatattttttcttttctttttttttttttttttttgacagagtctcgctttgtcacctatgctggagcgcaatggcatgatcttggctcgctgcaacctccgcttcccaggttcaagt

SEQ ID NO: 538151 - DNA, 201 bp, Homo sapiens
ttcaattgtaaaaagctctaagatatttggctgtgataacttggttgcagaaacaaaaactttcttgaaaaaatttgctcaagaaccaaacactgataaarcatatactaaattgtacagggacttgcactcttatataccttcagagtacatctaaaaaaaagcaaccttgtccaaatgtagacttacagtacttaagcc

SEQ ID NO: 538152 - DNA, 201 bp, Homo sapiens
tctgaatttatttaaaccccacccttaagttgcccatctttaaaaaatgatagttgtgaagtacctacagctttatttgagatgagtttggaagagcctastctcatttttttatgataccaaaaagtaatctttcagcatgtacatattcatgtacaccaatacaaccaatagttttaactgtgatccccattaatctta

SEQ ID NO: 538153 - DNA, 201 bp, Homo sapiens
ttctattgtacaacatgttgaatatttctagttaataatagtgttgcctatttcaaaattgctaagtaaatttcaaatgttctcatcacaagtaatgctarctatttgacatgatgggtatgttaattagcttgatttaattattttgcattgtattcgtaaggtataacatcattttggactatacattttttttcccca

SEQ ID NO: 538154 - DNA, 201 bp, Homo sapiens
tttatctgcactctgaaaactagctttccagcttggtaaattttaggcattcaacatgacctaatttctttgcagtaacatcattttcctttttcctgaawaaaaagaaagacagtgtgcaggtcccttatttgaacagaaaaacacattttctaatcatttttttgaaaaaaaatggaagaatgaaataaggataaaaat

SEQ ID NO: 538155 - DNA, 201 bp, Homo sapiens
aatttaagcccctcatcccatccctttctgctcatttgtcactgttgccatcatctgaagattctggctaaagcaataaggaatggcattttataaaactaaaacaaaacaaaacaaaacaaaacaaaacaccattttaaatctaattgaataaggagaaagttgggaggtatcttcgtcactctgtctgcttacctaaca

SEQ ID NO: 538156 - DNA, 201 bp, Homo sapiens
ttggctgtttccgttagggacggggatggctgtggatttcagtttgaggtccgagttgctgcatgaggtggaggtggaaacacacacaaatctaggtttcyccacagtccatcatgacatttcaccatagcagtagtgctggtctaaatgcgatgggagcactgacctctgctggaatgctctctggcccatctctctagc

SEQ ID NO: 538157 - DNA, 201 bp, Homo sapiens
ccttttaaaaaataaagttaaaagctttcattttgataaattaacaacatgaatcaatgaatttaactttttctacttgattaaatccttgattatctccytctgattatatcagaacaagatgttccatgaatagatctagaggaaaatgactgtacttcacagtaaagcatcatctagaaactcccacaaacagtaaag

SEQ ID NO: 538158 - DNA, 201 bp, Homo sapiens
atttaagcccctcatcccatccctttctgctcatttgtcactgttgccatcatctgaagattctggctaaagcaataaggaatggcattttataaaactaaaacaaaacaaaacaaaacaaaacaaaacaccattttaaatctaattgaataaggagaaagttgggaggtatcttcgtcactctgtctgcttacctaacaa

SEQ ID NO: 538159 - DNA, 201 bp, Homo sapiens
tttaagcccctcatcccatccctttctgctcatttgtcactgttgccatcatctgaagattctggctaaagcaataaggaatggcattttataaaactaaaacaaaacaaaacaaaacaaaacaaaacaccattttaaatctaattgaataaggagaaagttgggaggtatcttcgtcactctgtctgcttacctaacaac

SEQ ID NO: 538160 - DNA, 201 bp, Homo sapiens
ttaagcccctcatcccatccctttctgctcatttgtcactgttgccatcatctgaagattctggctaaagcaataaggaatggcattttataaaactaaaacaaaacaaaacaaaacaaaacaaaacaccattttaaatctaattgaataaggagaaagttgggaggtatcttcgtcactctgtctgcttacctaacaact

SEQ ID NO: 538161 - DNA, 201 bp, Homo sapiens
taagcccctcatcccatccctttctgctcatttgtcactgttgccatcatctgaagattctggctaaagcaataaggaatggcattttataaaactaaaacaaaacaaaacaaaacaaaacaaaacaccattttaaatctaattgaataaggagaaagttgggaggtatcttcgtcactctgtctgcttacctaacaactc

SEQ ID NO: 538162 - DNA, 201 bp, Homo sapiens
tctttgtcacaggagtgggataggatctttagattaaggaataagataggacttctcaggatggtagcaaagaagtctgttaagggtcggggtattctcamatcaccagcgctaggaaggaggggtgttacttgcaagagtgaaagaaaaagactgaggggttctgtggatactaggcagtctttgacttctattcagaat

SEQ ID NO: 538163 - DNA, 201 bp, Homo sapiens
aaactaaaaaataattaatttaaaattattattgttcatctaaacaaaagctagaacatatcccctcaactagattataaaccccttgaggctagtaactytagtttctgtttttcctccatctgcctcactgtccctcatggtgctaagcctataaaacagcatgtgttagctactcagtatctctgtacctgccctttt

SEQ ID NO: 538164 - DNA, 201 bp, Homo sapiens
ttcttctttgacaatttccttgatggcatgttctgtcccttctaacgtgtggtccccactcatgcagaactgagagtgggcatgcattgtctggaggtaaragaagttgcacaaaagccatggctgagaaacttcttttttaacaaatacgattatttttctattgaccatgagcatgcatacataccaattattacccat

SEQ ID NO: 538165 - DNA, 201 bp, Homo sapiens
ttgctatcaatagagtgaaaaggtaccaaataaaaactgaaactaaaagcagctgagctcagctgttagaaattgctcaggataggaaatttctggcttcrgcataggcttgactaaagtcatccatgggttcagtggtaggattggcacagatgtggagagagcttgcataatccttccatggaagcacactccagggag

SEQ ID NO: 538166 - DNA, 201 bp, Homo sapiens
tttcccttcctttttctttctcatctcttatttgggtaaggaaagaccagcctttgtctgtgcctggtgagtactgcaaaggcttgcaaagacacctaagygacaggatggagcttataaaatagtttgcaggccctggtttctcatcttccagatgggtttgaggattattctgtgaccaaagccaataaaacgcttggg

SEQ ID NO: 538167 - DNA, 201 bp, Homo sapiens
ttctcatcttccagatgggtttgaggattattctgtgaccaaagccaataaaacgcttgggaggaatctaaagtacatccaaatgtggaccattccctggmgttactgcagattatattaagcttccattaccagcaatactcctccatcaaaattatctagtatctgctatccaaggattccaacatggtttaccaacag

SEQ ID NO: 538168 - DNA, 201 bp, Homo sapiens
ctgcccccctccactgccaaacatccttcaaaggttcttgttacactgttagaaaaccactgccctaggatatggtttatatgccttcacagaaacaatamgtttaagtttcttttttttttccaagtgcaacttctgaataatgaaataaatctcttttctggtcccactatttgagtgcttagtggagaaatagttacc

SEQ ID NO: 538169 - DNA, 201 bp, Homo sapiens
gacttttataagtgagaactgaataaatggagatctttctatacactcggctgcgtgagatgcaatgaaatactcagcctgctgcgtgacaatcataccayctccctggaggcatcggaatggcaccctgaacactagtaactttgccaccttcttccctgtctcatcctttacccagtcctggggagggagctgtgtcaa

SEQ ID NO: 538170 - DNA, 201 bp, Homo sapiens
tttatttaaaccccacccttaagttgcccatctttaaaaaatgatagttgtgaagtacctacagctttatttgagatgagtttggaagagcctactctcayttttttatgataccaaaaagtaatctttcagcatgtacatattcatgtacaccaatacaaccaatagttttaactgtgatccccattaatcttagtagtg

SEQ ID NO: 538171 - DNA, 201 bp, Homo sapiens
agcctaatagcaatctaagatcactgatttctgtaggacatgtttgatccgtaataaaatctagtctgtctatggactgtgtgtccttcatgcatatctgyacgtgcatacagcatttctcatgattgaacttttgataataattacatggcatgtgactgaattcaaggttgtttgctctggtaagggccagaagtgcag

SEQ ID NO: 538172 - DNA, 201 bp, Homo sapiens
atatcaagcagtaacacagcagcattgggggtcccttcaccatgctagacttctaaaatggagggtgtgcagcaaactaagaataccaaaatggaaacagytgaaatggaaacctgcttttctcctgggataatcatcatcattgttagctggggagacaccaatgactgtataacccctgcccatgtggaaatggaacgt

SEQ ID NO: 538173 - DNA, 201 bp, Homo sapiens
aaccccacccttaagttgcccatctttaaaaaatgatagttgtgaagtacctacagctttatttgagatgagtttggaagagcctactctcatttttttawgataccaaaaagtaatctttcagcatgtacatattcatgtacaccaatacaaccaatagttttaactgtgatccccattaatcttagtagtggaaaataa

SEQ ID NO: 538174 - DNA, 201 bp, Homo sapiens
ttttattagtgctaagctcatactcagaaatggcaatcttgcaatgatgctgttgcagaacatctctgtggtgatgcacttgtacctttttaatggggttytccttacatactctctttgaatattgaagattttagttattagtctcaacttgtttggttactctggttggctatatattttcaatggctagttatagat

SEQ ID NO: 538175 - DNA, 201 bp, Homo sapiens
cattaagtaatgggatgcaatttaatggttatgagttcacacatgacagaagtggagcttggagctacacttcaggacatttaatctggtgacaatatgcrgaatagtttggccaaaaagtggtttgggaatctgatttgagggaggtatgaaaaaaatggaaataaaaggcattagattgatttgaaggttttgtagaga

SEQ ID NO: 538176 - DNA, 201 bp, Homo sapiens
gcggaatagtttggccaaaaagtggtttgggaatctgatttgagggaggtatgaaaaaaatggaaataaaaggcattagattgatttgaaggttttgtagrgacagaatctatagtcttggcaactgcttaggtgggaagaggaaaaaggaaaaataagtcttaggtttaaggtgactgggttgatggtgacatcatgaaa

SEQ ID NO: 538177 - DNA, 201 bp, Homo sapiens
ccatgtgagacatgcctctcaccttccaccgtgatggtgaggcctccagagccacgtagaactgtgagtccattaaacctttttctttataaattaccccrtctcaggtatgtctttataagcagcatgaaaacagactaatacgtaatccatgagagttccatcctccaaaaactgaaatacaactatgatacaaaaata

SEQ ID NO: 538178 - DNA, 201 bp, Homo sapiens
gaactgtgagtccattaaacctttttctttataaattaccccgtctcaggtatgtctttataagcagcatgaaaacagactaatacgtaatccatgagagwtccatcctccaaaaactgaaatacaactatgatacaaaaatacacttgaaaatatttctatgattaggttactaaccaaaggtgagtcttcatatacaat

SEQ ID NO: 538179 - DNA, 201 bp, Homo sapiens
catagactcttgtctccagtattcttttccaaaacagccctgaccacaccacttgctggcatctccagtttcaggagtctgtagctctgactcatcaaatycataacccacaaattagatgacaggataatgtaaccacttggtgggtacactgaaagaaaggatattactgaggtacccagctggggaggaacatcatct

SEQ ID NO: 538180 - DNA, 201 bp, Homo sapiens
ttttatagttaggaaggaaataagctgatgattgatcatgataaaaatacagcacaggtgcattttttaaaagatttttgttcatcatcctgcttcccctycccccaccaaaaaaaaacagcaagtgaaatttatttgagtaacaatactttgtagacttaatacagtataaattacaaagaatttgagaattaatccaga

SEQ ID NO: 538181 - DNA, 201 bp, Homo sapiens
acagagccctcagaaataatgccacacatctacaactatctgatctttgacaaacctgacagaaacaagaaatggggaaaggattccctatttaataaatsgtgctgggaaaactggctagccatatgtagaaagctgaaactggatcccttccttacaccatatacaaaaattaattcaagatggattaaagacttaaat

SEQ ID NO: 538182 - DNA, 201 bp, Homo sapiens
tgccactggactccatcctggtgacagagcgagactccatctaaaacaacaacaacaacaacaacaacaaaacaaaaacaaaaaaaaaaggaaaaaaagaaaggaaggaaggaaggaaggaaaacatttgattcacaggaggccaaattatcaacattaacagacggttaagagaaattgaaatcaactctcacaaaatat

SEQ ID NO: 538183 - DNA, 201 bp, Homo sapiens
gccactggactccatcctggtgacagagcgagactccatctaaaacaacaacaacaacaacaacaacaaaacaaaaacaaaaaaaaaaggaaaaaaagaaaggaaggaaggaaggaaggaaaacatttgattcacaggaggccaaattatcaacattaacagacggttaagagaaattgaaatcaactctcacaaaatatt

SEQ ID NO: 538184 - DNA, 201 bp, Homo sapiens
ccactggactccatcctggtgacagagcgagactccatctaaaacaacaacaacaacaacaacaacaaaacaaaaacaaaaaaaaaaggaaaaaaagaaaggaaggaaggaaggaaggaaaacatttgattcacaggaggccaaattatcaacattaacagacggttaagagaaattgaaatcaactctcacaaaatattt

SEQ ID NO: 538185 - DNA, 201 bp, Homo sapiens
cactggactccatcctggtgacagagcgagactccatctaaaacaacaacaacaacaacaacaacaaaacaaaaacaaaaaaaaaaggaaaaaaagaaaggaaggaaggaaggaaggaaaacatttgattcacaggaggccaaattatcaacattaacagacggttaagagaaattgaaatcaactctcacaaaatatttt

SEQ ID NO: 538186 - DNA, 201 bp, Homo sapiens
atactgtcacattcagttttcttcagcttgaggagagcctcatatattgaattatgttgtgctttgtaaagcatgtcatcattcactccaggatatttgattttaagagggcagaatttgctaaacggtttacttcatttggtttcataaagaaactatgacagaggaaaagtaagtgttttaacaataaccatccaaaat

SEQ ID NO: 538187 - DNA, 201 bp, Homo sapiens
acatatttacttggcagttactatgtgccaggcactttactatttgctggaaatattaaataaagaaaacatagggctgtgccttagtgatatggaaaacrcgttttaaaagtccatttcaacacaatgtggtaaggacacaacagggcataggacaacaagatgatacagaagcacctaaatctgcaagaggcactgact

SEQ ID NO: 538188 - DNA, 201 bp, Homo sapiens
atgattctattgaccactgtacctactaattgtcactacttaactcttcatagcaaaactttacatttacaggcaatttctttaatttatttaaaaaaaawtactgaagaaattacatatttactacaatttgcacactaggtctaaaatcttttcttcacttaaagaatgttttccttataaataataacaaagttttaa

SEQ ID NO: 538189 - DNA, 201 bp, Homo sapiens
tttgtaaagataggtatggagtaactcttactttagggatagattagtcctacttctaaacatagactttataagataaatacccttctgaataccagggktatttaatgaaggaactctggtagttgttcagctcaaagatccctagtagtttttcttttcctagtgtttgtgaattttgttcagttttatagtttttat

SEQ ID NO: 538190 - DNA, 201 bp, Homo sapiens
aaagcatgtcatcattcactccaggatatttgattttaagagggcagaatttgctaaacggtttacttcatttggtttcataaagaaactatgacagaggraaagtaagtgttttaacaataaccatccaaaatgcaatattttaatgacctcagttggttagaacacttacataacagttaaagatctattatatacata

SEQ ID NO: 538191 - DNA, 201 bp, Homo sapiens
cttctcattattaatagatacacagagggtgttgtgtatcccaaagaccctgggtagatttgaagataagggagagagaaataccattccatatgcttaamgttgtcaaatcctggcctccagaaactgaaggttctatacagaaagccatacagcttagtggtcacattctatttcttagaaatccacaccttgagccaa

SEQ ID NO: 538192 - DNA, 201 bp, Homo sapiens
ggaacgtgatactgaagctttcagggtggactcaaactttggaaggctgcttggctagtgatggggcaagagtgggtgggtatggggaactgggataaggmcaggaggctctgaggagtctgggaacagacttttgcttctaagcagctcatttttttctaacatcatggctgcagcatttcttctgtagtaatcagactt

SEQ ID NO: 538193 - DNA, 201 bp, Homo sapiens
ggttggggccacatggaaaatattttcctttggaatatagtccttttaaagctcactctagtaaagttgacttaccgaggttgatgccttaaaaataataygatgacttaaaaataataatctggaatgacatgtcattttcacttcatgcctcagagtcagtaactctagcaagagtttgtgttattttggagggaagcc

SEQ ID NO: 538194 - DNA, 201 bp, Homo sapiens
tggaatgacatgtcattttcacttcatgcctcagagtcagtaactctagcaagagtttgtgttattttggagggaagcccatgtcaattttacttgtacgyattgggtagtgacctgaaaattattctccacacaggccacaggtaatgtcagattcctaaaacaaagttatgtgatgggggtctggcaaagaaattaaag

SEQ ID NO: 538195 - DNA, 201 bp, Homo sapiens
aaaaaaaaaaaaagattatgtgttccagcatcagcctggttctaactgttctttcaccactgttcaatatctgatctgaagcaaattacttaacctgtcgkcatctttgtttcttcatctctaaaatgaagataacactagtctctactttagtaagctattgtaaaattaataaaatcttacttggcatcagctaagaaa

SEQ ID NO: 538196 - DNA, 201 bp, Homo sapiens
gttaagcatgcttccatcagtgtttcatgggaggtggctatgtgatagcactgtcgttggaaatacaaagccactaagcctcaggcagctggtgtctgttytagggccaggtcagccattacacaaagaagcaccacacaatataattctgggtattacagtatgtattgttttcttgttcctgatacccttgctggaaac

SEQ ID NO: 538197 - DNA, 201 bp, Homo sapiens
cgtgggagagaaaggttggtggaagacaagtgaaacagatagtggcaacgggagtcattgcagggttctgagcagaagagcaagtaatcaactttattagyagaaacatgtaaggcatggaaaggagagatcagaggctgagttcttaaccaggaggctactgcaatagttcaggcaagaaaagatgagcaatggactggt

SEQ ID NO: 538198 - DNA, 201 bp, Homo sapiens
tgaagattctggctaaagcaataaggaatggcattttataaaactaaaacaaaacaaaacaaaacaaaacaaaacaccattttaaatctaattgaataagragaaagttgggaggtatcttcgtcactctgtctgcttacctaacaactctgtaagaaacctgcagctggtgctgactagaaaggtccaaagagaggagag

SEQ ID NO: 538199 - DNA, 201 bp, Homo sapiens
ccttggcttcccaaagtactgggattacaggcatgagccactgcacctggcctatttttttttttaattatactttaagttctagggtacatgtgcacaaygtgcaggtttgttacatatgtacacatgtgccatgttggtgtgctgcacccattaacttgtcatttacattaggtatttctcctaatgctatccctcccg

SEQ ID NO: 538200 - DNA, 201 bp, Homo sapiens
taaaatcataaatataatagcaagaagcttttatttctatagccattgtgattgtaaggtatacatttacatttaagtaagtacttaatgtaagtaattargtacattaagtaagtacttaatgtaagtacttaaatgtaagtgtatacctaacgagctcagaaccgtaacagttctagagtcattgactgtcaacctatt

SEQ ID NO: 538201 - DNA, 201 bp, Homo sapiens
caaccctatcaaaaagtgggcaaaggatatgaacagacacttctcaaaagacgacatttatgcggccaacagacacatgaaaaaatgcttatcatcactgrtcatcagagaaatgcaaagcaaaaccacaatgagatgccatctctcaccagttagaatgacgatcactaaaaagtcagtaaacaacaggtgctggagagc

SEQ ID NO: 538202 - DNA, 201 bp, Homo sapiens
actgattgagaaggcaaacagcaaataccaggcataaaaatgggaatatcattactaaggacattaaaatatcataagatgatattctaaataactttacsccaataattagagggaacagatcctaaaacaacatttatcaaagcttctcatggctaataaacataatgaatccatgactaaaaagcctgcttataaaga

SEQ ID NO: 538203 - DNA, 201 bp, Homo sapiens
ttatactactgtaaatagtatttttaaattttttcccattgctatagatactagcatatatatatatatatatatatatatatatatatatatatatatayacgctagtatatatattccatatatatggaatatatggaatatatatatgccagtatatatattccatatatatggaatatatggaatatatatatatgg

SEQ ID NO: 538204 - DNA, 201 bp, Homo sapiens
tatactactgtaaatagtatttttaaattttttcccattgctatagatactagcatatatatatatatatatatatatatatatatatatatatatatatmcgctagtatatatattccatatatatggaatatatggaatatatatatgccagtatatatattccatatatatggaatatatggaatatatatatatgga

SEQ ID NO: 538205 - DNA, 201 bp, Homo sapiens
gaagaagaaggaattgatggcagtctacttatttttcattccactagaattatttatcagttgttaaatttcacagctgtgtgctgttcacatggaatttyacaggtctgacatcttgacagaggtatattgtaaaataagatactctctccgggaaaagagaaggcagtttagaggacaggtagagaggaagtatacaga

SEQ ID NO: 538206 - DNA, 201 bp, Homo sapiens
ttgttcccctataggtaatacgtcttttttcctctggtaattttaaagatttttctcttggtttttagcaatttgattatatgctatgtagtgtttttttkgtttattctgcttgaagttcattgagcttcctgaattggtgatgttatcttttttatcaaatttgagaattttcctaccattatctcttcaaaatatttt

SEQ ID NO: 538207 - DNA, 201 bp, Homo sapiens
atttccttaccacttactgctgctgagagttgctatccttttgtagaagacagattgttaaaaatggaatccacccccaagctatttccctatttcaaagttttcacttagaagtgaaatataattaatggggtgtaaatcttttaacaagcaggttgtgtggaaagagttatagtttaaaagctgacttcatatcataca

SEQ ID NO: 538208 - DNA, 201 bp, Homo sapiens
tttccttaccacttactgctgctgagagttgctatccttttgtagaagacagattgttaaaaatggaatccacccccaagctatttccctatttcaaagttttcacttagaagtgaaatataattaatggggtgtaaatcttttaacaagcaggttgtgtggaaagagttatagtttaaaagctgacttcatatcatacat

SEQ ID NO: 538209 - DNA, 201 bp, Homo sapiens
ttgaggctgcagtgagctatgatcacaccactacattacagcctggtgatggagcaagactccacctgtaaaaataaataaataaataaataaataaataratagatagatagatagatagatagatagatagatagataaagtgggataaattttaaaagtgatttatttcgcctacaaaagatttaaggttatcggagc

SEQ ID NO: 538210 - DNA, 201 bp, Homo sapiens
cctacaaaagatttaaggttatcggagctgaatgtcaaattgacaaattcacttaagttagaacaatggatcatttcatcttctaggaatcttttcagtayctaattggatttcacccaaaatagtttcaagcctagcacagaagcacagaggaggaaaataacatttgcacatctgtatgtaaattacaactggtatgta

SEQ ID NO: 538211 - DNA, 201 bp, Homo sapiens
aggctactgcaatagttcaggcaagaaaagatgagcaatggactggttctcactgctacaagcatgctgtcacgaatgattctattcccctagtgagagascttaacttggcttggtcccattagctgttggctgtagtcctattccaaactgtcacttgaccaaattcttacaaccctctaattgctgtaatgtgaaagg

SEQ ID NO: 538212 - DNA, 201 bp, Homo sapiens
gtgatgtcattagtgtacctgagtgtttatgcttgcaaaaagtgtatgttattattgcctattttattgtgcaaggtggtttgtgaagtgttctgctgtttttgtttgtttgtttgttttttggagacagagtctcactcttgttgcccaggctggagtgcagtggtgcgatcttggctcactgcaacctccgcctcctct

SEQ ID NO: 538213 - DNA, 201 bp, Homo sapiens
tgatgtcattagtgtacctgagtgtttatgcttgcaaaaagtgtatgttattattgcctattttattgtgcaaggtggtttgtgaagtgttctgctgtttttgtttgtttgtttgttttttggagacagagtctcactcttgttgcccaggctggagtgcagtggtgcgatcttggctcactgcaacctccgcctcctctg

SEQ ID NO: 538214 - DNA, 201 bp, Homo sapiens
aacctctttacaattagaaacaacttttctttggtgtgtttacattattacatctctaagtgcatcagtaatctatgaattgttagtaacttttaaggtaktatctgcacataataaaaactacaaaaatagtataactgagtattttatattcccatccctaacttccattgcaaacaatgccttatcagattcttgtgg

SEQ ID NO: 538215 - DNA, 201 bp, Homo sapiens
gacataaccagtcaatgaaaatactgtttctttgggttctttggctaactgctctgaaaaaaaaaaaataccacttaagtaattagaatccaatgttccaytcttctaaggtcttctcattattaatagatacacagagggtgttgtgtatcccaaagaccctgggtagatttgaagataagggagagagaaataccattc

SEQ ID NO: 538216 - DNA, 201 bp, Homo sapiens
gatgtcattagtgtacctgagtgtttatgcttgcaaaaagtgtatgttattattgcctattttattgtgcaaggtggtttgtgaagtgttctgctgtttttgtttgtttgtttgttttttggagacagagtctcactcttgttgcccaggctggagtgcagtggtgcgatcttggctcactgcaacctccgcctcctctgt

SEQ ID NO: 538217 - DNA, 201 bp, Homo sapiens
acatatgttttaggatttggaggtggatggaagatggagacagaacagggagtgagtattcttacaggcattaaaataaatgtgataaggagtggcttggrgtataaggggtgacctacaaacataaaaagaactcaaacctctttacaattagaaacaacttttctttggtgtgtttacattattacatctctaagtgca

SEQ ID NO: 538218 - DNA, 201 bp, Homo sapiens
atcctgcagaccttgttccactatcctgtggcattcaaggtttcagggacaactaatgtaaaattaatttttctttctctgacaatagcttgtttttcaaytgcttctctgcttttaggatttttttttttttaatttttgaaatgttaaaattccatgaagctgtgttgagtgcttctctctttgttaattttgcatggt

SEQ ID NO: 538219 - DNA, 201 bp, Homo sapiens
tcctctggaataacttcaacttttttgttcacattactacttagacttaagactggatggagtctgttctttctacttttcatgtagatttgagttttggyagtgcagttttagttttcttatctttccttattgcattcaattcccttattatttctgcttgcttcttagccagatacttttcaatttatgtcttatttc

SEQ ID NO: 538220 - DNA, 201 bp, Homo sapiens
aaagctgaaagcaaaactggacactgttttccgatactggtctcactgttgtggtgattagtggaagagccattccttgatgctaactctaattctaaccmaggcttcatttgtgtgtgattgtgagaagtcagagcagtggacctgacttttcatcttttggctgattgtataaacatgataccatttatctaaagcact

SEQ ID NO: 538221 - DNA, 201 bp, Homo sapiens
taaagttgtcaaatcctggcctccagaaactgaaggttctatacagaaagccatacagcttagtggtcacattctatttcttagaaatccacaccttgagscaaaccatgtaagaaaaacaaaaaccatctttcataaggaggaattaattttggtgagccaataagtctctgccaagggtcaacactttaaacatatagt

SEQ ID NO: 538222 - DNA, 201 bp, Homo sapiens
catcttttggctgattgtataaacatgataccatttatctaaagcactgatctgaggattaaatgtgatagtgcttgtaaaagcaactatagcatagtccycaacaaataccaattaagacatcaactaataccagatgaggaatctgataccttcaattaaaaatgtattcttatatccctttgtagcactgtgaatcct

SEQ ID NO: 538223 - DNA, 201 bp, Homo sapiens
aaagctagaaagtatttcatgactacagaaacatgtttttagagtatgaacatcacatgatgagcaccatctggggaatgaaagtcattccagccactttyatagcttgttcagaaaaaagaaaggtattgtgaattctatctgattgaattttcagtgactaataatttttccttaaaaatagtctaattaagtaattac

SEQ ID NO: 538224 - DNA, 201 bp, Homo sapiens
taaaattgacttataaaagtaaccaataggtgtctggtattttctgtaagtctacaaaagcaaatattcattattttctcttctcattccttgccctttcyctgggtaagcttacccattcccatctttcatttatcttctatgtattgatggctcccacacttctatgtctggtcttgacttctttcttgagctctaaac

SEQ ID NO: 538225 - DNA, 201 bp, Homo sapiens
ctctgtgcacttgtgcatactgcttcctctgttggacatgccctgactccttaagcacatgggaaattccttagcatctttcaagagtaaattcaaacatyacattctccatgaagcctttcctcatttcgtctcatagcattgtgtgcaaaattctctacagaactcaggaaatttagttgactttgagtcccttctttg

SEQ ID NO: 538226 - DNA, 201 bp, Homo sapiens
tttgccaaaaaatgaatgctcaattagtgtttgttgaactaaataaaaatactaaatgtaagatccaagtttcttagaaaaaaactatggctcagattacrttatcaatggataagtggcagtatatcctttctaaatcaccaagagaacttaccaatttaaccactgttatgatgcagtcttaactgagaccaagagcca

SEQ ID NO: 538227 - DNA, 201 bp, Homo sapiens
cccagaaggacaattacaaataagaaccaaaaagggaaaggcaatcaccttgaaatacttcatggaaaagaaacacaagattccagagtagaatggagaarcagggcacagcttggctcccaaccttcttcctttgtcctgaaatgaggctttgctttctctttagacaaaaaatctgattttgtttctgattttaaggaa

SEQ ID NO: 538228 - DNA, 201 bp, Homo sapiens
attatttagcccccaccacaaatgtgatccttctcccactttatcatattaattaacagcaactatactcacgtgtccaaggtaggatttatggacatttytgatttctcactttctctcatatctcccttaacccacctcatatttcatcagttagtaacatgtatcatccttcttctgaaacatttctcatatttgttt

SEQ ID NO: 538229 - DNA, 201 bp, Homo sapiens
attataatcactgggggttcagcttcatctccaatttaaaatgtaagccccttgatttttggcttacattcccaccactctactaacactgatcttggtargtccatcaataatatcctatttaccaaattaaataaattagttttcttcctattttgctgtttccttctcagtcttttttgcagtttcttcttcatcttc

SEQ ID NO: 538230 - DNA, 201 bp, Homo sapiens
acaaacagagagccaaatcatgagtgaactcccattttctaatacactttctttagaattaggttatttaaactgtgaattataattaaataaaatgaaayataaatcacattggatattggtctgtcaggcttccctattcatccttacaattcccaatcctgtcccatcaggccatctactttcttcatacctttttct

SEQ ID NO: 538231 - DNA, 201 bp, Homo sapiens
attaccagaccatatattttagaaaattaacccaatatgaaatttaaaaaattaaacacccttaatcaaataactctatccactattccaaacagcttgcaaagaagttcagtggaaatgatcctgtgaattaatatctaccctttctaaaagataaccaactggaaaaagaaattaggactttcctgttacctttcttac

SEQ ID NO: 538232 - DNA, 201 bp, Homo sapiens
ttaccagaccatatattttagaaaattaacccaatatgaaatttaaaaaattaaacacccttaatcaaataactctatccactattccaaacagcttgcaaagaagttcagtggaaatgatcctgtgaattaatatctaccctttctaaaagataaccaactggaaaaagaaattaggactttcctgttacctttcttacc

SEQ ID NO: 538233 - DNA, 201 bp, Homo sapiens
gtatatcatagaaagaataaacctgtgattaattaccttaatggtcacctctttatctgcaatccggatggtcacagaagcttgggacacatggttttccrtcatcttctctacttttacaatctctttaggaagtagagagcttcctgaatcttgaagttcaaagcgctgtaaaattacaagaaaatcatgcaatttact

SEQ ID NO: 538234 - DNA, 201 bp, Homo sapiens
accagaccatatattttagaaaattaacccaatatgaaatttaaaaaattaaacacccttaatcaaataactctatccactattccaaacagcttgcaaagaagttcagtggaaatgatcctgtgaattaatatctaccctttctaaaagataaccaactggaaaaagaaattaggactttcctgttacctttcttaccac

SEQ ID NO: 538235 - DNA, 201 bp, Homo sapiens
agaccacaaaagaacttgcaacaaaaccaaaaattgacaagtgagacctaattaaaccaaaaagcttctgtacagcaaaaggagctatcagcaaagtaagyagacaacctccagaatgggagaaaatattcacaaactatgcatatgacaagggtctaataacataaagaacaattcaacagagaaaaaacaaccccactt

SEQ ID NO: 538236 - DNA, 201 bp, Homo sapiens
attgagccagagagtctgaaactataaagaaaaaagagaaaatgaagtgcaaatttaagtattacttataatataaatctccaagtaatgtggacatatttatatatatatataacgtatataaaatatgtgtttatctgtgtatttataaacatatgtatataaatatatataaacatatgcatatgtttatctggacaa

SEQ ID NO: 538237 - DNA, 201 bp, Homo sapiens
gctgggattacaggcgtgagccaccgcacctggctgctttcttttttcaatttcgtttatggtgctttatatctatattgtataatatacatataaattayatataatatatagatataaaaatatataaatatatatgatataaatattaaaatatacatatacatactcacagaaatttttctttttacttgtcaaatt

SEQ ID NO: 538238 - DNA, 201 bp, Homo sapiens
tgaaagaaatcagagattagacaaacaagtgaaaaaaacatgctgtgctcctaagaattacaattgttaaaatggccatactgcccaaagcaatttacagrttaaatgctattcctatcaaattaccaacatcatttttcacagaattagaaaaaactatcctaaaattcatatagactcaaaaaacagcctgaatcgcca

SEQ ID NO: 538239 - DNA, 201 bp, Homo sapiens
ttgagccagagagtctgaaactataaagaaaaaagagaaaatgaagtgcaaatttaagtattacttataatataaatctccaagtaatgtggacatatttatatatatatataacgtatataaaatatgtgtttatctgtgtatttataaacatatgtatataaatatatataaacatatgcatatgtttatctggacaaa

SEQ ID NO: 538240 - DNA, 201 bp, Homo sapiens
tcactgttaaaagcagtgttgctatccgatacaacaataggagggtatagaattttgaacaggaagaacatgttttcttcttctttttgatttctattgtwcaacatgttgaatatttctagttaataatagtgttgcctatttcaaaattgctaagtaaatttcaaatgttctcatcacaagtaatgctagctatttgac

SEQ ID NO: 538241 - DNA, 201 bp, Homo sapiens; identical to SEQ ID NO: 120256

SEQ ID NO: 538242 - DNA, 201 bp, Homo sapiens; identical to SEQ ID NO: 120244

SEQ ID NO: 538243 - DNA, 201 bp, Homo sapiens; identical to SEQ ID NO: 120245

SEQ ID NO: 538244 - DNA, 201 bp, Homo sapiens
aatttaggtaatacacatgattccagaaaattgtcttttttagtacagttttcataaatattgactttattttcagttatgctttttcctttccaaaatthaattacttatttgttcttcctctcttttacactaattaaatttaccaaggctttatctattaatattttcaaagaactaccttttggttggactaatctt

SEQ ID NO: 538245 - DNA, 201 bp, Homo sapiens; identical to SEQ ID NO: 120246

SEQ ID NO: 538246 - DNA, 201 bp, Homo sapiens
taacatttcattgtatggataaaacacactttatctgttgagcagttgatagtcatttgtttccagtttttcactattatgaatattattgctatgaacawtcatgtagaagtttttgtgtggacctgtttttgtttctcttggatagattcctaggagtggaactgtaaccctagtcctgtttcatttctgatacctctg

SEQ ID NO: 538247 - DNA, 201 bp, Homo sapiens
atgtcattagtgtacctgagtgtttatgcttgcaaaaagtgtatgttattattgcctattttattgtgcaaggtggtttgtgaagtgttctgctgtttttgtttgtttgtttgttttttggagacagagtctcactcttgttgcccaggctggagtgcagtggtgcgatcttggctcactgcaacctccgcctcctctgtt

SEQ ID NO: 538248 - DNA, 201 bp, Homo sapiens
tctgtccacagaatatctattaattcatgtttataaagcattagccactttaaaaataaattttgcatggttttattacctttaaaggagagaagagatargagcaagaagaacagaaataaaactggtttataaaatgggcctctaagaaagtatttttaaattgtaccaggagggaaacaaatgattaaatgagatttt

SEQ ID NO: 538249 - DNA, 201 bp, Homo sapiens
atgaacctgggaggcagagcttgtagtgagctgagatggcgccactgcactccagtctgggtgacagagcgagactccatctccaaaaaaaaaaaaaaaamcaccgtgttttagaagagatccattaaatttcccactccaaatagcagaggaaatataaaatcacacaaaaattatttcttgtcaatattgtcttaaaaa

SEQ ID NO: 538250 - DNA, 201 bp, Homo sapiens
ttctgctgtttttgtttgtttgtttgttttttggagacagagtctcactcttgttgcccaggctggagtgcagtggtgcgatcttggctcactgcaacctycgcctcctctgttcaagtggttctcgtgcctcagcctcccaagtagctgggattataggcacccgccaccaaacccagctaatttttgtatttttagtag

SEQ ID NO: 538251 - DNA, 201 bp, Homo sapiens
ttcaaaagctgaacagataataatgttcattggcctaccatatttataacttagattatacacatttcaaatcatgtaatctgactcattattgtatttayggaaattaaaaactctggtacaaactgtacagtctgaaaaaataaaaaagagagtgatggctcttaggtacaggtgtgtgccatacctacctgtaaatgt

SEQ ID NO: 538252 - DNA, 201 bp, Homo sapiens
gtattttgcattggaattcagtgctaccctgtcacagtggagagcaacagggtagcattttgatcagccctagctagaggggaataatcattcatcccagkggtcagaacctgaattctaactagccccaccaccacaggctaaagtgctctgtgttctaaataaacttgaaaggctgtctaggccacaggaatacaattc

SEQ ID NO: 538253 - DNA, 201 bp, Homo sapiens
ctcctatttatttaacaaatgtgtttgagcatattttgcgccagacatcatatgaaacagcgaggatacagaaaagagatgtggtctctgactttgaggcrttcacagtaaaatgaggaaagttcctttttattaaaccattgtgggcctctggggacttggaaaggattctagagttggaatcacagtcctgaggccagg

SEQ ID NO: 538254 - DNA, 201 bp, Homo sapiens
ttcttcttcttctttttttttttttttaacataatgctttccttggttaccatattcaggatttgtgatattttgacacaactcacgaaagcaagtttctrtaaagagggctagactatgcagagctgaggctagcagttcaccatgacttacttgtggctccagctcaccccgacgtttgtagatggctttttctccagt

SEQ ID NO: 538255 - DNA, 201 bp, Homo sapiens; identical to SEQ ID NO: 120252

SEQ ID NO: 538256 - DNA, 201 bp, Homo sapiens
ctatagcataaatgatacaaatcacaactgtaagagctgccaagtccagggacttaggacttgactgttgagaaaactgtattggagaacactctcaaatycatactgtcaaggaaggcagcaaagtgaaatcaggttcaggatgccagggcaggctcacaacatgaagactggggtgtttgaaaggaaaagcagttaaca

SEQ ID NO: 538257 - DNA, 201 bp, Homo sapiens
gccagtcattaatttattttacttaccaagatttgaaccgcagctgctaaactatctaaaggaaagtctggaagtccaagagtagaagattcttgggaacmcagagttgtggcaaaggacaagagctgagaaactctaagggaaaaatgatattaaattttaatagttttaaaatataaaatgtgtaagttgttaaatata

SEQ ID NO: 538258 - DNA, 201 bp, Homo sapiens
ttaattcttaaggaacaatggttccgcatcataatatcctacttaaaactcagaagctgattagatgcaaatatattcctaaattcatcacaatatttgakgtttttcaccacctggtccaaatctaccctgccagcctcatctctcacatttcgtaatcccaaacctaaactctagcctccaagagttttttatggccct

SEQ ID NO: 538259 - DNA, 201 bp, Homo sapiens
gcttgaggaaccaacacaaatgctggtactttgactactgcttttgctgaataatcattcctcttttgtctgtgactcaggagtctagtgtcttctgccaygaaagccttctgtggcaggctaacttgttagcttaaaagtagagtaaactcttagatctttcacagttcataacaaagaataaggctggaagcagggcga

SEQ ID NO: 538260 - DNA, 201 bp, Homo sapiens
ttctcacacgcttggccaactcctctgtctttcaaccaccttacggtattctcttttacttcaactgagactcttctctgcagcatttactagaggtgtayattttcctcatcccttccccatgtcctctctttcctctcttacatccgctaaattcatttgcgttaagggcacagatgccccttacttcttcccctgtag

SEQ ID NO: 538261 - DNA, 201 bp, Homo sapiens
ccgagttgctgcatgaggtggaggtggaaacacacacaaatctaggtttccccacagtccatcatgacatttcaccatagcagtagtgctggtctaaatgygatgggagcactgacctctgctggaatgctctctggcccatctctctagcagctctcttgacctcttcgggaactgcatctttctcagcctgagagacct

SEQ ID NO: 538262 - DNA, 201 bp, Homo sapiens
agcaccctctagatgtactccatgagaaatgagaaggacaaagaacatttcaaaactggtacagttttattctgttgctaatttaataaatctatatgagkctgggcgcagtggctcacacctgcaatcccagcactgcgaaaaacaaaacaaaacaaaaaaactatatgaaaggtatgattacagtctaaatttttttta

SEQ ID NO: 538263 - DNA, 201 bp, Homo sapiens
ttcaactgtgggctaatgtaagtgctctgagcatgtttaagataggctaggctaagcaatgaagtttggtagatctggtgtattaaacacattttcagctkaccatatttctaacttacgatgggtttattgggatgtaagcccgttgtaagtcaaggagcatttgtagtttgcttatatgcgttaagactcttctgtagg

SEQ ID NO: 538264 - DNA, 201 bp, Homo sapiens
aatggcacatgaaatattactactcaggaggctgaggcaggagaatcgcgtgaacctgggaggcggaggttgccgtgagccgagactgcaccactgcactmcagcccgggtgacagtgcgagactccatctcaaaaaaagaaaatcatatatgtggagaatgaattctatacccagaatacattaaaagactcctataact

SEQ ID NO: 538265 - DNA, 201 bp, Homo sapiens
taaagccagcacagggaagggacatgactcactgaagccctgtaattctgggcaaggcccatatattttaggctcctccttgagttcatgacttttaaaarccatcaataaaatgatataaatagccagattataatcctggaagaaaagtgagcttttggaggtatgactggacaacacagctggagactagtgtggcaa

SEQ ID NO: 538266 - DNA, 201 bp, Homo sapiens
ttatacatgtacaaataacagggaagtctccacatcttctaggaaaacagatggtgtatctactttttcccactaaattctctatgttgcatcaaacctcyggaactttttcatcaatgtgcactatattattatacaaaccaaattcattctttaagtttattaattcctgtgtcccacagaggagtcttatatttgatc

SEQ ID NO: 538267 - DNA, 201 bp, Homo sapiens
gtccttatagttaagccattgttatttgggttttctgctacttggagtcaactgcatgcaaactaactgattcatgtattaagggatgaatgagaggcagyagggcagaagctactgtcttgatcttcctgaggatgtcctacttctaacgagacatgctttgaattttctgacattaaaaattaccataacagcatcagc

SEQ ID NO: 538268 - DNA, 201 bp, Homo sapiens
caagatgatacaggctatgataaggttctgaatatacctgcctaaaacaaaatattgtctgaggttattgtacccataggttagaaatttctttcataggmataaaataagattgatagatggctagctagattaataaagaaataagagagaagatccaaataaacacaattagaaatgacaaaggtgacattaccacca

SEQ ID NO: 538269 - DNA, 201 bp, Homo sapiens
tgtataatcccattaatatgacattctggaaaggcaagactaatggggatagaaagcagtggttgccaggggctgggtttgggtggactacacaagggaasaagggaattgttcaaggtgatggaaatgccctatatctcaattgtggtactggccctactaccaaatgtgtttgtcaaaatggactgaattttactatgt

SEQ ID NO: 538270 - DNA, 201 bp, Homo sapiens
actccagagaaatacaaaaaaacccctcagagactattatgaacacctctctgcacacaaactagaaaatctagaagaaatggataaattcttagaaacayacaacctcacaagattgaaccaggaagaaattgaatacctgaacagaccaataacatgttcagaaattgaatcagtaataaaaaaacctaccaaccagaa

SEQ ID NO: 538271 - DNA, 201 bp, Homo sapiens; identical to SEQ ID NO: 120254

SEQ ID NO: 538272 - DNA, 201 bp, Homo sapiens
tttttattactattcctttgtggaatattttgaaaccaggtagtgtggtgcctcaaatgttgtttctcaagattgctttggctatttgaggtattctgtgrttccatatgaattttagtattttttttccatttctgtgaaaaatgtcattggaattttggtagagattgattgcattgaatctgtattgctttgggtggt

SEQ ID NO: 538273 - DNA, 201 bp, Homo sapiens; identical to SEQ ID NO: 120255

SEQ ID NO: 538274 - DNA, 201 bp, Homo sapiens
aacgtcactaacctctggcaaactcctcacatttgcagtggtcttcaatgactataaaatcctgaggactctcaaaagatttccctaagactcctaatcaraattactgtaaagtacattgaaaacagaagtgcataggtcaggcacggtggctcgtgcctgtaatcccagcactttgggaggccgaggccggtggatcat

SEQ ID NO: 538275 - DNA, 201 bp, Homo sapiens
tattattcagcctttaaaaagaaggaaatcttaccacttgccacaacatgaatgaagttggaggacattatgctaagagaaataaaccagacccagggttaaaaaaaaaaaaaaaaaaaaaaacccctacatgagctcacttatatgtggaatctggttggggcggtggggtgcagggggagtaaaaaatacagagataca

SEQ ID NO: 538276 - DNA, 201 bp, Homo sapiens
gaacagactaatacacagggcagccttcccacctatgtgatagcatagtgactatcattcctctcctgcaggggctccctgtctgcagctacctaaatctsggagagcttaagggagctactagaaataaacatgaagcatcagaggtgctaggctggctaaggctcctctttaaattgttaaccttttaacagcagtcaa

SEQ ID NO: 538277 - DNA, 201 bp, Homo sapiens
aggagaatcgcttgaacctgggaggcagaggctgcagtgagccaagattgagccactgcactccagcctgggcgacagagcaagactctgtctcaaaaaawaataataataataataataataataaataaataaaccacagtgagaggacaggcattactggaatagagtaaggacctctgaaaattcattccttcttaa

SEQ ID NO: 538278 - DNA, 201 bp, Homo sapiens
gttcttgtgatagtgagtgagttctcatgagatatgatggttttataagcatctggcatttcccctgcttgcactcaactccctcctgccacctagtgaargtgcctgcttctcctttgccttctgccatgattgtaagttttctgaggcttccccagcaatgtagatctgtgagtcaattaaacctctttcctttaaaat

SEQ ID NO: 538279 - DNA, 201 bp, Homo sapiens
aacatgaaggagaaatatagactttcccagacaaacaaaagtggacggatttaataaatgtcacacttgtcctacaagggaaaaaaaaaggaattaaaaarttaatttaaaaattaaaaaaaaattaatgagcagtaagaaatatctgaagcctcaaaattcactggtaatagtaagtatacagaaaaagacagaatgtca

SEQ ID NO: 538280 - DNA, 201 bp, Homo sapiens
gcagttgtatgtgtggtaagcactggaatctatttcaagatgatctgctttagttaaagatttatactatgaacacagaataaatttctctcattgaagayaaccagaagtcaaacccactatgttgctaacaactgattcaactaaaggacatcttaataaagatgcaaaattaaatataaatgtaaggtcagtataggt

SEQ ID NO: 538281 - DNA, 201 bp, Homo sapiens
atccaacggctgcagaatacacattcttctcagcacatggatcattctcaaggagagaccatatattaggccacaaaacaagtcttaaaaaattcaaaaawaaaaaaaaaaaaaaaagaaatgatgtcaagtatcttctgtgaccacaatggaataaaactagaaatcagtaactggaggaattttggaaactacacaaat

SEQ ID NO: 538282 - DNA, 201 bp, Homo sapiens
agtgtctcactatgttgcccaagctggtctcaaactcctggcctcaagcgatcatcccaccttagcctcccaaagtgctaggattacaggcgtgagcccarttgttttacaacaaactgtccataatcatggtgaaaaccagcagcctggaagtcactgaagtgaacagaactatacagaagctcctcaaaagcctcaatc

SEQ ID NO: 538283 - DNA, 201 bp, Homo sapiens
atataaaaaggatccttgttaagattgataactgacttcttttcaaaatctaggaagtccacaaacagtaagaagacatattcaaagtgctgaaaaaaaamaacctgtcaaccaagaattctatttccagtaaaattatccttcaaaatacaaaggagaaatgaagacatttccaaatttaaaaaaaaaaaagtgataatt

SEQ ID NO: 538284 - DNA, 201 bp, Homo sapiens
aacggctgcagaatacacattcttctcagcacatggatcattctcaaggagagaccatatattaggccacaaaacaagtcttaaaaaattcaaaaataaawaaaaaaaaaaaagaaatgatgtcaagtatcttctgtgaccacaatggaataaaactagaaatcagtaactggaggaattttggaaactacacaaatacat

SEQ ID NO: 538285 - DNA, 201 bp, Homo sapiens
atgctcttcatgagaaaaaaaatacatacacacatacaaccataccatgtgactctatttatatatagctaaagaacaagcaaaactaatctaccatcataaaaaaaaaaaaaaaaaaaaaaaggaacagtgatttccagggcagggtaaaggggtaggaacacaagagaacatttgggatgattaatgtaatcttggtgg

SEQ ID NO: 538286 - DNA, 201 bp, Homo sapiens
ccatcattctcagaaaactaacacaggtacagaaaaccaaacactgtatgttctcactcataagtgggagttgaacaatgagaacacatggacacagggaggggaacaacacacactggggcctgtcagggggtagggggctaggggaggaatagcattaggagaagtatctaatgtagatgaccggttgatgggtgcagc

SEQ ID NO: 538287 - DNA, 201 bp, Homo sapiens
tgggtgacagagcgagactctgtctcaaaaaaaaaaaaaaaaatcactgtcatattaacaacaaaaaagcaaataaaacagttgattaggttttttttttwaaaaaaaaaaagtaaggctgagagtacagattacaccttggagagcaacctcaagttttaagaaatgccaaagtagtggcatatccaggacaccaaatta

SEQ ID NO: 538288 - DNA, 201 bp, Homo sapiens
gctgatagaacacttggaaagtgtataacgccgtatctggcagatagcaggggtgtaattacataccagctttagatatttgttgtcactattgttgttgytgtgactgaaagttccttgcctgcctacctttcacttgatcttcagttttttagcagagatggtgcttcttgaaagatcccttccctgaccttttgtaga

SEQ ID NO: 538289 - DNA, 201 bp, Homo sapiens
gtctataagtcaagcactatgctctaaaacttctatccaaagtatatatgtataaaggagaagtgaggcatcagtgcaattcacattttaaatgtgttagcaaacaaacaaacaaaaacatgataaaatacatcaacaagctttatttcatgaatagcaacattaatataggcaaaagcaatacagaagaatgcattttgt

SEQ ID NO: 538290 - DNA, 201 bp, Homo sapiens; identical to SEQ ID NO: 120247

SEQ ID NO: 538291 - DNA, 201 bp, Homo sapiens
ggctggtctcaaacttctgacctcaggtgatccgcccacctcggtctcccaaaatgctgggactacaggtgtgagctactgcacctggcccgcatcagcattttttttttctttttttttgagacagagtctcgctctgtcaccaggctggagtgcagtggcgccatctcggctcactgcaacctccacctcccgggttca

SEQ ID NO: 538292 - DNA, 201 bp, Homo sapiens
cctgcctactctatcttgtgaaacttccttgcggtatttacaggtatttaatcagtacggttagttcctactctgtttactgttgtctccatgtgatttgyttcaaaatgaaaatattttttacctgcataccacatgcttgttgtaaaaagccaaagaacagaacaggaaggtttccccactgactcactctcttgcttc

SEQ ID NO: 538293 - DNA, 201 bp, Homo sapiens
tgttaaatatctatactgaagttttcagaaaagtcagtctatgaataaatgaagaagaaaagataaagcaacaagaaaagaaggaaagaacataaaaagtrcaaacaacagagaaacagggagcagtagagggcaagaaaacaagtatgactacaactgaatttacactgctcatgtcctctgagtcctttcctgggtctg

SEQ ID NO: 538294 - DNA, 201 bp, Homo sapiens
caatacaactaccttttactgttatatgagctactctctttctactttaaaaatcaatcttgtatagacctggagtacacagtcatgggctagagtgtgayagaacttgcctgatcaatgtaaaaggctgtgcctgcacggatctctcgtcgctgtttgagatcagtttcagtggtgtcccttgacagggcaatgtattcg

SEQ ID NO: 538295 - DNA, 201 bp, Homo sapiens
tctataagtcaagcactatgctctaaaacttctatccaaagtatatatgtataaaggagaagtgaggcatcagtgcaattcacattttaaatgtgttagcaaacaaacaaacaaaaacatgataaaatacatcaacaagctttatttcatgaatagcaacattaatataggcaaaagcaatacagaagaatgcattttgtt

SEQ ID NO: 538296 - DNA, 201 bp, Homo sapiens
taatgcacatataactgtcttataggaaattaaattgcttgtagcaaaagtagaatatcaaagtacatatagagtatgacttcaaccaggtttaaaaaatrcgcatttctaccacatatataaacccaacagtttcagaaagtatttaagttgagttgcaaaaatatgcttaatataatgtattataaaattaaacataag

SEQ ID NO: 538297 - DNA, 201 bp, Homo sapiens
cataaaacattatgttagttggtaatctgtacctaagatactctcccaccagagaaaaagctatagtttctggaagtgtatactctcactacctttaatamccctttacccaagtgacctatagattgaaaatactttaataaatatgctagagaatctcctatatcaaatctccttaattcattttttaataaatcaaat

SEQ ID NO: 538298 - DNA, 201 bp, Homo sapiens
tttagtttctagttttcctagcaccatttattaaatagggaatcctttccctattgtttgtttttgtcaggtttgtcaaagatcagatggttgtacatgtstggtgttatatctgaggcatctgttctgttccattggtctatatctctgttttggttactgtagacttgtagtacagtttgaagtcaggtagcatgatgc

SEQ ID NO: 538299 - DNA, 201 bp, Homo sapiens
accaccaggcgcagacgcttgggtttctgttgtgggctgccaagctgagggaaggaataacagaaaagccgtttgtgaactggcaaacttcccctggtggytgtcttggggatctcacagaagctccagcgtgccagccccgagatgggcagaccagccataggctcagccctgcacaaggctgtcctagcaggtagcaag

SEQ ID NO: 538300 - DNA, 201 bp, Homo sapiens
tgttttgtccaattctttgttcaagacaccaataacttggacaccctccaccgttaacatattttggtgaaccagccaggaggaagagtcaagcaggttcrctagggccgctcagggagagagaacctagaagcctggcatgctggcaaaagggtaaaaaaagctttttatggtttgaatcttctggaaacatcagagaaa

SEQ ID NO: 538301 - DNA, 201 bp, Homo sapiens
tgaaccagccaggaggaagagtcaagcaggttcgctagggccgctcagggagagagaacctagaagcctggcatgctggcaaaagggtaaaaaaagctttktatggtttgaatcttctggaaacatcagagaaagactgtccttgccatccacactacaacaaaacttcgggagcttgaactttgggttcatggtgttgca

SEQ ID NO: 538302 - DNA, 201 bp, Homo sapiens
cgccccaggtcagcatgaagcagttacagaaaaaaagaccatcggtccctctccttcccataaagatttatgaggatcacatctctaagtggggagatgaygcaggaaaatagagtctggaagcagggaacataggccgattcacactttagctataacaggaaatatcctctccatagggcatacaccgagtaaatgact

SEQ ID NO: 538303 - DNA, 201 bp, Homo sapiens
ttaagatgctatacttataaacaaacctttaagggaaaccaaatgttatcattgtgtgtaggtgagtgtcaaaaacaaatgttgaaaaattgcaaacaatwggcacagcactggtttactgcatggaaatgcacccttcctgctgcctcctcacagactcacactcagtattaacactcacacaagaacaaccgctaatta

SEQ ID NO: 538304 - DNA, 201 bp, Homo sapiens
agcgacaaattaagaatactaaatatcggttggtaaagctttctaattaaatttagggcacagctgatctgatatatatttacattatatatcactgataytgagctgcatggtaatcagaaacacacaaacaattcacataatgactgtaattaatcaggggtttctacaatcgaacataggcgggttggtcatttcctc

SEQ ID NO: 538305 - DNA, 201 bp, Homo sapiens
aatttaattcctttaggtctaccactgtctaaccttgaacacctcactttcattcagatccctggaaaacatccatgtatctcttacgattccatgtcaaytggaattatgttcttttgatttgtaactgagaaactctactgaaaataaaaacatcctgttaaaatgagaagcacaactcaagaaatggatcagagaaca

SEQ ID NO: 538306 - DNA, 201 bp, Homo sapiens
attatatatcactgatactgagctgcatggtaatcagaaacacacaaacaattcacataatgactgtaattaatcaggggtttctacaatcgaacataggygggttggtcatttcctcctttgtgttagttctccattttctttaaccatgtaaatctgtttgtttcccacttataccttgaaattcttactcctaaaaag

SEQ ID NO: 538307 - DNA, 201 bp, Homo sapiens
aaaactcctggtatgaatcattccagaaaaatatttgccatagagttacatcacacattaccttggaaaagtaaaaaaagaaacagaaaacacagtttagygcagtggttcaaaattaaagatacattatcagaaacaggtggggaacttttgaaacatatataaacttaagctccactatcctgaagattctgattcatc

SEQ ID NO: 538308 - DNA, 201 bp, Homo sapiens
tgtcatatcctaaaacaaatccccaccacccaacaaagaacatgacgaattaatttttaagacatgcaaggtagcttacatggctttatagagtcacctcygtctgaacttaacattccatatagtaacagagaagtcatcttctccaattcctaaaacgaaagctcttcagaaagcttttttttggtcattttaggattt

SEQ ID NO: 538309 - DNA, 201 bp, Homo sapiens
ctgctgtagcagatcacgcgctgtcatatcctaaaacaaatccccaccacccaacaaagaacatgacgaattaatttttaagacatgcaaggtagcttacrtggctttatagagtcacctccgtctgaacttaacattccatatagtaacagagaagtcatcttctccaattcctaaaacgaaagctcttcagaaagcttt

SEQ ID NO: 538310 - DNA, 201 bp, Homo sapiens
gcgggcggatcacgaggtcaggagatcgagaccatcctggctaacaaggtgaaaccctgtctctactaaaaaatacaaaaaattagctgggtgtggtggcrggcgcctgtgttcctggctacttgggaggctgaggcaggagaatggcatggacctgggaggcggagcttgcaatgagccgagattgcgccaccgcactcc

SEQ ID NO: 538311 - DNA, 201 bp, Homo sapiens
ctataagtcaagcactatgctctaaaacttctatccaaagtatatatgtataaaggagaagtgaggcatcagtgcaattcacattttaaatgtgttagcaaacaaacaaacaaaaacatgataaaatacatcaacaagctttatttcatgaatagcaacattaatataggcaaaagcaatacagaagaatgcattttgttt

SEQ ID NO: 538312 - DNA, 201 bp, Homo sapiens
tataagtcaagcactatgctctaaaacttctatccaaagtatatatgtataaaggagaagtgaggcatcagtgcaattcacattttaaatgtgttagcaaacaaacaaacaaaaacatgataaaatacatcaacaagctttatttcatgaatagcaacattaatataggcaaaagcaatacagaagaatgcattttgttta

SEQ ID NO: 538313 - DNA, 201 bp, Homo sapiens
tattgcaaaattgctttgattcatccttctgaaaatataaactgttccatgacccgtgattcacatgcaaataatgtgccaaagccgactgctattaaccraagttatgatatgcgaaggatctctaacttgcctccctaaacactcaaccaaccatttaccagtctaaaagaatttgataatgtatacctcggaagtaaa

SEQ ID NO: 538314 - DNA, 201 bp, Homo sapiens
acaagctttatttcatgaatagcaacattaatataggcaaaagcaatacagaagaatgcattttgtttaagatcattcaaagtatccatagagtaaaatctttttttttttttgtttttgagatggagtctcactctgtcacctgggctggagtgcagtggtgcaagctcagctcactgcaagctccgcctcccgggttca

SEQ ID NO: 538315 - DNA, 201 bp, Homo sapiens
ataaagttaatattaaagcaggtaaaaatagtaaagaaaagctgacaacagaggtcatttaaaaataatctaaaattttcaggctaggcacggtggctcaygcctgtaatcccagcactttgggaggccaaggtaggcggatcacctgaggccaggagttcaagaccagcccggccaacatggtgaaaccccatctctact

SEQ ID NO: 538316 - DNA, 201 bp, Homo sapiens
ttagagctgaccgacatcatccttctaataaataatctagaaaaagggcagactatacaaattcatggtaacttgacaattggctgtccattttttttttwaaaaaagtaaaattcatacctcacatttctgaaagacagtacattcaaactgagtaactgaggagagtacaaaaagggaactatttacaaaggtatagca

SEQ ID NO: 538317 - DNA, 201 bp, Homo sapiens
tgaccgacatcatccttctaataaataatctagaaaaagggcagactatacaaattcatggtaacttgacaattggctgtccattttttttttaaaaaaartaaaattcatacctcacatttctgaaagacagtacattcaaactgagtaactgaggagagtacaaaaagggaactatttacaaaggtatagcagagttta

SEQ ID NO: 538318 - DNA, 201 bp, Homo sapiens
tgtgtccgacccaaatcttgtcttgaattctagctcccataatccccatgtgtcatgggagggacccagtgggaggtaattgaatcatgggggcaggtttytcctgtgctgttctcgtggtagtgaaaaagtctcacgaggtctgatggttctataaaggggagtttctgtacacaagctctcttacttgccgctatgtaa

SEQ ID NO: 538319 - DNA, 201 bp, Homo sapiens
aatatacgtgaaacaacatgaacatctgcaactgaatcataaagtgctttagaagagtcagactatgatggtgcataagttttaaaaatatttcaaaatattttttattgttatatttatttataaatttattatatttatttttattttatatatattttcctatttattatattcatattttcctttttctgcatgcac

SEQ ID NO: 538320 - DNA, 201 bp, Homo sapiens
aaaactgccataaagcccagcaacagatgttggatgtatccttgatcctcttctctcctagttaggacaaaaaaaggtaggagagaaagagcctggtttgrctacccaaaattaaagctgcagatgtagtttctcacttaagatagtgaaggataccaaatcagggaataaacaaagtcaaaatacaacaggcaagccaaa

SEQ ID NO: 538321 - DNA, 201 bp, Homo sapiens
aaacactgctagctcagaaggtcaactaaaactggattaatagagttacccttacctgagtttcctctctgaaagcaggacaggtatctaaatttaccaaytgggtctagaagcaaagaagctcttaaatctgtcttggtcttggaaagggctagaggaatgtcagagaaggtttcacagaggacatcacttttgaaggaa

SEQ ID NO: 538322 - DNA, 201 bp, Homo sapiens
gtttgagcctggaaggcggaggttgcagcaagctaagattgtgccgttgcactccagcctgggtgacatagccaggccttgtctcaaaaaaatgaaaattaaaaaaaaaaaaaaaagaaagaaacttccacaaaaccttcccattataatagcatctcccaattcaatctattgtctaaatcatatatttgttggatatct

SEQ ID NO: 538323 - DNA, 201 bp, Homo sapiens
caaataatattacaaatacttatgatcctcttatagcattctcccactatataggcaaggaatttgaaatgacatttaatgaaaatgtcacttcaaattaraaatttcattctgctaactctttaggcactgtgatggttaattttatgtgtcaacttgactgggctgtgggatgctcagatatttggttaaatagtattc

SEQ ID NO: 538324 - DNA, 201 bp, Homo sapiens
ttgaaactggaaccaatcctttcaccatatacaaaaattgcttcaaaataggttagagacttaaatctaagacctaaaacataaaaacctagaagaaaacytaggacatactgttctgaatatgggccttggcaaagaatttatgactaagaccacaaaagaacttgcaacaaaaccaaaaattgacaagtgagacctaat

SEQ ID NO: 538325 - DNA, 201 bp, Homo sapiens
aaaaagatgcttagcatcagtagtcattagggaactgcaaatcaaaaccacagtgaattaccacttcgcagccattaggatgatgattataaaaaaaaaaraaaaaaagaaagaaaagtgttagggaggatgtagaataattggaaccattgtgcattgttggtgggaatgaaaatggtgcagctgctatggaaaacagtt

SEQ ID NO: 538326 - DNA, 201 bp, Homo sapiens
gtctgggcgcagtggctcacacctgcaatcccagcactgcgaaaaacaaaacaaaacaaaaaaactatatgaaaggtatgattacagtctaaatttttttwaaacaaacagaatggaacttacatatggagatactattttttttttttctttttgagatgaagtcttgctctgtcacacaggctggagtgcagtggtgca

SEQ ID NO: 538327 - DNA, 201 bp, Homo sapiens
agatgcttagcatcagtagtcattagggaactgcaaatcaaaaccacagtgaattaccacttcgcagccattaggatgatgattataaaaaaaaaaaaaaraaagaaagaaaagtgttagggaggatgtagaataattggaaccattgtgcattgttggtgggaatgaaaatggtgcagctgctatggaaaacagtttatt

SEQ ID NO: 538328 - DNA, 201 bp, Homo sapiens
cagtagtcattagggaactgcaaatcaaaaccacagtgaattaccacttcgcagccattaggatgatgattataaaaaaaaaaaaaaaaaagaaagaaaartgttagggaggatgtagaataattggaaccattgtgcattgttggtgggaatgaaaatggtgcagctgctatggaaaacagtttattggctccttaaaaa

SEQ ID NO: 538329 - DNA, 201 bp, Homo sapiens
aggcagaagaattgcttgaacccggggtgggcagaggttgcagtgagccgagattgtgccattgcattgcagcctgggcaaaagagtgaaactccatctcaaaaaaaaaaaaaaaaaaaaggctaatgtggtaaactttatgttatatatattttgtcaccatttaaaaaataatctattcagtgaatatataattagctc

SEQ ID NO: 538330 - DNA, 201 bp, Homo sapiens
aatcgcttgaacccaggaggcggaggttgcagtgagccaagattgcgccactgcactgcagcctgggcaacagagcgagactctgtcccaaaaaaaaaaawatatatatatatatatgtgtgtgtgtgtgcgcgtgtgtgtgtgtatatgtgtgtgtgtgtgtgtaaaacatgcatgtttttctcaaaatatcagtaactt

SEQ ID NO: 538331 - DNA, 201 bp, Homo sapiens
ggaggcggaggttgcagtgagccaagattgcgccactgcactgcagcctgggcaacagagcgagactctgtcccaaaaaaaaaaatatatatatatatatrtgtgtgtgtgtgtgcgcgtgtgtgtgtgtatatgtgtgtgtgtgtgtgtaaaacatgcatgtttttctcaaaatatcagtaacttaaagtatataactgc

SEQ ID NO: 538332 - DNA, 201 bp, Homo sapiens
agaaacaaactgaactttcagcaaacttatgatggccacgcatgggcagacataatgtaccgagaagtcctagccacatagaaaacctgcatccacccacytactccttcccaacagtccttacaagtacacagggatgtacactacagaccaaatacagggcaggagctgagacatattcctcctgaagcatgctggacc

SEQ ID NO: 538333 - DNA, 201 bp, Homo sapiens
gcagtgagccaagattgcgccactgcactgcagcctgggcaacagagcgagactctgtcccaaaaaaaaaaatatatatatatatatatgtgtgtgtgtgygcgcgtgtgtgtgtgtatatgtgtgtgtgtgtgtgtaaaacatgcatgtttttctcaaaatatcagtaacttaaagtatataactgccacttaaaagcct

SEQ ID NO: 538334 - DNA, 201 bp, Homo sapiens
ttttatttccaaactaacaaccagaataaaccagctaatctataaaaatcacagttttctaaaactcatcacacagctaacaaaacaaagaagcctacatsaactaaattctagaaaagactgagccttttcaaggaaagaatagacccgcagctaactttcacccctggtagaatggcaggaggagaaacaatctgcata

SEQ ID NO: 538335 - DNA, 201 bp, Homo sapiens
ctagttcttactacctctttcatctatgaagctgacataagtaaccaaaaatctctctagttaacatgatcataaatttagaaaattatcataaagaaaaytatatagtaacagaaataagaacatatcaactaaatgtacattatctctatgtgattttcatgctcgtacaatgatgtgcactggattatacgaaatagt

SEQ ID NO: 538336 - DNA, 201 bp, Homo sapiens
gtcagtcgtagaaactagccatgaatgtctaagatatggtataagataagactgctggaataaaaatatccaaggagccaagaggccagagagtgggaagsgtcacatatgtgtatactgcaatcactccaaaagaagagtagggttggagagaatgaaagcgagtaaagggctaaagatcaataagaagtgacaaggatg

SEQ ID NO: 538337 - DNA, 201 bp, Homo sapiens
tgttgagaccagtgtcaggaaggaaggatggaagcagggagtgcagttaggaggttcctacagcaacctcggcatgtgatgctggtggcttgggtcatcaraacaggatatcctttaaatattttattcatttctgtcaatacctactggacctttagcttcctgaagctaaaaactggactttcttcagctttgtatccc

SEQ ID NO: 538338 - DNA, 201 bp, Homo sapiens; identical to SEQ ID NO: 20452

SEQ ID NO: 538339 - DNA, 201 bp, Homo sapiens
aagtgataattcaccactagcaaacctgccatctagaagatacttactaaagggcatccttcctttaagctgaaatgaaagcacactagacagtaactcamatccacatgaagaaataaagattatcagtaaagggaactacatagataaataataatgacaacgtaagcctatttttgtttgtaactcttttcttctacc

SEQ ID NO: 538340 - DNA, 201 bp, Homo sapiens
tatgaaaagtaaaaggggtggaataacaaaaacgtaggccctttgtgctttaggcagggatttttttttttttttttaagattactttcactggtgttttrtgtttcttacaggtattttaaacacagaaaaaccatgagctctttctgtttgtaattcaaaaagataaatgttattgtgttcaagttatgaaagtgtttc

SEQ ID NO: 538341 - DNA, 201 bp, Homo sapiens
tataaatacaccattctcattctcctgtgtgccactaactacgggctacacaggatcagaagataaatatgtgatttaaaaagtcaagagaaatgccagcrgaaccctagtgttagttacgtaataacctatagcattagctggctaacctttcttcagatcatgtaagtcaacgtgaaaagaataatgtactgaaaggtc

SEQ ID NO: 538342 - DNA, 201 bp, Homo sapiens
ctgatctggaaaaaggaatccaagtgaagctaagagaccacaaaaataaagcaggagggatgacactgcacattgtaatgttctttactgttgaaaaagtrtgctcacactactcattattttatacctgctcttacctctgtcaccacataggcaggttatgaggatacactatgagcaaaagttcttaaacaaacatgc

SEQ ID NO: 538343 - DNA, 201 bp, Homo sapiens
cttcttatcaacatcacagctggtcagaagaacaatagacatataattatttcaggttacttcctagcaagaagtagaaaataagagtttgttaacttacyactttctgagtatttcctatgaattcttgaatttcaattaaacagtattaacattttcttttttatttttttaaatttattattatactttaagttttag

SEQ ID NO: 538344 - DNA, 201 bp, Homo sapiens
aatagtgccgcaataaacatacatgtgcatgtgtctttatagcagcatgatttatagtcctttgggtatatacccagtaatgggatggctgggtcaaatgstatttctagctctagatccctgagaaatcgccacactgacttctacaatggttgaactagtttacagtcccaccaacagtgtagaagtgttcctatttct

SEQ ID NO: 538345 - DNA, 201 bp, Homo sapiens
gtgcatgtgtctttatagcagcatgatttatagtcctttgggtatatacccagtaatgggatggctgggtcaaatggtatttctagctctagatccctgaraaatcgccacactgacttctacaatggttgaactagtttacagtcccaccaacagtgtagaagtgttcctatttctccacatcctctgcagcacctgttg

SEQ ID NO: 538346 - DNA, 201 bp, Homo sapiens
acaatggttgaactagtttacagtcccaccaacagtgtagaagtgttcctatttctccacatcctctgcagcacctgttgtttcctgactttttaatgatygccattctaactggtgtgagatggtatctcattgtggttttgatctgcatttctctgatggccagtgatgatgagcattttttcatgtgtcttttggctg

SEQ ID NO: 538347 - DNA, 201 bp, Homo sapiens
ctaacatcacaattaaaagaactagaaaagcaagagcaaatatattcaaaagctagcagaaggcaagaaataactaaaatcagagcagaactgaaggaaaytgagacacaaaaaaatccttcaaaaaattaatgaatccaggagctggttttttgaaaggatcaacaaaattgacagaccgctagcaagactaataaagaa

SEQ ID NO: 538348 - DNA, 201 bp, Homo sapiens
agcagcatatcaaaaagcttattcaccatgatcaagtgggcttcatccctgggatgcaaggctggttcaatatatgcaaatcaataaatgtaatccagcayataaacagagccaaagacaaaaaccacatgattatctcaatagatgcagaaaaggcctttgacaaaattcaacaacgcttcatgctaaaaactctcaata

SEQ ID NO: 538349 - DNA, 201 bp, Homo sapiens
caaatcaataaatgtaatccagcatataaacagagccaaagacaaaaaccacatgattatctcaatagatgcagaaaaggcctttgacaaaattcaacaaygcttcatgctaaaaactctcaataaattaggtattgatgggacgtatctcaaaataataagagctatctatgacaaacccacagccaatatcatactgaa

SEQ ID NO: 538350 - DNA, 201 bp, Homo sapiens
agcagcctggaagtcactgaagtgaacagaactatacagaagctcctcaaaagcctcaatcccaaaaaattatccctacttgacctgtctggcagctccckgaaatgctccatttttagaatttgtctttatttgatgtactcagagctactgtatgcaaacagcactaactcggggcatttgtcaaaaaaaatcaacaat

SEQ ID NO: 538351 - DNA, 201 bp, Homo sapiens
tgtaaaaaaattcccccttctaaaacatctgacttatatctctttttagctatatgtagtgggtggccaattatctttccatccccatcctgagtgtgggyatgatcatcttgttctagtttcagtgtaactttactcccatcaataagcactgcggttggattagagaacatgaaaattaagttgtagcaagaactgttc

SEQ ID NO: 538352 - DNA, 201 bp, Homo sapiens
caacattgcccaggctggagtgcagtggcgtgatctcggctcgctgcaacctccacctcccagccgcctgccttggcctcccaaagtgccgagattgcagyctctacccggccgccaccccgtctgggaagtgaggagcgtctctgcctggccgcccatcgtctgggatgtgaggagcccctccgactggccgcccagtct

SEQ ID NO: 538353 - DNA, 201 bp, Homo sapiens
ggcaggtggatcacatgaggtcaggagttcgagaccagcctggccaacatggtgaaaccccatctctactaaaaatacaaaaattaaccaggctcagtggyacatgcctgtaatccctactactggggaggctgaagcagaagaatcgcttgaacccgggtggcggaagttgtagtgggccgagatcatgccactgcactc

SEQ ID NO: 538354 - DNA, 201 bp, Homo sapiens
cttcccagtaggggcggctgggcagagggctcctcacttcccagtaggggcggccgggcagaggcgcccctcacctcccggacggggcggctggccgggckgggggctgacccccccacctccctcctggacggggcgactggctgggcagaggagctcctcacttcccagtaggggcggccgggcagaggtgcccctcac

SEQ ID NO: 538355 - DNA, 201 bp, Homo sapiens
catgatctctgaaacatgtgctgtgtccacccagggttaaatggattaagggcggtgcaagatgtgctttgttaaacagatgcttgaaggcagcatgctcsttaagagtcatcaccactccctaatctcaagtacccagggacacaaacactgaggaaggccgcagggtcctctgtctaggaaaaccagagacccttgttc

SEQ ID NO: 538356 - DNA, 201 bp, Homo sapiens
tcacatcccagacggggcggcagggcagaggctctccccacatctcagacgatgggcggccgggcagagacgctcctcacttcctagatgggatggcgacygggaagaggcgctcgtcacttcctagatgggatggcggccgggcagagacgctcctcactttccagactgggcagccaggcagaggggctcctcacgtcc

SEQ ID NO: 538357 - DNA, 201 bp, Homo sapiens
gtgtccacccagggttaaatggattaagggcggtgcaagatgtgctttgttaaacagatgcttgaaggcagcatgctcgttaagagtcatcaccactccckaatctcaagtacccagggacacaaacactgaggaaggccgcagggtcctctgtctaggaaaaccagagacccttgttcacatgtttatctgctgaccttc

SEQ ID NO: 538358 - DNA, 201 bp, Homo sapiens
tatctaaatatcaacttggagggaaacagttttacaatactaaatcttccatttatttgtcttcttttataactttgaataaagatgtatacttttctccwttaaagcattacatgatatttattagattattcttagttgtgcaaagctttctactattattttgaatgaaatttttaaaaattatatttccttattgat

SEQ ID NO: 538359 - DNA, 201 bp, Homo sapiens
ccatgctgttctcatgatagtgagttctcatgagatctgatggctttataaagggcttttcccctccttcactctgcacttttctctcctgccaccatgtraaggacgtgtttgcttcctcttccaccacgattgtaagtttcctgaggcctccatagccttgcagaactgtgagtcaattaaacctcttttctttataaa

SEQ ID NO: 538360 - DNA, 201 bp, Homo sapiens
tgttcacatgtttatctgctgaccttccctccactattgtcctatgaccctgccaaatccccctctccgagaaacacccaagaatgatcaataaatactaaaaaaaaaaaaaaaaaaaaaaaagaaacaggccgggcgcggtggctcacgtctgtggtcccagcactttgggaggccgaggctggcagatcacaaggtcgg

SEQ ID NO: 538361 - DNA, 201 bp, Homo sapiens
ttatttgtgcaaactgaccacagagcacaatttctaatttgaaatctccaaacaatagtcatgcttaggaaatactgaagtgtcttaatattttcaggagsagtagcagtaccaacttgttcctcagcattgagagctttgtgaaactgcaaaagggcaggcaatgtgaaagcaaggggagggcagaaagaggaggagaca

SEQ ID NO: 538362 - DNA, 201 bp, Homo sapiens
ccagtctcaggtatttcttcatagcagcgggagaacgaactgatacacacactgaagtatttaagagtactgactgcaatttacttccaaatggttcaggaaaaaaaaaaaagaaaaaagcacatgcaaacaaatgtggcaatatattaataatgggtgattgtaggtgaggggattatgaatgttttactgtttttcaac

SEQ ID NO: 538363 - DNA, 201 bp, Homo sapiens
gttcacatgtttatctgctgaccttccctccactattgtcctatgaccctgccaaatccccctctccgagaaacacccaagaatgatcaataaatactaaaaaaaaaaaaaaaaaaaaaaaagaaacaggccgggcgcggtggctcacgtctgtggtcccagcactttgggaggccgaggctggcagatcacaaggtcggg

SEQ ID NO: 538364 - DNA, 201 bp, Homo sapiens
gtaaaattaatttttctttctctgacaatagcttgtttttcaactgcttctctgcttttaggatttttttttttttaatttttgaaatgttaaaattccaygaagctgtgttgagtgcttctctctttgttaattttgcatggtacttagtaaagtccttttgatccatagacttaggcctttcttcagctgggtacggtt

SEQ ID NO: 538365 - DNA, 201 bp, Homo sapiens
tcctgaatgaccagtgagtcaatgaagaaattaagaagaaaactgaaaaatttattgaaacaaatgaaaatggaaacacaccaatcctataggatatagcraaaacagtataataaaagaaaagtctatagccataaaagcctacatcaaaaaagtagaaaaacttcaaataacctaacaatgtatcttggaaaactagaa

SEQ ID NO: 538366 - DNA, 201 bp, Homo sapiens
aagtataagatttgataaacaggaggagaaattctgttctggatgtatagaacaatgtcaacaatacctaggctccctgactcacatgaaacatacatatatacatacatacatacatacatacatacatacatacaagtttaaaaataagtctcttgcctaagatagtattcccactatcttggatggtgccctcctcca

SEQ ID NO: 538367 - DNA, 201 bp, Homo sapiens
ctgaccttccctccactattgtcctatgaccctgccaaatccccctctccgagaaacacccaagaatgatcaataaatactaaaaaaaaaaaaaaaaaaaraaaagaaacaggccgggcgcggtggctcacgtctgtggtcccagcactttgggaggccgaggctggcagatcacaaggtcgggagttcgagaccggcctg

SEQ ID NO: 538368 - DNA, 201 bp, Homo sapiens
aacagtataataaaagaaaagtctatagccataaaagcctacatcaaaaaagtagaaaaacttcaaataacctaacaatgtatcttggaaaactagaaatrcaggagcaaaccaaacccaaaattagtacaagaaaagagataataaacatcagagcagaaacaaataaaatttaaattaaacatgcaaaggataggctgg

SEQ ID NO: 538369 - DNA, 201 bp, Homo sapiens
agtataagatttgataaacaggaggagaaattctgttctggatgtatagaacaatgtcaacaatacctaggctccctgactcacatgaaacatacatatatacatacatacatacatacatacatacatacatacaagtttaaaaataagtctcttgcctaagatagtattcccactatcttggatggtgccctcctccac

SEQ ID NO: 538370 - DNA, 201 bp, Homo sapiens
aaaaaaaaaaaaaaaagaaacaggccgggcgcggtggctcacgtctgtggtcccagcactttgggaggccgaggctggcagatcacaaggtcgggagttcragaccggcctggccggcatggtggaaccctgtctctactaaaaatacaaaaaattagctgggtatggtgacatgcgcctgtgatctcagctgctcggagg

SEQ ID NO: 538371 - DNA, 201 bp, Homo sapiens
gtataagatttgataaacaggaggagaaattctgttctggatgtatagaacaatgtcaacaatacctaggctccctgactcacatgaaacatacatatatacatacatacatacatacatacatacatacatacaagtttaaaaataagtctcttgcctaagatagtattcccactatcttggatggtgccctcctccaca

SEQ ID NO: 538372 - DNA, 201 bp, Homo sapiens
gacttaacaatattttcctttttaaataaatgccagaatttgaggggaaagagttcctcctctcaaatgttagagcagtgcctagatcctggtgtcagtgwttgccactgctttctgaaatctcctgcctttaatatgagtaccagatcgaacagtttaaaaatgctagttatgtaaaggagcgtgttaaatatctatact

SEQ ID NO: 538373 - DNA, 201 bp, Homo sapiens
tataagatttgataaacaggaggagaaattctgttctggatgtatagaacaatgtcaacaatacctaggctccctgactcacatgaaacatacatatatacatacatacatacatacatacatacatacatacaagtttaaaaataagtctcttgcctaagatagtattcccactatcttggatggtgccctcctccacag

SEQ ID NO: 538374 - DNA, 201 bp, Homo sapiens
ggaaggaagttactacttatttggcttccctattcaattagggacagtagatgacagaagctatgagttggaaggacgttaaggactatttaattcattgytctaagtctgaatcctctcaagtgcctccccaaaaaggtttgtccagatctgtttgaacccaatctacagaaagtacaccttctctttgtcctcagtagt

SEQ ID NO: 538375 - DNA, 201 bp, Homo sapiens
cctaactattatcttaaacaattcaaaaacattacactatatagaaaattagaataatgagcaaagaaatggagcattaggatgcaaatacactataagcraagcaagattctttgctgcagaaatgactacacttccaataagatttacaaaggcaagattcccccaaggggaagaatttgggtttaaatttgttgggaa

SEQ ID NO: 538376 - DNA, 201 bp, Homo sapiens
attaccaaagggaagcaaataatgaagtcttgttcatacctcatgcttctgaacatattgtttaaactgccaaaaatgttctatccactcctgagccactkgaaaaatcctatgttattcttgcaggcttagctcaagcttcatcttctctctgaagctttccctattccgtctcctgaatcccagtattactttcttctc

SEQ ID NO: 538377 - DNA, 201 bp, Homo sapiens
aatgtcagaagatgtactttttattttaatcactactccaatattactttctaaagaagtcatatgaactcatatttctcccagcaatgtatgaaaatgcyatttccctgaaactatataggtattggacattacgatattttttaattttggcccaagtgatgtatgaaagtttgctatcttgctatataatttccatct

SEQ ID NO: 538378 - DNA, 201 bp, Homo sapiens
atactcaaagcataaagctgacaaaacatatgcaagacctgtacactgaaaacaatacaacattgctgagagaaattaaagatctaaatagagaaatataycttgttcatgagttggaagtttcaataatattaagatagcaattatctccaaaatgatctacagatttaatgcaatccccattaaaaatcccagcaggct

SEQ ID NO: 538379 - DNA, 201 bp, Homo sapiens
cccctcaagcaattaagaggttaaaggtaactacttcaactctgcttactacatcttttactatttacctccatatttctaagtaatattcttatgtctcyttatttttcaatttcagacattgtctattgacttcctattatgaaaggtaaggattatttttcctctcccacctcaaacacacatcactcatttttttct

SEQ ID NO: 538380 - DNA, 201 bp, Homo sapiens
caacttgattagattgaaggatgcaaagtattgatcctgggtgtgtctgtgggggtgttgccaaaggagataaacacttgagtcagtgggctggggaaggmagacccacccttaatctggtgggcatcatctaatcagctgccagccaatataaagcaggcagaaaaacatgaaaaggcaagacgggtctagcctcccagc

SEQ ID NO: 538381 - DNA, 201 bp, Homo sapiens
ttataacaataaaaaagtgccattctacttggtatagaatcatgatttttcaggatctacacaacccagtttaaaaaaaagaaaaagaatgagatagttcyatctttactgcttaagtcagagtggggtgtgtgtctgtgtgtgatttttgtgactcatacccacctttgcaatacagcaagcgtgcccgcattcacccgg

SEQ ID NO: 538382 - DNA, 201 bp, Homo sapiens
cttttaagtgtattttttgttattgctatgaattctgttgcttcttggttggagaatgtgatcttcatgacaaatattctttgctatttactgaaaaaccratttttttctttttttcttttttgagacagagtcttgctctgtcatccaggctagagtgtaatggtgtgatcttggctcactgcaacctccactgcccgg

SEQ ID NO: 538383 - DNA, 201 bp, Homo sapiens
atcttggctcactgcaacctccactgcccgggttcaagtgattctcctgcatcagcctcccaggcagctgggattacaggcacgtgccaccacacccaagyatttttttttttttttttggtatttttagtagacacagggtttcaccgtcttggccaagctggtcttgaacttctgacctcatgatccacccacctcggc

SEQ ID NO: 538384 - DNA, 201 bp, Homo sapiens
atattcattgtccactgggtataaagtccattatatcaagtttgttaatggttttggtaaatctctatctttactaactcttagaatatatgatctgtcastttctgaaaaaagtgagttttgaaaactctcattataactgttgatttgtcaatttctcctgtcttcaattctgattgtttctgtcatacagtgttcctt

SEQ ID NO: 538385 - DNA, 201 bp, Homo sapiens
gtactaagcctattttttttttttttccgacagagtctcgctccctcacccaggctggagtgcagtggtgcaatcctggctcaccacaatctcagcctccygggttcaagcgattctcctgcctcagcctcccgagtagctgggattacaggcgcatgccaccacgcccagctaatttttgtatttttagtagaaacgagg

SEQ ID NO: 538386 - DNA, 201 bp, Homo sapiens
tttcctggcagaagccctgattctctcagtctcagcaaccagtacacgcccgtccccttgaccctccttccgtgaccctgtgctccaatccatctcccaaytgcagctctccaaacacatgatgctgcttcaccaacactactccatcttcttggaacaacacccttttcactcgcacaccgtaaacacaagggtcagtca

SEQ ID NO: 538387 - DNA, 201 bp, Homo sapiens
tgtatgaacaagaaactcttgtaaatgaaagaggttagagagatttgatataactctctcgcactgttggaaaaaaattttttttgctattattacatgtwttacctttcctatgtaaggaaactagttaataaaaatgattaaacattttaaaatataagaaaagtacacttcaaattagtagaaattaggaatttggaa

SEQ ID NO: 538388 - DNA, 201 bp, Homo sapiens
ttcaaaaaaaaaaaaaaaaaaagaaacaagccaggcacggtggctgacgcctgtagacccagcactttgaggtgggcagatcacctgagattgggagctcragaccagcctggccaacataatgaagccccatctctactaaagatacaaaacaaaacaaaaattggccgggcatggtggtgcgtgcctgtggtaccagct

SEQ ID NO: 538389 - DNA, 201 bp, Homo sapiens
atctacagtattgactaaatttgtgtgaatgcacatttgtacactctgagagaaacgtccacggctttcagcaattcttcacagcccaaatgacaatatasaaactcttaagatggcacttaaggcctttcctggcagaagccctgattctctcagtctcagcaaccagtacacgcccgtccccttgaccctccttccgtg

SEQ ID NO: 538390 - DNA, 201 bp, Homo sapiens
ggtctcactgacttcaagaatgaagccgcagaccctcgcggtgtgtgttacagctcttaaggctgcgcgtctggagttgtttgttcctcccggtgggctcrtggtctcgctggcttcaggagtgaagctgcagaccttcgctgtgagtgttacagctcataaaagcagtgtggacccaaatagtgggcagtagcaagattt

SEQ ID NO: 538391 - DNA, 201 bp, Homo sapiens
ctgagattgggagctcaagaccagcctggccaacataatgaagccccatctctactaaagatacaaaacaaaacaaaaattggccgggcatggtggtgcgygcctgtggtaccagctacttgggaggctgaggcaggagactggcttgaacccgggaggaggaggtcgtagcgggccgagattgtgccactgcactctagc

SEQ ID NO: 538392 - DNA, 201 bp, Homo sapiens
tttaacagcaaaaaatcatttattgatacatttcattttctaaaagaaaagccagccttttaaaaaaaatccttcaaataatgccataataatttttcttyctagtttccagagcttttctttactctttattctcatatctttccatgacctactcaggaagacattcaaaactgcagtaacatttttatagcattgaag

SEQ ID NO: 538393 - DNA, 201 bp, Homo sapiens
caagatttattgcaaagagcgaaaaaacaaagcttccacactgtggaaggggacccgagcgggttgccactgctggctccggcagcctgcttttattctgytagctggcccccacccacatcctgctgattggtagagccgagtggtctgttttgacagggcgctgactggtgcgtttacaatccctgagctagacacaaa

SEQ ID NO: 538394 - DNA, 201 bp, Homo sapiens
tgagattgggagctcaagaccagcctggccaacataatgaagccccatctctactaaagatacaaaacaaaacaaaaattggccgggcatggtggtgcgtrcctgtggtaccagctacttgggaggctgaggcaggagactggcttgaacccgggaggaggaggtcgtagcgggccgagattgtgccactgcactctagcc

SEQ ID NO: 538395 - DNA, 201 bp, Homo sapiens
gaggcgggggaaggctcaggcatggcgggctgcagtcccgaggcctgccccgcgggaaggcagctaaggcccggcgagaaatcgagcgcagcgccggtggsctggcactgctgggggacccagtacaccctccacagccgctggcccgggtgctaagtccctcattgcccggggcctgcagggccggccggctgctccgag

SEQ ID NO: 538396 - DNA, 201 bp, Homo sapiens
agcctgagcaacggagcaagactccatctcaaaacaaacaaagaataagacctagtgttagctagcacaacagggtggctatagtttaaaaaaaaaaatawatatatatatatatatatacctctctctatatatacgtgtatatatatatacgtatatataaaatatatacacgtatatatatgtatatatataaaatat

SEQ ID NO: 538397 - DNA, 201 bp, Homo sapiens
aaatcagataactttgggcacacagtaaaccttaaaaaacaattagttgctgttactgttatgaatacaatcatcattgtcactgtcatcatgatcatcatttttttttttttttttttttacaagcagagtctcactttgttacccaggctggattgcaatgactcaatcatagctcactgtaaccttgaactcctggcc

SEQ ID NO: 538398 - DNA, 201 bp, Homo sapiens
acacacaaaaccctaggaatatacttaaccaaggaggtgaaagagctctacaaggaaaactacaaaacactgatgaaagaaatcatagatgacacaaacawatggaaacacatccaatgctcatagatgaggagaatcaatattgtgaaaatgaccatactgcccaaagcaatcaacaggttcagtgtaattcccatcaaa

SEQ ID NO: 538399 - DNA, 201 bp, Homo sapiens
tgaggcacgagaattgcttgtacccaggaggcagaggttgcagtgagccgagatcatgccactgcactccagcctgggtgacagaacaagactccatctcaaaaaaaaaaaaaaaaaaaaaaaaaatatatatatatatatatatacacacatatatatttgcatacatatatatgcaaatagaaaggagttcttctgagt

SEQ ID NO: 538400 - DNA, 201 bp, Homo sapiens
atttaatgttagtccactggaatctctaaagtcaccaatgacctcctgatttctaaaagtcaagtccacaaatccttttcaggtttatcttagtttaccastgagaggcatctgttcacatattctctcttcccatcttttacatctacttctcattttattttttgtcttccccttttattatttatcctccactattag

SEQ ID NO: 538401 - DNA, 201 bp, Homo sapiens
tacccaggaggcagaggttgcagtgagccgagatcatgccactgcactccagcctgggtgacagaacaagactccatctcaaaaaaaaaaaaaaaaaaaawaaaaatatatatatatatatatatacacacatatatatttgcatacatatatatgcaaatagaaaggagttcttctgagtatgatagcaacataacaacg

SEQ ID NO: 538402 - DNA, 201 bp, Homo sapiens
cacgtggaaccaaaaaagagcccagatagccaaagcaatactaagcaaaagcagcaaatctgaaggcatcacattacagggctttaaattatactaaggcwatagttaccaaaacagcatggtactggtataaaaataggcacgtagaccaatgagacagaatagagaacccagaaataaagccaaatatgtggatgtggt

SEQ ID NO: 538403 - DNA, 201 bp, Homo sapiens
cccaggaggcagaggttgcagtgagccgagatcatgccactgcactccagcctgggtgacagaacaagactccatctcaaaaaaaaaaaaaaaaaaaaaawaaatatatatatatatatatatacacacatatatatttgcatacatatatatgcaaatagaaaggagttcttctgagtatgatagcaacataacaacgag

SEQ ID NO: 538404 - DNA, 201 bp, Homo sapiens
caggaggcagaggttgcagtgagccgagatcatgccactgcactccagcctgggtgacagaacaagactccatctcaaaaaaaaaaaaaaaaaaaaaaaawatatatatatatatatatatacacacatatatatttgcatacatatatatgcaaatagaaaggagttcttctgagtatgatagcaacataacaacgagca

SEQ ID NO: 538405 - DNA, 201 bp, Homo sapiens
acagtgtcacaggcacagaataatggaaaacgaaaaggaacaagaaccaaaccacatttattgagcactaagcaccaggcagtatcctacacatttcatayatgctatttgatttaatcattataatatatctgtgaagttgaaacaatcacccctatacagtcaaggaggctcagagcagtgaaataacctgcagaaact

SEQ ID NO: 538406 - DNA, 201 bp, Homo sapiens; identical to SEQ ID NO: 120250

SEQ ID NO: 538407 - DNA, 201 bp, Homo sapiens
tgggagtaaatgggaagaaaaaactaaaaatgtctaactctactttggcatgtatcagagtgccttaaaaagagatcagctttttaagaaaatagactaasattggctttcttcttaccttttccttaatcacttggatttcttcacttttcacaagtggtttcatgtaatggaaaaagaacatggttaagaattctggtc

SEQ ID NO: 538408 - DNA, 201 bp, Homo sapiens
ttaaaatcactgaaatcggagtaaaccatatgcatagaacaaaggcatagcataagggattccaaaaaataaaataccagcttaaaaaatagattttaagyactgaattctaagaaaagaaaaccagcagcatgtcaacaatagaaaatcctgtggaaaaagcctagacttaccgttggatcctgtgtttctctgagtttg

SEQ ID NO: 538409 - DNA, 201 bp, Homo sapiens
gaggaggagctggaagagatgttaaaatcactgaaatcggagtaaaccatatgcatagaacaaaggcatagcataagggattccaaaaaataaaataccascttaaaaaatagattttaagtactgaattctaagaaaagaaaaccagcagcatgtcaacaatagaaaatcctgtggaaaaagcctagacttaccgttgga

SEQ ID NO: 538410 - DNA, 201 bp, Homo sapiens
gttaagagtcttgtttcaacttgctaaagtccctttagatggatatcacagcagaattcattattactgaaggggtaaggccaaacttaaagtatgtgctrttaattaattacaaatcaaaataaacagaaaccaatttacacttaaaacatccttgaagatagtttttaaaaaatctaaagtatttatcaattaaattta

SEQ ID NO: 538411 - DNA, 201 bp, Homo sapiens
aggctttagtaacagcactgtgaagattttcattaggatactgtgacagccgacgagaaattcgcaacagttgtctggtagaaagtgatgccgctaatgaytgtgcctatcaaaagacaaatacattgtgttaagagtcttgtttcaacttgctaaagtccctttagatggatatcacagcagaattcattattactgaag

SEQ ID NO: 538412 - DNA, 201 bp, Homo sapiens
aaagaatatgtttacctggaaaggcaggctttagtaacagcactgtgaagattttcattaggatactgtgacagccgacgagaaattcgcaacagttgtcyggtagaaagtgatgccgctaatgattgtgcctatcaaaagacaaatacattgtgttaagagtcttgtttcaacttgctaaagtccctttagatggatatc

SEQ ID NO: 538413 - DNA, 201 bp, Homo sapiens
cagaagagtgttgtaaagctgtaaattcatgactctagcaatttacccaagataagggccatctgaacatctgtcctgattccaacagagccatgtcttayacaataaaatggcactgcccatagcttgacagcaaagacaaagcaacaggattttcttttcttactcggagaagtttgtcgtaacgctcagcagacatca

SEQ ID NO: 538414 - DNA, 201 bp, Homo sapiens
tcttaagggtgaggggaattgtatctagtatgtactgaaatgaagtaaatattctaagattttacttgtgtttttcaaacttaaaaaaatcagattcattycttcaaactaatatataaaacaaagtagatgaaaaccaaaaactgtttaactgtttattttaactggaattaaaataaacagcatcaaatgtttgttaat

SEQ ID NO: 538415 - DNA, 201 bp, Homo sapiens
tcactgcaacctccgccccctgggttcaagcaattctcctgcctcagcctctctagtagctgggattacaggcatgtgctaccatgctcagctaatttttrtattttaggagagatggggtttcgccatgttggccaggctggtctcaaactcctgacgtcagttgatccgcccacttcagcctcccaaagtgctggaatt

SEQ ID NO: 538416 - DNA, 201 bp, Homo sapiens
caaaaaatcaaaagataaatgtcggcaagggtgtggagaaaagagtgcgcactgttggtagacatgtaaattggtacagccataatggaaaacaatgtggycatttctaaagaaattaaaactagaaatactatatgactcagcaattcttctggatatatacccaaaggaaataaaatcacctcataaagatatctgtac

SEQ ID NO: 538417 - DNA, 201 bp, Homo sapiens
tcaaattatccaacttcaaactatactacaaggctacagtaaccaaaacagcaccatactggtacaaaaacagacacatagaccaatggaacagaatagakaacccagaaacaaagttgcccacctatagccatatgattctcgacaaagtcaacaaaaacaagcaatggggaaagaactctactcaataagtggtgctgg

SEQ ID NO: 538418 - DNA, 201 bp, Homo sapiens
gtggctgtggctgggactataggcatatgccaccatgcctggctaatgtttgtattttttagtacagacgggatttcaccatgtcggccagactgatctcraactcttgacttcaagtgatctgcccacctgggcctcccaaagtgttgggatcataggcatgagccaccgcacccagtctaaaaggaggaaaaattttta

SEQ ID NO: 538419 - DNA, 201 bp, Homo sapiens
caggagaattgcttgaacccaggaggtggaggttgaggttgcagtaagccgagatcacaccattgcactccagcctgggcaacaaagcaagactccatctsaagggaaaaaaaacaaacaaacccaataatcaggtaaacagaagataaatacacatgcatagttgtaggagaagtagaaggaggattttaaaaaggagag

SEQ ID NO: 538420 - DNA, 201 bp, Homo sapiens
ggctcaggcatggcgggctgcagtcccgaggcctgccccgcgggaaggcagctaaggcccggcgagaaatcgagcgcagcgccggtgggctggcactgctrggggacccagtacaccctccacagccgctggcccgggtgctaagtccctcattgcccggggcctgcagggccggccggctgctccgagtgtggggcccgc

SEQ ID NO: 538421 - DNA, 201 bp, Homo sapiens
catgtaggggctgagaagagccatataggacatacaagggggcccaggttgtagaatcccaatctaaatccaagtgtcctaaaaatatgtaggggacaaattttaaattttatatggtggagaaaaggattttaggcatgatgggtgttttctcagttcaatacttgaatgtgtgtgaaacagtctttttctttcctgtgt

SEQ ID NO: 538422 - DNA, 201 bp, Homo sapiens
actcttaggaagtgctcaggtaatgtttgtaatttcgcggaatttaactgacatccagcaagcaggtcatatggtaacagtttggtttgtaactgtcaataaaaaaaaaaaaatgaaacatcttgtgaaatgctcatttccttgatattgttccttttttgtgtgtgacaggtctagtttcattaatagttcttccatatt

SEQ ID NO: 538423 - DNA, 201 bp, Homo sapiens
caataaactggttatctccttctacacatgtacataccatactgctttaccagaaaaatgtctttacttatactgacccctcacttaaaatttaattttcyctatagtaattgtccaaaaaaaggatctaaatgtttgatgaggggaaaacatatctctatttttttaagacttaatatccaaataaatttctggagtagc

SEQ ID NO: 538424 - DNA, 201 bp, Homo sapiens
gtagacaggctgcatccaaggagggcttagggagacattggcatgcagccttaaaggaagagacacaggagtgtgtatgggcattccaggcaggggccaaygtgagtgaaggtgtggggtctgataaggcatatttaaggggtgtgtggacactgctttagcttcattcttctcattcttacaaccagaggattttgcttt

SEQ ID NO: 538425 - DNA, 201 bp, Homo sapiens
ggaaattagttctaaattacatataattgctatccaatccaagaatgacagacaccaagtctatcataaactttttgatgtctagagattattttaatccrtcttttaaaaaaacatgtgcaggaaggaaagatcaaaagaataagcagacataccatgtgatgtagcaatgtcacagattatattaatttcatccaatgg

SEQ ID NO: 538426 - DNA, 201 bp, Homo sapiens
tgattgtgtgactgatatatctatctaccatttaaatatatgcctaggagaaaaaaaacatactatacttttctaggcaaatgagacaaagaaaggtggaytgtatgcttctttttcttccttcttccctcttccctttctttcttctttttttcccttcctttttctttctcatctcttatttgggtaaggaaagaccag

SEQ ID NO: 538427 - DNA, 201 bp, Homo sapiens
tcatcaatggtccaagtgatttaagaactataatctatctcatactagaaaggacctaaaatattttaaaataaacattttctataaacccataaagcataaaaaaaaaaaaatcaaggaaaacttatacctgaagggagcaagggtgaagaaaaggaaaaagtcgaacactggtctgcaagccatgagacataacaaagt

SEQ ID NO: 538428 - DNA, 201 bp, Homo sapiens
catcaatggtccaagtgatttaagaactataatctatctcatactagaaaggacctaaaatattttaaaataaacattttctataaacccataaagcataaaaaaaaaaaaatcaaggaaaacttatacctgaagggagcaagggtgaagaaaaggaaaaagtcgaacactggtctgcaagccatgagacataacaaagtt

SEQ ID NO: 538429 - DNA, 201 bp, Homo sapiens
ttatttagtagtcaatcactcatcactaacatgctcagatgcaaaaaatcctaactataaaaggaaggaaaacattagggggataatattcatagaatatyatctgtgacgaaacactttgctcttcagaggtagggtcttgctgggaactgctggtagcaaaaagccacagcaaaacagtcacctgatggaaactaaaca

SEQ ID NO: 538430 - DNA, 201 bp, Homo sapiens
gtaagataagacttcctttggtttgtgaaatgacttgaattatttttggaaaacctagaaaccctgtatcagaatcttaatcatgtggataatattgtccrtttttatcaattctactaaaaaacccagcagaaatatgctttttgagggtaatatagttcttgctaagagaaaggagagataaaacataaacacttgcca

SEQ ID NO: 538431 - DNA, 201 bp, Homo sapiens
ataaatccttcaaaactgttgatgttttcttagtatcccaaaaagcagcataatataatggaggaaaaaaaaaagtctttgaagccagacagacctactgygatttttcatcctgtcttttatccatgtccttagacaagcattttgactctttcaggtctgtttccttattttcttttttaaattttttaaattatactt

SEQ ID NO: 538432 - DNA, 201 bp, Homo sapiens
catttggaaagggctcagagacactccaaaaaagtagtcgtgcaaaactcatctttcagcactgccagtttaaagctagcaagataccttgaacactaagrccttaaatcatggtactaataacaatagccaacatttgttgaatgcttactaccttctaagtattttttgcattctcaaaataatcctatgagacagaaa

SEQ ID NO: 538433 - DNA, 201 bp, Homo sapiens
ggctcagagacactccaaaaaagtagtcgtgcaaaactcatctttcagcactgccagtttaaagctagcaagataccttgaacactaaggccttaaatcayggtactaataacaatagccaacatttgttgaatgcttactaccttctaagtattttttgcattctcaaaataatcctatgagacagaaattttacaaatg

SEQ ID NO: 538434 - DNA, 201 bp, Homo sapiens
ccttaaatcatggtactaataacaatagccaacatttgttgaatgcttactaccttctaagtattttttgcattctcaaaataatcctatgagacagaaaytttacaaatgagaaaatttgtaaatccataacagagtttttaacagataaagaaatttattacaggtatgtggtaaattgagagaggaagataaggacta

SEQ ID NO: 538435 - DNA, 201 bp, Homo sapiens
tgagtctaaagtttctaacagtagctttgacaaagaagttggtttcatgagggtttttcaacagcggccctatgaacattttgggccagataattttttgytgtgaggggctgtcctgtgtgtcatggactgtttagcagcatcactggcctctacccgctagatgccagtagcacccctccctcctggttctgataacca

SEQ ID NO: 538436 - DNA, 201 bp, Homo sapiens
aggaggttgcagtgagccaagacgtgacactgcactctgcttggtgacagagcaagactccgtctcaaaaaaaaaaaaaaaaagaaaaaaaatttagaacraagattcattaaattctaggaaaacaaataaatgagcttaaatgtatgttttcccacagctagagtagtgtcaatctaacttgatacaggagtgacgtca

SEQ ID NO: 538437 - DNA, 201 bp, Homo sapiens
acccatagcattcattagctgaagctgcccttcttcttccacttaattctaaaaggaattcctcacgtagagcttcacacaaggggctctgggaaattcagggggggcagtatccttaataataggcctaaagtacctgaagtgatgggtttcatcaatctgtttcttgttgcctacctcataacacagagacacaactca

SEQ ID NO: 538438 - DNA, 201 bp, Homo sapiens
tctattatacctcccttggatggtgaggtgccaagggtaggagaagacagagtaccttacataaatgatacacttgctcctgaattacagtttaaaaaaaycaaattgaacagagataaaacagctataagaaacagggatgaaacatcaactaagagccctgaagtggaagtcagaagtgctggctttgcactgtaacgg

SEQ ID NO: 538439 - DNA, 201 bp, Homo sapiens
tctgtaaaacaaaaaggttggtgaaaataatttccaaggccattcctaccccccaaattctatataaacttaatggtatgtttaagaattgtaatgagaargcctgcttctcttagttttaggaacacctaatgccttgttttcttctgtcaagggagagtgagtcatctaaatcagagggtcaatggcaccttttccaga

SEQ ID NO: 538440 - DNA, 201 bp, Homo sapiens
aacatattggtacagccattaaaaatattttactaaatatctgcttaggttcctaggtgctctcaatagtgaaagaaaagaggagatatgtaccttattcyaagggattcatgtttcttgaagtaatatctcattgcaaaggaaaacggtgaatcatctatggtgattctcattagaagagtttatattcttggatggtga

SEQ ID NO: 538441 - DNA, 201 bp, Homo sapiens; identical to SEQ ID NO: 120248

SEQ ID NO: 538442 - DNA, 201 bp, Homo sapiens
agctcccattattttaacatcttttcatgctcaaccaacatatatttttatgctacaaatgtgtatgactcaaacaaataattattggattaaggaaaackttcatattgaatttataagataaactattaatcagtggaaacacaaaattttattttgtggttctcaacatattggtacagccattaaaaatattttact

SEQ ID NO: 538443 - DNA, 201 bp, Homo sapiens
tattgaactggaagctggatatgagtgtgaagttcaggaggaaggtctgggttggagatgaatatttggcaataacaggcatataattggtagtctaaaayatgacacattctgattttattaaaggaatgagtatagataggtaagagaaccagggcctgagccttgggacattctaacaagctccaacaaataaggctg

SEQ ID NO: 538444 - DNA, 201 bp, Homo sapiens; identical to SEQ ID NO: 120249

SEQ ID NO: 538445 - DNA, 201 bp, Homo sapiens; identical to SEQ ID NO: 120251

SEQ ID NO: 538446 - DNA, 201 bp, Homo sapiens
aaatatttgttgggtgaatgaataactgtaaatgatgttagagggtacctgtgaacagcgattctcttattaaacattagctcccattattttaacatctyttcatgctcaaccaacatatatttttatgctacaaatgtgtatgactcaaacaaataattattggattaaggaaaacgttcatattgaatttataagata

SEQ ID NO: 538447 - DNA, 201 bp, Homo sapiens
tgttcattcatgacctcactcaggaagttcagttttgctacaaatattacaaataccaaactgatgtttcctaactcactcagtgttctgcccagattgcrgcaggcccctttttatggctctggcagctgatattaggacttgattacttctgaactcctgaaaacatgtttgctgtcagttgcaaaagaggtggcatga

SEQ ID NO: 538448 - DNA, 201 bp, Homo sapiens
ccgccaaaaaaaaaaccagagtgtagagaggtagtttgccttgcccatatgcacttctctaggataattaaatatatattttgtctagtcttagcagatayatgtagagcaggtccttgaataacattttgttcaaggacatttcattataaagtcaatgagaaaaaacacagattcccggccagggccactgtctgtgtg

SEQ ID NO: 538449 - DNA, 201 bp, Homo sapiens
atcccagcactttgggaggctgaggtgggtggatcacctgaggtcaagagtttgagaccagcctgaccaacaaggtgaaaccccatctctactaaaaatamgaagattagccaggcgtggtgacaggcacctgtggtcccagctactcgggaggctgagataggagaaatgcttgaacccaggaggcggaggttgcagtga

SEQ ID NO: 538450 - DNA, 201 bp, Homo sapiens
gttctacacatatgttcattgcagcactgtgatggttaatactgagtgtcaacttgattagattgaaggatgcaaagtattgatcctgggtgtgtctgtgrgggtgttgccaaaggagataaacacttgagtcagtgggctggggaaggcagacccacccttaatctggtgggcatcatctaatcagctgccagccaatat

SEQ ID NO: 538451 - DNA, 201 bp, Homo sapiens
agatcaaaaacagaagctaaatacacaaggttttttttccatctactctaatggcagtactgtgaccacaaagttgaaaaagtagggatagatggaaaaargataacacaatttaatgatctcttgaaaatctggtcaatgctgcaacttttctccacagtcaaatgcatgcaggtatatgtatagagcagagacctcaat

SEQ ID NO: 538452 - DNA, 201 bp, Homo sapiens
cttaaattacctaatttgagcatgccttatgtttcttgctgggaccttgagttgaataataaatagtataatatttatggagtttttcttcttcttcttctttttttttttttttaacataatgctttccttggttaccatattcaggatttgtgatattttgacacaactcacgaaagcaagtttctgtaaagagggcta

SEQ ID NO: 538453 - DNA, 201 bp, Homo sapiens
gatcatgggagttctcagcctccataatctcacacatcaatttcttacaataaatctctataggttctgtttctctatgaaatcctaactaatacagacaytaaagtttatagtctgataggttggaatgtattttaaatttaaaatattctacataaaagaggcaggcgacaaagcaatatcattattaaagagaaactg

SEQ ID NO: 538454 - DNA, 201 bp, Homo sapiens
gggaggggatctgtactcaataattagtgcagagagcaggtgggatcctcagccaggggtcagcacaatatggtagtggagcaaaccagaagagctcctamcccagaggctaggggtcaggagaagagtcagagaaattttcctggaagaagtaatgttcaagaggaatcttgaagaacgagtaagaattagacagcgcag

SEQ ID NO: 538455 - DNA, 201 bp, Homo sapiens
caggggtttctacaatcgaacataggcgggttggtcatttcctcctttgtgttagttctccattttctttaaccatgtaaatctgtttgtttcccacttakaccttgaaattcttactcctaaaaagactagagtcctggatgccattccaacaagttcccctgcctctgcttcctgtggctccctctttctccctatacc

SEQ ID NO: 538456 - DNA, 201 bp, Homo sapiens
ctaaaaacacaaaaaattagccaggcatggtggcaggcccctataatcccagctactcgggaggctgaggcaagagaatcgcttgaacctgggaggcggaractacagtgagccgagatggcgccattgcactccagcctgggtgacagtgcgggattccgtctcaaacaaaaaaaaaaagaaaaagaaaaaaagaaaaat

SEQ ID NO: 538457 - DNA, 201 bp, Homo sapiens
taacagcacttttgaaaatgcaggccaggtgcggtggctcatgcctgtagtcccagcactttggaatgctgaggcaggcagatcacgaggtcaggagttcsagaccagcctggccaacatagtgaaaccctgtctctactaaaaacacaaaaaattagccaggcatggtggcaggcccctataatcccagctactcgggag

SEQ ID NO: 538458 - DNA, 201 bp, Homo sapiens
tgtggaaatgctgggtcacagagtatggatatgttcagctttagcgtatactgatgaacagttttccaaagtggttttcccaatttacattcctgtgagcrgagtataagggtttcatttgtttctgtcctcaccaacacttgatattgacagcttaaaataatttttttagccattcttttggtgtacagtatactcctt

SEQ ID NO: 538459 - DNA, 201 bp, Homo sapiens
ttgggacttagctcttatctcttctttcctaacatttctgttctctagtgtggataatcctcaggcttcctggataatttatcctgggaaatgctattgtrgatgaccatttatgtaccttcagtcttcacattgtacaactcttggaggtaccaagctgcagagcactggattctaatggctttcatagatgaggacaga

SEQ ID NO: 538460 - DNA, 201 bp, Homo sapiens
tcaatagtttccatttctcttttcattatgttcatattttccctaaaatccttgaaaatatttataatagtgttattaaaagcccttctctgttaattccaaaaaaaaaaaaaaaaagattatgtgttccagcatcagcctggttctaactgttctttcaccactgttcaatatctgatctgaagcaaattacttaacctg

SEQ ID NO: 538461 - DNA, 201 bp, Homo sapiens
ctcttttcattatgttcatattttccctaaaatccttgaaaatatttataatagtgttattaaaagcccttctctgttaattccaaaaaaaaaaaaaaaargattatgtgttccagcatcagcctggttctaactgttctttcaccactgttcaatatctgatctgaagcaaattacttaacctgtcggcatctttgtttc

SEQ ID NO: 538462 - DNA, 201 bp, Homo sapiens
ttccagattatgttcttggcaagaatcccatgatctctcaggaaaatgggtcactctggagcatagctatcatgtaaaacttgatcagatacccagctacvggtggcaagaggaaggaatgtgcacagtctactagaatctcttcctactgatctatctgtgaatcagacagacaaccttgaccacacagcacagtccttt

SEQ ID NO: 538463 - DNA, 201 bp, Homo sapiens
atatatttaccttcagaatttctagtctttgcttattgtccttggggattttgttcattggaaccagaccaatgttgtagccatctccagagtgtccaacratgtcatactacatgcaagagaaccagaaagttataaacttttctccacaaaagaacagtcattagatctttaatgttcaactctttggaccattattgt

SEQ ID NO: 538464 - DNA, 201 bp, Homo sapiens
aaaggattttaggcatgatgggtgttttctcagttcaatacttgaatgtgtgtgaaacagtctttttctttcctgtgtatctgctgctgcttcaatgaatycttttagtctttacctaacctgatagaagctttcataatacagaggtaataaaatatatttaccttcagaatttctagtctttgcttattgtccttgggg

SEQ ID NO: 538465 - DNA, 201 bp, Homo sapiens
gagccgagatcatgccactgcactccagcctgggtgacagaacaagactccatctcaaaaaaaaaaaaaaaaaaaaaaaaaatatatatatatatatatayacacacatatatatttgcatacatatatatgcaaatagaaaggagttcttctgagtatgatagcaacataacaacgagcaaacacttgagttctaacaca

SEQ ID NO: 538466 - DNA, 201 bp, Homo sapiens
tgcctcatttgcatagcatgtaagtgtgggggtacaatctcgaagtattcttgttctttcatacctacgtttcatctccccagtggattcttagctctacraaggatgagaaccctgtcttttatggcatactggtacaaaactggctcacagcaggctattagcatttatggaataaacatgcaaccactcagttaaaag

SEQ ID NO: 538467 - DNA, 201 bp, Homo sapiens
actgttttatttgttaatgtactttacaactaccaaccacctgaaaccacggaagtgaatgaagttgcctgaaatgagaatttaaagtgaagagggctcasgggagaaatgaatcagtgaaggagactgagaagaagcagacaagagggaagctgggaggagatcgggattatcatggaagccatgagaagactgggtttc

SEQ ID NO: 538468 - DNA, 201 bp, Homo sapiens
ctgaaactataaagaaaaaagagaaaatgaagtgcaaatttaagtattacttataatataaatctccaagtaatgtggacatatttatatatatatataaygtatataaaatatgtgtttatctgtgtatttataaacatatgtatataaatatatataaacatatgcatatgtttatctggacaaacatgtagacacctg

SEQ ID NO: 538469 - DNA, 201 bp, Homo sapiens
acagaacaccaaagggatcgctctctagaacaggacaaaatcaaaataagtgtctgtgggtcatttttatagtcaaactatgaaaaaaaatcaaatattayatatgcatatacatgtgcatataaatatatatgtgtctgtatatatatgtatgtatacaaatacatacaaacacacagaattttttaaagtaaatataaa

SEQ ID NO: 538470 - DNA, 201 bp, Homo sapiens
ccaatcccattagctgctacatggttttattaaccagtgatgcttttaccatgtaaagagccactgtaatggctatagattgtcatttttgtaatttttgttttttttttttttgacacaaggtctctgacacccaggctggagtgcagtggtacgatcatagctcactgcacccttgaactttgaactcctgggctctag

SEQ ID NO: 538471 - DNA, 201 bp, Homo sapiens
tctcatctcttatttgggtaaggaaagaccagcctttgtctgtgcctggtgagtactgcaaaggcttgcaaagacacctaagtgacaggatggagcttatwaaatagtttgcaggccctggtttctcatcttccagatgggtttgaggattattctgtgaccaaagccaataaaacgcttgggaggaatctaaagtacatc

SEQ ID NO: 538472 - DNA, 201 bp, Homo sapiens
gccccgtctgggaagtgaggagcccctctgccaggctgccaccccgtctgggaggtgtacccaacagctcattgagaatgggccatgatgacgatggcggytttgtcgaatagaaaagggggaaatgtggggaaaagagatcagattgttactgtgttggtgtagaaagaagtagacatgggagactccattttgttctgt

SEQ ID NO: 538473 - DNA, 201 bp, Homo sapiens
acaaagtgcagtggggacacagaagagaaggcaattaatcctgatggaaaagaacagagtcctgattatggaatttgattttaactggcaggaatgagtakaaagtatgtctaggcagaggaataagcacatagaagttgggggatgcaagagaagtttaaggctacacttagttatccagcatgtctaggatatagtcac

SEQ ID NO: 538474 - DNA, 201 bp, Homo sapiens
tggggggcgcctctgcccggctgccccgtctgggaagtgaggagcccctctgccaggctgccaccccgtctgggaggtgtacccaacagctcattgagaaygggccatgatgacgatggcggctttgtcgaatagaaaagggggaaatgtggggaaaagagatcagattgttactgtgttggtgtagaaagaagtagacat

SEQ ID NO: 538475 - DNA, 201 bp, Homo sapiens
atcatttattgatacatttcattttctaaaagaaaagccagccttttaaaaaaaatccttcaaataatgccataataatttttcttcctagtttccagagmttttctttactctttattctcatatctttccatgacctactcaggaagacattcaaaactgcagtaacatttttatagcattgaagttcttgttataaat

SEQ ID NO: 538476 - DNA, 201 bp, Homo sapiens
atgttaggcagagaaatgtataatgattataaaaacagtcaccgaactactgaataacaggatgagaagggcctttttgtttgctaggttctccctaaagscttccttacatacaaataggttacatgggaagtcatttcctgatgatgctagctaggttccacaagccagaaagttagagagcagaggatctgctgtgta

SEQ ID NO: 538477 - DNA, 201 bp, Homo sapiens
gagttatacagttctgtacacagaccatatttcccctttttcctatgcagtgtagcaaactgcatgaacacattccttatgcatctttttatcacccaggktctagtgtaatacttggggaagaaagcagacgctaaataagtaagtgtatacggctattgttaatgaccatcattgctattaactttttgaagatctttg

SEQ ID NO: 538478 - DNA, 201 bp, Homo sapiens
aaacatttaacctgaaggaaagaatgaagtaatgctaacactcaataacaaatacttatactcgccaaatcagttatctccaatcatcagtctatagatargatcatctgggtactattctgggagcctagagagtgaatgactccatggattaccgttataacattcatgttcaaaaacaccatccaattgctacagttg

SEQ ID NO: 538479 - DNA, 201 bp, Homo sapiens
agataggatcatctgggtactattctgggagcctagagagtgaatgactccatggattaccgttataacattcatgttcaaaaacaccatccaattgctayagttggaacaagagctttaaagccaactctcaggaggcattattctacaaattagtagaagttgtcctaggagtactgattccctggaggtagatttatt

SEQ ID NO: 538480 - DNA, 201 bp, Homo sapiens
acactgagacttacagagttaaacagtgacagccctctatctttctaacatgccatctgggaatggaaatacaagtcaatcagaaatgagaagttagaagstgaacataaagatgtaggcattaacttgtgataggtacttgaagccataagaatagataacactgctcagcataggagacagaggggacagagcagaacc

SEQ ID NO: 538481 - DNA, 201 bp, Homo sapiens
tcaacttgattagattgaaggatgcaaagtattgatcctgggtgtgtctgtgggggtgttgccaaaggagataaacacttgagtcagtgggctggggaagrcagacccacccttaatctggtgggcatcatctaatcagctgccagccaatataaagcaggcagaaaaacatgaaaaggcaagacgggtctagcctcccag

SEQ ID NO: 538482 - DNA, 201 bp, Homo sapiens
ggtgatcctcccacctcagtttcccaagtagctgggattacaggcacacgctaccacacctagctaatttttgtattttttgtagagctggggtttcaccrtgttggccaggctggtcttgaacctttgggctcaagcgatcctcccacctaagcctcccagagtgctgtgcttacaggcatgagtcactgtgcctggctt

SEQ ID NO: 538483 - DNA, 201 bp, Homo sapiens
atgcctctgcccggtggcgaccccgtctgggaattgaggagtgtctctgcccgaccaccaccccatctgggaggtgaggagtgtctctgatcggctgcccygtctgagcagtgaggagcccctccgcccggcagctgcccgtctgcgaagtgaggagcccctccgcctggcagccgccccgtccgggagggaggtgggggg

SEQ ID NO: 538484 - DNA, 201 bp, Homo sapiens
ccagtctgggatgtgaggaatgcctctgcccggtggcgaccccgtctgggaattgaggagtgtctctgcccgaccaccaccccatctgggaggtgaggagygtctctgatcggctgccccgtctgagcagtgaggagcccctccgcccggcagctgcccgtctgcgaagtgaggagcccctccgcctggcagccgccccgt

SEQ ID NO: 538485 - DNA, 201 bp, Homo sapiens
actccagtctggcgacagagcgagactccatctcaaaacaaaaaacaaaaacaagcaaacaaacaaacaaaaaaacggggggacaacaaacaccagggccwacctgagggtggaggttaggagatgaagactgaaaaactacctactatgcaatcccattcacaatagccacaaaaagagtaaaatacctaggaatatcat

SEQ ID NO: 538486 - DNA, 201 bp, Homo sapiens
cccattaaaaaatgggcaaagagacacttctcaaaagaagatgtacacgtggccaaaaagcatatgaaaaaatgttctatgtcactaattattagagaaaygcaaatcacaaccacaatgagataacatctcacaccagtcagaatggccattattaaaaagtcaaaaagtggcctttgagaccctatgctcaggcccgct

SEQ ID NO: 538487 - DNA, 201 bp, Homo sapiens
aggaatatcattaaccagggaggtgaaagatctctacaatgagaattacaaacactgctgaaagatgacacaaacacacacaaatcaaacactcataaatyaaagtaatggcaacaaaagccaaaattgacatatgggatctaactaaactaaagagcttctgcacagcaagagaaactaccatcagagtgaacaggcaac

SEQ ID NO: 538488 - DNA, 201 bp, Homo sapiens
tcatcttgtggtttgtgacactttgtcttatgatttcagcactgaaatcattctgattaatcttatatctttgcttatttgggttatgattaatcaagactttttttttacctacaaactctataatcaagccaattttatattagtccttcagaatttgtttaatgaagagaataaaaagacttaagtagcaattgttat

SEQ ID NO: 538489 - DNA, 201 bp, Homo sapiens
ttgtgggacaaatgtggtgtttcttacagcttcttctttgttccaccagaaaggtttcttagatgtaaacttctcggaagggaggatgagacgatgaaggrcccggccagtagtatctaacaacaggataacattactctgcaaatgataaaaacagtgaaaagctcaagatttgttctttttttttttttttttaaagca

SEQ ID NO: 538490 - DNA, 201 bp, Homo sapiens
aaaaggagtgactctcccttccccctaccagtcactgcacccccagctctcagtggcgactcagcaattctggttacccaggaatacaggagatcacagarctcaccaagagactcaatatttcatcctgtcatcattttgttttgctattacattgcaaatattttaaatttatggctgtctaaaactttacatactaca

SEQ ID NO: 538491 - DNA, 201 bp, Homo sapiens
ctatcctgtggcattcaaggtttcagggacaactaatgtaaaattaatttttctttctctgacaatagcttgtttttcaactgcttctctgcttttaggatttttttttttttaatttttgaaatgttaaaattccatgaagctgtgttgagtgcttctctctttgttaattttgcatggtacttagtaaagtccttttga

SEQ ID NO: 538492 - DNA, 201 bp, Homo sapiens
ccaagtgacctatagattgaaaatactttaataaatatgctagagaatctcctatatcaaatctccttaattcattttttaataaatcaaatttctatagscaagtagtaggaaacaatttaaaattatgaaatcagcacattgatctttaacgttttagaaccattaatttcatctaggatttctcatttagtacaaaac

SEQ ID NO: 538493 - DNA, 201 bp, Homo sapiens
tgataaacaacttcagtaaagtttcaggatacaaaatcgatgtacaaacatcagtaacatttctatacatcaataacgtccaagctgacggccaaatcaaraatgcaatcccattcacaatagccacaaaaagagtaaaatacctaggaatatcattaaccagggaggtgaaagatctctacaatgagaattacaaacact

SEQ ID NO: 538494 - DNA, 201 bp, Homo sapiens
tcgaatgatgagatacaaaactgttgaggaacagattggacagatgctccttggttgcattcactttccacttagtttctactagaattcttcttgagagrttttaaactggttgaactaaatctacaatgccagcagggaaggaattgaaactgcggacagtcccagcatgagaacttcatcaccacatcatttcttatt

SEQ ID NO: 538495 - DNA, 201 bp, Homo sapiens
gctggtagcaaaaagccacagcaaaacagtcacctgatggaaactaaacatttcaaaatgtgtttagtttacaaaatctacttacctctaccacgtctccwactactatgttaatactatttaaaaagaaattcttcaaaagtcaaagccatgctgataatcaagtcttttaactacctaaaaattttctaagttgtccac

SEQ ID NO: 538496 - DNA, 201 bp, Homo sapiens
actgtcctcagagatgccaagccacccaacacagaatgcaatacagcttcagtaatatctgtggattttaatttaacatctaaagaaataagctggagagyagtaataaaacaccacagctctagatacaaaatgcttcaaaaggtaacaaattttctttaaaacaatgtagatagaaaacagtatatatataattgtgag

SEQ ID NO: 538497 - DNA, 201 bp, Homo sapiens
catctctctgttttccagcaagttgttcaaaacaggcaaaacattcctctctgccttttccaaaccttccaaaatgagagttctgccttctgtggctgcaygaactgcacactatttccaagaaacgtaaaagcaaaatgagaatactgaagttgcagagcttggcctaacattacttgtaattcaaatttaagttgcagt

SEQ ID NO: 538498 - DNA, 201 bp, Homo sapiens
tctttttgagatgaagtcttgctctgtcacacaggctggagtgcagtggtgcaatcttggctcaccgcaacctccaccttccaggttcaaacaattctccsgcctcagcctcccaagtagctgggattacaggcacctgccaccacgcccagctaatttttttatttttagtagaaacagggtttcaccatgttggccagg

SEQ ID NO: 538499 - DNA, 201 bp, Homo sapiens
aagacacaatttatttttactttttattttatttttaattatactttaagttttagggtacatgtgcacaacgtgcaggtttgttacatatagtatacacrtgccatgttggtttgctgcagtcattaattcgtcatttacattaggtatttctcctaatactatccctcccccagccccccgccctgtgacaggccctgg

SEQ ID NO: 538500 - DNA, 201 bp, Homo sapiens
cacacctggctaatttttgtattttttttttttttgtagagacagggtcttgctacattgcacatgctggttttgaactcctgggctcaagcaataaaccygccctggcctcccaaagtgctggaattataggcatgaaccactgtgcccggcccagtgtttttactacagagaaataactacttccccagctacgctccc

SEQ ID NO: 538501 - DNA, 201 bp, Homo sapiens
gtaggggctgagaagagccatataggacatacaagggggcccaggttgtagaatcccaatctaaatccaagtgtcctaaaaatatgtaggggacaaatttwaaattttatatggtggagaaaaggattttaggcatgatgggtgttttctcagttcaatacttgaatgtgtgtgaaacagtctttttctttcctgtgtatc

SEQ ID NO: 538502 - DNA, 201 bp, Homo sapiens
gaagattcttgggaacacagagttgtggcaaaggacaagagctgagaaactctaagggaaaaatgatattaaattttaatagttttaaaatataaaatgtrtaagttgttaaatataaaatacaggggccaatttaattaatctaaaaaagatccctaatattaattcttaaggaacaatggttccgcatcataatatcct

SEQ ID NO: 538503 - DNA, 201 bp, Homo sapiens
acacaaagacataagagtgatataatggactttggggactaaggtggggaaggttctcaggggggtgagggataaaagactacatactgggtacagcgtayactgctcgggtgatgggtacactatctcaaaattcaccactaaagaactcatccatataaccaaaaaccactcgtaccccaaaaactattgaaataaaaa

SEQ ID NO: 538504 - DNA, 201 bp, Homo sapiens
aagaaatgtaacagattaaatgcaaatgttttgtagatacaatccaaccttttaattaagcagacactaaatatttaacagcaaaaaatcatttattgatmcatttcattttctaaaagaaaagccagccttttaaaaaaaatccttcaaataatgccataataatttttcttcctagtttccagagcttttctttactct

SEQ ID NO: 538505 - DNA, 201 bp, Homo sapiens
caaatagattgagaaaaagtattcataatacttatacatgacaaagtacttggatccataatacataaaaaacttttgcaactcaataataaaaaggcagrcaactcaatttttttagtgggcaactgactttaatatatacttcacaaaagtagaaatacaaagggccaataagcacagaaaaatatcttgaacatcact

SEQ ID NO: 538506 - DNA, 201 bp, Homo sapiens
ttccttactcagactggaacttatactattggctctattggttctcagcccttcaaggcttctcttagaactacaccaccacaccacctctttcctggctstccagcttgcagatggcagatcatgggagttctcagcctccataatctcacacatcaatttcttacaataaatctctataggttctgtttctctatgaaa

SEQ ID NO: 538507 - DNA, 201 bp, Homo sapiens
tttttatggctgcatagtattccatggtgtatatgtgccacattttctttatcccgtctattatgggttggttccaagtctttgctattgtgaatagtgcygcaataaacatacgtgtgcatgtgtctttatagtagcatgatttataatcctttgggtatatacccagtaatgggatggctgggtcaaatggtatttcta

SEQ ID NO: 538508 - DNA, 201 bp, Homo sapiens
ttctctcatgatttggctctgtgtttatctgttattggtgcataagaatgcttgtgatttttgcacattgattttgtatcctgagactttgctgaagttgyccatcagcttaaggagattttgggctgagacaatggggttttctagatatacaatcatgtcacctgcaaacagggacaatttgacttcttcttttcctaa

SEQ ID NO: 538509 - DNA, 201 bp, Homo sapiens
ccatgctgttttgattactgtagccttgtagtatagtttgaagtaaggtagcgtgatgcctccagctttgttctttttgcttagcattgtcttggcaatgygggctcttttttgtttccatatgaactttaaagtagttttttccaattctgtgaagaaagtcattggtcgcttgatggggatggcattgaatctgtaaat

SEQ ID NO: 538510 - DNA, 201 bp, Homo sapiens
gggctaaagatcaataagaagtgacaaggatgaataggggtagatgacaaaacaagagcagatggcacatatgttttaggatttggaggtggatggaagayggagacagaacagggagtgagtattcttacaggcattaaaataaatgtgataaggagtggcttggggtataaggggtgacctacaaacataaaaagaact

SEQ ID NO: 538511 - DNA, 201 bp, Homo sapiens
ggaagggaggatgagacgatgaagggcccggccagtagtatctaacaacaggataacattactctgcaaatgataaaaacagtgaaaagctcaagatttgktctttttttttttttttttaaagcagcaacctcttggcaacctgacagtgaaggttatagtgataaatcaaaacaaagacaatattgtaatacttaagaa

SEQ ID NO: 538512 - DNA, 201 bp, Homo sapiens
tggagaaacccagtgccattaggatttctaccacttttatatgacctgttccctacttctctcaaaattagaagttatcggctttatttctttatccatgrggttctaaaatttcaagtggacatgctttgatgtgtgtgtgtgtgtgtgtgtgtgtgtgtgtgtgtgtgtgttccatttgttatactgtatatctggttc

SEQ ID NO: 538513 - DNA, 201 bp, Homo sapiens
ttatttaaaccccacccttaagttgcccatctttaaaaaatgatagttgtgaagtacctacagctttatttgagatgagtttggaagagcctactctcatttttttatgataccaaaaagtaatctttcagcatgtacatattcatgtacaccaatacaaccaatagttttaactgtgatccccattaatcttagtagtgg

SEQ ID NO: 538514 - DNA, 201 bp, Homo sapiens
aaaaaactataagatgttttatgtaagcctcatcatacctgcaaaacaaaaaagtatagcagatacaaaaacaatacagagaaagaaatcaaagcatagtsttatagaaaatcatcaaatcacagagggtaacaacagagaaagaaaggaacaaaggatctacaaaacagccagaaaacaaataacacaatggaaacagtg

SEQ ID NO: 538515 - DNA, 201 bp, Homo sapiens
attaacagcaactatactcacgtgtccaaggtaggatttatggacatttttgatttctcactttctctcatatctcccttaacccacctcatatttcatcrgttagtaacatgtatcatccttcttctgaaacatttctcatatttgtttaattcttatttcactggcctacttcaggtcattactgctttgaccagagct

SEQ ID NO: 538516 - DNA, 201 bp, Homo sapiens
agggaattcttgtgtgttgctttccatttgactaccacagttccattcagccatcagaagagagacaaggaattaagaatttctttttattccttgttacyaaataaaccatttgtctcctctcaaaaaaaaaaaactataagatgttttatgtaagcctcatcatacctgcaaaacaaaaaagtatagcagatacaaaaa

SEQ ID NO: 538517 - DNA, 201 bp, Homo sapiens; identical to SEQ ID NO: 120253

SEQ ID NO: 538518 - DNA, 201 bp, Homo sapiens
tattatttttaacttaacaataaattagcaatgggagtaatggaccccaaattacctcttctgtagctgttcatcagacagttgcagctcctcctttaaaygcatatacctgtcttctctcagcagcctagaaccatcatagaggcttagctctcgatcatggattaacctaacaagataagaaaaaagcccgaaaataaa

SEQ ID NO: 538519 - DNA, 201 bp, Homo sapiens
tgtttatgtgatggattatgtttattgatttgcgtatgttgaaccagccttgcatcccagggatgaagccaacttgatcttggtggataagctttttgacmtgctgctggattcagtttgccagtattttattgaggatttttgcatcgatgttcatcagggatattggtctaaaattctctgtttttgttgtgtctctgc

SEQ ID NO: 538520 - DNA, 201 bp, Homo sapiens
aatttatccatttcttttagattttctagtttatttgcacagaggtgtttacagtatgctctgatggtagtttgtatttctgtgggatcggtggtgatatmccctttatcattttttattgcatttatttgattcttctctcttttcttctttatcagtcttgccagcggtctatctattctgttgatcttttcaaaaaac

SEQ ID NO: 538521 - DNA, 201 bp, Homo sapiens
ggacagtccaacccaggacagaaagaaactggaacatactcagggaggcttatcatttgaggaattttgtttcctgggacagccatgtggtagacagccastagccattcagaaagttgataagctgctgtttgctttcatgtgcgtgttgaaaagcatttggaatgtacttcctttgagagctggtttcatctagaaaaa

SEQ ID NO: 538522 - DNA, 201 bp, Homo sapiens
tgtttgctttcatgtgcgtgttgaaaagcatttggaatgtacttcctttgagagctggtttcatctagaaaaagctcaagtaagtaattccaattactgamataaacactactgaattcacttaaagggatcaaaaatttccccaaaaaagaaaatattatggccccttataacttttgatgcaacccgatgctgagcccc

SEQ ID NO: 538523 - DNA, 201 bp, Homo sapiens
gtggagcttggagctacacttcaggacatttaatctggtgacaatatgcggaatagtttggccaaaaagtggtttgggaatctgatttgagggaggtatgaaaaaaatggaaataaaaggcattagattgatttgaaggttttgtagagacagaatctatagtcttggcaactgcttaggtgggaagaggaaaaaggaaaa

SEQ ID NO: 538524 - DNA, 201 bp, Homo sapiens
agacttagggaaaaaaaggaatgtaaaatatttcattaaaaatttcatattgactacatgtcaaaataataatatttttgatacattgggttaaataaaakatattaaaattaatttcaccttaaaacaatattttagtgtgtctaccaagaaatatataattacatatatggctttcattatatttccattggacagtgc

SEQ ID NO: 538525 - DNA, 201 bp, Homo sapiens
gaatcccagccaaaaaacccaatgtttctcctttttatttttcccttctatttttagcacatgcctgggtgtgtttaactttgtgctacaattgtaatgaraaacagacatatgcatacaaactcaggagtgcttatgtggattccacaatagcatttttttaggttgttagaggaaattagttctaaattacatataatt

SEQ ID NO: 538526 - DNA, 201 bp, Homo sapiens
acttttaaggcaagacatctttctcctcccactctagcagcaaggagaagaggacatttgctctttaagagccttttaaaagtcacgtggaaaggcaagcrctccaaggattttttgattccttttggctttggccaagaaaatgaaattattgagaacagccagcctttcataagatattgctgttggagggactttttg

SEQ ID NO: 538527 - DNA, 201 bp, Homo sapiens
aagatatccaatgaatttaagtgaaaatctcaagatttttaaaaaaatagtaagaaatataatgtaaagtggaccatatcctaatttttctcataggatgktatattttaagaaaacacagattaagaaatgggcattccttctaccacaattattttaaaccatatttttaaaaaacttataagaaatttcttttttaag

SEQ ID NO: 538528 - DNA, 201 bp, Homo sapiens
ggaaacaacaggtgcgggagaggatgtggagaaataggaacacttttacactgttggtgggactgtaaactagttcaaccattgtggaagacagtgtggcrattcctcagggatctagaactagaaataccatttgacccagccatcccattactgggtatatgcccaaaggattataaatcatgctgctataaagacaca

SEQ ID NO: 538529 - DNA, 201 bp, Homo sapiens
accctcttagcttggaagaacccttggctctttcagaggctttcctcttacgagcctctaatctacctgtgagacctaggcatcttgtaccacccccgccaaaaaaaaaaccagagtgtagagaggtagtttgccttgcccatatgcacttctctaggataattaaatatatattttgtctagtcttagcagatacatgta

SEQ ID NO: 538530 - DNA, 201 bp, Homo sapiens
tcctcagggatctagaactagaaataccatttgacccagccatcccattactgggtatatgcccaaaggattataaatcatgctgctataaagacacatgmacacgtatgtttattgcggcactattcacaatagcaaagatttggaaccaacccaaatgtccaacaatgatagactggattaagaaaatgtggcacatat

SEQ ID NO: 538531 - DNA, 201 bp, Homo sapiens
ctttattgcccaaaactggaaaaaaccaataaatatgtcaccttgtgaatggataaacaaactgtggtacatctatataataggcaaccacttggcaattaaaaaaaaaaaactaatgatacacacataacataaaaaataaataaataaatgattctcaaatgcactgtattaattgaaagatgccaggcttaaaagacc

SEQ ID NO: 538532 - DNA, 201 bp, Homo sapiens
ctatctaagattatttcccatagagaattagaactactttaaaaatataagtagcgtctttgaagagttcagctattttttcaaactaccctacttcttaytcaaagtaaagcacaaagttgcaattgtgttgttttgactatctactatgtataagacactactggacagtgatattcagacctggacgttatacttgtg

SEQ ID NO: 538533 - DNA, 201 bp, Homo sapiens
agcattttctgactcctgctggtaggcatttcagcaatggcaccttttagagatatcacacagcttaggtcatgtgggaccaaaaagttctctcatctccygggaaatctaccacttcaggatgaacacgaggatgtggttcatttgtcccgttttctcatctgagtttaggtatcactgcaatttatttaagattaccca

SEQ ID NO: 538534 - DNA, 201 bp, Homo sapiens
cagctattttttcaaactaccctacttcttactcaaagtaaagcacaaagttgcaattgtgttgttttgactatctactatgtataagacactactggacrgtgatattcagacctggacgttatacttgtgaaatgtacaccaaatgccaaactttactacaatctattaaaattgtaaaatgtgtatctgttttttaaa

SEQ ID NO: 538535 - DNA, 201 bp, Homo sapiens
tattccccagtcacctaaattcaacacatctaaaactcaacttattactttctcctgaacttcattctttatcctgtatctttttctccagttaatggcaycattttctaccagctgaccaaactcctattatcatcaccctgccctccttattcctctcttatcaacatccaactaaacagcacctgaattgttaagcca

SEQ ID NO: 538536 - DNA, 201 bp, Homo sapiens
tgacttgatctccttaatagccctggaatgtgtcctctccactctgtccccactgtcacctctttagttcagatccttcataaatttcatctggactaccrcaataaccacctaactagtttctctttgccttagttctaactcctagacaatactaaagagtaaaagctaagttagccaaagtacaaatgtgcttaaaat

SEQ ID NO: 538537 - DNA, 201 bp, Homo sapiens
ttgttcctttccactatatgaatagagtgtaatactatcagtgcttggaaatagtatgttttcctcataatcatgtttttgcctttgacaggcaagttttytttctacttttgtgtcttataagtagctttattttctgttcatttgtttactgattgtgcaagagcattaatgctccagaagaaaaataaaacattagtt

SEQ ID NO: 538538 - DNA, 201 bp, Homo sapiens
taaaatttattaccctaatcatagcaaccattcctccaatttttaagtacctttggaaaaaattttctgttttctgtcttatgtcttaataaaagttgttyggccagacatggtggctcacgcctgtaatactagcactttgggaggctgaagcaggtggatcacgaggtcaggagtttgaggccagcctggccaatatgg

SEQ ID NO: 538539 - DNA, 201 bp, Homo sapiens
tttcatcatgaattaacaaataacttctcaacactgtgttaaagagcagtgcacaacagcaatacagtaatgaatgtgaggcaaaaatccaatgcttcctrtaagagaaagggttgtggggaggggaagcaactctaatggggtgcactcttattatcatgtaaccctctcttgataaaactctttgatcagccaggaagg

SEQ ID NO: 538540 - DNA, 201 bp, Homo sapiens
gccagcctggccaatatggtgaaaccctgtctctactgaaaatacaaaaattagccaggcatggtggcacatgcctctagtctcagctactcgggaggctkaggtagaagaatcgcttgaacctgggaggtggaggttgcagtgagccgagatcgtgctactgcactccagcctgagtgacaaagtgagactgcatcacag

SEQ ID NO: 538541 - DNA, 201 bp, Homo sapiens
cagacaagtaaaaagtctcttcacttaggctccttatcccctacatgaggcttagatgggcactgctaacactagccagtaaccaagaccaaacaatcggyagtctgaatgacagtcgttctttggatatttaatagactcactcaaataatattgagaatacaatattattccttctctttgagttgactctgcgtatct

SEQ ID NO: 538542 - DNA, 201 bp, Homo sapiens
tgctaacactagccagtaaccaagaccaaacaatcggcagtctgaatgacagtcgttctttggatatttaatagactcactcaaataatattgagaatacratattattccttctctttgagttgactctgcgtatctgtattcagatccctcagtatgctgagtttataatttgactctaaaaaaaatcttatttcctca

SEQ ID NO: 538543 - DNA, 201 bp, Homo sapiens
taatccttcagttctggctccaaattgtcatcagtatttatttctattgtagcatctgccagatttttttctaatgctgacctagcaagactgggtaaaamcctggaggatgaagagggaggaagggggaaatggcttaagtcaaagctttctgcgattcttaaatacacacacacacacacacacacacacacacacact

SEQ ID NO: 538544 - DNA, 201 bp, Homo sapiens
tctagcacccagacagcaatatcaatcaaggtaccaaggaagttgaaatatatttacatctagaacattctaagatactggcccatccaacaaatgaggaraatggaacatatcaggcggtgtaaggccaatcctaatttttttcctggattttaagggatttgttaactgtttcctttcccattgctcactgatattttt

SEQ ID NO: 538545 - DNA, 201 bp, Homo sapiens
tagctgagctctggccccacctcacatcagcccactaaacttgcctttctctgcactgctggaggggacagcctccgcaccctatgactttagcacttaactctgtgcatgtgtgtatgtatgttcccttgtcctgtctccgcactaatctgcaagatttctgagggcaggaagggaccattgtgtagacttacctgaatt

SEQ ID NO: 538546 - DNA, 201 bp, Homo sapiens
catgttagccaggatggtctcatctcctgacctcattatccacccgccttggcttcccaaagtactgggattacaggcatgagccactgcacctggcctatttttttttttaattatactttaagttctagggtacatgtgcacaatgtgcaggtttgttacatatgtacacatgtgccatgttggtgtgctgcacccatt

SEQ ID NO: 538547 - DNA, 201 bp, Homo sapiens
agctgagctctggccccacctcacatcagcccactaaacttgcctttctctgcactgctggaggggacagcctccgcaccctatgactttagcacttaactctgtgcatgtgtgtatgtatgttcccttgtcctgtctccgcactaatctgcaagatttctgagggcaggaagggaccattgtgtagacttacctgaattc

SEQ ID NO: 538548 - DNA, 201 bp, Homo sapiens
aaagtggtttcttgagatggaatccactctaggtgaaaatcttatgaacactgttgaaatgacaacaaagtatgtagaatgttacataaacatatttgatwaaaaaaaaaaaaaactcaagcacagtacagtacagtggttagaacacagggctgaagccagaatgtatgaagctagctgtgtgaccttggccaaattgtt

SEQ ID NO: 538549 - DNA, 201 bp, Homo sapiens
agcataaagtgaggcatgtttgtaagaacaaagggtttcattgagtacccatggacacaaagaagggaacgatagacgatggagcctacttgagagtcggyggtgggaggagggtaaggatcaaaaaactacctattgggtactatgctcactgcctgggtgagaaaataatgagaaaataatatgtacaccaaaccccag

SEQ ID NO: 538550 - DNA, 201 bp, Homo sapiens
ataaacctgtaaattgcccagtcttgggtatgtctttatcagcagcatgaaaacagactaatacaggtacattagtaggtgtgtatatttatggtgtacaygagatattttgatacaagcatgcaatgcataataatcacatcagggtagatggggtatccattacctcaagcatttatcctttgtgttacaaactatcca

SEQ ID NO: 538551 - DNA, 201 bp, Homo sapiens
atgtttgtaagaacaaagggtttcattgagtacccatggacacaaagaagggaacgatagacgatggagcctacttgagagtcggcggtgggaggagggtraggatcaaaaaactacctattgggtactatgctcactgcctgggtgagaaaataatgagaaaataatatgtacaccaaaccccagtgacatgcaatttac

SEQ ID NO: 538552 - DNA, 201 bp, Homo sapiens
agggaggatgagacgatgaagggcccggccagtagtatctaacaacaggataacattactctgcaaatgataaaaacagtgaaaagctcaagatttgttctttttttttttttttttaaagcagcaacctcttggcaacctgacagtgaaggttatagtgataaatcaaaacaaagacaatattgtaatacttaagaaata

SEQ ID NO: 538553 - DNA, 201 bp, Homo sapiens
atataactatatttttgtactcattaaccatacttacttccgcaacaccccactattcttcctagcctctggtgaccacgcttctgctctcttatctccaygagttcaattgttttaatttttagctcttacaaataagtgaaaacatgtcaagtttgtctttctgtgcctggcttatgtcgcttaacataatgacctcca

SEQ ID NO: 538554 - DNA, 201 bp, Homo sapiens
gagaaaataatatgtacaccaaaccccagtgacatgcaatttacccatgtaactcacctgcacatgtactcctggaacctaaaataaaagttggagggggraaaaaaagaacaaagtgtttccagaaacatcatcatagcaaatgggtgggccacgcttggaagcaaagtgctctttatgtgggtcacatcactactctac

SEQ ID NO: 538555 - DNA, 201 bp, Homo sapiens
cgcttctgctctcttatctccacgagttcaattgttttaatttttagctcttacaaataagtgaaaacatgtcaagtttgtctttctgtgcctggcttatgtcgcttaacataatgacctccagttgcacccatgtttttgcaaatgacaggatctcattcttttttttatggccgaatagtactctattgtgtatatata

SEQ ID NO: 538556 - DNA, 201 bp, Homo sapiens
atgcaatttacccatgtaactcacctgcacatgtactcctggaacctaaaataaaagttggaggggggaaaaaaagaacaaagtgtttccagaaacatcakcatagcaaatgggtgggccacgcttggaagcaaagtgctctttatgtgggtcacatcactactctacgatttcaagagagccctatgtagccaagtatat

SEQ ID NO: 538557 - DNA, 201 bp, Homo sapiens
taaattacccttgttttgcttctccttttaaaatcttcaagcacgcaccctgaatgaagacaaagaatgaggaggactggcaggatagttatgttgtctgkgggcaagatatggctagcagggctggagtgttagatatggatagcatggctggaagtgttttctgggagaaaggatgtcctggggtaaacaactagagcg

SEQ ID NO: 538558 - DNA, 201 bp, Homo sapiens
ggcttatgtcgcttaacataatgacctccagttgcacccatgtttttgcaaatgacaggatctcattcttttttttatggccgaatagtactctattgtgyatatatatcacattttctttttccattcatctgttgatggacccttaggttgcttcttccaaatcttggctattgtaaataatgctgcaataaacataag

SEQ ID NO: 538559 - DNA, 201 bp, Homo sapiens
tgaagacaaagaatgaggaggactggcaggatagttatgttgtctgggggcaagatatggctagcagggctggagtgttagatatggatagcatggctggragtgttttctgggagaaaggatgtcctggggtaaacaactagagcgagaattgcggtgcttagagcaaaaaggaaatcttaaaaataaaacaaaagcaat

SEQ ID NO: 538560 - DNA, 201 bp, Homo sapiens
gcaatgctagtcccagtcaggtagattatttcactttgaaatctcttcagaaatttaatgcatgggtaacttgcctagggtcatacatagtatgtctggarttctttggaattctgactctccatatgtgtactggctcagctttttggcaaagagttattataatgtctactactggtgaggggccagtactgctgaggt

SEQ ID NO: 538561 - DNA, 201 bp, Homo sapiens
ttataaacaatatctggatgtttataaattctgctcctaggagaaagtaaaagtaaaaataaaaaagtgaaaacaaaatcagaaaaatacttataactcagaatttgtgataatttctggtggcaaggactaaagttaaagttgacttatttcctcaatgaactactgatatattatgcaatacttttctcttgattagtg

SEQ ID NO: 538562 - DNA, 201 bp, Homo sapiens
tctttggaattctgactctccatatgtgtactggctcagctttttggcaaagagttattataatgtctactactggtgaggggccagtactgctgaggtgytcattattagttttaagacggctgttctgctcttatctattaagagacaccatgggaatgatgtctcccctgacaaccagaggatcttaggtagggaggc

SEQ ID NO: 538563 - DNA, 201 bp, Homo sapiens
actctacaccagtggcccccaacctttttggcaccagggaccagttttgtggaagacaattttcccactgactggggaggtggggtgggggctgtgtgggkgtgtgagatggtttcaggatgaaattattctatctaagatcatcaggcattagattcttacaaggagcgcacaacctagatcccttgcatgcgcagttca

SEQ ID NO: 538564 - DNA, 201 bp, Homo sapiens
ctttgatgtgtgtgtgtgtgtgtgtgtgtgtgtgtgtgtgtgtgtgttccatttgttatactgtatatctggttctttagttcagtgaaattcttaaatayagatgctactaccttccttgagtctaagtaaaaaaagcagactttcactttatcttcttgttgtatggtttccctcctgtcctaattggtgccttttgta

SEQ ID NO: 538565 - DNA, 201 bp, Homo sapiens
gctgatggcctaagcatatatgcttatagtccaagtgcagctaaaaatgaacactgtacctgatagagcataataggttctatgttgtatcctaaggtatyggcaaagttcttagcgatcactgtttttccacaaccctacaaatggaaaaaattattcaagaggtaagtcaaaataaccaaaagccaggaaactaaaagt

SEQ ID NO: 538566 - DNA, 201 bp, Homo sapiens
tccagtctggcgacagagcgagactccatctcaaaacaaaaaacaaaaacaagcaaacaaacaaacaaaaaaacggggggacaacaaacaccagggcctacctgagggtggaggttaggagatgaagactgaaaaactacctactatgcaatcccattcacaatagccacaaaaagagtaaaatacctaggaatatcatta

SEQ ID NO: 538567 - DNA, 201 bp, Homo sapiens
gatgtggaagcacagcatgtaatgtaataccagatgttctacgtgggaggaatttcataactcatacattttagcatgcttttttctaactgcgcccatcwcctttcatgcagcacaaaaatgtaaatctgtttcccaaactactaccaggtcctggaatctaaaaggaaatactggtggttctttggtatttttcacttt

SEQ ID NO: 538568 - DNA, 201 bp, Homo sapiens
ttcatgcagcacaaaaatgtaaatctgtttcccaaactactaccaggtcctggaatctaaaaggaaatactggtggttctttggtatttttcacttttagytgaagcacacatgtggatgtctagggtaacatcatgtggattcttcttattttttaaatggctcctattgtagtggcccagaacagctggggaatgtccg

SEQ ID NO: 538569 - DNA, 201 bp, Homo sapiens
gcccgtgctggtctcaaactcttggactcaagcaatccgcccaccttggcctcccaaaatgctgggattataggcatgagccactgcacccagcagggactttttttttttttttttttttgagatggagtttcactttcctggcccagggtggagtgcaatggcgcaatctcagctcaccgcaacctctgcctcctgggc

SEQ ID NO: 538570 - DNA, 201 bp, Homo sapiens
acacagattcccggccagggccactgtctgtgtggggtctgcacgttttccccatgcctgtgtgtgttttctctagctactctggtttcctcccacatccyaaagctgtgcactttaggttaactggtgtgtctacatggtcccagtgtgagtgagtgcaggtgtgttagtgtgccccacgaggcgggggatggcctcctg

SEQ ID NO: 538571 - DNA, 201 bp, Homo sapiens
gtttcaccgtgttagccaggatggtcttgatctcctgacctcgtgatctgcctgcctcggcctcccaaagtgctgggattacaggcgtgagccaccgcacstggctgctttcttttttcaatttcgtttatggtgctttatatctatattgtataatatacatataaattatatataatatatagatataaaaatatataa

SEQ ID NO: 538572 - DNA, 201 bp, Homo sapiens
atcagctttgaaaccatgagtagaatcagtcacattatttactgataaatatacatcgctaaaagaattcaagtctgggccaggtgcagtggctcatgccygtaatcctagcactttgggaggccgaggtgggtggatcacttgaggtcaggagtttgagaccagattggccaatatggtgaaaccctttctctactaaaa

SEQ ID NO: 538573 - DNA, 201 bp, Homo sapiens
acggtggctcatgcctgtaatcccagcattttgggaggccaaggcgggtggatcacatgaggccaggagttcgataccagcttggccaacatggtgaaacytcgtctctactaaaaatccaaaaagtagctgggcgtggtgggggggtgcctgtaatcccagctacttgggaggctgaggcacgagaatcacttgaacccg

SEQ ID NO: 538574 - DNA, 201 bp, Homo sapiens
agcattttgggaggccaaggcgggtggatcacatgaggccaggagttcgataccagcttggccaacatggtgaaacctcgtctctactaaaaatccaaaamgtagctgggcgtggtgggggggtgcctgtaatcccagctacttgggaggctgaggcacgagaatcacttgaacccgggaggcggagttgcagtgagctga

SEQ ID NO: 538575 - DNA, 201 bp, Homo sapiens
taatattgtatacttatatactactttacagttcacaaaatgcttgaacatgttatctcatttgggttttacaacaatcctgtgaggtagctgctatagtyagttctattttacagatggggaaatggagcttcagagaggttaaatgatagcctaagatcactggatagaacttggaatcaaacttggttttggctacct

SEQ ID NO: 538576 - DNA, 201 bp, Homo sapiens
aacctggatgctgcaaagatatgataaatcagagcaaaactcaatggaaaataaatctatcttcatgactgttgaaaattttaatctacaataatgacaayccaacaaatttaactttacacaggaacaaaaaaccaaatatcacatgttctcacaagtgggagcgaaacatcgaggacatacggacacaaagaagggaac

SEQ ID NO: 538577 - DNA, 201 bp, Homo sapiens
taatgtcataaaaagaatttattgatatttaattatacacatatctatggttatatatatcatgttaaaatctatacgtgcataacaggaaattctcttgygcattacaacaaaaaaggcacttaaagggatgggcatgcatgcatctttctggttagaaagctatagaaatccttggcaatttgtgggacaaatgtggtg

SEQ ID NO: 538578 - DNA, 201 bp, Homo sapiens
ttaaagcagcaacctcttggcaacctgacagtgaaggttatagtgataaatcaaaacaaagacaatattgtaatacttaagaaatatcacaaagacattargtgatttttcttaagaatcacaaagaattaagtgcttcttaatttaagaatttaaaatttttggtggttttatgaagacgtttctaaatatgtgatgcag

SEQ ID NO: 538579 - DNA, 201 bp, Homo sapiens
atatggaaggaaaaaaaagtaaagagctataacattgtattgtgctctaaaaattagagggaacagagcagcttaattacaagtggccagtttttcagctytatattcttatgcttgttatgagatcaataaaaattatttcctgattttctagttctaaacatgccaagaaaacaactgccctaacctggtatgctaaca

SEQ ID NO: 538580 - DNA, 201 bp, Homo sapiens
ttataggctcgtagaactcatccaaagcaactgctcattttacttagagtaccttatttattcattctcttctatttaaattcaagtaggaatgaaagatgaagaagatttttggaaaatctgggaatatggaatgcagaatgatgaagtcaagaggatgattcacggattaagatgctatacttataaacaaacctttaa

SEQ ID NO: 538581 - DNA, 201 bp, Homo sapiens
aaggcgggtggatcacatgaggccaggagttcgataccagcttggccaacatggtgaaacctcgtctctactaaaaatccaaaaagtagctgggcgtggtgggggggtgcctgtaatcccagctacttgggaggctgaggcacgagaatcacttgaacccgggaggcggagttgcagtgagctgagattgcgccactgcag

SEQ ID NO: 538582 - DNA, 201 bp, Homo sapiens
gagagacaaggtgagtgcttgttccactgtattcagaactggaatccttgagtcattttaaagtcaaagaaagaaaattaaccagcttattcagttacataaaaaaaaagtactgttttaagtttcaaggatccaaagatgagttaaatttaatctctacttctgaggaattgtttcatgcccaccctcattcctcttttc

SEQ ID NO: 538583 - DNA, 201 bp, Homo sapiens
tataggctcgtagaactcatccaaagcaactgctcattttacttagagtaccttatttattcattctcttctatttaaattcaagtaggaatgaaagatgaagaagatttttggaaaatctgggaatatggaatgcagaatgatgaagtcaagaggatgattcacggattaagatgctatacttataaacaaacctttaag

SEQ ID NO: 538584 - DNA, 201 bp, Homo sapiens
tgaggagcccctccgcccggcagctgcccgtctgcgaagtgaggagcccctccgcctggcagccgccccgtccgggagggaggtggggggtcagcccccgscccgccagccgccccgtctgggagggaggtggggggcgcctctgcccggctgccccgtctgggaagtgaggagcccctctgccaggctgccaccccgtct

SEQ ID NO: 538585 - DNA, 201 bp, Homo sapiens
ataggctcgtagaactcatccaaagcaactgctcattttacttagagtaccttatttattcattctcttctatttaaattcaagtaggaatgaaagatgaagaagatttttggaaaatctgggaatatggaatgcagaatgatgaagtcaagaggatgattcacggattaagatgctatacttataaacaaacctttaagg

SEQ ID NO: 538586 - DNA, 201 bp, Homo sapiens
tggatcttcctgtagcaattccttccttctaccttcttacatgcttccccttgtattcatggtatggggcaggttgtgactatctgtacccaggcacccacctgagggttgagggagggctgtgtgcagagttggatacccacatgtcagcattcaaagacccacttctgaccctgctctccttaaatcctctcatctatc

SEQ ID NO: 538587 - DNA, 201 bp, Homo sapiens
aacatgttatctcatttgggttttacaacaatcctgtgaggtagctgctatagtcagttctattttacagatggggaaatggagcttcagagaggttaaaygatagcctaagatcactggatagaacttggaatcaaacttggttttggctacctggctcagaggtgtttattccatagccacaaactaacaagcgtagaa

SEQ ID NO: 538588 - DNA, 201 bp, Homo sapiens
gcccttctgacacatgtcaaagtcagagatcacagcatgatcaaggcatagggatgccgaggagggagggatgtgttttgctgagggtagacaggctgcakccaaggagggcttagggagacattggcatgcagccttaaaggaagagacacaggagtgtgtatgggcattccaggcaggggccaatgtgagtgaaggtgt

SEQ ID NO: 538589 - DNA, 201 bp, Homo sapiens
gctccaccctggtgtgagaaaagagatatcagcaggtcctgccatcccacaaatgtgtgtactgtcattactcccagtgtgaaacattctgaatttgctgytaaaatttcaaattaatgagatttcacttaaaaatctagattttggtcttctcttgaaaatgggaggataaggccaaattggggccagattctcacatgg

SEQ ID NO: 538590 - DNA, 201 bp, Homo sapiens
actgactcttccccagggcagatggctgcaatcctgagtcttggttccctcttgtgtggctctaacttcacatgagtcactctgtctctctgtctctctcttttttttttttttttttaagaaacagggtctagctatgttgcccagctggagtgcaatggctattcacaggtgcaatcattgtgctccacagccttgaac

SEQ ID NO: 538591 - DNA, 201 bp, Homo sapiens
aaaagaaattaaggcccagagaggtgaaatgactacttaaaaccaactagtgatggaaccagaaagaggatttgggtttcttaatttttagtcagaggaartttctctgtgctacaatacctcactaaaatttctgaattctttcataaaagcctttcatttgatagccaaaagatcttctgatagaaaggacattgactc

SEQ ID NO: 538592 - DNA, 201 bp, Homo sapiens
ctgactcttccccagggcagatggctgcaatcctgagtcttggttccctcttgtgtggctctaacttcacatgagtcactctgtctctctgtctctctctyttttttttttttttttaagaaacagggtctagctatgttgcccagctggagtgcaatggctattcacaggtgcaatcattgtgctccacagccttgaact

SEQ ID NO: 538593 - DNA, 201 bp, Homo sapiens
tgttattgagacatctgaaatttgaataaggtctgtgggttacacattaatgctatatcaatgttaacttcctgattttgaggtctgtgttgttggttacrttaggagaatgctcttgtgaggaaaaactgaaatttttttttttttttttgagacagagtctcgctcgtggcccaagatggagtgcagcggcatgctctt

SEQ ID NO: 538594 - DNA, 201 bp, Homo sapiens
tacagatgttctttatggaaaggattattcagccctcaccagcaacgtgaaatgtaggcccttcaacagctttgtattcccctcttaaaacaaacatcccraagaaaaaaataataaaaattatccaatatgagtgagctctttttcttggggggtaaggggattcccactgttatgctaccagaacactgtcaaggaaga

SEQ ID NO: 538595 - DNA, 201 bp, Homo sapiens
ccagccactgctgtatttagaattagtttataagcaattggcaacatgaaggagttctgttgctccatccttttagatgttaatggtttccttctgtaaaygactaatgatagattctgtctgggtttaaaaatagaattttgcgtcacacatgagtacatgtaactgtggctttggcactcctttaaggggggcagggag

SEQ ID NO: 538596 - DNA, 201 bp, Homo sapiens
ctttgtattcccctcttaaaacaaacatcccgaagaaaaaaataataaaaattatccaatatgagtgagctctttttcttggggggtaaggggattcccamtgttatgctaccagaacactgtcaaggaagacttgacgaatttcattcagaaccccagcaactggaaagtctcatatgaattagactggactagagagta

SEQ ID NO: 538597 - DNA, 201 bp, Homo sapiens
cttttatgacacattgttttggttatagagttaaattcaatggcatcaatactttgttgaaaatctttaaagtaaaaccctcattccaattttcaggagayaaagttttataaacaatatctggatgtttataaattctgctcctaggagaaagtaaaagtaaaaataaaaaagtgaaaacaaaatcagaaaaatacttat

SEQ ID NO: 538598 - DNA, 201 bp, Homo sapiens
ttccagcaaactcccaggagaggctaatgctgctggtttgagatcctcccttttgagtagccaggctctggactaagtttctcataatctcttatgtgggmaccgctgaagcaagggattaagctacttttgcataatgaatggtatcagcatcacctatcacccaggtatctattttacaacagtcatattttccaaacc

SEQ ID NO: 538599 - DNA, 201 bp, Homo sapiens
acttctattacaactagtaacggacagttctttactttactttcacatgaagactgaacctggcaacaatgtgtggctaaaaagaggccaaaaatcaaaawgcacaaagttttaatcctatcagcacaagacaaataccacagagcaactttcctaggaaaatatgtaacatacctgactctcatcatccaattagctctt

SEQ ID NO: 538600 - DNA, 201 bp, Homo sapiens
tatatgcttatagtccaagtgcagctaaaaatgaacactgtacctgatagagcataataggttctatgttgtatcctaaggtatcggcaaagttcttagcratcactgtttttccacaaccctacaaatggaaaaaattattcaagaggtaagtcaaaataaccaaaagccaggaaactaaaagtctgcagtgagactgtc

SEQ ID NO: 538601 - DNA, 201 bp, Homo sapiens
atttcttattgtacccaagtcatagaaaaaaataacacggcatctattatcaaccacacaaataaatttgaagagtgctttacttagaagtgagttatacwtcattttattaaacgacagtgtataaaatcatgtttaaaatatactttaagacaaaaaagatctcgcatttcagaaactaagaaggtaaggcaaggtcct

SEQ ID NO: 538602 - DNA, 201 bp, Homo sapiens
attttgacttgttattattttgaagtaatttttaattcttatcaaagtaataagcatacacggtttaataagtcaaatagtactacaagatgtataacaatttaaaatagcacccttgtgacacagtctccccctcaagcaattaagaggttaaaggtaactacttcaactctgcttactacatcttttactatttacctc

SEQ ID NO: 538603 - DNA, 201 bp, Homo sapiens
tcctcccacctcatcctcctaagtagcagggactacaggcatgcaaaactatgcctggctaatttttttattttttatttttagtagaagcagggtcttgytgtgttgcccaggctggtctcaaactcctggactgaagtgatcctcctgcttcagcctccgaaagtgctgggattacaagtgtaagccaagtcttcactt

SEQ ID NO: 538604 - DNA, 201 bp, Homo sapiens
ttttgacttgttattattttgaagtaatttttaattcttatcaaagtaataagcatacacggtttaataagtcaaatagtactacaagatgtataacaatttaaaatagcacccttgtgacacagtctccccctcaagcaattaagaggttaaaggtaactacttcaactctgcttactacatcttttactatttacctcc

SEQ ID NO: 538605 - DNA, 201 bp, Homo sapiens
ctttcagattttactgacaatgccaggcatgttcataaaatctggtttgaacttgccaactcattctaagtaagtcatggaaattatatgttgtctggctstatataaaaatagcactggctgtttggttggcagggtatgggaaggacctccaggtaccctatacagaatctatttcagaaccacataacatgatgctat

SEQ ID NO: 538606 - DNA, 201 bp, Homo sapiens
tttgacttgttattattttgaagtaatttttaattcttatcaaagtaataagcatacacggtttaataagtcaaatagtactacaagatgtataacaatttaaaatagcacccttgtgacacagtctccccctcaagcaattaagaggttaaaggtaactacttcaactctgcttactacatcttttactatttacctcca

SEQ ID NO: 538607 - DNA, 201 bp, Homo sapiens
agcctgggaaacaagagcgaaatttggtcttaaaaaaaaaaaatttgtatgtactaaaagaaaaagccagcacattaaagagagataatacaaatgccccyttacatacttgaaattagtaacaatggataccattattaattcccagtaatatcttcctttatttgctagaaacttcagaatgtcgcttccctaccatct

SEQ ID NO: 538608 - DNA, 201 bp, Homo sapiens
aaacataaagatgatgtttggaatcagagagatctgtggttgaatgccccgttctatcacttattggttgtagaatttatttaaggtctcttgaatttccrttttttaatctgtaaaacagattcaaacacacaaatgtacataccccaaaacctaatagataatagaaaaaaattacttaatagaaaaaacaatattgta

SEQ ID NO: 538609 - DNA, 201 bp, Homo sapiens
gtttagcaaaagtttattaaagaagacaagttaaattcacctcatcacattgggcctttaaaaaatgtgcagaaacctgtgagatagataacatcactgcmctctttaggagaacaaaagggaaagtgacagcatctctcttttgggaattttgccaaagaacacaaaaataacatcaccgctactgaacagacaagtata

SEQ ID NO: 538610 - DNA, 201 bp, Homo sapiens
gtgaacaaatctgagctaaaaataattgtcatcctgtttaatcactgtggagtgctacacatttgacacagcacagtagatcttaacagtaacttcgcccytcaatagatccttgccattttccttttgtttacaagttctacagggaaggaaaaccatgagctgtaacactgagagtttactatttatttaccaccatta

SEQ ID NO: 538611 - DNA, 201 bp, Homo sapiens
gtactggtacaaaaacagatacatagaccaatggaacatgtgagagaagccagaaacaaagccacacacctacagccatctgatctttgacaaagccaacaaaaaaaaaagcaatggggaaaggattgaggattgctttgactattgaggctctcttttggttccatacaaattgtaaaatagcttttcctaattttgtga

SEQ ID NO: 538612 - DNA, 201 bp, Homo sapiens
acaaagtgagtcactgtctcaaaaaaaaaaaaaaaaacaaaacaggcctgaggccgccgctagccggagcatcaccatgaagttcaatcccttcgtgaacytggaccgcagcaaaaaccgcaaacgtcacttccatgcccccttgcacgtgcaccggaagatcatgtcatccccgctctccaaggagctgcggcagaagta

SEQ ID NO: 538613 - DNA, 201 bp, Homo sapiens
atccgcaaggacgacgaggtccaggtagttcaaggacactacaaaggtcagcaaattggcaaggtagtccaggtgtacagaaagaaagatgtcatctacaytgagcaggtgcagcgtgagtaggccaacagcacaaccgtccacgtgggtactcacccaaacaaggtggttatcaccaggctaaatctcaacaaggatcgg

SEQ ID NO: 538614 - DNA, 201 bp, Homo sapiens
cgccgctagccggagcatcaccatgaagttcaatcccttcgtgaacttggaccgcagcaaaaaccgcaaacgtcacttccatgcccccttgcacgtgcacmggaagatcatgtcatccccgctctccaaggagctgcggcagaagtacaatgtccgctccacacccatccgcaaggacgacgaggtccaggtagttcaagg

SEQ ID NO: 538615 - DNA, 201 bp, Homo sapiens
gctgcggcagaagtacaatgtccgctccacacccatccgcaaggacgacgaggtccaggtagttcaaggacactacaaaggtcagcaaattggcaaggtartccaggtgtacagaaagaaagatgtcatctacactgagcaggtgcagcgtgagtaggccaacagcacaaccgtccacgtgggtactcacccaaacaaggt

SEQ ID NO: 538616 - DNA, 201 bp, Homo sapiens; identical to SEQ ID NO: 355381

SEQ ID NO: 538617 - DNA, 201 bp, Homo sapiens; identical to SEQ ID NO: 355382

SEQ ID NO: 538618 - DNA, 201 bp, Homo sapiens; identical to SEQ ID NO: 355383

SEQ ID NO: 538619 - DNA, 201 bp, Homo sapiens; identical to SEQ ID NO: 355175

SEQ ID NO: 538620 - DNA, 201 bp, Homo sapiens; identical to SEQ ID NO: 355176

SEQ ID NO: 538621 - DNA, 201 bp, Homo sapiens; identical to SEQ ID NO: 355315

SEQ ID NO: 538622 - DNA, 201 bp, Homo sapiens; identical to SEQ ID NO: 355384

SEQ ID NO: 538623 - DNA, 201 bp, Homo sapiens; identical to SEQ ID NO: 355317

SEQ ID NO: 538624 - DNA, 201 bp, Homo sapiens; identical to SEQ ID NO: 355385

SEQ ID NO: 538625 - DNA, 201 bp, Homo sapiens; identical to SEQ ID NO: 355178

SEQ ID NO: 538626 - DNA, 201 bp, Homo sapiens; identical to SEQ ID NO: 355179

SEQ ID NO: 538627 - DNA, 201 bp, Homo sapiens; identical to SEQ ID NO: 355180

SEQ ID NO: 538628 - DNA, 201 bp, Homo sapiens; identical to SEQ ID NO: 355181

SEQ ID NO: 538629 - DNA, 201 bp, Homo sapiens; identical to SEQ ID NO: 355182

SEQ ID NO: 538630 - DNA, 201 bp, Homo sapiens; identical to SEQ ID NO: 355183

SEQ ID NO: 538631 - DNA, 201 bp, Homo sapiens; identical to SEQ ID NO: 355186

SEQ ID NO: 538632 - DNA, 201 bp, Homo sapiens; identical to SEQ ID NO: 355188

SEQ ID NO: 538633 - DNA, 201 bp, Homo sapiens; identical to SEQ ID NO: 355189

SEQ ID NO: 538634 - DNA, 201 bp, Homo sapiens; identical to SEQ ID NO: 355327

SEQ ID NO: 538635 - DNA, 201 bp, Homo sapiens; identical to SEQ ID NO: 355329

SEQ ID NO: 538636 - DNA, 201 bp, Homo sapiens; identical to SEQ ID NO: 355331

SEQ ID NO: 538637 - DNA, 201 bp, Homo sapiens; identical to SEQ ID NO: 355332

SEQ ID NO: 538638 - DNA, 201 bp, Homo sapiens; identical to SEQ ID NO: 355333

SEQ ID NO: 538639 - DNA, 201 bp, Homo sapiens; identical to SEQ ID NO: 355334

SEQ ID NO: 538640 - DNA, 201 bp, Homo sapiens; identical to SEQ ID NO: 355335

SEQ ID NO: 538641 - DNA, 201 bp, Homo sapiens; identical to SEQ ID NO: 355389

SEQ ID NO: 538642 - DNA, 201 bp, Homo sapiens; identical to SEQ ID NO: 355337

SEQ ID NO: 538643 - DNA, 201 bp, Homo sapiens; identical to SEQ ID NO: 355391

SEQ ID NO: 538644 - DNA, 201 bp, Homo sapiens; identical to SEQ ID NO: 355393

SEQ ID NO: 538645 - DNA, 201 bp, Homo sapiens; identical to SEQ ID NO: 355396

SEQ ID NO: 538646 - DNA, 201 bp, Homo sapiens; identical to SEQ ID NO: 355394

SEQ ID NO: 538647 - DNA, 201 bp, Homo sapiens; identical to SEQ ID NO: 355273

SEQ ID NO: 538648 - DNA, 201 bp, Homo sapiens; identical to SEQ ID NO: 355397

SEQ ID NO: 538649 - DNA, 201 bp, Homo sapiens; identical to SEQ ID NO: 355399

SEQ ID NO: 538650 - DNA, 201 bp, Homo sapiens; identical to SEQ ID NO: 355401

SEQ ID NO: 538651 - DNA, 201 bp, Homo sapiens; identical to SEQ ID NO: 355403

SEQ ID NO: 538652 - DNA, 201 bp, Homo sapiens; identical to SEQ ID NO: 355405

SEQ ID NO: 538653 - DNA, 201 bp, Homo sapiens; identical to SEQ ID NO: 355407

SEQ ID NO: 538654 - DNA, 201 bp, Homo sapiens; identical to SEQ ID NO: 355409

SEQ ID NO: 538655 - DNA, 201 bp, Homo sapiens; identical to SEQ ID NO: 355279

SEQ ID NO: 538656 - DNA, 201 bp, Homo sapiens; identical to SEQ ID NO: 355411

SEQ ID NO: 538657 - DNA, 201 bp, Homo sapiens; identical to SEQ ID NO: 355412

SEQ ID NO: 538658 - DNA, 201 bp, Homo sapiens; identical to SEQ ID NO: 355339

SEQ ID NO: 538659 - DNA, 201 bp, Homo sapiens; identical to SEQ ID NO: 355340

SEQ ID NO: 538660 - DNA, 201 bp, Homo sapiens; identical to SEQ ID NO: 355343

SEQ ID NO: 538661 - DNA, 201 bp, Homo sapiens; identical to SEQ ID NO: 355345

SEQ ID NO: 538662 - DNA, 201 bp, Homo sapiens; identical to SEQ ID NO: 355346

SEQ ID NO: 538663 - DNA, 201 bp, Homo sapiens; identical to SEQ ID NO: 355416

SEQ ID NO: 538664 - DNA, 201 bp, Homo sapiens; identical to SEQ ID NO: 355347

SEQ ID NO: 538665 - DNA, 201 bp, Homo sapiens; identical to SEQ ID NO: 355348

SEQ ID NO: 538666 - DNA, 201 bp, Homo sapiens; identical to SEQ ID NO: 355349

SEQ ID NO: 538667 - DNA, 201 bp, Homo sapiens; identical to SEQ ID NO: 355350

SEQ ID NO: 538668 - DNA, 201 bp, Homo sapiens; identical to SEQ ID NO: 355351

SEQ ID NO: 538669 - DNA, 201 bp, Homo sapiens; identical to SEQ ID NO: 355352

SEQ ID NO: 538670 - DNA, 201 bp, Homo sapiens; identical to SEQ ID NO: 355353

SEQ ID NO: 538671 - DNA, 201 bp, Homo sapiens; identical to SEQ ID NO: 355214

SEQ ID NO: 538672 - DNA, 201 bp, Homo sapiens; identical to SEQ ID NO: 355290

SEQ ID NO: 538673 - DNA, 201 bp, Homo sapiens; identical to SEQ ID NO: 355417

SEQ ID NO: 538674 - DNA, 201 bp, Homo sapiens; identical to SEQ ID NO: 355215

SEQ ID NO: 538675 - DNA, 201 bp, Homo sapiens; identical to SEQ ID NO: 355420

SEQ ID NO: 538676 - DNA, 201 bp, Homo sapiens; identical to SEQ ID NO: 355422

SEQ ID NO: 538677 - DNA, 201 bp, Homo sapiens; identical to SEQ ID NO: 355425

SEQ ID NO: 538678 - DNA, 201 bp, Homo sapiens; identical to SEQ ID NO: 355427

SEQ ID NO: 538679 - DNA, 201 bp, Homo sapiens; identical to SEQ ID NO: 355429

SEQ ID NO: 538680 - DNA, 201 bp, Homo sapiens; identical to SEQ ID NO: 355431

SEQ ID NO: 538681 - DNA, 201 bp, Homo sapiens; identical to SEQ ID NO: 355434

SEQ ID NO: 538682 - DNA, 201 bp, Homo sapiens; identical to SEQ ID NO: 355295

SEQ ID NO: 538683 - DNA, 201 bp, Homo sapiens; identical to SEQ ID NO: 355436

SEQ ID NO: 538684 - DNA, 201 bp, Homo sapiens; identical to SEQ ID NO: 355437

SEQ ID NO: 538685 - DNA, 201 bp, Homo sapiens; identical to SEQ ID NO: 355438

SEQ ID NO: 538686 - DNA, 201 bp, Homo sapiens; identical to SEQ ID NO: 355300

SEQ ID NO: 538687 - DNA, 201 bp, Homo sapiens; identical to SEQ ID NO: 355301

SEQ ID NO: 538688 - DNA, 201 bp, Homo sapiens; identical to SEQ ID NO: 355357

SEQ ID NO: 538689 - DNA, 201 bp, Homo sapiens; identical to SEQ ID NO: 355302

SEQ ID NO: 538690 - DNA, 201 bp, Homo sapiens; identical to SEQ ID NO: 355358

SEQ ID NO: 538691 - DNA, 201 bp, Homo sapiens; identical to SEQ ID NO: 355359

SEQ ID NO: 538692 - DNA, 201 bp, Homo sapiens; identical to SEQ ID NO: 355303

SEQ ID NO: 538693 - DNA, 201 bp, Homo sapiens; identical to SEQ ID NO: 355360

SEQ ID NO: 538694 - DNA, 201 bp, Homo sapiens; identical to SEQ ID NO: 355361

SEQ ID NO: 538695 - DNA, 201 bp, Homo sapiens; identical to SEQ ID NO: 355362

SEQ ID NO: 538696 - DNA, 201 bp, Homo sapiens; identical to SEQ ID NO: 355364

SEQ ID NO: 538697 - DNA, 201 bp, Homo sapiens; identical to SEQ ID NO: 355441

SEQ ID NO: 538698 - DNA, 201 bp, Homo sapiens; identical to SEQ ID NO: 355442

SEQ ID NO: 538699 - DNA, 201 bp, Homo sapiens; identical to SEQ ID NO: 355231

SEQ ID NO: 538700 - DNA, 201 bp, Homo sapiens; identical to SEQ ID NO: 355446

SEQ ID NO: 538701 - DNA, 201 bp, Homo sapiens; identical to SEQ ID NO: 355449

SEQ ID NO: 538702 - DNA, 201 bp, Homo sapiens; identical to SEQ ID NO: 355451

SEQ ID NO: 538703 - DNA, 201 bp, Homo sapiens; identical to SEQ ID NO: 355453

SEQ ID NO: 538704 - DNA, 201 bp, Homo sapiens; identical to SEQ ID NO: 355454

SEQ ID NO: 538705 - DNA, 201 bp, Homo sapiens; identical to SEQ ID NO: 355455

SEQ ID NO: 538706 - DNA, 201 bp, Homo sapiens; identical to SEQ ID NO: 355456

SEQ ID NO: 538707 - DNA, 201 bp, Homo sapiens; identical to SEQ ID NO: 355457

SEQ ID NO: 538708 - DNA, 201 bp, Homo sapiens; identical to SEQ ID NO: 355458

SEQ ID NO: 538709 - DNA, 201 bp, Homo sapiens; identical to SEQ ID NO: 355459

SEQ ID NO: 538710 - DNA, 201 bp, Homo sapiens; identical to SEQ ID NO: 355370

SEQ ID NO: 538711 - DNA, 201 bp, Homo sapiens; identical to SEQ ID NO: 355371

SEQ ID NO: 538712 - DNA, 201 bp, Homo sapiens; identical to SEQ ID NO: 355372

SEQ ID NO: 538713 - DNA, 201 bp, Homo sapiens; identical to SEQ ID NO: 355373

SEQ ID NO: 538714 - DNA, 201 bp, Homo sapiens; identical to SEQ ID NO: 355310

SEQ ID NO: 538715 - DNA, 201 bp, Homo sapiens; identical to SEQ ID NO: 355245

SEQ ID NO: 538716 - DNA, 201 bp, Homo sapiens
cgagaagggagtgctgcttcatggggggtcaggtcagtttctaagagatgagcgccggacctatagcgggttagggttgcgggagcctcccacccaagaartgtgtccgagagctctgccaatggccaggtggtaccatggtgactagtgagaggaaggtccgtttagtgaagaaacaggaatggggaaagcaagctggaa

SEQ ID NO: 538717 - DNA, 201 bp, Homo sapiens
aagaagaaaggcttaaaggaaatcacgtctaagtgaccgagagttggaaattgctagacctactaattctttgttgtaaatgatgaaattttgtttcttggttgatttgctttaagaagctctttttctatttcagcagttggaattgatcacaccttttcagttgtacttcaatcctgaattaatctttaaacactttca

SEQ ID NO: 538718 - DNA, 201 bp, Homo sapiens
cgcgatcgcgcaggacaggacccagaagccagagcgcaggaactgcttccggccggctcccggcttccgtcgggccccgcgcccgcgctgcatgctgggaycttcaggtcggaggccggggtgaggccgacccacaggccgccttgctccctcgcgaagacgcttatgccagtctcgcccgtccccgctcctcctcagaga

SEQ ID NO: 538719 - DNA, 201 bp, Homo sapiens
agaagaaaggcttaaaggaaatcacgtctaagtgaccgagagttggaaattgctagacctactaattctttgttgtaaatgatgaaattttgtttcttggttgatttgctttaagaagctctttttctatttcagcagttggaattgatcacaccttttcagttgtacttcaatcctgaattaatctttaaacactttcaa

SEQ ID NO: 538720 - DNA, 201 bp, Homo sapiens
gtgacgatttgaagcacacacaggcttcccgccacctcctttaaaccgccgctggcttgccagggacagacggcgcggttggctccccaaaattccgactratacgcgcctcggcgagcgaaagcaaacgcgggatactctcgcgttcctgattggctggttgtggacacctcaattatgacagaaaggggccgggcggga

SEQ ID NO: 538721 - DNA, 201 bp, Homo sapiens; identical to SEQ ID NO: 213888

SEQ ID NO: 538722 - DNA, 201 bp, Homo sapiens
ctcgtttttcccggacgttggctggtggagaagagagggtggggagatggggcgctggggggggggcggtggcgacgcaactcgtgattggcggatgtgckttccttaggtctctacggattgcggttgcttggcgttgattgggcagtcgcgggaaaactaaagtgggcggggggcctttgggcccgccccgccgccggg

SEQ ID NO: 538723 - DNA, 201 bp, Homo sapiens
gcgctggggggggggcggtggcgacgcaactcgtgattggcggatgtgcgttccttaggtctctacggattgcggttgcttggcgttgattgggcagtcgygggaaaactaaagtgggcggggggcctttgggcccgccccgccgccggggcctgctggcggaaggggaaatggggtgggtggggggtggggcaggcgacg

SEQ ID NO: 538724 - DNA, 201 bp, Homo sapiens
gggtaggaattaaaatctgtgttttatttttaaagttccctgcatcgttttgatgtgtccagttcctgtatttggaaatcactggtttagacttaacgttktcctatgagaggaggctgactagctagctgcttaggggttgtctcacagggatggccttattttgtccattcagcacctaggcacacccaccaccttggt

SEQ ID NO: 538725 - DNA, 201 bp, Homo sapiens
ttcctttcttttagatgtttctgactgcctaatgtaaacatttctcagcaatttatattagaccctgaagtttttctctgatatgtcagttctatttattrtatgatgatactacatatgaaagcactgttttctgttctgccgattaacctagtctttccagcaaactttctccatacgacgatcacaatttaaaatttt

SEQ ID NO: 538726 - DNA, 201 bp, Homo sapiens
atttatattagaccctgaagtttttctctgatatgtcagttctatttattatatgatgatactacatatgaaagcactgttttctgttctgccgattaacstagtctttccagcaaactttctccatacgacgatcacaatttaaaattttctttcctattattataaatgtcacagtcccaatgatgtctttcagacttt

SEQ ID NO: 538727 - DNA, 201 bp, Homo sapiens
tcctttattaaatggggtcagcatcaaaactttttcttaggaagtaaaaaattaagttgaaacttttcatcctgttacttgtttttggtaccatcttagcyatgatttctgggtcagtggtacataaagtagttgcttaggtagtaatgttttgaaaatgtctgtaggtcactttgttcaaatgggaggttttaaccataa

SEQ ID NO: 538728 - DNA, 201 bp, Homo sapiens; identical to SEQ ID NO: 213897

SEQ ID NO: 538729 - DNA, 201 bp, Homo sapiens
gcgagttgagctgtctaagaccccgcgatcgcgcaggacaggacccagaagccagagcgcaggaactgcttccggccggctcccggcttccgtcgggcccygcgcccgcgctgcatgctgggatcttcaggtcggaggccggggtgaggccgacccacaggccgccttgctccctcgcgaagacgcttatgccagtctcgc

SEQ ID NO: 538730 - DNA, 201 bp, Homo sapiens
tgttgcccaggctggtcttgaactcctggactcaagcaatcctcccacctcagcctcccaaagtgctaggatgacaggcatgagccaccatgcccagccattttttttttttttgccttttttgttttgttttgttttttgtttttttaattaaaaaaaaaaaatagagacagggtctcagattttcattagatttggaaa

SEQ ID NO: 538731 - DNA, 201 bp, Homo sapiens
ggcaaaccaggacaggggcatgatctgtgttttctttggctcccctagctcctagtacacatagctcaggtcagtaaccatttgcagattgagcattctgrctacagttgaagagcacttggactgggtaggagcagacagtgccagggttgtggcaagaccaacgtcaacaggctcaagatatcttgggagtaacctggt

SEQ ID NO: 538732 - DNA, 201 bp, Homo sapiens
tagaagcagaacacctaagtcctgggtctggataatgaaaccctcagtctctggggcctctgaaaataaggaagcattggagctattgccatgttgagtartgggcttcctagaactattgtcatctatcctgccagtgttttatgttgtagctgtttttctttgacaggtgagttccagctatgttgttagtcatgatcc

SEQ ID NO: 538733 - DNA, 201 bp, Homo sapiens
ccggtttgttgaaaggaaaaccccagctctgatccaatggtaattggggccacagagcagggcattcctcttccacccctgccctctgtattaagagggasttacagttcaactcatctgcagctgcattccttcctgaggatggcaggaatccattttatatcctatgtaggatatcattctgataagtttccattaaag

SEQ ID NO: 538734 - DNA, 201 bp, Homo sapiens
tgtaggatatcattctgataagtttccattaaagttttttctcatcgtaattcatctttattgactgaggtgctcaacctgccaggctggaaaagtagttkagcacacaaggcttcttgctgcggatttcttccaagttaggatgtgggaaagcaaagatggtgcatattaaggtgtggctgagcacaggaaagacaatac

SEQ ID NO: 538735 - DNA, 201 bp, Homo sapiens
gcacacaaggcttcttgctgcggatttcttccaagttaggatgtgggaaagcaaagatggtgcatattaaggtgtggctgagcacaggaaagacaatacaratttttaaaggtttaataggggactggagggccgggtgtggtggctcacacctgtaatcccagcacttggggaggccaaggcagtggatcacgaggtcag

SEQ ID NO: 538736 - DNA, 201 bp, Homo sapiens
tagctaaatctctgcacacatccatgattattttcaaaagataattcctagaagtagaattcctattttgttgccaaacgccttccagaatggatgttcargtttacatttcaactagcatttataactgttcatttccccacatcctaatcaaacaaggaaggcattttatttaccctttcctagttgaatagttgtagg

SEQ ID NO: 538737 - DNA, 201 bp, Homo sapiens
cagactttgtatttatgttcctttttggtggattcttaatgaccgtatccttcaacaaacaacacgggaaaatgttgaagaacaccctggctcttcctaargcttgtcatctgtctcccacagttctctagatcttagcttcagggcactatcatttattttacagcacattttctgtgacaagtttccaaacctagcagt

SEQ ID NO: 538738 - DNA, 201 bp, Homo sapiens
catactcttacaggcaaaccaggacaggggcatgatctgtgttttctttggctcccctagctcctagtacacatagctcaggtcagtaaccatttgcagaytgagcattctggctacagttgaagagcacttggactgggtaggagcagacagtgccagggttgtggcaagaccaacgtcaacaggctcaagatatcttgg

SEQ ID NO: 538739 - DNA, 201 bp, Homo sapiens
aaatgcggcttgatcagtatttgccgattcaacgcagaggtgcccaggtcatctcggcgagttgagctgtctaagaccccgcgatcgcgcaggacaggacscagaagccagagcgcaggaactgcttccggccggctcccggcttccgtcgggccccgcgcccgcgctgcatgctgggatcttcaggtcggaggccggggt

SEQ ID NO: 538740 - DNA, 201 bp, Homo sapiens
aaaccaggacaggggcatgatctgtgttttctttggctcccctagctcctagtacacatagctcaggtcagtaaccatttgcagattgagcattctggctrcagttgaagagcacttggactgggtaggagcagacagtgccagggttgtggcaagaccaacgtcaacaggctcaagatatcttgggagtaacctggtaat

SEQ ID NO: 538741 - DNA, 201 bp, Homo sapiens; identical to SEQ ID NO: 213917

SEQ ID NO: 538742 - DNA, 201 bp, Homo sapiens
cagtttgccagtggttcctcactacactggtactgaaagtgtaatttcttagagccaaaaaactggagaaacaaatatcctgccacctctaacaagtacaygagtacttgatttttatggtataaggcagagccttttcttcctcttcttgatagatgaggccatggtgtaaatggaagtttcagagaggacaaaataaaa

SEQ ID NO: 538743 - DNA, 201 bp, Homo sapiens
aaacagctttcattaacggcatgtaggcacaggtccctttcccaaaagtggattgttagtagtagttcattcaacctttgttaaggggtagctttccagartgtgacattgtcctcagaaagatagacataggcttaaacataatggacatcctaaataggaattttcagattgtttttgaagtgaaaagtgttttaatgt

SEQ ID NO: 538744 - DNA, 201 bp, Homo sapiens
ttttttttttttttttttttttttttttttacatggagtctcactctgttacctaggctggagtgcagtagaactttgatttatgagacctctttctactytggaatttggtatccttgggagatgccatattaaaaagggctcaattgagaagtaaaatgtgagtttttgttataaaatgtttgttgtagaatagtaagc

SEQ ID NO: 538745 - DNA, 201 bp, Homo sapiens
aacataatggacatcctaaataggaattttcagattgtttttgaagtgaaaagtgttttaatgtctttaaatggaattgcataactaatggtatttaagtrttttacatgttgctaataactttgaatatgattgttgcaattttatggaacctgggtctatgggactgctttttaagcagtttaaaaaaggttttcaaag

SEQ ID NO: 538746 - DNA, 201 bp, Homo sapiens; identical to SEQ ID NO: 213921

SEQ ID NO: 538747 - DNA, 201 bp, Homo sapiens
ccgtcgggccccgcgcccgcgctgcatgctgggatcttcaggtcggaggccggggtgaggccgacccacaggccgccttgctccctcgcgaagacgcttawgccagtctcgcccgtccccgctcctcctcagagaaaatgctgccccgcagcacttaccggagcgaccatgagggtgacgatttgaagcacacacaggctt

SEQ ID NO: 538748 - DNA, 201 bp, Homo sapiens
tgcaagttcccagtggcaggatgccctgctgtgtgactgactacactgtgtcctgagcagtggtaatttcaatcacctctcatcagtttggccagccctayaaccaccattcctagccctgtgttgcttgacaggatacctgtgcttgaatggacataaggaaaagtccttactttctccccaatttacctctcaatctta

SEQ ID NO: 538749 - DNA, 201 bp, Homo sapiens
acttagtatgccataattgttttttccaccctgaagtgttataaaattataacaggtgatattccatggtatggatatggtgtaattatactaatcccttrttgatggacattgacgttagtgcttggttttctcttctgtaattggagtggtgaatgtccttgtagctaaatctctgcacacatccatgattattttcaa

SEQ ID NO: 538750 - DNA, 201 bp, Homo sapiens
ccaagttaggatgtgggaaagcaaagatggtgcatattaaggtgtggctgagcacaggaaagacaatacaaatttttaaaggtttaataggggactggagrgccgggtgtggtggctcacacctgtaatcccagcacttggggaggccaaggcagtggatcacgaggtcaggagtttgagaccagcctggccaacatggtg

SEQ ID NO: 538751 - DNA, 201 bp, Homo sapiens
ctgcatatggtggcatgtacttgtaatcccagctactcgagaggttgaggtggaaggattgcttgagcccagagggttgagactgcagtgagccgagatcrcaccactgcacttcgggctgggggacagagtggcaccctgtctcaaaaaacaatttttgtaaccttgtaaacttagtatgccataattgttttttccacc

SEQ ID NO: 538752 - DNA, 201 bp, Homo sapiens
attcagctagtcagtcaacttttagtctcctatctgtgaattgggggtagcttgcttgtctgtggatcacaagagatagtagacattttaaaacgttaagyactctacaattgagagtggttactgtgggtgtggagatgttgggtagggaagggtctatcagggtttccaacaagaaaataagtgtttggcagggtgcag

SEQ ID NO: 538753 - DNA, 201 bp, Homo sapiens
ctaagaagaaaggcttaaaggaaatcacgtctaagtgaccgagagttggaaattgctagacctactaattctttgttgtaaatgatgaaattttgtttcttggttgatttgctttaagaagctctttttctatttcagcagttggaattgatcacaccttttcagttgtacttcaatcctgaattaatctttaaacacttt

SEQ ID NO: 538754 - DNA, 201 bp, Homo sapiens
taagaagaaaggcttaaaggaaatcacgtctaagtgaccgagagttggaaattgctagacctactaattctttgttgtaaatgatgaaattttgtttcttggttgatttgctttaagaagctctttttctatttcagcagttggaattgatcacaccttttcagttgtacttcaatcctgaattaatctttaaacactttc

SEQ ID NO: 538755 - DNA, 201 bp, Homo sapiens; identical to SEQ ID NO: 213925

SEQ ID NO: 538756 - DNA, 201 bp, Homo sapiens; identical to SEQ ID NO: 355684

SEQ ID NO: 538757 - DNA, 201 bp, Homo sapiens; identical to SEQ ID NO: 355686

SEQ ID NO: 538758 - DNA, 201 bp, Homo sapiens; identical to SEQ ID NO: 355687

SEQ ID NO: 538759 - DNA, 201 bp, Homo sapiens; identical to SEQ ID NO: 355690

SEQ ID NO: 538760 - DNA, 201 bp, Homo sapiens; identical to SEQ ID NO: 355691

SEQ ID NO: 538761 - DNA, 201 bp, Homo sapiens
tttgccagcccagagcgtttattgctaacaagaccacccgctccctaaatttccaacttgtgccaaaaagttgtcaacaagttgtctctgtattagggacyggactgcccagacggcacactcagccacagcacagatagctccaccaggctcagagggcacacggcacagggatgtccccccttcccagatgtacctgac

SEQ ID NO: 538762 - DNA, 201 bp, Homo sapiens
caacactttgggaggcagaggtgggaggattgcttcagttcaagagttcgagaccagcctgggtaacatggcgaaaccctgtctttacaaaaaatgcaaamctttgccgcatgtgttggggtgcgcctgtagtcccagcttctcgggaggctgaggtggggggaccacctgagccatggaggttgaggctgcagtgagccg

SEQ ID NO: 538763 - DNA, 201 bp, Homo sapiens
cgggccaccgactatgtgttccggatcatctaccccggccacaggcacgagcacagtgagtgtcccgagcttcatcccgggggaggagaggaagacgctcygggaggcggggagcgcagcgtcacccaggagggcagcaggcagggcccactgaccaggccaggttaacaccagaggctcatcgcctagcctctcagctgg

SEQ ID NO: 538764 - DNA, 201 bp, Homo sapiens
ctggtgagccaggatggcatccagaggccgccgctgcatttcccacagggaggacacctgctgtcctttctgtcctgtctggagaatgggctgctgcctcrgggacagctagagcccccgctgtggacccagcaagggaaggtaactcgggtgggaggctttaggggaagggctgtgtgtggggttctctgcccgcctccc

SEQ ID NO: 538765 - DNA, 201 bp, Homo sapiens
cccgtctttcccaggctcagatgccgtttccctttgtggcctaggtgcagtggaggcttgcctcttgcatcagctgagacgccgtgccgctggcttcctgygcagtgacaagatggcagccctgttcaccaaggtggggaagacgtgcccagtggcgggggagatttgccacaaggtacaggagctgcagcaacaagcaga

SEQ ID NO: 538766 - DNA, 201 bp, Homo sapiens
gactcctcgtcctcctcccatccttgttaatggggctcccaggccatgctgtagcccagccatctgcctcctacccagcctgggggcactggccagcaggstgtgatagccgacgagagggcctcagccgcactctccacgttcacccccagagagcggtggcacgcttgtgctggtgagccaggatggcatccagaggcc

SEQ ID NO: 538767 - DNA, 201 bp, Homo sapiens
ccatgtgggccgggcgcggtgcctcacgcctgtaatcccagcactttgagaggccgaggcgggcggatcacttgaggtcaggagttcgagaccagcctggycaacgtggcgaaaccccgtctctactaaaatacaaaaattagctgggcatggtggtgtgtgcctgtagtctcagctactcgggaggctgaggcgggagaa

SEQ ID NO: 538768 - DNA, 201 bp, Homo sapiens
gggcctgtagggacgggaaaccggcctctctacgggacaggccttggagatgccccaaggtagcggctgcctcagaagagccttctccgcacaataaaacytaacacaaatgccgggagcccatgctggtccgtggctggagagcagagggtggctgggagtaaaccggggcaggaaggacccctggggtcagctggagag

SEQ ID NO: 538769 - DNA, 201 bp, Homo sapiens
ctcacccgagagaaccccatggctgtgctcagaggctggccgggaaggtaggcgaggccaccccgatgggagtgctggggccggccactccccagtccccmcggcctggctgcttttgcggtcgcctagggaaggtggggaagcgaatgactcattatcccggcaattaatcacaccactgaggcatgtgatccgtgcagg

SEQ ID NO: 538770 - DNA, 201 bp, Homo sapiens
aagtcctctcggggccatagttctcaagtagtggtgtcactattattattttgtctgcacactgcacgcgataacatattcatcacacgtgcacactctcrgtggggaacaccttgtgggcatggcataggacaagtgcagtgtgaacagttactggccgggagcccacagagctgagtcagtaatgcctggtctaatggc

SEQ ID NO: 538771 - DNA, 201 bp, Homo sapiens
gtcagaagctggcttggtgctccgtggccacagtgttggaggctgtggtgggagagggggtgtgaagagttttgcattccagctcccttctggcccgaggmggcggtgggctgcgggaaggtgctggagtgcaggtggagccgccctgtgttcaccccccaggtgtttatctcagtggatgatctggaacccccggagccc

SEQ ID NO: 538772 - DNA, 201 bp, Homo sapiens
ccgtgagtccttggcctccaccaagcacgtgtggccattgtgtgcctgccttagtgactccgtggttttgtgaggagcagagtgtgtatgatttttgcctyagaaactatactcttctgtgtaacagaccaataaacaacatttgtcaacactggagcctctgggactggacactgagagaccacgtgccttctttaagct

SEQ ID NO: 538773 - DNA, 201 bp, Homo sapiens
aggaggtgtgtgcgcaccaggcgagggagagggacagcttggcatgtcaaagctcttcgccccgggcaggagccgagggatggggaggggaattttggaargaagccagggtatctccctggcctgcccttggcttgcccttaccccttgcctcaccacaggtatggggaagaggagcttttcttcctgctcccccgtctt

SEQ ID NO: 538774 - DNA, 201 bp, Homo sapiens
actctcctaatcattctagagcacctcaacaatttgcattcaaattgctcccaatatcagggaggggctcttttttgttgttgttgttgtttttgtttttkttttttttttgagacaaagtctcgctgtgttcccccaggctggagtgcagtggcgccatctcggctcactgcaacctctgcctcccaggttcaagtgatt

SEQ ID NO: 538775 - DNA, 201 bp, Homo sapiens
ggaagggatcccatatcttagaatggtggaatcggggtgtaagggttgggggaagggaccccatatcttagaatggtggaattggggtgtaagggttaggraagggaccccatatcttagaatggtggaattggggtgtaagggttggggtgcccataggattccatcagcatctgtggtctccagccgcgtgtagcattt

SEQ ID NO: 538776 - DNA, 201 bp, Homo sapiens
tggggaagggatcccatatcttagaatggtggaatcggggtgtaagggttgggggaagggaccccatatcttagaatggtggaattggggtgtaagggttrgggaagggaccccatatcttagaatggtggaattggggtgtaagggttggggtgcccataggattccatcagcatctgtggtctccagccgcgtgtagca

SEQ ID NO: 538777 - DNA, 201 bp, Homo sapiens
tcggggtgtaaggattggggaagggatcccatatcttagaatggtggaatcggggtgtaagggttgggggaagggaccccatatcttagaatggtggaatyggggtgtaagggttagggaagggaccccatatcttagaatggtggaattggggtgtaagggttggggtgcccataggattccatcagcatctgtggtctc

SEQ ID NO: 538778 - DNA, 201 bp, Homo sapiens
gtggctcacgcctgtaatcccagcactttgggaggctgaggagggtggatcacttgaggtcaggagttcgagaccagcctggccatcatggtaaaaccccytctctactaaaaatacaaaaattagccggccatgatggtgggtgcctgtaatcccagctacttgggaggctgaggcaggagaattgcttgaacctggcag

SEQ ID NO: 538779 - DNA, 201 bp, Homo sapiens
agaccctgattttctccctaattacatcagaagctcagagaggtttagtgacttgaccaaagtcaaacagccagtaaggagaggagcccgtgggctgggcrtggtggctcacgcctgtaatcccagcactttgggaggctgaggagggtggatcacttgaggtcaggagttcgagaccagcctggccatcatggtaaaacc

SEQ ID NO: 538780 - DNA, 201 bp, Homo sapiens
caggagttctagaccagcctggccaatatagtgaaaccctgtctctacaaaaaatacaaaaatgtgccgggtgtggtggcgcacgtctataattccaactrctggggaggctgaggcaggagaatcgcttgaacccaggtggtggaggttgcagtgagccgagaccgtaccactgcaccactgtactccagcctgggcgac

SEQ ID NO: 538781 - DNA, 201 bp, Homo sapiens
catggatctgagtatgcagaaggtgctcaatcgcattctactttggtttttattttgttttgtttcgttttgtttgagatggagtctcactctgtctcccmgctggagtgcagtggtgtgatcatagctcactcagcctcgaccttctgggttcaggcgatcctctcacttcagcctcctgagtagctgggtctacaggtc

SEQ ID NO: 538782 - DNA, 201 bp, Homo sapiens
tggttcctttctagcgtttactgggactatgccctcgtggtgcccttcagccaggtcgtgtgcatccactgccaccagcaaagtaagcctgccttgtcctyggctcgggtgggaagggagaggctgccttctgccagctgtgcactgtgcgtggggcctgtaagactcctcgtcctcctcccatccttgttaatggggctc

SEQ ID NO: 538783 - DNA, 201 bp, Homo sapiens
tgctttatgtggtgagtgagtgactgaaggatgatgggaggtcggtctagagccgaggacactggcctggggccaggaaaagatgagtcctcaggtgcagkagctctcaaatctggctgcaagtccaaatcaacctggaagcttttgaaatcctctttggccccatttgcagacctactaaatcaggttcttcaggggtca

SEQ ID NO: 538784 - DNA, 201 bp, Homo sapiens
tagagacggagtctcactctgctgcccaggctggagttctgtggtgctatctcagctcactgcaacctccgcctctcaggttcaagcaattctcctgcctyagcctcctgagtagctgggattacaggtgcctgccaccacacctagctaatttttgtatttttagtagagacaggggtttcaccatgttggccaggctgg

SEQ ID NO: 538785 - DNA, 201 bp, Homo sapiens
aggctgaccagggaaactgagtcctgttttcctgtgcttctgccccgtccctagtccaggaccccgtgactagcctagcttggcctcccctcctcccagcrggagctcatttctcataggccatccctgagagcctctcagcccttcatcgtcggtcttccggtgtctcccgctgtagaaggaggatatggaggcggtccc

SEQ ID NO: 538786 - DNA, 201 bp, Homo sapiens
ggatatggaggcggtccctggctacctctccctgcaccagtctgcagagagcctgactctgaagtggacccccaaccagctcatgaatgggactctggggkactccgagctggaaaagaggtgggggctttgggactcaatcccaggagccagggcagggagtgggtttgacctcaggcagagggatggagaaaccccgct

SEQ ID NO: 538787 - DNA, 201 bp, Homo sapiens
ggagcttacattctgttggggagacagacaggaaacaaatgcgcaagtaaatatgtcatccaataacttggcatgtgataagagctaggaagaaaaaacatgtgggagggcagtcggagaggcagcctctgagcagagtctgagtgacagactggggtttgaatcctggcgtcctgccttttaagtcgtcttggacaagtt

SEQ ID NO: 538788 - DNA, 201 bp, Homo sapiens
actcacggacgcggctgctctatggcaagaaccacgtgctggtgcagccggtaggaaagcttcatcctgccatccctccccgaaggtccccgaacgagacsactggaagcctctagccatggctattcctttcctgaggagcttgaccagagacgggggggagaatggccccagcctcccaactccctgtttcacacgact

SEQ ID NO: 538789 - DNA, 201 bp, Homo sapiens
gtttcttgatgactgatctgaatctggtctttgtggggatgtccctacctggtgagcttgactgccctggaatgagccccggagcctcggcagtcacactstctgtctcctggcagcaagtactacgagaaggaggcactgctggcagaccctgtgttcggcccgatcctggcctctcttctaggtgagcctgagagcaca

SEQ ID NO: 538790 - DNA, 201 bp, Homo sapiens
ccaggggtgaggctgcatataggaggtgtgtgcgcaccaggcgagggagagggacagcttggcatgtcaaagctcttcgccccgggcaggagccgagggayggggaggggaattttggaaagaagccagggtatctccctggcctgcccttggcttgcccttaccccttgcctcaccacaggtatggggaagaggagcttt

SEQ ID NO: 538791 - DNA, 201 bp, Homo sapiens
gtgccctcaaggcattggccataccaggcacctcacgaagcccagtccctaaggactcactgtttcttgatgactgatctgaatctggtctttgtggggaygtccctacctggtgagcttgactgccctggaatgagccccggagcctcggcagtcacactgtctgtctcctggcagcaagtactacgagaaggaggcact

SEQ ID NO: 538792 - DNA, 201 bp, Homo sapiens
gcagtggaggcttgcctcttgcatcagctgagacgccgtgccgctggcttcctgcgcagtgacaagatggcagccctgttcaccaaggtggggaagacgtscccagtggcgggggagatttgccacaaggtacaggagctgcagcaacaagcagagggcaggtgagccctgggccagcccattcttccctcctttcagctc

SEQ ID NO: 538793 - DNA, 201 bp, Homo sapiens
caccaaggtggggaagacgtgcccagtggcgggggagatttgccacaaggtacaggagctgcagcaacaagcagagggcaggtgagccctgggccagcccmttcttccctcctttcagctcttcccacttggcaattgctacttcctaggacacccatcggaaagttggcatcctgggcctgttccttgcagggcctctgg

SEQ ID NO: 538794 - DNA, 201 bp, Homo sapiens
ttggcccctgaagctctgatccctcacctggctccatttagaggcctgtgagcagccagtccggccagcatcagccccagccccagcctcagcctcagccycagccccagcctcaatcccagcctcagcctcaatcccagcctcagccccagatatgcggctaggacgggtgagcagcagccgcttactctccgcagaact

SEQ ID NO: 538795 - DNA, 201 bp, Homo sapiens
ggtgtggtctgagtacaggtggacgcagtggtggcagcaaggtaccagcaggtgttggcagagtggaaggcctgcgaggtggtggtgaggcagcgggagcrggaggcccacccagccacacgcaccaagttctcctcaggcagcagcatcgacagccacgtgcagcgcctcatccaccgagactccaccatcagcaacgat

SEQ ID NO: 538796 - DNA, 201 bp, Homo sapiens
aagaatggggcacagccacagtgactctccccctgcctttcagctacgtgtgggagcacctggacgtgggctatgtgcagggcatgtgcgatctgctggcrcctctcctggtcaccctcgacaatggtgagggatggcgggacatgggactgggctgcgtaagctggagaaaggacgagagggtggccaggtctggagggg

SEQ ID NO: 538797 - DNA, 201 bp, Homo sapiens
tccagtgggcccggccctgcagctcacactttgagggagccccaggatcccagccaggagaagcctcaggccggagaactggaggccggagaggagcttgyggctgtgtgtgcggctgcctacactgtgcgtacatgctccccaggctgttcccagccgccccagaggccctcctgacatcccagagctggggaagcgctg

SEQ ID NO: 538798 - DNA, 201 bp, Homo sapiens
ctgccctttctctgggcctctctacagctcttcacgtttccccccagaacgtgctgagcatcacgatgcccaggagatcctgcggattgcccgggacctcrtccacaaggtgcagatgctcatagagaacaagtgagctggggccaggaggcagcagccgtgcagagcctgggctccggcagggagaggtgcaggggagtc

SEQ ID NO: 538799 - DNA, 201 bp, Homo sapiens
gtgttccggatcatctaccccggccacaggcacgagcacagtgagtgtcccgagcttcatcccgggggaggagaggaagacgctccgggaggcggggagcrcagcgtcacccaggagggcagcaggcagggcccactgaccaggccaggttaacaccagaggctcatcgcctagcctctcagctggaccttttacccacag

SEQ ID NO: 538800 - DNA, 201 bp, Homo sapiens
ggccgcagcccctccctgctgagcccggttgttgccacaggttgccgctcaggctactgtgtgagagtatgaagaggcagatcgtgtcccgggccttctayggctgtgagtgtggggcgcgccgggctgtggcgggctgggggcgggcggccctgggtcccagcctcctgctgcccaccgctgcccaccgcagggctggca

SEQ ID NO: 538801 - DNA, 201 bp, Homo sapiens
ggggaaggaggacactgttgctgccggctttgcaggcagttctgagtgtggtattcactagatgcgggatggcatgtgtttatgtctccatgtatgtttcrattagtgacaatgcctgggtttctgctcgactcagaagtctcagagccaggctcagtggctcaagcctgtaatgccggcgctttggaaggctgaggtgga

SEQ ID NO: 538802 - DNA, 201 bp, Homo sapiens
aggagcttacattctgttggggagacagacaggaaacaaatgcgcaagtaaatatgtcatccaataacttggcatgtgataagagctaggaagaaaaaacatgtgggagggcagtcggagaggcagcctctgagcagagtctgagtgacagactggggtttgaatcctggcgtcctgccttttaagtcgtcttggacaagt

SEQ ID NO: 538803 - DNA, 201 bp, Homo sapiens
acctacccgcctcaggacagttctttatcctcccaatcagagtcccgttgcgaatgttgctttcttgttttgggggttgagcagggctgaatgccttccaragttgaagcaaacaaccagtatcaccagtgcaggctgagagaaaatgcaccctagttaccgcagaaacgctcatctgagtaaaggcagccactacaaatc

SEQ ID NO: 538804 - DNA, 201 bp, Homo sapiens
gagacggggtttcgccatgttgcccaggctggtctcaaactcctgacctcaagtgacctacccgcctcaggacagttctttatcctcccaatcagagtccmgttgcgaatgttgctttcttgttttgggggttgagcagggctgaatgccttccagagttgaagcaaacaaccagtatcaccagtgcaggctgagagaaaa

SEQ ID NO: 538805 - DNA, 201 bp, Homo sapiens
gacaagatggacagagtctctgccgcaggagcttacattctgttggggagacagacaggaaacaaatgcgcaagtaaatatgtcatccaataacttggcaygtgataagagctaggaagaaaaaacatgtgggagggcagtcggagaggcagcctctgagcagagtctgagtgacagactggggtttgaatcctggcgtcc

SEQ ID NO: 538806 - DNA, 201 bp, Homo sapiens
acagtcctcaatgttcacagcagcagtatccataacagccccaaactggaaaccacccaaacgccgggtgtttgtacgttcacaccacggagagtgaacarcctacaactgtacacaacgcgcacggagaatgaacaatctacagctatacacaacatgaacaaatttcagaatgacacaggtgagcaaaagaaactagtc

SEQ ID NO: 538807 - DNA, 201 bp, Homo sapiens
ccccttaaggaaggagagcagaacgagatctcatcccactgtgagctggggcacgggaggacgtggccaccccaaagcaggccttgcctgggcttcagcartcactacaggccccgccccagcccattctccgtgggatggggctcacccagctgggccacggtgactgtggaggctgcacagtcttgactccccgggtcc

SEQ ID NO: 538808 - DNA, 201 bp, Homo sapiens
tgtaggcactccgtgactgtttggtaaataaatgtgctgattttggagacttcgaggcctggtgtttggaaagcatacattttggaatagtctggacctarttctgtgtgaccttgagtctctatgccgtctccctaatatatatatatataacctcacgcctgtaatcccagcacgttgggaggcctaggtgggtggatc

SEQ ID NO: 538809 - DNA, 201 bp, Homo sapiens
cctcccaagtagctgggactacaggcacatgccaccacacccagctaattttttgtattttagtagagatggggtttcaccatgttggccaggatagtctygatctcctgacctcgccttggcctcccaaggtgctgggattacaggcatgagccactgcgaccgccaggaaatattttttaagaggatgatgactttttc

SEQ ID NO: 538810 - DNA, 201 bp, Homo sapiens
gcgcccctctgcccgggggacccggccggcgctcccggcttgtttgcttcgcagccccgcagctccccgcccagtgacggcagcggcgctgggagcccaargccgggggaggggtggcggcgatggcggggatggctggatccggagctgcccattcagtgcccgcgccgccaggggagggggcggggccccgcgcgagct

SEQ ID NO: 538811 - DNA, 201 bp, Homo sapiens
ggctatgtgcagggcatgtgcgatctgctggcgcctctcctggtcaccctcgacaatggtgagggatggcgggacatgggactgggctgcgtaagctggaraaaggacgagagggtggccaggtctggaggggtgggaatgggagccggctctgtcccctgcgtctcctgccctgccagcttcactcctgtctcccctcag

SEQ ID NO: 538812 - DNA, 201 bp, Homo sapiens
aaggcggggcgccctgactgccctggaagggagttctgagcccatttctcagcatccccacaggactcgctctggtctctgggttccgttttgctgcattycttggggcgtcacctcctgcccccagcctgggaagggctgcccggtctcatgcctgagggccctccactcttccagatagaattactggacactgtggcc

SEQ ID NO: 538813 - DNA, 201 bp, Homo sapiens
ctccctcccagcccttccaatatgagcccgtaggccaggcctaggtgggaacatcctacttctgatgtttattgcctacacacacccctgccatctggttycttgcaaacctggacttggggctgttgcctatttacagtgaactgactgagcagtgtgggaaggttgagctctgaggggacccacggagctacttcttcc

SEQ ID NO: 538814 - DNA, 201 bp, Homo sapiens
ctttgcccacccccgccctcacccctgttgccctccctgcctgcccgcctgttgcctgctgcctgcctggctgggcctcttcccaccccggctcctcccgrgactgtcctcttctctcctgcctgctgcaggggcctgagctgggctcctgccccactgcacctgcaccctccccttcttcccagagtctcaggcatggct

SEQ ID NO: 538815 - DNA, 201 bp, Homo sapiens
cacatcgccctgtgaccctggacaaagctttgcctctctccgggcgccatttcctgccccttaaggaaggagagcagaacgagatctcatcccactgtgakctggggcacgggaggacgtggccaccccaaagcaggccttgcctgggcttcagcagtcactacaggccccgccccagcccattctccgtgggatggggct

SEQ ID NO: 538816 - DNA, 201 bp, Homo sapiens
gagaatgggctgctgcctcagggacagctagagcccccgctgtggacccagcaagggaaggtaactcgggtgggaggctttaggggaagggctgtgtgtgkggttctctgcccgcctcccttccttccccacgtggagttcttaggagcggccttgtgtggaaccctggatgagactctgccctatacagcccgaccacct

SEQ ID NO: 538817 - DNA, 201 bp, Homo sapiens
cccaacctcgagaggctcagagacgtcatgtgcaggtgccttgtggggcggggctcagggtgggaggcgggaccctgccgccagttactctgtgaagatgrggtccggaaggtgccctgctcctctctcctgctcctgaatcacacttggctccccctgcctggaacgcttttttcctgcacacccctcccccgcgcctct

SEQ ID NO: 538818 - DNA, 201 bp, Homo sapiens
ggggctgttccttcaagcagggctgaagacgtgtcttcatgtttggccagaggcttgtttctctctgcctggctggctgggtcagaagctggcttggtgcyccgtggccacagtgttggaggctgtggtgggagagggggtgtgaagagttttgcattccagctcccttctggcccgaggaggcggtgggctgcgggaagg

SEQ ID NO: 538819 - DNA, 201 bp, Homo sapiens
ttacccaacgggaggggcaagactcctaggactggctagaaaattgctttgttgagtgtttgctgtggttgttcctaaacctgtctgtccagaagctggabatgcagtaggcccctgcgagtagaaactttccttgtgtggaagttttcgctggcaaaccagtctggcggcagcaggggggtgggtggggttctctgtgtg

SEQ ID NO: 538820 - DNA, 201 bp, Homo sapiens
ccttggcctcccaaactgttgggactatagatgtgagccactgcacctgacctagagtttttttgtttgttttttttgtttgtttgttttttagtagagayggggtttcactatgttacccaggatagtctcaatctcctgacctcgtgacccacccgcctcggcctcccaaagtgctgggattacaggcgtgaaccaccg

SEQ ID NO: 538821 - DNA, 201 bp, Homo sapiens
tagagatggggtttcactatgttacccaggatagtctcaatctcctgacctcgtgacccacccgcctcggcctcccaaagtgctgggattacaggcgtgarccaccgcgcccagccaagttttttatactaataaaaaagattgtattctttgttcacacctccctttttgtaattaaaaggtgtcatgcaattataccat

SEQ ID NO: 538822 - DNA, 201 bp, Homo sapiens
taagggttagggaagggaccccatatcttagaatggtggaattggggtgtaagggttggggtgcccataggattccatcagcatctgtggtctccagccgygtgtagcatttgttaggctgcagaacttgatggctttgaggtcacatcggggctggtgaagggagccccagggctagtctgggtctgtagttcctggcct

SEQ ID NO: 538823 - DNA, 201 bp, Homo sapiens
tggctggagagcagagggtggctgggagtaaaccggggcaggaaggacccctggggtcagctggagagggtcagcatggaagcgtgagggttcccaagccytgaggccagtttcccaaggctggaggctgagccccggccttccacacagatccggaaacggcactcaagcggcagcgcgtcggaggacaagctggctgcc

SEQ ID NO: 538824 - DNA, 201 bp, Homo sapiens
ttcccaagccctgaggccagtttcccaaggctggaggctgagccccggccttccacacagatccggaaacggcactcaagcggcagcgcgtcggaggacargctggctgcctgcgcccgcgagtgtgtggagtccctgcaccagaactcacggacgcggctgctctatggcaagaaccacgtgctggtgcagccggtagga

SEQ ID NO: 538825 - DNA, 201 bp, Homo sapiens
acactctcagtggggaacaccttgtgggcatggcataggacaagtgcagtgtgaacagttactggccgggagcccacagagctgagtcagtaatgcctggyctaatggcctaactggtcttagcttggaaagtcgatgcatgagagggatttctccttccccagacactgcctggcaccttgcctgggttgcacagaagga

SEQ ID NO: 538826 - DNA, 201 bp, Homo sapiens
aggccagtttcccaaggctggaggctgagccccggccttccacacagatccggaaacggcactcaagcggcagcgcgtcggaggacaagctggctgcctgygcccgcgagtgtgtggagtccctgcaccagaactcacggacgcggctgctctatggcaagaaccacgtgctggtgcagccggtaggaaagcttcatcctg

SEQ ID NO: 538827 - DNA, 201 bp, Homo sapiens
cctcttctctcctgcctgctgcaggggcctgagctgggctcctgccccactgcacctgcaccctccccttcttcccagagtctcaggcatggcttgcaacrccctcactcccagagccgcagcccctcctcaccacgcgtgttcccttaatttgcctcctggtggagctgaagggccagatatctgcaaaactcccggccg

SEQ ID NO: 538828 - DNA, 201 bp, Homo sapiens
agctgtgtatgcgggggtgccaggaagggcatagctcctgcccccaggcctaggcatgctgcttgctcggccatccccacttcctcctctaccccaacacwtgcaggctaggccttgccctggaacgtggaggccctgcccggggctggggcctagtccagcagccaccaaagtctggcagactttctgcatttgagaaac

SEQ ID NO: 538829 - DNA, 201 bp, Homo sapiens
acggctctccatccctgttcttccgaactcttctccactctctccctccctcccggcatcaccccccagtgcttccacttcctctctcactttgcttcatstctgtggctccctggacctgccagagtcccccttaagcagtgccctgccccacgtgggccgtggaagctctcgagggtcttgagttctgattcagaccgc

SEQ ID NO: 538830 - DNA, 201 bp, Homo sapiens
acatggtgaaactccgtctctactaaaaatacaaaaatcagccgggcatggtggcgggtgcctgtagtggaggcaaggttatggtgagctgagattgtgcyactgcactccagcctgggcaacagagccagactgtgtctcaaaaaaaaaaaaagaaaagaaaagaaaaaattgaaaagaaaacaaaatttccataggtga

SEQ ID NO: 538831 - DNA, 201 bp, Homo sapiens
tgaagtaagttaaatataactggctgggtgtgatggctcatgcctgtaattccaacactttgggaggcagaggtgggaggattgcttcagttcaagagttygagaccagcctgggtaacatggcgaaaccctgtctttacaaaaaatgcaaaactttgccgcatgtgttggggtgcgcctgtagtcccagcttctcgggag

SEQ ID NO: 538832 - DNA, 201 bp, Homo sapiens
gggcatagctcctgcccccaggcctaggcatgctgcttgctcggccatccccacttcctcctctaccccaacacatgcaggctaggccttgccctggaacrtggaggccctgcccggggctggggcctagtccagcagccaccaaagtctggcagactttctgcatttgagaaacatgacaaagggccccgcagcccttct

SEQ ID NO: 538833 - DNA, 201 bp, Homo sapiens
aggctgctgagtgcagctttcaacgtagatatatatgcacatgagagccaaggcagaatgcaggtgcagagacccagccctgcttctgaggctccctgggmtgactgatgaccctcctaaccactgctgcattttctttttttctttttttttttttttttttgagacggagtcttgctctgtcacccaggctggagtgca

SEQ ID NO: 538834 - DNA, 201 bp, Homo sapiens
gccaagaatagcagggagcggctgcctggagtgattcccaagctctctaggacggagccaagcctggccgtgaagaggtttgtctgagccaagctctcagyggctgagacggacagctgtccatgtgccgagcgggcagcacagatctcaggggtcatggctggctgtgtgcacctcttggctatggtcatcctatcttca

SEQ ID NO: 538835 - DNA, 201 bp, Homo sapiens
ccgcaaggacgtctggccctttctgcttggccactacaagttcggcatgagcaagaaggagatggagcaggtgaggggagcctgttcccatggggctgagrtggggagctgggccaggggacgccagggaggggaccttggaagcctcagccccttcccagccggaaagaagcatggcagggcagctccaccgtccttacc

SEQ ID NO: 538836 - DNA, 201 bp, Homo sapiens
tctgtccctggtgagaagcaaggctagctctgccttccacatgcttctcaggatgccaagaggcctaggaacccagaaacccccttggaggagctgtgtaygcgggggtgccaggaagggcatagctcctgcccccaggcctaggcatgctgcttgctcggccatccccacttcctcctctaccccaacacatgcaggcta

SEQ ID NO: 538837 - DNA, 201 bp, Homo sapiens
gggattacaggcgcacacctccatgcccggctaatttttgtatttttagtagagatggggtttcaccatattggccaggctggtctcaaactcctgacctygtgatctgcctgcctcagcctcccaaagtgctagggttacaggcgtgaccactgcgcccggcccagcgcttctttttggatggtgaatattgtctgctga

SEQ ID NO: 538838 - DNA, 201 bp, Homo sapiens
cctgctccccaacccctacaagacagcctgggtatgggaccagcgctactttttttttttttttttttttgagacgacgtctcgctcttttacccaggctrgagtttaatggcgtgatctcagctcactgcaacctctgcccctgggttcaagcgatcctcctacctcagcctcctgagtagctgggattacaggcgcaca

SEQ ID NO: 538839 - DNA, 201 bp, Homo sapiens
ccctctagaaaagcaagtgcttgctggtcgcaggatagagctaggcacaatcatccaagactcagtccaagcattttaccacatgcagaaggacgccttgygcccctctccaggcttgctggaggctaggaagtgtcaggcgccctctctccctaccgtttccatctctgggctctggaccaggcaggccccacctctgtg

SEQ ID NO: 538840 - DNA, 201 bp, Homo sapiens
ttctgctctaattagcgtctcccaaagccccaggtccagaatggactacctgaggctggctgccctgcttgcacttcctcgcttgggttctgtgtggcagyggtggctgaactcccctgtcgtgcagatggcagctggtagcaaaaggtgaaaccgggccggaggtggggagcaagccacacctgccaacttgctgtcctc

SEQ ID NO: 538841 - DNA, 201 bp, Homo sapiens
accgcagaaacgctcatctgagtaaaggcagccactacaaatccctgggtggaaatagccagggagagaagcggggaagagaggggcaggtcacacttggygatggcccttcgctcctctcaccttgtctgtggcagatgaaacactggctccttccaccggcagttggagtaaagatacttgatgcttcttctccttcag

SEQ ID NO: 538842 - DNA, 201 bp, Homo sapiens
accaaggacgtgtggagcaagtatcagaaggacaaaaaggtgccaaccctggggttccagggccacaggtcgaggggctggggcgggcaggagtgagggcytcagggtaaaatgtgccagtgggtgcggttgacaggccagggccgatgccacggagtgaccagggtcccggcagaatctcttgcagctgggcctggggct

SEQ ID NO: 538843 - DNA, 201 bp, Homo sapiens
tcccctacttcccttcagtagccacaggaagacctggggctgttccttcaagcagggctgaagacgtgtcttcatgtttggccagaggcttgtttctctcygcctggctggctgggtcagaagctggcttggtgctccgtggccacagtgttggaggctgtggtgggagagggggtgtgaagagttttgcattccagctcc

SEQ ID NO: 538844 - DNA, 201 bp, Homo sapiens
ctcagctgggtggatcacctgaggtcaggagttcgagaccagcctggccaaaatggcgaagccccatctgtactaaaaatacaaaaattagctgggcatcrtggtgcacgcctgtaatcccagctctttgggaggctgaggcaggagaatcacttgaacctgagagatggaggtttcagtgagcgagattgtgctgctgca

SEQ ID NO: 538845 - DNA, 201 bp, Homo sapiens
tggaactgactaggtgcttgctacagaacgttcctgtcttgtcctgctgaacactcagtactgaaaataaggcaaaacttgtttttcctaaaacctctagscttctctccacccagccacaccaaaacactaaggccattctcccggtctcatgacttcaggcgtttctagaatgagactgagttcaaactggccattgag

SEQ ID NO: 538846 - DNA, 201 bp, Homo sapiens
ggcatcatggtgcacgcctgtaatcccagctctttgggaggctgaggcaggagaatcacttgaacctgagagatggaggtttcagtgagcgagattgtgcygctgcactccagcctgggcgacagagcgagacttggtctaaaaaaaaaaaagtgaccttacaacctttcctataaagcctcctcgagccttccccaggat

SEQ ID NO: 538847 - DNA, 201 bp, Homo sapiens
tctccctctctctggctttgggttttgtaaaaatctgtctgtgccagtgcccagctgctgagctcatggacagcagtagctcctcgctggcgtattagatkgccacagaaccgtggccttacccagcacttcatgcttcctgcccaaagtagaaactacttttagcattgctttccctacgtggtgaaaacagagagagaa

SEQ ID NO: 538848 - DNA, 201 bp, Homo sapiens
ctcgggggccacccgcgttttatgcacagtggtcctgagcaccagcctgacctctgggaactggtggggccctgcgagaaaggcctaaggtgcctgtgtcycattttctccaactggaaatggctaactgtgcctctgctgcctacttctctgggtattgtaggaataaagtgagagagtgcattgtgctcagttttagcc

SEQ ID NO: 538849 - DNA, 201 bp, Homo sapiens
tgccacaggttgccgctcaggctactgtgtgagagtatgaagaggcagatcgtgtcccgggccttctacggctgtgagtgtggggcgcgccgggctgtggygggctgggggcgggcggccctgggtcccagcctcctgctgcccaccgctgcccaccgcagggctggcacactgccgccacctgtccacggtgcggaccca

SEQ ID NO: 538850 - DNA, 201 bp, Homo sapiens
gtgtgtgaatgctcgtgcccatgaaagttctggcgaacagtaggggttgctgatgacatcagacacccagaaaatcctataaccctaaaaataatgcagcycagagagatgggtgatgggaggggcagcaggagcaacccaccctccacaaggagatccgagggggagagagtgcaccgcgcagcacagggcaacagacag

SEQ ID NO: 538851 - DNA, 201 bp, Homo sapiens
gggaggtgttctcttttacctttacttcgtcttccgtttattaatcctgatgatcctccgctgcctctctccatttttcacatgaggaaacgaagattcaygtaggtgaagttcgttgaccaagatccctgggtggttgggggccaggcgggggccccacagcactctgtccaggtggcaggcagggacagggcacccact

SEQ ID NO: 538852 - DNA, 201 bp, Homo sapiens
tgcttggccactacaagttcggcatgagcaagaaggagatggagcaggtgaggggagcctgttcccatggggctgagatggggagctgggccaggggacgycagggaggggaccttggaagcctcagccccttcccagccggaaagaagcatggcagggcagctccaccgtccttaccctgaggcccgtcttgagtctgag

SEQ ID NO: 538853 - DNA, 201 bp, Homo sapiens
tggcttttatgggaggtgttctcttttacctttacttcgtcttccgtttattaatcctgatgatcctccgctgcctctctccatttttcacatgaggaaasgaagattcatgtaggtgaagttcgttgaccaagatccctgggtggttgggggccaggcgggggccccacagcactctgtccaggtggcaggcagggacag

SEQ ID NO: 538854 - DNA, 201 bp, Homo sapiens
gctagaggctggagggtcctagcagagcccttggcagactcggtgataaaaagcctatccctgactagtcttagggctgaggcctccgggatcagagaaasttccagacccacttccaggggtccagaggcctcagggctcatctgtgcatcctctcaaggaactcaggggctaggccaacctagtatagagcttctgggc

SEQ ID NO: 538855 - DNA, 201 bp, Homo sapiens
tcctactgccaggcgcctgccctcatgcccaccctccctcccagcccttccaatatgagcccgtaggccaggcctaggtgggaacatcctacttctgatgyttattgcctacacacacccctgccatctggttccttgcaaacctggacttggggctgttgcctatttacagtgaactgactgagcagtgtgggaaggttg

SEQ ID NO: 538856 - DNA, 201 bp, Homo sapiens
cacagctcccaatccgatgaaaggttcttatccctccctctccctgacccacctcatccccaccctccctcccgggcccgcctgccacccaccacaggggytcgaacggcagtgttggcattaggggacttgcacccagggcagttcccttccatcgggggcagatcagggagggcagaaggaggccagacaggtgctggc

SEQ ID NO: 538857 - DNA, 201 bp, Homo sapiens
tataccattctgcatcttgctgttggcgagctttccattattcattcctagagagcatcctcattctttttcagagttgcatgatattctgctagagatgwaccatatttacttcacctgtcccctattgatgggcatgtggatggcttccagtcttttgctgttataactaaataatcacgcagttatatctgtaggacg

SEQ ID NO: 538858 - DNA, 201 bp, Homo sapiens
tcctagagagcatcctcattctttttcagagttgcatgatattctgctagagatgaaccatatttacttcacctgtcccctattgatgggcatgtggatgrcttccagtcttttgctgttataactaaataatcacgcagttatatctgtaggacggattctcagaagaggggttactggatcagaggttatttgcagcat

SEQ ID NO: 538859 - DNA, 201 bp, Homo sapiens
taatcacgcagttatatctgtaggacggattctcagaagaggggttactggatcagaggttatttgcagcattagtggagagggccatattgcgtctataygggttgcagcatcttgcctacctaccagcaatatatgaatggattcagcagctccccacgtcccttccatctgtgtcttcctggcgtctcctctactcta

SEQ ID NO: 538860 - DNA, 201 bp, Homo sapiens
tgtttgctgtgtgggaggtgatctgggcagccaggcacatctcatcggagcactttgtcctgttcatcgccctcgccctggtggaggcctaccgagagatyatccgtgacaacaacatggacttcactgacatcatcaagtttttcaatggtacgagctggtccagccatccaggctgccctgagcagaggtgtggaggcc

SEQ ID NO: 538861 - DNA, 201 bp, Homo sapiens
tcacgatgcccaggagatcctgcggattgcccgggacctcgtccacaaggtgcagatgctcatagagaacaagtgagctggggccaggaggcagcagccgygcagagcctgggctccggcagggagaggtgcaggggagtcaccgcccagacctccccagccaccaaccgaccccacctctgttcctaacaaagcggttgt

SEQ ID NO: 538862 - DNA, 201 bp, Homo sapiens
gcaggtgaccgccccgttccccaaaaactgcaggtgaccgccccgttccccaaaaactgcaggtggccgccccgttccccaaaaactgcaggtgaccgccycgttccccaagcagcccctcccttgacccgtctcccgacgtccctcagccccagccctcaggatgcttgcctgtccgtgacagcctgtaggcaaccctcc

SEQ ID NO: 538863 - DNA, 201 bp, Homo sapiens
aaaactgcaggtgaccgctccgttccccaaaaactgcaggtgaccgccccgttccccaaaaactgcaggtgaccgccccgttccccaaaaactgcaggtgrccgccccgttccccaaaaactgcaggtgaccgcctcgttccccaagcagcccctcccttgacccgtctcccgacgtccctcagccccagccctcaggatg

SEQ ID NO: 538864 - DNA, 201 bp, Homo sapiens
ccagaactcacggacgcggctgctctatggcaagaaccacgtgctggtgcagccggtaggaaagcttcatcctgccatccctccccgaaggtccccgaacragacgactggaagcctctagccatggctattcctttcctgaggagcttgaccagagacgggggggagaatggccccagcctcccaactccctgtttcaca

SEQ ID NO: 538865 - DNA, 201 bp, Homo sapiens
ccccgttccccaaaaactgcaggtgaccaccccgttccccccaaaactgcaggtgaccgccccgttccccaaaaactgcaggtgaccgccccgttcccccmaaaactgcaggtgaccgccccgttcccaaaaactgcaggtgaccgctccgttccccaaaaactgcaggtgaccgccccgttccccaaaaactgcaggtga

SEQ ID NO: 538866 - DNA, 201 bp, Homo sapiens
cgtggaggccctgcccggggctggggcctagtccagcagccaccaaagtctggcagactttctgcatttgagaaacatgacaaagggccccgcagcccttytgcacccagcacagcctgcccagcccagccctgcccccgggcactgcacagcctgtctgggggccagaccaccccattgtccatccttgttgtccgtgag

SEQ ID NO: 538867 - DNA, 201 bp, Homo sapiens
tcatcgagaaagttctggacaaggtcgtgcaatacctggcggaaaactgcaggtgaccgccccgttccccaaaaactgcaggtgaccaccccgttcccccmaaaactgcaggtgaccgccccgttccccaaaaactgcaggtgaccgccccgttccccccaaaactgcaggtgaccgccccgttcccaaaaactgcaggtg

SEQ ID NO: 538868 - DNA, 201 bp, Homo sapiens
cagcagccaccaaagtctggcagactttctgcatttgagaaacatgacaaagggccccgcagcccttctgcacccagcacagcctgcccagcccagccctscccccgggcactgcacagcctgtctgggggccagaccaccccattgtccatccttgttgtccgtgagtccttggcctccaccaagcacgtgtggccattg

SEQ ID NO: 538869 - DNA, 201 bp, Homo sapiens
gtacgcacggcgctcatcgagaaagttctggacaaggtcgtgcaatacctggcggaaaactgcaggtgaccgccccgttccccaaaaactgcaggtgaccrccccgttccccccaaaactgcaggtgaccgccccgttccccaaaaactgcaggtgaccgccccgttccccccaaaactgcaggtgaccgccccgttccca

SEQ ID NO: 538870 - DNA, 201 bp, Homo sapiens
ctttctgcatttgagaaacatgacaaagggccccgcagcccttctgcacccagcacagcctgcccagcccagccctgcccccgggcactgcacagcctgtytgggggccagaccaccccattgtccatccttgttgtccgtgagtccttggcctccaccaagcacgtgtggccattgtgtgcctgccttagtgactccgtg

SEQ ID NO: 538871 - DNA, 201 bp, Homo sapiens
cactccagcctgggcgacagagtgagactccgtctcaaaaaaaaaaaagtttaccttagctgagccgtaattagagtttcagggttggggaagcgtctggrctctcataacatcctggaaagtggacaggcgcggtggcttacgcctgtaatcccagcactttgggaggctgaggcgggtagatcacgaggtcaggagttc

SEQ ID NO: 538872 - DNA, 201 bp, Homo sapiens
ccttgaaacacgtatgggtacgcacggcgctcatcgagaaagttctggacaaggtcgtgcaatacctggcggaaaactgcaggtgaccgccccgttccccmaaaactgcaggtgaccaccccgttccccccaaaactgcaggtgaccgccccgttccccaaaaactgcaggtgaccgccccgttccccccaaaactgcagg

SEQ ID NO: 538873 - DNA, 201 bp, Homo sapiens
tttggccagaggcttgtttctctctgcctggctggctgggtcagaagctggcttggtgctccgtggccacagtgttggaggctgtggtgggagagggggtktgaagagttttgcattccagctcccttctggcccgaggaggcggtgggctgcgggaaggtgctggagtgcaggtggagccgccctgtgttcaccccccag

SEQ ID NO: 538874 - DNA, 201 bp, Homo sapiens
gccttgaaacacgtatgggtacgcacggcgctcatcgagaaagttctggacaaggtcgtgcaatacctggcggaaaactgcaggtgaccgccccgttccccaaaaactgcaggtgaccaccccgttccccccaaaactgcaggtgaccgccccgttccccaaaaactgcaggtgaccgccccgttccccccaaaactgcag

SEQ ID NO: 538875 - DNA, 201 bp, Homo sapiens
tcagccctcaggccttgaaacacgtatgggtacgcacggcgctcatcgagaaagttctggacaaggtcgtgcaatacctggcggaaaactgcaggtgaccrccccgttccccaaaaactgcaggtgaccaccccgttccccccaaaactgcaggtgaccgccccgttccccaaaaactgcaggtgaccgccccgttccccc

SEQ ID NO: 538876 - DNA, 201 bp, Homo sapiens
ttttttgtatttttagtagagatgggatttcaccgtgttagccaggatggtctcaatctcctgacctcatgatccgcctgcctcggcctcccaaagtgctrggattacaggcgtgagccacggcgcccagacccagggagggagtttttggagccccagaagcccattcacaaagtcctctcggggccatagttctcaagt

SEQ ID NO: 538877 - DNA, 201 bp, Homo sapiens
ggccaagccttccagccccagaaaggagagagtcgcttataaaccatttccgcctcctcagcctgaagacttttgctttgtaggagcaagcctatccctaygcacagactcttcttggatttctaggaatttcagcttcctctcaaccccccatctgaagggacagggaaccattcaccttctctgtgttgtattccttgg

SEQ ID NO: 538878 - DNA, 201 bp, Homo sapiens
tgttcaccccccaggtgtttatctcagtggatgatctggaacccccggagccccaggaccctgaagattccagaccaaaacctgagcaggaagcaggaccygggactccgggcaccgccgtggtggagcagcagcattccgtggagttcgactctccagactcaggactgccctcctctcgcaattactccgtggcctcgg

SEQ ID NO: 538879 - DNA, 201 bp, Homo sapiens
aggagctagagaacgatcaggacccatctgccagctgtcatgcgcagcctctgtgagggccgatgacctcctgggctgccagcccatcccagacagtcccrgtctttcacatcctcccacctctgttctctctcttctgttcttcctagagaggctgcctccgaagagtgaggttctgcagctgccccagcccctcgcctc

SEQ ID NO: 538880 - DNA, 201 bp, Homo sapiens
ccacaaggagatccgagggggagagagtgcaccgcgcagcacagggcaacagacagacccactgccaggttggggatcgcctgcatccctgggcgtgagcrgacggtgagtggcggccagaggcagcatcggctcagggctcagcctctctcccttttcccacccacataagatcctggactcagagctgtttgagctgat

SEQ ID NO: 538881 - DNA, 201 bp, Homo sapiens
cagggctggcacactgccgccacctgtccacggtgcggacccacctgtcggcgctggtgcaccatagcgttatcccacctgaccggcccccgggggcctcsgcgggcctcaccaaggacgtgtggagcaagtatcagaaggacaaaaaggtgccaaccctggggttccagggccacaggtcgaggggctggggcgggcagg

SEQ ID NO: 538882 - DNA, 201 bp, Homo sapiens
agatggaataggggtaccatttatgggaagtttggcagaatgtgagtatctttctgagcattttttaaaaagcttttacactcgctatctgcttttttttwatttcttgtcatagtataaattttctgtcgaaaattgtttagaaatcagcttgactgagaacaggattacagtttaagttcccatatgtcttacttagtt

SEQ ID NO: 538883 - DNA, 201 bp, Homo sapiens
cccaaattcagatgttatacttacttttgagtctatgcatgggttggacaatagtcagaatgaagaagtctcaaagcagacctctccagtgggattctacrcctgcatccactggcattgcagtattcattgtcatgacacaggtgggtattgatactcagtgtttctgcttagtaatcctcagaaatgcaaacttgagca

SEQ ID NO: 538884 - DNA, 201 bp, Homo sapiens
gtcagaaactttatcctgtaagtcagaaactttaaagatattctgtaaaatattataaataaataaaactttaaattgaatgccatgtttaattttttaayactaagaaggaaagataaaaactaagattcaaaacacaggatagcataaggaactttactgacccacagttgttataatatatttagcatttttattttc

SEQ ID NO: 538885 - DNA, 201 bp, Homo sapiens
agtataataagatttaacaattagtatccacctgttttaaaattagattttaatttcaaagtgaacaaagtgaacacaaattgagtttaatttcaaagtgaacaaacaatttttgcttgtggcaaaacaaaaaattggtagctgaagagaggaagaaaacagacttttttaaagagatgatttgtttaaaagaacactgag

SEQ ID NO: 538886 - DNA, 201 bp, Homo sapiens
gtataataagatttaacaattagtatccacctgttttaaaattagattttaatttcaaagtgaacaaagtgaacacaaattgagtttaatttcaaagtgaacaaacaatttttgcttgtggcaaaacaaaaaattggtagctgaagagaggaagaaaacagacttttttaaagagatgatttgtttaaaagaacactgagt

SEQ ID NO: 538887 - DNA, 201 bp, Homo sapiens
tataataagatttaacaattagtatccacctgttttaaaattagattttaatttcaaagtgaacaaagtgaacacaaattgagtttaatttcaaagtgaacaaacaatttttgcttgtggcaaaacaaaaaattggtagctgaagagaggaagaaaacagacttttttaaagagatgatttgtttaaaagaacactgagtg

SEQ ID NO: 538888 - DNA, 201 bp, Homo sapiens
tttaaatctttagaattattacctgcgaatatctcttaatgaatttcgttagcttctctttgaaaatggctttttgtggtttttcttaaaaaaaaaaaaaratgttctcaatgcaaaaagcactaaattttttatattgtgaaaacttggttgacgttggttttcatgtcccattagtttttgacatcgcttcccaaattc

SEQ ID NO: 538889 - DNA, 201 bp, Homo sapiens
acctcaaagctgaagtttttcttcctattataattccactctctgttataactgactcttttctatttctgacccaaagcctaaaactcacatcaaaataygctgtgaagaaaagtgataagttttcttaaaaatcattaaatgctacctcataaaataaatatatatatgaaacttgaagcatttatagatttctgttgt

SEQ ID NO: 538890 - DNA, 201 bp, Homo sapiens
ataataagatttaacaattagtatccacctgttttaaaattagattttaatttcaaagtgaacaaagtgaacacaaattgagtttaatttcaaagtgaacaaacaatttttgcttgtggcaaaacaaaaaattggtagctgaagagaggaagaaaacagacttttttaaagagatgatttgtttaaaagaacactgagtgc

SEQ ID NO: 538891 - DNA, 201 bp, Homo sapiens
gtgaacaaagtgaacacaaattgagtttaatttcaaagtgaacaaacaatttttgcttgtggcaaaacaaaaaattggtagctgaagagaggaagaaaacagacttttttaaagagatgatttgtttaaaagaacactgagtgcagagctagcattttatcttttaagcattttatgtacagttttaagggaagaatcatc

SEQ ID NO: 538892 - DNA, 201 bp, Homo sapiens
tgaacaaagtgaacacaaattgagtttaatttcaaagtgaacaaacaatttttgcttgtggcaaaacaaaaaattggtagctgaagagaggaagaaaacagacttttttaaagagatgatttgtttaaaagaacactgagtgcagagctagcattttatcttttaagcattttatgtacagttttaagggaagaatcatct

SEQ ID NO: 538893 - DNA, 201 bp, Homo sapiens
aaggatggggtcagtgctttattcatctttctatccctagtatttaatatagtaggttttgagtggaataggagtattgaatttacatgaatgatttgagagagaccatatcacaggtggtgatatttagaaaggaggtagtgccaggaaaggggatgatgagaaataattgaattagaagaattgattaaaataaggttg

SEQ ID NO: 538894 - DNA, 201 bp, Homo sapiens
aaaatgggaaacgaaaagagttaaggttggacttaatggacatatggtatgggcatatatatgtatttttaaatagtattgctgctgttttaactattttwataaatatattacaaaatttatggcaatttttaaatctttagaattattacctgcgaatatctcttaatgaatttcgttagcttctctttgaaaatggct

SEQ ID NO: 538895 - DNA, 201 bp, Homo sapiens
agttttagaaaatactcttcacattatagttcagccatcaaaaaaaattcacccagaaatgaaggtactagtattctccatattgcagaaatcgtatttakaatttgctttaataagcagtgagttatagagaacaggattatgtagttagaaaagctaagaaaaatgggaaacgaaaagagttaaggttggacttaatgg

SEQ ID NO: 538896 - DNA, 201 bp, Homo sapiens
atatgaacatttatgaagaatacattaaatatagctctgatcttcaacaagccagacaaggcagatcagacaggcagtcagagactatacaaatacatacktattttatacagatcacatattagcatatgtatatgaaaacagggaagtttgaatatgtaaaaatatgaaccatgggctgtggtagctctgtggtagcac

SEQ ID NO: 538897 - DNA, 201 bp, Homo sapiens
tttgctgtaggtagtatcttcattttacagatgaagaaagtgagtgtcattgcttatgtaacttacccaaggtcacacaacaggtaagtattgaagccagsattcaaacatacatctgaatgatgccacacaccccccacccctgactgtatcatactacttcatgtggacctgatccagtataataacttctgcattcct

SEQ ID NO: 538898 - DNA, 201 bp, Homo sapiens
cttccctttttcctcttattattcagggactcatccatatatggaacatggtagtctcttctcttagcctattctagtgaagcattcatttctaaacatcyggcttttatcttatcagctgtctgattccctcataaggcaactagctagatcagtgaaaagagcagaggtccccagtccttgccacccattgtggggatc

SEQ ID NO: 538899 - DNA, 201 bp, Homo sapiens
aaaaactaaaggccggtatcactttatgaagcatacttttatttctgtttgaagtaaatccacataatttaaaatgaaacatcaaaaatatattggtaaargtgtgggttttttttatattttatctaagagaaaaagggcaaatgataaaaatggcaacacagcagagcctttatataatgaggtccggattatataatt

SEQ ID NO: 538900 - DNA, 201 bp, Homo sapiens
ggaagccagactcgttgggtggctcctgcctgtaatcccaccactttgggaggcagaggtgggcagatcacttgaggtcaggagttcaataccaacctggyggctgggcgtggtggctcacacctgtaatcccagcactttgggaggctgaggtgggtggatcacctgaggtcaggagttaaagaccagcctagccatcat

SEQ ID NO: 538901 - DNA, 201 bp, Homo sapiens
gttaggagaagataatagaaacggaactactttggtgagaaaaggaatttaaagtattgggaaattacagaattgacagaataaagggaagggatcctgattttttttttttttgaagtttttaagatagctaagaaaaggagtttcagtaacccagtttttcaaaatccaatgtggaatatattttgggtgaatgaagaa

SEQ ID NO: 538902 - DNA, 201 bp, Homo sapiens
ggcatgtgttttatgcagacaagtatacatgccaagatgacaaggagaattctcaggtggaagatatcccatttgaaatggtgttactaaacccagatgcygaagggaatccatttgatcattttagtgctggagaatctggtaagaatatgtatttgaatatatcctaaattcaggaaaagatttatgtacaaatatatt

SEQ ID NO: 538903 - DNA, 201 bp, Homo sapiens
attttttgagacagaggcttgccctgtcgcccagcctggagtgcaatggtgcagtctcggcccaccgcaacctctgcctcccgggttcaagcaattctccygcctcagcctcctgagtagctgggactacaggcacccaccactacacctggctaatttttgtatttttagtagagacgaggttccaccatgttggccaga

SEQ ID NO: 538904 - DNA, 201 bp, Homo sapiens
tcacattgttttagtaatgtgttttaaaatacagccttaagagggattcttcctactttgtagcctcaggtatggaatttgtttacagggaaaatgttcarttcattttagaaacttctgctagtttgcctaattatctgctacaagtaggaaaaattgatttgctatgctttttacagaaaattgactattaccacatgt

SEQ ID NO: 538905 - DNA, 201 bp, Homo sapiens
tacaagtgttcaccacctgttgtatgctcattaagagtatttttcttcttcagtgtatacttttttcatgtgtattattaagtcttaagtataataagatktaacaattagtatccacctgttttaaaattagattttaatttcaaagtgaacaaagtgaacacaaattgagtttaatttcaaagtgaacaaacaattttt

SEQ ID NO: 538906 - DNA, 201 bp, Homo sapiens
ctgagctaaatgccaatgtattatcttagttaattgggtaatttagcttgagtgatgctgtttcacaacatgtcatttgaacatgagacttagttatatgrtataaaatatgtcactttgacagccaggtgcagtggctcaggcctgtaatctcagcacttggggaggccaaggtgggtggatcacctgaggttgggagtt

SEQ ID NO: 538907 - DNA, 201 bp, Homo sapiens
tgccaaccccgctggtgcggctttccagccccaggcagcggcctctcgccactagtgatcgtgttccgcacctgaaagctggtttccatttccccaacccyccccttggaagccaatgtgcaaaagactggtcggccgcatctttccagatccttcccgcaaagaagcatatttgctccttcctgtctcggccacactgtg

SEQ ID NO: 538908 - DNA, 201 bp, Homo sapiens
tttgcttgtggcaaaacaaaaaattggtagctgaagagaggaagaaaacagacttttttaaagagatgatttgtttaaaagaacactgagtgcagagctarcattttatcttttaagcattttatgtacagttttaagggaagaatcatctaaaattcagtgaataaagtgtgggacagacccagttcaatttgtttaata

SEQ ID NO: 538909 - DNA, 201 bp, Homo sapiens
cccaggacgcccagggccagcgcatcggccacttcgagttccatggtaggtctgggggcggggagggggatgaaggcgcgctggcccatcccgccggctgrgtccgccggccgctcctcccggcccctccctgccacgttgggcgaggccggcgacttccccagcctcacctggacctccagcgttgcagcagctgccgcg

SEQ ID NO: 538910 - DNA, 201 bp, Homo sapiens
agagctagcattttatcttttaagcattttatgtacagttttaagggaagaatcatctaaaattcagtgaataaagtgtgggacagacccagttcaatttrtttaatatgttatgtcaatgaaataatttttgtgttcgttataatgttagctttttctggaagattattaactttgaataatcctaagacattttttgct

SEQ ID NO: 538911 - DNA, 201 bp, Homo sapiens
aagactgtactaaaaagctgctagtaggcactagaggctgctctaatgactggttccatttttaatacaaagtctgcacattctttgttctttgccagccrtctgtctttcctcacttgtaatttctactccctcaaaactttggtttttatcatggctcagtttgattcgtctggcctgtcccaacatcagctcctttca

SEQ ID NO: 538912 - DNA, 201 bp, Homo sapiens
ttacaggcacataccatcatgcctggctgatttttaaatttccttttctgtagatggggtctcactatgttgcccaggctggccttatactcttgggcttragggatccacccaccctggcctcccaaagtcctggaattacaggcatgagtctccacactctgccttttcattgtttttaggtatatttatatacattct

SEQ ID NO: 538913 - DNA, 201 bp, Homo sapiens
tgttgagcattgcaaagctgctgctgctgcagccctaagaaccaacttcaggcttctgagcgcaagacaagaagatgtcatcctgcctttgagtttttcasagggacagtagtgcttattgtttgataagttaatatgtatttgaggtgtttaggcattaagttttcttattttgcttttttcgttgttgtttttgagacg

SEQ ID NO: 538914 - DNA, 201 bp, Homo sapiens
tttctttgggaagttaataaacaactacatgctaacttttattaaacttctgggttgggcacagtggctcactcctataatcccagtgctttggaaggccragacagacagattgcttgagcccccaagttggaaaccagcctgggcaacatagaccccatctctacaaaaaattaaaattagccacgctttgtggcgagc

SEQ ID NO: 538915 - DNA, 201 bp, Homo sapiens
attaggctgtggactctatcagatcatcacagtggagagaagtacactcaaaagggagttctacatcacatttgccaaagtatgggtttggaaagaaaatsgtttattctgattatccacttggttctggtttctttgggaagttaataaacaactacatgctaacttttattaaacttctgggttgggcacagtggctca

SEQ ID NO: 538916 - DNA, 201 bp, Homo sapiens
aggaatttcccagctttggggctcaggtggctcccaagaccctcccttggggccccaaacgataatgatcaaaaagaacagaaccctctccagcctgctgrcccaaacccaaccacacaatggtttgtctcaatctgacccagcggctggaccctccgtaaattgttgacgctcttcccccttcccgaggtcccgcaggga

SEQ ID NO: 538917 - DNA, 201 bp, Homo sapiens
accacccagcacccagcaggtgcctcacagacatatgcattctgaacaaggtgtggggtctcttccagcagctgtcagctgtcccttttcccctttctctstagttcacagtacagagccagttgtccaggagaatggggacgaagctggggaggggagagaggctaaagattgtgaccccggctctccaaggaggtgtga

SEQ ID NO: 538918 - DNA, 201 bp, Homo sapiens
acgtaacacatagctgcaggccaggcgcagtggctcacacctgtaatcccagcactttgggaggccaaggcaggcagatcactgaggccaggagttcaacrccaacctggccaatgtggtaaaatcctgtctctacaaaaaaatatacaaaaattagccaggcatagtggcgcacacctgtagtccagctacttgggaggc

SEQ ID NO: 538919 - DNA, 201 bp, Homo sapiens
cctttctctctagttcacagtacagagccagttgtccaggagaatggggacgaagctggggaggggagagaggctaaagattgtgaccccggctctccaasgaggtgtgacatcatcatcatctctggccggaaagaaaagtgtgaggctgccaaggaagctctggaggtatgtgtccatgtgcccccctccaccccccgc

SEQ ID NO: 538920 - DNA, 201 bp, Homo sapiens
ggtgcagatacactcgaacttaccctaacctgggagtcagggcaaccttccccaagcatgtgatgtttaagctcatgctgttttaatggatgagttggtgytgctgggcaggaataagcaaagatggtgtttctgccagaatgtcttggaaaaatatgctccttcagaacctacaaatattcttgttttcttttattctct

SEQ ID NO: 538921 - DNA, 201 bp, Homo sapiens
aaaaaaaaaaaaaaaagaaagaaagaaataggccgggcgcggtggcttatgcctgtaattccagcactttgggagacaggcgggtggatcacggtgtcagragtttgagaccagcctggccaacaatgtgaaaccctgtgtctactaagaatacaaaaatcagccaggtgtggtggcgcacgcctgtagtcccagctactc

SEQ ID NO: 538922 - DNA, 201 bp, Homo sapiens
caaattgggttcaaatgatccttctgcctcagtctcctgagtaactaggattacaggcacaggctaattgtttttattttttatttttttaagaaatgagktctcactttgttgcccaggctggtctcaaacttttggcctcaagtgatccttctgccttggcctcccaaagtgctaggattataggcatgagtcaccatg

SEQ ID NO: 538923 - DNA, 201 bp, Homo sapiens
cgttttttttctgaatgtcatttttagacatgtccctttattcatggtgggtattttcttagaacaaggacattctcttacataattctagcacatttatyggaatcggatttaacattatataacagtagtatctaatatgttgtcggtattcaaatttgccagtttttctccttcagaaacacctacttccccatccta

SEQ ID NO: 538924 - DNA, 201 bp, Homo sapiens
gtgcctctttcttagccagtaacaccaagtgctaattaccattgctttgtagtatgctttgctaattttagttgaatcccagcttttttttttttttttttgcaaaattttctagcctggttttatgtttaggtgaatttttaggagaatccttgttagagttaaaaaaatatcctactgggatgttgtgttactttccca

SEQ ID NO: 538925 - DNA, 201 bp, Homo sapiens
ctttggtttaagggaattttgagactggtttaatcttctagccagaccactcaaactttctccttatcagcgataaggctgtttcgctctcttaccatttrtgtgttcactggagtagcacttttccttcagccttttttctttgcattcacagcttggctatttggtgcaagaggcctagcttttggcgtgtcttagctt

SEQ ID NO: 538926 - DNA, 201 bp, Homo sapiens
gaatggtcagtgttatctgccatccctctcctatattgatgtttatttccaaattagggtgtttagttttcctttctttttttttttttttttttttttttgagacggagccaggctggagttcagtggtgccatcttggctcactgcaacctctgcctcctgggttcaagtagtgattctcctgcctcagcctcccgagt

SEQ ID NO: 538927 - DNA, 201 bp, Homo sapiens
tctgtctggtctcctgctcatttatttacatcacacacctcctgggttctgtcttagtgataattattgttgtgtctgttttgtgacacttattgttgtgstgtctattttggtacacacgcggtgtcccagtgtggcctgtaggagcccctccagctgtcttctgtgtcctgttcacacgcctcttcacttctggggctc

SEQ ID NO: 538928 - DNA, 201 bp, Homo sapiens
aatttgggttttgactttgaactggaatggtcagtgttatctgccatccctctcctatattgatgtttatttccaaattagggtgtttagttttcctttcyttttttttttttttttttttttttgagacggagccaggctggagttcagtggtgccatcttggctcactgcaacctctgcctcctgggttcaagtagtga

SEQ ID NO: 538929 - DNA, 201 bp, Homo sapiens
gattgtgaccccggctctccaaggaggtgtgacatcatcatcatctctggccggaaagaaaagtgtgaggctgccaaggaagctctggaggtatgtgtccrtgtgcccccctccaccccccgccaaggcccagtcagcaggcacctggggagacgcgtggcctggatgggatggacggttgcccaagcggcagtggcagtg

SEQ ID NO: 538930 - DNA, 201 bp, Homo sapiens
aactcctgggctcaaatgatccttttgcctccgcctcctgagtagctgggaagcatactacaggcactgtacctggctaattaaattttttttttttttttgtagagatgggagttgtggggggtctcactctgttttgctatattgcccaagctgatcttgaacttccgacctcaagcagtcctcccacctcggcctccc

SEQ ID NO: 538931 - DNA, 201 bp, Homo sapiens
tcacaactcattgcagcttctaactcctgagctcaagtaatcctcctgcttctgccgagtagctaggactatagggtgcctggctaatttttattttttttgtcaaaatggaggtttgctatgttgcccaggctggtcttgtactcctggactcaagtccttctgcttcagcctcccaaagtgcaaagtgctgggattaca

SEQ ID NO: 538932 - DNA, 201 bp, Homo sapiens
ttcagtctttctgcttttggccatagacaatacagttaaatacctgtttttctgtccttggctggctgattctaacactgtcatttctgggtggttttctrttttcttttcctcgttatgggttttccccctattctttgcatttctggtgtttcttaatgagggtgtttttgtattcctctgaatattattttgtgtttg

SEQ ID NO: 538933 - DNA, 201 bp, Homo sapiens
agcaggttaagtgctgcctctctcctgttgcttgttttctgtaatatgtcacctttcttggcatgattcctttgtccagtcttccagcgtcctgttgtatrgtgtgggtgggctggggactgcataaatgagttggagcagtgatgttcttggccttgctctgtcctgtgagagaggaccctgcaccatctggggctcctg

SEQ ID NO: 538934 - DNA, 201 bp, Homo sapiens
ataatgtggtggaagactccatgctggtggaccccaagcaccaccgccacttcgtcatccgcagaggccaggtcttgcgggagattgctgaagagtatggyggggtgatggtcagcttcccacgctctggcacacagagcgacaaagtcaccctcaagggcgccaaggactgtgtggaggcagccaagaaacgcattcagg

SEQ ID NO: 538935 - DNA, 201 bp, Homo sapiens
ggcttatgcctgtaatacatacacatgcactttgtaatcccagcattctgggaagctgaggcagggggatcactggagcctaggagtttgagaccagcctrggcaacaaagtgagacccccatctctacaaaatatagaaaaaagttagctggacctggtggtgtgcctttgtggtcccagctactcaggagactgaggtg

SEQ ID NO: 538936 - DNA, 201 bp, Homo sapiens
atggcgtgaacccgggaggcggaactttgcagtgagccgagatcacgccactgcactccagcctgggcgacagagcgagactccatctcaaaaaaaaaaamaaaaacaaataaacaactttgtattcattgcttcctatatactagtcatcacgctatttatttctagcagtggttatcaccagggtgatttttgttaccc

SEQ ID NO: 538937 - DNA, 201 bp, Homo sapiens
accataaaagagcttacttccctcttttcagaattgtttccctcctctgtaactggtgtccccagtccaaagattctacttccctttgcagacagaaaagygatacctttttgccaggataggagagggactgtgcaggttggctctgtgtggctgtgcagagttgtggggtgcatcttagggatcttcgtgccttttaaa

SEQ ID NO: 538938 - DNA, 201 bp, Homo sapiens
ctctttggtcctgtttatttgcaactcatgttcttcaacgctgggcatttttttgatttattgctttgatttcttcctatttgctttctctctctctctctagaattctactcttggactttctggattggcactcataattttcttaaggtttctttttcccccctctaaaatttttgtttttgtttttatcttttaaat

SEQ ID NO: 538939 - DNA, 201 bp, Homo sapiens
gatttcatcgcacaatcattgggcagaagggtgaacggatccgtgaaattcgtgacaaattcccagaggtaaagtttcccagagacattctgtaactctayaggagtgatccaagtcacacttcaggaatatttgatatttgggatatatgtccttcctcatacttgaacttagtctccccatgatttgttctaggtcatc

SEQ ID NO: 538940 - DNA, 201 bp, Homo sapiens
ggtctagtgtgagagacttatttgtagaagagtaattacattatggtgtgataagtgcaatgatagaaatatgtgtaaggtgtggacataggaaataggcwgtggttacctgttggaaagtcttcctacagaatgtggtccttgaactgcggtttaaaagacgagtaagagtttttccaggtggtgctgagtggacaggaa

SEQ ID NO: 538941 - DNA, 201 bp, Homo sapiens
acactcgaacttaccctaacctgggagtcagggcaaccttccccaagcatgtgatgtttaagctcatgctgttttaatggatgagttggtgctgctgggcrggaataagcaaagatggtgtttctgccagaatgtcttggaaaaatatgctccttcagaacctacaaatattcttgttttcttttattctcttcttgctat

SEQ ID NO: 538942 - DNA, 201 bp, Homo sapiens
taaccagagaggattgtatgttcttaggtttcataagtatcttaagaaacatgtcatttagtaattatggtgaaataacttcatgatactttggcgggccrggtgcggtggctcatgaggtcaggagatcgagaccatcctggctaacatggtgaaaccccgactctactaaaaatacaaaaaattagccgggcttggtgg

SEQ ID NO: 538943 - DNA, 201 bp, Homo sapiens
tcgccatattggccaggctggtctcgaactcttgacctcaggtatctgcctgcctcagcctcccaaagtgctgggattacaggcacgagccaccgtgcccrgcctatttgaatcttttgaaatgatcaaattatctttgcccctcatgctgttaatgtggcgagtaactttactctgtttttctaatattgtaccccccca

SEQ ID NO: 538944 - DNA, 201 bp, Homo sapiens
tccatggttcttagctctttcattcgttccatctctcgattttttttctaaaatgtcacctttatgtctcttatgcttttttattgtctcaatcttagttytgtctcccgaagttcttgagtctaatcctacttctaatccatccttccttctttttgagctttgggcttttagcctctctaccatttgtgctgatctgtg

SEQ ID NO: 538945 - DNA, 201 bp, Homo sapiens
ccttgtccctcctcagttcttctccataaagcaacgggagggaccctgcaccatcaagcagaatgcctcctgctgaaaagcctgtgttgacttttactacrgggtgggatgggtgatcctcttcactgtccccctctggtgtgtgcaccaggctccgcccccatccacctcctccgctttcctgcctgtacacccttagtt

SEQ ID NO: 538946 - DNA, 201 bp, Homo sapiens
cgttacgttattgggcagaaaggaagtgggatccgcaagatgatggatgagtttgaggtagacccctttcccgggaggccatgtcacaggagtggcctgtygcatcctctcccgagtgccagtgtcctttctcaacttcctgttgactctgcctcctcctgctcggactgggcactgacttcccttcacggcgggtggcct

SEQ ID NO: 538947 - DNA, 201 bp, Homo sapiens
ggtacacacgcggtgtcccagtgtggcctgtaggagcccctccagctgtcttctgtgtcctgttcacacgcctcttcacttctggggctctcgctttctgrcataaggagctggcacaggtttaccttggccttgccctttctgtctcccctagacctctcaccccccttcccactgcctctcctgggtggggctgcgtgc

SEQ ID NO: 538948 - DNA, 201 bp, Homo sapiens
aaacgataatgatcaaaaagaacagaaccctctccagcctgctgacccaaacccaaccacacaatggtttgtctcaatctgacccagcggctggaccctcygtaaattgttgacgctcttcccccttcccgaggtcccgcagggagcctagcgcctggctgtgtgtgcggccgctcctccaggcctggccgtgcccgctca

SEQ ID NO: 538949 - DNA, 201 bp, Homo sapiens
aagccgtcctgatcccaagggacagggcagggaaggtgagtagtggtccgagagtcccttgtggcacctcatgggcatcggtcaaagccgtcatgaccccraggatgtgccaggagtcagggcctctcctcctacgtgggcctgaaggggctgctgtaattcaggagggtaggcttgggatgaagggtctggaatttctgt

SEQ ID NO: 538950 - DNA, 201 bp, Homo sapiens
gtgctgcagacaggagcaggggttctggaacttggagcagactgtgctggggtgctggtttgctaagggggttggctttccactcctcccgtgagcacgtygagtctggtgaatggggtggagctcgtgaacctcacatggtgtcagtgtacccctgcgtggactctgggttgtctcctgcagccaggtcatacctgtagc

SEQ ID NO: 538951 - DNA, 201 bp, Homo sapiens
aaattttttttcttttttttttttttgagacagagtcccgctctgtcgcccaggctggagtgcagtggtgcgatctcggctcactgcacgctccgcctccygggttcacgccattctcctgcctcagcctcccgagtagctgggactacaggtgcccgccaccacgcccggctaatttttgtatttttagtagagacgggg

SEQ ID NO: 538952 - DNA, 201 bp, Homo sapiens
actctttggtcctgtttatttgcaactcatgttcttcaacgctgggcatttttttgatttattgctttgatttcttcctatttgctttctctctctctctctagaattctactcttggactttctggattggcactcataattttcttaaggtttctttttcccccctctaaaatttttgtttttgtttttatcttttaaa

SEQ ID NO: 538953 - DNA, 201 bp, Homo sapiens
tgttttcatccatcgtcttgcctactctttggtcctgtttatttgcaactcatgttcttcaacgctgggcatttttttgatttattgctttgatttcttcytatttgctttctctctctctctctagaattctactcttggactttctggattggcactcataattttcttaaggtttctttttcccccctctaaaatttt

SEQ ID NO: 538954 - DNA, 201 bp, Homo sapiens
ctttagcgctgtcctgcccagttatgtcattggcagaatgttgttggtctgtgtcctaaatgtgtttccttttgtgttcctaagtaaacagaatcaaagaycagtacaaggtgtccgtgcgcatccctcctgacagtgagaagagcaatttgatccgcatcgagggggacccacagggcgtgcagcaggccaagcgagagc

SEQ ID NO: 538955 - DNA, 201 bp, Homo sapiens
ttgggcatgggcggtcatctctcgatgacatcccacatgtccgggcacagacacccagggcatcctagctgggtgagtaataggttctgaaacaaccagargctggtcgaagtcctggaataatcgtgggtggaggaaacttcatcttgaagaaggcatctttcaggggagatgcaggggcagtctccaacaattcctgac

SEQ ID NO: 538956 - DNA, 201 bp, Homo sapiens
ctttggggctcaggtggctcccaagaccctcccttggggccccaaacgataatgatcaaaaagaacagaaccctctccagcctgctgacccaaacccaacyacacaatggtttgtctcaatctgacccagcggctggaccctccgtaaattgttgacgctcttcccccttcccgaggtcccgcagggagcctagcgcctgg

SEQ ID NO: 538957 - DNA, 201 bp, Homo sapiens
actttgtatagcttcatataaggaccagtctgccttccttaactccttacctggaggataataaaccaggaactctggcagccttgtctatgtcaagcaarttactttaccaccttggtacagctatacgagttttaaaattccatccgtgctctgtctcattctttatgcaactcaagaggaccaggccttgtaaaagtt

SEQ ID NO: 538958 - DNA, 201 bp, Homo sapiens
ttacatcctcctgcctgctggaagaggccacttttccttttccctttggtgcagtggttggattagagctgcttggccagtgggtgaattgtcacttttgraaatccatctaagccctccccaaataacccacagaggccatgttgaaggcatgcccaagggcagcattctctatatttccgtcagacctgctaggttagc

SEQ ID NO: 538959 - DNA, 201 bp, Homo sapiens
cctggccagtatggcgaaaccccatctctactaaaaatacaaaaaaattagccaggcgtggcggtgggtgcttgcaatctcagctacttgggaggctgagrcaggagaatcacttgaacccgggaggcagaggttgcagtgagccaagatcatgccattgcactccagcctgtgcaacaggagcaaaactctgtctcaaaa

SEQ ID NO: 538960 - DNA, 201 bp, Homo sapiens
ggcagcattctctatatttccgtcagacctgctaggttagccaatcagtgttggtagtactcatgccttctgaacgtggaaactgctgatctggaactcaytgaagagtaaaaacattctagatttgtgcccaagtaaaacaacatggggagggatacttttttgagacagggtctcactctgtcacccaggctggagtgc

SEQ ID NO: 538961 - DNA, 201 bp, Homo sapiens
ctggtatttcctgtgttaatgataatggtttcatgtttaatgtctaggaccactgttaacacctccaccctgcactattctttttcagggttttcttgttyatttttgttggttctgtgttacaacctttataatcaactgtttgaaattgtattaatattttaaagttaattgggatgatcgccatctacttaaaccttc

SEQ ID NO: 538962 - DNA, 201 bp, Homo sapiens
ctcgactccctttatacccttaaaagaaacagtggcagttatcacttagtaaacacaatggatgcagaagtgacaagtccttcccggagggtggagacccygagagtagggattccgttccgcccagtcctgcgtatccaccgtgggctcagaggccacacaccggttcttttgcgtgtatacatctatgtagagatggag

SEQ ID NO: 538963 - DNA, 201 bp, Homo sapiens
ctgtgttaatgataatggtttcatgtttaatgtctaggaccactgttaacacctccaccctgcactattctttttcagggttttcttgttcatttttgttkgttctgtgttacaacctttataatcaactgtttgaaattgtattaatattttaaagttaattgggatgatcgccatctacttaaaccttctgttagctat

SEQ ID NO: 538964 - DNA, 201 bp, Homo sapiens
tctttttcagggttttcttgttcatttttgttggttctgtgttacaacctttataatcaactgtttgaaattgtattaatattttaaagttaattgggatratcgccatctacttaaaccttctgttagctattttaaggagtgttttctaatttcgaatgcacatactccaccttgtgttgggcttatgtcttgctattt

SEQ ID NO: 538965 - DNA, 201 bp, Homo sapiens
atcaactgtttgaaattgtattaatattttaaagttaattgggatgatcgccatctacttaaaccttctgttagctattttaaggagtgttttctaatttygaatgcacatactccaccttgtgttgggcttatgtcttgctattttcttgtccttttttcttttttccttttttctattagaaacacatcttttggccag

SEQ ID NO: 538966 - DNA, 201 bp, Homo sapiens
tttccccagaaatgtttgagcctgccacgtgtgccatgtttgtgtttgtggtagaggagatgctttcatgattgagaagaagacgcattttatactctttycccctaatgtaaatttattcattaaacacaaaagatttgtaataaaatattttttccttaagattgttatataaagtttactaatgagaaaaactccctt

SEQ ID NO: 538967 - DNA, 201 bp, Homo sapiens
tggggtgtctgcttcctaggcgtgtccagcacagctttgcccacagtgggagactagcaagccttggtggccacagttgtgctggtttccagaaacagcaraccccctggcagcagagcccctccacgcccctcgctcccactgtggatgtgccgcccagggttttccgctgcttccccttccccttccccttcttcctcc

SEQ ID NO: 538968 - DNA, 201 bp, Homo sapiens
ctgtgtcatgctgtgagggctgaggacggggccctagtctctggttttctggtcttaacatccttatctgtgtccgccacggaggtgactgagctgctagygagttgtcctgtcccaggtacttgagttttggaaaagctgactcacgcccatccatctcacagcccttccctggggacagtcgcttccgccttgacacct

SEQ ID NO: 538969 - DNA, 201 bp, Homo sapiens
cctcggcaagtccccatttgctcaggcagccctgaatgggcctgtttacaggaatggtaaattgggattggaaggaatatagcttccagcttcataggctrgggtgaccacggcttaggaaacagggaaagaaagcaaggcccttttcctgcctttcccgggatctgtctactccacctccacgggggaggccagtgggga

SEQ ID NO: 538970 - DNA, 201 bp, Homo sapiens
gagcagactgtgctggggtgctggtttgctaagggggttggctttccactcctcccgtgagcacgttgagtctggtgaatggggtggagctcgtgaacctyacatggtgtcagtgtacccctgcgtggactctgggttgtctcctgcagccaggtcatacctgtagcctttggccatgggtgttcaggggctgtggctgcc

SEQ ID NO: 538971 - DNA, 201 bp, Homo sapiens
ggcatcatctccatgattcaggcttctcgtgtatatgtgtgtgtgtaaaatttttgttttgccaacttgccaagcttgccttcactgttactagagcttcrttataatagagaggttttctaaacaggtcatctgcagacagtggtatttgtctccttgcttcattctgtctctttagatggcctattggacagtctttga

SEQ ID NO: 538972 - DNA, 201 bp, Homo sapiens
cccttggggccccaaacgataatgatcaaaaagaacagaaccctctccagcctgctgacccaaacccaaccacacaatggtttgtctcaatctgacccagyggctggaccctccgtaaattgttgacgctcttcccccttcccgaggtcccgcagggagcctagcgcctggctgtgtgtgcggccgctcctccaggcctgg

SEQ ID NO: 538973 - DNA, 201 bp, Homo sapiens
tttgtcttgttttctgtctttctgtttctgatattgctttgttgacctttgtactgtggatgcccttgaaaactggtgtatttttctgaattaactggcckgtttgacatggtcaacttccgtgttagcttaaagaacagcagaataaatgtctgtagatgtctgtaccatccttctggcctttaaccagagaggattgta

SEQ ID NO: 538974 - DNA, 201 bp, Homo sapiens
acaccacaccggtttattgtgtgccagctcgggttaagtgctgtctatgtatatgctcatggtaacacaaaaggcattaatatcaactttttataggagargagacaggcccaggaaatcaagatctgtaattatttcttctttttgttatcttggcccttaacttttagaagttcacacatttaaacattccatcttgac

SEQ ID NO: 538975 - DNA, 201 bp, Homo sapiens
cactcgaacttaccctaacctgggagtcagggcaaccttccccaagcatgtgatgtttaagctcatgctgttttaatggatgagttggtgctgctgggcargaataagcaaagatggtgtttctgccagaatgtcttggaaaaatatgctccttcagaacctacaaatattcttgttttcttttattctcttcttgctata

SEQ ID NO: 538976 - DNA, 201 bp, Homo sapiens
ttgcagagagagaccgctggctttttgtagcaactgtcatgatgcattttgtaagcattaagaggtgtgtggtgagcaaattgacagaataaccaaggtcrctgttaggagaacgatcctggtgttgatctatgcctggagcctgggtcaggcaggtggcaggttccatggtccccccacccctgcggttaggggtggtgt

SEQ ID NO: 538977 - DNA, 201 bp, Homo sapiens
gcatgccaccacagccaattaatttttgtatttttagaagagacggggtttcaccatgttggccaggcttgtctcaaattcctgggctcaggtgatctgcycaccttggcctcccaaggtgctgggattaaaagtgtgagccaccacacccagcagggggattctgttgaagaggcagtgatatgtcagccaaggtcgcta

SEQ ID NO: 538978 - DNA, 201 bp, Homo sapiens
aggcgggtggacacttgaggtcaggagttcgagaccagcctgaccaacatggtgaaaccctgtctctactaaaaatacaaaaattagcctggcatggtggygcgcgcctgtaatcccagctgctcaagaggctgaggcatgagaatcgcttgaacccaggaggcggaggttgcagtgagccgagattgtagcactgcactc

SEQ ID NO: 538979 - DNA, 201 bp, Homo sapiens
ctcctgaagccgtgtcctctctctgcacaggctcctgacatgagcagctctgaggaatttcccagctttggggctcaggtggctcccaagaccctcccttkgggccccaaacgataatgatcaaaaagaacagaaccctctccagcctgctgacccaaacccaaccacacaatggtttgtctcaatctgacccagcggctg

SEQ ID NO: 538980 - DNA, 201 bp, Homo sapiens
catcctctgctggaaaggcgagaccctttaatccagtctactggatgctcccccattgccatgaaccgccttctcagctccggacccatgtgtcgtaaggrcaagattattgtcacggtacgagtagtcttctccagttgagtggggtgttcctgttactgtcattgcttttcccattttagacacatgcctcactcctgt

SEQ ID NO: 538981 - DNA, 201 bp, Homo sapiens
actcacgcccatccatctcacagcccttccctggggacagtcgcttccgccttgacacctcactctcagttgaataactcaagcttggtcatcttcagackcgaattcttgagtagacccagacggcttagcccaagtctagttgcagctgcctcggcaagtccccatttgctcaggcagccctgaatgggcctgtttaca

SEQ ID NO: 538982 - DNA, 201 bp, Homo sapiens
tcaccctggagtggtgactggcatctgtgggtagttcgtctttggtgtgattttctcagcagttctcaacactgtgttcaacggcccctcgggagccacaytgagggagacccaggtgtggtcatggcaagagggtggctgcctgtccctgtcctctggctgccagacagtcagcagttgccctgcagccctcattgaggg

SEQ ID NO: 538983 - DNA, 201 bp, Homo sapiens
cacctccacgggggaggccagtggggaagggctgtcacctcttccccatctgcatgagttctggaactctgtcctgttggctgcttgcttccagctccccscaatctccatcgcagcgggttcctcctgtcttttctacagtgtcataaaacatcctgcccctaccctctcccaaaggtcaattttaattctcaccaagtt

SEQ ID NO: 538984 - DNA, 201 bp, Homo sapiens
ccagtggggaagggctgtcacctcttccccatctgcatgagttctggaactctgtcctgttggctgcttgcttccagctccccccaatctccatcgcagcrggttcctcctgtcttttctacagtgtcataaaacatcctgcccctaccctctcccaaaggtcaattttaattctcaccaagttttgcacatctctgtatg

SEQ ID NO: 538985 - DNA, 201 bp, Homo sapiens
gaatctagggaagttcttcaggatcccagcatcccagcgacatctggctggaggtgagatgcaggcagtgccaggacgcagtcagcatccaggggtcttgmtgtggaactagccaagagcatggcacctttctctttttcataaaaaagtgacaaagttggacttccgtgtaaatttgcagtttctctcaaaaccaaatca

SEQ ID NO: 538986 - DNA, 201 bp, Homo sapiens
tggatgggggtaggttcgctgtcagagactgggagtctctggcctcctctagctctcacactcagggtgctgggcctggtgacctcctggggccttttccyatcactatgaattagaagagaggggtggggggagttgtccttggagcatttgatggttcttgtttgtctgtttttaagcactaaaacccttaaaagtgtt

SEQ ID NO: 538987 - DNA, 201 bp, Homo sapiens
gactctagaggacttaaaaattgacgtagcaaggcttgctttcaagggactcaccccgttaggggagtggggctcacaatgtctgagctgatgtttaccarggaggccatgtggatgggggtaggttcgctgtcagagactgggagtctctggcctcctctagctctcacactcagggtgctgggcctggtgacctcctgg

SEQ ID NO: 538988 - DNA, 201 bp, Homo sapiens
cccatctggagtgggagtgggcacttccaccccgcccacaggccatccggctgtgcaggccagcccctaggagcaggtcccgggtgactggcagttttcayggtctagggccgagacgatggcatggggcctagagcatgaggtagagcagaatgcagaccacgccgctggatgccgagagaccctgctctccgagggagg

SEQ ID NO: 538989 - DNA, 201 bp, Homo sapiens
tagaccccaaataccatcccaagattatcgggagaaagggggcagtaattacccaaatccggttggagcatgacgtgaacatccagtttcctgataaggaygatgggaaccaggtgagagcctcggttggagcgtgtcgggggcagaggtgcttgttgacctttcctgtgacttgggagcagtaaccagatgtgcctagat

SEQ ID NO: 538990 - DNA, 201 bp, Homo sapiens
cccacctcggcctcccaaagtgctgggattacaggcatgagccactgtgcccaaccaagaatgtttttttacacctctttgtttaactgtatggctatackcacacactcgcgtgttctgaaaacaagtgcacacgtcgcgtgtgttacctttgggtggaaggtgagaaggcaagcacgtcctccattcctggatagttca

SEQ ID NO: 538991 - DNA, 201 bp, Homo sapiens
ctctcatgtccaccctgtatgctagcactcagtaggacaggcacgtggtcgttttgcaggcagtgtttgtcagatgaatgggtcctgttttctgttctctrttcattatcctgctttctcgaagaggttaaccagtttcctggttttctttggcttcagtagcccttctctctgctacctgaatttgagatgttagtgagt

SEQ ID NO: 538992 - DNA, 201 bp, Homo sapiens
gttacgttattgggcagaaaggaagtgggatccgcaagatgatggatgagtttgaggtagacccctttcccgggaggccatgtcacaggagtggcctgtcrcatcctctcccgagtgccagtgtcctttctcaacttcctgttgactctgcctcctcctgctcggactgggcactgacttcccttcacggcgggtggcctt

SEQ ID NO: 538993 - DNA, 201 bp, Homo sapiens
tctgctctcagctcccacggcctaaccatgaccatcctccctgcaggcattggttcctgtcaccattgaagtagaggtgccctttgaccttcaccgttacrttattgggcagaaaggaagtgggatccgcaagatgatggatgagtttgaggtagacccctttcccgggaggccatgtcacaggagtggcctgtcgcatcc

SEQ ID NO: 538994 - DNA, 201 bp, Homo sapiens
tctgttttagctatctctttggttttggtgtggtaggttcacatcgagttcacagagggcgaagacaagatcaccctggagggccctacagaggatgtcartgtggcccaggaacagatagaaggcatggtcaaagatttggtaaggtaccccttggaatgttgtgtgtgctggtgacaagggaggctctgagttgggcat

SEQ ID NO: 538995 - DNA, 201 bp, Homo sapiens
aaagtgatgttacgatttatggatacaataaataataaaatcaagttaacataattcatcacttcaaatactttaagttttttgtggtgaaagcatatgarattactgtcagcacttttgaaatcgacattattatttactatattcaccgtgctgtacaatatatctcataaaagaaaaccacattcctcctgtctaatt

SEQ ID NO: 538996 - DNA, 201 bp, Homo sapiens
atgttacgatttatggatacaataaataataaaatcaagttaacataattcatcacttcaaatactttaagttttttgtggtgaaagcatatgagattacygtcagcacttttgaaatcgacattattatttactatattcaccgtgctgtacaatatatctcataaaagaaaaccacattcctcctgtctaattgatgtt

SEQ ID NO: 538997 - DNA, 201 bp, Homo sapiens
tgaggcaggaatatcacttgagcccaggaagtcaaggctgcagtgagctgtgattgtatcgtgccactgcattttagcctgggtgacagagcaagaccctrtctcaaaacacatatatatggaagtacagtagtgtaaatctaacattaatttctggtttctgcccccgagaaattgcagaatgtagcttagtcagtcatg

SEQ ID NO: 538998 - DNA, 201 bp, Homo sapiens
ttttcttctcatgcagttcctaactcttgtcttctttcgtaatctaaaaaaacctgctgcccagctcccatgtcctctgcttctcttgtcttgtgttgctycacctggcacagctgcatgtccatgttcccccctcagtgcatcgcctcgttgctgcctctgcgtgtgcatgtgtttgggatggacgcacaaaaagccctc

SEQ ID NO: 538999 - DNA, 201 bp, Homo sapiens
tggacttgggcatgagcctgtctgattccagagatcatccccctgttctctgtcacatccattcatggtgtttttcactgggccttgctattgccaagacrccatgctcagtcctggggatttgggttatccaaaacagtcacacccttgatttcatggagattgtggctaatggcacaaacacatgaacaaatagggcac

SEQ ID NO: 539000 - DNA, 201 bp, Homo sapiens
agggtcagacttgacatggtgtttggacgccatgtaaaatcgaaggaagtcgacttgggctttgcttattaaacagtgcctattatggtgaaattaaacgkctgaaggaatgtggatgagtcgtaatcttaaggaacatgacgatttgcccctcagttttgcgttttatgtcctcagattcatagctacctataccctaag

SEQ ID NO: 539001 - DNA, 201 bp, Homo sapiens
gcatccaggaagcatgtcacacacagccattcaagcccctttgttttcctgagaatacagggtgttttgagtaggaaactaataaactcatactgcactcygtctatgttttacacttcagtggttatttaaaactttgattttgatagaatttcacagaatagtataaagacacatcctgtggcaccagtttcttttctc

SEQ ID NO: 539002 - DNA, 201 bp, Homo sapiens
tgtcttgtgttgcttcacctggcacagctgcatgtccatgttcccccctcagtgcatcgcctcgttgctgcctctgcgtgtgcatgtgtttgggatggacscacaaaaagccctcctcgtggtccttccagcaagctgggcttccctttactgcacagtgggcaagattcctgccttgtttcctgatgatacggcttctcc

SEQ ID NO: 539003 - DNA, 201 bp, Homo sapiens
gtgcctcgtgcccctgcctacctgcttgtgcagacctcactccctcatgggttgccgtgtccagtgtggacttcaaggcataatgtggtgggggtggaggkcttgactccaactctaaaaagccctgtctgtccccagtttgttttcaaaggcctgttctcatcagatcatcccttcctttccaggacaaacgtgctgtgg

SEQ ID NO: 539004 - DNA, 201 bp, Homo sapiens
ggctggagtgcagtggtgcagtcatggctcactacagccttggctttccagactcaagcagtcctcccaccttagccttccaagtagctgggaccacaggygcatgctaccgcaccaggctaatttttttcttcttttagttagtagagatgaggtcttgttatgttgtccaggctggtctcaaactcctcaagtgatcct

SEQ ID NO: 539005 - DNA, 201 bp, Homo sapiens
cagtcccagtgattctcatgacatcgtttggatcgcatgagccccgtcgtagagcttcctcctccacatctcccatcactgtggggtgtcccctgtgaggsaggcagctgcagcctctggctggccagagggcaccatccaagtggccggcagttctaggagggcattcagttccccgtaccatgcttgcccccagctctg

SEQ ID NO: 539006 - DNA, 201 bp, Homo sapiens
agcctctggctggccagagggcaccatccaagtggccggcagttctaggagggcattcagttccccgtaccatgcttgcccccagctctgctcatgcacckggtggtggggaggcgacctgtgggatgcgggtcggttgcctctctctcacttgctctgcatttgtgaaacaaaaggtatgccctccactctgtgttatca

SEQ ID NO: 539007 - DNA, 201 bp, Homo sapiens
tcttttcattaactgtgtaccccgaagactatgcatagtagtgtatggaggctttccttctaccttttatgctatgtgttgcttcactgcatggacacaamgtggtttcttcagcccatctgcatattgaagttgtgttactttccagattttttttttttagctttttatgtctcgctatctctgctgttgcccttctga

SEQ ID NO: 539008 - DNA, 201 bp, Homo sapiens
tttcctcccctgcagagtatctacttcagccttagtagatttccttgatctttgcctccaactctaaagagcatatttgcttgacgtctgtatttgtgtcycctacccctgtttcatgtgatgtctcttcgcttgacactgagaataggtaggaagttcctagctttctttcaccctctgccttctcagtgcaaacggatc

SEQ ID NO: 539009 - DNA, 201 bp, Homo sapiens
aggctgccaaggaagctctggaggtatgtgtccatgtgcccccctccaccccccgccaaggcccagtcagcaggcacctggggagacgcgtggcctggatkggatggacggttgcccaagcggcagtggcagtggaggtagccctcttgctcctaccgtgtgcgcacgggctgtgcttctcggctggacacagagtttggg

SEQ ID NO: 539010 - DNA, 201 bp, Homo sapiens
ctggcacagctgcatgtccatgttcccccctcagtgcatcgcctcgttgctgcctctgcgtgtgcatgtgtttgggatggacgcacaaaaagccctcctcrtggtccttccagcaagctgggcttccctttactgcacagtgggcaagattcctgccttgtttcctgatgatacggcttctccagagtttggggggcctgg

SEQ ID NO: 539011 - DNA, 201 bp, Homo sapiens
tttgatccgcatcgagggggacccacagggcgtgcagcaggccaagcgagagctgctggagcttgcatctcgcatggtaagtgccatggctgggccctctrgaaaggcactggccttgcgtctcttggccccctctaaggagtagcgtgttgtggtgtgcggccttagagaatggaagtcgacaaatcccacgttgcactg

SEQ ID NO: 539012 - DNA, 201 bp, Homo sapiens
ggagaggcgatggtgaaggactccagcactgtgagctgctgtcacatcactgccgtgagtgcagaattgcccagagcgtaggggtccgtgctgtctccatrtgtgttctgagccccttccttaaccagctctgatcctggcatgggacatgaactctctcttagccaaaaagtagacttgcatcgattgactgtaatttgc

SEQ ID NO: 539013 - DNA, 201 bp, Homo sapiens
ggcttgaataggttcatgtaaagtcatcaccacttcctcaaaaggaaattaacaaaaaaaaattttaattcagacgtcttgcagataacgtggcaattgtratgagaatagcacagcagagaaaataaattttgtgactctgtttttcactgatttgtagtacctggtgatacttaagtgtcctcttttccctctccaggt

SEQ ID NO: 539014 - DNA, 201 bp, Homo sapiens
agcttctgttttgtaatcaacactgtaggggaaagggccacttcactgaatatatggatcagaatgaagacattgacccctgacactctcctactcctcarttatcttcagacaaatcccagatacattattgtgccttagttcagatcttcccgttttcatgtatacatatatatagtcattgtgctcctaactcatgta

SEQ ID NO: 539015 - DNA, 201 bp, Homo sapiens
gctgtctccatgtgtgttctgagccccttccttaaccagctctgatcctggcatgggacatgaactctctcttagccaaaaagtagacttgcatcgattgmctgtaatttgcaacgtaagttagttgttggacaaatgatctatctcacttaccctcatgacaaacctctgaaggtttgtttgcaaataccagtgctctgt

SEQ ID NO: 539016 - DNA, 201 bp, Homo sapiens
agattgctgaagagtatggcggggtgatggtcagcttcccacgctctggcacacagagcgacaaagtcaccctcaagggcgccaaggactgtgtggaggcrgccaagaaacgcattcaggagatcattgaggacctggtaggcacttgggtgctcggggaggggttctcaccccccagtggccactcaccgaagccgtgta

SEQ ID NO: 539017 - DNA, 201 bp, Homo sapiens
atttcccagctttggggctcaggtggctcccaagaccctcccttggggccccaaacgataatgatcaaaaagaacagaaccctctccagcctgctgacccraacccaaccacacaatggtttgtctcaatctgacccagcggctggaccctccgtaaattgttgacgctcttcccccttcccgaggtcccgcagggagcct

SEQ ID NO: 539018 - DNA, 201 bp, Homo sapiens
gccgacgatgcttaagcatcttttattccctttctagatggaggcatctttgaaaagtaaagcgcctcgtgtgatacagagcttcccctcctgcagataastctcacaaacacttagcatgtgtctgtccagagtttcctgttaaaacacactttcagaggcgtgtagtgtatgaataagtgccattttcatggcacatat

SEQ ID NO: 539019 - DNA, 201 bp, Homo sapiens
tccctctcctatattgatgtttatttccaaattagggtgtttagttttcctttctttttttttttttttttttttttttgagacggagccaggctggagtwcagtggtgccatcttggctcactgcaacctctgcctcctgggttcaagtagtgattctcctgcctcagcctcccgagtagctggtactacagatgcacgc

SEQ ID NO: 539020 - DNA, 201 bp, Homo sapiens
ccagcaggacgcagctcttcctggcccttctgtcggcctctaaacacagtgcaggctgactttcttatcacagctcgtttggctggctggaccaaatgctrcttgtttctttctggagtggggaaataacttcaaccaggtgcagtcagtgtgtattcttatctcagctgcaaaagctgttctaaatgcccttctagggaa

SEQ ID NO: 539021 - DNA, 201 bp, Homo sapiens
ttccctaacctggccttgtcagtcagcctcagtctaccatctacccaggtctgcataccccgcaaaacagtatacactttgacgcttttctgcaagcacarttaccttttgggggagcccttctcttaaagcagagtaggttaatgtttgtgaatgaaacggaactttggcaggctgaggtgtctcaggtcatcagcttac

SEQ ID NO: 539022 - DNA, 201 bp, Homo sapiens
ctccatggccagaaaggggaaagaagttgtagattttgtcataacttgaggtggagcgtttacagccatgcaggggtggacccgggccctgagaaggccaygaatttcctgtccctggtggtattaagaaatgggattagattaatatctgaggttcctttcaatcctgatttggacagtactgttagatccagtgagaat

SEQ ID NO: 539023 - DNA, 201 bp, Homo sapiens
gaacaaaaaagaaataccagagaatccaaccatcatatttaattcctgttttatttaaactttgtttccaattaatgttacagtcctttttaaaaattaawttttttttattttattccttttttttagtgacaaagcctcactctgtcacccaggctggggtgcagtagcgcagtcatagctcactgcagccttgaactc

SEQ ID NO: 539024 - DNA, 201 bp, Homo sapiens
tatgttgaccttcacgaggctgctaaataaagctcatgtatattagcgccagtcactgttttgtggattttttttttttttttttttttttttttttttttgagacggagtcttgctctgtcgcccaggctggagtgtagtggcgcaatctcgcctcactgcaagctccgcctcctgggttcacgccattctcctgcctca

SEQ ID NO: 539025 - DNA, 201 bp, Homo sapiens
ttccttctgtctgaaggaaaccactcaacatctctcgtagtgtgtatccggtaatgacttctttcacattctgtatgtctgcaagtatttttttccttcaytttcgaaaagctgtttctgctgcataaaggtttctaggttggcagtttttttcctttccagacttggcttcattgccgtctcctgttgtttctgatgaga

SEQ ID NO: 539026 - DNA, 201 bp, Homo sapiens
cgctgctgcactccagcctgggccatagagccagaccttgtctcaaaaaaaaaaaaaagaaaaaagattatgatgtttgcatttaattacagttgtgattrtatatgttatatatcacatatttatatttattacatatgtttaacaaacgcggttaaataacttactgtaatttttttcctcaattgtggtaaaatatac

SEQ ID NO: 539027 - DNA, 201 bp, Homo sapiens
tggtttgttcttttttatttcaggataatattgcactgtagggatagatcatctgtttctttgtgtgtacttggtaattagtgtctttcaaggggttttctattttctccaaggtgtcaaatgtattaacatgaagttttttagaatagtcctgcattatccttttgctgtcaatactgacgtcacctctctttcacagta

SEQ ID NO: 539028 - DNA, 201 bp, Homo sapiens
gctgtgtgcctcacctgtgccaggttgcaggtgtagcacagttacaggatgctgttagaagtgtgtcgtgggcattctgctgcaggtccaaggatgttttstgttgtttgtttgttttttgggacggagtctcgctctgtcaccaggctggagtgcagtggcgtgatctcagttcactgcaacgtccacctcccaggttca

SEQ ID NO: 539029 - DNA, 201 bp, Homo sapiens
caccacagccaattaatttttgtatttttagaagagacggggtttcaccatgttggccaggcttgtctcaaattcctgggctcaggtgatctgcccaccttggcctcccaaggtgctgggattaaaagtgtgagccaccacacccagcagggggattctgttgaagaggcagtgatatgtcagccaaggtcgctatatgcc

SEQ ID NO: 539030 - DNA, 201 bp, Homo sapiens
tctttgtggagacagttatataagtaagcgtttctagggagtctttatatccaaaagtgaggcttaatctctgaagagtagactgataggaagagagtacytggagagatgatgcagtcccaccttctcatgagacaaaggaggaagcaggccaagtgaagagggtgatgtgccaagcagtgtcagcagcagatcgcacat

SEQ ID NO: 539031 - DNA, 201 bp, Homo sapiens
ttcccttggtccagacagtcctgtttgtggagtgcaatcagcctcctccagctgccagagcgcctcagcacaggtgtcagggtgcaaggaagacctggcartggacagcaggaggcaggttcctggagctggggggtgacctgagaggcagagggtgacgggttctcaggcagtcctgattttacctgccgtggggtctga

SEQ ID NO: 539032 - DNA, 201 bp, Homo sapiens
tggggggcctggaactcttaacttgggggtactgggttctatccagagaggttgacagcaggagggtttgcaacagcacttgtcttgcagacacagtgaartgctcagtgtgaatctgagccaacagtagatggggtctctgggcagcagcatgggccccacaaggctcttaggcgtcagtgagtgcttttgtgtggagtt

SEQ ID NO: 539033 - DNA, 201 bp, Homo sapiens
caaatgatattactgatttaattatatttactttttaaacatttgctgataagtagacgattaggtggtcttatagcattggtttaaatcagtatgtgtgyggccgggtgcagtggctcatgcctgtaatcccagcactttgggaggcctaggtgggcagatcacgaggtcaggagatcgagaccatcctggctaacacga

SEQ ID NO: 539034 - DNA, 201 bp, Homo sapiens
tgtgtgttctctttctcgtcaccctggagtggtgactggcatctgtgggtagttcgtctttggtgtgattttctcagcagttctcaacactgtgttcaacrgcccctcgggagccacattgagggagacccaggtgtggtcatggcaagagggtggctgcctgtccctgtcctctggctgccagacagtcagcagttgccc

SEQ ID NO: 539035 - DNA, 201 bp, Homo sapiens
tatagcagccggggcccgggcgccgcgcctcggagcgtcccggcttctcccgcgcggggggcgagtaagccagcggcaggaccagcgggcgggggcccacragtgagcgcgcaacacggggctgggaggcctgggcgggcgggcggacggggcgggcgggctgccgggcgggggggtggggggtggctgctgacgtggagg

SEQ ID NO: 539036 - DNA, 201 bp, Homo sapiens
tgtcagtgttccacgaaaaaaaaaaaaacacgtctgatcctgccttctgctgcttgcagcccccacccagctcccaccatcctcaacagcacccgtggccyggctgcaggctgtgcggacctgaccccattccctgggtaaggctgggtgtgcccctacctcttcccctgtgtgggacggtcttgtccccagatacctgta

SEQ ID NO: 539037 - DNA, 201 bp, Homo sapiens
tggcagatgcgggttttcaccatgttgcccactctggtctcaaacccctaggctcaaatgatccactcatttcagcctaccaaagtgttggaattacaggygtgagccaccacgcccagccaatcctccccttttttaatgccattgattagtggggaccgtaggtttttggttctgctattgactgattatttttggtga

SEQ ID NO: 539038 - DNA, 201 bp, Homo sapiens
tcatggcagccttgacctcctgggctcaagtgatcctcctgactcagcccttcaagtagttgagactgcaggcatgcaccatcaggcccggctttttttttgtttgttttttggcagatgcgggttttcaccatgttgcccactctggtctcaaacccctaggctcaaatgatccactcatttcagcctaccaaagtgttg

SEQ ID NO: 539039 - DNA, 201 bp, Homo sapiens
tgtccaaacaaggtcacaatgttgcatttgattatagagtcctgtctctcattctttaacagtgcttactccctcctacccccttttttttttttttttttgagacaggatctcactttgttgcccaggctggagtgcagtggtgcagacacagctcatggcagccttgacctcctgggctcaagtgatcctcctgactca

SEQ ID NO: 539040 - DNA, 201 bp, Homo sapiens
tttttagtggaaaaactcactaaactaataatagaactgggacacttaccatttttgctctttgagtgaatgaacttgaaagtaataataattttttttttaagagacagagtctcaccttgttgtctaggctcttgtgcagtggctattcacaagtgtggttatagtacactgtggcctcaaactcctgggctcaggcaa

SEQ ID NO: 539041 - DNA, 201 bp, Homo sapiens
gtcgcctgtggtctctcctagatttcgatcttgtgatctctgagtggatcaggattttattttcccattctgaactttggtttgtggtcttgagtaattttagttttggaagaggagaagtctgggtttcagccggaggcttttttggtgccctccatacccggtcctgtctggtgctttaaagcacttgcgggtctcatt

SEQ ID NO: 539042 - DNA, 201 bp, Homo sapiens
gagttatattagctgttcttggtccttgatcttttgtataaattttgttgtgtaaatatgattgtatttgtaactattctaaaaatggtgtatataaatawttttttttacaattcagtgtttgcaatgcaacattataaaaattacatatagaaaacttgtataaataaaaattgtataaaatctggttgtaaaattcca

SEQ ID NO: 539043 - DNA, 201 bp, Homo sapiens
ggcacagaggtttatttaatcaccagtcatttgatacagggtgaagacctatttgaaatgggactggctggattctacatgttttctttttttttttttttggaaacagggtcttgctgtgttgtccaggctggagtgcagtggtgccatcatggctcactgctcaacccctggggctcaggtgatcctcccacctcagct

SEQ ID NO: 539044 - DNA, 201 bp, Homo sapiens
ctgagtccggtatctccattgtctaactttgcatagaggaacatacctgtgctttggtggggacgttgtgcttgtattcgtgcagtttaatgttgaattarctctttgtggagacagttatataagtaagcgtttctagggagtctttatatccaaaagtgaggcttaatctctgaagagtagactgataggaagagagta

SEQ ID NO: 539045 - DNA, 201 bp, Homo sapiens
cagtgaattttcactaactgaactcactcatataaccagcattgagataaagaagtggaacgttttatttttagagtttagagtctgatttttttttttttcctttgagacagagttttgttcttgttgcccaggctggagtgcaatggcgcgatctcggctcaccacaacctccgcctcttgggttcaagcatttctcct

SEQ ID NO: 539046 - DNA, 201 bp, Homo sapiens
taaccttgaactcctgggctcaagggatcctcctgcctcagcctctcagtagctgggactacaggtgtgtgccatcatgcatggcttttcttattttattktattgtattttttatttttttgtggagatggggtcttgctttgttgtccaagctggtctcaaactcctgggcttaagtgatcctaaagtgctgagattac

SEQ ID NO: 539047 - DNA, 201 bp, Homo sapiens
tgcccaggtttggggagagcgtgcctctgagccccaggtgagcagcctggctttcactgtgacacgaccttgagctctgcaaacccatggctgttctcccrttttcttaggccaatagcttcaccgtctcctctgtcgccgccccttcctggcttcaccgtttcatcattggcaagaaagggcagaacctggccaaaatca

SEQ ID NO: 539048 - DNA, 201 bp, Homo sapiens
ccaggtgcagtggctcacgcctataatcctagcactttgggaggctgaggcgggcagatcacctcaggtcaggagtttgagaccagcctggccagtatggygaaaccccatctctactaaaaatacaaaaaaattagccaggcgtggcggtgggtgcttgcaatctcagctacttgggaggctgaggcaggagaatcactt

SEQ ID NO: 539049 - DNA, 201 bp, Homo sapiens
ggaggcgcaaacattaaaaaggtgataacttgtccgctgcatcttgcttcttcttgccttgtcctctgtagccctgcaccattttggttttagactaggarggactcttccttacttctagccctgtgctcaactgtgtctcaactctgggagagctctagtcagcttctcatggtgatctctctccctgtagattcgtga

SEQ ID NO: 539050 - DNA, 201 bp, Homo sapiens
ggctgaggcgggcagatcacctcaggtcaggagtttgagaccagcctggccagtatggcgaaaccccatctctactaaaaatacaaaaaaattagccaggygtggcggtgggtgcttgcaatctcagctacttgggaggctgaggcaggagaatcacttgaacccgggaggcagaggttgcagtgagccaagatcatgcca

SEQ ID NO: 539051 - DNA, 201 bp, Homo sapiens
tgttaatttggtaagaatacattgactacatactctcccttactactttttattagcattcatattaatcttatttcaaatcaaggttacagcttcatgtmatttgtagagtcagataatcctagaaaggcttgtaagaaagaagtgccaacatccttcccctaatcatgtttcctcccctgcagagtatctacttcagcc

SEQ ID NO: 539052 - DNA, 201 bp, Homo sapiens
aatgactataaaattaacaagtttgcagccttaaatctgtttgagacattccatgtaaaaataatttggtgaaaaaaatttttttttttttgtttttttgttttttgtgatggagtcttgctttactgtccagggtgtagtgcagtggtgtgatctcggctcactgcaacctctgtctcccgggttcaatctattctcctg

SEQ ID NO: 539053 - DNA, 201 bp, Homo sapiens
atgaaggaagccacagagatgttttgtgaggtttgagatcatgtatgtaaatatttagcaatgtatcaggcatctagtggcaccaaatgctaaaaaaaaaraggatattattatctagatgaaacgtattcgtataaaaatgctcaccactcgttcattcattcacttgcaactttaccaaagggttattgaactttaagg

SEQ ID NO: 539054 - DNA, 201 bp, Homo sapiens
gttatgaaattctgaccagattcatatcttttaaaagtatattacaagataatttaagattgattcttacaggaaatcctttacatttcctagaaacaaamacaaatcagttatgactccaaattacgtatgggaagagacttctcacagttttacccacagaacctgcttttaaattcttgtaaaagagaggttcgtgag

SEQ ID NO: 539055 - DNA, 201 bp, Homo sapiens
atagtagaaaaaatgagatcttttatcttttttttctttttggcactgttttcttctttccttctgctatcaactatttttgctagtggatgaaaagctayaaaaaaataagaaaaagttgtaaatgtgctttactctgtgaaaggccatatggtacccctttactatcctagggaacatttttctattgatccttgcaat

SEQ ID NO: 539056 - DNA, 201 bp, Homo sapiens
cttatcactatgtagcattctacatattttacttatttactttatttagcaccttacatttaaaatatgatgcaaggtgaaatattaatacattagatgasttcattagaaatactacttaaagtaggtactaactagataaaaagtaccttccctccccgcaaaaaccaaaccaatcaaataacaaagcatgctaagtgg

SEQ ID NO: 539057 - DNA, 201 bp, Homo sapiens
cgactgggttgtgctctaaagatgtatttgtacgttagttgtctgggctttagaaggcattttgtgtccattttgtttaccaccatatccttggagcctcrgaaggtgctagacatatagaggcacccacatatttgtcgagtgacaggatgaactggccccaaaagtctacttcactaataatgtaatagaattatatga

SEQ ID NO: 539058 - DNA, 201 bp, Homo sapiens
attcttgctggtctcttcaaggtgcacacagaagaagcggctgaatgacatggcaaaagtctccatgtatctatggaagtggggaaaggaggccccaaacyaaccttttcatcaggcccctggcaagcacctccccataccacaccaaaagcagaattagtagcgttgaatacagtgcctgagggggtcaatacatgctga

SEQ ID NO: 539059 - DNA, 201 bp, Homo sapiens
aactgaacagtcatgcttagaaagcattcctactcatataagactttgttttatcttttgagaaattctaaatattgcttaacatatcataaatgtaaatrcccataaaaccccgattaagtaatttatcattttctgcacacttgtgccatactgactttatcacaaggtattgaaacacagccctttccatggcctaga

SEQ ID NO: 539060 - DNA, 201 bp, Homo sapiens
gggaatttaaaccatgaaatcttttttccagaaaggagacgccttaatctgataccctgggaatggatctaccctgcgtcaggaaacaaagagtccgccartacagatgcttccaacttctggcaggtcgccctttgggtcccacccagtttttcttcaaacttccccagaagaagcctgtatggcatgagtgaaatgaag

SEQ ID NO: 539061 - DNA, 201 bp, Homo sapiens; identical to SEQ ID NO: 114392

SEQ ID NO: 539062 - DNA, 201 bp, Homo sapiens
tatgagatatttaataaatatacaatgggtcctcatttagagggaggcaaagctagagacctttggagttcagatgtgcactatcagtttctaacattacrtaaacataactaagaaaaaaactctctgaactgccaaatggcagaaaagcttattttacatgctgtctcttcagggtttctacctgtgacaggttataga

SEQ ID NO: 539063 - DNA, 201 bp, Homo sapiens
aattctattttctttatatttttaagccagggaagggataaattccctaggaaaagcaatatgagatatttaataaatatacaatgggtcctcatttagarggaggcaaagctagagacctttggagttcagatgtgcactatcagtttctaacattacataaacataactaagaaaaaaactctctgaactgccaaatgg

SEQ ID NO: 539064 - DNA, 201 bp, Homo sapiens
tgggaggattatttaaacccaagaggtcaaggctgcagtgagctgtgatcatgccattgcactccattcagcctgggtgacagagcaaaaaccctgtctcaaaaaaaaaaaaaaagttatttattctaacttgataggggacattctccacccgtaagtacctttcactggcagcaaaatttctttcacattaatcaatct

SEQ ID NO: 539065 - DNA, 201 bp, Homo sapiens
ttggaaggaaaaaggatctcctcaggttctggttcagttctgattccccaacacatatttcttactaattgttgattctaaaatgcaacccaagaacttattttttcacaataaatgtcaaagttatgacccagagtgacagaagttcttaacttcagctttgtctttgttgttgtttgtttgttttttgagacagagtct

SEQ ID NO: 539066 - DNA, 201 bp, Homo sapiens
caatttaatttccggatattttcacaagagttcatcaataatgcatgagacttactttgaatagtacctttttttgggggggacagagtttcgctcttgtygcccaggttggagtgcaatggtgtgatctctgctcactgcaacctctgcctcctgggtccaagtgattctcctgccccagcctcctgagtagctgggatt

SEQ ID NO: 539067 - DNA, 201 bp, Homo sapiens; identical to SEQ ID NO: 114396

SEQ ID NO: 539068 - DNA, 201 bp, Homo sapiens
agggcagtaagcattatacccgaggtagttcagggtgcatgagaatacaggagcaacaaactgcctcattgtagatatgtttttttttttaaaggaaactratgattgaactggctttcaaaatagcctccttgcctttgtatcagagaggaacactgctttcttgactactctaagttctatggaattaagttactctcc

SEQ ID NO: 539069 - DNA, 201 bp, Homo sapiens; identical to SEQ ID NO: 114397

SEQ ID NO: 539070 - DNA, 201 bp, Homo sapiens
aatagtgaagtcattccaaaagctgcccagctgcctgctgaattcttagagcaagggggacttaagggagatgatttcgagacacagctttaagaagaaaygacacaatttgaactgttatacataaatagagtgtgaagttaaatagtagaaaaaatgagatcttttatcttttttttctttttggcactgttttcttct

SEQ ID NO: 539071 - DNA, 201 bp, Homo sapiens
tataaaaaaataagaaaaagttgtaaatgtgctttactctgtgaaaggccatatggtacccctttactatcctagggaacatttttctattgatccttgcratgttatatacattacgttcaatggtagctagttccacaatattcaaggggtatttaatttcaaataaaattatggccaggcatggtggctcatgcctgt

SEQ ID NO: 539072 - DNA, 201 bp, Homo sapiens
aaaaaaaaaaaaagttatttattctaacttgataggggacattctccacccgtaagtacctttcactggcagcaaaatttctttcacattaatcaatctgraattcctttcacccaattatatccaattagaactctttgttcaaggaaagtaaattattttttgccacacctctacttcccccttacaccttttgagtat

SEQ ID NO: 539073 - DNA, 201 bp, Homo sapiens
cttgatggtttttgttggcctatctggaatattctccagtcatttccatctttcctatactaagattccttaggatgaaatcagttctttagattcaaatwctacatggctatttatcagtaagcagggccttacaaaactaaaggcttttacttttttttttttttcaaaaaaactaggttctttaaaaattatttttgc

SEQ ID NO: 539074 - DNA, 201 bp, Homo sapiens
aaagtatttgctcctgatttagcttttctaaaaacagaactcaaagttcaaggcccttagctgggaaagaagctgcttgtcaagatctttcaccaagaccscggcggccactccctccgcgcggccactccctcggcagcgactccaggctcccaacattgttttctcctgaaaaggccaaggccctacagaatttctgag

SEQ ID NO: 539075 - DNA, 201 bp, Homo sapiens
caaagttcaaggcccttagctgggaaagaagctgcttgtcaagatctttcaccaagaccgcggcggccactccctccgcgcggccactccctcggcagcgmctccaggctcccaacattgttttctcctgaaaaggccaaggccctacagaatttctgagggggatttttaatagtgaagtcattccaaaagctgcccagc

SEQ ID NO: 539076 - DNA, 201 bp, Homo sapiens
agaaaaacttcagccgaattagatttaaaggagtttaattgagcaatgaacgactcgcgagttgggcagcccccggaatcacagctgattcagagatgccmccgcagccagtggtggaagaagatttatagaccaaaaaaaaaaaaaaaaaaaggaaatgatgttcagaaattggaagtgaggtacagaagagctggattg

SEQ ID NO: 539077 - DNA, 201 bp, Homo sapiens
aaaacttcagccgaattagatttaaaggagtttaattgagcaatgaacgactcgcgagttgggcagcccccggaatcacagctgattcagagatgccaccrcagccagtggtggaagaagatttatagaccaaaaaaaaaaaaaaaaaaaggaaatgatgttcagaaattggaagtgaggtacagaagagctggattggta

SEQ ID NO: 539078 - DNA, 201 bp, Homo sapiens
tactgttctatttaaagtgtggtttccacaaacagttacttcatattgattctatgctggaatcattcacagttgctttcaatataaaacaaggatgtctrtgttgtttatatggtataaaatgaactcacgtgactttgccaaacctacaatttgaaagaaaaagcccacaagttactatttgaagagacctcaataacc

SEQ ID NO: 539079 - DNA, 201 bp, Homo sapiens
gacagccatagtctccgaagccccagtatcccaccatgcacctgtcacaacgtcgccctgccaccccaggcttgcaagggcagtcaccattgctggggtcrcagaaggtcactgagttggcaggaaggacagctgatcctactggatggcaggaacacgctacaacagagaggacacgcaaggatcaaagactgactgtag

SEQ ID NO: 539080 - DNA, 201 bp, Homo sapiens; identical to SEQ ID NO: 114410

SEQ ID NO: 539081 - DNA, 201 bp, Homo sapiens
aatccaagtgcagtaactatcctttatttcatcagcttgagtccatttattgtctaccttctactcacaagtagtcttaagatcttaaatagctctccctsttcatcactcttttttctattagtcatcctgtttaccaaaatgcagtgctataggaaataattttactttatggagaatgagaaaggaaattactttgat

SEQ ID NO: 539082 - DNA, 201 bp, Homo sapiens
tctctctgatgggaatatctctactcatgctttgttaatttccattaaacttcaggtctcaggttctcaaaactcagaacactccactcttgctgactgcycctctgatgtgctcccctccacactctgtaacacaatacttattatacttctgtgtatgagtgtgtgtgtgtataccactagttgcctatatatacatat

SEQ ID NO: 539083 - DNA, 201 bp, Homo sapiens
gtcccgaaagggaagccagaggagggctagaaatctaacttgttcactcactcactgtagagcaacctcttaacagaatcacttggaaattccttcatgartctgaaataccaaccagatgtaggtggatacatttctttcagttttgataagacattttactttaagctcatacttgtatcttaccataacattgctgtc

SEQ ID NO: 539084 - DNA, 201 bp, Homo sapiens
tgttcacttttatctaaatctaactcccactctattattgcctgtctaggtagatgactgggctactgctttaatgagaagacacaattcttgtgttcacrttatctactattaaatgccaagactgatgttgtcctctaactcaatgtctgtccaaaagcactaagcaaaaatgtagaccctcaacgctcttggagacat

SEQ ID NO: 539085 - DNA, 201 bp, Homo sapiens
catggctatttatcagtaagcagggccttacaaaactaaaggcttttacttttttttttttttcaaaaaaactaggttctttaaaaattatttttgccttwaaaatatatatcttattatttcttcctttgggttttgattctgttgtcattaactgggtcacggtgtgtaatacagttctttggatctttgcaggtcatg

SEQ ID NO: 539086 - DNA, 201 bp, Homo sapiens
ttatctaaatctaactcccactctattattgcctgtctaggtagatgactgggctactgctttaatgagaagacacaattcttgtgttcacgttatctacyattaaatgccaagactgatgttgtcctctaactcaatgtctgtccaaaagcactaagcaaaaatgtagaccctcaacgctcttggagacattgacagttg

SEQ ID NO: 539087 - DNA, 201 bp, Homo sapiens
tcagtaagcagggccttacaaaactaaaggcttttacttttttttttttttcaaaaaaactaggttctttaaaaattatttttgcctttaaaatatatatyttattatttcttcctttgggttttgattctgttgtcattaactgggtcacggtgtgtaatacagttctttggatctttgcaggtcatgggatctttgtag

SEQ ID NO: 539088 - DNA, 201 bp, Homo sapiens
agtaagcagggccttacaaaactaaaggcttttacttttttttttttttcaaaaaaactaggttctttaaaaattatttttgcctttaaaatatatatctwattatttcttcctttgggttttgattctgttgtcattaactgggtcacggtgtgtaatacagttctttggatctttgcaggtcatgggatctttgtagtc

SEQ ID NO: 539089 - DNA, 201 bp, Homo sapiens; identical to SEQ ID NO: 114379

SEQ ID NO: 539090 - DNA, 201 bp, Homo sapiens; identical to SEQ ID NO: 19160

SEQ ID NO: 539091 - DNA, 201 bp, Homo sapiens
actttgagcctccatttctgttctcagccctaggttcagctggagagattcatgttttcccttgtgtttacagaccttaaatgcactgtcctttcaaaaawttttttttcctaagctgtagaaataaattcagtttcagtgatctccccagtcttaaaaaaacaaacaacatccctggaatcctcagaagtgatttcttgg

SEQ ID NO: 539092 - DNA, 201 bp, Homo sapiens
cctcatctagaatgtaacatctcttagggaagatcttctgattttcacagacttaatgttggcacaggggaagcactcaataaatgttttctgaactaaaytgagctacaacttatgtgcttctagtaaatttatctcaactgttgcttcaggttttcaatggttttttttttttttggttttttttttttttgagacata

SEQ ID NO: 539093 - DNA, 201 bp, Homo sapiens
tattatgtttatgattatttcactgatagaaatgtaaggttcattatttccttggtacgcatttgtaggctctagcacttggaaatggggaacaaatatayagaaaaaaatcttctagcgtgtgtcttcccaagtaaagtcttcatatagatatggccagtataacaacattttccagtgtgtgctatagaacacgggtcc

SEQ ID NO: 539094 - DNA, 201 bp, Homo sapiens
acatctactaaggagggaattaatgatatgaaaatattactaaagagtaatgaaaatgctctcaaacatactcctaatcaaacaacgtaggtagagagtasgtaggtagagagaactggatgtgctgataaatgttgggatctactgcaggctcagaaaaagagaagaaccagagtaatattctggaagcagatgccagta

SEQ ID NO: 539095 - DNA, 201 bp, Homo sapiens
gcatctctgccccaaatgtatcctggaatagtcacaaagcgaatggagataggctttcctagggaagcctacccagggatcggggagctgtctggagaggraaagaaagaaatacagatcttccctatgaacccatctacctcctatacattatgctaaaagaactaaattggtgttggttattttcataattttcctact

SEQ ID NO: 539096 - DNA, 201 bp, Homo sapiens
ggaaagaaagaaatacagatcttccctatgaacccatctacctcctatacattatgctaaaagaactaaattggtgttggttattttcataattttcctayttggtgcattaagtaccatccaagtatttgttaactaggaatgattactaatatgacttagtagtagtagtttttagcttcaagtttttcagtagccaga

SEQ ID NO: 539097 - DNA, 201 bp, Homo sapiens
agttcacagtctggtaggttgacatgtctctaaatatttgttattttctgattgaatcctacctgaacccagttaactgagatacactaaatcatagcacyctttatttgaaacaatactgtaggatttcaaagatccatcagtgtctagaaactagcaggtatctgttgaatgaatgctgcattttcttcaactctggga

SEQ ID NO: 539098 - DNA, 201 bp, Homo sapiens
gtgaacgggaatttaaaccatgaaatcttttttccagaaaggagacgccttaatctgataccctgggaatggatctaccctgcgtcaggaaacaaagagtscgccagtacagatgcttccaacttctggcaggtcgccctttgggtcccacccagtttttcttcaaacttccccagaagaagcctgtatggcatgagtgaa

SEQ ID NO: 539099 - DNA, 201 bp, Homo sapiens
tgccctacaagataacttatccaagttagtgacaaattatttttcttttctcttttatctgcttagtagttcagacattctcatttttagacatttctacwagtggtctgaggctatgggatacacacgtatatatatctattcatttaaacatattctgtacaaaatggtgtcaggactatgttctaagacaccattatt

SEQ ID NO: 539100 - DNA, 201 bp, Homo sapiens
agttggagtcttaaaagaaaaacttcagccgaattagatttaaaggagtttaattgagcaatgaacgactcgcgagttgggcagcccccggaatcacagcygattcagagatgccaccgcagccagtggtggaagaagatttatagaccaaaaaaaaaaaaaaaaaaaggaaatgatgttcagaaattggaagtgaggtac

SEQ ID NO: 539101 - DNA, 201 bp, Homo sapiens
tattttctccagtagagttcagctgtctagccgaaggagcaagaaggtaaacagtgagattgagctgggattgggatgcaacagaaggacagggggcagtrgaattgagagaactgatagaagattccagagagaaaatcatgggggcaagctaagtatcatgtccatttttacagacaaataggagccagagcagagata

SEQ ID NO: 539102 - DNA, 201 bp, Homo sapiens
attgtgttgttattttctccagtagagttcagctgtctagccgaaggagcaagaaggtaaacagtgagattgagctgggattgggatgcaacagaaggacrgggggcagtggaattgagagaactgatagaagattccagagagaaaatcatgggggcaagctaagtatcatgtccatttttacagacaaataggagccag

SEQ ID NO: 539103 - DNA, 201 bp, Homo sapiens
gatgtcagggagaagagagaagctttgagagtctctgcagggaagaaagagagcggaagggaagaagaacttccagggaagttttagggcaaacttgagastggaaaacataaaggcatctctcagtatgattgtgttgttattttctccagtagagttcagctgtctagccgaaggagcaagaaggtaaacagtgagatt

SEQ ID NO: 539104 - DNA, 201 bp, Homo sapiens
gatgagcttctctgggttagacagcaatgccatgtatacatctattttctctgtgaagcaggaggcaagctctttagctgagagtcagcagggggtttgcrgagatgtcagggagaagagagaagctttgagagtctctgcagggaagaaagagagcggaagggaagaagaacttccagggaagttttagggcaaacttga

SEQ ID NO: 539105 - DNA, 201 bp, Homo sapiens
tgatgagcttctctgggttagacagcaatgccatgtatacatctattttctctgtgaagcaggaggcaagctctttagctgagagtcagcagggggtttgyagagatgtcagggagaagagagaagctttgagagtctctgcagggaagaaagagagcggaagggaagaagaacttccagggaagttttagggcaaacttg

SEQ ID NO: 539106 - DNA, 201 bp, Homo sapiens
tcagctttttgctttgatgagcttctctgggttagacagcaatgccatgtatacatctattttctctgtgaagcaggaggcaagctctttagctgagagtsagcagggggtttgcagagatgtcagggagaagagagaagctttgagagtctctgcagggaagaaagagagcggaagggaagaagaacttccagggaagtt

SEQ ID NO: 539107 - DNA, 201 bp, Homo sapiens
attataaatatagataaaatgtcacccattaatacagagactcagaaagactcagggactcctcgcctttttcctctgccttccttttctttggcagttargtgacatccttatgttcagtggctaaaaagggtgctcctcttacagtagcaagaaataagatttccctaaaagagtttcaccaaaattatgggctcctgc

SEQ ID NO: 539108 - DNA, 201 bp, Homo sapiens
agctgaagactcagtgatcttgctaagcagtgtccaacacaagccctcttctattggagtcgttggatgtaaaatattttcttaagtcataatctatattsacagttaaatgggatattcaaaggtcttgacctaagcctctgaatctggacataaatcctctctgtaccttttctcactgtagatcattcagcctttgcg

SEQ ID NO: 539109 - DNA, 201 bp, Homo sapiens
gatcttgctaagcagtgtccaacacaagccctcttctattggagtcgttggatgtaaaatattttcttaagtcataatctatattgacagttaaatgggayattcaaaggtcttgacctaagcctctgaatctggacataaatcctctctgtaccttttctcactgtagatcattcagcctttgcggaaacatttcatggg

SEQ ID NO: 539110 - DNA, 201 bp, Homo sapiens
ggatgtaaaatattttcttaagtcataatctatattgacagttaaatgggatattcaaaggtcttgacctaagcctctgaatctggacataaatcctctcygtaccttttctcactgtagatcattcagcctttgcggaaacatttcatgggatgagaaactgaaaggaattcatttggtctttggatacaacaagttttt

SEQ ID NO: 539111 - DNA, 201 bp, Homo sapiens
tgacagttaaatgggatattcaaaggtcttgacctaagcctctgaatctggacataaatcctctctgtaccttttctcactgtagatcattcagcctttgyggaaacatttcatgggatgagaaactgaaaggaattcatttggtctttggatacaacaagttttttagaaagttatttggtcatactcttgccttttgaa

SEQ ID NO: 539112 - DNA, 201 bp, Homo sapiens
ttattataccatgaaaccccagaactaaagagttcccctcataggatccaaaagctggaccctggtttgtcacgtatcactgttacataagaccagacctsaaaatatgatgcctggttacatccatctcacctgagtgtagaagtgcagaaaacccctgcgcatcctcccactcccaggctggttcgctcttattgtgca

SEQ ID NO: 539113 - DNA, 201 bp, Homo sapiens
gcctaaggcctatacgtaatatcacccaacacatgggttcatcctgccacaaatctcaggcctcaggagtccgcagatatttagagttacctcgtcaaacrttcacatgtatcacaagataatgttggacaagtcaattccctctacagcgaggatttcagagcattcccttgatcccacatgccaaggattgggatgaac

SEQ ID NO: 539114 - DNA, 201 bp, Homo sapiens
tttttaagagtatcttaatgtggtcttgatggagttttccttgaaatgactttggagcctttggtcttctggtacttgggtattatctataaatatacatrgctatatctataaatatcaaccaggcaattatagtagatgacgcacatggactgattatcaactacttgttggtagttcaactcgagagttactcttgct

SEQ ID NO: 539115 - DNA, 201 bp, Homo sapiens
attggtcagacttaggcactataaaagggcttcatctgttttaattctttgtacatttacctatcttatgactttacaaagccaaacaatttaaaaatcartaaagtaaaatgcaatgaataatatgtaatgctttgaaattaatctgagctatacatcattaaaatacattgcaaatatatcacactatactaattgaat

SEQ ID NO: 539116 - DNA, 201 bp, Homo sapiens
ctcttgttttatttttttcttctttgatgacactagcccttatgaacttctcacatactgtatatttcacttattagttatatttattgtctgtctcctcyatcagaatataagctccttgagggcaaggatctttgtcttattctctgatgcatcttaagcacctggcacatagtaggcgctcaataaaagtaactggat

SEQ ID NO: 539117 - DNA, 201 bp, Homo sapiens
actgatgtggttagatgagctattcatccacagttgacatttacataagccctgcatgcaccctttacattcacataattcagataatgtcctatgaatcrgatagatcttttcaaattctattcttttttcaaataaacctctttttcttttctttcctttccttcctttctctctctctctctctctcttttttttttt

SEQ ID NO: 539118 - DNA, 201 bp, Homo sapiens
gaagctcccccactgagcaccttgtgacccctacccctgcccaccagagaacaaccccctttgactgtaattttccattaccttcccaaatcctataaaayggccccaccccatctcccttcactgactctcttttcggactcagcccgcctgcacccaggtgaaataaacagccatgttgctcacacaaagcctgtttgg

SEQ ID NO: 539119 - DNA, 201 bp, Homo sapiens
caagtgcagtaactatcctttatttcatcagcttgagtccatttattgtctaccttctactcacaagtagtcttaagatcttaaatagctctccctcttcmtcactcttttttctattagtcatcctgtttaccaaaatgcagtgctataggaaataattttactttatggagaatgagaaaggaaattactttgatgaat

SEQ ID NO: 539120 - DNA, 201 bp, Homo sapiens
catatggagtatatttatagtagatgatctaatgtcctggcttgctaattctaccagctgtgtaatttctggatgttcttattcatcaatttttcttttgkttaggagtcatattttcatgccttgtaatttattaaacattagacattgtgaattttatattgttgcttgatggattttgatatatttctccaaaaaggg

SEQ ID NO: 539121 - DNA, 201 bp, Homo sapiens
tcagtatttagccgaaaacttaaggagacctttgtgtacagatctctggacttctcttatgtagctttctcctccccagtattctacccaacaaattctasctgccctggcctccttgagcactcatctctgtctcctcaacttggtgggcccactggactctgggttctccttcctatgtgttggcttggaaatgtccaa

SEQ ID NO: 539122 - DNA, 201 bp, Homo sapiens
tttagccgaaaacttaaggagacctttgtgtacagatctctggacttctcttatgtagctttctcctccccagtattctacccaacaaattctagctgccytggcctccttgagcactcatctctgtctcctcaacttggtgggcccactggactctgggttctccttcctatgtgttggcttggaaatgtccaatcagca

SEQ ID NO: 539123 - DNA, 201 bp, Homo sapiens
tttttctaactgagataacattcacgtaacataaaattcactatttttaaccattctagtgtacatttcagtggtttcagtatattcaaaatgttgtacartcattaccaccatctaattccacagcattttcaccactccaaaaagaaatctcatgctcactaggcagtcacttctcattcccccttaattgctggtacc

SEQ ID NO: 539124 - DNA, 201 bp, Homo sapiens
attgaaagaattggttttcttcaatactcatccatccaaaagctattgcttttgaaatcagtcagtttaatgactggtcttgaaaagaaatatatttattytgtaaaattcctgtataacccaccatgtttgtttttctgtttttgtttgggttttttttttaagctattgatttttttctaactgagataacattcacgt

SEQ ID NO: 539125 - DNA, 201 bp, Homo sapiens; identical to SEQ ID NO: 114413

SEQ ID NO: 539126 - DNA, 201 bp, Homo sapiens
tctggacttctcttatgtagctttctcctccccagtattctacccaacaaattctagctgccctggcctccttgagcactcatctctgtctcctcaacttrgtgggcccactggactctgggttctccttcctatgtgttggcttggaaatgtccaatcagcaaattggggcaattgtagggattgttatgtttgtttctt

SEQ ID NO: 539127 - DNA, 201 bp, Homo sapiens; identical to SEQ ID NO: 114384

SEQ ID NO: 539128 - DNA, 201 bp, Homo sapiens
caaattggggcaattgtagggattgttatgtttgtttcttctttctcagagcacggtcttgtgctgcctgttgccaatgtctgaaaacaattgtatcatcttttttttttttttttttctcgcttaagctgtgtgtttgtagtggggaaagaagaggggggcagtcattcctgtagcagttaatccctcatgagcagaagc

SEQ ID NO: 539129 - DNA, 201 bp, Homo sapiens; identical to SEQ ID NO: 114386

SEQ ID NO: 539130 - DNA, 201 bp, Homo sapiens
aagctagagtctgttccctgaaactcctaatactggccttagagctatacaaaacaagtctactttatcttcaacatggaaatccttcaaatatttaaggkcagccatcaacttaacttctattctccaggtaaattatctataatgtctcatatcacatagtttctacaccatttaccactcttgctaagtagcagatga

SEQ ID NO: 539131 - DNA, 201 bp, Homo sapiens; identical to SEQ ID NO: 114387

SEQ ID NO: 539132 - DNA, 201 bp, Homo sapiens
cttcccgagtagctgggattacaggtgtgtgccaccacacctggctaacttttttgtatttttagcagagacagggtttcaccatgttggccaggctggtsttgaactcctgaccttaggtgatctgcctgcctcccaaagtgctgggattacaggcgtgagccactgtacccagcctaataatccttttctattcaaaga

SEQ ID NO: 539133 - DNA, 201 bp, Homo sapiens
tatcactcatttatttattcagttacagatttattgactgcctactgtgatccaagcaatgtgctaaatgctagggacatacaggtaaataaaactgacaygagccttaccctctttaataatcctttactttttttttttcttttttttgagacagagtctcactctgtcgcccaggctgaggtgcaggggcgtgatctc

SEQ ID NO: 539134 - DNA, 201 bp, Homo sapiens
tgacctctctgtaactcgtaagcacatgttactaatgacggtattttctagacattttcctctccacgatgtcaagcgaattctagcctctatttctgaamctttctttttccaattttattttttaatccaaataaatttcaaagatttttccataatgtaatattcagattttaaaagacctagagtactttcaacaca

SEQ ID NO: 539135 - DNA, 201 bp, Homo sapiens
gaggtaattgctgccggttcatctttattcccaccttccactagaactctaggagtctgcctgtcttccactgagggagtgatctgtgatcttaagctcaytgttgaaaccaccaatggaattcagcatcttaccgctctgaaactggcctcctttaatattacctgatggctctaacttttgttattttgttataaaagc

SEQ ID NO: 539136 - DNA, 201 bp, Homo sapiens
atcatgccattgcactccattcagcctgggtgacagagcaaaaaccctgtctcaaaaaaaaaaaaaaagttatttattctaacttgataggggacattctscacccgtaagtacctttcactggcagcaaaatttctttcacattaatcaatctgaaattcctttcacccaattatatccaattagaactctttgttcaag

SEQ ID NO: 539137 - DNA, 201 bp, Homo sapiens
ttgtctgggctttagaaggcattttgtgtccattttgtttaccaccatatccttggagcctcggaaggtgctagacatatagaggcacccacatatttgtygagtgacaggatgaactggccccaaaagtctacttcactaataatgtaatagaattatatgattattaataatagcacttatatagtacttagccattta

SEQ ID NO: 539138 - DNA, 201 bp, Homo sapiens; identical to SEQ ID NO: 114399

SEQ ID NO: 539139 - DNA, 201 bp, Homo sapiens; identical to SEQ ID NO: 114398

SEQ ID NO: 539140 - DNA, 201 bp, Homo sapiens; identical to SEQ ID NO: 114400

SEQ ID NO: 539141 - DNA, 201 bp, Homo sapiens; identical to SEQ ID NO: 114401

SEQ ID NO: 539142 - DNA, 201 bp, Homo sapiens
ccaggctggttcgctcttattgtgcacgggacggaagtcaggaacttcatgataccagtctatgtctgtgtggctaacaaaatagaacatgataaagaacrtattcaggaattttttagaacttgtatagaaatgaatctatagagatttaaaccttatcttctgccttcccattcttcctttttccagaaatagtgtttt

SEQ ID NO: 539143 - DNA, 201 bp, Homo sapiens; identical to SEQ ID NO: 114403

SEQ ID NO: 539144 - DNA, 201 bp, Homo sapiens
tatgacctgcatatttctataacatctgtcattgcatcatttagttcataagaaaataatatttctggttacatgccaatgatactgacaggcagactagyagtcaaggctgagtcatagaagggtggggttgtggagagccacagctgtaaaacatgtaactgtcccttaagcagctgaagtgatgcaggaggctgactg

SEQ ID NO: 539145 - DNA, 201 bp, Homo sapiens; identical to SEQ ID NO: 114405

SEQ ID NO: 539146 - DNA, 201 bp, Homo sapiens; identical to SEQ ID NO: 114406

SEQ ID NO: 539147 - DNA, 201 bp, Homo sapiens; identical to SEQ ID NO: 19161

SEQ ID NO: 539148 - DNA, 201 bp, Homo sapiens; identical to SEQ ID NO: 19159

SEQ ID NO: 539149 - DNA, 201 bp, Homo sapiens
tactggaagtccctaacttacgactgggttgtgctctaaagatgtatttgtacgttagttgtctgggctttagaaggcattttgtgtccattttgtttacyaccatatccttggagcctcggaaggtgctagacatatagaggcacccacatatttgtcgagtgacaggatgaactggccccaaaagtctacttcactaat

SEQ ID NO: 539150 - DNA, 201 bp, Homo sapiens
atgtcctcatcaaaagtagaatggtatactatttatttattcagtgaattactgcattccactttcttcttggaagacattttagagaatttcatgacctygtccacttctcttcccaaatgtgactgatttttattatccatcaatttgtaaagttttggctgggtgtagtggctccagcctgtaatcccagcactttag

SEQ ID NO: 539151 - DNA, 201 bp, Homo sapiens
acaggaggtaaaatgaaataactgtttaagagagatcagtgcaaacggaaatgcagagactcttcctgagagcatcatgagaaggggctatttgagtagartgtgaagaatggcaatagagactgaggcaagagagtcatccacccaaagcacctgcatctccaacagctgagtagttttcacctaagccagaaagaagga

SEQ ID NO: 539152 - DNA, 201 bp, Homo sapiens
cattcccctttttccttctgtgcctgagcaacgagtcactttgagcctccatttctgttctcagccctaggttcagctggagagattcatgttttcccttstgtttacagaccttaaatgcactgtcctttcaaaaatttttttttcctaagctgtagaaataaattcagtttcagtgatctccccagtcttaaaaaaaca

SEQ ID NO: 539153 - DNA, 201 bp, Homo sapiens
aatagacagatgaaggaaaactgaactggtgagactaagtggaatggatctggggagaaggggaaacatggggggaaggtgatgctgttttaaaagacacrggagggggccgggcatggtggctcatgcctgtaatcccagcactttggaaggccgaggcaagcagatcacttgaggtcaggagttggagaccagcctggc

SEQ ID NO: 539154 - DNA, 201 bp, Homo sapiens
atctcatgaaaaattctaatttcattcatgttgctacaagtatagcttcatgctttaaaaaaaaatgcgggctggtaacatttttctatcttacttacagygtagagttaaacaggtgcccttacctctcctccagtgcatggaaaaggactggagtatttagaagtacaaatagcgcccttcttgacaacatcatcttcc

SEQ ID NO: 539155 - DNA, 201 bp, Homo sapiens
gcgttccagtcactgctccggggagagggcgctcagccctgccccaggtgtccttacctggttctctagtacccagcaccaggtcagggacaccagcgatsggcttctaccagagaccggccccagcccacgcgcgcccagggtcgctgggccacccctcctcatcattccttaggccatgaagtgccgggggatggcgag

SEQ ID NO: 539156 - DNA, 201 bp, Homo sapiens
tagtagagatggggtttcaccatgttggccaggctggtctcgaactcctgacctgaagcgatctgcccaccttggcctcccaaagtgctggaattacaggygtgagccaccgtgcccagcccaaaagagatagtcttataagtaaagtgcgtcaaaagacattagaagagtcacctaggttgtctaatttacctacaaaac

SEQ ID NO: 539157 - DNA, 201 bp, Homo sapiens
tacttctgcactcgttgggagcccccgttttgccatcagctgcctcccatggccggtcattgtataacggggcacagtgctggcagtggctgcctgctgtrttgtgcttacacatacacttcccatggacctacaagcaacatcaagtgagaactatgagcacacatgtcgccaaagaagaacagaacatgcttcccacaa

SEQ ID NO: 539158 - DNA, 201 bp, Homo sapiens
aaagaactagagaagcaagagcaaacacattcaaaagctagcagaaggcaagaaataactaagatcagagcagaactgaaggagatagagacacaaaaaamccttcaaaaaatcaatgaatccaggagctggttttttgaaaagatcaacaaaattgatagaccgctagcaagaccaataaagaagaaaagagagaagaat

SEQ ID NO: 539159 - DNA, 201 bp, Homo sapiens
gaaaactggcacaagacagggatgccctctctcaccactcctattcaacatagtgttggaagttctggccatggcaatcaggcaggagaaagaaataaagygtattcaattaggaaaagaagtcaaattgtccctgtttgcagatgacatgattgtatatttagaaaactccattgtctcagcccaaaacctccttaagct

SEQ ID NO: 539160 - DNA, 201 bp, Homo sapiens
gttgtctgggctttagaaggcattttgtgtccattttgtttaccaccatatccttggagcctcggaaggtgctagacatatagaggcacccacatatttgycgagtgacaggatgaactggccccaaaagtctacttcactaataatgtaatagaattatatgattattaataatagcacttatatagtacttagccattt

SEQ ID NO: 539161 - DNA, 201 bp, Homo sapiens
gcttatatatgctttatcttagtctttctcacattgatccaacttacaaaggaagaatccaaggcccctaaaatacagagatagccttttagggtactttygagatttgagtgtgcaatgagagagatggaactagacagataatagtggaagtggagaaccaacttaagagctggcaccatcagagcctggtgacagact

SEQ ID NO: 539162 - DNA, 201 bp, Homo sapiens
aataacagacaaacagagagccaaatcatgagtgaactcccattcacaattgtttcaaagagaataaaatacctaggaatccaacttacaagggatgtgawggacctcttcaagaagaactacaaaccactgctcaatgaaataaaagaggatacaaacaaatggaagaacattccatgctcatgggtaggaagaatcaat

SEQ ID NO: 539163 - DNA, 201 bp, Homo sapiens
ccaactcacacacgcagactgccatattgtgtctagtatcattataaatatagataaaatgtcacccattaatacagagactcagaaagactcagggactyctcgcctttttcctctgccttccttttctttggcagttaagtgacatccttatgttcagtggctaaaaagggtgctcctcttacagtagcaagaaataag

SEQ ID NO: 539164 - DNA, 201 bp, Homo sapiens
ctataggttttcaaaagagcctgaaatacatgcagctgagagcaagagccttgcacattcacctgctgatgcagtctccggtgatagggtcacagctcccygcacagtcacatggtcgacagccatagtctccgaagccccagtatcccaccatgcacctgtcacaacgtcgccctgccaccccaggcttgcaagggcagt

SEQ ID NO: 539165 - DNA, 201 bp, Homo sapiens
tgtttcaaagagaataaaatacctaggaatccaacttacaagggatgtgaaggacctcttcaagaagaactacaaaccactgctcaatgaaataaaagagratacaaacaaatggaagaacattccatgctcatgggtaggaagaatcaatatcgtgaaaatggccatactgcccaaagtaatttatagattcaatgccat

SEQ ID NO: 539166 - DNA, 201 bp, Homo sapiens
aacacatggacacaggtaggggaacaacacacactggggcctattaggggtgtggggggcgaggggagggagagcattaggacaaatacctaatgcgtgcrgggcttaaaacctagatgaggggttgataggtgcagcaaaccactatggcacatgtatacctatgtaacaaacctgcacactctgcacatgtatcctaga

SEQ ID NO: 539167 - DNA, 201 bp, Homo sapiens
actcacacacgcagactgccatattgtgtctagtatcattataaatatagataaaatgtcacccattaatacagagactcagaaagactcagggactcctygcctttttcctctgccttccttttctttggcagttaagtgacatccttatgttcagtggctaaaaagggtgctcctcttacagtagcaagaaataagatt

SEQ ID NO: 539168 - DNA, 201 bp, Homo sapiens
tcttcacaaaattggaaaaaactactttaaagttcatatggaaccaaaaaagagcctgcattgccaagtcagtcctaagccaaaagaacaaagctggaggyatcacgctacctgacttcaaactatactacaagtaaccaaaacagcatggtactggtaccaaaacagagatgtagaccaatggaacagaacagaggcctc

SEQ ID NO: 539169 - DNA, 201 bp, Homo sapiens
cctatcaaaaatcgatatcaagttttatagtggtgaaaatttcaaactatttccatcaaatttgggaaaacattgtactgcagtaaaaaaaaatgatgcakgagaactacacaagtgagacaaaactgtccttatttgtcaataatatgatggcctacattagaaaatccaagataatccatacatactggaatcagtaaa

SEQ ID NO: 539170 - DNA, 201 bp, Homo sapiens
aactcaaacaaatttaccagaaaaaaacaaacaaccccatcaacaagtaggcgaaggatatgaacagacacttctcaaaagaagacatttatgcatccaamagacacatgaaaaaatgctcatcatcactggccatcagagaaatgcaaatcaaaaccgcaatgagataccatctcacaccagttagaatggtaatcatta

SEQ ID NO: 539171 - DNA, 201 bp, Homo sapiens
tgagaactacacaagtgagacaaaactgtccttatttgtcaataatatgatggcctacattagaaaatccaagataatccatacatactggaatcagtaawcaagttcagcaaagtcgctggatacaagctcaaaatacaaaaaaaaagtgacacatatacatttatatcctttatatcaataatcatttaaaaatacaaa

SEQ ID NO: 539172 - DNA, 201 bp, Homo sapiens
atggaatactatgcagccataaaaattgatgagttcatgtcctttgtagggacatggatgaagctggaaaccatcattctcagcaaactattgcaaggacaaaaaaacaaacactgcatgttctcacttataggtgggaattgaacaatgagaacacttgggcacaggaaggggaacatcacacacacaccggggcctgtt

SEQ ID NO: 539173 - DNA, 201 bp, Homo sapiens
tagcaataaaatctaaaggtatctaggagtaaatttaatgaaagacaggtaaaaccattttggagaaaagtgacaaatgctattgaaaggccttaaagagsaccttaatatatagaaaggtatcttcatgtttgggactactcaatattacaaagctatcacttttttcaaaatgatccataaagtcaatgcaattgcaat

SEQ ID NO: 539174 - DNA, 201 bp, Homo sapiens
atgttctcacttataggtgggaattgaacaatgagaacacttgggcacaggaaggggaacatcacacacacaccggggcctgttgtggggttgggggagcrgggagggatagcattaagagatataccttatgtaaatgacgagttaatgggtgcagcacaccagcatggcacatgtatacatatgtaacaaacctgcacg

SEQ ID NO: 539175 - DNA, 201 bp, Homo sapiens
aagagaatagaggcaagatgaacacagaagctgaggattcataccactatcatggcatgcccttcgaaagaagaaacagaacaatgtcatagggaaattgrgtcagaggaaagaggagcccatattgagtaaactcaaagagctatatttatgtagtgagcagtgttttggctttggtacaaatcatttttcatattcagt

SEQ ID NO: 539176 - DNA, 201 bp, Homo sapiens
gttagaagaaaagacttgcagaaataaagaccagcaattggctttaaaagtaaaaagcagatatttttctctctactgtgtcctacatgtactgaagtacragcagtgcaactgaaagagaggtgagtctaattcacatgattcgtatagagacagaaaacagtaaatggtatgaaattagtctgtttccttctgctcatg

SEQ ID NO: 539177 - DNA, 201 bp, Homo sapiens
gggtcttgctcctgctttgtcttccgccatgattggaagcttcctgaggcctccccagaagcagatgctgccatgcttcctgtacagcctgcagaaccatragccaattaaacctcctttcttataagttacccagtctcaggtatttctttacagcagtgcaagaacagactaatacatgcccttagagatgcaaaatta

SEQ ID NO: 539178 - DNA, 201 bp, Homo sapiens
aatagcaaacctgggtgggaggagggcgagcatcaggaagaatagctaatggatgctgggcttaatacctgggcaataggatgatctgtgcagcaaaccamtatggcacacatttacctatgcaacaaacctgcacatgctgcacatgtacccctgcacttaaaagttggaagaaaaaagttgttaagcttgattctctca

SEQ ID NO: 539179 - DNA, 201 bp, Homo sapiens
gattatactcaccccactcagtaggctcttaactgtgttttagagtgagaaaaacataccaaagtattaacagtggaataatgagattttgggtgacctcttttttttttttttttactatgatgttttgcattttccaaattttctataccaactacatatattactctaatcatcagaaaacaaacaaaaatgtgttaa

SEQ ID NO: 539180 - DNA, 201 bp, Homo sapiens
cttcctgtacagcctgcagaaccatgagccaattaaacctcctttcttataagttacccagtctcaggtatttctttacagcagtgcaagaacagactaayacatgcccttagagatgcaaaattaaaaggcaagacacttgattcatgtttacttgtatgaattgcataatgtttatattatatataaaatatttaatag

SEQ ID NO: 539181 - DNA, 201 bp, Homo sapiens; identical to SEQ ID NO: 114389

SEQ ID NO: 539182 - DNA, 201 bp, Homo sapiens
agagtatagtgttctggaagccaaagaaggtttcaaggagtagggcagcatcagctgtggcagatgttgaaaggtcaaagaagatggggcatgtgatggartattgcatttgaacagcacaaaagctgatggtgttcttcacaggaagagtttcagtgtaatacatagtgagagggaaacccagtggaagaggattcaggg

SEQ ID NO: 539183 - DNA, 201 bp, Homo sapiens
tccttggcttaacctggcaggaaactagctacctaactgcaaacaaaaccccaagattaatgccatcaatatttgttgaatgaatcaacatgcccaggtamgtattttattacatgtatcatagatgctgtgaggaagaacatcatcaatttgtttcattttctagatcaactcattaaaaatgactgagattagaaagct

SEQ ID NO: 539184 - DNA, 201 bp, Homo sapiens
ctcttttgaggagctttgcttttttttttgagagagggtctcactctatcaccaagaccagagtgcagtggtaccaccatggctcactgcagcctcaactycttgagctcaagcgatcctcctgccttagtctcccgagtaggtgggactacaagccggcaccatcatacctggctacttaaaaaaaattttttttttttt

SEQ ID NO: 539185 - DNA, 201 bp, Homo sapiens
tgctttgttaatttccattaaacttcaggtctcaggttctcaaaactcagaacactccactcttgctgactgcccctctgatgtgctcccctccacactcygtaacacaatacttattatacttctgtgtatgagtgtgtgtgtgtataccactagttgcctatatatacatatgtgtatgtatacattacagataactca

SEQ ID NO: 539186 - DNA, 201 bp, Homo sapiens
cttttatcttatatacacactttgtcttatatagttctcattacactacaggcaggaattttacatatgaagaaactgaagtctgaagagcttcaatagcyggcataacatcacacagctggcaattggcagtgaaggcattgaatctacatctgtttgaaacctattaaatattacaaagtctgagtacaaacaaggagc

SEQ ID NO: 539187 - DNA, 201 bp, Homo sapiens
ctctgacagggacaagactgtcgtttcagcagctgcacgcgaaggttggtgatcttcagctgctcctgaactttggcactgtaagggttctctgtatcgtrtggtggtgacaaagctttgaaaataacctgtaaggagaaagaaaataccatgcgtttataggactgtgcgcaaaccctgaattgtttgcctaatgtagtc

SEQ ID NO: 539188 - DNA, 201 bp, Homo sapiens; identical to SEQ ID NO: 114393

SEQ ID NO: 539189 - DNA, 201 bp, Homo sapiens; identical to SEQ ID NO: 114394

SEQ ID NO: 539190 - DNA, 201 bp, Homo sapiens; identical to SEQ ID NO: 114395

SEQ ID NO: 539191 - DNA, 201 bp, Homo sapiens
caagaaagccaggatgggagtgggagggagagggcatctgccgacgccgacgccggttgtccagttaccgagccagggagcagacccgcctccgacctccsgcagagtctctgccagggtaccaattccccaggggcggccagccagctcaatgcaagcccggggtgatcaccacctatcgtccaagccaggagtcccact

SEQ ID NO: 539192 - DNA, 201 bp, Homo sapiens; identical to SEQ ID NO: 114402

SEQ ID NO: 539193 - DNA, 201 bp, Homo sapiens
tgcagcctcaacttcttgagctcaagcgatcctcctgccttagtctcccgagtaggtgggactacaagccggcaccatcatacctggctacttaaaaaaawtttttttttttttgtagaggcaaggtcttgctatgttgcccaggctggtctcaaactcctggcctcaagcaatcctctcaccttggcctcctaagtgctg

SEQ ID NO: 539194 - DNA, 201 bp, Homo sapiens; identical to SEQ ID NO: 114404

SEQ ID NO: 539195 - DNA, 201 bp, Homo sapiens
acagaggtatacataaagcactgtgggaacacagaggaaaggtgaaggcaatacaagctgagggaatcaggtgggatcaacaaaggagggatcatttagckatctgagccagttcataaaagatgaataggagtttgcaagttgaaaaggagggcaaggggctgggcgtggtggctcacacctgtaatccctgcacgttgg

SEQ ID NO: 539196 - DNA, 201 bp, Homo sapiens
tcagtgggcagtgatatggctatgtttgtgtagggtctagtgtttgtcacccaccactttgtgttgtatttctagagacaacaaggagtccacagatgcgytgactttacaaagaaagcttttgagtatcgtgggcttgttacttacttctgcactcgttgggagcccccgttttgccatcagctgcctcccatggccggt

SEQ ID NO: 539197 - DNA, 201 bp, Homo sapiens
ttgacctggaggatattccaggctgtgggaatcctatgtgaaagagcccatgtggggaatgtgagaagtttagtgtgcctgagtgtacactgagtagaaarcagttgaaggagatgaggcagaagaaaagctgtagagtcaggtcggatggtaataggattccaggttgtggaattgcctagctttagaggttgaattttg

SEQ ID NO: 539198 - DNA, 201 bp, Homo sapiens
caccccttcccacctcaccaaatgtgaagccagagcagtagctccacttgcccacaagggacaggtccaccttattttagaaatcattccttattccaatrcagttgagtatgatttaccctttctttgtaaccctccagtgctttaaagaaacatttcttcttatagctctgatcacattctactttgcattaggcagtt

SEQ ID NO: 539199 - DNA, 201 bp, Homo sapiens
ttaccctttctttgtaaccctccagtgctttaaagaaacatttcttcttatagctctgatcacattctactttgcattaggcagttgggggttttctttgwctatcacaccggtctgtaagctctttgaagtggagcatgggcctcactcacctatcccctgcagtgcttagcggaggcagacttgagtttaactcctagc

SEQ ID NO: 539200 - DNA, 201 bp, Homo sapiens
tgaaatttgttttacctttctgagccccacatttctattttaccaggttctgttgaggactaaaccagagataatgtacgtcactagcacttagtaagacrttagcaaatggtagattacagctgctcaaaaatgacccttgaactgaattaaaaggctatgatataagcactatttacaaaggacaatggaggaaaacag

SEQ ID NO: 539201 - DNA, 201 bp, Homo sapiens
taaaaggctatgatataagcactatttacaaaggacaatggaggaaaacagcataggagacactgtttgaaaggctaataatgtgtatatttaaggcagcrtttatttacccattcacttactcaacaaacatttaatgagcacctgctatgtgctaagtactgtgcaaattgctagggatctaacttgaataaaacagtc

SEQ ID NO: 539202 - DNA, 201 bp, Homo sapiens
gtgcaaattgctagggatctaacttgaataaaacagtcttggtccttaaagagatcccaagtttaaaagaattattccaagattttaaagatctttatacyggaggaaagtaaagattttgcctctaaaacattgaggttctaaggagaacatctttatattcatacagttatgataagcactgtctctacattaaatttc

SEQ ID NO: 539203 - DNA, 201 bp, Homo sapiens
tgcctgggttctgtttgccacttttctcattagctggggcaacagttgcttgtggccagaagcacacaaacacacaatgtgctatgactcacctgtaaaamatttcaaggaaaatcatatactgcctgtacaagtatttttgacttgaaacacttgccttgtgatgtttatttacaacctttcaatggcttgcatgttttt

SEQ ID NO: 539204 - DNA, 201 bp, Homo sapiens; identical to SEQ ID NO: 114415

SEQ ID NO: 539205 - DNA, 201 bp, Homo sapiens
gtgaaattttacatctggtataagaagtggtagaaattaagggtgttttgttggtaaagtatattatactcctagttgaaagctgtttttatggaaacttrtgggaggtatataggtaggtagattgttttcagtgcttagaacacttgttgaaaaaggtgctcagaagcaccattctatacccaatgcagggaactcaat

SEQ ID NO: 539206 - DNA, 201 bp, Homo sapiens
catcttccaggccaaatgtagcggagcagttagtcgcaaagtacttataaggcttccatgttttcccaaagtcctgggagcggtccagcaccatggcagcyggcctgggggacttgaacatcacaattaggtgagtgaagtagaattcagcttccaggtctaactggatcttttctctgtgcacatcctccgcagactgcc

SEQ ID NO: 539207 - DNA, 201 bp, Homo sapiens
aagctgtcccagagctcactaatgctatatttatttctttttctggcttttttttctccctgtgtttcatattgggtcatttctattgctacgtattaaaygtcactaatcttttcttctacaatgtctagtctactaatcctgtttggtatgtatttttcatctcaggcatcagaatcttcaaaaatggtcattcaactt

SEQ ID NO: 539208 - DNA, 201 bp, Homo sapiens; identical to SEQ ID NO: 114385

SEQ ID NO: 539209 - DNA, 201 bp, Homo sapiens
gtttgcctaatgtagtccctgtttgatttatgccttatgtcatctgtgaacgataagataacaagaagtttttagaccttgagcacacctgggacagagcygccctgttattctaaggagcagatgtgctgcctgtttgtacacagaagtatacattgagtgaccagcagagacctgacccttgagataaaggcagccata

SEQ ID NO: 539210 - DNA, 201 bp, Homo sapiens
catgaggccatttaactcaaatttctcaatgcaagaagttcctctataatggctgatgcccattcattctctgctagctcctacagcctcatcaggcagcrtgtttcagttttagaaaggtctaattaacaaaaagttcttctgtgttaagctagagtctgttccctgaaactcctaatactggccttagagctatacaaa

SEQ ID NO: 539211 - DNA, 201 bp, Homo sapiens; identical to SEQ ID NO: 114388

SEQ ID NO: 539212 - DNA, 201 bp, Homo sapiens; identical to SEQ ID NO: 114391

SEQ ID NO: 539213 - DNA, 201 bp, Homo sapiens
tgaatgttttcaatttgttgatacttcttgaatttaaaaaaaatgtaaagaaagaaaagaaatgaatgaatgtgcattcgggggatagggctttggggtcygctttcagaatcaggcagcagtggtcaggagttcagatacaaaggagttaataggacaaaaaagagatcacagtcagactcactttttaaagacagattg

SEQ ID NO: 539214 - DNA, 201 bp, Homo sapiens
aaagtgtgagatttgctaaccctttgaaggtgtgtatgggtgctcattgcataacatttttactacttgtaatgtttcataataaaatatatttaacttgmtgtgagtttaatttggagcatttggtgagcactttatagccaagtgttgacgcaatatttcatgcccacatttgagtttgtgttaaggagcaagttagtg

SEQ ID NO: 539215 - DNA, 201 bp, Homo sapiens
ggtctcactctatcaccaagaccagagtgcagtggtaccaccatggctcactgcagcctcaacttcttgagctcaagcgatcctcctgccttagtctcccragtaggtgggactacaagccggcaccatcatacctggctacttaaaaaaaatttttttttttttgtagaggcaaggtcttgctatgttgcccaggctggt

SEQ ID NO: 539216 - DNA, 201 bp, Homo sapiens
aacctccacctcctgggttcaagtgattctcctgcctcagcctcctgagtagctggggttacaggtgtgtgccaccacacctggctaatttttgtattttyagtagagacaaggtttcaccatgttggccaggctggtcttgaactcctgaccgcaagtgatctgcccgcctcggcctcccaaagtgctgggattacaggc

SEQ ID NO: 539217 - DNA, 201 bp, Homo sapiens
acaggggaagcactcaataaatgttttctgaactaaactgagctacaacttatgtgcttctagtaaatttatctcaactgttgcttcaggttttcaatggttttttttttttttggttttttttttttttgagacatagtcttgctctggaggctcccaggctggagtgcaatggcgcaatcttggctcactgcaacctct

SEQ ID NO: 539218 - DNA, 201 bp, Homo sapiens
ataaatgttttctgaactaaactgagctacaacttatgtgcttctagtaaatttatctcaactgttgcttcaggttttcaatggttttttttttttttggttttttttttttttgagacatagtcttgctctggaggctcccaggctggagtgcaatggcgcaatcttggctcactgcaacctctgcctcccaggtgcgag

SEQ ID NO: 539219 - DNA, 201 bp, Homo sapiens
gcatactgttcaaggaaatgctatataactgtatctttttgaaaatgttacctgttgccctacaagataacttatccaagttagtgacaaattatttttcttttctcttttatctgcttagtagttcagacattctcatttttagacatttctactagtggtctgaggctatgggatacacacgtatatatatctattcat

SEQ ID NO: 539220 - DNA, 201 bp, Homo sapiens
actgttcaaggaaatgctatataactgtatctttttgaaaatgttacctgttgccctacaagataacttatccaagttagtgacaaattatttttcttttctcttttatctgcttagtagttcagacattctcatttttagacatttctactagtggtctgaggctatgggatacacacgtatatatatctattcatttaa

SEQ ID NO: 539221 - DNA, 201 bp, Homo sapiens
gttcaaggaaatgctatataactgtatctttttgaaaatgttacctgttgccctacaagataacttatccaagttagtgacaaattatttttcttttctcttttatctgcttagtagttcagacattctcatttttagacatttctactagtggtctgaggctatgggatacacacgtatatatatctattcatttaaaca

SEQ ID NO: 539222 - DNA, 201 bp, Homo sapiens
ttcaaggaaatgctatataactgtatctttttgaaaatgttacctgttgccctacaagataacttatccaagttagtgacaaattatttttcttttctcttttatctgcttagtagttcagacattctcatttttagacatttctactagtggtctgaggctatgggatacacacgtatatatatctattcatttaaacat

SEQ ID NO: 539223 - DNA, 201 bp, Homo sapiens
tcaaggaaatgctatataactgtatctttttgaaaatgttacctgttgccctacaagataacttatccaagttagtgacaaattatttttcttttctcttttatctgcttagtagttcagacattctcatttttagacatttctactagtggtctgaggctatgggatacacacgtatatatatctattcatttaaacata

SEQ ID NO: 539224 - DNA, 201 bp, Homo sapiens
aacgctatagtattattttccactttctggcttataggacatgacagttattataatactagttttcatttttatttctttattgttattttatttatttatttatttatttatttatttatttatttatttatttttgagacagagtcttgctctgtcgcccaggctggagtgcagtggcatgatctcggctcactgcaa

SEQ ID NO: 539225 - DNA, 201 bp, Homo sapiens
gcagagactcttcctgagagcatcatgagaaggggctatttgagtagagtgtgaagaatggcaatagagactgaggcaagagagtcatccacccaaagcamctgcatctccaacagctgagtagttttcacctaagccagaaagaaggaaaaaaaaaaaaagatctggatgatataaccctttctttacaaagatagctgg

SEQ ID NO: 539226 - DNA, 201 bp, Homo sapiens
tgctaaagggcaattgactacatttattttggcccatcagggaggaaggaagggcatgccaatctttcaagaggttgtttactttgacagagaatgaattytgctttcttttccattttctgattttccttttaatatggagaaagactatgtaatagtttaaaatatgtgtcttggcataaaagtcaataaatttattgt

SEQ ID NO: 539227 - DNA, 201 bp, Homo sapiens; identical to SEQ ID NO: 114381

SEQ ID NO: 539228 - DNA, 201 bp, Homo sapiens
acaatttaaaggtcccaatcagactaactccttaaagacaggaatatactataatgaggtacaggtaatagggaagaggcacagctcagaaatttctcacaaaaaaaagtttattttgtttgttttggcaaggaaaataatatttaaacctctctcaccgaagaaagttttctcccttaactagtttctcctcccagctcc

SEQ ID NO: 539229 - DNA, 201 bp, Homo sapiens
cctatgaatcggatagatcttttcaaattctattcttttttcaaataaacctctttttcttttctttcctttccttcctttctctctctctctctctctctttttttttttttggaaaggtttggctctattgctcaggctggagtgcagtggcactatcccagctcattgcaacctctgcctgctggattcaagccatcc

SEQ ID NO: 539230 - DNA, 201 bp, Homo sapiens
aaaatgtttgtgctattgtttttcattgtttccttgatgtgttatgaaattctgaccagattcatatcttttaaaagtatattacaagataatttaagatkgattcttacaggaaatcctttacatttcctagaaacaaaaacaaatcagttatgactccaaattacgtatgggaagagacttctcacagttttacccaca

SEQ ID NO: 539231 - DNA, 201 bp, Homo sapiens
gtggaagaagatttatagaccaaaaaaaaaaaaaaaaaaaggaaatgatgttcagaaattggaagtgaggtacagaagagctggattggtacaggttggcrtttgccttatttgaacacagtttgaacattcggcagtgcatgaatggttgaagtatggacattgggattggtcaagactcagctgttgttacaggtgcat

SEQ ID NO: 539232 - DNA, 201 bp, Homo sapiens
tcttttaaaagtatattacaagataatttaagattgattcttacaggaaatcctttacatttcctagaaacaaaaacaaatcagttatgactccaaattaygtatgggaagagacttctcacagttttacccacagaacctgcttttaaattcttgtaaaagagaggttcgtgagcgttaacattgtgatgggcacgcgca

SEQ ID NO: 539233 - DNA, 201 bp, Homo sapiens
acctcccggtttcaagtgattcttgtgcctcagcctcccaagtagctgggcttacaggtgcacgccaccatgcccggctaattttttctttctttctttcttttttttttttttttttttttgtatttttagtagagatgggatttcaccatgttggccaggctggtcttgaactcctggtctcaagtgatccacccgcct

SEQ ID NO: 539234 - DNA, 201 bp, Homo sapiens
aatcctttttgagcccccagattaggcttaaatgacatatagctggatcctgttgccacttaccaatgcagaacattcctggaatcatctgaaaatcaaaygaggaagagctaagagagtatttcctctttcctgcagcaactacccaatgtgacacaaatggaaaagtaaataaatattaatagtctctgaagacagact

SEQ ID NO: 539235 - DNA, 201 bp, Homo sapiens
tgggttctcagtccaagctgtggaaaagctccccttgtccaagagagtttaaaggtagtgacttgggtttttgcgaccgctttgtttactaagaacttgtkggggaggaaccatgctaagccatgaccaatgaggagaagcaagagagcctgtctgtccccaagagccagtcctctgctcttctgtagtcaggccactgcc

SEQ ID NO: 539236 - DNA, 201 bp, Homo sapiens
gcagagattataatcatgttttcaatcctagaactgggacttcccggaggagggaaagggaatgtcttaaggggagagaggagccaaaaacaaactgtgcytacttcactaatttgccaagaccttgctctgatggacagacctgaaaaaaccatgaatggagccaatgcaaattccctaagaaaacggcatttagtgtac

SEQ ID NO: 539237 - DNA, 201 bp, Homo sapiens
tcgaattttggaggctcaagtgatcctccctcctcagcctcctgaggagctgggatgtcagctgtgtgccatcatgcctggctactctgaacctttaataygattcaatagctctggggtaggatcagaggttctgaattgctaatcagcaaccagatgatgccaatgcggctggtctgcagaccacacacagagtagcag

SEQ ID NO: 539238 - DNA, 201 bp, Homo sapiens
tacctttcctgctgtcggggaaaaatagtgaaagactctgaaatccactccctgtgcccaccaccaagagattaccaagtgtgttaccgcagcacaccctygctaggttttcttggccttttatcatcattcagctattttacaactctgtaagttgtaggaaatgattaataatgcaaataatttctgtccatagaaatg

SEQ ID NO: 539239 - DNA, 201 bp, Homo sapiens
ttgactcatgttcgttttatatatatatgagagtcatgacctttctttttacaaagttattttttaacactaccatttcttacccttcacatgttacctaragttttttttttaaatcaagaatacttgaggatttacttctaaaaatggaattttaacatgtttcgtatagtggggttggaatgcctcatattttcacaa

SEQ ID NO: 539240 - DNA, 201 bp, Homo sapiens
tggtgatgtgacagctgtttcctccctgaccccagaggagatggctctagaaggttgggatcaatcctgaatttagcttaggtgttacatttacttttataaaaaaaaaaagtatagtatatataaataatacaaaaccataatccttctcggatctcttgtggcagttgaaatagtcccacatgtggtcatcagaaagta

SEQ ID NO: 539241 - DNA, 201 bp, Homo sapiens
actatctcaatacacagccaagtaatttgaaatttctttcaagccaaattgctactaggtcactatgctcagttactaagacagtagctacatagtcattytacctactccatctttgttcttcatttgatctcagtcttgttttcataactttcctttgcacttgtctttttatacttaaactttcccaaggtcagaaag

SEQ ID NO: 539242 - DNA, 201 bp, Homo sapiens
atgcctcttggtcctgtccaagtgtgtctttcactgactgatttctgaatcatgttctagttgctcggccacatgggtccagtgctcatttgagcatcacwgtactaaatcctttctccaggaatgagtataataaaggagttatgtgcaattaaaaaaattggcctggtgtggtagtatgtgcctgtagtcccagctacc

SEQ ID NO: 539243 - DNA, 201 bp, Homo sapiens
tgaggcaggagaatggcgtgaacctgggaggcggggcttgcagtgagtggagattgcgccactgcactccagcctggaagacagagcaagactctgtctcaaaaaaaaaaaatttttttggggaaaatgccagactgttttccacagcagcagtagcattttacatttctaccagcaatgtatgaaggttccaacttttcc

SEQ ID NO: 539244 - DNA, 201 bp, Homo sapiens
gaatgtcaacatcaacagatcttgttttccttactatttgaaatggctgtgggtttttttccatcttctggaattattataaagagagagagagagagagwgtgtgtgtgtgtgtgtgtgtgtgtgtgtgtgtgtgtgtgtgtattttaaccttacgtgtcttgtcactaaaaatttcccttgcaagggagaataaggact

SEQ ID NO: 539245 - DNA, 201 bp, Homo sapiens
gcacctaacccagaatattggtgcaaggtgaagtttaagcaaattccttaaggatgagtgggaattatctagtatttctccatctacccctaaattatttsagtgacttaactaacttaaatgaatgagaggcaggattagggggaggggatcagaaaaggagagccctcccccaccaagccaaggagggtcagagagtga

SEQ ID NO: 539246 - DNA, 201 bp, Homo sapiens
cagtatccccggcagggcgcacccaggatagctggttatccaagcgcatgtgtatcccagttgtaaaaataaatcaatagtatttgaaactgcggagcccsggggaaaggaggcggaacatggccactcatttcaccctcgggagcagcgctctgcgctcgcagccctggctcccctgcacccccgagtcccgagatgggt

SEQ ID NO: 539247 - DNA, 201 bp, Homo sapiens
tttgttattttctgattgaatcctacctgaacccagttaactgagatacactaaatcatagcaccctttatttgaaacaatactgtaggatttcaaagatycatcagtgtctagaaactagcaggtatctgttgaatgaatgctgcattttcttcaactctgggagcctggattaacttctacaagtaatagcactgtttc

SEQ ID NO: 539248 - DNA, 201 bp, Homo sapiens
attgccattcccaacttctctctcacctgtgattttagagtttgcacccaccattctgactatggtaacccaacataaatcaattcatgttgttgcttaaytgaacaaaagttggacccataaattagtgagattggttttctttcttgttttttgagacagggtctcactctgttgcccagactggagtgcagtggtgcg

SEQ ID NO: 539249 - DNA, 201 bp, Homo sapiens
gggagtactttatagtaagaaaaaagtcaaatatgagttattccttcccaaatttatagaacaagtatttcaaacctgttagattcatttttgcacttttrcaatgccccaattttgacctaaatatatatgttttctggaaaaacattcactttctggaaagcatgttcatgaaaagttaaatgaacaaatattatattt

SEQ ID NO: 539250 - DNA, 201 bp, Homo sapiens
tcaccatttctacctctgtcctctgtcccatgcaccatcaagtctagtctgaattattgcaataggattctaaatggtccccctgcctcttccctcacccyccttccctctttggtcttttattaacacacaagccagagtaatcgtactaaaaatagataatatcaccccaccacttaaaatctcaaaatctccaatggc

SEQ ID NO: 539251 - DNA, 201 bp, Homo sapiens
ctgcaacctccgccctccggggttcacgttattctcatgcctccgcctcccgagtagctggaatttcaggcacctgccaccacgcccagctaatttttgtwtttgtagtagagacagggtttcaccatgttggccaggctggtctcaaactcctgacctcaggtgattcaccagcctcggcctcccaaggtgctaggatta

SEQ ID NO: 539252 - DNA, 201 bp, Homo sapiens
caacatcaacagatcttgttttccttactatttgaaatggctgtgggtttttttccatcttctggaattattataaagagagagagagagagagagtgtgwgtgtgtgtgtgtgtgtgtgtgtgtgtgtgtgtgtgtattttaaccttacgtgtcttgtcactaaaaatttcccttgcaagggagaataaggacttaaatc

SEQ ID NO: 539253 - DNA, 201 bp, Homo sapiens
tcttagcaaacggcacaccaggagattatatcccgtgcatggctcagagggtcccacgcccacagagcctcactcattgctagcacagcagtctgagatcraactgcaaggcggcagccaggctgggggaggggtgcccgctattgctgaggcttgagtaggtaaacaaagcagctgggaagcttgaactgggtggagccc

SEQ ID NO: 539254 - DNA, 201 bp, Homo sapiens
cttaaatcacagtttatcttctactgaatataactgtttcaggacaaattgaagtatgcttccagctattacaaaattggcaagacacaaatgaaataccrtggagacacgatttgtgcaccagaagtcagatatctatcagtaacctcagcttttctctttccatatagcttccttctccccatgaacccattatattag

SEQ ID NO: 539255 - DNA, 201 bp, Homo sapiens
caaagaactcaaacaaatttaccagaaaaaaacaaacaaccccatcaacaagtaggcgaaggatatgaacagacacttctcaaaagaagacatttatgcakccaacagacacatgaaaaaatgctcatcatcactggccatcagagaaatgcaaatcaaaaccgcaatgagataccatctcacaccagttagaatggtaat

SEQ ID NO: 539256 - DNA, 201 bp, Homo sapiens
agtactttatagtaagaaaaaagtcaaatatgagttattccttcccaaatttatagaacaagtatttcaaacctgttagattcatttttgcacttttacartgccccaattttgacctaaatatatatgttttctggaaaaacattcactttctggaaagcatgttcatgaaaagttaaatgaacaaatattatattttgg

SEQ ID NO: 539257 - DNA, 201 bp, Homo sapiens
tttaataactttattgttttttaaatctcctgttcgtttccttaataccttaaagattgaagagctttcttttctctccctttctctctttctttctttcbctttctttctttctctcctttctttctctctctcccttaaaatcctgattttacagtcaaatttagtaactttatcgtttttaaaatctcctgttcattt

SEQ ID NO: 539258 - DNA, 201 bp, Homo sapiens
ttcttttctctccctttctctctttctttctttctctttctttctttctctcctttctttctctctctcccttaaaatcctgattttacagtcaaatttartaactttatcgtttttaaaatctcctgttcatttccttaacatcttaaagattgaagagctttcttttctctctctctttcttcctcttttttttttttt

SEQ ID NO: 539259 - DNA, 201 bp, Homo sapiens
gaacaaagagaaacttctagaatttttatcttcagccttagaaagtgttgttaactctgaaagtttatatttagaggacttactttaaaaaaagaaagtawtacttttaaatgcctgctcatgattttttttaaatttttatttatttatttatttatttatttatttatttatttttttgagacagagtcttgctttgtc

SEQ ID NO: 539260 - DNA, 201 bp, Homo sapiens
cttagaaagtgttgttaactctgaaagtttatatttagaggacttactttaaaaaaagaaagtaatacttttaaatgcctgctcatgattttttttaaatttttatttatttatttatttatttatttatttatttatttttttgagacagagtcttgctttgtcactcaggctagagtgcagtggcacgatctcggctca

SEQ ID NO: 539261 - DNA, 201 bp, Homo sapiens
ctagagtgcagtggcacgatctcggctcactgcaacctctgcctcccaggttcaagtgattgttgtgcctcagcctctcgagcagcagggaatacaggcgyccaccactatgcccagctaatttttgtatttttagtagagatggggttttgctgtgttggccaggctggtctggaactcctgacctcaggtgatccaccc

SEQ ID NO: 539262 - DNA, 201 bp, Homo sapiens
tatttatttatttatttatttatttatttttttgagacagagtcttgctttgtcactcaggctagagtgcagtggcacgatctcggctcactgcaacctcygcctcccaggttcaagtgattgttgtgcctcagcctctcgagcagcagggaatacaggcgtccaccactatgcccagctaatttttgtatttttagtaga

SEQ ID NO: 539263 - DNA, 201 bp, Homo sapiens
tccaccactatgcccagctaatttttgtatttttagtagagatggggttttgctgtgttggccaggctggtctggaactcctgacctcaggtgatccaccygccttggcctcccaaagtgctgggattacaggtgtgagccactgtgcccggccacctgaagtttttataaggcccttgagaactctggcactttgttgtg

SEQ ID NO: 539264 - DNA, 201 bp, Homo sapiens
ctaaaatgtggattgatgggtggatagaatttaggtggcgggtatgtgaatgcacaacttctaaaacttttctggatgtctgaaatttttcataataaaakgttgggaaaattatcacagacattctcaatcaacacaactttgtgaattcatacttcagcacatcctcagctccaagcacatagcaatattagataaagg

SEQ ID NO: 539265 - DNA, 201 bp, Homo sapiens; identical to SEQ ID NO: 114409

SEQ ID NO: 539266 - DNA, 201 bp, Homo sapiens
gatcatatttttaaaaattctttttagctgctagcttgaggaataatattcaaggccgtcctgtggactcccttggaactcgttccttccatgatggcacrcttacactgttctattgttgttgcctatttacttgtctgtatctcacatcagactcagtgctcagagggcagggatcctgtttgtctggttcacagctgt

SEQ ID NO: 539267 - DNA, 201 bp, Homo sapiens
agaagatagcataattgacatgtgggcgtctgcagctggttggtttaattttagaacatttgtccttgactgtgcccctttaagtgaagtacctacttgtmttagagaagtgtgtctgtcttttgggcagcaccaaaatccttttgcttatactctggagcattcggcaccctgtttcatcagatagcccaccctttaaag

SEQ ID NO: 539268 - DNA, 201 bp, Homo sapiens
taccaacaccaaatcacaaataaaacaaattaataaccatgacagatattgaatcagtaatactttcgtctactcatagacactgtgtctcaatggttttatagataaattctaacaaaaattcaagtaacagatgattctatttttatataaataattgcagagaatagaaaaaaaacgtagtgggtaaggggacctcct

SEQ ID NO: 539269 - DNA, 201 bp, Homo sapiens
tttacctacaaaacctggtcacactaggaaaacgataaaccatgaacacatagttgtgagcacccagaataattctttaagtctacctaattatatctacwtttctattaacacatagtttttttcttttatccccctctttaagagtaagataactcttcagctgtaatgagaccaaatgctagtgaacttatccatggt

SEQ ID NO: 539270 - DNA, 201 bp, Homo sapiens
actctattattgcctgtctaggtagatgactgggctactgctttaatgagaagacacaattcttgtgttcacgttatctactattaaatgccaagactgatgttgtcctctaactcaatgtctgtccaaaagcactaagcaaaaatgtagaccctcaacgctcttggagacattgacagttgaccaaagttagtactggaa

SEQ ID NO: 539271 - DNA, 201 bp, Homo sapiens
ctctattattgcctgtctaggtagatgactgggctactgctttaatgagaagacacaattcttgtgttcacgttatctactattaaatgccaagactgatgttgtcctctaactcaatgtctgtccaaaagcactaagcaaaaatgtagaccctcaacgctcttggagacattgacagttgaccaaagttagtactggaag

SEQ ID NO: 539272 - DNA, 201 bp, Homo sapiens
caccatgtgcgaggaaaccggaaggatgagtctgccatggcagatggcaggtgagccaggtgaggataggcagcattgcacttgtcacatttgggctgccracaagtcagatccgtgttctcactgtagaagcagtacagttcggtagcattctgaccgcaggtggtgtctgcccagagttttcgccccaaagccaaattt

SEQ ID NO: 539273 - DNA, 201 bp, Homo sapiens
tcttggatgctgtgtgcctacactggtaacttcccaatactgatcacctcaatttcctatcaccatgctcggcccacacttaggaataccccactacttcrtcttggatcatcaatctcttgcctgcttgacctctggtggaaattgcctgtatgatctctcttttttttccctgcccatccttccccactctttcttcct

SEQ ID NO: 539274 - DNA, 201 bp, Homo sapiens
tgaggcaggagaattgcttgaatctaggaagcggaggcttcagtgagccaagattgtgccactgcactccagcctgggtgacagagcgggactcagtctcaaaaaaaaaaagtctgctaaaataacaactacaattaaaaacacttatgaactaggtttagaaggtatctgtacactgaaataacttacataaatgttagt

SEQ ID NO: 539275 - DNA, 201 bp, Homo sapiens
agctatatctttatatttaaagtgagcttcttataggcagcatacctaatctttttcaaaaattttgtccaatattataatctatgcctttaatggggatrtttacaccttttacatttaatgtgattgatgatatttaccacttcacatatagtataagaaactaagaagagtatactctcatttcctcccctcaacctt

SEQ ID NO: 539276 - DNA, 201 bp, Homo sapiens
aaagtgagcttcttataggcagcatacctaatctttttcaaaaattttgtccaatattataatctatgcctttaatggggatatttacaccttttacattyaatgtgattgatgatatttaccacttcacatatagtataagaaactaagaagagtatactctcatttcctcccctcaacctttgcactgttgtcatccat

SEQ ID NO: 539277 - DNA, 201 bp, Homo sapiens
cccaaagccccgcgtctatcaccttgtaatagtcttaaagcccctgcacctggaactgtttactttcctgtaaccatttatccgtttaacttttttgcctrctttacttctgtaaagttgttttaactagaccccccctcccctttctaaaccaaagtataaaagaaaatctagccccttcttcggggccgagagaacttt

SEQ ID NO: 539278 - DNA, 201 bp, Homo sapiens
accaacaccaaatcacaaataaaacaaattaataaccatgacagatattgaatcagtaatactttcgtctactcatagacactgtgtctcaatggttttatagataaattctaacaaaaattcaagtaacagatgattctatttttatataaataattgcagagaatagaaaaaaaacgtagtgggtaaggggacctccta

SEQ ID NO: 539279 - DNA, 201 bp, Homo sapiens
tggcacaatcatagctcaccacagccttgaactactgggctcaagtaatcctcctgcgtagctgggattacaggtgcatgccaccatgcccagctaacttytttattttttgtagatactaagtctcactatgttgcccaggttggtctcaaactcctggcctcaagagatcttcctgccttggtctctcaaagttttggg

SEQ ID NO: 539280 - DNA, 201 bp, Homo sapiens
ccaacaccaaatcacaaataaaacaaattaataaccatgacagatattgaatcagtaatactttcgtctactcatagacactgtgtctcaatggttttatagataaattctaacaaaaattcaagtaacagatgattctatttttatataaataattgcagagaatagaaaaaaaacgtagtgggtaaggggacctcctaa

SEQ ID NO: 539281 - DNA, 201 bp, Homo sapiens
ctggccttatccacagttttggcttggcttagctccattcaaacacatgcttagtaatggcactaggggctgctaccactgctgcacaaattgaaatcagyatgaaaatggaatagaaagatgtcagcaaactaatattattttaaaaggaaattgcttccaatttcaaagcagcaggagattagtaagaaaatgaggttt

SEQ ID NO: 539282 - DNA, 201 bp, Homo sapiens
gacttgcacatatacgcccagatggcctgaagtaactgaagaatcacaaaagaagagaaaaggccctgccctgccttaactgatgacattccaccattgtsatttgttcctgccccaccattaaccctgtgaatttccttctcctggctcagaagctccccaactgagcaccttgtgacccctacccctgcccaccagaaa

SEQ ID NO: 539283 - DNA, 201 bp, Homo sapiens
caacaccaaatcacaaataaaacaaattaataaccatgacagatattgaatcagtaatactttcgtctactcatagacactgtgtctcaatggttttatagataaattctaacaaaaattcaagtaacagatgattctatttttatataaataattgcagagaatagaaaaaaaacgtagtgggtaaggggacctcctaac

SEQ ID NO: 539284 - DNA, 201 bp, Homo sapiens
ttatttctgtgccccgaccccttatttccatgccccaacccctttctgtgccccatcccttatttccgtgccccgacctcttatctctgcgccccaacccsttttcccacttttctggaaggtaagaaccgctgaaccccttctctccgtttctctactctctcttttctctaggcttgcttccttcactatgggcaacct

SEQ ID NO: 539285 - DNA, 201 bp, Homo sapiens
tctattattgcctgtctaggtagatgactgggctactgctttaatgagaagacacaattcttgtgttcacgttatctactattaaatgccaagactgatgttgtcctctaactcaatgtctgtccaaaagcactaagcaaaaatgtagaccctcaacgctcttggagacattgacagttgaccaaagttagtactggaagt

SEQ ID NO: 539286 - DNA, 201 bp, Homo sapiens
accgctgaaccccttctctccgtttctctactctctcttttctctaggcttgcttccttcactatgggcaaccttccaccctccattcctccttctactcycttggcctgtgttctcaaaaacttaaaacctcttcaactcacacctgacctaaaacctaaatgccttattttcttctgcaatgccacttgaccccaatac

SEQ ID NO: 539287 - DNA, 201 bp, Homo sapiens
cgcataatattctagctgtgcttgcctagacgggaagacagaagggctcttctcttgtttggagcattattcttccatgaatgtagcctaagattgcattygcttttttggcagtcatggtatactgttgactcacgttgatctcagtcaattaaaaccttcaggtctttttcacatgaatggctgataagtccacctctc

SEQ ID NO: 539288 - DNA, 201 bp, Homo sapiens
ctataggcgcgtgccaccacacccagctaatttttgtattttagtagagacagggttttaccgtgttggccgggcagatcactcctgacttcaggtgatcygcctgccttggcctccgaaagtgctgggattacaagcataagccaccgtacccagcctgaagagctttctaatgatacttttggcttattcatagaacat

SEQ ID NO: 539289 - DNA, 201 bp, Homo sapiens
aaactcaacagtagttccaaatagccagaaaatggcactttgaatttctccatcctgcaagatctaaataattcttgtcgtaaaataggcaaatggtctgmggtgcctgacgtccaggcattcttttacacatcagtcccttcctagcctctgtgcccagtgcaactcgtcccaaatcttccttctttccctcccgcctgt

SEQ ID NO: 539290 - DNA, 201 bp, Homo sapiens
acctagatgaggggttgataggtgcagcaaaccactatggcacatgtatacctatgtaacaaacctgcacactctgcacatgtatcctagaacttaaagtaaaaaaaaaaaaaaaaaaagaatagtttgataccggaaaaaaattattttcaaataccacattgatagattacaggaggaaaaccatctgattttctcaaa

SEQ ID NO: 539291 - DNA, 201 bp, Homo sapiens
ttaattgagcaatgaacgactcgcgagttgggcagcccccggaatcacagctgattcagagatgccaccgcagccagtggtggaagaagatttatagaccaaaaaaaaaaaaaaaaaaaggaaatgatgttcagaaattggaagtgaggtacagaagagctggattggtacaggttggcatttgccttatttgaacacagt

SEQ ID NO: 539292 - DNA, 201 bp, Homo sapiens
tttaattaacctcgccttcaaggtgtacaataatagaaaaaagttgcaattccttgcctccactgtgagacaaaccccacaacaggatttaattaacctcrccttcaaggtgtacaataatagaaaaaagttgcaattccttgcctccactgtgagacaaaccccagccacatctccagcacacaagaacttccaaacgcc

SEQ ID NO: 539293 - DNA, 201 bp, Homo sapiens
cctagatgaggggttgataggtgcagcaaaccactatggcacatgtatacctatgtaacaaacctgcacactctgcacatgtatcctagaacttaaagtaaaaaaaaaaaaaaaaaaagaatagtttgataccggaaaaaaattattttcaaataccacattgatagattacaggaggaaaaccatctgattttctcaaaa

SEQ ID NO: 539294 - DNA, 201 bp, Homo sapiens
cataccaccatattacaaattatcagtagactatatgttgtatacaatacctactgattaccagggaaatttagttttagtttttctctcttttttttttwaaaaaaaaaagattggcattataataaagtctaatcatataaataacttcaaggcaaattaatcatcccagctctggaataggttagctcaataatttta

SEQ ID NO: 539295 - DNA, 201 bp, Homo sapiens
agcacacaagaacttccaaacgcctgaaccgcagcggccaggcgttcctccagaacctcctcccacaggagcttgctacatatgctggaaatctggccacygggccaaggaatgcccgcagcccgggattcctcctaagccgcatcccatctgtgtgggaccccactgaaaatcggactgttcaactcacctggcagccac

SEQ ID NO: 539296 - DNA, 201 bp, Homo sapiens
ctagatgaggggttgataggtgcagcaaaccactatggcacatgtatacctatgtaacaaacctgcacactctgcacatgtatcctagaacttaaagtaaaaaaaaaaaaaaaaaaagaatagtttgataccggaaaaaaattattttcaaataccacattgatagattacaggaggaaaaccatctgattttctcaaaag

SEQ ID NO: 539297 - DNA, 201 bp, Homo sapiens
ataccaccatattacaaattatcagtagactatatgttgtatacaatacctactgattaccagggaaatttagttttagtttttctctctttttttttttaaaaaaaaaagattggcattataataaagtctaatcatataaataacttcaaggcaaattaatcatcccagctctggaataggttagctcaataattttag

SEQ ID NO: 539298 - DNA, 201 bp, Homo sapiens
acccataaaaccccgattaagtaatttatcattttctgcacacttgtgccatactgactttatcacaaggtattgaaacacagccctttccatggcctagrgacaaatgaatacttggatcttgaaaggcatattatctacaccacatatttgggggattaagcatgcactatctcatataatttaatgaatcagtccata

SEQ ID NO: 539299 - DNA, 201 bp, Homo sapiens
ggtagcattctgaccgcaggtggtgtctgcccagagttttcgccccaaagccaaatttcccatccgagggttgcaggctttttcacagcgggaactcactmcagctactccactcagtcctaagaaagggaaagcatgcatgatgcaagacaaacccatctggaaagctcttttggccacctagtccatcaacaacagtca

SEQ ID NO: 539300 - DNA, 201 bp, Homo sapiens
tccctgtctgacagctttgaagagagtagtggttctcccagcacggagtttgagatctgagaatggacagcctgcctcctgagtagcctaactgggaggcrccccccagtaggggcagactgacaactcacacggccgggtactcctctgagacaaaacttccagaggaacgatcgggcagcaacatttgctgttcagcaa

SEQ ID NO: 539301 - DNA, 201 bp, Homo sapiens
aatagacatctacagaactctccaccctaaattaacagaatatacattcttctcagcaccacatcgcacttattccaaaattgaccacatagctggaagtaactcctcagcaaatgtaaaagaacagaaattataacaaactgtctctcagaccacagtgcaatcaaattagaactcagaattaagaaactcactcaaaac

SEQ ID NO: 539302 - DNA, 201 bp, Homo sapiens
aagtgaattttcccgaggcaggacaaaagagatattcttttttttttttttccccaagacggagtctcgctctgtctcccaggctggatagagtgcagtgktgcgatctcggctcattgcaacctccacctcctgggttccagcgattctcccacttcagcctccagagtagctggggttacaggcactcgtcaccatgcc

SEQ ID NO: 539303 - DNA, 201 bp, Homo sapiens
atagacatctacagaactctccaccctaaattaacagaatatacattcttctcagcaccacatcgcacttattccaaaattgaccacatagctggaagtadctcctcagcaaatgtaaaagaacagaaattataacaaactgtctctcagaccacagtgcaatcaaattagaactcagaattaagaaactcactcaaaacc

SEQ ID NO: 539304 - DNA, 201 bp, Homo sapiens
tctaaaattgacaccctaacatcacaattaaaagaactagagaagcaagagcaaacacattcaaaagctagcagaaggcaagaaataactaagatcagagsagaactgaaggagatagagacacaaaaaaaccttcaaaaaatcaatgaatccaggagctggttttttgaaaagatcaacaaaattgatagaccgctagca

SEQ ID NO: 539305 - DNA, 201 bp, Homo sapiens
cctcttaaaactccccaactctggtgccaacttagacaatacccttttaagcactcctttttagttatccccacctgcccagttcccttattaggctgacrctttaactaaattatctgcttccctgactattcctggactacagctatatctcattgccgcccttcttcccaatccaaagcttcctttgcgtcctcctct

SEQ ID NO: 539306 - DNA, 201 bp, Homo sapiens
aatctccggagtatctgggactataggcgcgtgccaccacacccagctaatttttgtattttagtagagacagggttttaccgtgttggccgggcagatcmctcctgacttcaggtgatccgcctgccttggcctccgaaagtgctgggattacaagcataagccaccgtacccagcctgaagagctttctaatgatactt

SEQ ID NO: 539307 - DNA, 201 bp, Homo sapiens
actaaattatctgcttccctgactattcctggactacagctatatctcattgccgcccttcttcccaatccaaagcttcctttgcgtcctcctcttgtatycccccaccttaacccacaagtataagatacctctactccctccttgcacctcttaccatctcattaaaacctaattacccttaccccactcaacgccaat

SEQ ID NO: 539308 - DNA, 201 bp, Homo sapiens
cgggtgtggtagtgggcaactgtaatcccagctactcgggaggctgaggcaggaaaatcgcttgaatctgggaggcagaggttgcagtgagccgagattgygccactgtgcaacagagtgagactctgtctcaaaaaataataataaataaataaatcagctaacctttgggggtgagaattgtctttactctctcacttc

SEQ ID NO: 539309 - DNA, 201 bp, Homo sapiens
cgctttaaaaagattaaagcctgttatcactcgcctgctacagcatggccttttaaagcctataaactctcgttacaattcccccattttacctgtcctaraaccagacaagccttacaagttagttcaggatctgcgccttatcaaccaaattgttttgcctatccaccccgtggtgccaaacccatatactctcctatc

SEQ ID NO: 539310 - DNA, 201 bp, Homo sapiens
ctcaaggaaataacttctcagtgttccatctgctattctactactcctcagggattattcaggccccctcccttccctacacatcaagctcgaggatttgyccccacccaggactggcaaattagctttactcaacatgtcccgagtcaggaaactaaaatacctcttagtctaaatagacactttcactgaataagtaaa

SEQ ID NO: 539311 - DNA, 201 bp, Homo sapiens
tgctccctggtgattctgacccacagccaggtttgggaaccaatgacttgaggtgagagaagtggggctgtgaaagtggaggcaagaccttgtccaaaccrttctacttttgactcagagtctgagtctgacttcctgatgaaaaatgacctgagagtttgaaactggccgtggtgagaatgtttcaaccacagaaattgc

SEQ ID NO: 539312 - DNA, 201 bp, Homo sapiens
ttacggtcctccgtcttcaagaaaagtagaacggactaaaggtcttttaaaaacacacctcaccaagctcagctaccaacttaaaaaggactggacaatayttttaccactttcgcttctcagaattcaggcctgtcctcagaatgctacaaggtacagccaatttaagctcctgtatagacgctcctttttattaggccc

SEQ ID NO: 539313 - DNA, 201 bp, Homo sapiens
ttccccagttaactctttggtgaacttcttcactgtcttcaaatcttagctgaaatctcaccttcccagtgctggggactaccctcatcatcctgtccctyactgtaccctgccactcctcttcccaccccaagcccttggttccctggatcccttccctcttgttttatttttttcttctttgatgacactagcccttat

SEQ ID NO: 539314 - DNA, 201 bp, Homo sapiens
cccaaactgccacacttaactcctgaagtaaacaaacaatcttggctggcaggactatgctgaatctccttaggcactctctaatcagatgtcctaggtcytcccaattcttagaccttttatacctgtttttctccttcttttattccatttagtttttcaattcatacaaaactgtatccaggccatcaccaatcattc

SEQ ID NO: 539315 - DNA, 201 bp, Homo sapiens
tgttttcacccaactggttgaaaattcttgcctcttatcaatgaagaaattaaccgatatctgtgagtgtgttatctcagaacctcaatgacctccttctyttgggttagcagaatgagggataaagagattcatctcttgtacaaatcagcctattttctggaaaccacaggttacttacgtttgcaagcatctggagct

SEQ ID NO: 539316 - DNA, 201 bp, Homo sapiens
attaacgtcgaagtgacaggtatcagcatgcccattacacttgcaggctggaaataagaagcgtggagagaaacactaataagtaaaaataaaatgatggrttatctcatattcagataggtaaaaataggatgagttggccaggcgtggtagctcacacctgtaatcccagcacttgtgggaggctgaggcaggtggatc

SEQ ID NO: 539317 - DNA, 201 bp, Homo sapiens; identical to SEQ ID NO: 114414

SEQ ID NO: 539318 - DNA, 201 bp, Homo sapiens
ccagtaccaagattatttatttacatgatgtcatgactgtacaaaggaaaggtttgcaaagtagctcagaatggggtccataagtgtggatctaagaggtyttatattttttccttgagaaacagtgttaaaggtaacataaaggtaacaaattatatcaactagtcaacaaatatttaatgggtacctacaagggagagt

SEQ ID NO: 539319 - DNA, 201 bp, Homo sapiens
aaggtttgcaaagtagctcagaatggggtccataagtgtggatctaagaggttttatattttttccttgagaaacagtgttaaaggtaacataaaggtaayaaattatatcaactagtcaacaaatatttaatgggtacctacaagggagagtcactatgctaggccatgtttggtacacaaagtattagaaaactttcct

SEQ ID NO: 539320 - DNA, 201 bp, Homo sapiens
tgacatgtgctcagagtggccaaaccaaaatgagtccctaaggtaaagttcaacaaacctgaaaacagccacaccgatacactgatatactactgcttgayctaagataacactcaagtaacttgtgtcatctcatccaggactttctttcttttaatactttcctaccactggtggacgcactctgcaagtggcctgtgc

SEQ ID NO: 539321 - DNA, 201 bp, Homo sapiens
gaatttagtaagatgaaggcatccttatgtagctggcagaagtagcacaatggagactagtaggaaaaacagttttgtaattatctaaatcctacatgtcaaaaaaaaaaaacacccacacacaaaaaagcaaaacatacataaaaacacataaataatctgatagaattggagtcagagttcctgctgttaagggagttc

SEQ ID NO: 539322 - DNA, 201 bp, Homo sapiens
gaaatttgagacttcttatttttaaactagattgactagcttctttttctgagcacacaattttcaaagatggaaattggtgacatggagttgaaactgcraaataaatttgtagtactgcactgatttatatatattctaacatgacaggggagaggaaggcaataatcacttctggggaggcttcctgtagtccttgag

SEQ ID NO: 539323 - DNA, 201 bp, Homo sapiens; identical to SEQ ID NO: 114390

SEQ ID NO: 539324 - DNA, 201 bp, Homo sapiens
cttgagatgcttaaaggctatcttaaatatatcctggaaacattctgacacttaggagaaaagttggggtcataaatacagttttgagagttgtcacccartggcagttgaaattaggagggctagatgaaacttcccagggacggtgtgtagagtgagaagatgatcaaggatagaacacggtggaaacatccataggta

SEQ ID NO: 539325 - DNA, 201 bp, Homo sapiens
agttggtttacttgagcaatagctattgaatatgtcaggcagcacgtgagatgctaaggcagtgtttctccaagtgtggtctgggctactttagggagctygctaaagaatgtggtaagtgctatgacagaggtgaacataggatactgtgggtgcacacatgtgatgtacgtgtacactgcacctaacccagaatattgg

SEQ ID NO: 539326 - DNA, 201 bp, Homo sapiens
gcagcacgtgagatgctaaggcagtgtttctccaagtgtggtctgggctactttagggagctcgctaaagaatgtggtaagtgctatgacagaggtgaacrtaggatactgtgggtgcacacatgtgatgtacgtgtacactgcacctaacccagaatattggtgcaaggtgaagtttaagcaaattccttaaggatgagt

SEQ ID NO: 539327 - DNA, 201 bp, Homo sapiens
tgacctttattacattgagaagttcctttctaacctttattacattgaggaagctcctttttattcctggtgtgttaagttgaattgaattaagttataartttgaactaaaagacaaataggctacaggattttttgcctctgttcagcctatggaaatactatgatcctgtgttctctttaattttaatggctactagg

SEQ ID NO: 539328 - DNA, 201 bp, Homo sapiens
agctcgctaaagaatgtggtaagtgctatgacagaggtgaacataggatactgtgggtgcacacatgtgatgtacgtgtacactgcacctaacccagaatmttggtgcaaggtgaagtttaagcaaattccttaaggatgagtgggaattatctagtatttctccatctacccctaaattatttgagtgacttaactaact

SEQ ID NO: 539329 - DNA, 201 bp, Homo sapiens
atttttgaaatgttgatcttgtatcttacaacttgtttatcagctgtaatagttttttggtgaattcttaagagttttctataatctaagattatatcatytgtgaataaatataggcttacttcttcctttctaatctgaatgctctttacttatttttctagcctaattgccctggctagaacttccagcaccatattg

SEQ ID NO: 539330 - DNA, 201 bp, Homo sapiens
agaatattggtgcaaggtgaagtttaagcaaattccttaaggatgagtgggaattatctagtatttctccatctacccctaaattatttgagtgacttaaytaacttaaatgaatgagaggcaggattagggggaggggatcagaaaaggagagccctcccccaccaagccaaggagggtcagagagtgagaaagaacatg

SEQ ID NO: 539331 - DNA, 201 bp, Homo sapiens
tattgtttgtctttctgatcatagccatggatgtaaagtggtatcacaatatcgttttgatttgcatctccctaatgactaatgatgttgaatgtcttttwatgtgcttattggccatttgcataccttctttgggtggctcaagaccagtcattcaaatcttttactgattattaaactgggttattttttgttttgttg

SEQ ID NO: 539332 - DNA, 201 bp, Homo sapiens
attagggggaggggatcagaaaaggagagccctcccccaccaagccaaggagggtcagagagtgagaaagaacatggcacctgagagtgatccaagcagcycaacagatccagctagaggctacagctcaggaggcagggatgagacaagaggccaggggggcattcagacagggcctagcaagccacattcaagaatgtg

SEQ ID NO: 539333 - DNA, 201 bp, Homo sapiens
gtcactgaagagtttcaagcaaggaagtaacattttgtatttttaaaatatccttgagaatgcagtatagagaataaattggggagcaagcgagacagaamagaacattcaggagaatgccacaattacgcagaagaaaaataagagtggtttgctctaagatagtagctacagggatggagagaggcatacccactaaag

SEQ ID NO: 539334 - DNA, 201 bp, Homo sapiens
ccagcaatgtatgaaggttccaacttttccatatcatccccaagacttgttattgtttgtctttctgatcatagccatggatgtaaagtggtatcacaatatcgttttgatttgcatctccctaatgactaatgatgttgaatgtctttttatgtgcttattggccatttgcataccttctttgggtggctcaagaccagt

SEQ ID NO: 539335 - DNA, 201 bp, Homo sapiens
aaggtctgtaggaactttgaagctcttctgcttcctgagcccagacagtgggagctgaatggcggctctgtgcttggtgtgcatgacaccacagttggcamgcggatatcagtagggaagggacatcatgacccctgaggctgtgtgctggaaaggagacagcagagtgccacagacacaaaagtgaacgggaatttaaac

SEQ ID NO: 539336 - DNA, 201 bp, Homo sapiens
gaattttcccgaggcaggacaaaagagatattcttttttttttttttccccaagacggagtctcgctctgtctcccaggctggatagagtgcagtggtgcratctcggctcattgcaacctccacctcctgggttccagcgattctcccacttcagcctccagagtagctggggttacaggcactcgtcaccatgcccagc

SEQ ID NO: 539337 - DNA, 201 bp, Homo sapiens
tggacagagtcctgatatccagggatgcctagccccaggcctgtctgtgcctttcaccagagttttgggagcacttaaacctccaccccagcatttcccasgctgcgctctgtggatcattagggtcctgaaagatagtaacgaattctgcaaaaagagggtttcatagccaagtaagtgcaggaatgtcacatcctaaat

SEQ ID NO: 539338 - DNA, 201 bp, Homo sapiens
tgtctgtgcctttcaccagagttttgggagcacttaaacctccaccccagcatttcccaggctgcgctctgtggatcattagggtcctgaaagatagtaaygaattctgcaaaaagagggtttcatagccaagtaagtgcaggaatgtcacatcctaaatctcccatttggggatacagggtacataatgagaatattaat

SEQ ID NO: 539339 - DNA, 201 bp, Homo sapiens
catttggggatacagggtacataatgagaatattaatgtatttataaatgtttcaatttgttaaaccaagtcagtgtttcccagcctaagttaacaatgcyatcttttattctcagtataccactgccatctcagaggacattactgctcaggagaaaactgtttggcaaattccattttaccttcatgtcatctccaaat

SEQ ID NO: 539340 - DNA, 201 bp, Homo sapiens
caaatagagggagagaacttgattttatggaacaaatactagacttcaggtcagaagacttgtgacttagtcctagctctgtcacgtaactaatggtatgytgttgggcaaatcattttagctcaagcctcaatctcatctcccaggaaggagacacgttttaggatagccataccccattctttgaaagagctgggcagt

SEQ ID NO: 539341 - DNA, 201 bp, Homo sapiens
atgtctactaaaaatacaaaaaaaagctggatgtggtggtgtgcacctgtaatcccaggtactcaggaggctgaggcaggagaattgcttgaatctaggargcggaggcttcagtgagccaagattgtgccactgcactccagcctgggtgacagagcgggactcagtctcaaaaaaaaaaagtctgctaaaataacaact

SEQ ID NO: 539342 - DNA, 201 bp, Homo sapiens
tatttgttgaaaactcatattcatgcttaataatggcttacattttataaactgtctttatttttatctcatttcatccttatagtaaatctatgatgtgrtattatccattcccctctttcagatacagaaactctgagaagatgttaattaacctatccaacatcacctagctagtaagtggcagagccagtacttgaa

SEQ ID NO: 539343 - DNA, 201 bp, Homo sapiens
ctgtcattgccacccattccgctcccaccctctacttggtcaactcatgccaatcttttagatgtcatctttgatgtaactttattcaggaagctctcttwatcatccctgttccttctatgtgctacttcaagcacccgttatttcttccagacttagaatataccatgtctatttttaaatttgcttaattgcttgtat

SEQ ID NO: 539344 - DNA, 201 bp, Homo sapiens
atttcaccataaaaatgcaaactggaataaacatcatctttcctaatgcaaatgttacagctatttttaagtatttctgagtttcactttgaaaagcaaaygactataaaattaacaagtttgcagccttaaatctgtttgagacattccatgtaaaaataatttggtgaaaaaaatttttttttttttgtttttttgttt

SEQ ID NO: 539345 - DNA, 201 bp, Homo sapiens
aacagggatatttacttgactagatcctacaagtgaactgagctggtgtatgggcttaacttggctgcagatttgcatgtatgcaatggcaataaagtaargcactctgattttaagacatttatttcaatatatctaagacttcattgcattagaatatcaaattggctccttttctcctttataacagctatagtttgt

SEQ ID NO: 539346 - DNA, 201 bp, Homo sapiens
tacagtcattaccaccatctaattccacagcattttcaccactccaaaaagaaatctcatgctcactaggcagtcacttctcattcccccttaattgctgrtacctgccaatcaccaacctattttatctttatggatttgtctattctggggatttcacataaaaggaataatacaatatgtgggcttttgtgtctaggt

SEQ ID NO: 539347 - DNA, 201 bp, Homo sapiens
gatcaaggatagaacacggtggaaacatccataggtactggcagttggaggagcaataactttcaaaaagattattaaggagaaggtagagaaggaggagaaaaaaaaaaaagccaaaggatgagaaagtttcaagcagttaacagtgtcaaacagtgcagaatgctcaagtcacatacgatggacaataggccagcaaca

SEQ ID NO: 539348 - DNA, 201 bp, Homo sapiens
cccccttaattgctggtacctgccaatcaccaacctattttatctttatggatttgtctattctggggatttcacataaaaggaataatacaatatgtggscttttgtgtctaggtttcacttagcacagcattttcaaggtttatccaaattataacgtgtatcagtatttcattcttttttatggctggataatagtcc

SEQ ID NO: 539349 - DNA, 201 bp, Homo sapiens; identical to SEQ ID NO: 114412

SEQ ID NO: 539350 - DNA, 201 bp, Homo sapiens
ctgcagcctcaacttcttgagctcaagcgatcctcctgccttagtctcccgagtaggtgggactacaagccggcaccatcatacctggctacttaaaaaawatttttttttttttgtagaggcaaggtcttgctatgttgcccaggctggtctcaaactcctggcctcaagcaatcctctcaccttggcctcctaagtgct

SEQ ID NO: 539351 - DNA, 201 bp, Homo sapiens
gcagcctcaacttcttgagctcaagcgatcctcctgccttagtctcccgagtaggtgggactacaagccggcaccatcatacctggctacttaaaaaaaatttttttttttttgtagaggcaaggtcttgctatgttgcccaggctggtctcaaactcctggcctcaagcaatcctctcaccttggcctcctaagtgctgg

SEQ ID NO: 539352 - DNA, 201 bp, Homo sapiens
cggtgttatgaataaaagtgttacctttggggttggacgttaccgagtttaccagctttcccatttcctccctatgcagtcttcttttttttttttttttttcttgagacacagttttgctcttgttgcccagggtggagtgcaatggggcaatctcggctcaccacaacctctgccacccggattcaagcaattctcctg

SEQ ID NO: 539353 - DNA, 201 bp, Homo sapiens
gaagggaattcctgtgagtgctcagatttcggccatttgtttccattcagggagaaaccccgttgcacacagcgtgtcggcatggcctggccaacctcacrgcagagctcctgcagcaaggcgccaacccaaacctgcagacggaggaagctctgcctctgccaaaggaggccgcatccctgaccagcttggcggacagcg

SEQ ID NO: 539354 - DNA, 201 bp, Homo sapiens
aaaaagacatggagtcaaatttttattgtggttgtattttcaaaagaacttacctttatctccaagtgactgaatgactgagtgggggaaggaaggtttgycaggagggttcttggagtggcattttattaagatgctttaaaaagtaactataagatttcagcacgctgggatgttatctccgagggcaataaggtgaca

SEQ ID NO: 539355 - DNA, 201 bp, Homo sapiens
aatatctgaagtagagtaacatctttattttatagaggaggagagaggggcacagagagctcaagtaatttggcccctaaaatgtaatgggtctccactcrggtcttttttacctcattgtttatcttgctctgtccaccacattctgcctttgtggttagaaaagagttttggtggaggctgctggcagggaaaacaatg

SEQ ID NO: 539356 - DNA, 201 bp, Homo sapiens
ggagggttcttggagtggcattttattaagatgctttaaaaagtaactataagatttcagcacgctgggatgttatctccgagggcaataaggtgacatgkttatgtgttctaaaaagtcagaatggacagacactattttcacatttaatttccctgagaaaatattgaatgattgtgagtgaatatgattagagacaga

SEQ ID NO: 539357 - DNA, 201 bp, Homo sapiens
aagccttcacagcagtggttctcagactaatggttttctggttttctttctttcttttttttttttttttttttttttgagacagagtcttgctctctcayccaggctagagtgcagtggcaccatcttggttggctcactgcaaactctgcctcctgggttcacgccattctcctgcctcagccctgggactacaggcgc

SEQ ID NO: 539358 - DNA, 201 bp, Homo sapiens
ggtgttatgaataaaagtgttacctttggggttggacgttaccgagtttaccagctttcccatttcctccctatgcagtcttcttttttttttttttttttcttgagacacagttttgctcttgttgcccagggtggagtgcaatggggcaatctcggctcaccacaacctctgccacccggattcaagcaattctcctgc

SEQ ID NO: 539359 - DNA, 201 bp, Homo sapiens
accacgcccagctcatttttgtacttttagtagagacggggtttcaccatgttggccaggctggtctcgaactcctgacctcaagtgatctgcctgcctcrgcctcccaaagtgctgggattacagtcatgagccactgcggcccaccctaaaatcagtttttaacaaggaatttcagttacaatgaagaatgttccaaca

SEQ ID NO: 539360 - DNA, 201 bp, Homo sapiens
tggcccccttggagtgtgggaagtgtgggagccgaggttattcaggaagccttcacagcagtggttctcagactaatggttttctggttttctttctttcttttttttttttttttttttttttgagacagagtcttgctctctcacccaggctagagtgcagtggcaccatcttggttggctcactgcaaactctgcctc

SEQ ID NO: 539361 - DNA, 201 bp, Homo sapiens
agtgtgggaagtgtgggagccgaggttattcaggaagccttcacagcagtggttctcagactaatggttttctggttttctttctttcttttttttttttytttttttttttgagacagagtcttgctctctcacccaggctagagtgcagtggcaccatcttggttggctcactgcaaactctgcctcctgggttcacgc

SEQ ID NO: 539362 - DNA, 201 bp, Homo sapiens
tctgttaaaccctaataaaaaagaataaaagataaaagtttataaagatactgattgaccaagtgggaagagaaagaatatgactgttagctcagcaaagyataacaaatctgagtccacaaggaaagtattatatttacttcttggtgaagtaaagcaatttgcttctagcaaaatgatctgtttatggcctctctgtag

SEQ ID NO: 539363 - DNA, 201 bp, Homo sapiens
ggtccggctaatttttgtatttttagtacagacagggtttcaccatgttggccaggctggtctcgaactcctgacctcaagtgatcctggtttgcctactrtgaaactacactttcatatggggtcatacagtatgtagtcttttttgcctggctcctttcacgtagcatattgcttttgagatacatctgtacctcatgt

SEQ ID NO: 539364 - DNA, 201 bp, Homo sapiens
ctcgtggccacatcctttattggaagatgctacaggttgtccacagttctctccagagcctcggggcccccgtatgtctgtggggactttgtgaacagatktcctgccagcggtctgttctgcccttggctgtcctccgccctccgtctgtggctgccgggctgggccgggtgggaagtagccctgcgcgtgcttttgttt

SEQ ID NO: 539365 - DNA, 201 bp, Homo sapiens
acaggcacatgccactacgcttggctaatttttctatttttgtagcgattgggtttgccatgttggccaggctggtctcaaacccctggcctcaagtgaamtgcccgcctcggcctcccaaagtgctgggattacagtcaggagccgctgcgcccggccactatgtatttgtgtcttagtttggaatatattttaagctta

SEQ ID NO: 539366 - DNA, 201 bp, Homo sapiens
gttaaccagctgtggggccagttatgatccctaacacagcaccagggaccatgaatatacatctgtgagacgtcccgtatggagagtcccatatccactcrtatgtcttatcgatcagtgattagactgggcgcccagagttctggggaggctgagacttagaagtcagggtcctaaccagagcagctaagcagcacctag

SEQ ID NO: 539367 - DNA, 201 bp, Homo sapiens
tgaaggaggagaatcgcttgaacccaggagacggaggttgcagtaagccaagattgtgccactgcactctagcccaggcgacagagtgagactctgtctcaaaaaaaaaaaaaaaattgtttatctttgtttttctcagtaactcagggctccagtgacaggtatgtcagagtgcacttaccatcgtgcagcgcccagcgc

SEQ ID NO: 539368 - DNA, 201 bp, Homo sapiens
gattagagcaaccatcaactaagagtctccagattaaccatcaactaggagtctccagattagagtaaccatcaactaggagtctccagattagagcaacmatcaactaagagtctccagattaaccatcaactaggagtctccacattagagcagccatcaactaggagtctccagattaaccatcaactaggagtctcc

SEQ ID NO: 539369 - DNA, 201 bp, Homo sapiens
ggaggcggagctgggtcccaaagtcgtagggaatcggcctcgtgttcatcagtctttatgcctctgtagggctggaggaggttacggtccctgaccaaggwccccgccttcctggggcccggcatgacagatgataggatcgcccagaaacactagaaacagcgggtcttccagtgtccgtgtgctccttcctctgaattg

SEQ ID NO: 539370 - DNA, 201 bp, Homo sapiens
aagattttattcttgctcctagcctctccttcgtgatgttttgaaagtgtgttgtgaggtggggtgcggtggctcacgcctgtaatcccagcactttgggaggctgaggcgggcgggtcatgaggtcagaagatcgagaccatcctggctaacatggggaaaccccgtctctactaaaaaaaaaaatacaaaaattagctg

SEQ ID NO: 539371 - DNA, 201 bp, Homo sapiens
ctctactcactgggcgctaatttacaaacttgtttgtgtagctccctgggaagctgaatgaagcggatcataacggagatctggcattagatctagccctytcacgacgactggagagtattgccaccacgctggttagtcacaaagctgatgtggacatggtggacaagagtggctggagcttgttacacaaaggaatcc

SEQ ID NO: 539372 - DNA, 201 bp, Homo sapiens
cttagtagccggaatgactgatgtgtaggttttaaaattttttaagttgagaaatgtggaagaaactggtagccttttttttttttttttttttttttaawtaaataagagacagagtctcactctgttgcccaggctggtctcaaactcctagtcctggcctcccaaagtgctgggattacaggtgtgtgccactgtgcc

SEQ ID NO: 539373 - DNA, 201 bp, Homo sapiens
aactgagaccacagtagatgattccctctgtgttgaatccctccccacctgcgcgacctcagctctcttgcagcccaagctctacgtgggaaagactgtgkcttggaaacggcagctgctctagaattctttggctcgtggccacatcctttattggaagatgctacaggttgtccacagttctctccagagcctcggggc

SEQ ID NO: 539374 - DNA, 201 bp, Homo sapiens
gattcatacaggccaagtgatgagagggggagtcaccaaggcttcagccccaagggcatctccagcctcaggccggcaggtcctatgtccttgacacaaaygcttcttgctgaaatcctccctagtgatgctgcgagtgctgttggtcccagttctgtgtagcttgccctgccccatgaagggccaccagccaagggccct

SEQ ID NO: 539375 - DNA, 201 bp, Homo sapiens
cctgaaattcccagaagttacagatgccttaaagactttctttggaagatcattgcctgtactattccttttttgtgtggcataaataatatattaacctrttacaactgacaacattggttttctgcagctagggagtcttgagtcgagactgctcgccttgatgacttgctcttttttggcagatgtgtggagttggct

SEQ ID NO: 539376 - DNA, 201 bp, Homo sapiens
gtcttgagtcgagactgctcgccttgatgacttgctcttttttggcagatgtgtggagttggctgttacgacatccctgtgtgatcccagaggaggggcastagctgggcagaaactgcaggcacacatttgggtggatcacctggcttccagccccttcggggtggtgctcagtgtggggtgatggtatcatagaggacc

SEQ ID NO: 539377 - DNA, 201 bp, Homo sapiens
agacacgcacaagtgagaaggcggttgtgaggggggattgtgagtgaaaaatcattctttttaaacatctttagtgttgcatatattaagaagttaaagtkagctaaaaaaaaaatgtgtcattgaaaaagggtaaagagaaagaaccaggttgttgtcagtatagagtgtctcaaaaagattgtatgtgctgttgacact

SEQ ID NO: 539378 - DNA, 201 bp, Homo sapiens
ttagatccagtggaaaactgctggctttgagaagctgagagggtctggctgttgtagtaagatgttgaggaagcgggaaaagccgagcctggatgagatcrgggcttgtttcccaggcatgcacacgatcgcagcccagctgctgggctctggagccgccatcaatgacaccatgtcggatgggcagacgctactgcacat

SEQ ID NO: 539379 - DNA, 201 bp, Homo sapiens
caaattaaacataacttgtttatacttcccaagtctgtcccacaggacctagtgcacgaacttgcacacagcaaattttaattagtgtttgtaaaataatsagtgatacagattaaagtaattatcaatttattatcaaccgtatcttatctgaaagtggatttaatgctatacatagagctcagacttggtaataaaact

SEQ ID NO: 539380 - DNA, 201 bp, Homo sapiens
aagtacagtaaactgcccacattaaaagtgtgcaattggataagttttgacatacgaatacacctgtgaagccactgccacaatcaacataaacatttctrtccttgctgggtgtggtggctcacgcctgtaattccagcactttgggaggccaagttgggtggatcacttgaggtcaggagtttgagaccagcctagcta

SEQ ID NO: 539381 - DNA, 201 bp, Homo sapiens
cattccagcctgggtgacgtagtgagaccctgtctcaaaaagaaaaaaaaaataatgttaattctttgtcatatgtttcaaatattttccccaatttattygacatatctttagtaggtttatttcctcactcactgcccactgcgaaagtttagtcagatgttgcccagactgctgagtcaccttttttttgagacggag

SEQ ID NO: 539382 - DNA, 201 bp, Homo sapiens
tgggattacaggcgtgagccactgcacccggccgagtccccatttttaatgactgtgtaatattcctttaagttgggtatactgtcatttactttattagsctcaaattttagggatcccttgagaaagtctaagcatgtcattctatgctttttcagttgttctctctttctttaaccagatgctaatcctgaggtgacg

SEQ ID NO: 539383 - DNA, 201 bp, Homo sapiens
taaagcttttgctattctcttttctttcactggtctgttacctgaaattacataatcgtataaactgaaaaattaaatatgaaataatataatccaatgtycaaactttcagctttccttccctttctgtttcccttgacattttactctattttctgatatatcaagttgaatgaaatccttagtcatagtctctttgtt

SEQ ID NO: 539384 - DNA, 201 bp, Homo sapiens
gtttttttctgctggaatgctctgatttcatggctgaggttagagtgactttgtcagacattgctgtggtgtgctacaggtttggagaaaccaatggtacrgaaaactgaggcttagaaatataatgctgttgactgggtgtgatggctcacacctgtaatcccagcactttgggaggccgaggtgggtggatcccgaagt

SEQ ID NO: 539385 - DNA, 201 bp, Homo sapiens
gagatggatctgctgcctgcgtagctgtcacaggagcaagatctgtcaagtaacatagtgggacaaggacaagcagttgaaagcatgttaaagaaacttgyagttcaacatggtcttggctgaccttttgtttttaggtcatctttaccaagaaaactaccaagaagcaagagaatggcggcgtttcctcaggagccttct

SEQ ID NO: 539386 - DNA, 201 bp, Homo sapiens
aatttttatttaatttttaaaaattttacctgtcaatgatttgaagctcatttttaaaaattgttttctttttgtttttgtttttaaagagacaggaagayggggtttcccaggctggagtgcagtggctattcacagatgtgatcatagtgctttatagcctcaaactcctgagctcaagtgatccttcctccccagcct

SEQ ID NO: 539387 - DNA, 201 bp, Homo sapiens
gtagctgggcagaaactgcaggcacacatttgggtggatcacctggcttccagccccttcggggtggtgctcagtgtggggtgatggtatcatagaggacyacggcgcttatcagcattgtttctttggagtctgtgtaatggaatgtatttttcaaatactgatatttgcattttctgtaacaattccttataataaaat

SEQ ID NO: 539388 - DNA, 201 bp, Homo sapiens
ccggcttcaagagattctcctacctcagcctcccgagtagctgggattacaggcatgcaccactacgctcggctactttttgtaattttagtagagagggrgttttgccataattggccaggctggtttcaaactcctgacctcaagtgatccgcctgcctcggcctcccagagttctgggattacaggtgtgagccacca

SEQ ID NO: 539389 - DNA, 201 bp, Homo sapiens
tgggactacaggtgcccaccaccacgcccagctaattttttgtatttttagtagagacggggtgtcaccgtgttagccaggatggtctcgatctcctgacytggtgatccacccacctcggcctcccaaagtgctgggattagaggcgtgagccaccgcgtcctcccagaacattttaatcttaatgaattaacttgtcaa

SEQ ID NO: 539390 - DNA, 201 bp, Homo sapiens
aggatttcaatggtggaggcagggtgggagcaccgaggaagtggagatccacttgtgttctctgtcaggcattcaactgggactttgaagtgagctgtctytcttaattttcaaaaccacagaggggtatgagaaatgttttacattttacaaaggagaaaatgtaggccgagaaagaattttacccccgaggctatctaa

SEQ ID NO: 539391 - DNA, 201 bp, Homo sapiens
atgtagcagtaattagaagccttcattgtcaaagccttattgtacacgtagggggaaagaaggcccagagacggggagttacctgtcaggaatcgtgcagsgacattgttggatctgggcagcctggttctcctcttcaccccattattggagaacagtattccttatttgacctttgtttattgagtgactgcagtgtgc

SEQ ID NO: 539392 - DNA, 201 bp, Homo sapiens
cctgtctatgtagagcagtcagacagtgcctgggatagagtgagagttcagccagtaaatccaagtgattgtcattcctgtctgcattagtaactcccaamctagatgtgaaaacttagttctttctcataggttgctctgcccatggtcccactgcagacccaggcactctccggaagcctggaaatcacccgtgtcttc

SEQ ID NO: 539393 - DNA, 201 bp, Homo sapiens
gtatttgaggccagggaccaaggacagcagacccggccacagcagacgctgttggattggatgaggctcctgctttacatttgtaatcagcatgcctataygccaggtccaagcgtggcgttttttaaaatgtccccattcctttcagtggctgtgacgtgaacagtcccagacaaccaggcgccaatggagaaggagagg

SEQ ID NO: 539394 - DNA, 201 bp, Homo sapiens
acggagtggagggaacgtcttgggaaaggggagagcttgacctccatctaggtttcttttatctggagaaaaagaacacttttgaactatgtaatgcttcrccctgaaaggcaagctaacgctaacttcccaggtgacagtagcaggaacaaggaagggtaatgtttccatgacagacacttgcttcccttgggacaagtc

SEQ ID NO: 539395 - DNA, 201 bp, Homo sapiens
caccgtaagaatcccatgagaagatgtatttgaaagcagcgcatgccatgtgaattaaagccagaatttatcaatagaaaacatttctagcaacatactayaaagatgactcaccagaattcagtgctagcatataggaataattcttcgctgtaattttttcttttgcagatgtatgttgatgaatactcatgtgtttat

SEQ ID NO: 539396 - DNA, 201 bp, Homo sapiens
gccggctcaacaacatccgggttctcctgacagagtgcacagtggacgccgaagcctttaatctcaggtgagcgcgttgggcccgagtaggccccgcggcrcctggcctgctgctcagagctgctggttgctggtgcctcccatcagccccagggaggagctgcaaaaccggccgctggggcacctcaccagcttcgggta

SEQ ID NO: 539397 - DNA, 201 bp, Homo sapiens
gcctgggcaacatagtgagacctcacctctacaaaaatattttcaaatgagccaggcagggtggcatgcgcctgtacccctagctacttgggaggctgagkcaggaggatttcttgaggctgggaggctgaggttgcagtgagccatgatggtaccactgcactccagcttgaccaacagagtgagaccctgtctcaaaaa

SEQ ID NO: 539398 - DNA, 201 bp, Homo sapiens
aatggtttttctgtaagttactcagcctttgttgagtcaggatctctctctgtcacccaggctagagtgcagtggcacagtcatagcccactgcagtctcraactctggggctcaagcgatcctcccacctcatcctcctgagtagctggaaccacagctgttgtcaccgctccttgctaagtttttttttgtagagatgg

SEQ ID NO: 539399 - DNA, 201 bp, Homo sapiens
acagtggggagagacaggcaggaaaacaagctccgacatccccggtagccatgggatggcgatgcacaggacctgcccagggggcacagctggtctgtggyggagtcgggttgaaggacagcatttgtgacatctggtctactgcaccttccctctgccgtgcacttggcctttgaaaagctcagcaccggtgcccatcac

SEQ ID NO: 539400 - DNA, 201 bp, Homo sapiens
accttgcttcctggaaaagcaagagcccaggcacacgtcgttatctgagggcgttcagctcgcagaacagttctgttgggccctccgggtgtgagttacaragccctgttgtggagtctggggtgtctgattttagacactgtcccatctcaagtgcatgtagcgctctgaaaccatccatacccttctccaaacaggcct

SEQ ID NO: 539401 - DNA, 201 bp, Homo sapiens
cgcaatcttggctcaccacagcctccacctcctgggttcaagcgattcttccacctcagcatcccaagtagctgggattacaggcacccgccatcataccyggctaatttttgtagagatggggtttcactgtgttggctaggctggtcttgaactcccaacctcagctgatctgccggcctcggcctcccaaagtgctgg

SEQ ID NO: 539402 - DNA, 201 bp, Homo sapiens
taacttcttgttttcattaaattgtttacactttgtcacaggttgtgctgatacagtttgatgttctgttttgcatagagtattctgtttcttctttgacmattaataatgttctactgtgttaacagcagtttgtaataatttgaaataataaatactctcttaatcttgtgatctaatatccattggttatagcttggt

SEQ ID NO: 539403 - DNA, 201 bp, Homo sapiens
ttctttttttttttttttgagacagagtctcactctgttacccaggctggagtgcaatagtgatctcggctctctgcaacctccacctcccaggttcaagygattctcgtgcctcagcctcccgagtagctgggattacaggcacccaccaccacacccagctaatttttgtatttttagtagagacagggttttaccatg

SEQ ID NO: 539404 - DNA, 201 bp, Homo sapiens
actagcctgggaagaccctgtctctgcagcaaattaaagaaaaaattagctggacaggatggcatgtgcttgtagtcccagcttgttgggaatctgaggtkgatggatttcttgagccaagagtttgaggccacagtgagctatgatgtcaccactgcattcactgcattccagcctgggcaacagaacaagaccctgtct

SEQ ID NO: 539405 - DNA, 201 bp, Homo sapiens
ttacaaataggtatgacagttctagaaagcagttaggcagctgagctgtgaaatattcctacttttttttttttcttcattatctgacttctgggatactrtcgtaggtcactcagacagtgttaatgttcctcagttttattttaattgtgaaatatcgactgccaccaaaatgaatgagagtggcaaaaacgaaacatc

SEQ ID NO: 539406 - DNA, 201 bp, Homo sapiens
aaacccgtgccctcaagtgatgcgcctgcctcagccttccaaagtgctgggattacaggcgtgagccaccatgcctggcctgagctgctcttgatcttccaaaaaaaaaaaaaaaagccttcttcagtattgctttaacttgatgattgactagagttttgttttcatagactaaaaattctacatgaattgtggtaaccg

SEQ ID NO: 539407 - DNA, 201 bp, Homo sapiens
agttacctaattttgatcattgtactatggttatataagctgtattaataataggggaagatgagtaaagggcatatggggatgctctgcagcttttctcraagtatgaaagtatctgaaaatgtaaacaaagtagaaatttgcttttttatttcttactaaggtatctttaaatatatgaagtgatatgttaattagctt

SEQ ID NO: 539408 - DNA, 201 bp, Homo sapiens
tgcactctgcagtggaaagggcatagtttcccaaactgtgtactcggggagctgtgtgctatttaaatttttaagagaagcacagcaatattcaacatctkttggctactgtgtgaactactaggttaaggctgttcagtttcagtattaaatcatactgtgttccttcgatgacatccacgggaagtttagaatatgctc

SEQ ID NO: 539409 - DNA, 201 bp, Homo sapiens
gcttgcatagtaagaggatttacttcccagctcttcatcttgctgtcatgcacggccggctcaacaacatccgggttctcctgacagagtgcacagtggaygccgaagcctttaatctcaggtgagcgcgttgggcccgagtaggccccgcggcgcctggcctgctgctcagagctgctggttgctggtgcctcccatcag

SEQ ID NO: 539410 - DNA, 201 bp, Homo sapiens
aagtgaatttattctcagtgtattttgtagatgaggggaagagtcacggcaggagtgggaaagcttgtaaatcacttgaacctcattttgtttgaaatatsaagccctcccaggaaatccctactgaaagtagtttaaaaaagttttttgataatctaggtttttgtttattacttgtacaggtcaagattaaccgggcaa

SEQ ID NO: 539411 - DNA, 201 bp, Homo sapiens
agccgttgctctttttgtaatgtggggatctcgccggttttggaatgctagcactgatttgatgaaaaggaagtttttatagtaagcatcaggaaaatctyttctttttttttctaccacggagggcacactgaagaaaatactcttaatttttttttttttttttttagaagacagcctcactgtgtcaccctggctgga

SEQ ID NO: 539412 - DNA, 201 bp, Homo sapiens
tgacagaaagaatcagaatgtctcgagtgcctgtgctgtgtcatcacccacagtggggagagacaggcaggaaaacaagctccgacatccccggtagccaygggatggcgatgcacaggacctgcccagggggcacagctggtctgtggtggagtcgggttgaaggacagcatttgtgacatctggtctactgcaccttcc

SEQ ID NO: 539413 - DNA, 201 bp, Homo sapiens
gtttttcgggtaaggaaaagtaaccccataaagcaaaaccagatgtctcatcccagcccagagccctctgcgcagctgtgtggctgctgcattcccattcrctcacctctgtggtcttggcagaaatggagtcaccatggggttgtctgaaccttaacatgggaccacatattttatcaccatttttctcttggtcttgag

SEQ ID NO: 539414 - DNA, 201 bp, Homo sapiens
ttcatgttcattcttgggagggggtttcctaagactgagggaaggtctccatcgtgacctctccagtggtcagttcagcttgcagatgaagctcaggaggyactctgaaaagggaactaatattttgctttgcacttgttgctgtaggtggataacaagggccggaatttccttcatgtggcagttcagaactctgatatt

SEQ ID NO: 539415 - DNA, 201 bp, Homo sapiens
cccagatggaatcatactatcttctaatttgcaaggttttttaaacttacttgtcatcaacatctttccatgttaatcgataaatatttatcatcttactmtactgtttgtacctattacaattttttacaaccaaacccctttgccttcaggctttcctattccaagcagtagacacccgtagatagtacagcggccatc

SEQ ID NO: 539416 - DNA, 201 bp, Homo sapiens
tgggagtggaaccccgactctggtatttgaggccagggaccaaggacagcagacccggccacagcagacgctgttggattggatgaggctcctgctttacrtttgtaatcagcatgcctatacgccaggtccaagcgtggcgttttttaaaatgtccccattcctttcagtggctgtgacgtgaacagtcccagacaacca

SEQ ID NO: 539417 - DNA, 201 bp, Homo sapiens
agccaggatggtctcgatctcctgacctcatgatccacccgcctcagcctcccaaagtgttgggattacaggcgtgagccaccgtgcctggctcaaacttwatggttttcaaactttctttttgtattttctatttttgagatggagtcccattctgttacgcaggctggagtacaatggcgccatctcggctcactgcca

SEQ ID NO: 539418 - DNA, 201 bp, Homo sapiens
ggcttgtctcgaactcctgagctcaaattatccacccaactcagcctcccaaagtgctgggatgacaggcaatgagccaccgtgcccggctgtcacagttstttatcttgttttcagtcctggtgtttggtttatttagaatttcaaatagtatagctgttgacatgagagagtttgttcatttttggaaatggattttaa

SEQ ID NO: 539419 - DNA, 201 bp, Homo sapiens
tgtgtataactgatatttaaggaaatgtgtatggtttcctagagagcagagagggggaagatggctgaaacagagctttcaggatctcctccatttgaagscttagatagaggaatcagcaactttgcagtcatttttttttctttttctttttctctcttttttttttttaagacagggtctctctctgtcacccaggct

SEQ ID NO: 539420 - DNA, 201 bp, Homo sapiens
attgctgtttgtaagcagacagtattccccacgggctggtaatgtctcagccataagcactcctccattatactgtgaaatggtatggcaattgaagtagygctggtaagtgctcataagctgcctgagtgcattagtgatcctttgggtttcccccgacaaaagctgccgggtgggggagcatctgtaattttgtgacta

SEQ ID NO: 539421 - DNA, 201 bp, Homo sapiens
ctcctgctgggtgtggcccagttcctaacatgccacaaactagtacccgtccacggcctggaggtcggggacacctgctctaagatagtatcattagtctyattttccatgtgagaagactgaagcacagagaggaagtaagtaacttgcccaaggtcacacagctagtaaatgggtaagctggggtcaaacccagtcagt

SEQ ID NO: 539422 - DNA, 201 bp, Homo sapiens
ctggtttgcctactatgaaactacactttcatatggggtcatacagtatgtagtcttttttgcctggctcctttcacgtagcatattgcttttgagatacrtctgtacctcatgtgtctggtatcagtcccttctgttttattgctgagtgctcttccattatatggatgtgtgacagttgtgtctgtttaccagctggac

SEQ ID NO: 539423 - DNA, 201 bp, Homo sapiens
gaataggtataaagtcatttagtcattaaagaattacatgaagagactgggcacggtggcttatgcctgtaatcccagcactttgggaggccgaggccagrggatcacctcaggtcaggagttcaagaccagcctggccaacatggcgaaatcctgtctctgctaagaatacaaaaaaattagctgggcatggtggcaggc

SEQ ID NO: 539424 - DNA, 201 bp, Homo sapiens
ctcccaggttcacaccattctcctatctcagcctcccgagtagctgggactacaggcgcccgccaccaagcctggctaattttttgtatttttggtagagrtgaggtttcaccgtgttagcaaggatggtcttgatctcctgacctcgtgatccgcccgcctcggcctcccaaagtgctgggattacaggcgtgagccacc

SEQ ID NO: 539425 - DNA, 201 bp, Homo sapiens
ccaccaagcctggctaattttttgtatttttggtagaggtgaggtttcaccgtgttagcaaggatggtcttgatctcctgacctcgtgatccgcccgcctsggcctcccaaagtgctgggattacaggcgtgagccaccgcgcccggccctacttctgaaatttatctgtttattgttttacttattgaacaaatgtccca

SEQ ID NO: 539426 - DNA, 201 bp, Homo sapiens
ccgggctggcagttggcagagttgccagagtagcattgcgggcgccttggctgccaggccctgctgcggttgtcctcacgtgccaggaagcagagtctgtygttggcgctcctctcatacttcctttctttgcttccacagtcgtcactgcggacgtcttctttgccataaatgctcgaccaaggagattcctattataaa

SEQ ID NO: 539427 - DNA, 201 bp, Homo sapiens
tatgaatttattgagcatcacctgctagccatcaagaaaagttgcctggatacatccttagcctcttgtcaagcaaactggctggtccaccttttattatrctctgcataacctaagtctgctaggagctacctaacctacttttcatccagcccatttttgttttagcaactaaaatacaatgtttaaggccgggcacgg

SEQ ID NO: 539428 - DNA, 201 bp, Homo sapiens
tggagtgacttgtttgtggaagttggaattgattttgtaactgccatctttcagggggtgggaggaggactccctgctctcatgtgaggctcccttggggygcattcctgttagaggtatgcatggctggtgttttgccacctcactgggaggcacagtaatgctggaggagagtgaggctcggaacgtcagccttctggt

SEQ ID NO: 539429 - DNA, 201 bp, Homo sapiens
aaataaaaaaaattagctaggtgtggtggcgggcgcctgtaatcccagctactcgagaggctgaggcaggagaatcgcttgaactcgataggcggaggttrcagtgagccgagattgcgccactgcacggcagcctgggcaacagggcgagaccctgtctcaaaaaaaaaaaaaaaaaaggcatgctaatgtcatctaggt

SEQ ID NO: 539430 - DNA, 201 bp, Homo sapiens
tcatgaaaacattagctgttcaccgtaaaactctctgagcctctgcctggcactcgtgccccacagcactctgtccacattttcctggtggcctttaatcrtctcccacattgtttatgttggctatgtggtccccattaattctgtactccctgaaaacatgtaccctgaggaagcctgatagaagtttgtgaataaagt

SEQ ID NO: 539431 - DNA, 201 bp, Homo sapiens
tgtcccataaggtagttaaaaacgatggctatgtgtagtcatttactgtactcattcttttaccaaacaaacctatagtttttcctattgaagtgtctgaraaactaacaagaaactctttgcctcctctccagttacaacattctggtttccatgttttaaaaggaaatactctttaattgagtggaatcaagtttttta

SEQ ID NO: 539432 - DNA, 201 bp, Homo sapiens
ggagtgcagtggtgcgatcttggctcattgcaacctccgcctcccaggttcaggcgattctcctgcctcagcctcccgagtagctgggactacaggcgccygccaccacacctggctaatttttgtatttttagtagagatggggtttcaccgtgttagccgggatggtcttgatctcctgacctcgtgatctgcctacct

SEQ ID NO: 539433 - DNA, 201 bp, Homo sapiens
aggtaggagattgcttgaacctgggaggcagaggttgcagtgagccgagatcgcgtcattgcactcccgtctggacgacagagtgagactctgtctcaagaaaaaaaaaaaaaactaacaaaaaacatttccatccttaaagctttcctcatgtctctttgcaatccatcccttttgccatccacttctgcagctaaatgc

SEQ ID NO: 539434 - DNA, 201 bp, Homo sapiens
atattggccagactgatcttgaactgacctcatgatctgcccgcctcagcctcccaaagtgctgggattacaggcatgagccaccagacctggctggttgkttttttttttttttttttgagacagggtcttgctctgttgtccaggctggagtacagtggcacaatctcggctctttgcagcctgaacctcctaggctca

SEQ ID NO: 539435 - DNA, 201 bp, Homo sapiens
gtcagtttccattttctattacctggaaagggccataaggaagcaggcagggcttaggtagcttggttacctaagttagaaagtaagagaatcatggttcrgatatgaattgaagtggttggtacatggatacctgttctttaaaaggaatgtgggagatgagtcaagggtgaggccgattgttctgcccatgccctacca

SEQ ID NO: 539436 - DNA, 201 bp, Homo sapiens
gtgtgtgtgtgttttgagatagggtctcgctctgtcccaccggctggagtacagtggcgcggtcacggctcactgtagcttcagtctcctgggctcaagcratccttctgcctcagcctcctgagtagctgggaccaggggcgctcgccaccacacccggctaattaaaaaggggtgtgtgtgtgtgtagacaaggtcttg

SEQ ID NO: 539437 - DNA, 201 bp, Homo sapiens
tgataaaggaatttaggcaaagttacagagatagctgtgactgacacccagttggttttggggggtgtgtgtgtgtgttttgagatagggtctcgctctgkcccaccggctggagtacagtggcgcggtcacggctcactgtagcttcagtctcctgggctcaagcgatccttctgcctcagcctcctgagtagctgggac

SEQ ID NO: 539438 - DNA, 201 bp, Homo sapiens; identical to SEQ ID NO: 356653

SEQ ID NO: 539439 - DNA, 201 bp, Homo sapiens
agagatgagggaaaatctgcacacctgtggcagaaactgctgttctcaagaaaatcctgtctgtgccttcaggaaggggttgggattgagttggggagtayttgagatcacttccttgagctgattcttgtccattttggccgctgaataatggtcacatataagcagatccgttttcaggttttgatactgggtcatggt

SEQ ID NO: 539440 - DNA, 201 bp, Homo sapiens
cgggctggcagttggcagagttgccagagtagcattgcgggcgccttggctgccaggccctgctgcggttgtcctcacgtgccaggaagcagagtctgtcrttggcgctcctctcatacttcctttctttgcttccacagtcgtcactgcggacgtcttctttgccataaatgctcgaccaaggagattcctattataaag

SEQ ID NO: 539441 - DNA, 201 bp, Homo sapiens
gagaccctgtctcaaaaaaaaaaaaaaaaaaggcatgctaatgtcatctaggtgaaattgtaaagagaaaagagcagggtgagcacctgtgatgttgcgtrtagtccaggacagcaatgatgaaagactgaattggggtgctggatgtggcaaagaaacacagatgtgaatgtacataagaaggaaggacttgagccacta

SEQ ID NO: 539442 - DNA, 201 bp, Homo sapiens
tttttttgtaaatagtatattgaacagaaaatttatcataaacttttgttagcttgatggaatttgatcagaaaaatacttttgacaacaacccaagcaamatggggaaaacattccatgtcctgggtattcattgaccaacacaatagtcactagccacatgtggctacttaaatttgattaaaattaaataaaatttaa

SEQ ID NO: 539443 - DNA, 201 bp, Homo sapiens
cactaagaaagagtggaacggtcaagtggccagtcactttgggagctttcctgtctatgggatgagggattagtgaatgccacctgctttccagcagccayggtgaacttgattcttcgttttccttgcagaggaggtggccaagttggagaagcacttgatgcttctgcggcaggagtatgtcaagctgcagaagaagct

SEQ ID NO: 539444 - DNA, 201 bp, Homo sapiens
aaaatgtaaacaaagtagaaatttgcttttttatttcttactaaggtatctttaaatatatgaagtgatatgttaattagcttataaccatttcatagtgyatacatatatcaaaacatgtcatacattaactctatataatttttgtctgttaaaccctaataaaaaagaataaaagataaaagtttataaagatactga

SEQ ID NO: 539445 - DNA, 201 bp, Homo sapiens
accgtacccagccgtcaaagccattcttgatcctgtaggactatcactaagaaagagtggaacggtcaagtggccagtcactttgggagctttcctgtctrtgggatgagggattagtgaatgccacctgctttccagcagccacggtgaacttgattcttcgttttccttgcagaggaggtggccaagttggagaagcac

SEQ ID NO: 539446 - DNA, 201 bp, Homo sapiens
tgtaaacaaagtagaaatttgcttttttatttcttactaaggtatctttaaatatatgaagtgatatgttaattagcttataaccatttcatagtgcatayatatatcaaaacatgtcatacattaactctatataatttttgtctgttaaaccctaataaaaaagaataaaagataaaagtttataaagatactgattga

SEQ ID NO: 539447 - DNA, 201 bp, Homo sapiens
ttgggagtgaggcacacaggtgtggggcgggctcaccagtgacgagaccgagcggaggccgtggcagtgagtgtgaactgagggctaaggagcggtgggtmtgatggtgccaggaacagattggatgtgggggaagcagccaaggaggcggagctgggtcccaaagtcgtagggaatcggcctcgtgttcatcagtcttta

SEQ ID NO: 539448 - DNA, 201 bp, Homo sapiens
ttggatctatagaccaatttggagagacctgacatcttaacaatattgagctattgagccttccaatccatgagcgtagtatataactctctgtttatttrggttgcctttcatttctgtcagcagtgtttttatagtttcagtgtgcatgcattgcacattttgttaagtttatctctaaatattttgtatgtttggtat

SEQ ID NO: 539449 - DNA, 201 bp, Homo sapiens
cccaaggaatggctctttaacattttgataggtaattgccagtttgcccttggcacgggttttgctggtttctgcttcagcaggagtgtgtgtgaagctcytatgctcccagctctgtcagcagggcaggccatcagcctctgtgggtgtcagaagacaagcaggctcggcccccataagggggatcttgattgtggcaga

SEQ ID NO: 539450 - DNA, 201 bp, Homo sapiens
ccaggctggtttcaaactcctgacctcaagtgatccgcctgcctcggcctcccagagttctgggattacaggtgtgagccaccacacccagcctaaaaagtttttttttttaaatataaaacaaatcctttaatttttcaagtgtttaaaaaaacaagtttatacttaagccagccttgaagataagcacaaaatttacca

SEQ ID NO: 539451 - DNA, 201 bp, Homo sapiens
gaccagcctgaccaacatggtggaaccccatctctactaaacatacaaaaattagccaggcatggtggcatgtgcctgtaatcccagctgctcaggagacytgagtcaggagaatcacttgaacccggaaggtggaggttgcagtgatccgagatcgcgccaccgcactccagcctgagcaacagagactgtctcaaaaaa

SEQ ID NO: 539452 - DNA, 201 bp, Homo sapiens
ttaaatataaaacaaatcctttaatttttcaagtgtttaaaaaaacaagtttatacttaagccagccttgaagataagcacaaaatttaccagtttatttwaaaaaaaaaaaaaaacgacaactcaagcacccactctgtgcatagcactattctaggtgcaataaacgggaatcttaaccttagaaatatgagtccactt

SEQ ID NO: 539453 - DNA, 201 bp, Homo sapiens
cacttctggttcacagaaaagctaatttccaccaaattaaagatgcaatgaactcagttcctgctttcccaaaaacacgaaagcagaattccttttcactaaaaaaaaacaaacaaacagttttccatgcaagggcagtttgcttctaataagtattaaaaaaaattttttttcctctagcttttctttaaattttcttcc

SEQ ID NO: 539454 - DNA, 201 bp, Homo sapiens
acttctggttcacagaaaagctaatttccaccaaattaaagatgcaatgaactcagttcctgctttcccaaaaacacgaaagcagaattccttttcactaaaaaaaaacaaacaaacagttttccatgcaagggcagtttgcttctaataagtattaaaaaaaattttttttcctctagcttttctttaaattttcttcct

SEQ ID NO: 539455 - DNA, 201 bp, Homo sapiens
cttctggttcacagaaaagctaatttccaccaaattaaagatgcaatgaactcagttcctgctttcccaaaaacacgaaagcagaattccttttcactaaaaaaaaacaaacaaacagttttccatgcaagggcagtttgcttctaataagtattaaaaaaaattttttttcctctagcttttctttaaattttcttcctc

SEQ ID NO: 539456 - DNA, 201 bp, Homo sapiens
ttcacagaaaagctaatttccaccaaattaaagatgcaatgaactcagttcctgctttcccaaaaacacgaaagcagaattccttttcactaaaaaaaaacaaacaaacagttttccatgcaagggcagtttgcttctaataagtattaaaaaaaattttttttcctctagcttttctttaaattttcttcctctcatatt

SEQ ID NO: 539457 - DNA, 201 bp, Homo sapiens
tcgctgttagtacatatattaaccgtgaggtgttaaacttttcttttgaaggtttggccagtttctaaaaaatgcacatttaaagagaagcatctaccackgctttaaaacaaaacaactctgagatgaacaatatgtgttatactcagagattaacaatctcaatcatacatactgattctttcagacatttaataacca

SEQ ID NO: 539458 - DNA, 201 bp, Homo sapiens
ctccaaaagagtgacacttctcaagtcgttcttctctatccgcaaggtaggataacctgaggagctggtgataggagttggattgttgggtgtgtcagctytcggatactgagtcgtctgggtggatggctgagacaacccttgggaactcctgctggcactaatgctgtcatccagttcaacccttttcatactatgaag

SEQ ID NO: 539459 - DNA, 201 bp, Homo sapiens
atgattgactagagttttgttttcatagactaaaaattctacatgaattgtggtaaccgggctggcagttggcagagttgccagagtagcattgcgggcgscttggctgccaggccctgctgcggttgtcctcacgtgccaggaagcagagtctgtcgttggcgctcctctcatacttcctttctttgcttccacagtcgt

SEQ ID NO: 539460 - DNA, 201 bp, Homo sapiens
gtcagctctcggatactgagtcgtctgggtggatggctgagacaacccttgggaactcctgctggcactaatgctgtcatccagttcaacccttttcataytatgaaggtgcaaaacagctaatattattgctacgagaaatattactgcacaagaaaccctaccctaatataaaacacgcgtagaagtggttggagctgc

SEQ ID NO: 539461 - DNA, 201 bp, Homo sapiens
ctaaacaggtctcctcatggaaagagctttgttttgaagttgtactcctgtcctaagatgtggctgttgagatgtcccatccgtgcaggatgagatccggytcctctgcctgtgtgtcagcgcctgacagtgcccggcttcgatggaagcggaggcagtgggctccatcgtaggaattctgtggcatgtacagttgagctc

SEQ ID NO: 539462 - DNA, 201 bp, Homo sapiens
tgccaaaacattgtccgcttggaatcccagcttacattcaaccttggacttcgaatgccaggtgaagtgcaggaaatttgtctcactgggtactaacagaytaaaggacagagcgtagtgaataataaggtcatttgtcacataataaagttctgcatcaagaccgatcagccggtgcacctcatcctcactcaggtagag

SEQ ID NO: 539463 - DNA, 201 bp, Homo sapiens
agtgcagtggcaccatcttggttggctcactgcaaactctgcctcctgggttcacgccattctcctgcctcagccctgggactacaggcgcccgcctccaygcccggctaattttttttttgtatttttagtagagacggggtttcaccatgttagccaggatggtctcgatctcctgacctcatgatccacccgcctcag

SEQ ID NO: 539464 - DNA, 201 bp, Homo sapiens
cagtttttctctattttggtgtactgtggttttgttgttacagtagaaatctgatttttttggtgtggggggtgtactatgatttggctattttttctaatttttttttttttttgagacgagtcttgctctgtcacccaggcttgagtgcagtggcaccgtctcagctcactgcaacctctgcctcccgggttcacgtga

SEQ ID NO: 539465 - DNA, 201 bp, Homo sapiens
tgagatggtggatatgttaatttgcttcaccatagtgctcattttactatatatgtatcccacagcattgtgtcgtatagcttaaatatacacaatacaayttgtttttaaaaaaagaattttaaggccgggtatggtggctcatgcctgtaatcctagcactttgagaggccaaggtgggaggatcacttgagcccaggg

SEQ ID NO: 539466 - DNA, 201 bp, Homo sapiens
attagatgcaagaatggggctggagacctgggtttgagagtctcttccttgcagataatggcagaagccgtggagtagatcagcacacccaaggagaatgygtaggaagaaggtctggaacagaagacagccccgaggaggaggggtagaggagcgggaggagcaggggaggaggaggaagaggacatacttgggcgggct

SEQ ID NO: 539467 - DNA, 201 bp, Homo sapiens
aaaacagttgcggcgaacccatggaaaaacagaggaaactggccaggaggaggagcctgtgtgtgggaataaattccattgtgatttttgaatttctacayatttaaggtagggatgtctaacaggcagtgggaaaattagatgcaagaatggggctggagacctgggtttgagagtctcttccttgcagataatggcaga

SEQ ID NO: 539468 - DNA, 201 bp, Homo sapiens
agtgcattagtgatcctttgggtttcccccgacaaaagctgccgggtgggggagcatctgtaattttgtgactaagagccccaaatcatgctaaagccctscttttatctagcttcttctctgctcattaccttggtagtttatatcttgtgtcattgtccaggcagctgctacatatttgaatcaggaattctgtagaga

SEQ ID NO: 539469 - DNA, 201 bp, Homo sapiens
catctctactaaaaatacaaaaaattagccgagcatggtggcacatgcctataatctcagctacttgggaggctgaggtaggagattgcttgaacctgggrggcagaggttgcagtgagccgagatcgcgtcattgcactcccgtctggacgacagagtgagactctgtctcaagaaaaaaaaaaaaaactaacaaaaaac

SEQ ID NO: 539470 - DNA, 201 bp, Homo sapiens
cctataatctcagctacttgggaggctgaggtaggagattgcttgaacctgggaggcagaggttgcagtgagccgagatcgcgtcattgcactcccgtctrgacgacagagtgagactctgtctcaagaaaaaaaaaaaaaactaacaaaaaacatttccatccttaaagctttcctcatgtctctttgcaatccatccct

SEQ ID NO: 539471 - DNA, 201 bp, Homo sapiens
gttaaactaagattgcattcctgctgtaaaaacctgtttggtcattatatattacccttttttatgtatgttgttggatcctatttgccaatattttgttmaaaattttacaacagtaatcatgagggatattggtatgtaattttttttaatgtctctatcagattttactattagggttatataggccttatatgatcc

SEQ ID NO: 539472 - DNA, 201 bp, Homo sapiens
tagtagctgggactataagcgcatgccaccacacttgactaattaaaaaaaatgtttttttgtagagacagggtctcactgtgttgccctggctggtctcraactcttagcctcaaattatcttcccacctcggcctcccaaagctctggattcacaggcgatatccactatgcatagcctagttctatcaattccttaaa

SEQ ID NO: 539473 - DNA, 201 bp, Homo sapiens
tttaatcttaatgaattaacttgtcaaaggaaaaaaaaaatactaggtttttgtttgtttttttccatagtcttactaattcatgagtcccaaatggatcygggctgattttgctttgcaatggtcattttagacagagtgaaatctgtatagaggtagagttccagtgagaaatgaaagctttccaaagtgtcaaagcgt

SEQ ID NO: 539474 - DNA, 201 bp, Homo sapiens
aaggcgccaacccaaacctgcagacggaggaagctctgcctctgccaaaggaggccgcatccctgaccagcttggcggacagcgtccatctgcagacgccwctgcacatggcgatcgcctataaccatccggatgtggtgtctgtcatcctggagcagaaaggtaagtaagtgggaatactgtccatccttttgacttggg

SEQ ID NO: 539475 - DNA, 201 bp, Homo sapiens
tgatccacccacctcggcctcccaaagtgctgggattagaggcgtgagccaccgcgtcctcccagaacattttaatcttaatgaattaacttgtcaaaggaaaaaaaaaatactaggtttttgtttgtttttttccatagtcttactaattcatgagtcccaaatggatccgggctgattttgctttgcaatggtcatttt

SEQ ID NO: 539476 - DNA, 201 bp, Homo sapiens
  misc_feature (1)...(201): n = A,T,C or G
tgatctttcaatctcatgatgccttaggatcggaaccgctcgtttcctggcagtagctgggaccatttctctgaataagggaaggacttttgagcgtgttnggaaggtcactgtgaacagtctcttttcaaagcactctgccttgtgcatttcccacaccccacaaccttctagaaatgccaaagctccaggcaggccacc

SEQ ID NO: 539477 - DNA, 201 bp, Homo sapiens
tcttcctcaagcaccgttatgtgctgtgcaaagccagcgggtgcttagcactgagtgtgattcagtggggaaatctccaccacgtagggaatgattctttsccacactgtttcgtgtctgagatgtttattttggaaacagataccctgttactaaaaaaaaaaaatctgagaattttgtttctttcctcccagggagtta

SEQ ID NO: 539478 - DNA, 201 bp, Homo sapiens
acttttttaccttaataaccaacatcagttgatgggtttcttttttctttctttctttctttttttttttttttttgttgttgttgttgagacggagtttygctcctgtcacccaggctggagtgcaatggctcggtctcggctcactgcaacctctgcctcccaggttcaagcgattctcctgcctcagcctcctgagta

SEQ ID NO: 539479 - DNA, 201 bp, Homo sapiens
cgcacaagtgagaaggcggttgtgaggggggattgtgagtgaaaaatcattctttttaaacatctttagtgttgcatatattaagaagttaaagtgagctaaaaaaaaaatgtgtcattgaaaaagggtaaagagaaagaaccaggttgttgtcagtatagagtgtctcaaaaagattgtatgtgctgttgacactgcttc

SEQ ID NO: 539480 - DNA, 201 bp, Homo sapiens
acagggatattttaaggagagggatttggtgtaattcagtattgagtactggcaatgcataaaacatgggtaggtgtcactcacacaggaagacttgaccaaaaaaaaaaaaaaaaaaaaaagatggatattaaaacagccctttccctaaagaagttaataattaaaggttggccaggcgtggtggctcacacctgtaat

SEQ ID NO: 539481 - DNA, 201 bp, Homo sapiens
gaccaaaaaaaaaaaaaaaaaaaaaagatggatattaaaacagccctttccctaaagaagttaataattaaaggttggccaggcgtggtggctcacacctgtaatcccagcattttgggaggccgaggtgggtggatcacctgaggtcaggagtttgagaccagggtggcccctttagagactgaaacctgtcgctactga

SEQ ID NO: 539482 - DNA, 201 bp, Homo sapiens
aaggccggagaatcgcttgaaactgggaggcagaggttgcagtgagccaagatcgtgccatcgcactccagcctgggtgaggagactgaaactccgtctcaaaaaaaaaaaaaaaaaaaatatatatatatatatatatatggccgggcgtggtagctcatgcctgtaatcccaaagcatggtagctcacacctgtaatcc

SEQ ID NO: 539483 - DNA, 201 bp, Homo sapiens
tactgtctggcgtgggcttactgtctggcgtggacctactgtctggcgtggacctactgtctggcgtggacctactgtctggcgtgggcctactgtctggygtgggcctactgtctggcgtgggcctactgtctggtgtgggcctactctctggcgtgggcctactctctggcgtgggcctactgtctggcgtgggcctac

SEQ ID NO: 539484 - DNA, 201 bp, Homo sapiens
taggagtctccagattagagtaaccatcaactaggagtctccagattagagcaacaatcaactaagagtctccagattaaccatcaactaggagtctccasattagagcagccatcaactaggagtctccagattaaccatcaactaggagtctccagattagagcaaccatcaactaagagtctccagattagagtaacc

SEQ ID NO: 539485 - DNA, 201 bp, Homo sapiens
tactgtctggcgtggacctactgtctggcgtggacctactgtctggcgtggacctactgtctggcgtgggcctactgtctggcgtgggcctactgtctggygtgggcctactgtctggtgtgggcctactctctggcgtgggcctactctctggcgtgggcctactgtctggcgtgggcctactgtctggtgtgggcctac

SEQ ID NO: 539486 - DNA, 201 bp, Homo sapiens
ccatatatacccatatatataaaacccatacccctaaaaatgtagaacattttcattgtcccagaagaattatttagtacccctgtgcaatgaatactcascttcggtagccactgtcatatctaccccctgattagttttgcctcttctagaatttcatatatagtaactaaaatcatcctatgcactcttttgtttact

SEQ ID NO: 539487 - DNA, 201 bp, Homo sapiens
tcaagccatcctcctacctcagcctccctagtggctgggactgcaggcacatgtcaccacatcctgctgacttcttaatttttggtagagacagagtctcwctatgttgccagggttggtctcaaactcctgggctcaagtaagccaccatgccttacctgtcccaactgttttatgttaacatttgcaggcacattaagt

SEQ ID NO: 539488 - DNA, 201 bp, Homo sapiens
tcgcgtgaagccaggaggcggaggttgcagtgagccgagattgtgccactgccctccagcctggacgacagaacgagactccatctaaaaaaaaaaaaaaagcacccactttaaccataagcatcatagaaataaataaaaatacattgcagttattgtattgtgtctgtattgtattgggttatatcactatatttgtct

SEQ ID NO: 539489 - DNA, 201 bp, Homo sapiens
tgcactatatccataatggttcctaggactgtgtccacctgatggtttggagtacggaaaaccaacccttatggcttaagagtcatctcccatggaagacratgctggccttctgaacgctggggctcatgggcttgttgatgtggctttctggtgtgccaggatcccctggcagctcctgtatacttcagtcaagcagtc

SEQ ID NO: 539490 - DNA, 201 bp, Homo sapiens
gcgcgtgcccacgacgtccggggagaggaaacccagagagttacccttggtagggggagccatagaacctgctcgggaggtgcttcctggatccccgcccwgcttaggtccccgcccttggcttgggtcctgtttgtatttggcagtttggccccccaccccgtcgcttttccgtttctggtagttgtgctcgggatggaa

SEQ ID NO: 539491 - DNA, 201 bp, Homo sapiens
tggtcttgaactcctgacgtcaggtgatccgtccgcctcagcctcccaaagtgttgggattacaggtgtgagccaccacgcccggcttgtgttaacatttstgatagagcagttcatttcattgtttgaaaactaccctcatgggagcaatgacaagcacatgtctaggattttttcaagcatgtttggtgatctcctaaa

SEQ ID NO: 539492 - DNA, 201 bp, Homo sapiens
tcctgacgtcaggtgatccgtccgcctcagcctcccaaagtgttgggattacaggtgtgagccaccacgcccggcttgtgttaacatttctgatagagcasttcatttcattgtttgaaaactaccctcatgggagcaatgacaagcacatgtctaggattttttcaagcatgtttggtgatctcctaaacatacaggctg

SEQ ID NO: 539493 - DNA, 201 bp, Homo sapiens
aaacagtactccctcaattgtttaaattgttttgatctacctagtgtacttttcccctaaaattcatgatgaaatggtagagtaaatctatctatatctcyctccccaagttctgtttaactagataattgattatcctcaaactaaatatccatgtctatgtgctgaggtattaacacatgattcaatatgatattaagg

SEQ ID NO: 539494 - DNA, 201 bp, Homo sapiens
aaaagatgtcatgttacatcctataaagtaagtttacatcctataaagcagaatactagtataatgtggtgatagtaatattccacgattatagttttatwttgcaactaatatttctaactacaacaaactgagacatcagttagtagattatctttttaaagatctcagcattttcaagtgtgttccgcatagtgacaa

SEQ ID NO: 539495 - DNA, 201 bp, Homo sapiens
aagacttgggctgcctgtgtttcgaggagctatttagtttttgttgttgtttgttttgttttgttttttgagacagagtctccctttgtcacccaggctgkagtgcagtggtgcaatctcagctcactgcaaccttcacctctggggttccagcgattctcctgccttagcctccatagtagctgggattacaggcaggcg

SEQ ID NO: 539496 - DNA, 201 bp, Homo sapiens
ttcctcttaccagtgaggaacaattttacaaatagaaattaatattgctggtgtgtagtttcccacagaatatttttgttacatttttatggggtaacacvtgacaaatcctattcatgtagtttaataagcaaaataagcctaagagattgagcaaaggtttgctgaccagtgtccataccctacaggtaagtattattt

SEQ ID NO: 539497 - DNA, 201 bp, Homo sapiens
tgggtacaactttcagtttctgcttttatttttgaaatgctaaatatttttctgagtatttgagatatttgaaaaagacacccagacaacatcctggtgtdtttttcaacacacaataaaaaggtacgacaagataatagaaagcttttctgattattgaatttaggaaaatacatcattcgctttagagtgagtaccaaa

SEQ ID NO: 539498 - DNA, 201 bp, Homo sapiens
ttagagtgagtaccaaagacttaagaaaagttaaacattgggaaatacagtaaattaaacatctagaaaagacttaccagttttcagcctttagtcatagmatgctttggtctcacttgagcattgtaattctagagtagtaagtattttcaccatttgggcttgttgattgtaattgtgggctcctttctactatttctg

SEQ ID NO: 539499 - DNA, 201 bp, Homo sapiens
gcctccgccgccgccacgcccccgccgcctccaccgccggctgccgcgcccggaggaggtcgggatgttatcacttccgccggggcttctcactgtgtccrggtcagctgctgccgccgacgccgtaccgctgcggccgggggattgggccggggtctccaccgccgaccgaggggagcgggctccgctcggccctgcttt

SEQ ID NO: 539500 - DNA, 201 bp, Homo sapiens
ttggtgtggaaaagtcagcatctaccattttttttctgtggtaacaagtgtatcatcaaacattgaaaccttttgggaatgtttaaaaccttctcttgagkgtaagtaaaaattcaaactgggaagagagtcttccagccttggcagagatacaaatttagtttaccttgtgaaatctaacacttcaggatatttccattg

SEQ ID NO: 539501 - DNA, 201 bp, Homo sapiens
ttttatttccttaattgtattggatcttaacattttgatgtgcaatggataatacttttcaatactcattctttatgtattatattttataactgtgcgcrcgcgcgcgtgtgtgtgtgtgtgtaacaaagaaaaagaggaagaagccattttcccacaccatccccctaagttagcattttcttcaggctgtcagttgaa

SEQ ID NO: 539502 - DNA, 201 bp, Homo sapiens
cgcctccgccgccgccacgcccccgccgcctccaccgccggctgccgcgcccggaggaggtcgggatgttatcacttccgccggggcttctcactgtgtcygggtcagctgctgccgccgacgccgtaccgctgcggccgggggattgggccggggtctccaccgccgaccgaggggagcgggctccgctcggccctgctt

SEQ ID NO: 539503 - DNA, 201 bp, Homo sapiens
tggtgtggaaaagtcagcatctaccattttttttctgtggtaacaagtgtatcatcaaacattgaaaccttttgggaatgtttaaaaccttctcttgaggrtaagtaaaaattcaaactgggaagagagtcttccagccttggcagagatacaaatttagtttaccttgtgaaatctaacacttcaggatatttccattgt

SEQ ID NO: 539504 - DNA, 201 bp, Homo sapiens
ctgaaataactcttccctacaaaggtatgaagaagaaaagtttaaaaagaaacaaaaaaggtatatgcacaccttgactgggttgcatctagactagtccrtttgcattgcagactaactcttccttattggttggttagcttgtagacaaagataatagcatttgcaaatataaatgtaccccaacttccaaatacaggg

SEQ ID NO: 539505 - DNA, 201 bp, Homo sapiens
attgcagactaactcttccttattggttggttagcttgtagacaaagataatagcatttgcaaatataaatgtaccccaacttccaaatacagggtgaacscagagttcctaaggctgaatatgacttggattcaccatgttttattgccatatatgatgccaattagcaattaaaaaccacagacccttctctctccttc

SEQ ID NO: 539506 - DNA, 201 bp, Homo sapiens
tttaatttttaaattaaatttaggtagagaggcatgttttgttttgagacagagtttcactcttgtcacccaggcaggagtgcaatggcccagtctcagcyaactgcaatctctgcctcccgggttcaagcgattctgctgcctcagccccccaagtagctgggattacaggcacccaccaccatgcctggctaatttttg

SEQ ID NO: 539507 - DNA, 201 bp, Homo sapiens
gttttgagacagagtttcactcttgtcacccaggcaggagtgcaatggcccagtctcagccaactgcaatctctgcctcccgggttcaagcgattctgctrcctcagccccccaagtagctgggattacaggcacccaccaccatgcctggctaatttttgcatttttagtagagactgggtttcaccatgttggccagga

SEQ ID NO: 539508 - DNA, 201 bp, Homo sapiens
gggagatccagtgtccccagtgacagaaaaaggatagcagtttaaatgtttaaaatgtttctttcaaacaactggatgcaagtgtggccatgcagatacagattgttaaaatgtttcaggggagtttaaaaataattatgaaattagttggtaaggatatttcagatgttaagaggatttgatatattttgcatgccttat

SEQ ID NO: 539509 - DNA, 201 bp, Homo sapiens
aaatttgaaggtcatggctactcttcaacccttcctgtaaggtattttacaaaacagtggcctagagtagcaaaattgaagtggatgtgagctaacctttyaagatttagtctatcctagattgaacacacatgtggctgtgaccattctcatgtacttacaaaccttctgttacaaaagggaactttcctatattttttg

SEQ ID NO: 539510 - DNA, 201 bp, Homo sapiens
gatcacctgacctcgtgatttgctcaccccagcctcctgaagtgctgggattacaggcatgagccaccgtgcccggccctaaaacttggactttttaaccwtaactcttaatttgccttaaaaccgtgaacaaatttttttttcttttttttttttttgagatggagtctcattctgtcacccaggctggagtgcagtggc

SEQ ID NO: 539511 - DNA, 201 bp, Homo sapiens
taggacatttcttcctgctaaccagttcctggagggcttgttttttttgtaactttacacaaggggcactaatggaaaatatagctttctcaagacatctratgtcagtttcccattgttttgcttcacaaacatcaacaaagtaaacctgaacatgcttagcaatttcccaatgttctttgctgacattacttttgacat

SEQ ID NO: 539512 - DNA, 201 bp, Homo sapiens
ccaccacatccggctaatgtttttgtatttttagtagagactgggtttcaccgtgttggccaggctggttttgaactcctgacctcaagtgatccgcccayctcggcctcccaaagtgctaggattacaggcgtgagccaccgcgcccggcctagtgtcaacgacttttaactttatttttagtactgctagtgatgctcc

SEQ ID NO: 539513 - DNA, 201 bp, Homo sapiens
agccaccgcgcccggcctagtgtcaacgacttttaactttatttttagtactgctagtgatgctccgtatctcttaaatatgttactgcaaaaagaaaagraaagaacagaaatatgttactgctgtttgttgaataactttagacatctattgacttgaatgtaaatgaactaaatactcgtgtatacctctttccttct

SEQ ID NO: 539514 - DNA, 201 bp, Homo sapiens
tttttctgtggtaacaagtgtatcatcaaacattgaaaccttttgggaatgtttaaaaccttctcttgagggtaagtaaaaattcaaactgggaagagagycttccagccttggcagagatacaaatttagtttaccttgtgaaatctaacacttcaggatatttccattgtaattttgtcattacggaacataaggcttt

SEQ ID NO: 539515 - DNA, 201 bp, Homo sapiens
agccttggcagagatacaaatttagtttaccttgtgaaatctaacacttcaggatatttccattgtaattttgtcattacggaacataaggcttttttctwtgtaactttgtgcatcttttgaatgttgacgtagcagataagatagctataggacatgaccacatttttcttttagaagactggttgatgtgaatggctg

SEQ ID NO: 539516 - DNA, 201 bp, Homo sapiens
gcagatggtataatgaaaattctctgtaaaatctaggtagtaaagtggttaacgtataatttgatttttgttgtgtaacaatttgtgattcaaaaactttktattttgacagatgatcttccaaaacccaagactactgaagtaattaggaaaggctcaattactgaatacacagcagcagaggaaaaagaagatggacga

SEQ ID NO: 539517 - DNA, 201 bp, Homo sapiens
aatgatcagaataaaaattttgtgaataggtgctttgaaattatgttcaattaatattattttttcccaagaatggggtagttaaaatttttcttattcarctttagcatctaagcattccttgttacgtatctttttctttattttccaattccaggctcactagaagttaatggaaataaagtgagaaagaaactaatg

SEQ ID NO: 539518 - DNA, 201 bp, Homo sapiens
gcatttcaccctctttcctctgctactggttttgctctgtcacccagactggagtgcaatggtgtgacctcggctcgctgcaacctccacctcccaggttyaagcgattctcctgcctcagcctcccaagtagctgggattacaggcgcctgccaccacatccggctaatgtttttgtatttttagtagagactgggtttc

SEQ ID NO: 539519 - DNA, 201 bp, Homo sapiens
tcttttctttaaaaaaaaaaaaaaattgcaaccctgtaaatgaatttcatgaccagaccattgtactaaacatcaagtatgaactaatatataagattatyacgccttttcagtggataaaaagtaaagtggaaattaagttatacatttttctctcttcataggacattggctccctggattatcaagagtttgtagttg

SEQ ID NO: 539520 - DNA, 201 bp, Homo sapiens
aattttagagcaaaagttcaaaatttctttatcgagatgttactttttttttttttgagacggagtcttgctctgttgcccaggctggagtgcagtggcgmgatctcagctcactgcaacctccgcctcctggattcaagcaattcttctgcctccacctcccaggtagctgggactataggtgtgcgccaccacgcctgg

SEQ ID NO: 539521 - DNA, 201 bp, Homo sapiens
gccgagattgcagcactgcactccagcctgggcgacagagtgagactccgtctcaaaaaaaaaaaaaaaaaggatgaaaagatgtcatgttacatcctatraagtaagtttacatcctataaagcagaatactagtataatgtggtgatagtaatattccacgattatagttttatattgcaactaatatttctaactaca

SEQ ID NO: 539522 - DNA, 201 bp, Homo sapiens
tttctttatcgagatgttactttttttttttttgagacggagtcttgctctgttgcccaggctggagtgcagtggcgcgatctcagctcactgcaacctcygcctcctggattcaagcaattcttctgcctccacctcccaggtagctgggactataggtgtgcgccaccacgcctggctaatttttgtatttttaataga

SEQ ID NO: 539523 - DNA, 201 bp, Homo sapiens
tactaaaaatacaaaaaattagccaggcttggcgctcgcctgtagtcccagctgcttaggaggcagaggcacaagaatcacctgaacccaggaggcagggkttgccgtgagccaaggtcgcgctgctgcactccagcttgggcgaccgagcaaggctctatctcaaaaaaaaaaaaaaaaatttgtgggttcccccccacc

SEQ ID NO: 539524 - DNA, 201 bp, Homo sapiens
taagataggaaattgtgctaacccttgaatattctcaaggacttaaaaagtgtgtatagagtacaccagtggcttttttcccctcttatttgcccactgcyctcatgtttttttcatagctgtttcaaaaatatttcttgataattatggcatgctcttttttagtcaatcaagtaagaaacttttgaagagacatatagt

SEQ ID NO: 539525 - DNA, 201 bp, Homo sapiens
agctgagattgtgccactgcactccagcctgggtgacagagcaagactccgtctcaaaaataagaaaaaaaaaaagtttatatgcatttgtatgtaaagtrttttataatctttaaagaaacaacggtcacatttcttgccagtgtcctcctgcctttaaaaattctcttttctggttggggaaatgatgtttggtaactg

SEQ ID NO: 539526 - DNA, 201 bp, Homo sapiens
ttgttactgtagtctcgtgagtaaaaattgagcttcatacattgcatcatacatcacattatatttgtgcatttcagtcatatttgtttaaaattgttacmtgttttataattgtataagagctgttgcataaggaatttatatctacttttatgtgttacttatatataataagtgtataagtcagctctgacagtcaga

SEQ ID NO: 539527 - DNA, 201 bp, Homo sapiens
aaggcaacagatggttaaactgattgtcatgaatacccaaagatcatgtatataatcgaagtgtattagtaccatcccaaggtttttttctcatttaacayatttgtttcataattcagcaagtacagatgcaagcgcattgcacactttttcctttctaaacttaaagacaagtcaaaaagccattcttagaactagagg

SEQ ID NO: 539528 - DNA, 201 bp, Homo sapiens
taataagtgtataagtcagctctgacagtcagaatttttactttgaaagtgtagccaggcatagcagctcacgcctataatcctagtgctttgggaggccraggcagaaggattgcttgagaccagcctgggcaacatagcaatatccggtctctaccaaaaaaacttttaaaattagctgggcatgttggtgtgccactg

SEQ ID NO: 539529 - DNA, 201 bp, Homo sapiens
acactttttcctttctaaacttaaagacaagtcaaaaagccattcttagaactagaggatttaagagggtaggaattagggtttgtatatatgtatatatrggacattttatcttctggcccaaagtcagaactttataaaaatcttgagtttgttcactaatgtgaaataagctatgtgtccagggtattgctcccctga

SEQ ID NO: 539530 - DNA, 201 bp, Homo sapiens
catgtggctgtgaccattctcatgtacttacaaaccttctgttacaaaagggaactttcctatattttttgtcctcctcagtcctaaacttggcatgctawcttaaaaccagttataggagagagatgctggaggattcccaggatgaaacattcctcagcagcctcctgacttaactcagatccagcagctcttggcaga

SEQ ID NO: 539531 - DNA, 201 bp, Homo sapiens
cctcagcagcctcctgacttaactcagatccagcagctcttggcagatcctgaactaatgtcattacagtgaattgagccaaaacgattattgcttgctcwcattttaggaacactttttgttgaagaagcaaactaacaataacaagttaggcattccttctgaatttaccatataaggattatgtataaacaattatat

SEQ ID NO: 539532 - DNA, 201 bp, Homo sapiens
gctaaattgggcaataaaagttaaagaaccatgatttccaaagacataaaacagcctcatgttaagaataagccttttcctcctttatggaagagagattkaaaattgtgcagatggtataatgaaaattctctgtaaaatctaggtagtaaagtggttaacgtataatttgatttttgttgtgtaacaatttgtgattca

SEQ ID NO: 539533 - DNA, 201 bp, Homo sapiens
aagataggaaattgtgctaacccttgaatattctcaaggacttaaaaagtgtgtatagagtacaccagtggcttttttcccctcttatttgcccactgctstcatgtttttttcatagctgtttcaaaaatatttcttgataattatggcatgctcttttttagtcaatcaagtaagaaacttttgaagagacatatagtt

SEQ ID NO: 539534 - DNA, 201 bp, Homo sapiens
gatgcaagcgcattgcacactttttcctttctaaacttaaagacaagtcaaaaagccattcttagaactagaggatttaagagggtaggaattagggtttstatatatgtatatatgggacattttatcttctggcccaaagtcagaactttataaaaatcttgagtttgttcactaatgtgaaataagctatgtgtccag

SEQ ID NO: 539535 - DNA, 201 bp, Homo sapiens
gaatttatatctacttttatgtgttacttatatataataagtgtataagtcagctctgacagtcagaatttttactttgaaagtgtagccaggcatagcasctcacgcctataatcctagtgctttgggaggccgaggcagaaggattgcttgagaccagcctgggcaacatagcaatatccggtctctaccaaaaaaact

SEQ ID NO: 539536 - DNA, 201 bp, Homo sapiens
aagtgcacactaccacacctggctaatttttgtattttttgtagagacggagttttgccatgttgcccaggctggtctcaaactcctggtcaagcagtccrcccgcctcggccttccaaagtgctgggatcataggtgtaagccactgtgtctagccaataattaatttatattagatatttttgaatgttaaattctttt

SEQ ID NO: 539537 - DNA, 201 bp, Homo sapiens
cctgactctgctgaatcatgagtttaaatattattgatttactattatttacggtctagaatcaacctctatccaagggacagaaaatttaattatgagtytgtaataaagaacatttttatttcttaccccacttcaaattttttaatataatccatagtatgaaatatattttcaatcataacctgagatactatacat

SEQ ID NO: 539538 - DNA, 201 bp, Homo sapiens
aaagtgtagccaggcatagcagctcacgcctataatcctagtgctttgggaggccgaggcagaaggattgcttgagaccagcctgggcaacatagcaatayccggtctctaccaaaaaaacttttaaaattagctgggcatgttggtgtgccactgtagtcctagctactcagaaggctgagactttatcttaaacactgc

SEQ ID NO: 539539 - DNA, 201 bp, Homo sapiens
caggctgaggatggaaggtgtggaacttaaagaagaatggcaagatgaagattttccgatgtgagcaatgcttttaaaagaaaacaattttagagcaaaasttcaaaatttctttatcgagatgttactttttttttttttgagacggagtcttgctctgttgcccaggctggagtgcagtggcgcgatctcagctcactg

SEQ ID NO: 539540 - DNA, 201 bp, Homo sapiens
ctgggcaacatagcaatatccggtctctaccaaaaaaacttttaaaattagctgggcatgttggtgtgccactgtagtcctagctactcagaaggctgagrctttatcttaaacactgctaggctgggcacagtggctcatgcctgtaatcccaacacttagggaggtcaatgcacgagaatcgtttgagcccaaaagttc

SEQ ID NO: 539541 - DNA, 201 bp, Homo sapiens
tttttgttgttgtttgttttgttttgttttttgagacagagtctccctttgtcacccaggctgtagtgcagtggtgcaatctcagctcactgcaaccttcrcctctggggttccagcgattctcctgccttagcctccatagtagctgggattacaggcaggcgccaccacgcctggctgattttttgtattttttgtgga

SEQ ID NO: 539542 - DNA, 201 bp, Homo sapiens
ctcatgcctgtaatcccaacacttagggaggtcaatgcacgagaatcgtttgagcccaaaagttcaaggccagcctgggtaacatagcaagaccctgtctstactaaaaattagccaagcgtcgtggcacgcacctgtagtcttagatactcgggaggatctcttgagcccaggagttaaggctgcagtgagccatgattg

SEQ ID NO: 539543 - DNA, 201 bp, Homo sapiens
ttgaaatacatcattctttctaaagttcatatatttgttactaagataggaaattgtgctaacccttgaatattctcaaggacttaaaaagtgtgtatagrgtacaccagtggcttttttcccctcttatttgcccactgctctcatgtttttttcatagctgtttcaaaaatatttcttgataattatggcatgctcttt

SEQ ID NO: 539544 - DNA, 201 bp, Homo sapiens
taaagttcatatatttgttactaagataggaaattgtgctaacccttgaatattctcaaggacttaaaaagtgtgtatagagtacaccagtggcttttttsccctcttatttgcccactgctctcatgtttttttcatagctgtttcaaaaatatttcttgataattatggcatgctcttttttagtcaatcaagtaagaa

SEQ ID NO: 539545 - DNA, 201 bp, Homo sapiens
acaccagtggcttttttcccctcttatttgcccactgctctcatgtttttttcatagctgtttcaaaaatatttcttgataattatggcatgctctttttyagtcaatcaagtaagaaacttttgaagagacatatagttaacagtttgtgggaagggagttctgaaaggaggcatttggggtgactttttaagtaggttt

SEQ ID NO: 539546 - DNA, 201 bp, Homo sapiens
tcagcctcccaaagtgctgggattacaggcatgagccacagtgcccaggccaaattattttttaatagagaactagttcactccacacttctatacagcasccactttccatacttatgggatatacaaaaatacaaggcttaagtccctgcccttaagaaataggaaaagccataaaagtttaagttataaatcctttca

SEQ ID NO: 539547 - DNA, 201 bp, Homo sapiens
cggctgccgcgcccggaggaggtcgggatgttatcacttccgccggggcttctcactgtgtccgggtcagctgctgccgccgacgccgtaccgctgcggcygggggattgggccggggtctccaccgccgaccgaggggagcgggctccgctcggccctgctttttgcgacctggccgtcagccccacgtcgccggcctgg

SEQ ID NO: 539548 - DNA, 201 bp, Homo sapiens
aactagttcactccacacttctatacagcacccactttccatacttatgggatatacaaaaatacaaggcttaagtccctgcccttaagaaataggaaaarccataaaagtttaagttataaatcctttcaatctaacagtaccatatatagaagttaacctaggcacattgtaaatagtgctagaatgttagtggtaagt

SEQ ID NO: 539549 - DNA, 201 bp, Homo sapiens
ctccaccgccggctgccgcgcccggaggaggtcgggatgttatcacttccgccggggcttctcactgtgtccgggtcagctgctgccgccgacgccgtacygctgcggccgggggattgggccggggtctccaccgccgaccgaggggagcgggctccgctcggccctgctttttgcgacctggccgtcagccccacgtcg

SEQ ID NO: 539550 - DNA, 201 bp, Homo sapiens
ttcaatctaacagtaccatatatagaagttaacctaggcacattgtaaatagtgctagaatgttagtggtaagtcagaacacaactcactgtagagcatgwcatactaccttaaatcctcctaacacaggacggagggcatatgggtcaagcagattgattttttttcagggtcatttccacttgatttactctctgccag

SEQ ID NO: 539551 - DNA, 201 bp, Homo sapiens
attcttctgcctaatttaatcgtactcagatgaagaaaatggcgtaatctgcatcaggaagtccacagacatacattattcagctagttcacaggaatcawattataagacctgatttatggcttaaatctcttatctttcagaaatagcactttttttataggggaaaataagaccaccttattttattgcattaccaca

SEQ ID NO: 539552 - DNA, 201 bp, Homo sapiens
ataaacagtgaaatgctctgatcttaagtgtgcagttcaatgagttttgacaaatgcctatataaccatatatacccatatatataaaacccatacccctraaaatgtagaacattttcattgtcccagaagaattatttagtacccctgtgcaatgaatactcagcttcggtagccactgtcatatctaccccctgatta

SEQ ID NO: 539553 - DNA, 201 bp, Homo sapiens
tgaaagacagcacaccacctgactctgctgaatcatgagtttaaatattattgatttactattatttacggtctagaatcaacctctatccaagggacagraaatttaattatgagtctgtaataaagaacatttttatttcttaccccacttcaaattttttaatataatccatagtatgaaatatattttcaatcataa

SEQ ID NO: 539554 - DNA, 201 bp, Homo sapiens
ctaaagactgctgttgaaacatacatattttagcgctgttttccattactgaaaattatgtcagagatgtaatttagtttgtttttttgtttttgtttttkttttttttttgagacccaagtcttgctctgttgcccaggctggagtgcagtggtgcagtctcgactcactgcaacctccgcctcccaggtttgaatgatt

SEQ ID NO: 539555 - DNA, 201 bp, Homo sapiens
ccaccttattttattgcattaccacacttaatatattttgtgactgagtgattaagaaaggtagtgaagattctgatgttcttgaaatgttcaaatcttttcatgtgcaaatttgtaagcaatagaaatgaaggttaaagcagaagtatttgctactaaatattggcttaatatctaaagactgctgttgaaacatacata

SEQ ID NO: 539556 - DNA, 201 bp, Homo sapiens
accaccttattttattgcattaccacacttaatatattttgtgactgagtgattaagaaaggtagtgaagattctgatgttcttgaaatgttcaaatcttttcatgtgcaaatttgtaagcaatagaaatgaaggttaaagcagaagtatttgctactaaatattggcttaatatctaaagactgctgttgaaacatacat

SEQ ID NO: 539557 - DNA, 201 bp, Homo sapiens
tgtctgtttcatgcctgaaagtagtcagcctaactatagatacctgatggacaatctttttaagtaagtatatattaaacaaaaacatttggacagaattstgagctaattagatctacaccttaagaaacttaaccttttcaaaaattataaatattccagttctttgggagactgaagtgggcagatcacttgagtcca

SEQ ID NO: 539558 - DNA, 201 bp, Homo sapiens
cctgaacccaggaggcaggggttgccgtgagccaaggtcgcgctgctgcactccagcttgggcgaccgagcaaggctctatctcaaaaaaaaaaaaaaaaatttgtgggttcccccccaccaaaaaaaaaaaaaccttactaagtaaattaataaggattttctagcttatctggccagccaccttgacatgtttgcattt

SEQ ID NO: 539559 - DNA, 201 bp, Homo sapiens
attcagcaagtacagatgcaagcgcattgcacactttttcctttctaaacttaaagacaagtcaaaaagccattcttagaactagaggatttaagagggtmggaattagggtttgtatatatgtatatatgggacattttatcttctggcccaaagtcagaactttataaaaatcttgagtttgttcactaatgtgaaata

SEQ ID NO: 539560 - DNA, 201 bp, Homo sapiens
gaaattaagtttttcataaggcaacagatggttaaactgattgtcatgaatacccaaagatcatgtatataatcgaagtgtattagtaccatcccaaggtktttttctcatttaacatatttgtttcataattcagcaagtacagatgcaagcgcattgcacactttttcctttctaaacttaaagacaagtcaaaaagcc

SEQ ID NO: 539561 - DNA, 201 bp, Homo sapiens
atcttaacattttgatgtgcaatggataatacttttcaatactcattctttatgtattatattttataactgtgcgcgcgcgcgcgtgtgtgtgtgtgtgkaacaaagaaaaagaggaagaagccattttcccacaccatccccctaagttagcattttcttcaggctgtcagttgaagaactaggataaattatttccgg

SEQ ID NO: 539562 - DNA, 201 bp, Homo sapiens
ttttaatcaaaactttaaattccttaagaataggagttagatctgatttgtttttgttcctgtggtcatcttctccactcacacttctctgcctgcacagwgcttttcatggttttgaagaacttagcaccaatttctccctagtcttggaaaatgagaatagtttacttttacattcagtattggcctctttccctgttt

SEQ ID NO: 539563 - DNA, 201 bp, Homo sapiens
gccacgcctccgccgccgccacgcccccgccgcctccaccgccggctgccgcgcccggaggaggtcgggatgttatcacttccgccggggcttctcactgygtccgggtcagctgctgccgccgacgccgtaccgctgcggccgggggattgggccggggtctccaccgccgaccgaggggagcgggctccgctcggccct

SEQ ID NO: 539564 - DNA, 201 bp, Homo sapiens
atcaaattataagacctgatttatggcttaaatctcttatctttcagaaatagcactttttttataggggaaaataagaccaccttattttattgcattaycacacttaatatattttgtgactgagtgattaagaaaggtagtgaagattctgatgttcttgaaatgttcaaatcttttcatgtgcaaatttgtaagcaa

SEQ ID NO: 539565 - DNA, 201 bp, Homo sapiens
tcctccggggtgagtgcggcctgggagaactcggcacggtggctccggagctggactgggaaccggcctaggggcgaaagtctgtcgggcgcgtgcccacracgtccggggagaggaaacccagagagttacccttggtagggggagccatagaacctgctcgggaggtgcttcctggatccccgccctgcttaggtcccc

SEQ ID NO: 539566 - DNA, 201 bp, Homo sapiens
ctggcgatgtggctcatgcccagtgctttgggaggccaaaggaggaggattgcttaaggccaggagttcacgaccagtctgagcaacacagtgaaaccctrtctctacaaaaaaaattttataaaggttaaccaggcatgtttgtgtgcgctgtatccccagctcctctggaggctatgaggtgggaagatcccttgagcc

SEQ ID NO: 539567 - DNA, 201 bp, Homo sapiens
gaccatataagatttacaaaacatacatttaatacagaaatctgtgaaaagtaaactcttatttataatttactaatcatacagatgtcttctaaaaatgyctaagagtaaaatcgtgctggtgatactgtctttggtttcttttttaggatattatggggatggattaaatgccattgttgtgtttgctgtctgtttcat

SEQ ID NO: 539568 - DNA, 201 bp, Homo sapiens
gcctgttatgtgctaggcaccatggtaggtgttgggaatatattgggtacaactttcagtttctgcttttatttttgaaatgctaaatatttttctgagtrtttgagatatttgaaaaagacacccagacaacatcctggtgtttttttcaacacacaataaaaaggtacgacaagataatagaaagcttttctgattatt

SEQ ID NO: 539569 - DNA, 201 bp, Homo sapiens
atgtatcagtcacttcaacaattaccaatttatactttgttcccacttctaacccccagtttacaagtttgaagcaaatcccaggagcaaatcatttcacytagaaacatttcaaaatatatctctaaaaaataagataatcgtaatactagctaatgcggtttgagcattttcattgttgctctcattgtaggagagagg

SEQ ID NO: 539570 - DNA, 201 bp, Homo sapiens
atggtacaatttagagaacctagttcagttatgcacagtgatttttaaggcttaaacttaatttgttttttacagatatgttattggcactttggagctaytagtagcagaaaactacatgatagtttatttaaatggtgcaacaactcgaagaaaaatgcccagtctgggatggctcaggaaatgttatcagcaaattga

SEQ ID NO: 539571 - DNA, 201 bp, Homo sapiens
ggtttgatcttgctgtggctaatttaaatcaagtcagacccattaataggtttctcttcacatctaaatttgacattggctagctcttatgattatatatrtatctcactttatgtgtgaaatatgcataatacaaagagtatttagtcatttaaaaaggagaagtctaggataaaacctttaatttttaatcaaaacttt

SEQ ID NO: 539572 - DNA, 201 bp, Homo sapiens
ccccgccgcctccaccgccggctgccgcgcccggaggaggtcgggatgttatcacttccgccggggcttctcactgtgtccgggtcagctgctgccgccgmcgccgtaccgctgcggccgggggattgggccggggtctccaccgccgaccgaggggagcgggctccgctcggccctgctttttgcgacctggccgtcagc

SEQ ID NO: 539573 - DNA, 201 bp, Homo sapiens
ttccctgtttacagagtcctgaagacaagtgaatgtgtatgctaggagacatttagtaacaggctatactgtggacgtaaatctggccaaatgaagtaaarttcatttcatagcagtaggagggaccataagaatttaagagtgcattttcttgtctacaggggtatcacacctaattgagaacttttgggtgagattttt

SEQ ID NO: 539574 - DNA, 201 bp, Homo sapiens
ttcatagcagtaggagggaccataagaatttaagagtgcattttcttgtctacaggggtatcacacctaattgagaacttttgggtgagatttttcaactrttattttgtataaacttgcagcattagaatttatagaaatttttaattttctttgtgtgtgtgtgttttttttttaaactccaggttacggaaaaatcta

SEQ ID NO: 539575 - DNA, 201 bp, Homo sapiens
tgtgcaatggataatacttttcaatactcattctttatgtattatattttataactgtgcgcgcgcgcgcgtgtgtgtgtgtgtgtaacaaagaaaaagaggaagaagccattttcccacaccatccccctaagttagcattttcttcaggctgtcagttgaagaactaggataaattatttccggttgtgattcatgtta

SEQ ID NO: 539576 - DNA, 201 bp, Homo sapiens
atgtgcaatggataatacttttcaatactcattctttatgtattatattttataactgtgcgcgcgcgcgcgtgtgtgtgtgtgtgtaacaaagaaaaagaggaagaagccattttcccacaccatccccctaagttagcattttcttcaggctgtcagttgaagaactaggataaattatttccggttgtgattcatgtt

SEQ ID NO: 539577 - DNA, 201 bp, Homo sapiens
gcaggacttcttttttcctcttcagaacattttctgctttctagagaaatgtggataactctcggggaccaaaggagaccagtgtcagtagagtacaatcstttttttatgttcttttctgcagatacagttggtcccacctggacagatccagatccagggtggacaggctgtgcaggtgcagggccagcagggccagac

SEQ ID NO: 539578 - DNA, 201 bp, Homo sapiens
tgatacccttgcgtattctttccagaggctgcacaacttgctgttcatattactaatcttatccactgctcattttgtgaaatctccctcccttgggaatrtagtacagttttgggggttttttttccctttgtttttgccttcgcctttctatgttactttgtgtcaggcttgacccagtccactcatctcttggtttat

SEQ ID NO: 539579 - DNA, 201 bp, Homo sapiens
atttaaaaataggtatgttctggtcacttcaaaatcactaaatacttttgcttggcatctttctaaaaggcattataatctggtaacttttttgctaaatrccttacaagcttccaccagtctgcagaagaatttctttgtctgacattttgagagaaagtagtgtggccccaagctttttttcctgtttagtccactgtt

SEQ ID NO: 539580 - DNA, 201 bp, Homo sapiens
catttccttcctgacatatttcaagctcttcctgttcctgttctcagcagcagggtggtgtcactgctgtgcagttgcagactgaggcccaggtggcatcygcctcaggccagcaagtccagaccctccaggtagtggtaccctctctgattctctgtgagcactgcatgaacttctcctctcctcatgtctggtgctgtt

SEQ ID NO: 539581 - DNA, 201 bp, Homo sapiens
agaagggatctagagctatattttttcctaagattgaaaaaacgagtttctgacttgtttatgggttctgccccgtgatagtggctgagttctttggggakgaagaggagacttgtcctaggactctgaaaattatttttactcatgtgaatcatctagtgcattccctggcacataaaggtcttaagtatctggtgccca

SEQ ID NO: 539582 - DNA, 201 bp, Homo sapiens
gtgtacctcacagccttctaggatctccagagtggacaggaatctcacttggagggaccatggagcagtatacagcaaacagcaatagttcgacagagcarattgttgtccaggcaggacagattcagcagcaggtatggaagcaaaactgctttaaacattacagcaatgaaactgataacagcaccactcaattggttg

SEQ ID NO: 539583 - DNA, 201 bp, Homo sapiens
cagttaggtcacgtcattttattattcagatgttggaatttatgagggcctagtgaaaaatcagagagaaagacctatctacatttttgtttatatatctrtcctccctcccatatttccaagatgaattgccgattgctaacttatatcattttaattttttaatgaagtctttattaaaggttctcagatatcattcag

SEQ ID NO: 539584 - DNA, 201 bp, Homo sapiens
agcatgtttctttgagaatgcctggaaaagaaatggtataagtgacaggaagaaattcttataagtgacattagaatttattcagggctcggccgggcgcrgtggctcacgcctgtaatcccagcactttgggaggccgaggcaggcggatcacgaggtcaggagatcgagaccatcctggcaaacatggtgaaaccctgt

SEQ ID NO: 539585 - DNA, 201 bp, Homo sapiens
cagcagtgggcaagggactgtcactgtgacactaccagtggcaggcaatgtggtcaattcaggagggatggtcatggtaagaaaatgtatttttcagcttkgtctttgaaattttcttgaacatgcaacttgatgcctcctaaaatttattatgttgacctcttgggattgagatcgatccttaaggcactgtcggtaatc

SEQ ID NO: 539586 - DNA, 201 bp, Homo sapiens
cattgaattagaaatgattcaaagtagaatctagaatgtagaactggcatctcactttattgctagtgctgctaagcatccagcagataactacctcttaytgtcatcactttatcctttcaatcccacccctacccctgccaccaatagtgtttggtaatgatgtacagccaactttgaacataaattaagccgaaagaa

SEQ ID NO: 539587 - DNA, 201 bp, Homo sapiens; identical to SEQ ID NO: 232739

SEQ ID NO: 539588 - DNA, 201 bp, Homo sapiens
cctctgcctcccaggctcaaatgatcctcccacctcagttccccaagtagctgggaccacaggcatgtcctaccatgcctggataatttttgtatttttcmgtagatacagggttttgccatgttgcccaggctggtctcgaactcctgacctaatctgctcgcctcagcctcctgaagtgctgggattatgggcataagc

SEQ ID NO: 539589 - DNA, 201 bp, Homo sapiens
gtctaaaaaacatgtatatttgcctttggaacgtttttttgtttgtttttggatacagggctttcctctgtcatccaggctggagtacagtggcgcaatcrtagctcactaacctggaactcctgggctcaagccatcctcccttcttgttctcccaaaacgttgggattacaggcatgagccactgcgtcctgacctgaa

SEQ ID NO: 539590 - DNA, 201 bp, Homo sapiens
tgtctctagattactgatgtcttttggagattttatataaatggaatcatatatattcgtttacatcataaccttaattttattagtttacagccataaatgtattgtgtattagagacaagatagaatttagggaagcctgttagtgcccctaacagactcacagtctggctgaaaacctgattttctattctataccca

SEQ ID NO: 539591 - DNA, 201 bp, Homo sapiens
gttaattgtctggtaaggcctttattgacaatctcactttagtttctttccccacctttctaacaggagtgtacctcacagccttctaggatctccagagyggacaggaatctcacttggagggaccatggagcagtatacagcaaacagcaatagttcgacagagcagattgttgtccaggcaggacagattcagcagca

SEQ ID NO: 539592 - DNA, 201 bp, Homo sapiens
gatttctttttatttttaaaaccttcagaacagtgtctggcacatggtacataattagtggagagaagtgcattagaaagctccaatccagaaatctgtakgatgatggggaagctggacagccctttgttgtagtctagtctttcatcaagcgtctatcaggacccacttgttgagttgtgaaagaaattgagtgagcca

SEQ ID NO: 539593 - DNA, 201 bp, Homo sapiens
gtctctagattactgatgtcttttggagattttatataaatggaatcatatatattcgtttacatcataaccttaattttattagtttacagccataaatgtattgtgtattagagacaagatagaatttagggaagcctgttagtgcccctaacagactcacagtctggctgaaaacctgattttctattctatacccag

SEQ ID NO: 539594 - DNA, 201 bp, Homo sapiens
tctctagattactgatgtcttttggagattttatataaatggaatcatatatattcgtttacatcataaccttaattttattagtttacagccataaatgtattgtgtattagagacaagatagaatttagggaagcctgttagtgcccctaacagactcacagtctggctgaaaacctgattttctattctatacccaga

SEQ ID NO: 539595 - DNA, 201 bp, Homo sapiens
ctctagattactgatgtcttttggagattttatataaatggaatcatatatattcgtttacatcataaccttaattttattagtttacagccataaatgtattgtgtattagagacaagatagaatttagggaagcctgttagtgcccctaacagactcacagtctggctgaaaacctgattttctattctatacccagaa

SEQ ID NO: 539596 - DNA, 201 bp, Homo sapiens
cagtgggcaagggactgtcactgtgacactaccagtggcaggcaatgtggtcaattcaggagggatggtcatggtaagaaaatgtatttttcagctttgtytttgaaattttcttgaacatgcaacttgatgcctcctaaaatttattatgttgacctcttgggattgagatcgatccttaaggcactgtcggtaatctac

SEQ ID NO: 539597 - DNA, 201 bp, Homo sapiens
tcttggagcccaaccaagcggtctccgtttcttgtccgggctgtaagaccagtccattcggtgcctggaacctcactcttagaagattgatacccttgcgyattctttccagaggctgcacaacttgctgttcatattactaatcttatccactgctcattttgtgaaatctccctcccttgggaatatagtacagttttg

SEQ ID NO: 539598 - DNA, 201 bp, Homo sapiens
caaccaagcggtctccgtttcttgtccgggctgtaagaccagtccattcggtgcctggaacctcactcttagaagattgatacccttgcgtattctttccrgaggctgcacaacttgctgttcatattactaatcttatccactgctcattttgtgaaatctccctcccttgggaatatagtacagttttgggggtttttt

SEQ ID NO: 539599 - DNA, 201 bp, Homo sapiens
tctgtgaccaacagtgattccatgtgtagcagtttctatagtggttgctaatctagggattgtgtaagcttttagggaagaagtgtttctaaacagaagawtagaaatagggagttcattggtaaagagagaaatagatcaaaaatcaagttggctttagagtgctattgctgcttatgtttttttctgggtcattccatt

SEQ ID NO: 539600 - DNA, 201 bp, Homo sapiens
tgttgacctcttgggattgagatcgatccttaaggcactgtcggtaatctactttgacaataacattatgacaaaccataattcattctgagcacctactrtgtgccagggactattcaccagggactattctagatgctggagataaagcaatggataaatagtgattttatggaattcttttcagaattcaaataacga

SEQ ID NO: 539601 - DNA, 201 bp, Homo sapiens
aagtggatcttcaactcttaaagtctatgagaagggtaaattttgcctaccatatgtagtggacctgagtaacatgtttggtgggaagcaattacgtgttmcaacttaaagaagctttattctctaaagtatatgtgcaaacctgaaaatcagtgttaggtatgccttgtatcaaagtgatgtagcttaacgagtatctct

SEQ ID NO: 539602 - DNA, 201 bp, Homo sapiens
tcgtctttgtcacttattactattcattctttcttgaaaatcacacttttcttaattttcaaggaacaagttttatttttattgaacaggttttattaccscatcacaaatataatttgaatgtttacttttttcccttctaactgatgtgagcctggtctaatcctctcttctttggcttagatttataaaatagctgct

SEQ ID NO: 539603 - DNA, 201 bp, Homo sapiens
tctagattactgatgtcttttggagattttatataaatggaatcatatatattcgtttacatcataaccttaattttattagtttacagccataaatgtattgtgtattagagacaagatagaatttagggaagcctgttagtgcccctaacagactcacagtctggctgaaaacctgattttctattctatacccagaat

SEQ ID NO: 539604 - DNA, 201 bp, Homo sapiens
ctggtgaagtcagccagccatctcagcagggaagaacaaccttctcaaccaaaactgcaatcaggaaagcagcagcccactccttcccatggaatctagahagcatttatccctctggtgggggaatctcacactgactaactgaatggacgctttgtattcagagatggcttccaggcaaggaagttctatcttgtgata

SEQ ID NO: 539605 - DNA, 201 bp, Homo sapiens
gagggcctagtgaaaaatcagagagaaagacctatctacatttttgtttatatatctgtcctccctcccatatttccaagatgaattgccgattgctaacttatatcattttaattttttaatgaagtctttattaaaggttctcagatatcattcagtttatctaattgtatccttatttttaaaagtggatcttcaact

SEQ ID NO: 539606 - DNA, 201 bp, Homo sapiens
agggcctagtgaaaaatcagagagaaagacctatctacatttttgtttatatatctgtcctccctcccatatttccaagatgaattgccgattgctaacttatatcattttaattttttaatgaagtctttattaaaggttctcagatatcattcagtttatctaattgtatccttatttttaaaagtggatcttcaactc

SEQ ID NO: 539607 - DNA, 201 bp, Homo sapiens
gccaggcgcagtggctcatgcctgtgatcccagcacttggggaggccaaggcaggtggatcacttgaggccaggagttcaagaccagcctggccaacatgrcaaaaccccatctctactaaaaataaaaaattagccgggcgtggtggcacgcacctgtaatcccagctacttggggggttgaggcataagatatcttgaa

SEQ ID NO: 539608 - DNA, 201 bp, Homo sapiens
actgctcataaatcaaacttgtactttttgtgtattcttttgtgtttttatgcataatttttgggcataattgtaccatgcatgtggggttgtgttttcattttttttttttaattctttcataatgttcagtcaacttgatgaatcagaatttctaatttataaaatatagttaaggattttggttttcatttgcctttg

SEQ ID NO: 539609 - DNA, 201 bp, Homo sapiens
gctgaaaaaaatatattctgttacgtaaataaagctctctaggtgagattccatagcctcccttacaatacttaaggctttaatcccctttgtataggagttttttttctcattagtgttgagtagccattttttaaagaagactacttcttaaccttttttgaattgtattctctattttagaatcctagtaaagcttgc

SEQ ID NO: 539610 - DNA, 201 bp, Homo sapiens
ggatcattaagatgaagagagtaattcacatttactctagaacctttaacaagcactgaaaggaagaagcctgagatttgatccttgacaatttctggaargcactggtcagtcacactgtcctggacagagtccaagttacccactaaagcttgaggtggatgttggcttcactcctgcagcacaatgctggccctagaa

SEQ ID NO: 539611 - DNA, 201 bp, Homo sapiens; identical to SEQ ID NO: 232748

SEQ ID NO: 539612 - DNA, 201 bp, Homo sapiens
atccattttctgtctctagattactgatgtcttttggagattttatataaatggaatcatatatattcgtttacatcataaccttaattttattagtttayagccataaatgtattgtgtattagagacaagatagaatttagggaagcctgttagtgcccctaacagactcacagtctggctgaaaacctgattttctat

SEQ ID NO: 539613 - DNA, 201 bp, Homo sapiens
caccccagaagaaaaaaatgtattatgtttctatttgaccttaggccaagattgatattttggaaatactttgttttcaaaatggaatttagctaatatakaaaagtagtagggaagggaaaggtagtattgatgatgagtttttcccgtctaatgatcaaagacgaactcccctgatagctttcccttccatacagctgc

SEQ ID NO: 539614 - DNA, 201 bp, Homo sapiens
gttctatcttctgtctggacacatattccgcatttgtagaggagaattataaagctactaaagttgttccacagagcagatcctgatttcctgtgttctascacctgagaacaacagggacccaggaactaacgtatgagtgataatgtccaaattcttccaggaatatttatttatttgagacggagtcttgctctgacg

SEQ ID NO: 539615 - DNA, 201 bp, Homo sapiens
gaggccaaggcaggaggatgcttgggtctggaagtttgagaccagccagcgcaacatagtgagacctgtctctaccaaaaaaaaaaaaaaaatcaatttaraggtaggctatgaaaaagtacagatacatcccttaacatagactggagggtggtggcaaggggagcaaatgtggaggcccagtagctggcaaagtttaga

SEQ ID NO: 539616 - DNA, 201 bp, Homo sapiens
actggaattaggtggaatgtgacatgaactatatattagatattatgaaattaactttcttagaatgtcttcgttcttagaagatacaggctgaagtactytgggataagatataatgatgtctgcaacttactttcatatggtttagcaagcaaacacacacacacactttcactcatagatttaaagcaaatatggcaa

SEQ ID NO: 539617 - DNA, 201 bp, Homo sapiens
ttctatcttctgtctggacacatattccgcatttgtagaggagaattataaagctactaaagttgttccacagagcagatcctgatttcctgtgttctacsacctgagaacaacagggacccaggaactaacgtatgagtgataatgtccaaattcttccaggaatatttatttatttgagacggagtcttgctctgacgt

SEQ ID NO: 539618 - DNA, 201 bp, Homo sapiens
ttgggatgtaggcctaggggaggtgctgcaggctcaagaaccaggcccacacattatatattaaaaaaaaaaaaaacccacatttttttttattggtcagkgttggtaggagtttgttacaaaagtgagtccatgggcctgtggaatgtgaggggagtgggtccgctccaccagatgccagcaccggggccagtgcagctc

SEQ ID NO: 539619 - DNA, 201 bp, Homo sapiens
tagaaaaaagagacaatcaacatgtctagaaacctcaggatctctgctgtcatctgtagctcatgcattccaatataaaatgggattttaactggaagctmatcttgtaccttcctagaccctgtttattgctggacaggctccataatagcagaagaatgttaattaaggcagtcatgagtgcacactggctgtcaggat

SEQ ID NO: 539620 - DNA, 201 bp, Homo sapiens
atattaaaaaaaaaaaaaacccacatttttttttattggtcagtgttggtaggagtttgttacaaaagtgagtccatgggcctgtggaatgtgaggggagkgggtccgctccaccagatgccagcaccggggccagtgcagctcagagccctgtggcggactacagggcctgcacagacggtcactcaaagaaagatgtcc

SEQ ID NO: 539621 - DNA, 201 bp, Homo sapiens
aggttcttctccagcccaggtctgccattttcctcctaccttcttggccttacccccagcctcttgatctccttctgcagacaaagcctttagctcactargttttatgctggagagggttgagggtggggtaaaaaccaggagtaaactaaggggaagaaggagaatagcagtccttgagtttttgtgaatgacaccttc

SEQ ID NO: 539622 - DNA, 201 bp, Homo sapiens
aatttgttgaaagatttaagatttttgtttaaatgaaaataccaagacatttttcaaaggcctaaaaatcacattccatctccattctcaaagcaatatgytatttatcttttaaagataaatagaaaactaatgttaacactctagattgcttcataaatgcttccactatgatgaaggaaaaacacactataccatact

SEQ ID NO: 539623 - DNA, 201 bp, Homo sapiens
agctggaggtggtagaatttgtatgctcttagagcccaacagccaaggcagggtcaagaagataagtaataaaagaggaagtcagccaggcgcggtggctsatgcctgtaatcccagcactttgggaggccaagatgggtggatcacctgaagtcaggagttcgagaccagcctgaccaccatggagaaaccccgtctcta

SEQ ID NO: 539624 - DNA, 201 bp, Homo sapiens
tgttggtaggagtttgttacaaaagtgagtccatgggcctgtggaatgtgaggggagtgggtccgctccaccagatgccagcaccggggccagtgcagctsagagccctgtggcggactacagggcctgcacagacggtcactcaaagaaagatgtccctgtgccctactccttggcgatggcaaagggcttctccacctc

SEQ ID NO: 539625 - DNA, 201 bp, Homo sapiens
acaaggaggcagattatctctgcgcaaacttagccccttcaactagcaaaccctgagcctcggtcagaactaaacagtactctgtaaaaagacagaaacarataactatatcagctttttttttttttaaggtattcattttatgaagataactgactaccttgcctatttagcaatgtggcctaatgtttcctttagaaa

SEQ ID NO: 539626 - DNA, 201 bp, Homo sapiens
aattttctgagtctaatataggtccaaacacccccctctggcttgttgaaaggactgaaagaggtaacggacacaggtagtcccagctccatgaaacccakgtcctgtcccctccatggtgaggtcctgtgctgccctcctgatggcatgtagggtgagggtccttcccccaacagcaaagctatgccgcgtcatggggta

SEQ ID NO: 539627 - DNA, 201 bp, Homo sapiens
cacggcctgaggatacaatgcctttttccggaggtcaggaatagttactagatgtccccacagggctattttaggtcttcacacacttagtgttgtcccamtctacaacatagatactttggtactgggagtcttacacaccaaaacaaaccaaaacacaaacttccaaaatttggacctatggcgttaaaacgtctttaa

SEQ ID NO: 539628 - DNA, 201 bp, Homo sapiens
aatacacttgaaattgacattcatgtttaaaaatactacaaatttcattttcacagctgagctttgtgaccagtgccagggtttatgaaacattatacatytaaaaaaaaaaaaagtaaaaaaagaggcatttaacaataatcagacacatccacacattaaaactgatttccactgctgatttatacattatctagttgt

SEQ ID NO: 539629 - DNA, 201 bp, Homo sapiens
ctaaacagtgaatttccacccctcactcaatgctgtcaccttcctgaaagtgataaaattttaatgaaatgctatttccagtatatgggctacaattaccytttagttaccaccagagagtgagcagcagattaagcaacccaaactgttaaaacagtccattctggctaggcctgcaaagatacaagctgcaaaatgcct

SEQ ID NO: 539630 - DNA, 201 bp, Homo sapiens
aacctactcactattttgaatacaatgagaaaactatttttttgtacttagtcacctgcaaaaggagttaggaaaaacatttttaagactgcttgctggayaaaagactttcaagattccttacttgtggctaaaacattgctcaaaaaggataaacccacataagggccatggttgcctcttctttttcttattcagaaa

SEQ ID NO: 539631 - DNA, 201 bp, Homo sapiens
cggaagtgggttttctggttgtgttttgagaaaatatgtcaactaccactgtgtattatccagggaacctactcactattttgaatacaatgagaaaactwtttttttgtacttagtcacctgcaaaaggagttaggaaaaacatttttaagactgcttgctggacaaaagactttcaagattccttacttgtggctaaaa

SEQ ID NO: 539632 - DNA, 201 bp, Homo sapiens
tccggctttgctctaaaagggaagacagatcacacattatgtttgcagttattaaagcagaaagaggttcaaaaccaagtaatcccttcagaaacccttcrgctctggaaaggctctgcttactaattacttgtatatttaaaccaaggatagtattttagatcaaaaccctaaaccgatgtgtacttcctttgcctagat

SEQ ID NO: 539633 - DNA, 201 bp, Homo sapiens
acccagtgcccagttgtgccacattcccactcaaggctcagaacttggctcgcattggtagctggaggtggtagaatttgtatgctcttagagcccaacasccaaggcagggtcaagaagataagtaataaaagaggaagtcagccaggcgcggtggctcatgcctgtaatcccagcactttgggaggccaagatgggtgg

SEQ ID NO: 539634 - DNA, 201 bp, Homo sapiens
cccagtgcccagttgtgccacattcccactcaaggctcagaacttggctcgcattggtagctggaggtggtagaatttgtatgctcttagagcccaacagscaaggcagggtcaagaagataagtaataaaagaggaagtcagccaggcgcggtggctcatgcctgtaatcccagcactttgggaggccaagatgggtgga

SEQ ID NO: 539635 - DNA, 201 bp, Homo sapiens
ccgcagtctgcgatgatcacatccttcaggggtttatcccggctgtctgtcttggtgctctccaccttccgcaccacctcctggaaaagaaaggtggaagyaggagggcatggtggatcaggaggtccaccgctcaggagaaaggccccagcgtatggctcaggagggctaagacccacaagtgatcaacagcacacaaaa

SEQ ID NO: 539636 - DNA, 201 bp, Homo sapiens
tcacccagccaggcccgtagtgcttcagtttgaagttctcatcggggaagcgctcaccgtagatgctctttcctgggaaaaaagacagagcaggtcagggrcgctggattgcgccaaaccaagcagacattcggggccaggactgagggggcttaacctgtcctctgtgccaggctaggctggagtggactacaaggacat

SEQ ID NO: 539637 - DNA, 201 bp, Homo sapiens
ttcacagctgagctttgtgaccagtgccagggtttatgaaacattatacatctaaaaaaaaaaaaagtaaaaaaagaggcatttaacaataatcagacacwtccacacattaaaactgatttccactgctgatttatacattatctagttgtttaaaaatcgcaatcaacatcccaacatctttttaagagtacaatgggc

SEQ ID NO: 539638 - DNA, 201 bp, Homo sapiens
agtcggtgctcagtgaggtccacgctacagatcggctgaactctgcaggtcagtttgctgccatccccagtgccaatttcacttcatgtgagttgactacvcctgctccagccacttacctctcctgtagctaaggccacaaaattatccactgtttttggaacagtctttccgaagagaccaaagatcacccggcctaca

SEQ ID NO: 539639 - DNA, 201 bp, Homo sapiens
ccaaggtgcaaagtcttaaaatagagcaaattgcagatgtagtgtgacttctctgaatttaccctttttgccccagccagcttcccagaatgccatcaagmctgtgagtactaattcttgatgtgttgctacggctagtaaatcaccaaaaggcccacaaggatgtggctgaggaaccagcttattctcttctagaagagc

SEQ ID NO: 539640 - DNA, 201 bp, Homo sapiens
agctcagagccctgtggcggactacagggcctgcacagacggtcactcaaagaaagatgtccctgtgccctactccttggcgatggcaaagggcttctccrcctcgatcttgccgcagtctgcgatgatcacatccttcaggggtttatcccggctgtctgtcttggtgctctccaccttccgcaccacctcctggaaaag

SEQ ID NO: 539641 - DNA, 201 bp, Homo sapiens
tttttattggtcagtgttggtaggagtttgttacaaaagtgagtccatgggcctgtggaatgtgaggggagtgggtccgctccaccagatgccagcaccgrggccagtgcagctcagagccctgtggcggactacagggcctgcacagacggtcactcaaagaaagatgtccctgtgccctactccttggcgatggcaaag

SEQ ID NO: 539642 - DNA, 201 bp, Homo sapiens
agggcagatccttaagtgcaacataaggtacacatgcggtaaacaggtactttctataaataattatgagggaatggaaaggaagtgggagactcaggcarggaagatatgtgctggattctttgatcaatggtatattggaaactaaggtattaatagttttataatctctcatctgctctggaaataatgtgctaatga

SEQ ID NO: 539643 - DNA, 201 bp, Homo sapiens
tctaaaaacaatctacaacacattatgaaccctaactactctaagtagagatattttaaaatgcacatcaggttgagaactgaaatagaaccacctcaaargttttggtaatttgatcctattattgcctaataattagtctttcattcttttttaaaaactaaattacctaactatgaaggacaacaaccttggcaagcc

SEQ ID NO: 539644 - DNA, 201 bp, Homo sapiens
ttaaagaaaatagaataatttttctcccaaattaaattaattctcttctcagccccatcaatagtaatagtttctagcacaactactaaatgctctgtaaygtttctgagggatcaggcaattattattataatacatgggcaattatcattaaagaaaataatattaaacatgtacccttagcaagaaatcagaaatagg

SEQ ID NO: 539645 - DNA, 201 bp, Homo sapiens
ttgcaatgaatagatattgtctgaataggcatttattcaataatacacttgaaaagcaatcttaaacctggattttcattttagttcaggtgagttcttarcctacataggataaacaaatattttccaagttttcctgaggagtacaccctgctggcctttctggtaaaatgtgtagcagctgttgtcaacaatttgttc

SEQ ID NO: 539646 - DNA, 201 bp, Homo sapiens
caatcagggctcttgagccacccgctcaagcccgctcccactctgtggagtgtactttcacttcaacaaatctatgccttcgtcttccattgctttgtgcrttttgttcaattctttgctcaaggcaccaagaacttggacaactcacagtcaagactttccatctggtaacaccttggccacccaaagtgctgggcacgt

SEQ ID NO: 539647 - DNA, 201 bp, Homo sapiens
cccatacaccaaaaaacaaactgaaaaccaaaaacaacaacaaaaaaacaaaacccaaagccaaaggaatcccaatttgattcctatcaacccctcatggsaaagactaggagtctctgccatcgacctctagacaggacttccctggagtctgcaaaagcaagaacccgagagataagtgcctgtcacttacgtggccaa

SEQ ID NO: 539648 - DNA, 201 bp, Homo sapiens
tcatacatttataagcaatgattaattcactgaacaaacctaagtcacaatgggctttttgtttaagtattcattgtcaggaaatccaaatattttataawtcactggacagtaatgaacaatgacagacaaaacactagtgagtaaaaacactaattatgttactgtggtctttgtgtggctttggcacaaaaggttgtt

SEQ ID NO: 539649 - DNA, 201 bp, Homo sapiens
acttctagtccttattttagactgagacttcccttgtctttgacctccttaaacaagcattctctaacggcagccactaaaagctctactcaatgccagaraaatggctgtgagaatacggatggaagagaaacatacaggtatacagtaagagaaatacgagtaaagaccaaaaaaaggtcaaaatatgacatagaatta

SEQ ID NO: 539650 - DNA, 201 bp, Homo sapiens
agtatatacttttcatcagcatatggaatattatccaggacaggccatgtgttaggcctcaaaacaaatttcaaaaaatttaaaataaatggtataacaartatcttttctgaccataaggaaataaaaccagagatcaataacaagaggaactttagaaactgtataaatacatggaaattcaacaacatgctcctgaat

SEQ ID NO: 539651 - DNA, 201 bp, Homo sapiens
ttaaaaaaaaaaaaaacccacatttttttttattggtcagtgttggtaggagtttgttacaaaagtgagtccatgggcctgtggaatgtgaggggagtggktccgctccaccagatgccagcaccggggccagtgcagctcagagccctgtggcggactacagggcctgcacagacggtcactcaaagaaagatgtccctg

SEQ ID NO: 539652 - DNA, 201 bp, Homo sapiens
aaacccacatttttttttattggtcagtgttggtaggagtttgttacaaaagtgagtccatgggcctgtggaatgtgaggggagtgggtccgctccaccaratgccagcaccggggccagtgcagctcagagccctgtggcggactacagggcctgcacagacggtcactcaaagaaagatgtccctgtgccctactcctt

SEQ ID NO: 539653 - DNA, 201 bp, Homo sapiens
caattttaaaaatgaaccgcctactaggtatttaacaagttaactggctttctctgcccaatgagattttgttttgactactgcatttgtgaagtttcaaytggggtcttgttaaggctggacacagtggttcatgcctgtgatcccagcactttgggcagccaaggtgagaggatcacctggggccaagagttcaagacc

SEQ ID NO: 539654 - DNA, 201 bp, Homo sapiens
ttggtaggagtttgttacaaaagtgagtccatgggcctgtggaatgtgaggggagtgggtccgctccaccagatgccagcaccggggccagtgcagctcaragccctgtggcggactacagggcctgcacagacggtcactcaaagaaagatgtccctgtgccctactccttggcgatggcaaagggcttctccacctcga

SEQ ID NO: 539655 - DNA, 201 bp, Homo sapiens
ctcaatgtaacaaaggtcatataggacaaatacagctaacatcattttaaacagggaaaagctgaatttctcctcaaaaaattggaacaagacaggatgcygtctctcaccactctaattcaacatagtactagaagtactatccagagcaaacaggcaagaaaaagacataaagggcatccaaattgaaaaggaggaagt

SEQ ID NO: 539656 - DNA, 201 bp, Homo sapiens
gttagagatcacacaaggaaaagcagagacaatgtggaagacctccaaccagaaccacattcacaattacccagtgctgtcatttttgttctatctctacrtaattagagaattggtatgaatttctagatcaggtcatcaatgtgaaactggggtccaaaaggccaaggtaatgattaagagttgggtactgaagaaaat

SEQ ID NO: 539657 - DNA, 201 bp, Homo sapiens
gttaagccactaaactcaaatgaaaattgggcatgagaagagtaactccacacatgaaagacttgtcaaacagtgaatgaggaaccagatccttcacagtrgtacctcatatgaaaacaccatggggggaggcctagggcatactgggaaaaacatgcttagaggcacggccacctttctggaaggagtccaattgagaag

SEQ ID NO: 539658 - DNA, 201 bp, Homo sapiens
tctctctcctttgtactgggttccctcttcaaagaagggtgccgctggtctcaaagtaggtaagtaataagtaggcctgcctctagagctggggaagaaaraggcctggtctccccagcagaacctggccctcccactgtggaggctacactgacatactccttggcccagaggacctgtggttacctcctgtgccatctc

SEQ ID NO: 539659 - DNA, 201 bp, Homo sapiens
aagttctcatcggggaagcgctcaccgtagatgctctttcctgggaaaaaagacagagcaggtcaggggcgctggattgcgccaaaccaagcagacattcrgggccaggactgagggggcttaacctgtcctctgtgccaggctaggctggagtggactacaaggacataaaagcagcgtccttcctatcttctggcctca

SEQ ID NO: 539660 - DNA, 201 bp, Homo sapiens
ctggtctccccagcagaacctggccctcccactgtggaggctacactgacatactccttggcccagaggacctgtggttacctcctgtgccatctcccctrgtgaagtctccgccctggatcatgaagtccttgattacacgatggaatttgctgtttttgtagccaaatcctttctagaaaaagggaagagaaggtaagg

SEQ ID NO: 539661 - DNA, 201 bp, Homo sapiens
cttgatgtgttgctacggctagtaaatcaccaaaaggcccacaaggatgtggctgaggaaccagcttattctcttctagaagagcaattccaacttaccarctggatggctatcattaacaccgtcttcaaagtaaatgttcggtcacagaggtcaaacaagtcctccaagctagggccaaggagctccagcaccatggca

SEQ ID NO: 539662 - DNA, 201 bp, Homo sapiens
aatgtgaggggagtgggtccgctccaccagatgccagcaccggggccagtgcagctcagagccctgtggcggactacagggcctgcacagacggtcactcwaagaaagatgtccctgtgccctactccttggcgatggcaaagggcttctccacctcgatcttgccgcagtctgcgatgatcacatccttcaggggtttat

SEQ ID NO: 539663 - DNA, 201 bp, Homo sapiens
tctatgccatttcagagatcctagttccaaagctgcttccacgaggaacaccgaaacccttctttttccctatcaccccttggagactgacactgtgcatkaggccccaagaaactcagccaaaaatggggtcattttcattttgttttatctaacacctttcaaacatatttgcatgcaaaactcttttttccttctcac

SEQ ID NO: 539664 - DNA, 201 bp, Homo sapiens
ccagccagcgcaacatagtgagacctgtctctaccaaaaaaaaaaaaaaaatcaatttagaggtaggctatgaaaaagtacagatacatcccttaacataractggagggtggtggcaaggggagcaaatgtggaggcccagtagctggcaaagtttagaagcagggggcaaaagctcctgcctgacttttcctgggtagc

SEQ ID NO: 539665 - DNA, 201 bp, Homo sapiens
ggtgtcaccaattttttgatatctctcttttaatgtgtcagcctgtagagagtaaagagagaaagttactttaaaagagggcctaaacatgggagattcartatgtttttggacacaatggttgtttcactcaaattcgcagtatttgttggtcttgattttttttctaacactaacaaataagaaatgtagtagaaatta

SEQ ID NO: 539666 - DNA, 201 bp, Homo sapiens
gagccaccacgcctggccatcctagctaattttttaactttctgtagagatgagctctccctttgttgctcagtcttgtccaatccatcatggtttttttkgggggggatggagcctcattctgtcacccaggctagagtatgcagtggcatgatctcggctcactgcaacttctgcctcccagattcaggcaatcctccc

SEQ ID NO: 539667 - DNA, 201 bp, Homo sapiens
caggtgtggtggcgtgcgcctgcagtcccagctactcgggaggctgaggcaggagagttgctcgaacccgggaggtggaggttgcagtgacgcgagatcgygccactgcacaccaccctgggcgacagagcaagactccatctcaaaataaataaataaataaaattttaaaaaaaattctatcacattctaagagaatgg

SEQ ID NO: 539668 - DNA, 201 bp, Homo sapiens
ctcaagttatgtatacaccctgtgaactcagttgccagtcttaaatcttatgccaaaaacactccaatcaattaacaaatatatactgagaggctactgtkagcaagaattcatattaagttcaatgaaagacaagtccattgtgggctccctgggttataactatagctgattattgctatagtcagggtataataaaac

SEQ ID NO: 539669 - DNA, 201 bp, Homo sapiens
gccaagagtatatacttactggtgagaaaatatatttgtgggtgtactccattggacatgtgtgtgtgtgtgtgtgtgtgtgtgtgtgtgtgtgtgtgtgtttatatactattcttaacctatatacttgcacatgtgcatctatgaaataaatgtttttgtattttcttgtaaaaatgttaatacaagaaagtgaaatca

SEQ ID NO: 539670 - DNA, 201 bp, Homo sapiens
cactgtgcctggcccaaaataaaaacaggtaaaagtgtgttgtgtattggaggtgggtaggggcagaggagtaaagtcctttccctttccaaaaagactamctcggctgggtgtggtggctcacgcctgtaatcccagcactttgggaggccaaggtgtatggatcacgaggtcaggagatcaagaccatcttggtcaaca

SEQ ID NO: 539671 - DNA, 201 bp, Homo sapiens
ggcatgcaatactacaaaaaaaaatccttaagcctatatttttgggcatgtttgtaaattttttttttttttttttttttttttttttttttttttttaaracagaatctcactctgtcgcccaggctggagggcagtggcgcgacctcggctcactgtaacttccacctcccgggttcaagggattctcctgtctcagcc

SEQ ID NO: 539672 - DNA, 201 bp, Homo sapiens
ttcccatccttgcacctcaattcagacaaccccaatcaggaggaagttttaaacattgttatactgacaaagatgatcttccagatccatctctcatcccttttttttttttttctcctattttgttaagcctctttcttcactcactggtctcaggctgccatagccagagaaaaatgtttactaaatcatgttttcaaa

SEQ ID NO: 539673 - DNA, 201 bp, Homo sapiens
tagagccaaagaatttgaggctgcagcaagctacgattgcaccactacactctagcctcagaatcagagcaagagtccgtctctttaaaaaaaaaaaaaaggggggggggaggaatcttgtcattttttaatttgaggattagcttctcctttataagagagccaaatcagaagagtcactagattacaatagctgctggg

SEQ ID NO: 539674 - DNA, 201 bp, Homo sapiens
gaatgctttccatagcagttgtggggaagcattgggccacaaaggggttatttatacagacaatttgacactgatgttttctttactgacaaaataaaagygataaaacctactttggtctgtatcacaaaaggaaatgttaattacctaaacagcacccctatctagagatacccagtcatggactctacctagtttcaa

SEQ ID NO: 539675 - DNA, 201 bp, Homo sapiens
agggagttcctgcctggcgacagcaggcaagtcaaagccctagcccgcgcttggcccctgctgccccctagtggccatatgctaggaggcaggcctgctgsctgggcctgtctggcctgggccctgaagtctgttttccctttggtgcctcctgagcccatttcccactcaccttttccttcatgggtccctggtgatggc

SEQ ID NO: 539676 - DNA, 201 bp, Homo sapiens
tagttctatcttctgtctggacacatattccgcatttgtagaggagaattataaagctactaaagttgttccacagagcagatcctgatttcctgtgttctaccacctgagaacaacagggacccaggaactaacgtatgagtgataatgtccaaattcttccaggaatatttatttatttgagacggagtcttgctctga

SEQ ID NO: 539677 - DNA, 201 bp, Homo sapiens
tgggctttttgtttaagtattcattgtcaggaaatccaaatattttataattcactggacagtaatgaacaatgacagacaaaacactagtgagtaaaaayactaattatgttactgtggtctttgtgtggctttggcacaaaaggttgtttatttacaatgctgcaacatcaccttggtaatcaaaagagtggcatatgc

SEQ ID NO: 539678 - DNA, 201 bp, Homo sapiens
ttattcaaccttaaaaaggaaattctgacacatgctacaacacgggcaaaccttgaggacatcatgctcagtgaaataagccagttacaacggacaaataytgaatgagtctacttaatattaagtacccagtagccaggcgcggtggctcacgcctgtaatcctagcactttgggaggctgaggcgggtggattgcctga

SEQ ID NO: 539679 - DNA, 201 bp, Homo sapiens
gctggagtgcagtggcacgatctcggctcactgcaagctccgcctcccgagttcacgtcattctcctgcctcagcctcccgagtagctgggactacggacrcgcgccaccaggttgctaatttttttatatttttagtagagacgcggtttccctgtgttagctaggatggtctcgatttcctgacctcatgatctgcccg

SEQ ID NO: 539680 - DNA, 201 bp, Homo sapiens
ggaaggtacaagaagctaacctgaggatgggagagagaatagagccatatttttagagaagtggttctgaatctgattttggtgacggtaaaaatcctatragaatctaatgaaagctccagacccttttcttggaaaacatgcttatctataccctccttggactacaggataacaatatttgctctaaacagctaatgg

SEQ ID NO: 539681 - DNA, 201 bp, Homo sapiens
ggaagtaggagggcatggtggatcaggaggtccaccgctcaggagaaaggccccagcgtatggctcaggagggctaagacccacaagtgatcaacagcacwcaaaactggaggcaccaaaattctaacagactcctggccagagcagggagaatgcagatttgacgagggggtacaggaattttgttcctttgaagtaaga

SEQ ID NO: 539682 - DNA, 201 bp, Homo sapiens
taaaaatcctatgagaatctaatgaaagctccagacccttttcttggaaaacatgcttatctataccctccttggactacaggataacaatatttgctctraacagctaatggacccagattctaaaaattaacattagaaaacccataaggagcggagcctaagttcaccacttaagtttgaagtatacatactgtgctt

SEQ ID NO: 539683 - DNA, 201 bp, Homo sapiens
aggcatttaacaataatcagacacatccacacattaaaactgatttccactgctgatttatacattatctagttgtttaaaaatcgcaatcaacatcccamcatctttttaagagtacaatgggcaaagatcaaagacagataaataataatataataaattagagcatgtaatacatcctatgggaattgctgaatcaac

SEQ ID NO: 539684 - DNA, 201 bp, Homo sapiens
ggagggctaagacccacaagtgatcaacagcacacaaaactggaggcaccaaaattctaacagactcctggccagagcagggagaatgcagatttgacgakggggtacaggaattttgttcctttgaagtaagacccaggttgggccaagggtgaggaggaggaagagggtgaccagggcatgtggcttctcagggacatt

SEQ ID NO: 539685 - DNA, 201 bp, Homo sapiens
gtaacagtcctaaggctctacaaaaatgaaaaatgagtagttggagaggcagcaatgagggattagtaaatcaaattttaattgctgctgatataaacagytgcaggggttaggatgtgatattgctgctctgcatgaaaaccagaaaggactataaatcttacaaatgttcacagctataaaagttgtattctataaaaa

SEQ ID NO: 539686 - DNA, 201 bp, Homo sapiens
ctttggtctgtatcacaaaaggaaatgttaattacctaaacagcacccctatctagagatacccagtcatggactctacctagtttcaaagctcagtcacmctggaatgtctttttagcatcccacctggaaagttctcacagagagcttcaatgggagtattccttttggtgtcaccaattttttgatatctctctttta

SEQ ID NO: 539687 - DNA, 201 bp, Homo sapiens
tctcctctgttaggaaagagatgaaaggccctgctcattagctgaatgctttccatagcagttgtggggaagcattgggccacaaaggggttatttatacrgacaatttgacactgatgttttctttactgacaaaataaaagtgataaaacctactttggtctgtatcacaaaaggaaatgttaattacctaaacagcac

SEQ ID NO: 539688 - DNA, 201 bp, Homo sapiens
tgttcacaggagtcttgaatcgcatcaaagttagtcctagctagattgttaattacaaatgagccgagggagattaaaaacagacaaaccaatcaaccaamcaaacaagcagaagtagccaagaaaggtaagacattttattttacatacaaaaagggtgcaaactgagtcctttcctccccaaactggggaagaggtata

SEQ ID NO: 539689 - DNA, 201 bp, Homo sapiens
accgtaaatgccgcggactccaccggaccttgacggtgactttgggccccttcttcttctcatcggccgcagaaggtcccggcagcagcaggaagaagackgaccccgcgatgagggcggcggcaaggagcaccttcatgttgcgttcggagaggcgcagcatccacaggcggaggcgaaagcagcccggacagctgaggc

SEQ ID NO: 539690 - DNA, 201 bp, Homo sapiens
tcctggccagagcagggagaatgcagatttgacgagggggtacaggaattttgttcctttgaagtaagacccaggttgggccaagggtgaggaggaggaaragggtgaccagggcatgtggcttctcagggacattgcgttcagctgcactctgtatacctcaggggtgggaccagcacgtcactgagtgaaggaggggag

SEQ ID NO: 539691 - DNA, 201 bp, Homo sapiens
acctaatataggtcgtaaagactgaagctctccattgtaacctccccaggctttccagtccctgtattctccttcttctagcaaatactgatgaccggtaratccaggcttctcatatgcaacccaactgcaacataaagaacacgaggagtagtcatttccagacatgttaacattttttcaaggtacatatcaatttca

SEQ ID NO: 539692 - DNA, 201 bp, Homo sapiens
aatctgaaaggcaagtttagttagaaattactcatttcctcaaacaagaatttgacaagacaagtaacacccttattttgtgtatgagtagaagagcttartctagagtgaatgggccctggaataaatcacctaatggattcttaaggagttccctctacagcaaagacttcttatcccagttcaggggaaccagtgcat

SEQ ID NO: 539693 - DNA, 201 bp, Homo sapiens
aactttcatagaccccactgacgtaaacggcaaatgatcgtctccagtcgcctcttctgtttcacctccctccatgacaaaactacacattcctgtttctrgttccacacattttccttcaaagaaaggcttttcataaacaactacctacaatagaaatgagatataccagtaatctgtaagaagtatcccaacagctta

SEQ ID NO: 539694 - DNA, 201 bp, Homo sapiens
cagctgcttaaaagaaagatttaaaaacaaattactctcaacagaatctgaaaggcaagtttagttagaaattactcatttcctcaaacaagaatttgacmagacaagtaacacccttattttgtgtatgagtagaagagcttaatctagagtgaatgggccctggaataaatcacctaatggattcttaaggagttccct

SEQ ID NO: 539695 - DNA, 201 bp, Homo sapiens
ggctttgtaggtccacaaagttggtaaatttgttccagttctctcctgtcactatctttggaaataatttaaaatgtacacagtcttgaaatcttgatatracattttacaaaatcacccaaaagctgctaattaggcaacctgtttaagcagctaccaaaaatgaaaggcaagaaatgaaaggaggacaaattattggtt

SEQ ID NO: 539696 - DNA, 201 bp, Homo sapiens
accctgtgaattaccacgtcaagctgacaaagaatcaccacaaggacatttggatttcatttttaccattttcagaggccgcatggatccaatgtacgctkcttctgtatcccagaaggacaagtcagggtattcaccaggttccaggatgaaaggaacaccctgaaatccaggttcttcataaatcagccacctaaatag

SEQ ID NO: 539697 - DNA, 201 bp, Homo sapiens
cactgctggtgggaatgtaaattagtttagctgctgtggaaagcagtttgaagatttctcaaagaactaaagatagaactagtattcaacccagcaatccyattactgggatatacccaggggaaaacgaattattctaccaaaaagatacttgcacgtgtcttgtttactgccacactattcacaatatcaagatgtgga

SEQ ID NO: 539698 - DNA, 201 bp, Homo sapiens
gtttactcttttcacagttactcaggatcatcactgtgagcattatttaatgcacagtggtgtcctcaggggctctgaagttctgtggggctgcttgttcycaggccacaaagctttttgagttcttggttctgattgttatggcttttcaataccacacccttctatcagcttgtcagctgtcacttctgcttcagttgg

SEQ ID NO: 539699 - DNA, 201 bp, Homo sapiens
ttgctaaaatgttttagccgtggtactccaccatgttgtgttccccagaacaccatgccaagaagagagtggctgtaaatgaaatcttttaccaacaaaaygggtctgacccctccctctttgcttttttcttcttcccaattttggcccaaggcacatttttggcggtggtttttgtgaagattccgctggataaactgg

SEQ ID NO: 539700 - DNA, 201 bp, Homo sapiens
tagctgctgtggaaagcagtttgaagatttctcaaagaactaaagatagaactagtattcaacccagcaatcccattactgggatatacccaggggaaaasgaattattctaccaaaaagatacttgcacgtgtcttgtttactgccacactattcacaatatcaagatgtggaatcaacctaggtgttcattgatcaatg

SEQ ID NO: 539701 - DNA, 201 bp, Homo sapiens
ctggggactacaaaaggggccaggagggaggggggtttgaaaaactacctgttgcatgctatgctcaggttgacgggttcaaccgtaccccaaacttcagsaaatcatgcaatatacccatgtaacaaacctgcacatgtaccccctgaatctaaaataagagttgaaaaaaaacttaatgcaaaagaaatggtaagcgta

SEQ ID NO: 539702 - DNA, 201 bp, Homo sapiens
aatactaaaaataaatctcttttggaatgtttttttctcttttaagtgatctacacccagaggaaaatcaacaaaaccaatttaatgatgctatttcctakgcaaagataaagtctttgaaaggaaaaggtttttcagttctgttatattaaagagatacttaataccattatattgaagacattaagtatcttttcaatt

SEQ ID NO: 539703 - DNA, 201 bp, Homo sapiens
atttgtgttgtttattcctgctagactgacagctccaggagaatggggacatcattttatgtcttcactgctgtattcccagtgactagaaaagcacctgrcacatggtagatgcttgattaacagatttactgaatatatttaatacatctcatagacactcttttgggtttatatttgttaaagtcccaatttcttgtc

SEQ ID NO: 539704 - DNA, 201 bp, Homo sapiens
tatgaggaagagaagctattgtccccattttatagataaagttaagtaagttgcccaaggccacacagctataagtatgaaaggctggaatgattcaagcygattccagaaccaggttcctaatcaatttttttttttttttgacggagtcttgttctgtcacccaggctggagtacagtggcttgctctcagctcactgc

SEQ ID NO: 539705 - DNA, 201 bp, Homo sapiens
gtcacttctgcttcagttggggaaccagcagccccaccctcctctaatgtgccagaaatcaggaaaccagaaaaccatgcctactagccctgtctctaaastttacaaggtcttcttgtaaacatcttcgttcctgggaagggttctgagaaggtgaggatgctgaagaagtgacttttctataagagaggggttaatgta

SEQ ID NO: 539706 - DNA, 201 bp, Homo sapiens
agcctctcctctgaactccagcctcacatagtcaccttcttgcccacttacttgaatttgcagttggcatctcagccttaacctgtccaaaactgagctcytgaatctcactctctctcctatcctgctcctccaagtctttttcgtctcaataaatgttggggttccaaaccctgggcatgtcttggcccctcatacccc

SEQ ID NO: 539707 - DNA, 201 bp, Homo sapiens
aaatgtcagaaacgacagatacttccagactttaatatctgaacatgatcttgcagttttgttctattgaatattacttccactacatcaaactgaaagayttctgtccaaaagagggcactataatctggattagcacatagtggcaaactgggagaagtcatttgattgcaaatctctaaaacacagaataataataga

SEQ ID NO: 539708 - DNA, 201 bp, Homo sapiens
aatgagcaattacgtgtgtttaaagctttttatgagaaagcagttaccaaaaactaataaaaatgtcagaaacgacagatacttccagactttaatatctsaacatgatcttgcagttttgttctattgaatattacttccactacatcaaactgaaagatttctgtccaaaagagggcactataatctggattagcacat

SEQ ID NO: 539709 - DNA, 201 bp, Homo sapiens
ttgtaaacatcttcgttcctgggaagggttctgagaaggtgaggatgctgaagaagtgacttttctataagagaggggttaatgtacctgcttcataaacraacatagacttcttagtgatcacttacactcatcaattcggttagttttgctaaaatgttttagccgtggtactccaccatgttgtgttccccagaacac

SEQ ID NO: 539710 - DNA, 201 bp, Homo sapiens
actccaccatgttgtgttccccagaacaccatgccaagaagagagtggctgtaaatgaaatcttttaccaacaaaatgggtctgacccctccctctttgcktttttcttcttcccaattttggcccaaggcacatttttggcggtggtttttgtgaagattccgctggataaactggtaacttctctagactctctaatta

SEQ ID NO: 539711 - DNA, 201 bp, Homo sapiens
actcagcttatatatttagggtttatgtacctttttgtacaaatgttatgcttcaaaaaaagttaccttaaggaaaaaaagaggcttatcttttaaatackactgtaatgcttctaaaccacaagaaaacagacgctaagaatagggtactttacacttccttatgtttaaagcatgacagccaaggatacgttacatgta

SEQ ID NO: 539712 - DNA, 201 bp, Homo sapiens
atatttagggtttatgtacctttttgtacaaatgttatgcttcaaaaaaagttaccttaaggaaaaaaagaggcttatcttttaaatactactgtaatgcytctaaaccacaagaaaacagacgctaagaatagggtactttacacttccttatgtttaaagcatgacagccaaggatacgttacatgtattttggagctc

SEQ ID NO: 539713 - DNA, 201 bp, Homo sapiens
attgaaccatgctgcagtaccctgtacagacgaggaaaggtgcaaggtattttctgcctagataaactgtgttggattgaggtccacacttgccagacagycgggttcacaggatggaccaccagaatacaaaccctactcaggtttctagcctggcagagctgatcactaaacatatattccaccttcctctctcatagt

SEQ ID NO: 539714 - DNA, 201 bp, Homo sapiens
tgctggtcatcctcttgagcctttcacacctcgtttagtggctatagtgcccccaagacctgaggctgtccaccaacagctataccctgaagcatggctgyagaacactgcagggaaggcagccccatgcaggccatgtgtggatgcaggtggataggaggacaagaaattaggctaaaaaatctgagtttagcaaaaaag

SEQ ID NO: 539715 - DNA, 201 bp, Homo sapiens; identical to SEQ ID NO: 409805

SEQ ID NO: 539716 - DNA, 201 bp, Homo sapiens
tatttgatctccatcatttaaaaaattcactatctttctgtgcagaatgacaagggaaacagatctgtagatttctatcatgatacccaaagcctaccccraacgtaaaaagaagagatggtatgagaacgatttttaaagagagttaacgaaaatatcatgacagcaactattaaatgactgatttaatgttaagctgtt

SEQ ID NO: 539717 - DNA, 201 bp, Homo sapiens
aattactagaatatgaacagccatcaaggaaaaaaagaacactgccaaaatctccagtgagaagtagctaataacagccaacatctgtgcactcactcccrgccatccaaatggagaagctgctatatgcaccactcagtctttcaggaaatacagccccctaccaccccccatcccccgatttcagaacctcactagcaa

SEQ ID NO: 539718 - DNA, 201 bp, Homo sapiens
attaaatgactgatttaatgttaagctgttgagatatttgtgtattgaatgcctactctgtgatagactcttaccagtttaaaacaaaccaaggtaaaacscatgtttaaaattccaactggattatttcacttacactccactcagtacattaatagactgtgtcttcactccatatccagtctcctttaaattagcaac

SEQ ID NO: 539719 - DNA, 201 bp, Homo sapiens
ccaagcaatcaaacttggtattgctaaagggcaagctagttagcacatgccacctgctgtgatacaacataaatatatggcactatctatatgaagtatcsgtgccaaaactgtttggcctgaacctaaccataccttaagacctaagccctagtagataggaaattcgggcaacagaagaacatgctaaatagtagcatg

SEQ ID NO: 539720 - DNA, 201 bp, Homo sapiens
attattgggtcaaagtgaatggtacattggtgttcactgaactattcttcctacttttctgtatgtttgaaaacttttataataaaaaattgggctctgayatggtatattccacaatgaaatatacagtgactattacacagcaatgaaaaaaatacatagagatgtacccatcaatatgagtaatcttaggagtgtggt

SEQ ID NO: 539721 - DNA, 201 bp, Homo sapiens
gtttctcctccaagttctaaaagtggcattttctcattgttctgacgagacacaggcaaaacacatcctttatggttttctgacacttttagatcagtgcrtgggaaactgcttatgggtgattgaacacatgtgtctttgggaacatccccaggagcgggtgcagacagtgaaagagaaggcccaggagatgactcagca

SEQ ID NO: 539722 - DNA, 201 bp, Homo sapiens
tgattgtgccactgcactccagcctgagatcctgtctcaaaaaataataactcaaatcctactaacaaatgttaccagactttgacattaaatttttaaartgtattaatttttaatatgaactaaaggaaaatagtattttgtttagagttccttaaatgtgtgaatacctaaggctttcccattgtgctatgcagcata

SEQ ID NO: 539723 - DNA, 201 bp, Homo sapiens
gagaaagtgaccaaagcttgtcttcctcagtcaaatgatggtgttgggccagatcatctttatactccctttgaagttctaaacttctttgcttttgttcrtcataaatataccaccccccacttccacccctacacacaccccgcccccaaaaaacccagtatgctttcacctctgggaggatgggtgctaggattagcc

SEQ ID NO: 539724 - DNA, 201 bp, Homo sapiens
acagtcagcttttaagtgtctgttaatagtaggaatgatgcaggagggacatgggccattttctaatttacaacgtatgacacttaggaaatggactgtgyagcacacagagggatctctttacccttcatcccgttctgtggatttccccaaaacaaaccaagagtgatttttgttgacagggctggagcttatagtttg

SEQ ID NO: 539725 - DNA, 201 bp, Homo sapiens
ttataccagatgtgctgctggaagcactgaacaagcatgaatatcaggaagaatccaaagtgagatatggattaagggtaattaccatactcaagagtctyagaggttttaaattttctcaatgagaagagtttgacaaaatgtcaaagcgcctgaggcagggtgcctgcctgtggataactgcgtttgatgttcagtttg

SEQ ID NO: 539726 - DNA, 201 bp, Homo sapiens
tagagccacatcaaaaaaagggttctcaccagggctccgagtctgtaacaagtagagagataagagggttaaaggcctttctgtttgacttcaaggtttgragggaaaaaagacagtgaggtgggaggctgaatgccaaggagagaggacagccctggaagcagctttagccagtactctgttctttttactaacaagtat

SEQ ID NO: 539727 - DNA, 201 bp, Homo sapiens
cagcctggtggaataattgctcagaagataagggcagcagggtaaacctgcccttccgtggaaggccaaaggaaaaagaatttaaaacaacaacacttttygttttcatctgaataccagaaatatttcattttgctcctagttttaaaaaactagcccagtttccactatttgagcaagaatatagcatagaactagaaa

SEQ ID NO: 539728 - DNA, 201 bp, Homo sapiens
tgcttcaaaaaaagttaccttaaggaaaaaaagaggcttatcttttaaatactactgtaatgcttctaaaccacaagaaaacagacgctaagaatagggtwctttacacttccttatgtttaaagcatgacagccaaggatacgttacatgtattttggagctcaaagctatcacaggcacagtacccatggattttgttc

SEQ ID NO: 539729 - DNA, 201 bp, Homo sapiens
agtggctcacacctgtaattccagcactttgggaggccaaggcaggaggatcacttgagctcaggagtttgagaccaacctgggcaatatggtgaaacctyatctctgctaaaaagaaaaaaagttgggtgtagtggtacatgcctatagtcccagctattcaggaggctgaggcaagaggatggcttgagctggagaaat

SEQ ID NO: 539730 - DNA, 201 bp, Homo sapiens
tttgcctctttacagactattttctatacgaacagacaggctgatccttctattaataacacaagttagataaaaattcgccaatgattctccatgccacrtagagtaaatctaaatcctcctccccgaggcctgaaaggccagatgtgacctgagccctgtcctatccctatcctcctacttcactcagcttcagctgcc

SEQ ID NO: 539731 - DNA, 201 bp, Homo sapiens
acgaacagacaggctgatccttctattaataacacaagttagataaaaattcgccaatgattctccatgccacatagagtaaatctaaatcctcctccccraggcctgaaaggccagatgtgacctgagccctgtcctatccctatcctcctacttcactcagcttcagctgccttggcctcttagctattgcccaagcat

SEQ ID NO: 539732 - DNA, 201 bp, Homo sapiens
cagacaggctgatccttctattaataacacaagttagataaaaattcgccaatgattctccatgccacatagagtaaatctaaatcctcctccccgaggcstgaaaggccagatgtgacctgagccctgtcctatccctatcctcctacttcactcagcttcagctgccttggcctcttagctattgcccaagcatgccca

SEQ ID NO: 539733 - DNA, 201 bp, Homo sapiens
agttagataaaaattcgccaatgattctccatgccacatagagtaaatctaaatcctcctccccgaggcctgaaaggccagatgtgacctgagccctgtcytatccctatcctcctacttcactcagcttcagctgccttggcctcttagctattgcccaagcatgcccagaagggcttttgcaaatggtgtgcttcctct

SEQ ID NO: 539734 - DNA, 201 bp, Homo sapiens
aaaagctgaatgtggccacaggccaccaaatgcaaaaggcctacctaaagtcaagttaacacagaaaaaagcccagtcaagacacagagaccaagttctgrtagtgtttgatctgctgcatccaggcatgcctgaagcaaaatcttctccaggactttttagttacttaagccagtaagttccattttaatcccttgagcc

SEQ ID NO: 539735 - DNA, 201 bp, Homo sapiens
cacatagagtaaatctaaatcctcctccccgaggcctgaaaggccagatgtgacctgagccctgtcctatccctatcctcctacttcactcagcttcagcygccttggcctcttagctattgcccaagcatgcccagaagggcttttgcaaatggtgtgcttcctctctgggacaggctccctgcccctcttccctcagct

SEQ ID NO: 539736 - DNA, 201 bp, Homo sapiens
tattatcaaaaagacacaatataacaagtattggtgaggatgtggagcaaagggaactcttccacactattggtgggaatataaattagcacagccattayggaaaacagtatagaggctcctcaaaaaattaaaaatagaactcctgtgtgatcttgcaatctcactactgagtatatatccaaaggaaatgaaatcaag

SEQ ID NO: 539737 - DNA, 201 bp, Homo sapiens
acaatgcttctggcaaacagagttctttcttcaaaaatatttggatatatttattgcatttctgcttgtggcaaaataatattcataataagtcagttaastttgcatttgggaaacaaacttctttctccacgttctttctgacttccccagcctccagccttccttgctcttctcatgggtgccaccgtttgcccagcc

SEQ ID NO: 539738 - DNA, 201 bp, Homo sapiens
ctggggagaaaagagggagaggggataatgtaggcctcatagggcggctgtgaagatgacgggacatggtgtactgaaagtggctagcacagcagctggcrcacagtaggggctctcttactgttactactaataatacattcatcattttcaaaagttatgaatagatttttccttaactaaaagacatacacattacaa

SEQ ID NO: 539739 - DNA, 201 bp, Homo sapiens
atgtttctttgttactattttcatgtctcagtagcatttttgctatttaaacaggcaggcagggatgagatgaaaaccaactcacatacgttcttcctacmtttaaaactaaaatgagcaattacgtgtgtttaaagctttttatgagaaagcagttaccaaaaactaataaaaatgtcagaaacgacagatacttccaga

SEQ ID NO: 539740 - DNA, 201 bp, Homo sapiens
ggtattcaccaggttccaggatgaaaggaacaccctgaaatccaggttcttcataaatcagccacctaaatagccaccatggaaggaaagaaagggagccractcatcatttgtttcagtttttccttctgtctggtacccaggatgagaggaaaagaacaggagaggatacggacctacacaatgaatggttggactcag

SEQ ID NO: 539741 - DNA, 201 bp, Homo sapiens
tggacactcacttcccacagcttctggactacgctctgtggacaaaggaggggttgtttctcctccaagttctaaaagtggcattttctcattgttctgaygagacacaggcaaaacacatcctttatggttttctgacacttttagatcagtgcatgggaaactgcttatgggtgattgaacacatgtgtctttgggaac

SEQ ID NO: 539742 - DNA, 201 bp, Homo sapiens
taaaagaagtaatttcttgacaaatagcaaatttttgttacatgagtacttatgccaaaaagttccattcttgaagagaaataggtaagttttttcctccrtaaagcaatgaaatattgtcttttagtggattcctcagttcttcctgggaactattcataaaatagcttcagttgtaataatgggtctttaagttgttaa

SEQ ID NO: 539743 - DNA, 201 bp, Homo sapiens
tgagtttactgcccaggggatgtattacccatgtgatggtgagcctcctgggagatactttcatggaacaagaacttcagaagagtttttttctgacaatrcatgccataataagaaataaagaatcaagctaaaatacttaattgccaataaaaataaagccattaaaatacaataattttcctttgaaactatttaaag

SEQ ID NO: 539744 - DNA, 201 bp, Homo sapiens
tatactccctttgaagttctaaacttctttgcttttgttcatcataaatataccaccccccacttccacccctacacacaccccgcccccaaaaaacccartatgctttcacctctgggaggatgggtgctaggattagccagctgcttaaaagaaagatttaaaaacaaattactctcaacagaatctgaaaggcaagtt

SEQ ID NO: 539745 - DNA, 201 bp, Homo sapiens
gtaatttcttgacaaatagcaaatttttgttacatgagtacttatgccaaaaagttccattcttgaagagaaataggtaagttttttcctccataaagcartgaaatattgtcttttagtggattcctcagttcttcctgggaactattcataaaatagcttcagttgtaataatgggtctttaagttgttaatatttcca

SEQ ID NO: 539746 - DNA, 201 bp, Homo sapiens
aataaataaaatccatatttaccacaacctacctgaaccacatgtctgatggaaccaatcaccactggcttatcagactctgcttcttcgtgcctttccamaatgtcttctataccccagagaccagagagttccaattctccttcttctaaggggatggagtgcccttcaaaatttggttgctcatacaaaatccaacta

SEQ ID NO: 539747 - DNA, 201 bp, Homo sapiens
acaattttttccctatcctgcttaaagtttgtggaaagggtgcggtaccttactgcttcatttatgtggatgtgtcctgactggtaaaaagattttgtccrtcagtaaacagagcatgttagtgtgtagaagtagtttgtgtggtctaggaattagtttatataaaacatacatggaggaaagaagacaaaaattatagta

SEQ ID NO: 539748 - DNA, 201 bp, Homo sapiens
aagatatgaatcccttatcttaccacgagtagtatttcctgtgcttttcattgctaaagccataattttaaactagtagtgaggactaaaaagttaattargtatgtaaaactcaaacacttgacatcaggaacttaaagtgccattcttaccatcctctaacaacttttatgagtatcactggagagaggctccaagaac

SEQ ID NO: 539749 - DNA, 201 bp, Homo sapiens
caccatttgtgacgtccctgttctctttgtcattgatttccggcatcaccagaggctcactgttcccattagtgttggtgtgcagggacttgaagaggacrctctgttcagcagatgcacgtttgggtctcagtttggattttgtgtcaaggttctgcatcaaatgtaaagccggtgacatttctggctgactttccttct

SEQ ID NO: 539750 - DNA, 201 bp, Homo sapiens
tacccatgtgatggtgagcctcctgggagatactttcatggaacaagaacttcagaagagtttttttctgacaatacatgccataataagaaataaagaaycaagctaaaatacttaattgccaataaaaataaagccattaaaatacaataattttcctttgaaactatttaaagtgaataggtagtcctcctccatcat

SEQ ID NO: 539751 - DNA, 201 bp, Homo sapiens
aaaatacttaattgccaataaaaataaagccattaaaatacaataattttcctttgaaactatttaaagtgaataggtagtcctcctccatcatcttggckcatctcagccttcctatcctatcccacaggcctaactccaatgccacctcctccacaaagtcttccttccctgtgtccagactggaaattaatctctctc

SEQ ID NO: 539752 - DNA, 201 bp, Homo sapiens
ttcccagagcatttaatctgtacctcttttgtagcaataattatgttttacataaataccgtaacttctttgaggacataatacaatgctttgcacataayagacctcaataaatacttgtcaaatgacaaatcgaacaaaatatgaggaagcacctggccctggtaaatacaaaagcccttccatatgcaaagaatttca

SEQ ID NO: 539753 - DNA, 201 bp, Homo sapiens
gagcaaagggaactcttccacactattggtgggaatataaattagcacagccattatggaaaacagtatagaggctcctcaaaaaattaaaaatagaactmctgtgtgatcttgcaatctcactactgagtatatatccaaaggaaatgaaatcaagtatgtcaaaggatacccgcacttgcatgtttcttgcagtgctat

SEQ ID NO: 539754 - DNA, 201 bp, Homo sapiens
atagccaagatacagaatcagcctgagtgtccatcaacagatgaatgaataaagaaaatgtggtaaaaatatataatagaataagttctggtgttctattscacagtagggtaactatgattaacaataatatattttatatttcaaaatagctagaagagaggattctgaatgatcttaccacaaagaaataatacgtgt

SEQ ID NO: 539755 - DNA, 201 bp, Homo sapiens
ttgaaaatatacgctgtgacttatgttttatgtttcaagaaaccatgcacacgatctgtgaagaaaatataatccatgacacactgggagccatgacataycatagccctttaacatgacaccattcagaaaaatgtaccccaaggaaacaaattagaaaattataaattactggccgggcacagtggctcatgcctgtaa

SEQ ID NO: 539756 - DNA, 201 bp, Homo sapiens
cctgtattatgattattactgcagaaaaagcagactagaatatggccaacaaagggtagaaaattcaaaaaataaaaggggaggggacacttcatgatggygggaatcagatgatctttttaaacattgctttatttccaatattatttgagcagtaaataaaaactctaggcaaaatattccactaatgaggacattttg

SEQ ID NO: 539757 - DNA, 201 bp, Homo sapiens
cttgacactcgtctccattaaaacttgggattttaattttctacttagaagacatcattaattgcatttttaaggtaaagaatcatcaaatcctaagagcmacaaagaaagactctgacaacactttcctcatcaaataacaagaaaccaagaaattttacctcacccataaagtggcctcaaatagagtaaataatattt

SEQ ID NO: 539758 - DNA, 201 bp, Homo sapiens
ataacaagaaaccaagaaattttacctcacccataaagtggcctcaaatagagtaaataatattttgttaaacccacatgaaatcccagagttaatcaacmaaattatttttggattatttatttttccaaaatagaattcctataaaccactcaaagtaatcagaactcatacagcaaacaaaaacactaaataaatgaa

SEQ ID NO: 539759 - DNA, 201 bp, Homo sapiens
gccaagctacctacctggagatcattcagaagtgacagccacttttgctccccatacagttaccaaagcccctgatgaaaatgtccagattcgttctccaytatccagaaaagttgttttttaaaaatcagattacagcactttcttgtccctacaactttttttttttttgagacgaagtcttgccctgtcgcctaggct

SEQ ID NO: 539760 - DNA, 201 bp, Homo sapiens
tttctttttaaattatttaaagtgtacaaatacttaaaatacagaaaatatatccataaggcaccaaatatgtttcccaatcacatatttcgtaaaatgawcatttcccttaaagtaagaatccataaatattagctgaataaataaaatccatatttaccacaacctacctgaaccacatgtctgatggaaccaatcacc

SEQ ID NO: 539761 - DNA, 201 bp, Homo sapiens
ggtccgctgctaatgtaacaagtcagggacatcctgtgtgcctagcgcatctagaacgtaaactgtctgaagccaaggaggaggcttttttttttttttttcacgctggtgccctccgtgtctagcaccgagcctggcacatagtgtgtaccccgtgaatacatgttgaaagaataagagaagaaagctctagctaaggat

SEQ ID NO: 539762 - DNA, 201 bp, Homo sapiens
cataccacacacccaactaatttttttatttttatttttttgtagaatggggtctatgtcacccaggctggtctcaaactcctggcttcaagcaatcctcycatcttggcctccccaagtgctgggattacaggcatgagccaccattctctgccacatttgttttttaatgaaactatttttaaatagtcctaagtacac

SEQ ID NO: 539763 - DNA, 201 bp, Homo sapiens
atttggagtgtggtgtgtgtgtgtgtgtgtgtgtgtgtgtgtgtgtgtgtgcgcacacatgtgtttttaagacaaggtcttgctctgtcgccaagactggrgtacagcagtgtgatcatagattgctgcagcctcgaactcctgggctcaggcaatcctcctgcttcagcctcccaggtagctgggactacaggcacatac

SEQ ID NO: 539764 - DNA, 201 bp, Homo sapiens
agtacagcagtgtgatcatagattgctgcagcctcgaactcctgggctcaggcaatcctcctgcttcagcctcccaggtagctgggactacaggcacataycacacacccaactaatttttttatttttatttttttgtagaatggggtctatgtcacccaggctggtctcaaactcctggcttcaagcaatcctcccatc

SEQ ID NO: 539765 - DNA, 201 bp, Homo sapiens
aattgcttaaacctgggaggtggaggttgcagtgagccaagattgtgccactacactccagcctgggcgacagagtgagactctgtctaaaaaaaaaaaaagaagcttgggcctaaggagcttctagaagggacaggcagtatgactgctggtgagtcaacttatccttctggataaaatattctctccaaaagcagcact

SEQ ID NO: 539766 - DNA, 201 bp, Homo sapiens
caactaacaataaaacacagcaaaaccattagtcagtcttcgtgagagaggttttgattactcaaataacctggctaattgccattttatatatatatatwgaatattagcagccaattatctagcaattaaaatagcttaaactctccctaacactaatattttactgggtataattaagcctctgataactcatgaact

SEQ ID NO: 539767 - DNA, 201 bp, Homo sapiens
tgtgtgtgtatatatatatgtgtgtgtgtatatatatatgtgtgtatatatatgtgtgtgtgtatatatatgtgtatatatgtgtgtgtatatatatattrtgtgtatatgtgtgtgtgtatatatgtgtatatatatatgtgtgtgtatatatatatgtgtatatatatatgtgtgtgtgtgtgtatatatatatgtata

SEQ ID NO: 539768 - DNA, 201 bp, Homo sapiens
gcacccggcctccatctgtgtatttgaatgcaaagtcagtgcttttttgctgtgcaatactaaaggataggatagcattatttcaaccataaagaaccacrtgattaaaggcactattactactattattaagagacttaaatcctcaacacctcttgcacagattgctccaaggctttcctgaccgagtttccctgacct

SEQ ID NO: 539769 - DNA, 201 bp, Homo sapiens
ccatgttgtgttccccagaacaccatgccaagaagagagtggctgtaaatgaaatcttttaccaacaaaatgggtctgacccctccctctttgcttttttsttcttcccaattttggcccaaggcacatttttggcggtggtttttgtgaagattccgctggataaactggtaacttctctagactctctaattatacaga

SEQ ID NO: 539770 - DNA, 201 bp, Homo sapiens
ataaaaaagaatgaaatcaagtcctttgcagcaacttggatgcaactggaggtcactatcctaagcgaattaacacaaacagaaaatcaaataccaaatayttatgagcaagaacatatacttatgagcatgttcttgcccataagtgggagctaaacattggtcatgcatggacataaagaagaaaaaaaaataggccct

SEQ ID NO: 539771 - DNA, 201 bp, Homo sapiens
agagtaaagaacctgctctgaattccattacacaatgagatgatcttcagcttctccaaccaacctgaagcccgtgtcctctggcgtctggtactcagatrtcacgaagcacgccattggactaagatggtggtttcgcatagtgccaagcacctaacaggcatcactatatacttgctgatgtgtgaattctgttttact

SEQ ID NO: 539772 - DNA, 201 bp, Homo sapiens
ttggtcatgcatggacataaagaagaaaaaaaaataggccctggggactacaaaaggggccaggagggaggggggtttgaaaaactacctgttgcatgctrtgctcaggttgacgggttcaaccgtaccccaaacttcaggaaatcatgcaatatacccatgtaacaaacctgcacatgtaccccctgaatctaaaataag

SEQ ID NO: 539773 - DNA, 201 bp, Homo sapiens
ccccccatttcctataataaatcgatactgtttttaagacagatgaatcataacataggtgcaaaagaatcagaattttacgtgccttataaaaatatacyttacagttaataattacttaacaggatgacaaattagagtcagagtatcttaagtcctctttttccagtactacactcacaaaaaaacttcattaaaatt

SEQ ID NO: 539774 - DNA, 201 bp, Homo sapiens
cccccccatttcctataataaatcgatactgtttttaagacagatgaatcataacataggtgcaaaagaatcagaattttacgtgccttataaaaatataycttacagttaataattacttaacaggatgacaaattagagtcagagtatcttaagtcctctttttccagtactacactcacaaaaaaacttcattaaaat

SEQ ID NO: 539775 - DNA, 201 bp, Homo sapiens
tgtatatatgtgtgtgtatatatatattgtgtgtatatgtgtgtgtgtatatatgtgtatatatatatgtgtgtgtatatatatatgtgtatatatatatrtgtgtgtgtgtgtatatatatatgtatatatatattccagtactttgggaggtcaaggagggaggattgcttgagccaaggggttcaagaccagcctggg

SEQ ID NO: 539776 - DNA, 201 bp, Homo sapiens
tgtgtatatatatattgtgtgtatatgtgtgtgtgtatatatgtgtatatatatatgtgtgtgtatatatatatgtgtatatatatatgtgtgtgtgtgtrtatatatatatgtatatatatattccagtactttgggaggtcaaggagggaggattgcttgagccaaggggttcaagaccagcctgggcaacatactgag

SEQ ID NO: 539777 - DNA, 201 bp, Homo sapiens
atgaggaagcacctggccctggtaaatacaaaagcccttccatatgcaaagaatttcaaaggaagtggggtgtgtgtgtgtgtgtgtgtgtgtgtgtccaygtatgtgtacgtagctcccttcaacttcccccttctaccaaaacttaactgctacagccagaaaaaagaagcttaagccaggaaatgcaattagaaatga

SEQ ID NO: 539778 - DNA, 201 bp, Homo sapiens
ctccccactctttctgatgtccctggggaaccaccaaccccattcatatctaagtggctcctatgggatagaccctacatctcagctctggagatggacaygtagcccagacacggccgtctctgtggctacagtgattggttcaggcatgtgcacatgacccaagcctaggaaagcaaagtcaaacatggaacttgtgag

SEQ ID NO: 539779 - DNA, 201 bp, Homo sapiens
aggaactgtcgccctctgtaactgccatattcataagtaacccatctgaaaacaaaaataaccacagtaagtggcaattttcatttgacagtggaccccarttacatttatttttagaatgctttccatttctagactgaactatatacttttaacatacattgggggaaaaatgatcttttctagaacacttaaaagaag

SEQ ID NO: 539780 - DNA, 201 bp, Homo sapiens
catttgtgacgtccctgttctctttgtcattgatttccggcatcaccagaggctcactgttcccattagtgttggtgtgcagggacttgaagaggacgctytgttcagcagatgcacgtttgggtctcagtttggattttgtgtcaaggttctgcatcaaatgtaaagccggtgacatttctggctgactttccttcttct

SEQ ID NO: 539781 - DNA, 201 bp, Homo sapiens
gatggtggtttcgcatagtgccaagcacctaacaggcatcactatatacttgctgatgtgtgaattctgttttactccagtgattcagctctgccaggccwttgtttcacttacctgcctcctgaaactctgcaagacttggtagaaaatgaatcatcaatttgacttgttgtttcttcaaaactttgactgtgaccttga

SEQ ID NO: 539782 - DNA, 201 bp, Homo sapiens
tatatacttgctgatgtgtgaattctgttttactccagtgattcagctctgccaggccattgtttcacttacctgcctcctgaaactctgcaagacttggwagaaaatgaatcatcaatttgacttgttgtttcttcaaaactttgactgtgaccttgaaactgtggttctgaaaacaagtgaatctttgaaaaagtaaac

SEQ ID NO: 539783 - DNA, 201 bp, Homo sapiens
tacactgcgctgaagctttgcgcacccatctgcagctctgcagggctgagaatgccttaaagacaaaggacatagtcttacctgcctttttttttttttttaatctatagcatctagcaagttattctttccatgatttctattgagcaataggtccaatctactacaaatttgtttcttaaaagtcagctttattgcttc

SEQ ID NO: 539784 - DNA, 201 bp, Homo sapiens
ggtggcacacatctgtggtcccaactacttgggaggctgaagcaggaggatcgcttaagcccaggaggcagaggttgcagtgagctgagattttgccactgcactccagcctggatggcagagtgaaactctgcctcaaaaaaaaaagagttaggagaacaaaagctgaatgtggccacaggccaccaaatgcaaaaggcc

SEQ ID NO: 539785 - DNA, 201 bp, Homo sapiens
acaagtgaatctttgaaaaagtaaacagaaacacataaaattattttcctaaacacattaactaatttagcctttgaaatgatgacctaaacatgacctgytgacttttgttacagtaaactggtacgaattttagaaatcctttaattttccatgtctacattcatgatcaattagaaacatgttagctgcaccattcgt

SEQ ID NO: 539786 - DNA, 201 bp, Homo sapiens
ttattttttaaatacaattatgctttcaggcataaaaatgagtaaaactaacaaaatgtcccaaatgtctgatttttttttttttttttttttttttttttgagacagagtctctgtcactcaggctggagtgcagtggtgcgatctcggctcactccaacatctgcctcttgggattcaagcaattctcctgcctcagct

SEQ ID NO: 539787 - DNA, 201 bp, Homo sapiens
tttcctaaacacattaactaatttagcctttgaaatgatgacctaaacatgacctgctgacttttgttacagtaaactggtacgaattttagaaatccttyaattttccatgtctacattcatgatcaattagaaacatgttagctgcaccattcgtgactatttatttaattcagagacatcaaagtaaaatgcaacaac

SEQ ID NO: 539788 - DNA, 201 bp, Homo sapiens
atcacttgaacctgggaggcggaggttgcagtgagtcaagatcatgccactgcactccagcctgggcaactgagtgagactccatttcaaaaaaaaaaaaataaaagcatgtggggattacaattttttccctatcctgcttaaagtttgtggaaagggtgcggtaccttactgcttcatttatgtggatgtgtcctgact

SEQ ID NO: 539789 - DNA, 201 bp, Homo sapiens
gatgacctaaacatgacctgctgacttttgttacagtaaactggtacgaattttagaaatcctttaattttccatgtctacattcatgatcaattagaaayatgttagctgcaccattcgtgactatttatttaattcagagacatcaaagtaaaatgcaacaacaaaggtaactttctatagaacaccctgttgtgaagc

SEQ ID NO: 539790 - DNA, 201 bp, Homo sapiens
cactttcttgtccctacaactttttttttttttgagacgaagtcttgccctgtcgcctaggctggagtgcagtggcacaatctcggctcagtgcaacgtcygcctcccgggttgacgcgattctcctgcctcagcctcccaaatagctgggactacaggcgcccaccaccacacccagctaatttttttgtattttttagt

SEQ ID NO: 539791 - DNA, 201 bp, Homo sapiens
gcttactggatgtttcagatactttagtgctaaaaacagcctcatggcttctttctttggagaagtatcattaacaaaagggttatctgatttttttttttccagtgtagaataaagatcccttcagatggcttatcctttttttagcataaacctcagcaccaaggatgtatcaacaaagaccccatcaaagtaaaaatc

SEQ ID NO: 539792 - DNA, 201 bp, Homo sapiens
gttcaaaaggctggcagggctatcctggccatttgtaacagtctgatctggcctttgaggagtggctaagtgatttccgctgctgggagagttggtgggamtggattcagccatcaggggtgttctgctgccctgactttgagcctgaataggcagagttttctctgatgctggcggtatgacttgtgggccagattttgc

SEQ ID NO: 539793 - DNA, 201 bp, Homo sapiens
ctgatgtccctggggaaccaccaaccccattcatatctaagtggctcctatgggatagaccctacatctcagctctggagatggacatgtagcccagacayggccgtctctgtggctacagtgattggttcaggcatgtgcacatgacccaagcctaggaaagcaaagtcaaacatggaacttgtgagaaagagaagctct

SEQ ID NO: 539794 - DNA, 201 bp, Homo sapiens
cagtggtttataaaacgggagagataaagcataaccactaacaatcagtgattgtcaagcccttgacaaatgcttcatcgggcttacttaattaatatacractttatacattctatttttggctgaggaagttgaagtgtcgagaagtaactccctgaggttatgcagctgataagtgacagggccacagtttgaagtga

SEQ ID NO: 539795 - DNA, 201 bp, Homo sapiens
atttgccaaatgaccatgtgcaaggcactgcgcaaaacaaatacattgaatgtctggtaaagaaaatttttaggtataaattaatcagaactgggaaagasatatttggtttagttctattacagagaacagcaaacgaagaatttcattataagatcatctttcctgtttgtttagcctactatttcacagtgtaacatt

SEQ ID NO: 539796 - DNA, 201 bp, Homo sapiens; identical to SEQ ID NO: 409799

SEQ ID NO: 539797 - DNA, 201 bp, Homo sapiens
taggagaacaaaagctgaatgtggccacaggccaccaaatgcaaaaggcctacctaaagtcaagttaacacagaaaaaagcccagtcaagacacagagacyaagttctgatagtgtttgatctgctgcatccaggcatgcctgaagcaaaatcttctccaggactttttagttacttaagccagtaagttccattttaatc

SEQ ID NO: 539798 - DNA, 201 bp, Homo sapiens
aaatacttgtcaaatgacaaatcgaacaaaatatgaggaagcacctggccctggtaaatacaaaagcccttccatatgcaaagaatttcaaaggaagtggkgtgtgtgtgtgtgtgtgtgtgtgtgtgtccatgtatgtgtacgtagctcccttcaacttcccccttctaccaaaacttaactgctacagccagaaaaaag

SEQ ID NO: 539799 - DNA, 201 bp, Homo sapiens
ttcaggaaatacgaaatagtttttcttactcttcagtctcaaattgttttaaagaataatctgattaacatcttgcgatacggtcataggaagaattaaasggtctgaaaaaaccatcagtcacaaagaaatgggtcaaaggactagaaatacttattaatttttaagtcaataatttgccaaatgaccatgtgcaaggca

SEQ ID NO: 539800 - DNA, 201 bp, Homo sapiens
ctctcctcctcttaagcttacttatccaagaaatcaaatagaatgaaagaaaccattaggttcaagaattataatgataatgttgttaaaatacccactcyttgaacaaatatgtgaatggaggaaaaacttaagcacttaatcattattcacctgtgctaagtgggagtggtgagggagcagaagtgtgagaagggaggg

SEQ ID NO: 539801 - DNA, 201 bp, Homo sapiens
acacatgtcaaagctactggatcgtatttaacatgttactgtttgctccatattttgaaattcacagcacatgcattttaagaacatcccaccttggaacwcccttgtacattttgaataaagaatagaatcagctcatgtcaggccatgaggtcttatctctcatctacataaacgttgagcttcaacggatatcctatt

SEQ ID NO: 539802 - DNA, 201 bp, Homo sapiens
tcctgcccttcctcttcgtgggggacgaagccgggggtggctgtttgctccggtccgactcccctcggagctgccctttggtaccggggctgggcttggaytctgggctcgcagcggaggcaacgcccccgtcgagggctgcccgcggagatttcactttcttttccgccgaggcgttatcgctggccgcgtttggcgcca

SEQ ID NO: 539803 - DNA, 201 bp, Homo sapiens
gttttttttactctatttactaagagtaaaagttaagcatgttcatcaacttttagtacattgtacacacttttcaaatatccagggctattgtgggaggycccatgagatacaatggggttgaggctaggatgattcaaatagtctatgtcactatgacaacaaaaacctaacaccaaacactttcagcataaccaatgt

SEQ ID NO: 539804 - DNA, 201 bp, Homo sapiens
aagcgatctaagaacaattaaaaagaacaaagtagtaatgaatgggaagtggaccagtggaaattttgtgcttgagagaaatagttaatatttctattatrtaactattaatagaaatagttagaattttatgatttctgagtaccataggctgattcagtcttatttgtttatagcagtggttctcaaaatgtggttcag

SEQ ID NO: 539805 - DNA, 201 bp, Homo sapiens; identical to SEQ ID NO: 409812

SEQ ID NO: 539806 - DNA, 201 bp, Homo sapiens
gcaccagtattgagtgatgaggacaaaaagaggaagaatatattcaaggaaatgtttagcacttttgttcaaagctagaacccactgttggaagagcagcrtatgggctggtgtcttgtcagttgttaagcagtttgtttgcattttgaaatgcttactgcagttgaggattccaagattgcttgaagattgatttgactc

SEQ ID NO: 539807 - DNA, 201 bp, Homo sapiens
gagtggtgagggagcagaagtgtgagaagggagggtcttatcagtttcatagagtaccttccctatcctgtccacctatacaaattgcatttatcatcaasgcacaaggcccagctcccccaaagcaccagcagtgatttcttgctcgctagcacttccccaggatttacagatggtaacattcgtttggcagtttcatca

SEQ ID NO: 539808 - DNA, 201 bp, Homo sapiens
tgaataaacttaacagcaagtagtcacagttgttttgtgctttcatgcagcacaaggaggaagaagcaaccaagatacataaattagggactttttgaaaraggcttaggccaataatgcactaagttccataaaatgttttggaattatcttaaactcacacctgtcacagctgctttcatgtagcaaataatcttccag

SEQ ID NO: 539809 - DNA, 201 bp, Homo sapiens
actattataataaaataaatgtttgaagtcagcctatggccagattctggttcagcagttacagctgtgagattgtggccaaactggccaacccctttgarcttccggggttttgttgttgttgttgttgttgttttgtctgtaaaactggggagaaaagagggagaggggataatgtaggcctcatagggcggctgtgaa

SEQ ID NO: 539810 - DNA, 201 bp, Homo sapiens
cttcactatcttaagttcagcatggaggggaaagttcagtgaccagacgtttcttccacaatgcagataccccgagcctctcagagcggacccccagcacrtgtgcggacagcaactcggccgggacttgcgcggctacttacagggtcactttagtggtcactgtcgacctgcccacgccgaaatggttcctgggcttca

SEQ ID NO: 539811 - DNA, 201 bp, Homo sapiens
cttctagaagacaaaacccccagcagttgttataccagatgtgctgctggaagcactgaacaagcatgaatatcaggaagaatccaaagtgagatatggaytaagggtaattaccatactcaagagtcttagaggttttaaattttctcaatgagaagagtttgacaaaatgtcaaagcgcctgaggcagggtgcctgcct

SEQ ID NO: 539812 - DNA, 201 bp, Homo sapiens
ctctgggaggatgggtgctaggattagccagctgcttaaaagaaagatttaaaaacaaattactctcaacagaatctgaaaggcaagtttagttagaaatyactcatttcctcaaacaagaatttgacaagacaagtaacacccttattttgtgtatgagtagaagagcttaatctagagtgaatgggccctggaataaat

SEQ ID NO: 539813 - DNA, 201 bp, Homo sapiens
ccagattctggttcagcagttacagctgtgagattgtggccaaactggccaacccctttgagcttccggggttttgttgttgttgttgttgttgttttgtytgtaaaactggggagaaaagagggagaggggataatgtaggcctcatagggcggctgtgaagatgacgggacatggtgtactgaaagtggctagcacagc

SEQ ID NO: 539814 - DNA, 201 bp, Homo sapiens
ggccacaggcatgtgccacgacacctggctaatttttaaatttttggtagagatggggtctcactttgttgcccaggcttttcttgaatccctggattcawatgatccttctacctcggcctcctaaagtgttgggaatacaggcgtgagccactgtgcccagcccaaacttgatttttaaaatgatctattttattgagt

SEQ ID NO: 539815 - DNA, 201 bp, Homo sapiens
actagaggcaggagtattcctttggcctcgaatgtcagtgtgtcttgggctactgtttgtccgtttgttttcaaataaggagattttggtggcagtgttgyctttgtgaactggctggctaaatggattgtgctcatttcccaaactgtcaagattcttaggggttttaagatttagttccacatgtttgggcttggcagg

SEQ ID NO: 539816 - DNA, 201 bp, Homo sapiens
gccagattctggttcagcagttacagctgtgagattgtggccaaactggccaacccctttgagcttccggggttttgttgttgttgttgttgttgttttgyctgtaaaactggggagaaaagagggagaggggataatgtaggcctcatagggcggctgtgaagatgacgggacatggtgtactgaaagtggctagcacag

SEQ ID NO: 539817 - DNA, 201 bp, Homo sapiens
gagattgacagtttctgcattaagttcaatcttttttcctttgaagtcttctctttcaaagagaataattgttggttcagaaaattcctgttgaggaacaraaacaatgttctgttattcatctttgttaataattcaaacttatgtgaaaatcatcttgttacaaggacaaagcacaaaaaatctgctagatttggcctt

SEQ ID NO: 539818 - DNA, 201 bp, Homo sapiens
cattactttcttttcaggttgctccatttctttggcttttttggctaaattcagctttgccctcccaacaaacgttttactagaggcaggagtattccttkggcctcgaatgtcagtgtgtcttgggctactgtttgtccgtttgttttcaaataaggagattttggtggcagtgttgcctttgtgaactggctggctaaa

SEQ ID NO: 539819 - DNA, 201 bp, Homo sapiens
tttctctgatgctggcggtatgacttgtgggccagattttgccgcgagctctgctgtgcaatgagagtgttcattgcccagtacttcctcttgtgggggarcacaacttgcaacggaaaccacttcaggttcattactgtgacaagttggcaactgcacttctctaacttcagagctctctgggatgacctgggagctcac

SEQ ID NO: 539820 - DNA, 201 bp, Homo sapiens
tttctgcattaagttcaatcttttttcctttgaagtcttctctttcaaagagaataattgttggttcagaaaattcctgttgaggaacaaaaacaatgttstgttattcatctttgttaataattcaaacttatgtgaaaatcatcttgttacaaggacaaagcacaaaaaatctgctagatttggcctttccataaactc

SEQ ID NO: 539821 - DNA, 201 bp, Homo sapiens
ggccacaggccaccaaatgcaaaaggcctacctaaagtcaagttaacacagaaaaaagcccagtcaagacacagagaccaagttctgatagtgtttgatcygctgcatccaggcatgcctgaagcaaaatcttctccaggactttttagttacttaagccagtaagttccattttaatcccttgagccaatttagcttggc

SEQ ID NO: 539822 - DNA, 201 bp, Homo sapiens
cttttcacagttactcaggatcatcactgtgagcattatttaatgcacagtggtgtcctcaggggctctgaagttctgtggggctgcttgttcccaggccrcaaagctttttgagttcttggttctgattgttatggcttttcaataccacacccttctatcagcttgtcagctgtcacttctgcttcagttggggaacca

SEQ ID NO: 539823 - DNA, 201 bp, Homo sapiens
ccaccaaatgcaaaaggcctacctaaagtcaagttaacacagaaaaaagcccagtcaagacacagagaccaagttctgatagtgtttgatctgctgcatcyaggcatgcctgaagcaaaatcttctccaggactttttagttacttaagccagtaagttccattttaatcccttgagccaatttagcttggcttgcagtca

SEQ ID NO: 539824 - DNA, 201 bp, Homo sapiens
cagagggttaagtgagccgagatcacgtcactgcactccagcctgggtgacagagtgaaactcttgtctcaataaaataaataaaataaaataaaattaartttaattaaaataaataaaataaaataaaataaaatgttctaatcatattttaaaaaattaactaggccaggcacagtggctcacacctgtaattccagc

SEQ ID NO: 539825 - DNA, 201 bp, Homo sapiens
tgagtttattttggacacttcctctaagtgtctgcaatcagatgaacaaaaacacaacaaataattacaacttcacataacgatcctctttttccacccaygatcctgtaggtagatcacacttttcccacattgtatcgattttgaaacctccactctaatggatgctaaagttgtattaaaactctttgagtttatgct

SEQ ID NO: 539826 - DNA, 201 bp, Homo sapiens
agactggttctatcagagctaggatatactgtcatgaaaaaaacaaattcatttctgaaagtactccaggaattgtgaaattgcatctacttgaagaaaaratcaaaagcatatgaaaggatgagtcacctcctagcaaagccatcacaggcccccgtggaatcctaaagctcaccctgcatttgatacatccttcttgat

SEQ ID NO: 539827 - DNA, 201 bp, Homo sapiens
taggtcgtaaagactgaagctctccattgtaacctccccaggctttccagtccctgtattctccttcttctagcaaatactgatgaccggtaaatccaggyttctcatatgcaacccaactgcaacataaagaacacgaggagtagtcatttccagacatgttaacattttttcaaggtacatatcaatttcattgaaaaa

SEQ ID NO: 539828 - DNA, 201 bp, Homo sapiens
aagagatggtatgagaacgatttttaaagagagttaacgaaaatatcatgacagcaactattaaatgactgatttaatgttaagctgttgagatatttgtrtattgaatgcctactctgtgatagactcttaccagtttaaaacaaaccaaggtaaaacccatgtttaaaattccaactggattatttcacttacactcca

SEQ ID NO: 539829 - DNA, 201 bp, Homo sapiens
atgacctgctgacttttgttacagtaaactggtacgaattttagaaatcctttaattttccatgtctacattcatgatcaattagaaacatgttagctgcrccattcgtgactatttatttaattcagagacatcaaagtaaaatgcaacaacaaaggtaactttctatagaacaccctgttgtgaagctgtgaggtattt

SEQ ID NO: 539830 - DNA, 201 bp, Homo sapiens
tcagcaattatttataatataataaattctgataggcagaacccatacaaacaaaagctcgttggggttctcaatcatttttaaacataaagggtcctaayaccaaacatctgaaacccaaactttatgaaagtttatgaaatcacatgaaaaagggatctgcacctctgctggaaacccaaccatatattttgaaagagc

SEQ ID NO: 539831 - DNA, 201 bp, Homo sapiens
gatgtttgtgtactccaagctagagagaaagcacagaggggcagttagtttctccattgcataggaaggcaggtaaatataaatagtttgtaaaacagggraaaaaaaaaagagaaatgggtatacgctgggaatatcaacacttctgatggcatttatttttgacttagccattttcatgggacaaggaggggctggaaa

SEQ ID NO: 539832 - DNA, 201 bp, Homo sapiens
ctggtgggagtctcaagtggtgggatctagcagtactgaatgaaactgcctgttcttacatgtgaaatccagtaattctactcctaatatatagtccaagmgactcccactcaggtccatagggatatgcatatgaggattaagtgagtaaaacagggtggtggaaaacgtgtaccagttagaatcaataaactagatgta

SEQ ID NO: 539833 - DNA, 201 bp, Homo sapiens
acagagccaaatggacagttccatctccaagcccttaactaactttaagagcaggttctaccggctggttacctcactctgaccatcagctatatgaggcrtacatttctgcaacactattcacaatgacatacttacaacatctataaaacgaagagacttgaaagttgctccaggcgggcatcccattgcagacagaca

SEQ ID NO: 539834 - DNA, 201 bp, Homo sapiens
ggtatgctccctgattcgcgtgtccaccagctccactccagcgtgtactttctaccttcctgttaatgcagagtgccgatcctgtcctttgaacaatccamcttgggaggtaccttggattaactagagcccaactctccctttctagatgatgggaagacatacagagtaaagaacctgctctgaattccattacacaat

SEQ ID NO: 539835 - DNA, 201 bp, Homo sapiens
ctggaaggcagagaggttgcagtgagctgagatcatgccactgcactccagcttgggtgacagagcgagattctgactctaaaaaaaaaaaaaaaggccataagggcccccctagagccttatcagaagccagatggtatatacctatttatgtatatatacacattagaagtagataaactgaagaaaaagcctaaaatt

SEQ ID NO: 539836 - DNA, 201 bp, Homo sapiens
ggaaacaaacttctttctccacgttctttctgacttccccagcctccagccttccttgctcttctcatgggtgccaccgtttgcccagccagtggagcttyaagccctcaagtcctttttgaataatccttcttcaagctttgtgactagttaatcaccaaggcctattgatttggtctattgatttccttccaaaatttc

SEQ ID NO: 539837 - DNA, 201 bp, Homo sapiens
accaggaacacacattaaggaaatccagaattcagttaaatattctcatacaaaaatataactccttaccaaacatataggttgaacagaagagatcttayaatttttgcctccccagtcctcaaaactggtataaaatcctttatccagtatatactgttctcctgtgaagtcaggattttcataggctacccatctaag

SEQ ID NO: 539838 - DNA, 201 bp, Homo sapiens
ccagcctggccaacatggtgaaaccctgtctctactaaaaatacaaaaattagccaggtgtggtggcacaggcctataatcccagctacttgggaggctgrggcaggagaattgcttaaacctgggaggtggaggttgcagtgagccaagattgtgccactacactccagcctgggcgacagagtgagactctgtctaaaa

SEQ ID NO: 539839 - DNA, 201 bp, Homo sapiens
gccttcatgaagcttgagcctggctgggtgtggtggctcatgcttgtaatccctacactttgggaggccaaagcgggtggatcacttcaggtcaggagttycagaccagcctggccaacatggtgaaaccctgtctctactaaaaatacaaaaattagccaggtgtggtggcacaggcctataatcccagctacttgggag

SEQ ID NO: 539840 - DNA, 201 bp, Homo sapiens
aaatacataaattagctgggcgtggtggcactcacttataatcccagctacttgggaggctgagacatgaaaatcgcttgaacctggaaggcagagaggtkgcagtgagctgagatcatgccactgcactccagcttgggtgacagagcgagattctgactctaaaaaaaaaaaaaaaggccataagggcccccctagagc

SEQ ID NO: 539841 - DNA, 201 bp, Homo sapiens
ccacagatgggtaagcagcatcacatggaagtatttgttggtatttgttttgaatgggaaatgacttgtccagggtgacacaatcgactattggccagaaygtgactgaacctacctgtcctgaggcccaccaggctctccttgctttgtgacccaacctgccatgtgccctggaaagttccctttcatttactgttctag

SEQ ID NO: 539842 - DNA, 201 bp, Homo sapiens
tatatgtgtgtgtgtatatatatgtgtatatatgtgtgtgtatatatatattgtgtgtatatgtgtgtgtgtatatatgtgtatatatatatgtgtgtgtrtatatatatgtgtatatatatatgtgtgtgtgtgtgtatatatatatgtatatatatattccagtactttgggaggtcaaggagggaggattgcttgagc

SEQ ID NO: 539843 - DNA, 201 bp, Homo sapiens
tgctgaccaggatgcctattttaggaactgcctttgctctgactgctcttgcatcacaccagagtgtgatatgcccagaagaccacaaaaggctggggcgyagtgcctcacacctgtaatcccagcactttgggaggctgaggtgggcagatcacctgaggtcaggagttcgagaccagcctggccaacatggcaaaaccc

SEQ ID NO: 539844 - DNA, 201 bp, Homo sapiens
atgggaaatgacttgtccagggtgacacaatcgactattggccagaacgtgactgaacctacctgtcctgaggcccaccaggctctccttgctttgtgacycaacctgccatgtgccctggaaagttccctttcatttactgttctagtaaaccatgcctaaaacagtccacacactttataattagagcagattatgatt

SEQ ID NO: 539845 - DNA, 201 bp, Homo sapiens
gtacattatcatgtgagcatttgaaaaatcctattgagaaaaaaaattcaaaattcaaaggctagccatttattatccaaagaagaccaagtattagccawtagcttgtcctttacttacacctaatataggtcgtaaagactgaagctctccattgtaacctccccaggctttccagtccctgtattctccttcttctag

SEQ ID NO: 539846 - DNA, 201 bp, Homo sapiens
aatcaaaaccacaatgagataccacctcactccagttagaaaggctattatcaaaaagacacaatataacaagtattggtgaggatgtggagcaaagggarctcttccacactattggtgggaatataaattagcacagccattatggaaaacagtatagaggctcctcaaaaaattaaaaatagaactcctgtgtgatct

SEQ ID NO: 539847 - DNA, 201 bp, Homo sapiens
gtcattaaaaagttagaaaaatgcctttctttatagattatttttgttttaccttatagattttttttccttattgtttctttactttgccttttcctacrtgttctcaagtttccttataggtttttgaaaagtcgtatctggcctatcaacataactagtgcaattcttatcaacctcatttaaaggtcatcaaccaag

SEQ ID NO: 539848 - DNA, 201 bp, Homo sapiens
cattttttcaaggtacatatcaatttcattgaaaaatacaaatagttataaagctagacatgaccttctgctttattatcattggaattctttaaaatttrggagaataacagaatggccccaagaaaataacctaagagacatatatcagagttgtataaaaaagggaaggggagcgtgtgtgtgagtggtgtgtatgtg

SEQ ID NO: 539849 - DNA, 201 bp, Homo sapiens
aaattaaattttaagttagtgctgcattgaactgtcattaaaaagttagaaaaatgcctttctttatagattatttttgttttaccttatagattttttttccttattgtttctttactttgccttttcctacgtgttctcaagtttccttataggtttttgaaaagtcgtatctggcctatcaacataactagtgcaatt

SEQ ID NO: 539850 - DNA, 201 bp, Homo sapiens
atgtgtgtgtgtttaatcagggctgactcaaaagaacctcagcaagcaaaactggataaactcacttcagatagtaacaaaaatattatgaatagttagcratttacaagagcaactttagtgtgcacttctatgggaaatgtgcaagatctataagatgcaaaaatataaaaatcagaaagcgaactatcaaactgttca

SEQ ID NO: 539851 - DNA, 201 bp, Homo sapiens
tctcggctcactgcaacctccgcctccctggttcaagcaattctcctgcctcagctgccctagtagctgggattacaggaatgtgccaccaagcctggctratttttgtatttttagtagagactgagtttccccatgttggcctgctgatctcgaactcctggcctcaagtgatctgcccacctcggcctcccaacgtgc

SEQ ID NO: 539852 - DNA, 201 bp, Homo sapiens
ccctaagtgttgggattacaggcaggagccactgcacccggcctccatctgtgtatttgaatgcaaagtcagtgcttttttgctgtgcaatactaaaggayaggatagcattatttcaaccataaagaaccacatgattaaaggcactattactactattattaagagacttaaatcctcaacacctcttgcacagattgc

SEQ ID NO: 539853 - DNA, 201 bp, Homo sapiens
agcctcactaatagtgaaatacaaattaacccaatgacgacatactgctttctgctcattctatcaagttgacaaaaattagaatgagagaatattcagtratggcaacaatgtgtactgctggtgggagtctcaagtggtgggatctagcagtactgaatgaaactgcctgttcttacatgtgaaatccagtaattctac

SEQ ID NO: 539854 - DNA, 201 bp, Homo sapiens
caaaaggcctaaaatcagagctatatatctaggaacaagacagatatgttggatgctgttgtacatgcaccaataatattttaaaacaagacaaactattycagtgaccataattgcctaccatagactccagagaagatcagcattttagaattagaaacacacttgaatagatggaaaagaaacaagctgttctacctg

SEQ ID NO: 539855 - DNA, 201 bp, Homo sapiens
cagaaggacaagtcagggtattcaccaggttccaggatgaaaggaacaccctgaaatccaggttcttcataaatcagccacctaaatagccaccatggaargaaagaaagggagccgactcatcatttgtttcagtttttccttctgtctggtacccaggatgagaggaaaagaacaggagaggatacggacctacacaat

SEQ ID NO: 539856 - DNA, 201 bp, Homo sapiens
gttttaaaaagtgaacacacaaaccaattaattataaaactatgaaaagccaacatctccctgatatataacatttggagtgtggtgtgtgtgtgtgtgtrtgtgtgtgtgtgtgtgtgtgtgcgcacacatgtgtttttaagacaaggtcttgctctgtcgccaagactggagtacagcagtgtgatcatagattgctgc

SEQ ID NO: 539857 - DNA, 201 bp, Homo sapiens
ttgacctcccaaagtgctgggattacaggcgtgagccaccacacccggccccaaatgtctgacatttgaaacataagttcagcttttcaatggaaggcccyttatatattaatataaaagaatatttttaaagttacctgatttcgtctccttgggccagtgaaagaatcctaaaaatttttaaaggaaggagaaaaggaa

SEQ ID NO: 539858 - DNA, 201 bp, Homo sapiens
ttcagtgagccgtgatggtgccactgtataccagcctgggtgacagagcaaggcctggtctccacaaaaaaaaaaaaaaccctaaataatggcatctgatwagatagtaaaaagaaaaaaaaaatctggcttttttttttccctaatgtggtatagcccaaagccatggttccaaacagttttaaaataatttatatacat

SEQ ID NO: 539859 - DNA, 201 bp, Homo sapiens
ctgtgaagtcaggattttcataggctacccatctaagaaacaaaagcaatcacttgttggagttcatattttacatataaaacgatcacatatttggatawctatgtatcatacagaaactttcatttgttttgccaattgaaattttaatttttctgattctccattaacctttagaagcagatgggtttgtctatagga

SEQ ID NO: 539860 - DNA, 201 bp, Homo sapiens
caacaatacagatgaagacacgaggaaggcaggctagaacggagcctcgcacaagcagtctataagctgatctgcgttgtaggagtgttttttgacctagyaagtttttttaacttggaaaatttatcataaaaatccatacttctcttgaaaaagcagttccaagagctgacatctctggacccagattctcccaggcca

SEQ ID NO: 539861 - DNA, 201 bp, Homo sapiens
tcatacagaaactttcatttgttttgccaattgaaattttaatttttctgattctccattaacctttagaagcagatgggtttgtctataggacaaatcaraatggtaagccagcagagaagagggaacatttatacactgctggtgggaatgtaaattagtttagctgctgtggaaagcagtttgaagatttctcaaaga

SEQ ID NO: 539862 - DNA, 201 bp, Homo sapiens
tgcttcctcccaaagctgacagtctagcggaagaaacaaagaacaaagcaagacactgggacaagggagaggcagcacaaagcttccacagcagatactcrggaggacaacactcatctggtccagccccagagacccccaagacaccacccactcgtgtcacggcagccgagccggtcctcagcgtgccctgctctctct

SEQ ID NO: 539863 - DNA, 201 bp, Homo sapiens
aacaggatgacaaattagagtcagagtatcttaagtcctctttttccagtactacactcacaaaaaaacttcattaaaatttgtttgaaaaaaaaatactyacgtgccccaatgtactttcatggaacaagtcttctgcattacaccaaatccctgcatttcttcagtatcatcaaagtaggaacttaggattcctaaccc

SEQ ID NO: 539864 - DNA, 201 bp, Homo sapiens
tcaagcgattctcctgcctcagcctcccaagtagctgggatcacaggcatgtgacaccacgctcagctaattttgtattttttagtagacatggggtttcyccatgttggtcaggctggtcttgaactcctgacctcaggtgatccgcccgccttggcctcccaaagtgttgggattacaggtgtgagccaccacacccag

SEQ ID NO: 539865 - DNA, 201 bp, Homo sapiens
gtggtcccaactacttgggaggctgaagcaggaggatcgcttaagcccaggaggcagaggttgcagtgagctgagattttgccactgcactccagcctggrtggcagagtgaaactctgcctcaaaaaaaaaagagttaggagaacaaaagctgaatgtggccacaggccaccaaatgcaaaaggcctacctaaagtcaag

SEQ ID NO: 539866 - DNA, 201 bp, Homo sapiens
ctaacactaatattttactgggtataattaagcctctgataactcatgaactatatcaggatcttagagaactttggagttacctatatgaatgctatagmgctactaatgttctaagtaattgccaagtggtagagacttatgataatatgtcagataaatggatgtttactgtactaggtttttttttttttgtctctt

SEQ ID NO: 539867 - DNA, 201 bp, Homo sapiens
ccaagcctaggaaagcaaagtcaaacatggaacttgtgagaaagagaagctctttccactgcaagaaatgagctggggccaggcatggtggctcatgcctstaatcccagcactttgggaggccaaggcgggtggatcacctgagctcaggagtttgagaccagcctgggcaacatggcaaaaacctgtctctaaaaaaaa

SEQ ID NO: 539868 - DNA, 201 bp, Homo sapiens
atcaacttgaacaggccaatgtatcagccttccttgacagagtttcgctcttgttgcccaggctggagtgcaatggtgcgatcttggctcaccgcagcctytgcctcctgagttcaagcgattctcctgcctcagcctcccaagtagctgggatcacaggcatgtgacaccacgctcagctaattttgtattttttagtag

SEQ ID NO: 539869 - DNA, 201 bp, Homo sapiens
ggggggaggggggagggatagcattaggagatatacctaatgctagatgacgagttaatgggtgcagcacaccaacatggcacatgtatacatatgtaacwaacctgcacgttgtgcacatgtaccctaaaacttaaagtataataataataaaatttaaaaaaaaagaaaatctacgttacaaacactaggactttaaaa

SEQ ID NO: 539870 - DNA, 201 bp, Homo sapiens
tgcctcttgggattcaagcaattctcctgcctcagcttcctgagtagctgagcttatagacacaagccaccacacccagctaatttttgtctttttagtaragacggggtttccccatgttggtcaggctggtcttgaactcctgagctcaagtgatccacctgccttgacctcccaaagtgctgggattacaggcgtgag

SEQ ID NO: 539871 - DNA, 201 bp, Homo sapiens
gaggcagaactcatttaaaccaagttaccaggtaaaatatatttggaagatgggaatagaaggacaggcataaaagatctacctaaagggtttattgtgamaaattatctaaccaattatgtttctttttaaattatttaaagtgtacaaatacttaaaatacagaaaatatatccataaggcaccaaatatgtttcccaa

SEQ ID NO: 539872 - DNA, 201 bp, Homo sapiens
ttttttttttttttttttttttttttgagacagagtctctgtcactcaggctggagtgcagtggtgcgatctcggctcactccaacatctgcctcttgggrttcaagcaattctcctgcctcagcttcctgagtagctgagcttatagacacaagccaccacacccagctaatttttgtctttttagtaaagacggggttt

SEQ ID NO: 539873 - DNA, 201 bp, Homo sapiens
tgttctttgaaagtgagtttaattttagaaacaaaagcccaaatcatttgcattaagaccagcaaacatacagataattaaaccaaatactttggaaggaygggtaaaattaacattaaaaaaattgtcttcctaactttctaatttgtctcaaactgtctcagaagacaactgcgaagtgcagcttcaaaaacatgtttg

SEQ ID NO: 539874 - DNA, 201 bp, Homo sapiens
ccagagttaatcaaccaaattatttttggattatttatttttccaaaatagaattcctataaaccactcaaagtaatcagaactcatacagcaaacaaaamcactaaataaatgaaaaacctgttcatagaggcagaactcatttaaaccaagttaccaggtaaaatatatttggaagatgggaatagaaggacaggcata

SEQ ID NO: 539875 - DNA, 201 bp, Homo sapiens
taaaactaacaaaatgtcccaaatgtctgatttttttttttttttttttttttttttttgagacagagtctctgtcactcaggctggagtgcagtggtgcratctcggctcactccaacatctgcctcttgggattcaagcaattctcctgcctcagcttcctgagtagctgagcttatagacacaagccaccacacccag

SEQ ID NO: 539876 - DNA, 201 bp, Homo sapiens
caacactggggacaagacagatgcggcctgcttcctcccaaagctgacagtctagcggaagaaacaaagaacaaagcaagacactgggacaagggagaggmagcacaaagcttccacagcagatactcgggaggacaacactcatctggtccagccccagagacccccaagacaccacccactcgtgtcacggcagccgag

SEQ ID NO: 539877 - DNA, 201 bp, Homo sapiens
aagtggcctcaaatagagtaaataatattttgttaaacccacatgaaatcccagagttaatcaaccaaattatttttggattatttatttttccaaaatasaattcctataaaccactcaaagtaatcagaactcatacagcaaacaaaaacactaaataaatgaaaaacctgttcatagaggcagaactcatttaaacca

SEQ ID NO: 539878 - DNA, 201 bp, Homo sapiens
ctgtgattttttttattttcttttttagatggagtttcactcttgtcacccaggctggagtgcactggtgtgatctcagctcactgcaacctccacctccygggttcaagtgattctcctgcctcagcctcctgagtagctgggattacaggggccccaccaccacacctggctaatttttgtattttttagtagagacag

SEQ ID NO: 539879 - DNA, 201 bp, Homo sapiens
gagcatttaatctgtacctcttttgtagcaataattatgttttacataaataccgtaacttctttgaggacataatacaatgctttgcacataatagacckcaataaatacttgtcaaatgacaaatcgaacaaaatatgaggaagcacctggccctggtaaatacaaaagcccttccatatgcaaagaatttcaaaggaa

SEQ ID NO: 539880 - DNA, 201 bp, Homo sapiens
agctcacacagtgcattcaccgacagctccatttaaaaaatcatcctgctaattttttaagactgaatttaatttagcatgaagctttcctaattatcccytttctgtcacatcacccacaacttggaattgtatgtatctttgtcctgtttttccaccaatgtttaattcttcactttcctcacttgttaaacctacact

SEQ ID NO: 539881 - DNA, 201 bp, Homo sapiens
tctaatctgctagctgactctctttgaagggtgagatgagggctactgaatggactctcagatttcatcaacatagttaaccagaagcaagtttatttaaragatcagttcagcacaggctactgtagaatgtcttaccccaccatattgtaatggtatgcacaaaaggcctaaaatcagagctatatatctaggaacaag

SEQ ID NO: 539882 - DNA, 201 bp, Homo sapiens
atcccagcattttgggaggccgaggcgagtgaattgcttgagcccagaggttcgagatcagcctgggcaacgtgatgaaaccccatctctacaaaaaaaamacaaaatttggctgggcttggtgatgtgtgcctatagtcccagctacttgggaggctgaggtgggaggatcacctgagcctggggaggtagaggctgcag

SEQ ID NO: 539883 - DNA, 201 bp, Homo sapiens
gaaggaaagaaagggagccgactcatcatttgtttcagtttttccttctgtctggtacccaggatgagaggaaaagaacaggagaggatacggacctacayaatgaatggttggactcaggtgttagaatcacactagactcaaggaaaaataaagccattatatgcccctattcttgatcttttacttttctccttggct

SEQ ID NO: 539884 - DNA, 201 bp, Homo sapiens
aaggaaaaataaagccattatatgcccctattcttgatcttttacttttctccttggctggctttgtccccttattttaatttgtattattaattgctccraagttccatctaatcatttgtcatggtgccaaacattagtaacagctaacatctccctagagcttacaaggaatgccactgagaacttcatctaatcctc

SEQ ID NO: 539885 - DNA, 201 bp, Homo sapiens
ctctttgtcattgatttccggcatcaccagaggctcactgttcccattagtgttggtgtgcagggacttgaagaggacgctctgttcagcagatgcacgtktgggtctcagtttggattttgtgtcaaggttctgcatcaaatgtaaagccggtgacatttctggctgactttccttcttcttccccaaaccaaaggtaaa

SEQ ID NO: 539886 - DNA, 201 bp, Homo sapiens
ttattaattgctccaaagttccatctaatcatttgtcatggtgccaaacattagtaacagctaacatctccctagagcttacaaggaatgccactgagaayttcatctaatcctcacaaccatgctatgaggaagagaagctattgtccccattttatagataaagttaagtaagttgcccaaggccacacagctataagt

SEQ ID NO: 539887 - DNA, 201 bp, Homo sapiens
tcaatactggaacctttggatccaaagtttttttcactgtacattatcatgtgagcatttgaaaaatcctattgagaaaaaaaattcaaaattcaaaggcwagccatttattatccaaagaagaccaagtattagccaatagcttgtcctttacttacacctaatataggtcgtaaagactgaagctctccattgtaacct

SEQ ID NO: 539888 - DNA, 201 bp, Homo sapiens
aatagcaaagcagggctgtgaagctttggtcctcccgctacctgagtgtaccgtaggatgaggtgctggccgggccgcaggccaagctggctgttcccggrtagagcaaaccggacacggtaggtgtccttagtgagcctgtccatggcaatgatgcagaaggccacgaaggtctctgggttcagcttggaggggcagctc

SEQ ID NO: 539889 - DNA, 201 bp, Homo sapiens
tgtactccagcctgggtgatggagtgagactctgcctcaataataataataataataagtgagactctgcctcaataataataataataataataatgatrataataataataataataatgtcatgttgttttggggttcagagaaacaactgcaaggccaggtgtggtggctcacgcctctaatcccagtactttggga

SEQ ID NO: 539890 - DNA, 201 bp, Homo sapiens
cactgtactccagcctgggtgatggagtgagactctgcctcaataataataataataataagtgagactctgcctcaataataataataataataataatrataataataataataataataatgtcatgttgttttggggttcagagaaacaactgcaaggccaggtgtggtggctcacgcctctaatcccagtactttg

SEQ ID NO: 539891 - DNA, 201 bp, Homo sapiens
ggcgggcagatcacctgaggttgggagttcatgaccagcctgaccaacatggagaaaccctgtatctactaaaaatacaaaattagccgggtgtggtggcrcatgcctgtaatctcagctacttgggaggctgaggcaggagaatcgcttgaacctgggaggtggaggttgcggtgagccgagatcgcgtcactgcactcc

SEQ ID NO: 539892 - DNA, 201 bp, Homo sapiens
caggaggtcccagttccatcaactcctcctcactgaatctatttccaggctctaggcctcttaaagaggggtgaacctctgtaatcccagcaccttgggargccaaggcaggcggttcacgaggtcaggagatcgagccatcctggctaacacggtgaaaccccatctctactaaaaatacaaaaaattagccaggcatgg

SEQ ID NO: 539893 - DNA, 201 bp, Homo sapiens
atagcgggaccagatgagaatggtaccccacagcaccgggcaagaaggctgaccctgagcaccagggaacacagggggcccagcaggaatcccaacccagmggggacaggagggaaaagtgaagctaccaaccagggaaaggcaggccaccaaaggtagctgagggcctggcttgagatgaggggcagacaatcccccatg

SEQ ID NO: 539894 - DNA, 201 bp, Homo sapiens
gcactgaagatttacttcaatccaatctttgttttaattgctgccgttaaacctagtagcaggatcctaatgaaccgtgttctttccaggaacctgttggsccagttggtttcaagccagagacattcagaaagtttttagctctatatttgcatggtgctgcgtgagcggaggacccctctgaatcctgaaacccctctt

SEQ ID NO: 539895 - DNA, 201 bp, Homo sapiens
ttctgtgggccgtagctgcatccaggcttcctcagtgtcgtcgtcctcttccctctcagccatcatcagtggggcttgggcagcctagaaggaacaactgsgtgctcttccagaacaggccaggctctatgagaccacgggcgcaggccctgctccttggccagcctgggagagggaaaacatgggggttattctctggtc

SEQ ID NO: 539896 - DNA, 201 bp, Homo sapiens
tccgtattcccccatcagagcacgatcacattgctgtgcgtagaacctcttcacatgttttttttcctccaccaaacagaactccaagctcctagatcctygagggcagggtctggggatgcattcattttgtttcatcccacagatacggagttcctcctgcggcaccattgtgctgcaccccactgctcagctgacggg

SEQ ID NO: 539897 - DNA, 201 bp, Homo sapiens
gccaaggtcttggagcagcccgtggtggtgcagagcgtgggcacggatggacgtgtcttccatttcctagtgtttcaactgaataccacagacctggactstaacgagggtgtcaagaatttggcctgggtggactcagaccagctcctctatcagcatttttggtgtctcccagtgatcaaaaagagagtggttgtggta

SEQ ID NO: 539898 - DNA, 201 bp, Homo sapiens
tgagaggtgggtgtgagtgggcggtggcatacaaaaagtctggagaggtggcagagcagagaggccctaccccaaggccacagggagacagggaaggattycaagcaggggagtgacaggcttggatttgtgtgtggggaaaactggtctggtctcagcgtggaggtggcatggagactgggagctgggagacccatgagg

SEQ ID NO: 539899 - DNA, 201 bp, Homo sapiens
aggacaggtgcaaagggacagcagagtctcaatcaaaaaagaaagtcaccaccctgggctcacctggctgagtacaaagaaggtacggacattccagaaaygggcctgctcttggaggaaggttttcaggtagatgctctcaaaggtcttgaagcaaccgaccagagtgacaaaagtctcgtcattctcattgtctgtgat

SEQ ID NO: 539900 - DNA, 201 bp, Homo sapiens
ttactgggattataggcatgagccactgggcctggctacgtatacgccatcttttcttgcaaagtattttgggcagcttatttataacacaaccagattarattaaaaaacaggcgaggggatcagtacaaaggaaaaataaaacagataatacaacaaaaattcatgatgtgaggttctacttcatttactttttttttt

SEQ ID NO: 539901 - DNA, 201 bp, Homo sapiens
tgcatactcttttcttctgctgtacagtcagggaaggcttcctagaggtgtgctttgcagggccaaggcaagtagattgttgccctggtgctcatatcgakaagcagcctctctcacctgtgactctggcccacgcagcaggctcctgtccttgctggcttgggctgcctcccaccttgccagatctcggtgatagaggtc

SEQ ID NO: 539902 - DNA, 201 bp, Homo sapiens
aaccccccagctggcctgcctgaactctggcttgcctggaaatcgcctctcagtggcaggaactattactttgatgtgctcaaatagaagagcaggcaccstggggccatgaggcacagccagcctgggtgaaggaaggcccggccctggacagtgccctgaactcctcattctattttaattgtcccaaagagaagccat

SEQ ID NO: 539903 - DNA, 201 bp, Homo sapiens
ggaaccatgcccccacagctccaagaggtctgaactcacacaccacaccccacactcttcttcttgggcttgctcagcaccttgtggggcacagcacccgrccctgcactctcaagtttccaggcgacaggagccctttaggcttcttggcaccaagggcacggctgggtccccaccaatgtcccatgataagagatgcca

SEQ ID NO: 539904 - DNA, 201 bp, Homo sapiens
cggtgatagaggtcaaacacacagggtgagcagccactgccgcagcactgggaaggcaagggttctgtgggccgtagctgcatccaggcttcctcagtgtygtcgtcctcttccctctcagccatcatcagtggggcttgggcagcctagaaggaacaactgggtgctcttccagaacaggccaggctctatgagaccacg

SEQ ID NO: 539905 - DNA, 201 bp, Homo sapiens
ccataccctgtacttactggacaaagccaatttacgaccacaccgccttcaaccagatcagctgcgggccaagatgatcctgtttgcttttggcagtgccstggctcaggcccggctcctctatggggtatgtaggtggagaagaccactgagttgctttacgtggtgttggtctcctcccttaaggttactgctcagagg

SEQ ID NO: 539906 - DNA, 201 bp, Homo sapiens
tttggtcgccacttagtctttctagtcttatctcctgctttactgccccccaccccatccctaaattagccactttcagctttttagcatcaagctttcayaccatgtgcctttgcacatgctgtgcattctgtctggaatactcttttttgtttgatttttatttttgtttatttatttatttatttattttatttattt

SEQ ID NO: 539907 - DNA, 201 bp, Homo sapiens
aaaaagttagaatatcagcaatttcatgtagctcaacctaattattctttccacataattgggcctccacaacttcttatatatttgtttcctattccttkggtctccagggtgttttgcatccaacctactttgttcatctcatatctgccaattcctccatccaccctgccttctccaccagcaccctctcctcctggc

SEQ ID NO: 539908 - DNA, 201 bp, Homo sapiens
atgaaccgtgttctttccaggaacctgttggcccagttggtttcaagccagagacattcagaaagtttttagctctatatttgcatggtgctgcgtgagcrgaggacccctctgaatcctgaaacccctcttgcctctcttccacggaagagggcctgggccccgtggagcctcagtgcccgtttggcctgctgctctcgc

SEQ ID NO: 539909 - DNA, 201 bp, Homo sapiens
attgtctgtgatgctctgcaggataggcaccatgggggccaggcccgtgcccgcagccagcaagaggagctcaccatactggggaacagaaggggtatgtrtgacaggtgggttgggagagtctcaccttatcccctctactatgggacttttccttgagcttccttcaactggacggcagtgcccttccttggtgtccaa

SEQ ID NO: 539910 - DNA, 201 bp, Homo sapiens
cttacttccccaattgcctttgtccatgttgttcccagcactgagtttccttcccacattttccctttagctctccattcttagacccatagcttctccayggcatcttggagcatcctcaagggtcaactcaccttaattaacacttcaaagtatccttctgcgttggcagggctgatgggcgtataggctctctgaatt

SEQ ID NO: 539911 - DNA, 201 bp, Homo sapiens
ggagacatgactgtcatttttcctgacctcttcccgaccacagagtgataaagactaaaacaactgctaacatttattaaacacttactagcacctgacakaagcattaggactggaaggatcctcaaagggccctggtctaaagccctgtctcatgcatgaatcctctccatgttaccaaaaacagggtcaggataacca

SEQ ID NO: 539912 - DNA, 201 bp, Homo sapiens
ccagcagctctcagtgctgtttccacctgaaatgcctgctgggtctgtgccctttgctttggccccagacaccctcagttcacctgcatagtcacaccagscacctccgtgctctctgctcttagtcaggttttccctcctgactctgtgtcttcaggttctcttccctcagcctctcccttccaggatactgactcaggg

SEQ ID NO: 539913 - DNA, 201 bp, Homo sapiens
cataagtgtttcttattttgggaaacttctgaccaccaccgtccccatcccaaccctcacttaagtgcctcaggtgggctgccctggcctccgtattcccscatcagagcacgatcacattgctgtgcgtagaacctcttcacatgttttttttcctccaccaaacagaactccaagctcctagatccttgagggcagggt

SEQ ID NO: 539914 - DNA, 201 bp, Homo sapiens
tagcgggaccagatgagaatggtaccccacagcaccgggcaagaaggctgaccctgagcaccagggaacacagggggcccagcaggaatcccaacccagargggacaggagggaaaagtgaagctaccaaccagggaaaggcaggccaccaaaggtagctgagggcctggcttgagatgaggggcagacaatcccccatgc

SEQ ID NO: 539915 - DNA, 201 bp, Homo sapiens
cctaggatccatgtggcagccccatgagacaagtactattatctccatttcataggcaaagaaactgcagctcagggaagttaagtgatttgctcaaagastaactttactttttaccttggagaagtaactctattacatcagagtggcttgagggacttttttttttcttcagcaaactgtatcattgggcgtttgagg

SEQ ID NO: 539916 - DNA, 201 bp, Homo sapiens
ccagcaagaggagctcaccatactggggaacagaaggggtatgtatgacaggtgggttgggagagtctcaccttatcccctctactatgggacttttcctygagcttccttcaactggacggcagtgcccttccttggtgtccaaccacctatgtcccctctctacctcctccagaaagccgtccttgtttgtgaaaggca

SEQ ID NO: 539917 - DNA, 201 bp, Homo sapiens
taagctctatgacttcaggaaggtttagcagggtgggacccccttgagcacaggagggtgtcttattccttttgtattctatcaccaagcatagcttggcrtatggaagaaaggacataacaatcagagctggtaaccaaggtttcctgatctgttcctgtgctctgagtgccagctgacactttatacagaaaagtctca

SEQ ID NO: 539918 - DNA, 201 bp, Homo sapiens
ttatgcatactcttttcttctgctgtacagtcagggaaggcttcctagaggtgtgctttgcagggccaaggcaagtagattgttgccctggtgctcatatygagaagcagcctctctcacctgtgactctggcccacgcagcaggctcctgtccttgctggcttgggctgcctcccaccttgccagatctcggtgatagag

SEQ ID NO: 539919 - DNA, 201 bp, Homo sapiens
agtttttagctctatatttgcatggtgctgcgtgagcggaggacccctctgaatcctgaaacccctcttgcctctcttccacggaagagggcctgggcccygtggagcctcagtgcccgtttggcctgctgctctcgctgacaataaagagcccttgcgttgcactgaagcctgtgtttggtatgagggtgccatcgggaa

SEQ ID NO: 539920 - DNA, 201 bp, Homo sapiens
gccgccttctcgagggtgaggccccaggacgggcggcaagggaccgtgttcctctaaccagcaccgaccccgaccctctgtggctttgggcaagacattgraactctgtgggtcttggtttcttcgtctgcgaaatggggccgtagtgattcccgtcttctgagggttgttagaattgagttgtaaggagctgggcctctg

SEQ ID NO: 539921 - DNA, 201 bp, Homo sapiens
tcagcttggaggggcagctctgcaacaggaagagatccaacagctagaggccggggctccacagacacacaggcatccatagcatccttcccactgtcccsaaggagaggctgtcttggctcgggaagtttcctgtaaactggacactagcctcaccttacttccctttcaaaattggatctaagaatgccagagcgcttt

SEQ ID NO: 539922 - DNA, 201 bp, Homo sapiens
cattctattttaattgtcccaaagagaagccattcagtggacgtaggtggacgttgtaaagggaagaactagaagctgcctgggccgtgctgttccttacrctccacagcttctgatttgttttccttgtccccttttcctctcagaatgatgccaaggtcttggagcagcccgtggtggtgcagagcgtgggcacggatg

SEQ ID NO: 539923 - DNA, 201 bp, Homo sapiens
atatctgtgtattacatatgtggaaactgaggcctgagttgagtcatgctggcttacttgtccacaatcacactgtagacaaaaattcaaattcatgtctmagtctcagcccactgcctttaacattccaccccaacctgcatctcctccaggaagccttctctgaatgctgtgactcacagatctttctttcctgtaaaa

SEQ ID NO: 539924 - DNA, 201 bp, Homo sapiens
aaaatgggaagactgttcagatgcgggagaccaagacagggacagattcaaaacaaaacctatgcacagtgtcagaaggaataggtcctcagtttccctayctgtgttatacagggggtgaagtccagtgttctgacatctataactgtgaacccttccaaacattacaataaagggctaaactgcttagtccagactatg

SEQ ID NO: 539925 - DNA, 201 bp, Homo sapiens
gggccaagatgatcctgtttgcttttggcagtgccctggctcaggcccggctcctctatggggtatgtaggtggagaagaccactgagttgctttacgtgrtgttggtctcctcccttaaggttactgctcagaggaagaaaagggatataggggaactgatttcttgactgaggagttttagggaggagtacttcagccc

SEQ ID NO: 539926 - DNA, 201 bp, Homo sapiens
cacctcccttctgaggtcctccctgaaccttcccctactcattctctataaggcactctatttgtttctgttatacacgcattcactaaacatatttactrtgtgccaggcactgttctcagtgctggggatatagcagtgaagaaacagaaacccttgcactcactgagctcatatcttagggtgagaaacagttattaa

SEQ ID NO: 539927 - DNA, 201 bp, Homo sapiens
gaaagtcaccaccctgggctcacctggctgagtacaaagaaggtacggacattccagaaacgggcctgctcttggaggaaggttttcaggtagatgctctsaaaggtcttgaagcaaccgaccagagtgacaaaagtctcgtcattctcattgtctgtgatgctctgcaggataggcaccatgggggccaggcccgtgccc

SEQ ID NO: 539928 - DNA, 201 bp, Homo sapiens
catcatacaattaactggcagaaccgggcctcagttccttagtgagtctttctatcactaccctgtgtttctttttttttttttgagacagagtgttgctstgtcgcccaggctgaagtgcagtggtacaatttgggctcaatgcaacctccacctcctggttcaaacaattctcatgcctcagcctcccaagtagctggg

SEQ ID NO: 539929 - DNA, 201 bp, Homo sapiens
gtgttatcccctgatcctaagaggaggtttcagggacctagatggtatagaatacaaactaacttgtcacagagagctgtcccaagatggggaaagcctgrctctgggagcaaaggcctccagggaggggagggctatatgggagccctcaagcaggcctgggacaccagatccctggtttggggtgtgttggggggtagt

SEQ ID NO: 539930 - DNA, 201 bp, Homo sapiens
gaccacaggcatgtgctaccacacctggctaatttttgtattctttttagagatagggtcttattatgttttctaggctggtctaaaactcctgggcccargcgatctgcttgcctcagcctcccaaagtgctgggattaccggcatgagccaccatgcccagccttcccgacgtctttctttcttcttttcacctatatt

SEQ ID NO: 539931 - DNA, 201 bp, Homo sapiens
ggctgaaaagaacaagtactaaactttgattctcagcaccagtgttgtgtgggtcagttgtgaatgatgaggcaagtcatttgtcactaatattaaagtaktaaattttgcaaatgacttgctttcttttgaataattaccacagatttcaagttctccttctcctaacatcactgtcatctgtgtgccagaatgagagag

SEQ ID NO: 539932 - DNA, 201 bp, Homo sapiens
gccgaatacctgagcaggctgaaggaccaaacatgcaggagagccatgcctcctctaggcttttcagagcctacattattttcctagcctcttttttttttctttccctgagacagggtctctcagtctgtcactcaggctggagtgaagtagcacaattgttgctcactgcagccttgacctcccaggctcaagcaatcc

SEQ ID NO: 539933 - DNA, 201 bp, Homo sapiens
aagatcaggatggaaaacagatggtacggtagtgtgaaatgctaaagagaaaaataactacggaaaagggataggaagtgtgtgtatcgcagttgacttayttgttcgcgttgtttacctgcgttctgtctgcatctcccactaaactgtaagctctacatctcccatctgtcttatttaccaatgccaaccggggctcag

SEQ ID NO: 539934 - DNA, 201 bp, Homo sapiens
tcctgggttcaagtgattctcctgtctcagcctctcaagtagctgggattacaggtacccgccaccatgcccagctaatttttgtgtgtgtgtgtgtgtgtatttttagtagagacggggtttcactattttggccgggctggtcttgaactcctgacctcaggcaatccacccgccttggccttccaaactgcgggaata

SEQ ID NO: 539935 - DNA, 201 bp, Homo sapiens
tcatgcctggctaattttttgtatttcttttgtagagatggggttacaccacattggccaggctggtctcaaagcaatctacctacttcagcctcccagaktgctgaggttataggtatgagccactgtgtctggcccagacacaattttcaaatgaagatatgaccttgagtcagagaagtgttcttccagctgagatgg

SEQ ID NO: 539936 - DNA, 201 bp, Homo sapiens
ccaggctctatgagaccacgggcgcaggccctgctccttggccagcctgggagagggaaaacatgggggttattctctggtctcctctattcctcacattmtccaaagcctgcaggtgccaggctctgtgcaagcactggggatggagatggatcagccaaggagtgtgctgtctggtggggagcattaaccacttactat

SEQ ID NO: 539937 - DNA, 201 bp, Homo sapiens
aggacaaatcagcagggagtggctggtacggggagactcttgaggatgctgcagctgtggcccaggcaggggagagagcacactgagtcaagagagtgtgyacaggcaggagccaccagtcacccccttcacctgccactgatggccagcccactcgcttgcccaaccccaggccactggcaccaccctggcccagctggg

SEQ ID NO: 539938 - DNA, 201 bp, Homo sapiens
ccaatttgtactccttcttcaaggtccaactcaaatgccccggttctgcccacctcccctaagaggtgatgttaggttagtcctgtctataagctcctccmtgtcctacctcttgcctaatcctctcagattgcatcctgctcccttggcactccttccttctgttccaggacaaaggacttacttccccaattgcctttg

SEQ ID NO: 539939 - DNA, 201 bp, Homo sapiens
actgaggagttttagggaggagtacttcagcccaccctgtggagatgagccaacatcactagggggtgactgcctgtgcttcacctaagtagctcacttgrtcacagtagcccacatgtttttactgaagtccccactttctaagctatgccatagaattacagggaggccatgcagcttatcagcattacacagcactaa

SEQ ID NO: 539940 - DNA, 201 bp, Homo sapiens
ctgagcaggctgaaggaccaaacatgcaggagagccatgcctcctctaggcttttcagagcctacattattttcctagcctcttttttttttctttccctragacagggtctctcagtctgtcactcaggctggagtgaagtagcacaattgttgctcactgcagccttgacctcccaggctcaagcaatcctcctacctc

SEQ ID NO: 539941 - DNA, 201 bp, Homo sapiens
tctgtgctccttcctgggtcccagtagcaggctcatggcctaggctttggaagagaggccagggctagaagaggaaataggagtcctcagtgaggcctgcrcacagtaagcacctggctatgtctttggtgaactcagccgagccacagaccagtgcgaatggctttctccgacagcagctgaccagctctttaattaggt

SEQ ID NO: 539942 - DNA, 201 bp, Homo sapiens
actgcagcctcaacctcctgggctcaagcaatcctcctgcctcagtctcccgagtagctgagactacaggtgtgcaccaccatacctggctaatttttttwacttacattttgtagagacagggtctcactatgttgccagtctggtctcgaactcctggcctcaagtgatcttctcatctcagtctcccaaagtgctgag

SEQ ID NO: 539943 - DNA, 201 bp, Homo sapiens
ggttgacctcttgatgcctgcgtatcatgtctagctcctaagtctcccttctcctactacaacatcacacggtggccacgcctcccacaacacgcagtggrcatcatcagaggaacagcagctgatgggaaccatgcccccacagctccaagaggtctgaactcacacaccacaccccacactcttcttcttgggcttgct

SEQ ID NO: 539944 - DNA, 201 bp, Homo sapiens
tgtgtaactactactcagtcaagtaaaaagaatcttgccagcattccagaagccacctgtgtcccttcctgataactgcacttccccaggtgataattatktcctttttcccctagttttgccacctttgtttgcaatcctaaccactacagttcagctttgcccagagtttcatacagcttctaaaatggtggcaaccag

SEQ ID NO: 539945 - DNA, 201 bp, Homo sapiens
caagggcacggctgggtccccaccaatgtcccatgataagagatgccaccagcagccaggctgcacagaacctacacggagtgaggggaagaggaggccarcacattctaggttggttaccactgggtggccttgtataatatctaaatatctaaacatctaaaatgagacaaggacagagatacgagaactgccccggac

SEQ ID NO: 539946 - DNA, 201 bp, Homo sapiens
accttttcatgacacccatcacttttagacttacaggttgaattgctgccttccttgctaggctgtaagttccccgatggacataactgcatctgcctggygtgctgttgtttccctggtgtctgaacagagtcaggctcctgacaggcccccgctatttggagctgagtcaataggatgtgcaaactgagggagaggaaa

SEQ ID NO: 539947 - DNA, 201 bp, Homo sapiens
tttttagtggctaggaaaatccttttgtacaaataaaaataattcaaaaccccaatatatgaatgggataaaaatgcagctgctctggttgaagggggtaytggggatccatctggagctgtcctttcactgctgctatgcaaagaacccttgcttcctgtagagcgcagttcgaaaatcactgatgcagaattggcacat

SEQ ID NO: 539948 - DNA, 201 bp, Homo sapiens
atcctgggttcaagtgattctcctgtctcagcctctcaagtagctgggattacaggtacccgccaccatgcccagctaatttttgtgtgtgtgtgtgtgtgtatttttagtagagacggggtttcactattttggccgggctggtcttgaactcctgacctcaggcaatccacccgccttggccttccaaactgcgggaat

SEQ ID NO: 539949 - DNA, 201 bp, Homo sapiens
aagtccctggctcaactggaaggggtctagtaggaaaggtgaggtttttctcctgccttgctggaggctgtctccatgcacgctttgttttctggcccctrtctagggggaggcatgaccccagctgtggccttgacagcacccaagaagaagggaaggattcttccatgttgtctttagtaccctgatatggtttggctg

SEQ ID NO: 539950 - DNA, 201 bp, Homo sapiens
ggcatgagccaccgtgtccggcaacactcttaatatgagtgacttcaaagcttttgaagcctctatccccgctggcagtggtgtgcccctgggctctcccyagactaggctaaagcccctgccaaccactctcccagcaccctgcacttaccttttcatgacacccatcacttttagacttacaggttgaattgctgcctt

SEQ ID NO: 539951 - DNA, 201 bp, Homo sapiens
catcctgggttcaagtgattctcctgtctcagcctctcaagtagctgggattacaggtacccgccaccatgcccagctaatttttgtgtgtgtgtgtgtgtgtatttttagtagagacggggtttcactattttggccgggctggtcttgaactcctgacctcaggcaatccacccgccttggccttccaaactgcgggaa

SEQ ID NO: 539952 - DNA, 201 bp, Homo sapiens
gcatcctgggttcaagtgattctcctgtctcagcctctcaagtagctgggattacaggtacccgccaccatgcccagctaatttttgtgtgtgtgtgtgtgtgtatttttagtagagacggggtttcactattttggccgggctggtcttgaactcctgacctcaggcaatccacccgccttggccttccaaactgcggga

SEQ ID NO: 539953 - DNA, 201 bp, Homo sapiens
ccttgggggcttcggggccccgagacgcggggcgtatgagtggggcgtgcgctccacgcggaagtcggagcctcctcccctggatagggtgtacgagatcyctggactggagcccatcacctttgcggggaagatgcacttcgtgccctggctggcgcggccgatctttccgccctgggaccgcggctacaaggacccaag

SEQ ID NO: 539954 - DNA, 201 bp, Homo sapiens
gtcacagaacaaatccagtttctcacttgaggcagcctttttactaagatgctacctggcaggtgtaagcatctcttcctgaatctttttctttccttctttatttttgtggctaattacctcaaaggtgtaaagcaggccctctggctcaccaagaccaagttaatagaaggccttcccgagaaagtgcttagccttgtt

SEQ ID NO: 539955 - DNA, 201 bp, Homo sapiens
ctcgggagcagagcagcgtcaacagttgttttggctgaagggggctgggaatgcttcctgtcctcccaggctacagcccctcaatgccccttcttagtccragagagagacgatgtcagaaaaagaaagttactgtccaggcactgaagatttacttcaatccaatctttgttttaattgctgccgttaaacctagtagca

SEQ ID NO: 539956 - DNA, 201 bp, Homo sapiens
tgtcacagaacaaatccagtttctcacttgaggcagcctttttactaagatgctacctggcaggtgtaagcatctcttcctgaatctttttctttccttctttatttttgtggctaattacctcaaaggtgtaaagcaggccctctggctcaccaagaccaagttaatagaaggccttcccgagaaagtgcttagccttgt

SEQ ID NO: 539957 - DNA, 201 bp, Homo sapiens
gtgtcacagaacaaatccagtttctcacttgaggcagcctttttactaagatgctacctggcaggtgtaagcatctcttcctgaatctttttctttccttctttatttttgtggctaattacctcaaaggtgtaaagcaggccctctggctcaccaagaccaagttaatagaaggccttcccgagaaagtgcttagccttg

SEQ ID NO: 539958 - DNA, 201 bp, Homo sapiens
ctctctctttttttttctttcgacagaatcttgctctgacactcaggctggagtgcagtggcacaatctcactgcaacctctacctcccaggcctaatctrtccttccacctaagcctcctaagtagctgggattacaggcacatgctgtcatgcctggctaattttttgtatttcttttgtagagatggggttacaccac

SEQ ID NO: 539959 - DNA, 201 bp, Homo sapiens
atgagagaaatactgaagaggaaattaacagaacactgagactgactagatgtgagggagtgtggggggacagaggggtagaagggacatccaacccctcrgatctggcttgggttttgggtagacagaaggctcaagaagaagttgagttttaagggaaagaagaagagagtttggtttcaggtatgctgagtgcctgtg

SEQ ID NO: 539960 - DNA, 201 bp, Homo sapiens
ctccctcctgtgagcactccatgcacttggtccatccctgctcataaaagctgctcataaacacttttctttttcttttcttttcttttttttttttttttgagacagagtctcactctgttgcccaggttgccaggttggagtacagtagcatgatcttgactcactgcaacctctgcctcctgggctcaagtgattctc

SEQ ID NO: 539961 - DNA, 201 bp, Homo sapiens
gcttggatttgtgtgtggggaaaactggtctggtctcagcgtggaggtggcatggagactgggagctgggagacccatgaggggaacacagaagtgacgtyggtaaacatggtgagggctgaactaaagccaatgccgcttctgcgaccaagaatctgtcctcaggccctctagtagctgttgccttcctgaagcttggga

SEQ ID NO: 539962 - DNA, 201 bp, Homo sapiens
ggcctgcctggcttcactccctcctgtgagcactccatgcacttggtccatccctgctcataaaagctgctcataaacacttttctttttcttttcttttyttttttttttttttttgagacagagtctcactctgttgcccaggttgccaggttggagtacagtagcatgatcttgactcactgcaacctctgcctcctg

SEQ ID NO: 539963 - DNA, 201 bp, Homo sapiens
gaggatgtgcatagattacatgcaaataccacaccattttatatcaaggactcgagcatcctcagattttgctatctgcagggggtcctggagtcaatccyccatgaataccaagggacaactatatatagtctgaagaatttaaatgaaaaaaccatcttacaagcccacaaaaaaacaaaatccagaacagagccatca

SEQ ID NO: 539964 - DNA, 201 bp, Homo sapiens
ggagtgagactctgcctcaataataataataataataagtgagactctgcctcaataataataataataataataatgataataataataataataataawgtcatgttgttttggggttcagagaaacaactgcaaggccaggtgtggtggctcacgcctctaatcccagtactttgggaggctgaggcaggtggatcac

SEQ ID NO: 539965 - DNA, 201 bp, Homo sapiens
tcagcgtggaggtggcatggagactgggagctgggagacccatgaggggaacacagaagtgacgtcggtaaacatggtgagggctgaactaaagccaatgycgcttctgcgaccaagaatctgtcctcaggccctctagtagctgttgccttcctgaagcttgggatgcatatgcacaaagagagctctgtgtggctcaca

SEQ ID NO: 539966 - DNA, 201 bp, Homo sapiens
gccaccaaaggtagctgagggcctggcttgagatgaggggcagacaatcccccatgctctaacctatgggggtggccccagaagggttacctgagtgagcrgaggggatgtggagtcagagggaggaggggtcagcagggagagtcgctgccagctacggcggggtcctcctatggagggacaggctgaggtgggaggata

SEQ ID NO: 539967 - DNA, 201 bp, Homo sapiens
tgggcaccacctgcacaaggcaacggaagtccctggctcaactggaaggggtctagtaggaaaggtgaggtttttctcctgccttgctggaggctgtctcyatgcacgctttgttttctggcccctatctagggggaggcatgaccccagctgtggccttgacagcacccaagaagaagggaaggattcttccatgttgtc

SEQ ID NO: 539968 - DNA, 201 bp, Homo sapiens
ttttaagcacccatggccatctctgatatcatccctgacttccttgggcaccacctgcacaaggcaacggaagtccctggctcaactggaaggggtctagwaggaaaggtgaggtttttctcctgccttgctggaggctgtctccatgcacgctttgttttctggcccctatctagggggaggcatgaccccagctgtggc

SEQ ID NO: 539969 - DNA, 201 bp, Homo sapiens
attgttgccctggtgctcatatcgagaagcagcctctctcacctgtgactctggcccacgcagcaggctcctgtccttgctggcttgggctgcctcccacyttgccagatctcggtgatagaggtcaaacacacagggtgagcagccactgccgcagcactgggaaggcaagggttctgtgggccgtagctgcatccaggc

SEQ ID NO: 539970 - DNA, 201 bp, Homo sapiens
gctctatgacttcaggaaggtttagcagggtgggacccccttgagcacaggagggtgtcttattccttttgtattctatcaccaagcatagcttggcatayggaagaaaggacataacaatcagagctggtaaccaaggtttcctgatctgttcctgtgctctgagtgccagctgacactttatacagaaaagtctcattg

SEQ ID NO: 539971 - DNA, 201 bp, Homo sapiens
aacatcactgtcatctgtgtgccagaatgagagagaaaggtgtggagttagaactagcttgcaggcagcacctataacaggttggcaggcattttctgtgragagtcaaaacagtaaatattttaggtgttacaggccacatatggtctctgtcacagctacccaatagtcatacgtaaatgagtgaatgtggttgtgctc

SEQ ID NO: 539972 - DNA, 201 bp, Homo sapiens
ttagggtttttattaaaaaaaaaaatcagtggttcgttcgtaaaatatagtcttggattagcagcagaagcatcatctgggaacttgttgaaaaggcataytctcagacctaccccagacctgctgaatcagaaaccctggggttggggcccagcgatcagcgttttaacaagccccccagttatgctgctacaagctcga

SEQ ID NO: 539973 - DNA, 201 bp, Homo sapiens
gagtttaaaaaccactgaactggccgggtgcggtggctcacgcctgtaatcccagcactttgggaagccgaggtaggaggatcacttgaggccaggagttygagaccagcctggccaacatggcaaaaccccatctctactaaaaacacaaagattagctgggtgtgatggtgcatacctgtaatcccagcactttgggag

SEQ ID NO: 539974 - DNA, 201 bp, Homo sapiens
gaccagcctggccaacatggcgaaaccccatctctactaaaaatacaaagattagctgggtgtggtggcatgcacgtgtaatcccagctactcgggaggcwgaggcatgaatgttgctttaacccaggaggcggaggctgcagtgagctgaaagattgcaccactacactccagcctgggtgacagagtgagactgtgcct

SEQ ID NO: 539975 - DNA, 201 bp, Homo sapiens
tcttggagcagcccgtggtggtgcagagcgtgggcacggatggacgtgtcttccatttcctagtgtttcaactgaataccacagacctggactgtaacgarggtgtcaagaatttggcctgggtggactcagaccagctcctctatcagcatttttggtgtctcccagtgatcaaaaagagagtggttgtggtaagttgag

SEQ ID NO: 539976 - DNA, 201 bp, Homo sapiens
cccttagagaagccaaatttggggaaagtgaagctagggaggtctttgcctggcaccacagcccatcccactgagagtagctaagtttctttaatgtttaragactatcaggctaaactgaatctattttagtttgcatatacaccatcttttatttatttatttattttagagacagggtctctgtcacccaggctgcag

SEQ ID NO: 539977 - DNA, 201 bp, Homo sapiens
gagttggttcatgcgtcctctgagctctatcttttcagttcaagaggcaccacctttaatccaggccttgacacatgttgcctcaggctggatgacttttyccaccccgcaggccttggttttaaaggtcacctcccttctgaggtcctccctgaaccttcccctactcattctctataaggcactctatttgtttctgtt

SEQ ID NO: 539978 - DNA, 201 bp, Homo sapiens
ctgattccagtctgtgctccttcctgggtcccagtagcaggctcatggcctaggctttggaagagaggccagggctagaagaggaaataggagtcctcagygaggcctgcgcacagtaagcacctggctatgtctttggtgaactcagccgagccacagaccagtgcgaatggctttctccgacagcagctgaccagctct

SEQ ID NO: 539979 - DNA, 201 bp, Homo sapiens
tgcaccactacactccagcctgggtgacagagtgagactgtgcctcaaaggaaaaaaaagaaaaaagaaaaggcaaccactgaactgaaatttcagaacayggcattatttaatccttgtagttttttaaccccatgtggcagatgctattagcttcattttatagatggtgaaactgaggctcagggaggctaaggaact

SEQ ID NO: 539980 - DNA, 201 bp, Homo sapiens
atgttaaccatgagatagaaaccctgccttcagctagttcactgtgtgtacatagaaagatatgtatttgcctgtgtgtgtgtgtgtgtgtgtgtgtgtgwgagagagagagagagagagagagagagagaatgtatccatgtatccttccttcttttcttcccctctaccttccatgcccactttcccttcttgtccatc

SEQ ID NO: 539981 - DNA, 201 bp, Homo sapiens
gaattacctactgattttcatgtagaaagggctggtgccatggcttacctataactttatgacctccactccagaagagggaaagggaatcctccagggcrtgctgctactagaggaagaggagagaggtacaggaatatgctgaacgttgctgttctgaggagccactcaatagcatttttgccacagtggcggaattat

SEQ ID NO: 539982 - DNA, 201 bp, Homo sapiens
ggagagaggtacaggaatatgctgaacgttgctgttctgaggagccactcaatagcatttttgccacagtggcggaattatttatttaaggaagaaagtawaactggagaatatttcaagcagttaatcagtgagctgcatctcccaatttcagagacagaggaactctagagagcatgcagagcaagttaatctctaccc

SEQ ID NO: 539983 - DNA, 201 bp, Homo sapiens
gaaaagggaggcaagggaaagtgataccatttctaatacataagagttgtttgcagatactttatactgtcatcctattatgtttacctatttttttcttwtagaaccctgcaaattttcttcctcataattgggagaagactcactggccgaatggcagcagtagatgacttgcaatttgaaggtataccagttgggtgc

SEQ ID NO: 539984 - DNA, 201 bp, Homo sapiens
ggaagctgagaccgagagaggacagtgccttacccaaggccaccccagagttctggggcaaactaacatgtgtctatcacattccatttgacaaaacactttttttttttttttttttttgaggtggagtctcactctgtcgcccaggctggagtgcagtggcgcaatcttggcccactgcaacctctgcctcccgggttc

SEQ ID NO: 539985 - DNA, 201 bp, Homo sapiens
aggctggagtgcagtggcgcaatcttggcccactgcaacctctgcctcccgggttcaagagattctcctgcctcagcctcccaagtagctgagattacagktgcccgtcaccacacctggctaatgttttgtatttttaatagagatagggtttcactatgttggccaggctggtctcgaactcctgaccttgtgagccac

SEQ ID NO: 539986 - DNA, 201 bp, Homo sapiens
agatactggagacaaaaagatgaagaagtttatccactggtggagtagataaaaatgtaaaaagatcattaggatgaaatgtgatcagatcattccctcaytgaatcagtaaatatctcctggttgtgaccaggaaccgggcaattgttctagttatcagggatagaagagtgaacaaaatagtttccttgtgaagctctc

SEQ ID NO: 539987 - DNA, 201 bp, Homo sapiens
tacagatgaggaaactgaggccgcgaggagcgcgcacacagcagagaagcagcagaatcgggaatcaaacccagctctgtctgaccccagagcctgtgccyttaaccactggctaggctgaactgcctttgttcttcactgtccccatcacctctttcaaacctcagcctctccttcctcatcgttacatctctaggctgc

SEQ ID NO: 539988 - DNA, 201 bp, Homo sapiens
tgagcccaaggagtttgagaccagcctgggcaacataaggagaccctatctctactaaaaaataaaaataaaaagaatgatttttaaaaattcttcaaatractttacaacttgagacaaatttagtcactttgactaggtggagattggaccatttgatgttggaggagaaggtattctcacactttttcattgatatgc

SEQ ID NO: 539989 - DNA, 201 bp, Homo sapiens
gtgttatattagtgccacgtcatcattacaagtactagtatatccttcaaaggtctttaaatggggctgagcgcagtggctcatgcctataatcccagcamtttggaaggctaagatgggaggattgccagaggctaggagtttgagaccagtctgggcaacatagcaagaccctgtctctactaaaggctgggttggcac

SEQ ID NO: 539990 - DNA, 201 bp, Homo sapiens
atctcaaaaaaaaaaagcgaaaagatatttacactgactgccttctgtatgtgttgtatgtgtgtatatgtatttattattgtacataattctatatactrttgaatctagataagggaactaagcccagcaggagtctagtgatttgccaaagctcccctcagtggaggggccaggatttgaacccttttggtgtgactt

SEQ ID NO: 539991 - DNA, 201 bp, Homo sapiens
ttttaaagcatcatctttcttccaacactaagctctacttttagcatcaaaattagactcaagcctcaagatttagggaattggtggcagcagactgctcyggtgttgggagttatatctctaaacatacatgaatatccttttctacaatgtagctctttcctgtcggggtgggggggtgctttatcttgaaagtttccc

SEQ ID NO: 539992 - DNA, 201 bp, Homo sapiens
aattctgaccacgcctttaactatgtcacttccctacttagaaactttttttttttggccccctattgcccaaataacaaaattgaaaccccctgcattgycacaatctatccctgatttatttgtcctgcctcatatcctgccattatctcctgtataaccttacatttcaattaccacggttttccaggtcccagatct

SEQ ID NO: 539993 - DNA, 201 bp, Homo sapiens
attgaataggagtgataagagagggcatccatgtcttgtgctggttttcaaggggaatgctttccttggttggggatgggtgttcctttgtctccgtgctrctcctgggtgagccatcgccccaccctgcttttcttcattctccgtgggtcgagctacttgcctagtcagtcccaatgcaagaacctgggtatttcagtt

SEQ ID NO: 539994 - DNA, 201 bp, Homo sapiens
ctcggctcattgcaacctccacctcccgggttcaagtgattctcatacctcagcctcccgagtagctgggattacaggaatgcatcatcatgcctggctartttttctgtatttttggtagagatggggttttgccatgttggccaggctggcctctaactcctggcctcaagtgatctgcccacctcagcctcccaaagt

SEQ ID NO: 539995 - DNA, 201 bp, Homo sapiens
atactattgaataggagtgataagagagggcatccatgtcttgtgctggttttcaaggggaatgctttccttggttggggatgggtgttcctttgtctccrtgctgctcctgggtgagccatcgccccaccctgcttttcttcattctccgtgggtcgagctacttgcctagtcagtcccaatgcaagaacctgggtattt

SEQ ID NO: 539996 - DNA, 201 bp, Homo sapiens
atactaacaatttttgcacattgattttgtatcctgagactttgctgaagttgcttaccagcttaagaagcttttgggctgagatgatggggttttttagrtatagaaacatgtcatcttgcaaacaaagatgatttgacttactctcttcctatttgaataccctcttcctatttgaataccctttatttgtttctcttc

SEQ ID NO: 539997 - DNA, 201 bp, Homo sapiens
gttggccaggctggtctcgaactcctgaccttgtgagccacccaccttggcctcccacagtgctgggattataggtgtgagccatcgcgcccggcctgacraaacatttcctagtttattctctcattggccactcttactggccctcttgaccacattgtatgtatagatgagaaggctgggctgagtaaatctgggctg

SEQ ID NO: 539998 - DNA, 201 bp, Homo sapiens
tgtctgtgtttctgtgttcctcttattgaagtcctctgttttgaaatccacatgatactggctttatagagttggataacatgagctcttaggttcttctgtaagaggagctcctgcctttggtcccagtagaggggactctcttctccctgaaccctttcctagaacacaatatgggtttgttccattttataacaatcc

SEQ ID NO: 539999 - DNA, 201 bp, Homo sapiens
tgggaaatctttacttgttcattcattgaagttctactctgtgctggtgaacaacggagatcagtccttaccctcccagattctatactccagttttacayctcatacgccacacagactagaaggcccttttacattaaagagagaaacatgattatgggaacttctcattggaacatcccagatcagactgtggtgaca

SEQ ID NO: 540000 - DNA, 201 bp, Homo sapiens
aatcatatagcatcaaaactttcctggatttatgtggcaggttacttgggaaatctttacttgttcattcattgaagttctactctgtgctggtgaacaamggagatcagtccttaccctcccagattctatactccagttttacatctcatacgccacacagactagaaggcccttttacattaaagagagaaacatgat

SEQ ID NO: 540001 - DNA, 201 bp, Homo sapiens
gtaggttgactagatatgactggtcaaatgctttccagttccttaatggtaagacagtcaccctggccagtagaatgactgggaactattgtaaaatgtcrtagtctaccactttcgcctcttcctctcttctcatgggtatgcgatgttagaatcaaagaagatcagagcccttggagacattaaatagcatgggcttcc

SEQ ID NO: 540002 - DNA, 201 bp, Homo sapiens
aggcgcaatctcggctcactgcaacccctgagtcctgggttcaagtgattctcctgcctcagccttcccgagtagctgggactacaggcatgtgccaccaygccagctaatttttgtatttttagtagagacggagttttaccatgttggccaggctggtctcaaactcctaacctcaaatggtctgcctgcctcagcctc

SEQ ID NO: 540003 - DNA, 201 bp, Homo sapiens
aatggggattttccctcttagttgaggaatccaggttgtaggccctgtaggttgactagatatgactggtcaaatgctttccagttccttaatggtaagayagtcaccctggccagtagaatgactgggaactattgtaaaatgtcatagtctaccactttcgcctcttcctctcttctcatgggtatgcgatgttagaat

SEQ ID NO: 540004 - DNA, 201 bp, Homo sapiens
agtgctgggattacaggcgtgagtcactgtgcgcagctgatcccactttcatttttgttcccatattttctgtagtgattatgtagacttactggaaaaawtaaccttcattaaaattttttggacttgaatcaaagaagtaaagtttaggacttagattatattccttgttctcccaaaattatttaaaataaatgttat

SEQ ID NO: 540005 - DNA, 201 bp, Homo sapiens
gctgtcctatataatgtaaacataggagagatggtcatcacctttaccatcttctattgactagaagcaagtcacaggtcttgcctaccttctaggggagrcaattacacaagggcatgaatgcctggagacaggcagggatcactggaggccattttagattctcagtcacaagcacaaacttgtgatacgtatatattt

SEQ ID NO: 540006 - DNA, 201 bp, Homo sapiens
ggagtgcagtggcgcaatcttggcccactgcaacctctgcctcccgggttcaagagattctcctgcctcagcctcccaagtagctgagattacagttgccygtcaccacacctggctaatgttttgtatttttaatagagatagggtttcactatgttggccaggctggtctcgaactcctgaccttgtgagccacccacc

SEQ ID NO: 540007 - DNA, 201 bp, Homo sapiens
aacaactacagctactccaaaccaaacagttgctgcagccaagtccagctaatgaggaaagtaagagattctatttttattttgctgtgtggtgccataaracatgggcaggtgtatcaattctgttagtgttagctttaagcacagagggccagaccctttcatccttctgcacagttcagcgtgggtttgtgcatgtgc

SEQ ID NO: 540008 - DNA, 201 bp, Homo sapiens
tagcactctcttttcaaggtatttgcagaaagccaactaactagtttagcagcaagctaatgtagttcagttcattaggtattgattggttacatactgtkccaggccctgtgcaggggtgctggtgacacaaagatgaagaagtctttgccctggaggaaagactgtataatgttgtgattaagagcttgtgctttggag

SEQ ID NO: 540009 - DNA, 201 bp, Homo sapiens
ttcaagggtagtgagattggtattttcctgggctcaagtttggcttcgctcaagttaggcttctctagaccttatgtcttccctcctttacctccttctgwcttttgaccgttaaattgtagatggtgagtggaagcacttagcaaacctttcatttcccagctgaagaatttttagggaaagcatgcctagcactctctt

SEQ ID NO: 540010 - DNA, 201 bp, Homo sapiens
actgggaaatgatgactctgacaaaactgaggtttgaacttgtctttgagatattttttaaacaatttttaaagcttgtttatgtgcttattcactgtctrctgtgtgccaggtacagtgtcaggcaatgacagctcagaggtaaatgacacatggcctcttccttggtgggggaaacaggcaaacagaccattactttcc

SEQ ID NO: 540011 - DNA, 201 bp, Homo sapiens
atggttcaggatccttgaaaatggtttgcaccctgttgacctagtgatcacactgataggtgttcatcataaggctgccccccaaaaagctttttctacamagacactccttttgtatttgtaagaaaaccttcattgatggaatattatgcagtcacataagtgatcattttaagagactgttatatgaaaaatcgtttt

SEQ ID NO: 540012 - DNA, 201 bp, Homo sapiens
aggcgtgagccactgcatccagcccagttatactttacttttctttctttttttgtgagacagagtctcactctgttgccaggctggagtgcagtggtgcratctcggctcactgcaacctctgcctcctgggttcaagcgattctcctgcctcagcgtcccaagtagctgggaccaccagtttgtgtgtgccaccacgcc

SEQ ID NO: 540013 - DNA, 201 bp, Homo sapiens
tgtcaccttttttctgaattatagcctttaccttccttctggtctttctgcttcctcccttatccctctacagtctgtactttgcagccagagtagtcctkctaaaactcaagcagatcatgtcattctttcagaaccttccagtagctcccatctcactagaagaaaaagccaggctgggcgcagtggctcacacctgta

SEQ ID NO: 540014 - DNA, 201 bp, Homo sapiens
actctgttgcccaggctggagtgccttggctcgatcttggcttgctgcaacctctgcctcccaggttcagacgattctcctgcctcagccttctgagtagstggaactacaggtgcccgtcaccacacccgactaatttttgtatttttagtagatacggggcttcaccatattggccaggctggtctcgaacttctgacc

SEQ ID NO: 540015 - DNA, 201 bp, Homo sapiens
gggaggcaagggaaagtgataccatttctaatacataagagttgtttgcagatactttatactgtcatcctattatgtttacctatttttttcttttagamccctgcaaattttcttcctcataattgggagaagactcactggccgaatggcagcagtagatgacttgcaatttgaaggtataccagttgggtgcccacc

SEQ ID NO: 540016 - DNA, 201 bp, Homo sapiens
cactggctaggctgaactgcctttgttcttcactgtccccatcacctctttcaaacctcagcctctccttcctcatcgttacatctctaggctgcacctgstctctaaacattcacacagtgagttgagattcattcctggtacatacacaaccaaataaggttgaattggaacctttggatccccggggttagtttcttt

SEQ ID NO: 540017 - DNA, 201 bp, Homo sapiens
atttattattgtacataattctatatactattgaatctagataagggaactaagcccagcaggagtctagtgatttgccaaagctcccctcagtggagggrccaggatttgaacccttttggtgtgacttcaaaaccaatgcttgtttttctaatcaggctgagagttgcgaattggctatttcagagttggttattgaat

SEQ ID NO: 540018 - DNA, 201 bp, Homo sapiens
agaagaaaagctcccccttctggacatttgaatactaccaaacattctttgatgtggacacctaccaggtttggaaaccaatttcacctttccttttacgkgtaaaggagacttgtttctttaatggttgaacaaccaaataatgtgaaagcctttatatactgaaaatggtcttacaaaagtaaagggttattagcattt

SEQ ID NO: 540019 - DNA, 201 bp, Homo sapiens
ggcacatagttaaggtgctcagcaataaaatcaaagctactgccactctcagagtgcgtcagtagtttatgtttggtggctcccactgactttaccttgaycattttttcctttttgtaaaacaaatggggattttccctcttagttgaggaatccaggttgtaggccctgtaggttgactagatatgactggtcaaatgc

SEQ ID NO: 540020 - DNA, 201 bp, Homo sapiens
tactcacagagaacctgctgattcagctttgaggtctccacggtgcctagatccggactggacatagactaggtgccaaattgcaggaagtgttggagaaytagaagagcacagactatggagatggactcgactggattgaaatcctagctcagacacatagttgtctagccttgggaaaatctccatttctttgagcct

SEQ ID NO: 540021 - DNA, 201 bp, Homo sapiens
ctcctgaactttttacccattacacacctggatgagaaagcagtggagatgaggagacagaagaggctgttcagtctgtaagggactcagaagagcgggaygggttggactgtggagcagggaggtccttgtggggtgcagggcctcttcctggagaggaaggctcagttttctctttctggaggaagggaaccatcccgt

SEQ ID NO: 540022 - DNA, 201 bp, Homo sapiens
taaaggagcctgtgtcgtcagacactgccagggccagtatgctgcttattcctccatagtacccaagtaagagtggtccaaggtcccacagctggtaccckggccaaagctgaagtctcccactcttaatgacaatgcccttccttgttgcctctcactggcatcttcttatctctcctgaactttttacccattacacac

SEQ ID NO: 540023 - DNA, 201 bp, Homo sapiens
tcaaactgttagacacaacagttcttttaaaattgagtccatgggctgggcacgttggctcacacccataatcccaatactttgggaggcccaagtgggcsgatctcgagctcgggagctcaagaccagcctgggcaacatggtgaaaccctgtctctactaaaaatacaaaaattagctgggcatcgtggcttaaacgat

SEQ ID NO: 540024 - DNA, 201 bp, Homo sapiens
taatgggattgctgggtcaaatagtatttctgcctctaggtctttgaggaatcgccacactgtcttccacaatggttgaactaatttacactcccaccaamagtgtaaaagcattcctttttctccgcaacttcactagcatctgttgtttcttgactttttaataatcaccattctgactggcatgatatggtgtctcat

SEQ ID NO: 540025 - DNA, 201 bp, Homo sapiens
ttgactacatttcacctaaaatttaaaatttctacacaacaaaataaaccataagtaaagtaaaaaaataaaccacagaccaggggacatacttccaatgyatataaccaacaaacagtgagaaacaagaatatatgtcgaactcccacaaattagaagaataaaccaagcaactctggggaaaaaattgccaataaatat

SEQ ID NO: 540026 - DNA, 201 bp, Homo sapiens
agcactttgggaggcggaggcgggcggatcacgaggtcaggaccatcctggctaacacggtgaaaccccgtctctactaaaaatacaaaaaattagccggrtgtggtggcgggcgcctgtagtcccagctactcgggaggctgaggcaggagaatggcgtgaacccgggaggcggagcttgcagtgagcctagatcgcgcc

SEQ ID NO: 540027 - DNA, 201 bp, Homo sapiens
aattgccaataaatatatgaaaagatgcttagccccacctgcaaccagagaaataaaaagtaaaataagattatttatgctcattattttagtaaacatayacagtttggcttgtcttcatttattcattcaattcattcaacaaacattgagctcttgctattgtactggagatacagcagtgaaaacataaaaatctct

SEQ ID NO: 540028 - DNA, 201 bp, Homo sapiens
atcttagaaggtagtatattatttttcttcccattttatagatgaggaaactgagacaggaaggttaagtaacttacccccaagagtttcttttcctagarctagaacccatggagtctgtatacagagtctgtgcccttgaccattattccacattgcctctcaataaagcaccgagtgtaatacctgatgcccagtagt

SEQ ID NO: 540029 - DNA, 201 bp, Homo sapiens
ttcatttattcattcaattcattcaacaaacattgagctcttgctattgtactggagatacagcagtgaaaacataaaaatctctacccttaggcaatttktaatttactgagcttaacaataagcaaagaaaagtaaaatatatagttttctagtaatgaatgcttaggtgaaaatttaatagcagagagaagaaggaca

SEQ ID NO: 540030 - DNA, 201 bp, Homo sapiens
cattggccctatcaataaacatttttccgttttatgtaaaaagtatgagtcacatctgagatgagatcctgcttctactaacttgttaattatgtgacctwgaccaaacaacttagcttctctgaccccttttcctcatctctaaaatgacaatatagattgtatgaaataaatgtagctacatattagttaacaatataa

SEQ ID NO: 540031 - DNA, 201 bp, Homo sapiens
actagcttaggatatgccaggatgtaaaagcagagaatgttggtggcagaaataagacacataccagttttatgctcaaggagctgagatggacaagaatmaccagcacagagcagactgtgtgaagagtcgtcatgttaggggtacacgcagcccacactccagtcaaactatgccgtcactgtccctccatcacgggca

SEQ ID NO: 540032 - DNA, 201 bp, Homo sapiens
ggtaaggttcttttggaaagcagtttggtaacatggttcaggatccttgaaaatggtttgcaccctgttgacctagtgatcacactgataggtgttcatcwtaaggctgccccccaaaaagctttttctacacagacactccttttgtatttgtaagaaaaccttcattgatggaatattatgcagtcacataagtgatca

SEQ ID NO: 540033 - DNA, 201 bp, Homo sapiens
tacacagacactccttttgtatttgtaagaaaaccttcattgatggaatattatgcagtcacataagtgatcattttaagagactgttatatgaaaaatcrtttttgtgtataatccccaattttacataatcttgacaaagcaggatgcaaaattaattatagtatcatgttctagatcagtacttggcacattgtgggc

SEQ ID NO: 540034 - DNA, 201 bp, Homo sapiens
tggcatgaatctcactatgtgaagaaaaggaaatatactaaaatgttaatagtgtttgcctttatgtggtagaactaagagtgtttttttgttttttgggtttttttttttttttttttgagacaaagtcttactctcttgcccaggctggagtacagtggtatgatcacggctcactgcagcctctacctctgaggctcg

SEQ ID NO: 540035 - DNA, 201 bp, Homo sapiens
tctcactctgtcacacaggctggagtgcagtggtgtgatctcggctcactgcaacctttgcctcctgggttcaagtgattctcctgtctcagcctccagcrtaactgggattacaaggcatgtgccactacacccggctaatttttgtatttttagtagagacagcatttcaccatgttggccaggctggtcgaactcctg

SEQ ID NO: 540036 - DNA, 201 bp, Homo sapiens
acctctacaaaaagtacaaaatattagccgagtatggtggtggacacctgtagccccagctactcgggaaactaaggtgggaggattgcttgagcttgggragtagaggttgcagtgagctgagattgcaccactacactccagcctcggcaacagagtgagaccctgtctccagaagaaaggaaaaaaaaaaaaggaaag

SEQ ID NO: 540037 - DNA, 201 bp, Homo sapiens
ggattgcttgagcttgggaagtagaggttgcagtgagctgagattgcaccactacactccagcctcggcaacagagtgagaccctgtctccagaagaaagraaaaaaaaaaaaggaaagattgaaaacacttgcttgagtacctccaggaatgggctgtttaccaccatgtaaggcagttgctgccactgtcgactttaat

SEQ ID NO: 540038 - DNA, 201 bp, Homo sapiens
gatggatagattgcaaaaattttctctcattctgtaggttgtctgttcactctgaagatagtttcttttgctgtgcagaagctctttagtttaattagatyccatttgtcaatttttgcttttgttgcaattgcttttggtgttttcatcatgaaatctttgcccatgcctatgtcctgattggtattccctagattttct

SEQ ID NO: 540039 - DNA, 201 bp, Homo sapiens
ctttgtatcaggtagggtctatagcaaagctgaggttgtgacagcttgtctttaaattcaaagtatagcatttctagtgtgggtaaggtttctgaggcccktgtgctctaattgatttcagaatttggcaatgcagccacttctctgacagcaaacccagatgccaccacagtaaacattgaggatcctggtgaaacccca

SEQ ID NO: 540040 - DNA, 201 bp, Homo sapiens
ccaacatggtgaaacccgtctctactaaaaataaaaaattatccaggcatggtggcgcatgcctgtaatcaggaggctgaggcaggagaattggttgaacycaggaggcggaggttgcagtgagccgagatcacgctactgcactctagcctgggcaacagagagagactctgtctcaaaaaaaaaaaaaaaaaagcgggg

SEQ ID NO: 540041 - DNA, 201 bp, Homo sapiens
ttgaagatgcttataccctataattcagcagtttcactcctaggtagataattttagaggaattcacatatatatggaacaacatatagaagaatattatycactgtagcagtattgcttgtaatagcaaatatttagaaacaaccaagatatccatcagcaggagaatggatacattgtgctactatatttatacatgga

SEQ ID NO: 540042 - DNA, 201 bp, Homo sapiens
gtgatttatgtagatatctaagggaagagcacttgaaacagaaggatcagcaagtgcaaaggccctgaggcaagagctagcctagtacattcaaagaacckcaagaggctattgcgactggatgagagtgaacagggggacctagaaggagatgaggtgagagagacagtgtggagggacaggtaaggtctcataagtcac

SEQ ID NO: 540043 - DNA, 201 bp, Homo sapiens
gcccatgcttttcatctgagggttgtcagggtggtttctctgtctcattcattcttacttgtagcctgagaacatcctgaggggcaggctctgtgcctcartgtctttagtgcctggcagaggccttggcacacagcaggtgctcaaacaatttttagcaccttattttatgctagactctgtgctagaggctgaggattt

SEQ ID NO: 540044 - DNA, 201 bp, Homo sapiens
acttttcaaatgaggaagctgatgctcagtgaggatcattgatatatatgctcaatcagaaatgataaatagtaaagcagtcatatatgttgattttaaayatggactctagggagcctggtgtgaaaaccattgcactggcccatgcttttcatctgagggttgtcagggtggtttctctgtctcattcattcttacttg

SEQ ID NO: 540045 - DNA, 201 bp, Homo sapiens
agaaggtattctcacactttttcattgatatgctgagttccagctctgccctcagatgagctggctccttttaggatttggtcaccagcagtggaagtctraaacaggattgggccggggattgttgtcatccctgaccttaatgctgtctgagaaaaactcagaggtccacccagtactcctgaggaaaaggccccaaca

SEQ ID NO: 540046 - DNA, 201 bp, Homo sapiens
ccagctcctctccctgaaacactgcctctgcttcgcggtgtcccgggctgcagggtcgccgacaccccattgcctactaattgcctgactccgctctaggytccttacacgcactcccatttaatgacccccgcactgtgtgactaggtatcgttatgcacccattttacagatgaggaaactgaggccgcgaggagcgcg

SEQ ID NO: 540047 - DNA, 201 bp, Homo sapiens
tctctctgaattatgtacagactacctgggggatcctcttctctccaaatgttagccatcctgaagtagccgaacagtagaaactttggtggggattaacygggagcttgaaaatttgtctttggtaacctgatactggacagctgaactgaatggctgcaaaataaatacctcacatgatgtctgtgtctgcattttgtg

SEQ ID NO: 540048 - DNA, 201 bp, Homo sapiens
gaataggttaggcatgctcagtgccgtccctttgccaccacagtcaaatgacatgcttcactgtggtaccttaatacctgaaatagaaccatggaaaattytgatgtcctctctctgaattatgtacagactacctgggggatcctcttctctccaaatgttagccatcctgaagtagccgaacagtagaaactttggtgg

SEQ ID NO: 540049 - DNA, 201 bp, Homo sapiens
caagcagaaattaaatgttgctcagcacatgtgtctttcagctcttccttttcacccatggatgatcattgcgagcatgcgctgattggactgaaatgccrgggaataggttaggcatgctcagtgccgtccctttgccaccacagtcaaatgacatgcttcactgtggtaccttaatacctgaaatagaaccatggaaaa

SEQ ID NO: 540050 - DNA, 201 bp, Homo sapiens
ttgtttttcagttctcttttgttttttggagcatggttctttgggaagtggcatccactgcaggaaagcagaatgagcagagccagcagaactgatggagyggcacaaattcccagtgtctggatggtgccacactggcgcctaatcacccgtttaacaagcagaaattaaatgttgctcagcacatgtgtctttcagctc

SEQ ID NO: 540051 - DNA, 201 bp, Homo sapiens
agttgggaccatgtctgtcttgttcatcactgtccccagtacctggcacatgggtcctcaatatttgttggattaattaagaaatccatccagtcacccargatagaaacctcagcatcaaggtagattgtagattccccccactcaccttccacatagtatcagtcagcaagacctgtcttttctatctctgaagtattt

SEQ ID NO: 540052 - DNA, 201 bp, Homo sapiens
tgacaggcacaattcctggcattgggcatgcattctgccaccaaagagctgtgttgttgggatgggtatggccctcctcaggtgcctcttctcaataggattttttttttgtcagagtagtaatatttttagtactttagagtgagtcaatatatcagatttttgagaattcaggtggcaatagtagggaggattgtggat

SEQ ID NO: 540053 - DNA, 201 bp, Homo sapiens
tacatacacaaccaaataaggttgaattggaacctttggatccccggggttagtttctttgttacagttttaatatttaataatacctgatgcttagtggwtatctttatataaacctattaaaccccactgaaaagggaggcaagggaaagtgataccatttctaatacataagagttgtttgcagatactttatactgt

SEQ ID NO: 540054 - DNA, 201 bp, Homo sapiens
gagattgaggctgtagtgagctgtgatcgtaccactgcactccagcctgggtgacagagcgagtcactgtctcaaaaaaaaaaaaaaaaaaaaaaaaaaaragagacccggtgcggtggctcaagcctgtaatcccagcactttgggaggccaaggtgggtggatcacaaggtcaggagttcgagaccagtctgaccaaca

SEQ ID NO: 540055 - DNA, 201 bp, Homo sapiens
tgaggcaggagaattggttgaacccaggaggcggaggttgcagtgagccgagatcacgctactgcactctagcctgggcaacagagagagactctgtctcaaaaaaaaaaaaaaaaaagcggggagaaagaagtctgcaaatgatcaaagcctggaagggaaaatgcagaaatgaatgtgtcctagggatgggcttgtgaa

SEQ ID NO: 540056 - DNA, 201 bp, Homo sapiens
aaatgttaaccatgagatagaaaccctgccttcagctagttcactgtgtgtacatagaaagatatgtatttgcctgtgtgtgtgtgtgtgtgtgtgtgtgwgagagagagagagagagagagagagagagagaatgtatccatgtatccttccttcttttcttcccctctaccttccatgcccactttcccttcttgtcca

SEQ ID NO: 540057 - DNA, 201 bp, Homo sapiens
aaaagcctgtgaatttttctttgtcggtggtgatcctccaacaaaagaagctatacagaaatcagtgtcttcattcacctaattgtggaaggcgttttggyctttggattggagtaccaacaccccaccttctttaaggcagctaattactgagatgtgtgtttgacctttgaaaaaaaaatttcccttcagcaagtgttg

SEQ ID NO: 540058 - DNA, 201 bp, Homo sapiens
gtgactaaaggatgtttttatataagtgaaataattattcctaaatatgacttttaaacacggattttgtttaaccttgtttcttttttggagggtggttrgtaacaccaagactactttattgaaagcgtaactaagagcgattgatggatacgtaaagacatagtaggcacatccatgtaatagtaccgcggtgaggag

SEQ ID NO: 540059 - DNA, 201 bp, Homo sapiens
gggtacagtgtaccgggactgcgccactgcattgcagcctgctccgctggagtgagaccctgtctcaaaaaaatataaaaaaaaaaaggctaagaagccaytggcaacatttttaatgcttttacattctgcctactgtgtcaaactaattgttcccaattagtggagcttgtttaagctgtgactaaaggatgtttttat

SEQ ID NO: 540060 - DNA, 201 bp, Homo sapiens
tgagaggtcaaggtgggcagatcacctgaggtcgggaggtcgagaccagcctagccaacgtggtgaaaccccgtctttactaaaaatacaaaaattatctsggtgtggtggtgggcgcctgtaatcccagctactcaggaggctgaggcaggagaattgcttgaacttgggaggcaacagttgcagtgaaccacgattgcg

SEQ ID NO: 540061 - DNA, 201 bp, Homo sapiens
ctaaagttgaaattttgtgcttggtgctgataagaagctgattattagggcctggcacggtggctcacacctgtaatcccagcactttgggaggccgaggygggtggatcacctgaggtcaggagtttgagaccagcctggccaacatagggaaaccacatctcaactaaaaatacaaaaattagctgggcctggtggcac

SEQ ID NO: 540062 - DNA, 201 bp, Homo sapiens
gtcagagaatctactcaaaattataacgtatttttttagataaccatctcaaaagtatagaaaattatttcatataaatatttctaacatctattataaaygaaaactcctagaaagctagtaatagctttgtcctggatgtaaacacttttgcttttatttactgttccagtgtttctttctgcagatataaacaaattc

SEQ ID NO: 540063 - DNA, 201 bp, Homo sapiens
tgctcatcctggcccaagaatttgaccaatcgatattaaggttgtacagatcaaatgtctcaggggactctagaaggctggaagcttgcgggaggagatcycctagcatcactgcgcaggcagtgtggtgtgtttaaataagcaggaggctggagagctgggttctgttctgttcttcgctcagccactccccagcatgaa

SEQ ID NO: 540064 - DNA, 201 bp, Homo sapiens
ctgaggtgggaggatggcttgagctaggaggtcaaagctgtagctagccatgattgtgccactatactccaggctgggggacaggatgagaccctgtctcraaacaaataaataaatacaataaaaatgaaaagttttagcatgaaaataagtctccctctgaccctgtgtttctagttccaggacaaccatcattaggag

SEQ ID NO: 540065 - DNA, 201 bp, Homo sapiens
cagagtgagacttcagtctcaaaaaaataaaatataatgctgtttcacatgaaagtagtcttttgttttcttttggttttttgcttgtatatgtgtatatwtttttttttttttttagacagggtcttgatctgtcacctaagctggagtgcagtggtgcaatcatagctcactgcagcctccaactcccatgctcaagca

SEQ ID NO: 540066 - DNA, 201 bp, Homo sapiens
tggaaacaggattccaggttgtattattttttcagaggtttgttctggaagataacattgtactaatgcaaattaaaaaaaaaattttttttaaaaacttyacttccatctgtttgacctttacaattttttttttgttcttattgtttacagagagctctgactttctttttttttttttttttttttttttttgagtca

SEQ ID NO: 540067 - DNA, 201 bp, Homo sapiens
ttttttcagaggtttgttctggaagataacattgtactaatgcaaattaaaaaaaaaattttttttaaaaacttcacttccatctgtttgacctttacaattttttttttgttcttattgtttacagagagctctgactttctttttttttttttttttttttttttttgagtcagagtctcactcactctgtcatccagg

SEQ ID NO: 540068 - DNA, 201 bp, Homo sapiens
taaaaaaaaaattttttttaaaaacttcacttccatctgtttgacctttacaattttttttttgttcttattgtttacagagagctctgactttctttttttttttttttttttttttttttgagtcagagtctcactcactctgtcatccaggctggagtgcagtggcacaatctcagctcactgcaacctccacctcct

SEQ ID NO: 540069 - DNA, 201 bp, Homo sapiens
accataatcccagctattcaggaggctgagacaggataattgctggaacctgggaggcagaggttgcagtgagccgagatcaccgccattgccctccagcstgggcctcagagcgagactccatctcaaaaaaaaaaaataaatttattccttttagatggatggcttatcatgttaatactatttattaagtaaatcatc

SEQ ID NO: 540070 - DNA, 201 bp, Homo sapiens
ttttatgtgactgtatatgataaccatgttggcttctttgaattacaggtcaaactgccttaatatttggtgcaagaatattagactatgtcatcaatttktgcaaaggtaaatttgacttccttgaacggctctcagacgatttgctcctgactatcatttcttatctggatcttgaagatattgccaggctttgtcaaa

SEQ ID NO: 540071 - DNA, 201 bp, Homo sapiens
aattttttttcccaagattttcttggcaattttcacacactattttattttatttttttcatttttgagacggcatcttgctctgtcacgaggctggagtkcagtggtgcgatctcggctcactgcaacctccgcctcccaggttcaagcgattctcctgcctcagcttcctgagtagctggaactacgggcgcatgccac

SEQ ID NO: 540072 - DNA, 201 bp, Homo sapiens
gacacagtttgaaatatgttaaaggaattcaccatttttttccatctaggacttatatggtctgattttttaatacgcagaccctttctttcttccttcctttttttttttttttttgtagagatgagggtcttactatgttgcccaggctcgtctcaaacacctgggcccaagttcccacttcagcctcccaaagtgttg

SEQ ID NO: 540073 - DNA, 201 bp, Homo sapiens
ttttgatttgtatttctctgatggccagtgatgatgagcattttttcctgtgtctgttgactgcataaatgccttcttttgagaagtgtctgttcatatcsttcgcccacttgttaatggggttgtttgtttttttcttgtaaatttgtttgaattctttgtagattctggatattagccctttgtcagatgagtagattg

SEQ ID NO: 540074 - DNA, 201 bp, Homo sapiens
attttcagtataaaatttgatgagtcataaatgaagttatactagtggaaattttagctcttttgagaattatttcctttccccccaaatcttgtagtttycacccataatctctattacaagacacattgatatcctgaaatgtactgtgctagtaatgggatagtaatccacattggtgctggagttcagatcttttaa

SEQ ID NO: 540075 - DNA, 201 bp, Homo sapiens
ttctgttccattggtctatatctctgttttggtaccagtaccatgctgttttggttactgtagccttgtagtatagtttgaagtcaggtagcgtgatgcckccagctttgttcttttggcttaggaatgacttggcaatgtgagctcttttttggttccatatgaactttaaagtagttttttccaattctgtgaagaaag

SEQ ID NO: 540076 - DNA, 201 bp, Homo sapiens
agattctcttcaacttgacaatttatgtatgcaaaattcatgcaccaccaccggggggcgctaaatccatggttagctgggctttggatctgagtagccaraactatagaacctttcgttttgcaacctggcaactactaagcaaaagatcgtcagggtttgggagtcatagatgggggtattttgtacacgaacttataa

SEQ ID NO: 540077 - DNA, 201 bp, Homo sapiens
aattctctttttttgttgtgtctctgcccggctttggtatcaggatgatgctggcctcgtaaaatgagttagggaggattccctctttttctattgattgkaatagtttcagaaggaatggtaccagctcctccttgtacctctggtagaattcggctgtgaatccgtctggtcctggactttttttggttggtaagctat

SEQ ID NO: 540078 - DNA, 201 bp, Homo sapiens
ttgacagctgaagaggcagagaatgttcaaaagcagtaaatcctgtgtcctttttaagagaccttcctttagcttgtctcttttctcttatcttttacttwaagcatcaagaagaaatcaggcagtatgttcctgctctgcttggacatttccttagctaaatggcacaacccataagttgcatttttttctcatttaatc

SEQ ID NO: 540079 - DNA, 201 bp, Homo sapiens
caggcacatggtcaaggtgttgttttcatggagcctgttaagagtgcggtgtgcagggtcacctctacgagacagaaaggctcccacggccagacctgackccgtagtatcgcttctgccttagaagcataaagacacattcccaagagccagactgtgtagggactctgtgaaaggcaccccagcccagggagtccatgg

SEQ ID NO: 540080 - DNA, 201 bp, Homo sapiens
agtttaagacacagataatagaatggttagaatatgcagagtccatctctgtattctctaatcaagcaaacatctcagattgcaagagggagaagatattytcagagaatgaggttagatactgctgtttcccatgaggcatcctcagctttcaatcaagttggggagtgaaagtcagtaaaccagtggctgagcaaacct

SEQ ID NO: 540081 - DNA, 201 bp, Homo sapiens
ttcctttagcttgtctcttttctcttatcttttactttaagcatcaagaagaaatcaggcagtatgttcctgctctgcttggacatttccttagctaaatrgcacaacccataagttgcatttttttctcatttaatcttttttttttttgaggtggagtcttactctgttgtccaggctggagtgcaatggtgcagtctt

SEQ ID NO: 540082 - DNA, 201 bp, Homo sapiens
agtgcctcgcatccccagcagtttgctaaaggaggtagtggctggacaggttaagacaccctcccagccccccagcctcctgcagtactcagggaaccatyaggcaccttattctgcagccaccagtggggcagtgttgccaagagggtaccaggaggagaatcctgcagccttgagctgtgcaactgataacgaactaca

SEQ ID NO: 540083 - DNA, 201 bp, Homo sapiens
tgtgtattccacttatattttccttttttagatatattcacgggtaacatagatttgtcatattaaaattaatataatgttactataacttataaaatgarttaattagtataattactaacaataatgttctaaaatacatgcctaatgacgaattaaagagctctttcagtaactctgaaataagtgatgaaaaccatt

SEQ ID NO: 540084 - DNA, 201 bp, Homo sapiens
aacgtgtaactgtcagagtggggcactacagaggactacctgcattatattccctcaaaaacggttttccactcaggaaagttattttcaattgggaaatmtgttctgcccattcaaaaagtcttacagccactgatccatggccacagactgcactggaataacctcagaaataataatattagcagcttctatctattg

SEQ ID NO: 540085 - DNA, 201 bp, Homo sapiens
acgtctaagcccaattgcttcccaattaattattttaacacttctcaatatgaaaaattcaaacataaaaagcagacagaatggttttgttttttgttttytgtttttttttgagatggagttttgctcttgttgcccatgctggaatgcagtggcatgatttcagctcactgcaacctctacctcccaggttcaagtaat

SEQ ID NO: 540086 - DNA, 201 bp, Homo sapiens
ccatgctggaatgcagtggcatgatttcagctcactgcaacctctacctcccaggttcaagtaattcttgtgcctcagcctcccgagtagctgggattackggtgtacaccaccacgccaggctaattttgtatttttagtagagatgaggtttcaccatgttggccaggctggtctcgaactcctgacctcaggtgatcc

SEQ ID NO: 540087 - DNA, 201 bp, Homo sapiens
caaaaaattagctgggcatgatggtggtgggtgcccgtaatcctagccactcaggaggctgaggcaggataattgcttgaacccaggaggtggaggttgcrgtgagccgagatcacgccgttgcactccagcctgggcaacaagagtgaaattccatctcaaaaaataataataataataatagtaatattttaaagctag

SEQ ID NO: 540088 - DNA, 201 bp, Homo sapiens
gtccaggctgtagtgcgctgtgattgtgccactatactccaacctgggtgacagaatgagaccctgtctcaaaaaaaaaaaaaagaaagaaagaaaaaggraaagaaaaaaaaaattcccagcatgtccttatggtttgctgttgtattagtctgttctcacattgctataaggaaatacctgagaatggataatttataa

SEQ ID NO: 540089 - DNA, 201 bp, Homo sapiens
ccttggcctcccgtagtgctgggattacatgcgtgggccactgtgcccagcctccttcctctatctgcaaagccaacaatggcaggtcttgtctttctcaygaggcatcactctcaccttgcctccgtggtcatgtctccttctctgactatgactctcctgccttcgtctttcccttataaggaactttgtgatgacatt

SEQ ID NO: 540090 - DNA, 201 bp, Homo sapiens
tagaaatgtattttctcagagttctggaaaccggaagtccaagattaaggtgttggcaggtttggcttctgccgaggcctctctccttggctttcagatgsctgacttcttgctgtgtcctgccatggtcttttctctgggcatacacattgtcggggcaaagggaactttcccatcaccctctgaaggttccgtaatttg

SEQ ID NO: 540091 - DNA, 201 bp, Homo sapiens
gctcaggctggtctcgaactcctgacctcaggtgacctcagcctcccaaagtgctgggattataggcgtgagccaccatgctggcctgttttttttttttkttttttttttttttttaccgcatagtatttatgctttaatagagtatatatgctttatactaaagcatatactatatacatatcatatatatgctttatc

SEQ ID NO: 540092 - DNA, 201 bp, Homo sapiens
ggctcttgtcgaaaaaacaagtgataaataacaaatgttggcaggggtacggagaaaaggaaaccctagtacactgttggtgagaatgtagattggtacarctattatggaaaacagtatggaggttcctaaagaaatttaaaatagagctaccatgtgaccagcagtccgtcttctgggtgtatatccaaaggagatgaa

SEQ ID NO: 540093 - DNA, 201 bp, Homo sapiens
caggctggtctcgaactcctgacctcaggtgacctcagcctcccaaagtgctgggattataggcgtgagccaccatgctggcctgtttttttttttttttktttttttttttttaccgcatagtatttatgctttaatagagtatatatgctttatactaaagcatatactatatacatatcatatatatgctttatctgc

SEQ ID NO: 540094 - DNA, 201 bp, Homo sapiens
atttgcaacaacacagatggacctggaggttattatactaagtgaaataagccagaaacgaagagaaaaacatggtctgatcttacttatatgtgaaatawatatcgtttttaattatatatataaatatatattcacatatatctgtgtgtgtttatgtgtgtgtgtgtgtatatatgtgtgtgtgtgtatatatgtgtg

SEQ ID NO: 540095 - DNA, 201 bp, Homo sapiens
atataatttttttttgagacaaagtctcgctctgtcacccaggctggagtgcagtggcacaatctcggtttactgcaacctttgcctgccaagctcaagtsatcctcccacctcagcctcctgtcctgagtagttgagactagggcgccaccatgctcagttaactttttagttttttgtagagatagggtctcattacat

SEQ ID NO: 540096 - DNA, 201 bp, Homo sapiens
tcaaactccttacctcgtcatccacccaccttggcctcccaaagtgctgggattacaggcatgagccaccgtgcccggcctaaaatgttttcttctactgwgtaggccccagaactaaggctgaggtgatcatgtggggagggactgcaagcaggggtaaggacaatgcaccaggtaccacttgtcattgttttgtgagct

SEQ ID NO: 540097 - DNA, 201 bp, Homo sapiens
tgcctcccaggttcaagcagttctctgcctcagactccagagtagctgggattacaggcacccaccaccacgcctggctaattttttttttttttttttgkatttttagtagagacagggtttcaccatcttggccaggctggtcttgaacttctgacctcgtgatccacccgcctcggcctcccaaagtgttgggattac

SEQ ID NO: 540098 - DNA, 201 bp, Homo sapiens
aaaattaatagcttcacttctacttcattttaaaataagatcatctgcactctgaggcagcattcgtctgcccttgcaacgtgtaactgtcagagtggggyactacagaggactacctgcattatattccctcaaaaacggttttccactcaggaaagttattttcaattgggaaatctgttctgcccattcaaaaagtct

SEQ ID NO: 540099 - DNA, 201 bp, Homo sapiens
tgaggcaagagaatcgcttgaacccaggaggcggagattgcagtgacccaagatcgggccaccgcactttaccccaggctacagagcaagactccgtcttaaaaaaaaaaaaaaaaaaaaaaagttcttttttttatgaagtggtggcaataatacatgatcactttaaaaattgttcttatttgacaaaatgtgaaagtc

SEQ ID NO: 540100 - DNA, 201 bp, Homo sapiens
tcggagtgcagtggcacaatcttcgttcattgcagcctccgcctcccagattccagtgattctcctgcctcagcctcctgagtagctgggattacaggtgycctcctccatacctggctaatttttgtatttttagtagagatggggtttcaccattttggccaggctgatcttaaactcctgacctcaagtgatctgcct

SEQ ID NO: 540101 - DNA, 201 bp, Homo sapiens
ccgagtagctgagattacaggcgtgcaccaccacatctggctaatttttgtgtttttagtagagacggggtttcaccatgttggccaggctggtctcaaaytccagacctcaagtgggatccagccaccttggcctcttaaaggcatgagccaccacaccaggctcaaattatcttaaatttatataccccttataaactt

SEQ ID NO: 540102 - DNA, 201 bp, Homo sapiens
tgctttatgtcttaacatttcagagtgaaatgccacacaatttttttttttttttttttttgaggcagagttttgctcttttcacccaggctggagtgcartggtgcaatctcagttcatggaaccctccacctcctgggttcaagtgattctcctgcctcagtttcccgagtagctgggattataggagcctgccacaat

SEQ ID NO: 540103 - DNA, 201 bp, Homo sapiens
aaaagagccactaatatgttaactattgttaaataatagctaaaataatacagattattaaattattttaatacttacttgccataataatctgagtgccktattacttgattacaattgtttttgccaaaataggaacaatatcatcaagtgaacatcctgtgtctccccagcatcctcagtggttgaaacactttgtcc

SEQ ID NO: 540104 - DNA, 201 bp, Homo sapiens
gcctcccaaagttctgggattacaggggtgagacaccaaacctggccagggctagaaagaatcttgaatattatttagtttgtactttcatgacacatatrtattcctatttatagtggggagaatgtagctagtatttgatttgtaaaaacactttaatgactaatcttttatatgttgtatttttttttaactccaaag

SEQ ID NO: 540105 - DNA, 201 bp, Homo sapiens
tagtgtgaaggttatacataaaaaaaagcatcaggcctccaaaggaactctgtgtttatgagttagcagtgaggagacttggattctggtcctagctagcygtgtttccttaagcaagtgttatattctcagtaatttactttaaatacctcggaagggccagtgggaagcttatctgtgtgtgtgacttaacttgaatgt

SEQ ID NO: 540106 - DNA, 201 bp, Homo sapiens
tccactaaaaatacaaaaattagccaggtgccgtggtgggcgcctgtaatcccagctactcaggaggctaaggcaggagaattgcttgaacccgggaggcrgagggtgcagtgagctgagatcgcaccactgcactccagcctagggacagagcaagactccatctcaaaaaaaaaaaaaaagttctttaaaattttaaat

SEQ ID NO: 540107 - DNA, 201 bp, Homo sapiens
ttttacttaatgtcaagttctactactacttttttcccaaacaggttggcatatgtatgcattaagcctcagcaatatagaatccaaaattttttcattctttttttttttgagacagaatcttgctgctgtcgcccaggctggagtgcaatggtacaatctcggctcactgcaatctctgcctcctgggttcaagcaatt

SEQ ID NO: 540108 - DNA, 201 bp, Homo sapiens
ggctgaggtgagaggatcgcttgagcccagaggtcgaagctctagtgagctgtgatcacacccctgcactccaggctgggcaacagagtaagactgtttcaaaaaaaaaaaaaaaggaaaaagaaataccctaaataaatagcctaacattacatctcaaggagccagtagaagaacaaactaaatccaaagttagcagaa

SEQ ID NO: 540109 - DNA, 201 bp, Homo sapiens
aaatatatattcacatatatctgtgtgtgtttatgtgtgtgtgtgtgtatatatgtgtgtgtgtgtatatatgtgtgtgtgtgtgtatgtgtgtgtgtgtrtatatatatatataatttttttttgagacaaagtctcgctctgtcacccaggctggagtgcagtggcacaatctcggtttactgcaacctttgcctgcca

SEQ ID NO: 540110 - DNA, 201 bp, Homo sapiens
atatattatacttacgatatatacttatatgtagtatataataatattacatataaaaatgttataaaaataaatgctaaagtaaataaaaaaagagccaytaatatgttaactattgttaaataatagctaaaataatacagattattaaattattttaatacttacttgccataataatctgagtgccttattacttga

SEQ ID NO: 540111 - DNA, 201 bp, Homo sapiens
ttatttttttcatttttgagacggcatcttgctctgtcacgaggctggagtgcagtggtgcgatctcggctcactgcaacctccgcctcccaggttcaagygattctcctgcctcagcttcctgagtagctggaactacgggcgcatgccaccacgcccagctaatttttgtatttttagtagagacggggtttcaccatg

SEQ ID NO: 540112 - DNA, 201 bp, Homo sapiens
ggatctttgataatcaacactctttaaaaaattccattatttaggccgagcacagtggctcatgcctgtaatgccagcactttgggaggcccaggtgggtrgatcacctgaggtcaggagtttgagaccagcctggccaacatggtgaaaccccgtctctactaaaaatataaaaattagccgggcgtgggggcaggcgcc

SEQ ID NO: 540113 - DNA, 201 bp, Homo sapiens
ggaccttgctcaaagtacaacttcccaggactacttcacattgttaaataaacctataaacatttcttttcttttcttttttttttttttttttgtatttyctttttagtagaggtggagtttcgccatgtaggccaggctggtcttgaactcctgacctcaagtgatctacctgctctggcttccaaagtgctgggatta

SEQ ID NO: 540114 - DNA, 201 bp, Homo sapiens
cctttgttggctgtggagagagagattttttcctcatgtctacaaaccctctatgatcataattcccatgtctggccaagcaggtgaagcccctggggcayaggtggaaacacagatgccaggcccatcccctgagcatctggcttggtagatctgaggtggaaccagcacttgtgctcttaatgtgttttcttgtgttta

SEQ ID NO: 540115 - DNA, 201 bp, Homo sapiens
ttttgtattttttgtagagacagggttttgccatcttgcgctggttggtcttgaattttggggctgaagcaatcctcctgcttcagcctcccaaagtgttrggattacaggcgtgcgccaccatgcccggcattaatttttttctcaaatcagtttcatccttcaaaaaacaaaaactatccttatccaatctctcttctt

SEQ ID NO: 540116 - DNA, 201 bp, Homo sapiens
tttcgccatgttgtccaggctggttttggactcctgacctcaggtgatccacctgcctcggcctcccaaagtgctgggattgcaggcatgagccaccatgyccaaccttataagttattttcatttaactactttattaatgaaaaaaaggcttccttttcaaattccgggggacaagtttattaccaaattatttgtgtc

SEQ ID NO: 540117 - DNA, 201 bp, Homo sapiens
cttttggtttgtttgtttgtttgtttgttttttagacagtctcacgctgtcgccccagggtggagtgcagtggagcgatcttggcttgctgcaacctccgyctcctgggttcatgtgattctcctgcctcagcctcccgcatagctgagattacaggcacctgctatcatgcccggctaattttttgtattttttgtagag

SEQ ID NO: 540118 - DNA, 201 bp, Homo sapiens
atcttttggtttgtttgtttgtttgtttgttttttagacagtctcacgctgtcgccccagggtggagtgcagtggagcgatcttggcttgctgcaacctcygcctcctgggttcatgtgattctcctgcctcagcctcccgcatagctgagattacaggcacctgctatcatgcccggctaattttttgtattttttgtag

SEQ ID NO: 540119 - DNA, 201 bp, Homo sapiens
ctgtaatcccaggtagttgggaggctgaggcaggattgctgcttgaactcaggatgtggaggttgcagtgagccaagatcacaccactgcactgcagcctrgacaacagagtgagactgtctcaaaaaaaaaaaaaaaaaaaaaaagaagcagcagcagctgattattcatactttaaatgaaaagagaattctacgtaaa

SEQ ID NO: 540120 - DNA, 201 bp, Homo sapiens
ctgtaaaatgcatgccatttctactgcagtgcttgatacccctctgttgttaattgaattatgtccctgccaaattctaatgttgaagctgtagcccccartgtgactgtatttcccatctttctcctcctagccttcatcgaaatgcagacataatttggtctgtttctcaaatcggtggaagttttgtcatcttaatta

SEQ ID NO: 540121 - DNA, 201 bp, Homo sapiens
cttgaactccccacctcaggtgatctgcccgcctcagcctcccaaagtgctgggattacaggcgtgagccaccacgcccggccatgatatattttgtttgwtgtttgtttcagagtctcgctttctagccaaggctggagtgcagtggtgtgatctcagctcactgcaacctctgcctcccaggttcaagcagttctctgc

SEQ ID NO: 540122 - DNA, 201 bp, Homo sapiens
gaagatctctctaaggagtgagtatcgatcaacaaaacctggagaagcaaaagaaacccatgaagacttcctagagaattcacatcttcaaggtaaggaayggaacatattatatacccctgttaagttctcattagttagtggtagattttgttaaagaagtttcaaatatattttcacttgaaatattgatatgcagtt

SEQ ID NO: 540123 - DNA, 201 bp, Homo sapiens
ttgaggacttttgcattgatgttcatcagggatatttgtctaaaattctctttttttgttgtgtctctgcccggctttggtatcaggatgatgctggcctygtaaaatgagttagggaggattccctctttttctattgattggaatagtttcagaaggaatggtaccagctcctccttgtacctctggtagaattcggct

SEQ ID NO: 540124 - DNA, 201 bp, Homo sapiens
attttaacacttctcaatatgaaaaattcaaacataaaaagcagacagaatggttttgttttttgttttttgtttttttttgagatggagttttgctcttrttgcccatgctggaatgcagtggcatgatttcagctcactgcaacctctacctcccaggttcaagtaattcttgtgcctcagcctcccgagtagctggga

SEQ ID NO: 540125 - DNA, 201 bp, Homo sapiens
tggcatgatttcagctcactgcaacctctacctcccaggttcaagtaattcttgtgcctcagcctcccgagtagctgggattacgggtgtacaccaccacrccaggctaattttgtatttttagtagagatgaggtttcaccatgttggccaggctggtctcgaactcctgacctcaggtgatccacctgcctcagcctcc

SEQ ID NO: 540126 - DNA, 201 bp, Homo sapiens
gcagatcacctgaggttaggagttcaagaccagcctggccaagacagtgaaaccccatctctactaaaaatacaaaaaattagctgggcatgatggtggtrggtgcccgtaatcctagccactcaggaggctgaggcaggataattgcttgaacccaggaggtggaggttgcggtgagccgagatcacgccgttgcactcc

SEQ ID NO: 540127 - DNA, 201 bp, Homo sapiens
caggtggatcacctgaggtcaggtgtttgagaccagcttggccaacatggtgaaaccctgtctctactaaaagtacaaaaattagccgggtgtggttgtgyaagcctgtaatcccagctacttgggaagctgaggcaggagaatcacttgaacccgggaggcggagttaaaaaaaaaaaaagtctgctggattgagtggtt

SEQ ID NO: 540128 - DNA, 201 bp, Homo sapiens
taagaagagattatagacaagcatgtttagaattatcccattcatgtaaaatgtatacacacacacacacacacacacacacacacacagattaatctgtrtaagtatatagatgctgagaaatacttggtagatgtctataagtataaaaatattccaatattctttgccaggcatggtggctcacacctgtaatcccag

SEQ ID NO: 540129 - DNA, 201 bp, Homo sapiens
tctggtagaattcggctgtgaatccgtctggtcctggactttttttggttggtaagctattaagtattgcctcaatttcagagcctgttattggtctattyggagattcaacttcttttttcaaatggccacccactggttcctaaatcatttattcctaaatcaatatttttaatctgatttgagaagttctattttata

SEQ ID NO: 540130 - DNA, 201 bp, Homo sapiens
gagtcccttctatcccattgaaagtgtgcgggtggtggtataaaaatgtttcagctgctctgcgcttcagccccacccataatgacatctgctccacaacwagaccgaggattatattatctccaaagtaaccatcggcctatttttatgcctactttggttattgaaggtgggcttttggatgatttactgtgtccatga

SEQ ID NO: 540131 - DNA, 201 bp, Homo sapiens
ggcatgcgcctgtaatcccagctaccagggaggctgatgcatgagaatcacttgaacctgtgaggcagaggttgcagtgagccgagattgtgccactgcastccagcctgggtgacagagtatctcaaaaaaaaaaaaaaattaggttttatactccttatgttatttatttttaggtattttattgttttgaactgttgc

SEQ ID NO: 540132 - DNA, 201 bp, Homo sapiens
tttcattagttttttcaataatgtccttttgctgttttatgtccaatctagcttactacactgcatttagtaattaaatctttctctgttttttccccccygtacgttaattttttttttttcctttttgagacagggtcttgctttgttacacagtctggagtgcaatggcatgattacagctcactgcaacctccaccc

SEQ ID NO: 540133 - DNA, 201 bp, Homo sapiens
aatctcaaacatttatgcactgttcacaaacttaaactgtcttaaacatataaagacacaaaacttatatatctagcaaatttaattctctgaaatttttkttttgttttgttgagacagggtcttgctttgtcacccaggctagaatgctgttgcaggaataccactcactgctgccttgaccttcgggcttcaagcagt

SEQ ID NO: 540134 - DNA, 201 bp, Homo sapiens
acagagtgagacttcagtctcaaaaaaataaaatataatgctgtttcacatgaaagtagtcttttgttttcttttggttttttgcttgtatatgtgtatatttttttttttttttttagacagggtcttgatctgtcacctaagctggagtgcagtggtgcaatcatagctcactgcagcctccaactcccatgctcaagc

SEQ ID NO: 540135 - DNA, 201 bp, Homo sapiens
agaaaatggacaaaagacattaagaggtatttcaccgaagaggatatatgaatggcagataaatgcatgaaaagatattgaacaattaaaatcacagtgaracagcactactcacctatcagaatggctaaaataaaatagtgacactaccaaatgctggtgaggacccagagaagctggatcattcatatactgctgata

SEQ ID NO: 540136 - DNA, 201 bp, Homo sapiens
ttttttgtagagatggggttgtagagatggcgtgagccaccgcgcccaaccggattggttagatacaactttctttttttttttttttttttttttgaggkggagtttcgctcttgtcgcccaggctggagtgcaatggcgccatctcggctcaccgcaccctccgcctcctgggttcaggcgattctcctgcctcagcct

SEQ ID NO: 540137 - DNA, 201 bp, Homo sapiens
taacacggtgaaaccccgtgtctactaaaaatacaaaaaattagctgggtgtggtggcacacgcctgtagtcccaggtactcgggaggctgaggcaggagrattgcttgaacccaggaggcagaagctgcagtgagccaagatagtgccactgcactccagcctgggcaacagagcgagactccgtctcaaaaaaaacaac

SEQ ID NO: 540138 - DNA, 201 bp, Homo sapiens
ccctggaatgctttggccatttgagcctgagaatgaaacctcataaatattgacacgaaagctctcgccaagttttgcactgtggtcatggctataacttrgtgaaaaaaaaattttgcatgaaatgttttatttaaactttttttcaagaaaatgtttttttctccctaacagaacatttcataagttattttaattact

SEQ ID NO: 540139 - DNA, 201 bp, Homo sapiens
atttagacatcacatgaatagatgtctgtgacactaaagtataagaagagattatagacaagcatgtttagaattatcccattcatgtaaaatgtatacacacacacacacacacacacacacacacacagattaatctgtataagtatatagatgctgagaaatacttggtagatgtctataagtataaaaatattccaa

SEQ ID NO: 540140 - DNA, 201 bp, Homo sapiens
tctaaatcagtaccagagggttcattagttagtataaggaatgtcgaaataatttttccttgatgaaatgaatggtatgcaagatatgaggccaacagatygtacaggcatctctctgcctttttatgaacaagttaagaggcaagcccagcaatgtaacatttctggagcggtgccctgggctcgatctccattttttcc

SEQ ID NO: 540141 - DNA, 201 bp, Homo sapiens
taaacaattatctgacttttagccgaacacttgggctttagagaaaaaaaaaaaaaaaaaagacttcatttctcatcctcccttgcagctacagttagccrcatgactaaattctggccaagggaatggcagtggaaggggtgactgtgactacacagaagagtctgtgagagttggacccttttcatctcttcctccttc

SEQ ID NO: 540142 - DNA, 201 bp, Homo sapiens
tttagacatcacatgaatagatgtctgtgacactaaagtataagaagagattatagacaagcatgtttagaattatcccattcatgtaaaatgtatacacacacacacacacacacacacacacacacagattaatctgtataagtatatagatgctgagaaatacttggtagatgtctataagtataaaaatattccaat

SEQ ID NO: 540143 - DNA, 201 bp, Homo sapiens
cattcagccactctgccctgtttgggagctttttcccacagtcaagccggtctattgcccatccttggatcatgtggtaggagctgatgtttttaccaccygcctctgtccatcttcttgtggttacagtgccctggttttccacaggaaagccatgcctccctcacccttattttgtatggtccaaatagtctcatatgg

SEQ ID NO: 540144 - DNA, 201 bp, Homo sapiens
caacactttgtgagcctgaggcaggagaatcacttgagcccaggagttcgagactaacctgggcaacaaagagagaccttgtctctacaaaaaaaaatttwaaatgagccaagcgtggtggcatgcaactgtggtcccagctatctggaaggctgaggcaaaaggacgacttcagcccagaaggatgaggctacagcgagt

SEQ ID NO: 540145 - DNA, 201 bp, Homo sapiens
ttttccctgtttactgtgttcattttgccatgtgcatgtattgcctatttgaaaagaaaacggccgggtgcggtggctcacgcctgtaatcccagcacttygggaggctgaggcgagtgaatcacctgaggtctggagttcgagaccagcctggccaacacggcaaaacccaacctctactaaaaacacaaaaaattagct

SEQ ID NO: 540146 - DNA, 201 bp, Homo sapiens
tcacccttattttgtatggtccaaatagtctcatatggatccaccatcctcagtgtctagtaatgcagagatgggtccactccccaatccaagccaatgaratgcttaagaaaggcgcacttcctttatccctgaacttggttgtagtgatgttaaccagggtccagcagtcatgctgtcagcaccagagacaacctacct

SEQ ID NO: 540147 - DNA, 201 bp, Homo sapiens
ctataggtcatatcattattttatatatagcccagaaagaaaacaatgctaattaaacttcgatttcagcgattttgtaagaaaaaaagtgtcccacaatygttggaatatagtgcggcaaccacctcacctccttaaaaaccaataattgggctgggcgcggtggctcacgcttgtaatcccagcactttaggaggctga

SEQ ID NO: 540148 - DNA, 201 bp, Homo sapiens
aaattagctgggcatgctggcacttgcctgtagtcccagctacttgggaggctgaggtggtaggatcccttgaatccaggaggtcaaggctggcgtgagcyctgcttgtgccactgcagtccagcccgggcaacagagtgagaccccgtctcagaaaaaaaaaaaagagagagaaatatgtttacttgttttatgtattgt

SEQ ID NO: 540149 - DNA, 201 bp, Homo sapiens
attccaagaaacacaagtgctttagtggatattcttttcactagcagataggcactgaaaagggcatagatgcaggcatcccgcagcaggaagaaaggaarccacacagtaaagagggaaatgttacatatgcagagagactgaaggaggcacagaaatcaaactatgaagtaggccgggcacggtggctcatgcctgtaa

SEQ ID NO: 540150 - DNA, 201 bp, Homo sapiens
ggcaggagaattgcttgaacccgggatgcggaggttgcagtgagccgagatcgcaccattgcacttcagcctgggcgatagagtgtgactgtctccaaaaygatacaaaacaatgaggtgaccatttctgagtgataggactctacctgaggatgcatttgaagcaagcagtaatagggaatgagtcaataacaagaagaa

SEQ ID NO: 540151 - DNA, 201 bp, Homo sapiens
caaagtactgggattacaggcgtgagccaccgcgcccggtgcgtgtatcagtatttctttttattgttgagtaacattttgtcatatggatgtacttaccygtttaccagttgatgtttgttttggttatttccagtttggagctacgatgaactaagctgctttaaacatttctactataaaggtctttggagatttttc

SEQ ID NO: 540152 - DNA, 201 bp, Homo sapiens
aaatattagactgatagttatttaagttaccaccagtgatagctctggaatccctgttttattaatttccaggtaaatccttcttaagcacatgggaagayagcactgtaaattttggggggtaaggagaacctccatcaattaatacatcagcttgataaaattcaaagaaaaacatgatcaaataagttcagattatat

SEQ ID NO: 540153 - DNA, 201 bp, Homo sapiens
aaaaagtgggccttgagaattgccatttcagtcaagtgctaggaataaatacccatttggagaatttgaaggagagatgaggaggtagggaccacacatayagacatgtctttacatcttttagggagttttgctgttaagggaagcagagaaattcggtgataactgaaggtagaagtggggtcaagtaaggattttttt

SEQ ID NO: 540154 - DNA, 201 bp, Homo sapiens
gacaagcctggcaaacatggtgaaacctcgtctctactaaaatacaaaaattggccgggtgtgttggcatgcacctgtaatcccagctactcgggaggctraggcaggagaatcgcttgaacccaggaggcagaggttgcagtgagccgagatcacgccactgaactccagcctgggcaacagagcgagactccgtctcag

SEQ ID NO: 540155 - DNA, 201 bp, Homo sapiens
caggctggagtgcaatggcgcaatcttggctcactgcaacctccgcctccccggttcaagctagtctcctgcctcagcctcccgagtagctgggattacakgcgcccaacatcgtgcccagctaattttttgtatttttagtagagacggggtttcaccgtgttagccaggatggtctcgatctcctgacctcgtgatcca

SEQ ID NO: 540156 - DNA, 201 bp, Homo sapiens
cgcatcaccacgcctggctaatttttgtatttttagtagagatggtgaggtttcaccaagttggccagcctggtcttgaacacctggcctcaagtgatctrcctgcctcggcctcccaaactgctcggattacaggcgtgagccactgcactcggcctatttactttgatttatctttctctctctttaatgttgaaggct

SEQ ID NO: 540157 - DNA, 201 bp, Homo sapiens
tcacttccttctgttacttgtctttcacctatgtctgataaactgaaatacagtactgaacattgaggagagtcttatcaaataaaattatattttcacttctggtatatctcctctatccatattagttacaccaaagaagacaaacagcttttgggacagattatacatagttacttttgtttcacagttaaacttaaa

SEQ ID NO: 540158 - DNA, 201 bp, Homo sapiens
gagtctcactttgttaccccggctggagtgcagtagcgtgatcttggctcactgcaacctccacctcccaggttcaagtgattctcccaggagtagctgaractacaggcaggtgccaccatacttcgctaatttttttattatattgtagagatagagtctcattatgttgcccagtctccaatttttaaaaaatctcag

SEQ ID NO: 540159 - DNA, 201 bp, Homo sapiens
gaatttgtataaatatttgtcctcagaaaacatgggcttttaaatttcaatctgacagatgttttgagatagtgattggtggaaccccaatcatggggtcrgaccccaacaatagtgattaatgggaccccttaactttctaactttgtctaccagtggcctagaaagactagggaagtgttgggagtttctgtgacttca

SEQ ID NO: 540160 - DNA, 201 bp, Homo sapiens
aaaaattagccgggcgtagtggcgggcgcctgtagtcccagctactcgggaggctgaggcaggagaatggcatgaacccgggaggcagagcttgcagtgarccgagatcatgccactgcactccagcctgggtgacagagtgagactccgtctcaaaaaaaaaaaaaaaaattagccagatgtagtggcgtgtgcctgtgg

SEQ ID NO: 540161 - DNA, 201 bp, Homo sapiens
acccaccatgcctggccttcattaaattttcaaaaaattaaattaaaaaacttcagccttatctacataattttaattttaagttttattaattttagttmatttattgattgttttaaagttttaatagataatcaaggttacaggaaatacagcttttggaaatatctgaaaataatttcctgattattttacaatttc

SEQ ID NO: 540162 - DNA, 201 bp, Homo sapiens
gggaaccgacaagtgtgacaactcctccatgtcgctgcagatgggctacacgcagggcgccaagcaaagcggccaggtctttggcctgggccggcagatayatgaccccaagttctgcccagaaggcacagtggccgacagggctccctcgggcgcgcaggctcgggggaggtccctgaatatcccccttactaccaggag

SEQ ID NO: 540163 - DNA, 201 bp, Homo sapiens
tttctataattacacattagactttgagaaggtagggtgtgtagggctgatttctccaagaatttataaattacatattctaaagaacttatttcccatarcacttgacttaaaaacttaccatgaaacaaatggcatcacctggagcttaagaagttcattgaaggcctggtgagagacaatagccaagaacaaataaag

SEQ ID NO: 540164 - DNA, 201 bp, Homo sapiens
ctggagtgcagtagcgtgatcttggctcactgcaacctccacctcccaggttcaagtgattctcccaggagtagctgagactacaggcaggtgccaccatrcttcgctaatttttttattatattgtagagatagagtctcattatgttgcccagtctccaatttttaaaaaatctcagcaatcctagctttaatttccta

SEQ ID NO: 540165 - DNA, 201 bp, Homo sapiens
atgacccccagaaggaggtagagctccgcagctggatcgagggactcaccagcctctccatcggccccgacttccagaagggcctgaaggacgggattagyttatggacactcatgaacaagctacagccgggctcagtcctcaagatcaaccgttccatgcagaactggcaccaactagaaaacctctccaatttcatca

SEQ ID NO: 540166 - DNA, 201 bp, Homo sapiens; identical to SEQ ID NO: 358317

SEQ ID NO: 540167 - DNA, 201 bp, Homo sapiens
cctaaggacccacccatgttttctgctaatcattttttttttctaaacagctctgcacagcctttcctcattccgttcccgctctccccacccactctgcrttcgatccgaggtttctagtccccagctggacatcacagcaccaactcccactcaggagccggccagagcccgagccgcagcgcagtgggcagctccccg

SEQ ID NO: 540168 - DNA, 201 bp, Homo sapiens
tcacctcaggtgatccacccgcctcagcctcccaaagtgctgggattacaggcatgagccactgcacttgtcctgttttttctttatcaacactataaaaktaaagtattctggtgtttgattcagcactgaataggcacagactttgcaaaggagaaggaagaatgactgacacaattttcttttggacagatttcaagg

SEQ ID NO: 540169 - DNA, 201 bp, Homo sapiens
cagtctgttgcccaggctggaatgcagtggcgcaatttcggctcactgcaacctccacctcctgggttcaagcgattctcatgcctcagcctccagagtakctgagattagtagtgcatcaccatgcccagctaatttttgtatttttagtagagacagagttttgccatgtggcccaggccggtctcgaactcctgacct

SEQ ID NO: 540170 - DNA, 201 bp, Homo sapiens
gtggttttataaatgaataacagcagagtgtagaattcttgggtccctctttctgaggacattttaatcacgatttatttcactgttggtgatgtgcctckttgccaaatgttccccttccatttgtttcaaccaggagagcattagtcccacatttttgcttgactcatttccacaaatctgctgtgagtagcccaggct

SEQ ID NO: 540171 - DNA, 201 bp, Homo sapiens
agtctgttgcccaggctggaatgcagtggcgcaatttcggctcactgcaacctccacctcctgggttcaagcgattctcatgcctcagcctccagagtagytgagattagtagtgcatcaccatgcccagctaatttttgtatttttagtagagacagagttttgccatgtggcccaggccggtctcgaactcctgacctc

SEQ ID NO: 540172 - DNA, 201 bp, Homo sapiens
cctcggctcaggagatggagcagcagctggctgaacgggagtgtccccctcacgctgagcagaggcagcccaccaagaagatgtccaaagtgaaaggtctrgtctccagccgccactagggccggctggggcagctggcactcaccaggcctgggtcaggtggggaggggacaccaagggcccatttcctcccctctctac

SEQ ID NO: 540173 - DNA, 201 bp, Homo sapiens
ggagagtctgtcagtgcttcagaagtctcgtttgtgagttgtgtgttgtaaatgcagtggtaaagctgacttgagcaaagtgtctctgtaatggatcccaktgtgagggccatggccctgccccagcccaggccaggcctttgtggaggataaaaggctcatttcctaggcttagagacacttgcccaagaagccctcttt

SEQ ID NO: 540174 - DNA, 201 bp, Homo sapiens
gagactttaaaacacattccctcaggtaatgttaaattgcaggatcttctttggaagttagaggtaactgacatgcaaataaataaactaaagtcatgtcrttacctcttattatgattttagttcattttcttctggatatttagaaaatatatcaaattggagaagccttagaatgttattttataaagcagtgttccc

SEQ ID NO: 540175 - DNA, 201 bp, Homo sapiens
tctcgtttgtgagttgtgtgttgtaaatgcagtggtaaagctgacttgagcaaagtgtctctgtaatggatcccagtgtgagggccatggccctgccccakcccaggccaggcctttgtggaggataaaaggctcatttcctaggcttagagacacttgcccaagaagccctcttttcctctgcaggatgtttacattttg

SEQ ID NO: 540176 - DNA, 201 bp, Homo sapiens
ttgtgtgttgtaaatgcagtggtaaagctgacttgagcaaagtgtctctgtaatggatcccagtgtgagggccatggccctgccccagcccaggccaggcstttgtggaggataaaaggctcatttcctaggcttagagacacttgcccaagaagccctcttttcctctgcaggatgtttacattttgcctcaaagtggta

SEQ ID NO: 540177 - DNA, 201 bp, Homo sapiens
ctgcttttcatgaacttgagctaatttttttgaatacacacacacaccaccctatatacatatactctgtggatgttcaattcatagaccatgtttaatcygactagccaaggaagtatgaggctgggtgcagtggttcacacctgtaatcccaacactttgagagaccgaggaggaagtattgcgtgagtccaggagttc

SEQ ID NO: 540178 - DNA, 201 bp, Homo sapiens
ttgattaatgccttttccttactcatgcaggggttatgagactgtcagtaaatctaagacatgttaaataatgtagaaaactatttgtagtataagctgatttttttttttttttttgagacagagtctggctctgtagcccaggcaggagtgcagtggcgcgatcttggctcactgcaagctctgcctcccgggttcacg

SEQ ID NO: 540179 - DNA, 201 bp, Homo sapiens
tccagtgtgccgcgcagtgtgcgcaaattcacaaacccgcccgctgagttggtcgtttcggaatcccgagacttgaaacccaacgggaagacccttctcamcctcaaaagaagatgacagcccgcagagagttaacttctgtttacatggaactcagacatctgcaaatcatggtaaggctgcaaacaacaaacaaaaaca

SEQ ID NO: 540180 - DNA, 201 bp, Homo sapiens
ttccaatgcttaatgctttgtatgtgtgtgtgagagaaaagcagttcgttgggcatgctgtatagaaagtaaaacattcctgagagagagaaattaaattyggggctttaataatcttgtttattttttcccgaagaaccagagttggtagagaccccaggggccaagtaatcaaatagtacagaataaacagccatggca

SEQ ID NO: 540181 - DNA, 201 bp, Homo sapiens
agactaatcgccggggatttttcacctggttggagggtgggggtggggtggtgtgtgtgtgtgtgtgtgtgtgtgtgtgtgtgtgtgtgtgtgtgtgtgtktgtaggtcctggactgattaaagttcattgaggaaaaagcacattttacaacaaaaaaataaaagtgtagatttaatgtatgtgactggggtttggggtt

SEQ ID NO: 540182 - DNA, 201 bp, Homo sapiens
aactataaactctgtgaggaggtctgtagtgctcaccattgtttctttagagctgaatacgtagcctgacacacagtaggctttcaataaaaatttaattyaccagaagtggaaaatgagttttatgaagaaaatttcagaaaactgagttcatttttcaacacaagagatgaccaaggggtaatatgttccttcaggttc

SEQ ID NO: 540183 - DNA, 201 bp, Homo sapiens
tgcctctgcctcgcaagtagctatagtaagactataggtgtactccactgcatctgacaagcagaaattcttaattttaacacagtgcaatagttccgtgytttttattatggttagtgttttttgcattggatttcagaaatctttgcttttagagttggcaggttttttacaggctgatagaagagcattccaaaaaag

SEQ ID NO: 540184 - DNA, 201 bp, Homo sapiens
attgctgaatagtattctgttgtatgtttataccacaatttatcttttccactgttggcgggcatttgggttgttattttttggactattattagcaaagycgtagtgagcattcttacatgtttctttttgtagacacttgcacacatttctaggagaggaattgctagtgtgtagggagggtatgcacatgatcagtga

SEQ ID NO: 540185 - DNA, 201 bp, Homo sapiens
ataaacagccatggcatctttgacacatgctcacccgtcctctgtttgaacactacagtgattggtagacagtttggtctgtggtgaactttttttttccycttcagcttgcggaaggagctaatgctgcttatttgcagttgttgaacctgtttgcctatgggacatacccagattacataggtgagttggtgaagatcc

SEQ ID NO: 540186 - DNA, 201 bp, Homo sapiens
tgggcatcgagcagcaagttctgagagccaaccagtacaaagagaaccacaaccgaactcagcagcaggtagaagcagaggtaaggaaggaaaggaacatktgtttctctctccaggcatacctgtttattcgtttgcagtgtttatgtttttgttttgcgaatcttggtgtagatgaaacaagcagtcaccaacaagtgg

SEQ ID NO: 540187 - DNA, 201 bp, Homo sapiens
gtcaagatgcgctgctttccctctcctgcctcatcccttgttggcagctccagttcaggccgtggagggacgtgatgctgggctgtgtttactaaacccaygggttttcagcctcttaagcccagctccgatctccaattagttgagagcgctgggttgactaacctctggtatctgagcacagacagagggtgctgtggg

SEQ ID NO: 540188 - DNA, 201 bp, Homo sapiens
atctcaaggcaagttaacagcttaatctgttgctcagtacacagtgaactatgcccatgctggaggaaaaacttgctatgtcggacttgctagattttttkttgttgttgttgttgagacggagtctcactctgtcgcccaggctggaatgcagtggtgtgatctcagctcactgcaacctctgcctcccagattcgagcg

SEQ ID NO: 540189 - DNA, 201 bp, Homo sapiens
tggacagatttcaaggccagagaatggcaggggaacagaaaccctcaagtaatctcctggagcagtttattttactagccaaaggtaccagtggctcagcyctcactgctctcataagccaggtcttagaggctcccggagtgtatgtctttggagaacttctggagctggccaacgtgcaggaggtaagaacggtttgca

SEQ ID NO: 540190 - DNA, 201 bp, Homo sapiens
atttttcaaatagcaaggcatctcaaggcaagttaacagcttaatctgttgctcagtacacagtgaactatgcccatgctggaggaaaaacttgctatgtyggacttgctagattttttgttgttgttgttgttgagacggagtctcactctgtcgcccaggctggaatgcagtggtgtgatctcagctcactgcaacctc

SEQ ID NO: 540191 - DNA, 201 bp, Homo sapiens
acagacagagggtgctgtgggtctgctgggtggcagaaatggttccttccggcttggcgttctctcctggccactcttcctgctgcctctgactactcagycttgttttcggtgtgtaggccccagctgcccactggaactgccggctaatgcttgctctcccaagatctttaactcctcctggctgcacctgggtaggga

SEQ ID NO: 540192 - DNA, 201 bp, Homo sapiens
aagttctgagagccaaccagtacaaagagaaccacaaccgaactcagcagcaggtagaagcagaggtaaggaaggaaaggaacatttgtttctctctccakgcatacctgtttattcgtttgcagtgtttatgtttttgttttgcgaatcttggtgtagatgaaacaagcagtcaccaacaagtgggcctgggctaggtgc

SEQ ID NO: 540193 - DNA, 201 bp, Homo sapiens
gccgcatgtggcatgatcattttgccatattaaggggagactgctgttaaagatatacatttttcaaatagcaaggcatctcaaggcaagttaacagcttmatctgttgctcagtacacagtgaactatgcccatgctggaggaaaaacttgctatgtcggacttgctagattttttgttgttgttgttgttgagacggag

SEQ ID NO: 540194 - DNA, 201 bp, Homo sapiens
aaaaggggggctagattggatggtctttaccaggtttcttccccttctgattcagggacttcaggaggtttgtggtaacctgagaaagtagcctgaggtawtatggtgctggagttctccatagggtgcttagcagaccacctttatctccccatacattgcgtttttccatatgtgagctgagaataagctggttgcctt

SEQ ID NO: 540195 - DNA, 201 bp, Homo sapiens
tgacatccgaaagaaggatatcaataatattgtcaagaccctgcatgaatggtgaggctaaaaggaggagggggatatctagcatgtcttttgtgcctctycttgcaaaaatgtgattccctggtgtcagctgagggtttggggtgggcctgtagctacctgggagctggggcttagtgagccggagagtggagctacatt

SEQ ID NO: 540196 - DNA, 201 bp, Homo sapiens
agtcctccaacagctcagaggagagaactggcagaggaggtagtggttacgtaaatcaactcagtgcggggtatgaaagtgtagactctcccacgggcagkgaaaactctctcacacaccaatcaaatgacacagactccagtcatgaccctcaagaggagaaagcagtgagtgggaaaggtaatcgaactgtgggttccc

SEQ ID NO: 540197 - DNA, 201 bp, Homo sapiens
aagacagagagttttgtcttcattttgtgatggatggctctttcctttgcagccaaacagggaaaaagttaatggcgaagtgtcgaatgcttatccaggaraatcaagagcttggaaggcagctgtcccagggacgtattgcacaacttgaagcagagttggctttacagaagaaatacagtgaggagcttaaaagcagtc

SEQ ID NO: 540198 - DNA, 201 bp, Homo sapiens
gctgcgcggtggcccggggggcccgggcggcagggcaagcagcgcggcctcggcctatgcgaccggtggcgccggcgcggcttctgcctggagaggtaggygcgggccggctggcgggagcggacgcgggggacctccggggcctgagggctgatgcgcagccgcccccggcgggtaaggggcgggcagggcccgaaaggc

SEQ ID NO: 540199 - DNA, 201 bp, Homo sapiens
tttgggaggccaaggcagttggattgcttgcgcccaggagttcgagaccagcctgggcagcatggcgaaaccctgtctctaccaaaaaaaattacaaaaaattaactgggtgtggtggcacatgcctgtagtcccaggtactcgggaggctgaggtgggaggatcacttgagcctgggaggtcaagattgcagtgagccat

SEQ ID NO: 540200 - DNA, 201 bp, Homo sapiens
taaatggatttttttctataaaattggctgtaagccagagtatatcaggtactataaatacatcactaatttgaaacaaataatggctcaggcaatcccctgtctggaatatttccagtggtggaatgggttttgctttgggttgcgtgcacgcgcacgcacgtgtgtgtcttcgctttactgtttttctgttctaatttt

SEQ ID NO: 540201 - DNA, 201 bp, Homo sapiens
ggaacacttccgccgcttcgaggccattttatctccgtcctccgtccccaaggcccgggttgagaggggtgctctggcggccggagagaccggccactcasggaggccggaggatgccctccccgggctgagcggcggcgctcgttttttcctcgcctcggggtcgcccccttcacctcccttgggcctctcctgaggacc

SEQ ID NO: 540202 - DNA, 201 bp, Homo sapiens
aaggtctcttatggtcttgtatgtagtattgaatccccttgaatatattgtttagcagttttgatcattatgtatttgcttcttgctcctcaaaattgtaygttagttagtaggtccttcagcaaaagaagactgaagatagtattttggttttattcttgtttttaatttttttagttgtctccaacttttctgcctcta

SEQ ID NO: 540203 - DNA, 201 bp, Homo sapiens
ctgtggtaggtactaccttactttaacaacataatgctataaaaggaaagacttaaactggtattacccttttatagtcccttagcaacatgcgtaggatrctacttgaggtcattatatttctcttcaccctttatggcgacatcaaatgatttgaatggctgatcagcttttttacgagggaatttgtaaaaactaccc

SEQ ID NO: 540204 - DNA, 201 bp, Homo sapiens
attatatttctcttcaccctttatggcgacatcaaatgatttgaatggctgatcagcttttttacgagggaatttgtaaaaactacccaataactctaatratggaagatgttaacaaaggaagatctgggtacagagtatataggaactctgtaatatctttgccacttttttgtaaatctaaaactattttaaaattgt

SEQ ID NO: 540205 - DNA, 201 bp, Homo sapiens
agattgtataaggatattagctgtgatgagactcactgcattattttttttagtgaattttatgaaatccccgttccattcaacaggcacatgtttaaaaragctttgtcgttggtgttaatgggggaatgtgttccttcattgtatttgggccttttgtattgcactcttgatattaaattaaatgtgccttgaaatagt

SEQ ID NO: 540206 - DNA, 201 bp, Homo sapiens
ttctgtttgaagaaaatagagggagaaacagaagtcttaagtctgtggcacactgtgtcttcagacagtttgaaggaatgaaaacctagagattttaaatyatgaattgaacatgtaaaattccagtaaaatgtaaaaacggaatatgcatcgctcttaaccttgagcatagtgacttagagacactgtgtatcagttttg

SEQ ID NO: 540207 - DNA, 201 bp, Homo sapiens
ataagctggaatttatattgaacagcatccatgatactttagtattacaactaaagttgtacatactgagtaggtaggatgccttagtaactagataaaasgtataccacctagccatagtgataaatatagctgttttcaaactgtcattcacagatctctaccacagtacctgttacatgaagttcctggttggttctc

SEQ ID NO: 540208 - DNA, 201 bp, Homo sapiens
tacatatagaagtcttcttatgtgttattaaagtcttctaagatagtattctggtcattggagacaccaaaaatctatgggcacagtcctgttcctgtttyttttgccaatagaatgttccttaaggttcagtcacagtccttttacttcccttacagagattgtttaaatttccacaaaagcacgtatttactcttcttt

SEQ ID NO: 540209 - DNA, 201 bp, Homo sapiens
tgcttgcatgttttcatttctttgagatacatgtttaagagtgcaactgctgagttatatggcacattcatttttagttgtattaataaaaggaactgccwtacttcttcagataccatttttatattctcacctgcagtgtaggaaacttcagtttctctgaatcctcaccagcgtttggtgttgccactaatttttatt

SEQ ID NO: 540210 - DNA, 201 bp, Homo sapiens
agctttttgttttgaaataattatagattcataggaagttgcaaataaatgtacagagaggttctgtgcaactttcactgagcctgcttcattgttaacaycttgcgtgactagcagacatctctaataactgtgaaaatcagggaattgacattggtacaatccacagagcttattcacatttcacgttatactagcact

SEQ ID NO: 540211 - DNA, 201 bp, Homo sapiens
tactagatttttgctcagtgaaacaaatatattcccaaaccacttagtatatttgttccttttactaaatttatattagaaaattttaactgtaatcctayttaagccttagtatggagttagatcttgggccagatctactttgagtatgaagaaaatgatgaatttaatgctaataactatatttcatattttagaaat

SEQ ID NO: 540212 - DNA, 201 bp, Homo sapiens
ataaatggatttttttctataaaattggctgtaagccagagtatatcaggtactataaatacatcactaatttgaaacaaataatggctcaggcaatcccctgtctggaatatttccagtggtggaatgggttttgctttgggttgcgtgcacgcgcacgcacgtgtgtgtcttcgctttactgtttttctgttctaattt

SEQ ID NO: 540213 - DNA, 201 bp, Homo sapiens
taatgggggaatgtgttccttcattgtatttgggccttttgtattgcactcttgatattaaattaaatgtgccttgaaatagttggtttttttttttttttaagttcaaagaatattatgatgattttgttgtactctttaacattttaatttggggcggggagggcctgttgagagcagattcattttggaaatactgtt

SEQ ID NO: 540214 - DNA, 201 bp, Homo sapiens; identical to SEQ ID NO: 358345

SEQ ID NO: 540215 - DNA, 201 bp, Homo sapiens
ttaaccatttagtttggggctctatattacttgcttgagccttaatcaatgtggttttattcaatggtttgttctttgaatggttgcaaaaactgtagatmatcttactgaggactgtacaaacatgaaggtgtggtatcaaacttcaggttgaaactgtttgaagcattataaacattcatttcacaactagattgtata

SEQ ID NO: 540216 - DNA, 201 bp, Homo sapiens
atgtttggattgtaaagtaaaatgtatgtagccactttaagtcccagatttggagatgtaatcaaatggcctcaattcctaagtgagtaaccttaaataawgttatttttttaattgacaaataagttttttacatattcaaggactactacatagtgatgtttcaatacatataatgtatagtgatcagatcggggtaat

SEQ ID NO: 540217 - DNA, 201 bp, Homo sapiens
aatgtttggattgtaaagtaaaatgtatgtagccactttaagtcccagatttggagatgtaatcaaatggcctcaattcctaagtgagtaaccttaaataaagttatttttttaattgacaaataagttttttacatattcaaggactactacatagtgatgtttcaatacatataatgtatagtgatcagatcggggtaa

SEQ ID NO: 540218 - DNA, 201 bp, Homo sapiens
atacatagatacagatactgatataccggttaaatatgtacagctcaaatagctaaaattgtctttaagattttttaaattaaaaatattattggccgggygcagtagcttacacctgtaatcccaacactttgggaggccaaagcaggtggattacctgaggtgaggagttcgagaccagcctggtcaacatggtgaaac

SEQ ID NO: 540219 - DNA, 201 bp, Homo sapiens
attttcgtttgttttttggtaatgtttggattgtaaagtaaaatgtatgtagccactttaagtcccagatttggagatgtaatcaaatggcctcaattccwaagtgagtaaccttaaataaagttatttttttaattgacaaataagttttttacatattcaaggactactacatagtgatgtttcaatacatataatgta

SEQ ID NO: 540220 - DNA, 201 bp, Homo sapiens
ggttaattgcaaagatgatcagtagccaagtaatttcttctgaactacctaccttttcaaaatcttcaggaattatttcctgtgacttttgtccttttatrtgtaacagtccttggttgagaacatgggcctctttggagtgttatagaggaccacactatccttaaggatcagacttgctatggaactaaggcactggat

SEQ ID NO: 540221 - DNA, 201 bp, Homo sapiens
ctaatgatgtaactggcctaagagagtctgaagaaaaactaaagcaacaacagcaggagtctgcacgcagggaaaacatccttgtaatgcgactagcaacyaaggaacaagagatgcaagagtgtactgtaagtatttcaagttatataaatgtctttagttgaggaattggtttttagtccacattattacatgttaatt

SEQ ID NO: 540222 - DNA, 201 bp, Homo sapiens; identical to SEQ ID NO: 358351

SEQ ID NO: 540223 - DNA, 201 bp, Homo sapiens
tttactgtattgtttgggggataatgacaagaaaaaaaatctgtacatgttcagtatagacccagttttttcttccttgaatattttccttctacagttgsttgaattcattgttgcatgtggagggccaactgtatattattttaagtatctgacttcccccaaaacaaactcagtcatattttaagattccaagcaaaa

SEQ ID NO: 540224 - DNA, 201 bp, Homo sapiens
gaagatggtaattatggggaagcatctgctgtgatatagttatgtttgtatgtgttacatctatcactgtaataattgtaagcaaagacagagagttttgkcttcattttgtgatggatggctctttcctttgcagccaaacagggaaaaagttaatggcgaagtgtcgaatgcttatccaggagaatcaagagcttggaa

SEQ ID NO: 540225 - DNA, 201 bp, Homo sapiens
gataatttgagatgaaaatagatggatttcagaattgattattgatgtaatagaaacaaggtgtagctgtttgggcactttttgtttagggtttatttttrctgctgtgttggcaaaatactgaaatgcagaagatggatgtgtcccagaaaagaagatggtaattatggggaagcatctgctgtgatatagttatgtttg

SEQ ID NO: 540226 - DNA, 201 bp, Homo sapiens
ggccttcggtgatacctcatcactcttgtctcctcgacctggattttaaggttatttcaactataatggaacctaaccttttccagcttttttttttttttaaaacagctgtcacctgcatacgccagctgaacaacttcctgttcttccaattataatacaagtgaggttttgcagacagggcagggcagcaggagcaaa

SEQ ID NO: 540227 - DNA, 201 bp, Homo sapiens
tccaggctggagtgcagtggtgtaatcacacctcacttcagcttcccgagtaactgatttcaggtgtgcgccaccaagcgcagctaatttcttaatttttstagagatgaggtcttccctatgttgcccaggctggtcttgaactgctgtactttggcaatccttactccttggcctcccaaaactgttgggattataggt

SEQ ID NO: 540228 - DNA, 201 bp, Homo sapiens
ggagtgcagtggtgcaatcttggcttactgcagtctccgcctcctgggctcaagcgatcatcccacctcggcctcctgagtatctgggggctacaagtacrtgccaccacgcccagctaatttttgtatttcttgtagagatggggttttaccatgttgcccaggctggtctcgaactcccgggctcaagagatagccacc

SEQ ID NO: 540229 - DNA, 201 bp, Homo sapiens
tctcaaatctccccctgttgtgcattcctaccttgagtttaattactcttacatacacacacatacacacacacagtggctgttataaaagaggtaacatygtctctaggaggaatttgtgattcaattgggaaagcttactaaacttaatatttaagtgaataatttagatattacagaagtttcctattgtggagtcag

SEQ ID NO: 540230 - DNA, 201 bp, Homo sapiens
ctgcctttgaagatgtagttaatagaatttaatcttttctaagtgcacattgaagttgccttttatgttcatattatgttcatattttatttgaaaaatckatagcatttttattgtgctgaaagcattaatatttgcagcactttgtgagacaggcaaaattatctttttgctgacttggaaactgcaagagttaaaaga

SEQ ID NO: 540231 - DNA, 201 bp, Homo sapiens
ttgagaggaacaggactttaagcaggaaaaccaattgtgaggctgttaaaatagttcagatgaaatacatgaagccactggtggtagcagacaggacagartaggtgttttggaggcacaatcaataggacttgtttagtttggatgctgttgtggaaggaatgaaaaaaatctagggaggaatcacagcttcaggtttgt

SEQ ID NO: 540232 - DNA, 201 bp, Homo sapiens
ttctgagacagagtctcactctgttgcccatgctggagtgcagtggtacaatcttggctcattgtggcctcataccccagcttatgcgatcctcccacctytgccccccaaagtagctcagactacaggtgtgccactacgcctggctaatttttgtattttttggtagagatggggttttgccatgttacccaggctgat

SEQ ID NO: 540233 - DNA, 201 bp, Homo sapiens
ccttgccaaaatcctggcataggaatttgaaccctggtgtatgaaaagtctgccctttgcatactcaggtttcgcatcccgtgaatgctgtatttttgatycgagtactgtattttttaatctgagtttgattgaaaaaaatccaaatataaatggacccatgcagctaaaacctgggttggtcaaggaccaactataata

SEQ ID NO: 540234 - DNA, 201 bp, Homo sapiens
agatttgatatctgggttctaagactttgcagcctaatgcatgtgtcatgctaaaatagaagtagttagacatgtggagttaaatatggtgatggtttctsagatgattaaaatgactgccaccaggttaaggtagttacaaagcagctttctgtaatggcagcagagataataaactgggcaacaagggaggaaccaatt

SEQ ID NO: 540235 - DNA, 201 bp, Homo sapiens
atgtaactggcctaagagagtctgaagaaaaactaaagcaacaacagcaggagtctgcacgcagggaaaacatccttgtaatgcgactagcaaccaaggamcaagagatgcaagagtgtactgtaagtatttcaagttatataaatgtctttagttgaggaattggtttttagtccacattattacatgttaattttaaac

SEQ ID NO: 540236 - DNA, 201 bp, Homo sapiens
actaaatgacttcttcacattttactttgctaaaggctggcttttatcattttctttacttttttttcccactaacccccccgcccttttcttgagacagrgcctctctctcatccaggctggagtgcagtggtgtaatcacacctcacttcagcttcccgagtaactgatttcaggtgtgcgccaccaagcgcagctaat

SEQ ID NO: 540237 - DNA, 201 bp, Homo sapiens
gaaaggccacacgggcctggtgcggcaccggtctctcgtgagccgctctaccttcccgcctgcggggaacacttccgccgcttcgaggccattttatctcygtcctccgtccccaaggcccgggttgagaggggtgctctggcggccggagagaccggccactcacggaggccggaggatgccctccccgggctgagcggc

SEQ ID NO: 540238 - DNA, 201 bp, Homo sapiens
tgccttagtaactagataaaaggtataccacctagccatagtgataaatatagctgttttcaaactgtcattcacagatctctaccacagtacctgttacrtgaagttcctggttggttctcaaaattttatgttcgtatatacatagatacagatactgatataccggttaaatatgtacagctcaaatagctaaaattg

SEQ ID NO: 540239 - DNA, 201 bp, Homo sapiens
gaaaagattaagtcagcagcacgagtaggctgaaaatactttcaccttccaaaagacagaaataaattgatttgttcttgctaacttcccagcctacaacrgtttttcagaaagtgatcttaataatgatgtaagtaaaaaggaaatgtagagatgtcaaggttcagcagcatttcaaaatattatatggacaagatgtca

SEQ ID NO: 540240 - DNA, 201 bp, Homo sapiens
gctcctgatgccacctccttcctctttcaaatttgtttctcttactgttgggaaccaagagtccaagtgaggttggcatttggtcctttcattttcacatwctgactgttctataatattagattgatactgacatttcctattttaaaaaacaccccacactccgagcagcaaacaactgtcattcactgagatcactcg

SEQ ID NO: 540241 - DNA, 201 bp, Homo sapiens
gcctttatgagaatatcctcaataataacaaactaaatagttcaagtatcatgaagaaatttgtttctgaagagctgagttttatttacagatctacttcaaagagatttgaagagacagagctaagttactgaacatatgcatgacatggatatacttactctttgcttttatttatagctagcaccaaaataaatataa

SEQ ID NO: 540242 - DNA, 201 bp, Homo sapiens
tttgtaatttataaacaacttctgacttgccctttgaaagttaattataattgatgactgcttttcttagatgcttctgaagcccaagagaggggcagaaygtagttcttgatttaaaaaaacagaaaggggaggaggatgaccttaactacaaataatattccactgcaacattattgctgtaaaacttccaagctggct

SEQ ID NO: 540243 - DNA, 201 bp, Homo sapiens
aatgatccaaatattaaatcaaagtaatgcgttggggccgagtgcagtggctcacgtctgtaatcccagcaccttgggaggctgaatcaggcagatctctygagctcaagagctcgagaccagcctgggcagcagcaaaaccccatctctacaaaaaataccagaaaaaaaaaaaaagaaaaagaaaaaaattagccggcc

SEQ ID NO: 540244 - DNA, 201 bp, Homo sapiens
gtgaggattaaatgaagtaacactgttgagtactcaccaaagggtctgacacatggaaagtatttggtaagtaaaaactgttattattatgtaagttatcyaatgccaagaattaacacaataccttttcaataagtacatgaaaacaaaaataccgagtctgaggctgcctcccacggggttggttggtagaccatgaag

SEQ ID NO: 540245 - DNA, 201 bp, Homo sapiens
gtgagaagataataaaatcacagaagaatctgtatcctaaagttacattaattgaggtgaataaatgactaaatatttttcaacaatccagtgtttggttmatttaacatatttaacttggattttgcttgggaaaagtatttttcctccgcctttatgagaatatcctcaataataacaaactaaatagttcaagtatca

SEQ ID NO: 540246 - DNA, 201 bp, Homo sapiens
attatccccattccactttccactatgaaacttaagacttttgatgacagggataacatctactttatctttgtaactcctgcctctaacgcaatgcctakcaagtgatacaggtatgatgcttgttcaataaataaataatacatcacacagtaatgatttccaatttactcttacaactttacatagtacttaagaagt

SEQ ID NO: 540247 - DNA, 201 bp, Homo sapiens
gatcctgtaaaatgggggaaattataactgcttcatgatgtaattttaaggattaaatgagaaaaaacatataaagcaagtagcataattcctggcaaatrtaagtgttcattaaacaaccacctttataacaaagtatctcaagtcatactagactcctaactggtctttcttcaagtcctgctccctcaaaaatttaat

SEQ ID NO: 540248 - DNA, 201 bp, Homo sapiens
gcagctaaaatgatttttttttttttgagacagaattttgctctgtcgcccaggcgctcagctcactgcaacctccgcctcctgggttcaagtgattctcrtgcctcagccactggagtagctgggattacaggcgtgcaccaccacgcccctctaatttttatatttttagtagagacggggtttcaccatgttggccag

SEQ ID NO: 540249 - DNA, 201 bp, Homo sapiens
cgtgcaccaccacgcccctctaatttttatatttttagtagagacggggtttcaccatgttggccaggttggtctcaaactcctgacctcagatgatccgscttcttcggctggctccctaaagtgctgggattacaggcatgagacaatgcgcccagccagaatgatcttgaaaaaccaattcgggctcaagctttaaat

SEQ ID NO: 540250 - DNA, 201 bp, Homo sapiens
tatcatgaagaaatttgtttctgaagagctgagttttatttacagatctacttcaaagagatttgaagagacagagctaagttactgaacatatgcatgayatggatatacttactctttgcttttatttatagctagcaccaaaataaatataagacggaacaaaaatttaaatgcaaaaactgaaatcataacagtact

SEQ ID NO: 540251 - DNA, 201 bp, Homo sapiens
ataactcgcaacctaaatggggtgagaagataataaaatcacagaagaatctgtatcctaaagttacattaattgaggtgaataaatgactaaatattttycaacaatccagtgtttggttaatttaacatatttaacttggattttgcttgggaaaagtatttttcctccgcctttatgagaatatcctcaataataaca

SEQ ID NO: 540252 - DNA, 201 bp, Homo sapiens
ctgctgtagatccccaaactctccacgccagacgccgccgacccggaagtagcaagtcccctgccactgagtggccaagaaggcgatctgttatcctgcaycgccaatcatcgctcacgtcgaggggcacgcaggccctggagcccaccaaccacctcgtagctacgcccaagaccacgcttgttgcttaagtccggggtc

SEQ ID NO: 540253 - DNA, 201 bp, Homo sapiens
accgagaacccccaaaactgcgaccgaagcgccatcgctgagacgatctcggaaaagcctcgcctctttttcctcacggacgactcagtcgctcgccaggmgcagccatataaagtcagggacaagcctttggctgctgtagatccccaaactctccacgccagacgccgccgacccggaagtagcaagtcccctgccact

SEQ ID NO: 540254 - DNA, 201 bp, Homo sapiens
gcgatctgttatcctgcaccgccaatcatcgctcacgtcgaggggcacgcaggccctggagcccaccaaccacctcgtagctacgcccaagaccacgcttkttgcttaagtccggggtcaaaggcacacaccccacaaaaccatgtttgggttttctactcggagagcttgggcggtcattgactggtccacacacacccc

SEQ ID NO: 540255 - DNA, 201 bp, Homo sapiens
cgggatcctccatatgctgaacgctggttccctgggtccccttatttctttctctatactttgtgtctttttcttttccaagtctctcgttccacctaacragaaacacccacaggtgaggaggggcaacccaccccttcataacttaataggcaaagcattatccaaacagactgttcacagaaaagaaaaatattaatg

SEQ ID NO: 540256 - DNA, 201 bp, Homo sapiens
ctttttcttttccaagtctctcgttccacctaacaagaaacacccacaggtgaggaggggcaacccaccccttcataacttaataggcaaagcattatccraacagactgttcacagaaaagaaaaatattaatgactcaaattcacaaaaatatgctcaatctcactaacaaaatgcatggacaagacaattcgatgcaa

SEQ ID NO: 540257 - DNA, 201 bp, Homo sapiens
tcacctcagacaggcaggtatcctgtccgctactgtaacatcctctttaaatagcccccatcacacctatttgttgtttgttccagcccctccgcgaaccytgcctctacccgccgcatggcagctacctgggagagtgcctggagttgaatgaatgaaaatagtctgtagggtgcactgcccttgtcaatcacaagcaga

SEQ ID NO: 540258 - DNA, 201 bp, Homo sapiens
agaagtccttaagaaattctaaaaaatcctcaccaagcagataagcagcagataaacctgataaacacttacatgctgtagtatagtggtaataacctagygtcctggctctgaggtcagttaaaacatatgtaaatcttagctctggcacttactaatcatgtctccctaaacctcaatttctttgatcctgtaaaatgg

SEQ ID NO: 540259 - DNA, 201 bp, Homo sapiens
tatatgccaggcctgtcttaacggtttatagataaagcttatgtctcaattctattattttttctatatttttttttagctgcagaaactaacacagaaasgttaagtaacttgaaaaagattaaaactagtaagtaatggagccatggtttaagtcccagtgtctggctccagagtcaatgctcttaactaccatgaaga

SEQ ID NO: 540260 - DNA, 201 bp, Homo sapiens
ggcaagactaattaccagggttcctgcaaaccgagaacccccaaaactgcgaccgaagcgccatcgctgagacgatctcggaaaagcctcgcctctttttyctcacggacgactcagtcgctcgccaggcgcagccatataaagtcagggacaagcctttggctgctgtagatccccaaactctccacgccagacgccgcc

SEQ ID NO: 540261 - DNA, 201 bp, Homo sapiens
ttgcttttatttatagctagcaccaaaataaatataagacggaacaaaaatttaaatgcaaaaactgaaatcataacagtactagaagaaaacatgagaawtttttttataatctcaaggtatgcatatttaaatatgacatcaaaccatgtcatatggcttttattatttttcagaaacagggtctcactgtcacccagc

SEQ ID NO: 540262 - DNA, 201 bp, Homo sapiens
atggccatttttttttttttttgagacagggtctgcctctgtctctcaggctagagtacagaggcacgaacttggctcacagcagcctctgcctcctgggwtcaagtcatccttccacctcaacctcccaagtggctgggactacaggcgcatgccactgcacccagctaatttttgtatttttttgtagagacagggttt

SEQ ID NO: 540263 - DNA, 201 bp, Homo sapiens
aagataataaaatcacagaagaatctgtatcctaaagttacattaattgaggtgaataaatgactaaatatttttcaacaatccagtgtttggttaattthacatatttaacttggattttgcttgggaaaagtatttttcctccgcctttatgagaatatcctcaataataacaaactaaatagttcaagtatcatgaag

SEQ ID NO: 540264 - DNA, 201 bp, Homo sapiens
agacataggagactccattttgttctgtactaagaaaaattcttctgccttgagattctgttaatctatgaccttacccccaaccccctgctctctgaaayacgtgctgtgtcaaactcagggttaaatggattaagggttgtgcaagatgtgctttgttaaacagatgcttgaaggcagcatgctcgttaagagtcatca

SEQ ID NO: 540265 - DNA, 201 bp, Homo sapiens
agaggcattagatttggaaatatggagtctactcctggttttcctggtggctctagtaaaaaatcacaatctctttttttttttttgagacggagtctcastctgttgcccaggctggagtgcagtggcgcgatctcggctcactgcaagctccgcctcccaggttcacgccactctcctgtctcagcctccctagtagct

SEQ ID NO: 540266 - DNA, 201 bp, Homo sapiens
ggctggagtgcagtggcgcgatctcggctcactgcaagctccgcctcccaggttcacgccactctcctgtctcagcctccctagtagctgggactacaggygcctgccaccacgcctggctaatttttttgtgtatttttagtagagacggggtttcaccgtgttagccaggatggtcttgatctcctgacctcgtgatcc

SEQ ID NO: 540267 - DNA, 201 bp, Homo sapiens
ctttctaggtccaatagcttctgttgaaactgttcgactcagccattgtagtgctagaacagccaggtgatgcgtaaacaaatgagagtaggtacagctakgttctaagaacctgggcaacgaaatttgattttcatttaattttcccaagccacaaaatattcttttgattttttttttaacttaaaaaaagtaaaaaca

SEQ ID NO: 540268 - DNA, 201 bp, Homo sapiens
agtaaggcagacagagaaaaaatgaggaaatacatctttagttatttttaatgatccaaatattaaatcaaagtaatgcgttggggccgagtgcagtggcycacgtctgtaatcccagcaccttgggaggctgaatcaggcagatctctcgagctcaagagctcgagaccagcctgggcagcagcaaaaccccatctctac

SEQ ID NO: 540269 - DNA, 201 bp, Homo sapiens
ggcagacagagaaaaaatgaggaaatacatctttagttatttttaatgatccaaatattaaatcaaagtaatgcgttggggccgagtgcagtggctcacgyctgtaatcccagcaccttgggaggctgaatcaggcagatctctcgagctcaagagctcgagaccagcctgggcagcagcaaaaccccatctctacaaaaa

SEQ ID NO: 540270 - DNA, 201 bp, Homo sapiens
ttcctcacggacgactcagtcgctcgccaggcgcagccatataaagtcagggacaagcctttggctgctgtagatccccaaactctccacgccagacgccrccgacccggaagtagcaagtcccctgccactgagtggccaagaaggcgatctgttatcctgcaccgccaatcatcgctcacgtcgaggggcacgcaggcc

SEQ ID NO: 540271 - DNA, 201 bp, Homo sapiens
ataaagtcagggacaagcctttggctgctgtagatccccaaactctccacgccagacgccgccgacccggaagtagcaagtcccctgccactgagtggccragaaggcgatctgttatcctgcaccgccaatcatcgctcacgtcgaggggcacgcaggccctggagcccaccaaccacctcgtagctacgcccaagacca

SEQ ID NO: 540272 - DNA, 201 bp, Homo sapiens
tggctgctgtagatccccaaactctccacgccagacgccgccgacccggaagtagcaagtcccctgccactgagtggccaagaaggcgatctgttatcctkcaccgccaatcatcgctcacgtcgaggggcacgcaggccctggagcccaccaaccacctcgtagctacgcccaagaccacgcttgttgcttaagtccggg

SEQ ID NO: 540273 - DNA, 201 bp, Homo sapiens
atgcttccatttattcatagattctctgaggttcccgtagaaccacaccaccttctgtcatggcactttgtagtcgtttcatctggttttgaaaatcagawaaaaaaggaaaagattaagtcagcagcacgagtaggctgaaaatactttcaccttccaaaagacagaaataaattgatttgttcttgctaacttcccagc

SEQ ID NO: 540274 - DNA, 201 bp, Homo sapiens
ccgcacgttccaatgtactgtgcaagcccaggcgagtgagctgggagaaggggggcaagactaattaccagggttcctgcaaaccgagaacccccaaaacygcgaccgaagcgccatcgctgagacgatctcggaaaagcctcgcctctttttcctcacggacgactcagtcgctcgccaggcgcagccatataaagtcag

SEQ ID NO: 540275 - DNA, 201 bp, Homo sapiens
gttcccgtagaaccacaccaccttctgtcatggcactttgtagtcgtttcatctggttttgaaaatcagaaaaaaaaggaaaagattaagtcagcagcacragtaggctgaaaatactttcaccttccaaaagacagaaataaattgatttgttcttgctaacttcccagcctacaacagtttttcagaaagtgatcttaa

SEQ ID NO: 540276 - DNA, 201 bp, Homo sapiens
accaaagggtctgacacatggaaagtatttggtaagtaaaaactgttattattatgtaagttatccaatgccaagaattaacacaataccttttcaataartacatgaaaacaaaaataccgagtctgaggctgcctcccacggggttggttggtagaccatgaagttgattcccgcctctaagcatctctgtgccagcac

SEQ ID NO: 540277 - DNA, 201 bp, Homo sapiens
ccaagagtccaagtgaggttggcatttggtcctttcattttcacatactgactgttctataatattagattgatactgacatttcctattttaaaaaacamcccacactccgagcagcaaacaactgtcattcactgagatcactcgccatgaactagacacagtaataagtgctttacatcaacctcatatgtgctccac

SEQ ID NO: 540278 - DNA, 201 bp, Homo sapiens
atggagaaggaggaaaaagagagtcccttctccagtgaagaggaagaagaagatgtgcctttggactcagatgtggaacaggtgagtgggccagcgtgcarccacaaaacgctctccagcccactacaggagaaacctgcactggtccactgcacccttctcttggaatgtcttctcacttggcctgtcatatctctggcc

SEQ ID NO: 540279 - DNA, 201 bp, Homo sapiens
tctgggcactgggctgcccacaccaaatgcctcctcccctctctaccctttccaggacatttctactgcctccagcacctgccccagacagaccacaaagmggaaggcagcgatagaggccctgagagtccggtaaagactgaaggcgtgtatgtatattggggcatgggaagaggaagagggtctcgtcaaaccagcgct

SEQ ID NO: 540280 - DNA, 201 bp, Homo sapiens
ggtgttggctgagcggtaagacctgagttgaggaggatgtgggcagggcaggacatgtgacaaggttcaggaagaggggcaggggtgctgagtgaatagayggaggaataggcagaagaaaaggcctggcagttcctgagaggtgggtgctgacaggtgccctcccattcatgcccctgccccttaccctcaccccctcag

SEQ ID NO: 540281 - DNA, 201 bp, Homo sapiens
agccacccgctaccccaacctgaacctccgggcagtgacccccaatcaggtcagacccccgacacacccaccagccttcccaagccaacccccttcccccrggtcaggccctccctgcccagtcgctgccctttggggtcaatcctacccccggcaggcccttacccctggactcaggggctgtgtggccagcctgccttg

SEQ ID NO: 540282 - DNA, 201 bp, Homo sapiens
ccttagtaaacttcagaggaccctgcagcgatcccgggccaaggtggagagtttaggcagggctggagctgagcagggaggagtgggcaggggggtacccrgtggagatcctggggtgatggtgaggacattcagaaagtggggaggactgggacctcaaaacatcacacttagagctgttaggacttattgcaggaaaat

SEQ ID NO: 540283 - DNA, 201 bp, Homo sapiens
atgtggggagaagcagacacatcccagggatgtgtcatgcaagcctcatgatctcagatactgaccaagcaacatgatgctctagtctgtgtacctctgasacaattcaggaggaagccagaggagggggctccaaagccccttctcacttcagttcaatcagagctgcacagttggcttttgtataagatctccttcaaa

SEQ ID NO: 540284 - DNA, 201 bp, Homo sapiens
ttctgtcacagacatccccagaaaacatgcatcgcaatgtggcccagtatgggctggacccagccacccgctaccccaacctgaacctccgggcagtgacycccaatcaggtcagacccccgacacacccaccagccttcccaagccaacccccttcccccaggtcaggccctccctgcccagtcgctgccctttggggtc

SEQ ID NO: 540285 - DNA, 201 bp, Homo sapiens
tctcgccacaacgtgctccacctctggcccttcaccatccacgacctgcgggcactcggtgctaagaagttctacgggcgcttctgcaccggcaccctggmccacatcagtgagcaccacgtggtggcctggaggggcgggtgagcttgggcctagaggcaggccagtggggaaatgctgggacagccaaatgtcgaagtg

SEQ ID NO: 540286 - DNA, 201 bp, Homo sapiens
tggtgggtgctggaccttgcgggctgcgggtcgctgtggagctggcgctgctgggggcccgagtggtgctggtggaaaagcgcaccaagttctctcgccasaacgtgctccacctctggcccttcaccatccacgacctgcgggcactcggtgctaagaagttctacgggcgcttctgcaccggcaccctggaccacatca

SEQ ID NO: 540287 - DNA, 201 bp, Homo sapiens; identical to SEQ ID NO: 359464

SEQ ID NO: 540288 - DNA, 201 bp, Homo sapiens
cttggagatccctggacagggaggctgaactggaggctcccctggtgtcccatgtgccctctgtgcccaagactaatgtttttcacttccaaatttggcaratttcacttggagtggactggatagcagctgtctctggagcagatgctggcaggggaatgggctgggaggagcagagccaatcactggtgaatcccgagc

SEQ ID NO: 540289 - DNA, 201 bp, Homo sapiens
ttggtcaaccagagagatgccctcatccgcttccaggaggagcgcaggctcagcgagctggccttggggacaggggcccagggctagacgagggtgggccrtctgctttcgttcccacaaagaaagcacctcaccccagcacagtgccacccctgttcatctgggctgcctggcagagagccttgctgtttacaattaaaa

SEQ ID NO: 540290 - DNA, 201 bp, Homo sapiens
catgtgccctctgtgcccaagactaatgtttttcacttccaaatttggcaaatttcacttggagtggactggatagcagctgtctctggagcagatgctgkcaggggaatgggctgggaggagcagagccaatcactggtgaatcccgagctccctggggacaccagcctgctctcttcgcctccccttcctttttatttc

SEQ ID NO: 540291 - DNA, 201 bp, Homo sapiens
ctgccattgttcacctaccgccacctctaggcttcaaagttcgagaaatgcgaggcaaactggccattggcatcacagccaactttgtgaatggacgcacygtggaggagacacaggtgccggagatcagtggtgtagccaggatctacaaccagagcttcttccagagccttctcaaagccacaggtcagggaccctctt

SEQ ID NO: 540292 - DNA, 201 bp, Homo sapiens
tgtgtcatgcaagcctcatgatctcagatactgaccaagcaacatgatgctctagtctgtgtacctctgagacaattcaggaggaagccagaggagggggstccaaagccccttctcacttcagttcaatcagagctgcacagttggcttttgtataagatctccttcaaaaaaaatcgtgctgctcagtagtgctagaaa

SEQ ID NO: 540293 - DNA, 201 bp, Homo sapiens; identical to SEQ ID NO: 359512

SEQ ID NO: 540294 - DNA, 201 bp, Homo sapiens
ggcctgtcatatctctggcctctaccttttctaccagagcttaccccacttcagcacgggttattttctgcctttccaaacaacactcctatccaccaggrggcccaggccctatccctgactggcctgaccctcctataggccctgcagacctttgccaagacctcaggcaccatgaataactacccaacatggcgtcgg

SEQ ID NO: 540295 - DNA, 201 bp, Homo sapiens; identical to SEQ ID NO: 359513

SEQ ID NO: 540296 - DNA, 201 bp, Homo sapiens
ggtaggacagctgctacagctcgttgacaagaaaaacagcctggtggctgaggaggccgagctcatgatcacgtaaggggaaggggatggtgacagtggcycatgggccaggctccagccccttgggcaccttagacagctctgcttctacaatccctgacctccacagggtgcaggaattgaatctggaggagaaacagt

SEQ ID NO: 540297 - DNA, 201 bp, Homo sapiens
gtgtgtgtgtgtgtgtgtgtcagaaagaggaagaaggcgccctctgagggccagcctgggagaggtgtccttctgggttggagagtgactgttctgagagkacagtattggcaccccccatccacactgatgccctggctctccccgcaggccctgtcagccaggcctccccagggacctccagtgctgtattattcctta

SEQ ID NO: 540298 - DNA, 201 bp, Homo sapiens
aggatgtatgctcagcagctggggttgtgggtatcagatctgtccctgtgttgcatgcaaaggcagctctgtcctctccacatctaagaaatccccgcacrccctgattccaaggcctaaggaaggcaggctaagaattcctaccccagggcttggagatccctggacagggaggctgaactggaggctcccctggtgtcc

SEQ ID NO: 540299 - DNA, 201 bp, Homo sapiens
tactgaggtgccacctgacccagagcctggtgtacccctgacacccccatcccaacaccaggaggtgagagccaggctttgtgtgcaggcagaggcccggrgagggcagggcaggggcgtttcatgggagggaaagaactttggagctggccttggctccacctgaccctgtgtcctgggggtccacgcaggccggtgctg

SEQ ID NO: 540300 - DNA, 201 bp, Homo sapiens
gggcttgggatgcacctgttggattctccctgagctgcttcctattcctctgacactgcagcccttctggcccctgggcactggagtggcacggggcttcytggcagcctttgatgcagcctggatggtgaagcggtgggcagagggcgctgagtccctagaggtgttggctgagcggtaagacctgagttgaggaggatg

SEQ ID NO: 540301 - DNA, 201 bp, Homo sapiens
tctctgaggttctgctctgttgaccatacaggactggccagacaccaatcggctgctgggcagtgccaatgtggtgcccgaggctctgcagcgctttaccygggcagctgctgactttgccacccatggcaagctcgggaaactagagtttgcccaggatgcccatgggcagcctgatgtctctgcctttgacttcacgag

SEQ ID NO: 540302 - DNA, 201 bp, Homo sapiens
acagccaagaagcagtgcctgctgcggctgggggtgctgcgccaggtgaggcccagtcctggccaggagaggctgggtggtgagccccgggaggcagaggstaggcttggacatagtcgacacctgggtgtggggaccccgtcctctcctgcctttgtcctggcattaacttcacctctaaaagttctcttggccaggcat

SEQ ID NO: 540303 - DNA, 201 bp, Homo sapiens
aagtactgaggtgccacctgacccagagcctggtgtacccctgacacccccatcccaacaccaggaggtgagagccaggctttgtgtgcaggcagaggccyggagagggcagggcaggggcgtttcatgggagggaaagaactttggagctggccttggctccacctgaccctgtgtcctgggggtccacgcaggccggtg

SEQ ID NO: 540304 - DNA, 201 bp, Homo sapiens
ccggcacagggacgcttggagggagatggggcaggatgtatgctcagcagctggggttgtgggtatcagatctgtccctgtgttgcatgcaaaggcagctstgtcctctccacatctaagaaatccccgcacaccctgattccaaggcctaaggaaggcaggctaagaattcctaccccagggcttggagatccctggaca

SEQ ID NO: 540305 - DNA, 201 bp, Homo sapiens
atttctcatcccatgtcttgttccccaccccaggtcctgtaacccccccatccagcctccctgcctagtctcactccccttcccttcagccccttgtgttyatctgtacgcatcccctcccagctggccctgcccctctaccctccctgcctgagcacttacctccttagatggaggccgagaccccaagtactgaggtgc

SEQ ID NO: 540306 - DNA, 201 bp, Homo sapiens
acctctatgtcctggaacgcctctgtgtcaacggccatttcttccaccggagctgcttccgctgccatacctgtgaggccacactgtggccaggtggctaygagcagcacccaggagatggtgagtgggcctgggagacctccagagagactctgggcctggccctgcttgggggacacagagcttgaggtagagaggcac

SEQ ID NO: 540307 - DNA, 201 bp, Homo sapiens
tgagtgaatagacggaggaataggcagaagaaaaggcctggcagttcctgagaggtgggtgctgacaggtgccctcccattcatgcccctgccccttaccstcaccccctcagtgagagcctgtaccagcttctgtcacagacatccccagaaaacatgcatcgcaatgtggcccagtatgggctggacccagccacccgc

SEQ ID NO: 540308 - DNA, 201 bp, Homo sapiens
gcaagccactctgagcctcagattgagcatttgcaaaacaagaataacacttccttcctcacctgccttccatagctgctgtgaaggtgtaatctgatagrtaatatatcattgctttctaaaccagagagtcctttacacgttttgatgatttcactggtttgtcctgagagtataggggctcttacgacttctacacct

SEQ ID NO: 540309 - DNA, 201 bp, Homo sapiens
tccctgcccagtcgctgccctttggggtcaatcctacccccggcaggcccttacccctggactcaggggctgtgtggccagcctgccttgagacctgagcrgggctgccttaggtacgagacctgtatgatgtgctagccaaggagcctgtgcagaggaacaacgacaagacagatacagggatgccagccaccggtgagc

SEQ ID NO: 540310 - DNA, 201 bp, Homo sapiens
ctccctggggacaccagcctgctctcttcgcctccccttcctttttatttcttctgttctccagcctcttccccttctttttccacctctccagccactcrtctctgcccagctgctgccctccccaggaggcctccatggcttcacctacctccaccaacccagcgcatgcccactttgagagcttcctgcaggcccagc

SEQ ID NO: 540311 - DNA, 201 bp, Homo sapiens
acattcacagaggaagtgttttgaccacagtgcgtcagaaatagacccaggcctccgttccccagtcagtcgcaacatcctcccgccgtttgttgaggcastttggtggagggaagtggaacctacgcggacagaggctgtttctctgtcaggaggcaagcacgagtgctgaggaaaactttgcccttgccatgagacact

SEQ ID NO: 540312 - DNA, 201 bp, Homo sapiens
cgttttgatgatttcactggtttgtcctgagagtataggggctcttacgacttctacacctttgtgcctctcataccccctgccctagggagtggctggcrtgcccagctccaacccaacccccctgcccagctggccaactatgaatttgacgtccttatctcggctgcaggaggtaaattcgtccctgaaggtgagtga

SEQ ID NO: 540313 - DNA, 201 bp, Homo sapiens
gcttttgggctgagtgattgctaaggccttttccagtctgaccctgaccaggcacacactggtacatggggagcttgtgctgccctagggtccctgttccyaatgtcctctcccttccaggcatcaggcagctccagctgcttctgctgaaggtagcattgctgctgggggtggaaattcactggggtgtcactttcactg

SEQ ID NO: 540314 - DNA, 201 bp, Homo sapiens
ccccttctttttccacctctccagccactcatctctgcccagctgctgccctccccaggaggcctccatggcttcacctacctccaccaacccagcgcatrcccactttgagagcttcctgcaggcccagctgtgccaggacgtgctgagcagcttccaggagctgtgtggggccctggggctggaacccggtggggggct

SEQ ID NO: 540315 - DNA, 201 bp, Homo sapiens
tggcagctggaccaggagctacgaggctacatgaaccgggaaggtaggtgaaatgtggggagaagcagacacatcccagggatgtgtcatgcaagcctcaygatctcagatactgaccaagcaacatgatgctctagtctgtgtacctctgagacaattcaggaggaagccagaggagggggctccaaagccccttctcac

SEQ ID NO: 540316 - DNA, 201 bp, Homo sapiens
gtctgggcactgggctgcccacaccaaatgcctcctcccctctctaccctttccaggacatttctactgcctccagcacctgccccagacagaccacaaarcggaaggcagcgatagaggccctgagagtccggtaaagactgaaggcgtgtatgtatattggggcatgggaagaggaagagggtctcgtcaaaccagcgc

SEQ ID NO: 540317 - DNA, 201 bp, Homo sapiens
ccagacttgcagggcctccgtcaccaccatgctctttgttgcctgactggggcaggcgctggaggcagtagaacgtctcagttcttcttctcagctcttgyggccatggagaaggaggaaaaagagagtcccttctccagtgaagaggaagaagaagatgtgcctttggactcagatgtggaacaggtgagtgggccagcg

SEQ ID NO: 540318 - DNA, 201 bp, Homo sapiens
gggattctggaactacagatagtttgtagactaccatctcaatcttttgggtcattgtttttatgaatctgccttaactttgataatttatggatatggaytctaaaagtaaacatgaatattcaagtaatacaaaaaacatacttgctcatatttgtggataactaacctattcaaagtccaaagtatataaaaaataaa

SEQ ID NO: 540319 - DNA, 201 bp, Homo sapiens
tcaaaccatcaaatggtgctgatgtcacccaggagaagcagggacgctgtgcaatctacctatcccacccaacacacaggccttcccattatactacatgstagaaatggccactcccagttgcagcaagtccaggcttgccttttatcaacccttcccactgccaagagcagctgagccacacagggcatccaagatcac

SEQ ID NO: 540320 - DNA, 201 bp, Homo sapiens
tagcagcaccgggaccagaaccccgtccagggctcccacattaaccatgaacacagccaagcaccaatggggagcagaggaggggtgaggtcatttgaacytttcagtaatcaggtcttttgcagcacatctctgtttggttgctggggagggttcatttaccctgcttctcttagagcatcttcctgtggctaccaagct

SEQ ID NO: 540321 - DNA, 201 bp, Homo sapiens
agtaactctagaggggaaaaagtcatcacattcatatccttaggactttgggctgcagaagcctttggagataacctaatctccacttcatctggcaggtragaacactattgcacacagagtctaggtgactcctcatggccatacgcttggcgagtagcagcaccgggaccagaaccccgtccagggctcccacattaa

SEQ ID NO: 540322 - DNA, 201 bp, Homo sapiens
gcctccatttttaaaaccttgttctaaactgaatgttggtatcccccagaatgcacatgtaaaagccctatcccttcaatgtgactgtatttggagctagrtcctgtggggaagtgataaaggttaaatgaggtcagaagggtggggccctcatccggtggagctggtacccttacaagaagtagaagggaccccagagtg

SEQ ID NO: 540323 - DNA, 201 bp, Homo sapiens
gtttttagctttaaaaaggggttagaaagaaaggctcaagggtcaaattttaaactattgatcaaatcaatcctttataccaaatagtttgttataaatgytctatagcttcaaaagacaacttgaatctacaaactatcaagatttgcaaggggctaaatctagtgggtaaaagtttgattgtaacagagagtaacataa

SEQ ID NO: 540324 - DNA, 201 bp, Homo sapiens
gacacttgggactggataattctttgttgtggggaggtgtcctgtgcattgtagagcgtttggcagcacacctggcctccacgcactagatgacaacaccyctccagatgtgacagccaaaattgccccctgtggagaagcgctgtgttacgtagctacactactttaaggcagtacctaccaattcttacccagggtggt

SEQ ID NO: 540325 - DNA, 201 bp, Homo sapiens; identical to SEQ ID NO: 268697

SEQ ID NO: 540326 - DNA, 201 bp, Homo sapiens
gaaaaatatatgaacaatgtttcttagccagcttttgcccaatattaactaatcttagttaatataaaaatcatccagggttaggaaaaatcatataaaawtagcttttgtgtgcaaattcaagaagcatgcctgtccccagagattacaggatgttacatggccttacagtcggagggaggaagggatctgtccggcaga

SEQ ID NO: 540327 - DNA, 201 bp, Homo sapiens
ctgtttatggctgtgacaacaaagtgctcccctcaaacagtgatatcattttgtttgagacagagtttctacagactttttttttggtgtctggccttttyttctcacaccttgtgaaagccttctatgaccactgaggtaccttcctgtgaccacacgcagctgtatttcggtttcacactggttcctaaagcacctgat

SEQ ID NO: 540328 - DNA, 201 bp, Homo sapiens
tttgtctccattctaatcagtctaaaatctaactgcagcaatgcctcttaactggggctgctgtgtttgagatcttagccctccaatctgtcatgtatcayggatacgttctcctcccatcacttttcagctatttggtctttatcagtttaacattttgtgcacattcatctttctgccgctctgatctcatctcgtccc

SEQ ID NO: 540329 - DNA, 201 bp, Homo sapiens
aatgcaatgttggccatgtggaagtaccataattttgcagaagaataagcattggaatactattatctggatacagggatcaccaaaaagtaggtgcctaytgacagctctcctgtcttactcatcacccagaacatgcttgacacagagcagccacaccacaaaacttgtgaaatgagtgtctcttgatttcagccacca

SEQ ID NO: 540330 - DNA, 201 bp, Homo sapiens
cactgtaggtattataagtagtctagagatggtttaacgtgtgcaggaagatgtgtgtaggtgaaatgccaattctatgtcattttatatcaggcacttgkgcatctgtgttggtatctgaggcaggccctgaaaccaatccccccagataccaaggggtgactgtaacaggcagcagggcccactaaaatgaagtgcctt

SEQ ID NO: 540331 - DNA, 201 bp, Homo sapiens; identical to SEQ ID NO: 52983

SEQ ID NO: 540332 - DNA, 201 bp, Homo sapiens
atggttccctgaagcactgggtctcaacacttaatgggcaaaaggctcacctgggggcaaaggaggcattaaaaggcagatttcaagactctaatggcatkttacagaggcagtttctgggcaggggccagaaaccaaaaagggtattttaaagagtcccacagctgattctgcagcagtcccatccctggtcctgggctg

SEQ ID NO: 540333 - DNA, 201 bp, Homo sapiens
atttctcagcctccagaagcataagaaataaatttctgacaaagttgcccaatctgtggtattttgttatggcaatctgagctaatacaaggggaatgaayaggacttgaatgactggagactgtaattacaaataatgtaagaacctgaagaggaaaaaaaaggaattaattttaatcatgtggattgcccacaatattt

SEQ ID NO: 540334 - DNA, 201 bp, Homo sapiens
tcaagtaatacaaaaaacatacttgctcatatttgtggataactaacctattcaaagtccaaagtatataaaaaataaaataaaatcaacattatcaaggyaagtgaaagccagaaaataagtcaggcgagttatttaattgatacatatttataacacacttaaatttactagaaaccagactttgagtccaataagttc

SEQ ID NO: 540335 - DNA, 201 bp, Homo sapiens
acttatgtactcaaaagaaatctgtttctctgtaaattctgctcattggtcttcgttctactaattggaactgcatgaaacaaatctttattctttttctycttgataatcctgcacatatttaaagatgttgcattccccacataaagtcatctcctatggtttaaatcccatggtccgaccacttacagccgtgtgacc

SEQ ID NO: 540336 - DNA, 201 bp, Homo sapiens
acatgatccaccgcgcccggcctcctgctcatttttcaaaacccagctcaagataacttctctgtgaagtcctttccgaggctgatcagtcacttcctctscttcctcttccgtgttaccaaagcatcctgttcctgcctctacaacccccatcacagaagcattgtcacttgtcttcaggcatcttctctcccatggtga

SEQ ID NO: 540337 - DNA, 201 bp, Homo sapiens
tagagcaaatccactcagctagaagtactgattaactgtttcctatgtgcaaagccctctgcttagatctctgggaaacacagaagaggaaacacaaagargaataaaagaccgtcttcactctcaagcaagaagaaccactaatgtgagataaacatttactttaacaccaagcactgtgctaagtactcttgactgcat

SEQ ID NO: 540338 - DNA, 201 bp, Homo sapiens
tccatcatcagttagctgaagtgggtgactctttaagtggcaaatagcatttgattttgttaaataaatcccatttattttcaccatagagtcccccatcrtaactgtttctttggattccactgtcttctttgctgcaatataaccaagaaaatattttgttgaagtattcttattttaggaatcactacctttcaatgt

SEQ ID NO: 540339 - DNA, 201 bp, Homo sapiens
tagttatgtaagatatcaccactgggaggagctggatgatgggtacacaggacatctcggtactatttttgcaacatcttgtgaatttatacttagttcaraataaaagtttaaaaaggtgccagacacaaaagggtacatgctgtatattccgtttatataaagttttagaacaggcagagcttatctatggtgaaagag

SEQ ID NO: 540340 - DNA, 201 bp, Homo sapiens
cgtggacacgggtgatggcggagatgtggcggagtggagactgtgcttggcagagactggatgggggtgtgagggagaggaatcacccggggtgtcccccsccggtgcacataattgggtagatgttgaccacattgtctgaaataagggcacaggaagagggccaagttcagggacaggtcatgaattcagcttaagata

SEQ ID NO: 540341 - DNA, 201 bp, Homo sapiens
aggtggggtcgcgcaagataaagaattaacataatttccagcataagtacacatacttataattatctaaacacctaaatacaaatgcattaatctctacrtttaaaaactatgaaacataactaaagcaagagttaaaagaccccggccagcctggtacaaccttcattactaataataacttaagtcactgcttgatca

SEQ ID NO: 540342 - DNA, 201 bp, Homo sapiens
acaggatttcagagaagttctttactctcttctgttctttatgaatacatcattttattttattttatttggagaggcagggtctccatgtattacccagrctggtctccaactcctgacctcaagcaatcctcccaccttggcctccccaagtgccaaagtgctgggattgcaggtgtgcgctacctcgccaagcccatt

SEQ ID NO: 540343 - DNA, 201 bp, Homo sapiens
ttatatttatgcactctagagaaaatgcaaaaaaaaaaaaaaaaaagccatagaagaaatcatgaatgtatctaatgagttgaaagtccttctgtccccaytgtaaatagcattcagccttttcagttccaaattatagtaatctttaacatactcttgttgcttatagaaatatagtcacctaaatgcatactaatattt

SEQ ID NO: 540344 - DNA, 201 bp, Homo sapiens
aagttctttactctcttctgttctttatgaatacatcattttattttattttatttggagaggcagggtctccatgtattacccagactggtctccaactmctgacctcaagcaatcctcccaccttggcctccccaagtgccaaagtgctgggattgcaggtgtgcgctacctcgccaagcccattagtttacaattagt

SEQ ID NO: 540345 - DNA, 201 bp, Homo sapiens
caggtgtgcgctacctcgccaagcccattagtttacaattagtctattttggtatcttaatttaaatgggcaatatttttttcaaaaaaagtctggccagktgtggtggctcatacctgtaatgccaacacattgggagcctgaggtaggagaattgcttgagccccagagttcaagattagcttgggcaacacagtgaca

SEQ ID NO: 540346 - DNA, 201 bp, Homo sapiens
ggctcatacctgtaatgccaacacattgggagcctgaggtaggagaattgcttgagccccagagttcaagattagcttgggcaacacagtgacagctcagaaaaaaaaaaaaaaatcagaagattatctgggcatgggggcatgtgcctgtggtcccagttactcgagaggctgaggtcaggagaatcacttgagcacggg

SEQ ID NO: 540347 - DNA, 201 bp, Homo sapiens
agattaaatatttgaaagtcatcttggactctgtcttcttaatttcttgtgattacatttttatcccatcagaaataattgctctttgaagcttcaggttkgggtaattctgatcttattttattgaatggctttctggtgagtgcctactatgtgccttgccctgttatgggcgctttactagacgatctcatttcattt

SEQ ID NO: 540348 - DNA, 201 bp, Homo sapiens
cacagtgacagctcagaaaaaaaaaaaaaaatcagaagattatctgggcatgggggcatgtgcctgtggtcccagttactcgagaggctgaggtcaggagratcacttgagcacgggacattgaggctgcagtggggcacgatcatgccaccgccatccagcctaagagacacagagagaccctgtctcaaaaaataaaaa

SEQ ID NO: 540349 - DNA, 201 bp, Homo sapiens
ttactcgagaggctgaggtcaggagaatcacttgagcacgggacattgaggctgcagtggggcacgatcatgccaccgccatccagcctaagagacacagmgagaccctgtctcaaaaaataaaaaatccaaaattgaactgaacccttatttcaactaattccttagttttttatatgtaagtttgtatctaaaagtcag

SEQ ID NO: 540350 - DNA, 201 bp, Homo sapiens
tactatagaaattgccataccagtatttgcaaaaacagtgttcatacttcaacacaggccttggtaattcaacagctcatcctgtttccaaaatggcctgtttttgtttgtttgtttgttttagctatctttgtaaaagaattgaaatgcaagtatactctcacccacatgcccatttcactcgcagcagtcccactgccc

SEQ ID NO: 540351 - DNA, 201 bp, Homo sapiens
gaggagctcacgtgagaaacctgggatgcattgcagtggcttggcttcctgagtgagctgtgtttatttgctgttatccatgccacagtccccctgcacgrggtgcagtggagtaagggtgttctaggtaacggagcggctggaaaacacaaggctagttgtttgttttcggatgggaattcctgcctttgctacagtatg

SEQ ID NO: 540352 - DNA, 201 bp, Homo sapiens
aacctaatcaacagaaaataagcaataaccataataaataaggtatacgacatgttataagataataagtgctatggaaaaaaagcaaagtataaaagtasggaaggctcaaggggattgggaatagggtgggtacagcagggtagggaggacaaaccctttatggagtgaggcatccagccaccagggccagtattttca

SEQ ID NO: 540353 - DNA, 201 bp, Homo sapiens
tgcaacctccttctctcaggctcaagtgattctcctgcctcatcctcccaagtagctgggattacaggcatgggccaccaaacccagctaatttttgtggktttttttttaattgttgttgtagagacagagttttaccatgttgcccaggctggtctcgaactcctggcttcagacgatccatctgccgcaaagtgctgg

SEQ ID NO: 540354 - DNA, 201 bp, Homo sapiens
atataaacgttaatgaaagacaacaaatcaggcggacatggtggttcatgcctgtagtcccagcactctaggaggccaaggtggggggatcacttgaggcyaggggtttgagaccagcctggccaacatgatgaaacccaatctctactaaaattacaaaaattagccaggtgtggtggtgcacacctgtactgagccaag

SEQ ID NO: 540355 - DNA, 201 bp, Homo sapiens
tagaaattgccataccagtatttgcaaaaacagtgttcatacttcaacacaggccttggtaattcaacagctcatcctgtttccaaaatggcctgtttttktttgtttgtttgttttagctatctttgtaaaagaattgaaatgcaagtatactctcacccacatgcccatttcactcgcagcagtcccactgcccagacc

SEQ ID NO: 540356 - DNA, 201 bp, Homo sapiens
atgcagtttacttcctccaataatcagagcaaagttctactggtagacactgctaccttggttctgattgcacagtctgaagagttaggcttccaataggyggggtcgcgcaagataaagaattaacataatttccagcataagtacacatacttataattatctaaacacctaaatacaaatgcattaatctctacgttt

SEQ ID NO: 540357 - DNA, 201 bp, Homo sapiens
tagcacactgaaaaacacaagttttaattcctatcttttcccccatctcttaacttgcaatcctgtgggacttgcaatcctgaaggcagcccataggaagragaaaaaagagaagaaaatgacactgataatccacaaagaggactaatacaaatgtaagtttccttgcttattagcaattgttaggtgatgtttaggaca

SEQ ID NO: 540358 - DNA, 201 bp, Homo sapiens
atcattaatatgttaaaaacttgaccacataccaggccataaataaatctcagtaaattttcagagaactggtatctcaaagaccacattctctggtcaargtgcaattaaattagaaatcatttaaaaaataaatttaaaaaaaccttttttttggaaatgtaagaacacctaacttataggtcaaagaaacatgaaaat

SEQ ID NO: 540359 - DNA, 201 bp, Homo sapiens
ataaaatacacttcgtaaaatatatttatcaaaatctacattcaagtgcttgttaagagttatatagtataagagaaaagcttacttttagctaagataartctctgtaatagtaatttcagcagaaggatgggattgttaataaataaatgagaaagtattcttttaattaatgtcattccttgcctcttactaattatt

SEQ ID NO: 540360 - DNA, 201 bp, Homo sapiens
cttttaaatataacaatggggtcaaagaattagagaacttaagggctagaagaatcttcagggactatccagtgcaggggaactgcaaaccttaatttgcrtcagaagtccctgtggttcttgttaaaatgcagatggctaggtaggtcctaccctacccatctgactcagtagactggaatgaaacctggaagaaataac

SEQ ID NO: 540361 - DNA, 201 bp, Homo sapiens
ccaccctgctagcctgagttaagtgcccctcgtccagactccaaaaggccccgggctggtctctgccactccactctcccactgtgttagaattccctgtrcatgtggtgttggcccgagactctctgccccaaccgtccacgtgaggcacagctgaaggtcaacacttacgtaatcactagactccatttttaaatatag

SEQ ID NO: 540362 - DNA, 201 bp, Homo sapiens
aagattaaacacacacacgtagctcacaactcaccaaagaactaaaatgacttaacaaccaatgagtttagaatcacaatagaatcatatagacaatgggktcatttgtttgaattgttcatttttaacttgggccactagatttaccctttctggtaggcgaagtaaaaagaaggaaaaggattccttgccagtcacaca

SEQ ID NO: 540363 - DNA, 201 bp, Homo sapiens
ctggctaacacggtgaaacctcgtctctactaaaagtacaaaaacaaaattagccaggtgtggtggcacgcctgtagtcccagctactcgggaggctgagrgggcagaatggcgtgaacccaggaggtggagcttgcagtgagccaagatatcgccactgcactccagcctgggtgacagagtgagactcgtctcaaaaaa

SEQ ID NO: 540364 - DNA, 201 bp, Homo sapiens
atgtgtgaatggcatcgctgccatcatctcttcctagtgaagtgcccaggggcagccactccttcctccacttccccatttcctcatctgtgaaaagcagrtgacaagcactgctcacctctcggggggttgtgtgtagcaaatggaaacatgtagcactgtttttattacttatctaatactgtaaagcatcatgtaaac

SEQ ID NO: 540365 - DNA, 201 bp, Homo sapiens
atctttcctttgaaagtaaaatattcttcagatagacaccacaccctgcaaatacatggtacaaaaaccatcattatttttgtccaggactttataaaaaygaatgcttaagcccatccatatactaaatcattcctctatattaagcttttaaaaatccaccaagcagttagaaggttaggatctgagaacagctctcaa

SEQ ID NO: 540366 - DNA, 201 bp, Homo sapiens
tatgttttggggtggtcttaatatggttaacaaaacaaacacaaagcttcagattaaaatactgttagtatatacataaattatttggtccataaactcgyaaaacttactataggatgttgaaaatttaccacatttaaaatgaatactcattgtattcatggacaaaatatctcactaagttgatgtcactttaataac

SEQ ID NO: 540367 - DNA, 201 bp, Homo sapiens
ttctgggcaggggccagaaaccaaaaagggtattttaaagagtcccacagctgattctgcagcagtcccatccctggtcctgggctgagaagccctgctcrgtgtggtgagtggatctcaggaaggggaaagagcttcagcagacatgggcatgctacagagcaaatgctgaacgttttgaggttggaacagaaactgaat

SEQ ID NO: 540368 - DNA, 201 bp, Homo sapiens
gcacaatgtacaggtttgatacataggtatacatgtgccatgttggtttgctgcacccatcaactcgtcatttacattacgtacttctccttttaaaaggygggtggtggtacttgcctttatgaaaacagataatttttattaagcattttattgaatatcagctatgccaaatcaacatcaacaaccagaatcccatag

SEQ ID NO: 540369 - DNA, 201 bp, Homo sapiens
taaagataagttcaatgctagtcagtaacaaacagagattatgttttggggtggtcttaatatggttaacaaaacaaacacaaagcttcagattaaaataytgttagtatatacataaattatttggtccataaactcgcaaaacttactataggatgttgaaaatttaccacatttaaaatgaatactcattgtattcat

SEQ ID NO: 540370 - DNA, 201 bp, Homo sapiens
ataaccatttggagaaccactaaagaaatgtttatgaagacttatgggaatttctggttaatgattttaggaagtggttgggacacacaactacttccttrtagcctaaactctttccctgctcttctaaaatattttggttttgaggaaaatataaattatgtatttttcttactggaaaaaaatcaaagtaatgactta

SEQ ID NO: 540371 - DNA, 201 bp, Homo sapiens; identical to SEQ ID NO: 268692

SEQ ID NO: 540372 - DNA, 201 bp, Homo sapiens
ggggttaaatctgacaaatttaataattctcagcagaagtctttggctgggtaaagataagttcaatgctagtcagtaacaaacagagattatgttttggrgtggtcttaatatggttaacaaaacaaacacaaagcttcagattaaaatactgttagtatatacataaattatttggtccataaactcgcaaaacttact

SEQ ID NO: 540373 - DNA, 201 bp, Homo sapiens
ctcatgggctcataaaatgaacacacttaaaaagtatttaactcattaatgagggggccgataccacggtaaactttgttccaagcacaactgaagaaccrggaatttacaagcacttaaaatttctgggttatatacaaacctgacaaatgcctacaaagtaataaaaccataacttttgaggtgatcctgtctaccaga

SEQ ID NO: 540374 - DNA, 201 bp, Homo sapiens
cacaaagagagaatagtttctaaaagatctctctaaagttaagaaaaaagtaatgaaaaacattaggatgctgaaatcattattttttcaactatatattkcaatttcagactttagctactgacaaatctattccccattatgaaagtaaagaaatcagtactcacacttcctcccaagtactggttttggttatttata

SEQ ID NO: 540375 - DNA, 201 bp, Homo sapiens
gtagctcatgcctgtaaacccagcactttgggaggctgaggtgggtggatcacttgaggtcaggagttcgagaccagcctggccaacatggtgaaaacccrtctctactagagacctactaaaacaattttagttttgtactaaaaatacaaaatgtagctgggtatggtggcacacacctgtaatcccagctactctgga

SEQ ID NO: 540376 - DNA, 201 bp, Homo sapiens
caaagtatttttagcctaccgttatcttttagcattcgtttctctcattcattcactccctgaatatttattaagcacccacgactatgtgccaggtgctrtttactgcacgggtgaagccatggtgaacaagtcccagccatcatggagcttctagaagggaaacccaaccatacctataggtcaaggagctatacctgt

SEQ ID NO: 540377 - DNA, 201 bp, Homo sapiens
cccagcactttgggaggctgaggtgggaggatcgcttgagcccaggaggttgacaccagcctgggtaacatagcaagacctcatcgctacaaaaaaaaaawtttttttttaattatctgggcatggtggtgcgtgtctgtagtcccagctacttgagagacagaggcaggaggatcacttgagcccaggagtttagagctg

SEQ ID NO: 540378 - DNA, 201 bp, Homo sapiens
ttagttttgtactaaaaatacaaaatgtagctgggtatggtggcacacacctgtaatcccagctactctggaggcagagacaggagaatcacttgaacccrggaggcagaggttgcagtgggccgagattgcgccactgcattccagcctgggcgacagagtgagactctatctcaaaaaaatatatattaaaatttaaaa

SEQ ID NO: 540379 - DNA, 201 bp, Homo sapiens
agtgtttccctgacctatttgagcactgaaccctttttccaaagagaagctattaacattttgccaaaagtgttccctggagttccctggaactcagtttrgcaaacacttctgtaggcacaacagggcctctgaagggttttcagcaagagggtggtgcaatctgatctttatttgcttcccgacctcttgtgctttatg

SEQ ID NO: 540380 - DNA, 201 bp, Homo sapiens
agactgcgtcgtctggttcacaagacctacctggcagctccaggccttatctctctggcctcatttgctcctcctactcccagacccccaaggccaaccacaccagcctcctggcctcttggaatatgccagcatgcccctgcctgagaacccgtgcactgctgaactttcttctggaacatactgtcctcccagttagtc

SEQ ID NO: 540381 - DNA, 201 bp, Homo sapiens
atttttatagcatttttattaaatttaacacaatgttgcatattcatatcataactatgtgattttgaaatagcaaactgaagatgaatcaagagagagctttttttttttttcctaaagaaggcagtctagtataaccagttcatatcgactttctaattttgcttaaaacagaatcagcctagcaacagctacggccaa

SEQ ID NO: 540382 - DNA, 201 bp, Homo sapiens
ttttaaattgatatttgttaaactacaaattattatagatggtttttgccaacttgaaaaattaatcactcaggacctgaaagcttatctacttaaagtayacctgaaccataacacaatagtcctacagaaattctaactttacaaaattttccttccaagtagagcaaatccactcagctagaagtactgattaactgt

SEQ ID NO: 540383 - DNA, 201 bp, Homo sapiens
agtgagctgtgtttatttgctgttatccatgccacagtccccctgcacgaggtgcagtggagtaagggtgttctaggtaacggagcggctggaaaacacarggctagttgtttgttttcggatgggaattcctgcctttgctacagtatgacttcaggcaagccacttaactgtcctaaaacctactttccgtatctgtca

SEQ ID NO: 540384 - DNA, 201 bp, Homo sapiens
cacatggcaaaaccctgtctctaccaaaaaaaaaaaaaaaaattagccaggtgtggtggcacatgcctgtaatccctacttgggaggctaaagctggggtwaaatctgacaaatttaataattctcagcagaagtctttggctgggtaaagataagttcaatgctagtcagtaacaaacagagattatgttttggggtggt

SEQ ID NO: 540385 - DNA, 201 bp, Homo sapiens
tagggaatagtttattaaattgtgggacatcaatactatcatattaagcagtcacaaaaaagcataactgtgaacattatgtctaaaaagggaaacatttrtaacctactgttagatggaaataatatgtgccctcattacaaaggtgtaaaaatgtatttgtaggaataaggtcatctgaacaaaaaattatttctgttt

SEQ ID NO: 540386 - DNA, 201 bp, Homo sapiens
cccttcgcatccacgggccacgtatccacaggttcaaccaaccacagacagaatatttgaaacaacaacaataaaaagaatacaaataaaaatcacagcaygacaaccatttacatagcgttcacactgtaggtattataagtagtctagagatggtttaacgtgtgcaggaagatgtgtgtaggtgaaatgccaattcta

SEQ ID NO: 540387 - DNA, 201 bp, Homo sapiens
gaaaacaaaacaaaacaaaaccttgtatcagagttttcattaaaacaataagaagaaaaaacaaaaatgaaaacaaagaaaagaaaaaagacaactacaayttccaggcctgctataatgtcaatttacagtcagtgcaaatttgtaccgcttctccattgttaaccgtaaaattatgactttaagacataaaaagataat

SEQ ID NO: 540388 - DNA, 201 bp, Homo sapiens
aagatgtgtgtaggtgaaatgccaattctatgtcattttatatcaggcacttgggcatctgtgttggtatctgaggcaggccctgaaaccaatccccccarataccaaggggtgactgtaacaggcagcagggcccactaaaatgaagtgccttccaggtacactgcccctgctgagaagccagccatgcccacacctcct

SEQ ID NO: 540389 - DNA, 201 bp, Homo sapiens
aatctcagtaaattttcagagaactggtatctcaaagaccacattctctggtcaaagtgcaattaaattagaaatcatttaaaaaataaatttaaaaaaamcttttttttggaaatgtaagaacacctaacttataggtcaaagaaacatgaaaattacaaaagaaatacttaaatacgagtaataaaaaatattacaaat

SEQ ID NO: 540390 - DNA, 201 bp, Homo sapiens
catcttggagatgataaaatatcatttcggaacggctgataatctgtgtttttaaaagttccacgggtgagtctgctctgcagccaggattgggagcctcygctctggttagtgaaggagtgtaaaggaaaggtgtctgttaagctttctcaggttgcagagaagttgagctcaaaatttaaaaactcagcacctatggct

SEQ ID NO: 540391 - DNA, 201 bp, Homo sapiens
agagaaaccactgcctgcaccatctgctactgatctccagtcaagttatttgagcaaccattttgaatgtatttgcctacggttatttctttttctttctygcctttccttccttccttcttcttcttcttttttttttttaacttagttgcagtccaaaaacgttgagtttcttttaacattttctatgtactcagcctt

SEQ ID NO: 540392 - DNA, 201 bp, Homo sapiens
ggctgggcagtgatgggtacatctcctctatttgggaaaaaggattattaaaaacactcacttactgacccaaatcattgtttttagaattaacccaggawgaaaaaaattatcctaaaattataaaaattttttaaatgtaaaaaatgatcctggccaggcaaggtggttcacaccagtaatcccagcactttgggaggc

SEQ ID NO: 540393 - DNA, 201 bp, Homo sapiens
tgacttcatttgtttttgaacatgttcacagaaatgatagtgaaaacttactaaaaatatcagggcaatggggaacacataaataactacaggtatttttwaaaaaaaaaacaaaaacggttttttgtttgtttgtttgtgttttacccttttctaattcacgcaaaatcggtacaatccttgtattccaaaagacttcgt

SEQ ID NO: 540394 - DNA, 201 bp, Homo sapiens
ctgcgtcctcttcttgcaggtcagcttttgggactgcaaaagaaatccagagcaggagaaaaagctatgaaaaaggagttgtcatgaagcatggtcaaaascctttactattcatcactacaattaataaactagagaattaaattaccctttgctctccaagcctgactatttctcattagaactacaggtcttctaatc

SEQ ID NO: 540395 - DNA, 201 bp, Homo sapiens
tcgtctacttctatttctgcgtcctcttcttgcaggtcagcttttgggactgcaaaagaaatccagagcaggagaaaaagctatgaaaaaggagttgtcaygaagcatggtcaaaagcctttactattcatcactacaattaataaactagagaattaaattaccctttgctctccaagcctgactatttctcattagaac

SEQ ID NO: 540396 - DNA, 201 bp, Homo sapiens
taggtcccagtgtctgttgtccccttctttgtgtccatgagttctcatcgtttagctcccacttataagtgagaacttgtggtatttggttttctgttctygcgttagtttgctaaggataatggcctcctgctctatccatgtttctgcaaaggacatgatctcactcttttttatggccgcatggtattccatgatgta

SEQ ID NO: 540397 - DNA, 201 bp, Homo sapiens
gatggttctgaataagcatgttactgtacatggtttacaaggtgctctctattcctctttggaaattaaaataattttaataggtattttagtctgttctygcattgctacagataaatacttgagattagataatttatcaagaaaagagattgaattggctcatggttccgtaggctgtacaggaagcatgctgctggc

SEQ ID NO: 540398 - DNA, 201 bp, Homo sapiens
acatcagttcagagaagctgcaaggaggcttcctgctctacactctagtgagatggatccggaaaaatttaaaaggtaacttacatgtaggtgtacactayccacgtaattcagaaaacacaaacttacatgaaatttatatgaaatctggttggataccagtgagtcccctgagaccacatcagaagcaaatgtaaaact

SEQ ID NO: 540399 - DNA, 201 bp, Homo sapiens
atccaaacagaaagggaggaagtcaaactatctctgtttgcagaagggtacttatgaaaacctacaacaaatattattttcagctggtgtaaccatgaaamtatttcctttagagtcagaagaaagacaacaggcccaacactcacagatgattctacatctagaaaaccccacagtctcagcccaaaacctccttcagct

SEQ ID NO: 540400 - DNA, 201 bp, Homo sapiens
ctatcaaactaccaatgacattcttcacagaactagaaaaaaaaaaactattttaaaatttaacacggaactgaaaatgagctcaaatagccaaggaatcytatgcaaaaagaacaaagctagaggcatcacattgcctaattcaaactttactacagggctatggtaaccaaaacagcatggtactggtacaaaaacagg

SEQ ID NO: 540401 - DNA, 201 bp, Homo sapiens
cagggggatcacgaggtcaggatatcgagaccatcctggctaacacagtgaaaccccgtctctactaaaaatacaaaaaattagctgggcgtggtgtgggygcctgtagtcccagctacttgtgaggctgaggcaggagaatggcatgaacctgggaggcgaagcttgcagtgagccgagatcaccccactgcactccagc

SEQ ID NO: 540402 - DNA, 201 bp, Homo sapiens
gggggtatcagctatgttaaagtcttaaaaatgttgcactgatgagggagaaattgactggtcttgcttgggaggcctcacaggggagcagacaagagagstacaacttgaaatatggaattggctttgaagaggagaagtcacagagaaatttcatcagagccccttaggctcttctcattaagtctgttcatattcaat

SEQ ID NO: 540403 - DNA, 201 bp, Homo sapiens
aacatttcaatctttattataagtaaaagtattgagtcaaagtataattttttaaaagttaaaaacatgactctcatgggctcataaaatgaacacacttmaaaagtatttaactcattaatgagggggccgataccacggtaaactttgttccaagcacaactgaagaaccaggaatttacaagcacttaaaatttctgg

SEQ ID NO: 540404 - DNA, 201 bp, Homo sapiens
aggctgaggcaggagaatggcatgaacctgggaggcgaagcttgcagtgagccgagatcaccccactgcactccagcctgggcgacagagtaagactccawctcaaaaaaaaaaaaaaaaaaaaaagattcagggcaagcatttgacaaaacttaatacccactaatgagaaaaaaaatcattaatcttctaaagggtagt

SEQ ID NO: 540405 - DNA, 201 bp, Homo sapiens
ttgcaaacccagaacccctgttaagggacttaactcattcttcctaaggctttatccatcacacagcagtgggttccccaatacccaccactcccagagtyggctcccccaatcgacagatactgcaaaacctgacccaggcagcagctgcttctccacggcagtgaaagagtcccagctggtggaaaggagggagcacag

SEQ ID NO: 540406 - DNA, 201 bp, Homo sapiens
aatttttgtggttttttttttaattgttgttgtagagacagagttttaccatgttgcccaggctggtctcgaactcctggcttcagacgatccatctgccrcaaagtgctgggattacaggccaatctgagccacctgtgcccagctaagcacctgtatttttaaagctccccaggcaaatctgatgataagccaagttgg

SEQ ID NO: 540407 - DNA, 201 bp, Homo sapiens
cacattactctctgcccatggccagccacagtgaacacattcctccccgactcccacacccttcctcccgtaccttaaaataactcatgtgcataatgttractgtggggaagaaacaatatcaagctgtcacagaaagaataaactatgttcagcagactccacttaggagggaactgcttccactaagtaaaggaacac

SEQ ID NO: 540408 - DNA, 201 bp, Homo sapiens
acagcacagtaacagcagcaactaacacacagtacttattagtactcatgatgtgccaggcattgtcctaagcatttatatatacaaattaactaattcaytaaaaatgataacttccatttctttaacctgaataaagctattcacagtatcttttacaatctaaaccgccatctccctcgcacatttgataacagtgat

SEQ ID NO: 540409 - DNA, 201 bp, Homo sapiens
agctgaggactataaacagaatttttgtgtgaactttgatacatgtttcctgctgaaagactatatgaattctagttctgaaaatcctaataattaataayaataacagcacagtaacagcagcaactaacacacagtacttattagtactcatgatgtgccaggcattgtcctaagcatttatatatacaaattaactaa

SEQ ID NO: 540410 - DNA, 201 bp, Homo sapiens
ttttgccgtcaggttgccaagaataaaaacaacacggacgactaaatcctgcaataaacgaaagacagagtcaaaagtgcaaagggggctggaacacatcrtggggaagaagatagtatttaatttattcacaattgcattaatagtaaaatggaacacgtctggcttcggctcacttgtacagtatttgattctcaagat

SEQ ID NO: 540411 - DNA, 201 bp, Homo sapiens
aatttctgggttatatacaaacctgacaaatgcctacaaagtaataaaaccataacttttgaggtgatcctgtctaccagattgaaacctacaaattaacrtgtaactttattgtgtctggtatctaaccaaatagtaaacagcaagttcaaacaccaatatgttggcctagggaattaatccctgattgggtcattaaac

SEQ ID NO: 540412 - DNA, 201 bp, Homo sapiens
tctgtctgtctgtctgtctgtctagctagctagctagtgatcaatggctcactgcaacctgggctcaagcaatcctcccgccttagccttctaagtagctrggactacagacatgtgccaccacgcacggctaattttttgtttatagagatgaggtctatgttgccagtcttctctctctctctgagataggatttcacc

SEQ ID NO: 540413 - DNA, 201 bp, Homo sapiens
aagtggagcccaggtgtattaagttatctgcctggggtcatataactccccagcctctgcatttgacctcaaagctatgctgacttgcagcaaactagccractaaagggtaacactggggggaaatgtaactcatattagaaactgcaaattatgattatatttcacacaggcagtatctcaagatctaaaacactgact

SEQ ID NO: 540414 - DNA, 201 bp, Homo sapiens
ctcaatattacaatattacaaaagcccatgagttcacttttgtgacaactatattctattgcatgaatacattttgtatcatttctagactgtggtttatrttgttatatattttctcaaacactttaaaggcccaaaggacggtcttaataaagttaatatagtttcatttaagtgagcaattatctttttttttttttt

SEQ ID NO: 540415 - DNA, 201 bp, Homo sapiens
gaagggacgaccataaacgtgactttgttgatcagatcagtagttagcagtagccttaagaaaaggggacaaagggccaagggctgggcacgttttcatcsaggagcgcatgtccaggtgcgacgccaggggccccgtgaggggcgtcgggtgtggccaggaaactggggaggattgggggcagagtacaacttttggatt

SEQ ID NO: 540416 - DNA, 201 bp, Homo sapiens
actatgccatgttgcagcttagcccttggcctttcctaccgccctgaagattagcttctccaaataccattttttacttcattaacatgttccccccaccttttttttttttttttttgagatggagtttcactcttgttgcccaggctggagtgcaatggcgtgatctcggctcaccccaacttccgcctcccaggtcca

SEQ ID NO: 540417 - DNA, 201 bp, Homo sapiens
agaggagctcacgtgagaaacctgggatgcattgcagtggcttggcttcctgagtgagctgtgtttatttgctgttatccatgccacagtccccctgcacraggtgcagtggagtaagggtgttctaggtaacggagcggctggaaaacacaaggctagttgtttgttttcggatgggaattcctgcctttgctacagtat

SEQ ID NO: 540418 - DNA, 201 bp, Homo sapiens
ctatgccatgttgcagcttagcccttggcctttcctaccgccctgaagattagcttctccaaataccattttttacttcattaacatgttccccccaccttttttttttttttttttgagatggagtttcactcttgttgcccaggctggagtgcaatggcgtgatctcggctcaccccaacttccgcctcccaggtccaa

SEQ ID NO: 540419 - DNA, 201 bp, Homo sapiens
tatgccatgttgcagcttagcccttggcctttcctaccgccctgaagattagcttctccaaataccattttttacttcattaacatgttccccccaccttttttttttttttttttgagatggagtttcactcttgttgcccaggctggagtgcaatggcgtgatctcggctcaccccaacttccgcctcccaggtccaag

SEQ ID NO: 540420 - DNA, 201 bp, Homo sapiens
atgccatgttgcagcttagcccttggcctttcctaccgccctgaagattagcttctccaaataccattttttacttcattaacatgttccccccaccttttttttttttttttttgagatggagtttcactcttgttgcccaggctggagtgcaatggcgtgatctcggctcaccccaacttccgcctcccaggtccaagg

SEQ ID NO: 540421 - DNA, 201 bp, Homo sapiens
tgccatgttgcagcttagcccttggcctttcctaccgccctgaagattagcttctccaaataccattttttacttcattaacatgttccccccaccttttttttttttttttttgagatggagtttcactcttgttgcccaggctggagtgcaatggcgtgatctcggctcaccccaacttccgcctcccaggtccaaggg

SEQ ID NO: 540422 - DNA, 201 bp, Homo sapiens
ggcaacaaaagccaaaattgacaaatgggatctaattaaactaaagagcttctgcacagcaaaagaaactatcatcagagtgaacaagcaacctacagaayaggagaaaatgtttgcagtctatccatctgacaaagggctaatatccagaatctacaaagaactaaacaaatttacaagaaaaaaaaatcccatcaaaaa

SEQ ID NO: 540423 - DNA, 201 bp, Homo sapiens
taagcatgttactgtacatggtttacaaggtgctctctattcctctttggaaattaaaataattttaataggtattttagtctgttctcgcattgctacarataaatacttgagattagataatttatcaagaaaagagattgaattggctcatggttccgtaggctgtacaggaagcatgctgctggcatctgctcagct

SEQ ID NO: 540424 - DNA, 201 bp, Homo sapiens
ttgtcgttcacactttgcacttgaggagtgcgtgcctcagataggtcacagaaccatctcagcatcacctgggcatgtattaggaatgcagaatctcaggccccccccagcactaccgactcagaatctgcattttacaagatccccaggggatgcatgtgcacagtgaagtctgggaaacactgttgtggaagcttcaga

SEQ ID NO: 540425 - DNA, 201 bp, Homo sapiens
tctctctctctcttttcttttttttcagagacagggtcttgctctttcacccaggctggagtgcagtgatgccgccattacagctcactgcagccttgacytcgtgggctcaatcaactctcttgcctcagccgccagagcagctgggactataggcatgtgccaccatgcctggctaattttttcaacattttgtagaga

SEQ ID NO: 540426 - DNA, 201 bp, Homo sapiens; identical to SEQ ID NO: 52980

SEQ ID NO: 540427 - DNA, 201 bp, Homo sapiens; identical to SEQ ID NO: 52981

SEQ ID NO: 540428 - DNA, 201 bp, Homo sapiens; identical to SEQ ID NO: 52982

SEQ ID NO: 540429 - DNA, 201 bp, Homo sapiens; identical to SEQ ID NO: 52984

SEQ ID NO: 540430 - DNA, 201 bp, Homo sapiens
gcagaaaagcagatatcctgatgctgagcatccagcagcgccatcatgaacctgtggactacgagggaagagagcaaatgcagaccagtaaaagttcaggrttcccagctgtctcttgttttacagatggtatggggaaacggggagtggcttgcaaacccagaacccctgttaagggacttaactcattcttcctaaggc

SEQ ID NO: 540431 - DNA, 201 bp, Homo sapiens
aatacccattccagtcactgcacaccaacagttccttttccctggtccccaaggcatcaaagatgggacatcccaatccatagtcatcttcacgctccccwcatctaagctctggcaagggacattgccagcagaaaggaccatagtttccttaggagcttttattttcttgtttcaatctcaattttttctccttctcag

SEQ ID NO: 540432 - DNA, 201 bp, Homo sapiens
tagcacccatagcctaaaggttcctcagtctctgaagtgtggtttatccctccaaactcatctcctttgcctcggcaccaccctggccatctttcagactytgcaccacatgaggtcctcaacccttcatgacgccatgcctttgaataggcggcttcctccgcccagagtgccctcgattacactttgccaccccttctc

SEQ ID NO: 540433 - DNA, 201 bp, Homo sapiens
agtctatcagctcccaggtaggctagtgccctggcctcagtttcttggtctattgcctccctactctatttggcactggtctctaaaagcattttgcaatyatctggaatatccacaactgaaatccctcgagctttgtctcaacttaactgccaactgcaaaattgttgacttcccactgatgatgtaaaagaataaacg

SEQ ID NO: 540434 - DNA, 201 bp, Homo sapiens
atcatgtggtcacagtaaaggcaagttccaagtcaacccatttaactgaattttgctcctacttttgaattcattatatacaagtgaaaattaaaaaaaaraaaacaagaactctcagttgaacagagataaatctgtgaaaattatcaatgagttctgtgctctacagcagggtctttatttcccaccctcaagaaaagc

SEQ ID NO: 540435 - DNA, 201 bp, Homo sapiens
caatgtttgtaattacttttaggaattttgaacaaaagtcaaatttaaaaagacaactaccttgaaaatcaatcaatgtaatctatcacaccacaagctaaagaagatacagaaaatacaagctaaagagaatacatatcagcagatacagaaaaagcatttggcaaaatccaacactcattcataataaaaattcttagc

SEQ ID NO: 540436 - DNA, 201 bp, Homo sapiens
aatgtttgtaattacttttaggaattttgaacaaaagtcaaatttaaaaagacaactaccttgaaaatcaatcaatgtaatctatcacaccacaagctaaagaagatacagaaaatacaagctaaagagaatacatatcagcagatacagaaaaagcatttggcaaaatccaacactcattcataataaaaattcttagca

SEQ ID NO: 540437 - DNA, 201 bp, Homo sapiens
atgtttgtaattacttttaggaattttgaacaaaagtcaaatttaaaaagacaactaccttgaaaatcaatcaatgtaatctatcacaccacaagctaaagaagatacagaaaatacaagctaaagagaatacatatcagcagatacagaaaaagcatttggcaaaatccaacactcattcataataaaaattcttagcaa

SEQ ID NO: 540438 - DNA, 201 bp, Homo sapiens
ctcactaccacgagaacagcaccagggggatggtgctaacccatccgtgagaactccgcccatgatccaatcacctcccaccaggccccacctccaatccrggggattacaattcaacaggagatttaggctgggacagaaatccaaaccacatcaataggaacataaaattgtaatatacatcaacagagaaaaatgtgg

SEQ ID NO: 540439 - DNA, 201 bp, Homo sapiens
accttccttcctacaccaggaaacttcctagaacatcaacatttcatttctgactcatataactccttcaactcctataggtaacttactgcttcccaggrcagcccattatacatttaatggaagtttcttatagaaacctatatactcaaaacataaagacatttaacatgggcttacacaaacacattagtgtaaaga

SEQ ID NO: 540440 - DNA, 201 bp, Homo sapiens
tgaacccgggaggcagagcttgcagtgagctgagatcgtgccactgcactccagcctgggcaacagagcaagacaccatctcaaaaaaaaaaaaaaaagaraaacaaaaagaaagaaaacttatgtccacacagaaacttacacatggatgtttatagcagctttatttgtagttgccaaaacatggaagcaaatgagatg

SEQ ID NO: 540441 - DNA, 201 bp, Homo sapiens
actcatataactccttcaactcctataggtaacttactgcttcccagggcagcccattatacatttaatggaagtttcttatagaaacctatatactcaaracataaagacatttaacatgggcttacacaaacacattagtgtaaagactcattgaagaattaaatgaatgaagaactgacctgcttcttctggtatttg

SEQ ID NO: 540442 - DNA, 201 bp, Homo sapiens
atgcagatccagctgatggaacgtctggaataatgacagcagagtttggatgctccctttctctttggaaaattgttcacgagcctggttattttttgccrtcaggttgccaagaataaaaacaacacggacgactaaatcctgcaataaacgaaagacagagtcaaaagtgcaaagggggctggaacacatcgtggggaa

SEQ ID NO: 540443 - DNA, 201 bp, Homo sapiens
aagtgcttagatgctggactaagggtttaaatgctgacaattcacagccatgtgaccttaggcaatgcctctaatatctctaagcatcagtttcctcatcyataaaaggtggatagtaataataattgccccataggattgtttgaagaattaaatgatataatacatgtaaagtgcgttagcacagtgctttaaaaatgt

SEQ ID NO: 540444 - DNA, 201 bp, Homo sapiens
ctcattcattgctggtgggaaggcaaaatgatatagcccctttggaagacagtttggcagtttcttacaaagctaaacgcaatcttcccatatgatccagmaatcatgctccttggtgtttacccaaaggagttgaaaacttggccgggcgaggtcgctcacgcctgtaatcccagcactttgggaggcagaggcgggtgg

SEQ ID NO: 540445 - DNA, 201 bp, Homo sapiens
gacaaaaagctccaggaactaataagtgattatagtagggttgcaagatacaaggttggaaactgaaatgaaaacacattatcatttatattagcactccmaaaactaaatatttagttataaatctaacaagatatggataaaatctagatgaggaaagctataaaactcagtgaaagaaatcaaaaaactaaataaatg

SEQ ID NO: 540446 - DNA, 201 bp, Homo sapiens
caaaaaactacagtaatattaaaagcaatttacaggagtcaaacaacagaatcatagaataaagagccactctacaataaggtagagccaccgagctgccraactgggtcctcaggctgtagctggctcaaaacccaagtggttcccaaggttgtagacgttaacaagccatgtgtcaacaatagctggcaaattatttct

SEQ ID NO: 540447 - DNA, 201 bp, Homo sapiens
tgagatcatgccactgcactctggcctgggcgacagagcaagactccatctctaaaaacaaaaacaaaaacaaaacaaaacaaaataaaaaattagccagygtagcgatcaataccaaagactaacccctaaaatagcttcatctaatctcaaaaacaatatgctaagcaaaataaaccagatatagtactctaggtaact

SEQ ID NO: 540448 - DNA, 201 bp, Homo sapiens
gatgggtacacaggacatctcggtactatttttgcaacatcttgtgaatttatacttagttcaaaataaaagtttaaaaaggtgccagacacaaaagggtmcatgctgtatattccgtttatataaagttttagaacaggcagagcttatctatggtgaaagagatcagaaaaatggttccctctgggaggagggtagaag

SEQ ID NO: 540449 - DNA, 201 bp, Homo sapiens
tcatgccactgcactctggcctgggcgacagagcaagactccatctctaaaaacaaaaacaaaaacaaaacaaaacaaaataaaaaattagccagcgtagygatcaataccaaagactaacccctaaaatagcttcatctaatctcaaaaacaatatgctaagcaaaataaaccagatatagtactctaggtaactatggc

SEQ ID NO: 540450 - DNA, 201 bp, Homo sapiens
atccgacctggtgaatcagtttgcacctaaggatgctgaatccaggggaaagggacataaaagagtaacacagggagtaatatactatatgtgcacaccaraggtcccctttcttgatttgatatatttttggtcacagtaacactcaacttcccttcatacccactgatcatatgtgtgtgggtgcacacacatacacac

SEQ ID NO: 540451 - DNA, 201 bp, Homo sapiens
tactattatctggatacagggatcaccaaaaagtaggtgcctactgacagctctcctgtcttactcatcacccagaacatgcttgacacagagcagccacrccacaaaacttgtgaaatgagtgtctcttgatttcagccaccaggtgataaacatatatcaatacatacagccatacgtatacatatatgtaagaaacaa

SEQ ID NO: 540452 - DNA, 201 bp, Homo sapiens
aatatttactgagtggctcccccatgtcaaacactgtcctaggtacttggtgtgcatcaaaatagatctctgatctcacagggcttacaacctaatcaacrgaaaataagcaataaccataataaataaggtatacgacatgttataagataataagtgctatggaaaaaaagcaaagtataaaagtagggaaggctcaag

SEQ ID NO: 540453 - DNA, 201 bp, Homo sapiens
tttctgtctgattgacaaaatcagtgagaaaggatggcatagtcagtaaaaggtgctggaacaatcaactatccacatgggaaaaatatgaagttggaccyctacatgacactataaacaaaaataaattccttatgattctacaatgcattagataggtagtaattaggtatccagaacaaagctcagggaagtgcagta

SEQ ID NO: 540454 - DNA, 201 bp, Homo sapiens
aaggctcaacagatctgttccttctcaacccgtcaagcttcatctcataccatatatgcccccataaactctacttaatgctaggttatttaatattatgktttactatctgtctactcctccagactagacgcttcagtgaaggcataaaccttgttcatccttttcaccattgtacatccagctccaagtccagtgcct

SEQ ID NO: 540455 - DNA, 201 bp, Homo sapiens
gaggtgtgcatccatttctttcttaactttctattctaatttatattatctataaatgcacaaacttaaacacacatttttcttttttattgtatataatytttcaaaccacctcaaatcccttacttaaaaaaagtcttgtttagtctctaaaggacttagtagagaaattctcaacctcttaagtagcatttcaccaag

SEQ ID NO: 540456 - DNA, 201 bp, Homo sapiens
tgtttgtgagacgagtatcgctctgtcgcccaggctggagtgcagtggtgtgatctctgctcactgcaacctccacctcccaggctcaagtgattctcctsccacagcctcccaaaagtagttgggattacaggcatgtgcctgtaattagccaccacacccggctaatttttggatttttagtagagatggggtttcacc

SEQ ID NO: 540457 - DNA, 201 bp, Homo sapiens
ggagggtcccctcagcatgtttcatagcctaaagcactagatatacagtttccagacagattatcactttttcttttcttttcttttctttttttttttgygacagagtctcactctgtcacccaggctggagtgcaggggtgcaatctcagcttactgcaacctctgcctcctgggttcaagcgattctcctgcctcagc

SEQ ID NO: 540458 - DNA, 201 bp, Homo sapiens
ctttttttttaagggccaatgaaaatcctattacaaaatgcttcatgactctgttgatatcagattttctacactgaatatttgtgtacattcactgtgtrctttggcactatgggtgttagtgtcaccacccaaaataagataagggagtctggaatcccagtttgtaccttcctctcatcacaaccaagtggtcaacta

SEQ ID NO: 540459 - DNA, 201 bp, Homo sapiens
aggagcctcatttccacccttgatctgtcttttagcataacactcctggccatccaccgccctcacttcctgattggtgagcttgggacaggaatcagacmctcccagtccagcccctacctggtccctctcttcccttcctcttttagaagtgagctgccatcagaacaaaggtgttctgctcctccagggacagacatg

SEQ ID NO: 540460 - DNA, 201 bp, Homo sapiens
tattcctaatgtagctttcctcttgatacatttttctttcatttcttttttgcgtactgtaagcttatttttcatctccttatatgggcttagaatctctmatttaaattcttataacccaaagaacagtgcttttttccttttttttttttttgagagggagtctcactccatcgcctaggctggagtgcagtggcatga

SEQ ID NO: 540461 - DNA, 201 bp, Homo sapiens
aaaataaataaataaataaataaaaaagagctgggcaatcagagaaagaatcacgagcccggcaacactgagccagtgactgcagcttgaacaggccaccrcctcccctccctcctgcacaagtccacccactgttgggagagcccccagtccttctccacctggtctcacctgctccagaggcccagtcccagcctgcga

SEQ ID NO: 540462 - DNA, 201 bp, Homo sapiens
actggggaagcactgaggagggggatggtgggcaaagcattcatctctgtggtcactttcacatcagtgtgtacctcagcaagcagcagggttttctagcrtgcactcccaaaagttaaaaatacatgaaacacacagtattcaacctcacaagcaagaacacagaataaaaaacaaggtatgagtccttgcaccaatcct

SEQ ID NO: 540463 - DNA, 201 bp, Homo sapiens
tggctgaggaggtggtactgctctcaggcctcttgtctggcttgaataactggggaagcattcacagcagtgccacctccagccaaaaaccctgtgtgaaygcaaagcagttatactgctggccttttggagatgactacacaaatctcttcctctttcactgtcttgaagcaggaattccaaacctgccaccacaccccg

SEQ ID NO: 540464 - DNA, 201 bp, Homo sapiens
aactaaatcttcatcttccttagaagtcattagataattcctcaagctcataagtcagaaagcagcaagacagtgtggcattgggaagtctggatgtaaawcctaaaaggatgtgtcgaaagagcttaaagtgaaagccactgaggagggaacaatgaagaacaaggggacaggagaccattggatttttgttagtttttt

SEQ ID NO: 540465 - DNA, 201 bp, Homo sapiens
aggatgtggaggaacaggatctctcattcattgctggtgggaaggcaaaatgatatagcccctttggaagacagtttggcagtttcttacaaagctaaacrcaatcttcccatatgatccagcaatcatgctccttggtgtttacccaaaggagttgaaaacttggccgggcgaggtcgctcacgcctgtaatcccagcac

SEQ ID NO: 540466 - DNA, 201 bp, Homo sapiens
tactcaaatgatttaaatacaaggtagaaactgatggcagcaataaaaacaatagagacaaattacttatgtgatcacaaaggaagaagagatttctgatygggggaagacatcaggtagacttcctggaagaggtggtgcttgagctcggttgtgaaagaagggctgaatttgagcaagtggcagtggctggcactggag

SEQ ID NO: 540467 - DNA, 201 bp, Homo sapiens
catttcctagctgccctttaaggcaggcatagtcagcactttagagacaggaaactgaggctcagagggtaaagtgggctcagtgtcccagctgagaggcyagcttatgctgggggctccagtgcggtgctatcctcactggaccatgcagggtggcggcactgggcctgccccagcattgtccagggttgaatgaaccat

SEQ ID NO: 540468 - DNA, 201 bp, Homo sapiens
tttgtgacagagtctcactctgtcacccaggctggagtgcaggggtgcaatctcagcttactgcaacctctgcctcctgggttcaagcgattctcctgccycagcctcccaagtagccgggactacacctggctaattttttgtatttttggtagaaatgtgatttcaccatgttgggcatgctggtcttgaattcctgac

SEQ ID NO: 540469 - DNA, 201 bp, Homo sapiens
ttctgccttcaaccatcaaatccatgtagatgaccctaaatctgtatttttgatcttacctgctcttccaagcctcagctcatatctcctacttcctactygagaggcctgctggcatctgaaagttttatattcaagctaatttcggccgggagcagtagctcatgcctgtaaacccagcactttgggaggctgaggtgg

SEQ ID NO: 540470 - DNA, 201 bp, Homo sapiens
attttaagaaagtcctccaaggtacttaatagtgttggcttgggcacaagactaaaatacatacacacacacacacacacacaccccttggcacctttttyaataatcactaactggttattattaaagttctatatatatatacacgattagatatattgctttgtagctatccatgttagcttaacttagttaacctta

SEQ ID NO: 540471 - DNA, 201 bp, Homo sapiens
agaagaataagcattggaatactattatctggatacagggatcaccaaaaagtaggtgcctactgacagctctcctgtcttactcatcacccagaacatgyttgacacagagcagccacaccacaaaacttgtgaaatgagtgtctcttgatttcagccaccaggtgataaacatatatcaatacatacagccatacgtat

SEQ ID NO: 540472 - DNA, 201 bp, Homo sapiens
cagaaagttttcttctgttatgtcttaatatttttcttctttctgctctgatctcttccattcttcatgagttgttgtgaatattaaatgacttaatataygcaaaggacttagaaaagtgtctgacaattcacagtaagacagcgttagcagaggaagtgaaggaagataattatcttcttcaggaaaacaagtttcatt

SEQ ID NO: 540473 - DNA, 201 bp, Homo sapiens
gtttgtgtggagcaggtcgctgtgatgcacacaaaagccctttcacatgctgggttccttaaattctaatgtatcaagcccctcccccaaaacacacacayacacaaactagctggctcacatgtaaccaggagtgtgtgtcatcctcagctccatcttccccctcacttcttgatctggatcttgaatggagtccttaca

SEQ ID NO: 540474 - DNA, 201 bp, Homo sapiens
aagtattgctttcttgaccacatatcacaatttttaaaaagagagttaatagtttgagagctgaataagaatgtagcctccccctgatattacatagatayatgctcagaaaattctgctttatgaaagacttcattatcagaataagaaaaggtggcattcttattaactaacagtaagtacgccaacacttaccttcac

SEQ ID NO: 540475 - DNA, 201 bp, Homo sapiens
atgtaaccaggagtgtgtgtcatcctcagctccatcttccccctcacttcttgatctggatcttgaatggagtccttacacagggcatactccctgctccygcagcctgcctacatcgttagatctcatatctttaattaaatattgagtacatctttctgaattaaaagactcacttttagtgaaatctgtttcttgctc

SEQ ID NO: 540476 - DNA, 201 bp, Homo sapiens
atctcagagtaacttctatccccaagatatgtattcattacaaaggaaagaataaaaacctgacagtgggtacagctgtgggacacgaccagcaacagaaygcatcagcatcgtgtactcctggcaggaggtgctgagagggacacagcagcactcatgtgctctgcctgcccaagatgctaacctggagctcatcacggg

SEQ ID NO: 540477 - DNA, 201 bp, Homo sapiens
atgagggtgaacatagtaactctagaggggaaaaagtcatcacattcatatccttaggactttgggctgcagaagcctttggagataacctaatctccacytcatctggcaggtaagaacactattgcacacagagtctaggtgactcctcatggccatacgcttggcgagtagcagcaccgggaccagaaccccgtccag

SEQ ID NO: 540478 - DNA, 201 bp, Homo sapiens
cttatacaaatgacaatgattccaaggctggagagctcaaatattttttataactttataattggatgacatgtgcttttaaaataacaatgactttttgytgccagtatttcctgaatgctggcccagacctcagggatgacctgaatggtgaagaggggtgactgcaaacagggtggataaaagaaccacgatgaaaac

SEQ ID NO: 540479 - DNA, 201 bp, Homo sapiens
gttgaaaggaaagctcagtcatttgtaggctgcagaagacatacactgttccttccgccagtggcccctcccgctagagcagcaagcataggcccagtacmtggtagacacttaatggatacttggaaaaagaaagaataaataaagacctgacttcctcttttttagtttaagtatataaaaagggaataaggaactgaa

SEQ ID NO: 540480 - DNA, 201 bp, Homo sapiens
gaataaaaaacaaggtatgagtccttgcaccaatcctgccatcctgttcataagaagtgcccttcacctccaggtcccagcccctctcatcttggcaaacsctttgttcctgcaattaccaaccctttctgatttacctgagctgacacgggactcgggttgcggggggagcgtttgaaaagctcctcaggtgattctcat

SEQ ID NO: 540481 - DNA, 201 bp, Homo sapiens
tttgtaccaaaagcagtttacaccataaagcagacaatatgtgcacatttcttaaatgagatttgtcatttaattgaattttggccagcatttttaatagrtattttacctaactctaaagtttagctttcatacggcattaagccgaacgagaggctgtttcatctcagtttttgtgtgtgtgggaactggagttactag

SEQ ID NO: 540482 - DNA, 201 bp, Homo sapiens
ctctaagcatcagtttcctcatctataaaaggtggatagtaataataattgccccataggattgtttgaagaattaaatgatataatacatgtaaagtgcrttagcacagtgctttaaaaatgttaacattttaaaatatggcccttaaagatgttaacaattattgcccaagtgctacatgataaaaggatacagcaaaa

SEQ ID NO: 540483 - DNA, 201 bp, Homo sapiens
gcacagaaggccattcacaaggcagaggggaacactgcctaggtccatcttggcatcctgagccaggagccttaaacacgaagctttacaaatctcaaaayggaaacaagtataacactgtaatgactcaagctgcaaaaccactcagctgattattggcaaaaagtgaatgtttatgaattctagtgttattaactcacc

SEQ ID NO: 540484 - DNA, 201 bp, Homo sapiens
attacttttaggaattttgaacaaaagtcaaatttaaaaagacaactaccttgaaaatcaatcaatgtaatctatcacaccacaagctaaagaagatacakaaaatacaagctaaagagaatacatatcagcagatacagaaaaagcatttggcaaaatccaacactcattcataataaaaattcttagcaaactgggaat

SEQ ID NO: 540485 - DNA, 201 bp, Homo sapiens
tgttctgtgcttgatccacaagtatttactgggcacctgatgtgtaccaggcgctatgctgctcactgcagaagacaccaaaacggccatggtcagccccmagctggaggggcctggggaggggagcactgcctgtggggcagcttctgcataccctcctgcactaggccacttacaaaagttattctggaaatttggtgt

SEQ ID NO: 540486 - DNA, 201 bp, Homo sapiens
aatgggaaaataaaggtaaactttgtttttctataaaattcaagtacacatagtatcactttaaatgcagaccttcaaaacattgcccagttcaagaaaakgagtctaaaaatactctacacatcagttcagagaagctgcaaggaggcttcctgctctacactctagtgagatggatccggaaaaatttaaaaggtaact

SEQ ID NO: 540487 - DNA, 201 bp, Homo sapiens
caaggctaggagtctgagaccagcctgggcatcatagcgagaccccaattctataaaacattttttaaaaattagccaggtgtggtggtgcatgcctgtgrtcctaagctcctggggaggctgaggcagaaggatcacttgagcccagaatttgatactgcagtgagctgtgatctcgccactgtactccagccctgggtg

SEQ ID NO: 540488 - DNA, 201 bp, Homo sapiens
aatgcagatccagctgatggaacgtctggaataatgacagcagagtttggatgctccctttctctttggaaaattgttcacgagcctggttattttttgcsgtcaggttgccaagaataaaaacaacacggacgactaaatcctgcaataaacgaaagacagagtcaaaagtgcaaagggggctggaacacatcgtgggga

SEQ ID NO: 540489 - DNA, 201 bp, Homo sapiens
ctgagaccagcctgggcatcatagcgagaccccaattctataaaacattttttaaaaattagccaggtgtggtggtgcatgcctgtgatcctaagctcctsgggaggctgaggcagaaggatcacttgagcccagaatttgatactgcagtgagctgtgatctcgccactgtactccagccctgggtgacaagagcgagat

SEQ ID NO: 540490 - DNA, 201 bp, Homo sapiens
gacagttgcagcacattatatgaattttgtaatggatcgtgggtaaacttcaaaaggagacagctcccagcagccttaccacacaggaccagttcaggttyacaaatatttatttgatacctgttatataccacaccctgtaataggctcttgggcaacaaacagagaaaaacacttttcttaatgacgttgctctatcta

SEQ ID NO: 540491 - DNA, 201 bp, Homo sapiens
ccaccagcacttgctctcgtgcccggtcattgcactcgcttttccttccatgtggacacttggtccatggatttttacatggctgcctccttctcatgagkcaccttcctattcagctgccagctcctcaaagatacctttcagagccacctgagctaaagcaaattaccccaccacagtcactctcgagtccattatctt

SEQ ID NO: 540492 - DNA, 201 bp, Homo sapiens
cacagcaccccagtgagcagacggtggtttaagagcagcaaaacaggatgaggcaagagggatggaggcagcatggcggtggtgagggagaatgcagactygagagctagtcaggaagcacgtgtagggcttggtgacggagagtgtgacagggatggctgaggaggtggtactgctctcaggcctcttgtctggcttgaa

SEQ ID NO: 540493 - DNA, 201 bp, Homo sapiens
tagaagtggggctggtagttgcccagaggaggcagtggctgagaggggccatggtggcggattctgagcccagaaatgatcaatttgatgatgttggcagygatctattttttccttttgaatgctggttactgagtgtgtttagtttgtgtaaatgtatcaagctgaattcttctgtgtcaataaaaagttgaacgaaaa

SEQ ID NO: 540494 - DNA, 201 bp, Homo sapiens
aacaaagggccccacatttccattcagcattgggcccagcaaattacataggttctccctgaggcttgaaacagcagggtgggtgtggtgaacaacaaggrgttccaccctgccggtgcacccaccgtgagggggcaggcccaggacaggcgtgagcagggcctggaatgttacgctggggctggatcacaacacagctgt

SEQ ID NO: 540495 - DNA, 201 bp, Homo sapiens
ttttaatcctactacgtaaacttttttttggcaccactccaataaaattccacccaacgattaaaggaggtaaagattcataaagcaaaaaatgttactgraagttaaccttgccagggtacattgcaaacccaacttagacacaatccttatatgatgcaaaagccgtcctaacaaaacacaaagaaaacaattagtgct

SEQ ID NO: 540496 - DNA, 201 bp, Homo sapiens
agagatggggtttctccatgttggtcaggctggtctcaaactcccaacctcaggtgatccgcctgcctcggcctcccaaaatgctgggataacaggtgtgwgccatggcgcccaccagccaccccattttttttttaaacacttaacacttcctttaatcataaaataggaaaaagatgaagtcaattttccaaaaattgt

SEQ ID NO: 540497 - DNA, 201 bp, Homo sapiens
caccatgcctggctaattttgtatttttagtagagatggggtttctccatgttggtcaggctggtctcaaactcccaacctcaggtgatccgcctgcctcrgcctcccaaaatgctgggataacaggtgtgagccatggcgcccaccagccaccccattttttttttaaacacttaacacttcctttaatcataaaatagg

SEQ ID NO: 540498 - DNA, 201 bp, Homo sapiens
tagtaggagtttgataaatatcagatcgactggcagtgtaagaaaggaaacaaatcgggacatcaaggtaaagcaagttgcctgatgatctacttggtcayggcatcacagcatgaggtacacaccctgcacatcctcattgtcttgtcttttctcttctcttttcttccttccttcctccctccctctcttctttttctt

SEQ ID NO: 540499 - DNA, 201 bp, Homo sapiens
gagaacacatgaacacagagaggggcacatcacacactggggcctgtcggggggtggggggctaggggagggatagcattaggagaaatacctaatgtagrcgatgggctgatgggtgcagcaaaccaccatggcacatgtatacctatgaaactgcactttctgcacatgcatcccagaacttaaaatataattttaaaa

SEQ ID NO: 540500 - DNA, 201 bp, Homo sapiens
ttcaatctcaattttttctccttctcaggccttattctcacctcattagcaaaagtttagacagctcaagtttcttctgccccacatacataactttcatraataacccaagtcaggagagaaagcccacatttatatgtgacatgtcatttgattgaaattcctacccatttactgcacgtgatacacacagttgagtaa

SEQ ID NO: 540501 - DNA, 201 bp, Homo sapiens
cacccaaactgtactaaatgagagatcttttttttttttttttttttttaagacagggtctcattctgtcacccaggctggagtgcagtggtacgatcatggctcaccacagccttgacttcctggtctcatgcaattctccagcctcagcctcctgagtagctgggactacaagcatgcaccaccacacccagctaattt

SEQ ID NO: 540502 - DNA, 201 bp, Homo sapiens; identical to SEQ ID NO: 268696

SEQ ID NO: 540503 - DNA, 201 bp, Homo sapiens
aaaccacatcaataggaacataaaattgtaatatacatcaacagagaaaaatgtggtttcttaaacatgagttttgcttttcagataaccattggtctaaygtgaaaattagtttagtgaaaagtatagtaaaattttatgccaatttaaactttaggatttttaggctgggcgcagtggctcacatctgtaatcccagca

SEQ ID NO: 540504 - DNA, 201 bp, Homo sapiens
cacagttgagtaatatacaatacctcacgtatttccaaatttgtcatttgtggtgctggtagaaataacatgcatgaaacatataccatacatttgaaaamtacacagcaatagctcaatagatgacaccatcaacctagttgctcaagcagagacatcccagaatcctgcctttctgctttctgttactccaagccatat

SEQ ID NO: 540505 - DNA, 201 bp, Homo sapiens
ctggtagaaataacatgcatgaaacatataccatacatttgaaaactacacagcaatagctcaatagatgacaccatcaacctagttgctcaagcagagayatcccagaatcctgcctttctgctttctgttactccaagccatattggctttttgtccatagctcccaggataatattcagttccctgaccatggtctac

SEQ ID NO: 540506 - DNA, 201 bp, Homo sapiens
ggctgaggcgggcagatcacctgaggtcgggagttcaagaccagcctgaccaacatggagaaaccccgtctctactaaaaatacaaagaattagctgggtrtggtggtgcatgcctgtaatcccagctacttgggaggctgaggcaggataattgcttgaacctgggaggcagaggttatggtgagccgagatcatgccat

SEQ ID NO: 540507 - DNA, 201 bp, Homo sapiens
caggctcccgagaagaatcattatgtaaaaatactgacaaagagcagcgcgggaggaaacagaaatgcataattcaaagacagttctgaaatttaacaacrtcttgcttggaggcaacctggattcaaatgatcattatttctggaagaaataaagtaagtgtagacttgactagtgaaagcttgagccaaagttcaaata

SEQ ID NO: 540508 - DNA, 201 bp, Homo sapiens
ttgccaagaataaaaacaacacggacgactaaatcctgcaataaacgaaagacagagtcaaaagtgcaaagggggctggaacacatcgtggggaagaagakagtatttaatttattcacaattgcattaatagtaaaatggaacacgtctggcttcggctcacttgtacagtatttgattctcaagatcagtgcaaagtga

SEQ ID NO: 540509 - DNA, 201 bp, Homo sapiens
catacacacaccccatcttggagcacagaaggccattcacaaggcagaggggaacactgcctaggtccatcttggcatcctgagccaggagccttaaacaygaagctttacaaatctcaaaacggaaacaagtataacactgtaatgactcaagctgcaaaaccactcagctgattattggcaaaaagtgaatgtttatga

SEQ ID NO: 540510 - DNA, 201 bp, Homo sapiens
taggtacttggtgtgcatcaaaatagatctctgatctcacagggcttacaacctaatcaacagaaaataagcaataaccataataaataaggtatacgacwtgttataagataataagtgctatggaaaaaaagcaaagtataaaagtagggaaggctcaaggggattgggaatagggtgggtacagcagggtagggagga

SEQ ID NO: 540511 - DNA, 201 bp, Homo sapiens
ttgctcttgtgcttttaaacccaaagcggccgccgtaggcgaaggtgaagatggctgcctctgcctttgctggtgcagtgagagcagcttcaggtcagtgragagcgacatactccatgcatgccttcacagaaggggaaactggtgcgggatggaatgggcgtttagactggaggttaacaagcaaaaagggtcattatt

SEQ ID NO: 540512 - DNA, 201 bp, Homo sapiens
accacattccagctttaggacttttttttttttttttagtcttgtattagtgcatttttttttttatactttaagttctgaggacattttcatcatcctgyggaacttttttaacacacaattttgagtcccaaactggacttcagtcagaatttatgggtggagtcggagctccacgagtgattccgatttgcagccatg

SEQ ID NO: 540513 - DNA, 201 bp, Homo sapiens
aggagttcaagattgggctgggcaacatggcaaaattctatctctacaaaaattaggcatggtggcacatgctgtagtcccagctacttaggaggctgagrtgggaagatagattgagcccaggaggtcaaggctgcagtgagctatgattgtgccactgcattccagcctgggccacagagtaagaccctgcctcaaaaa

SEQ ID NO: 540514 - DNA, 201 bp, Homo sapiens
atacgctttagtatcttcttttacattgtgagattcattcattcattttgcgtagctgtaatgctttctcattgctatataattctttttttttttttgaracggagtttctctcttgttgcccaggctggagtgcaatggcacgatctgggctcactgcaacctcctcctcccaggtttaagtgattcccttggagtagc

SEQ ID NO: 540515 - DNA, 201 bp, Homo sapiens
ggagtgtgagcagattaaaatcaaacagaattcagaattcagccaggcactgtagctcatgcctgtaatcccagcactttgggaggccaaggcgggcagawcacttgaggtcaggcgttgtggcaggtgcctataatcccagctgcttgggaagctgaggcaggagagtcgcttgaacctggaaggcagaggctgcagtga

SEQ ID NO: 540516 - DNA, 201 bp, Homo sapiens
gtttcttcgacttcattgtggcctttgggtgaggagaaaggtgagtcttcacactgttactaaattgaaaaaggaatgtgaggccgggcgtggtggctcaygcctataatcccagcactttggcgggtggatcataaggtcaggagttcaagaccagcctggccaacatggtgaaactccatctctactaaaaatacaaaa

SEQ ID NO: 540517 - DNA, 201 bp, Homo sapiens
gtggctcacacctgtaatcctaacactttgggaggctgaggcaggtggatcacttgagcccaggagttcaagattgggctgggcaacatggcaaaattctrtctctacaaaaattaggcatggtggcacatgctgtagtcccagctacttaggaggctgagatgggaagatagattgagcccaggaggtcaaggctgcagt

SEQ ID NO: 540518 - DNA, 201 bp, Homo sapiens
tgttgcccaggccagagtgcagtggtgcattctcagctcactgcaacctccacctccggggttcaagcaattctcctgcctcagcctcctaagtagctggraagttctgggattacaggcgtgagccactgtgcctggctggtagagtctatttcaataaacatgatgcttagacaaactttccaagatattcatgcctgc

SEQ ID NO: 540519 - DNA, 201 bp, Homo sapiens
gggtttcactgtgttagccaagatggtcttgacctcctgatctcctcgtgatctgcctgcctcggcctcccaaagtgctgggattacaggcgtgagccacygcacccggcccacaaatggaaaattctttacccgatctcacgtgatcggtggcagtcaaaactttgtttcatgtacaaaattatttaaaatattgtataa

SEQ ID NO: 540520 - DNA, 201 bp, Homo sapiens
tttgtattctgcaataaaacccagagtaaactcttagataaaatgacgacgtccttctggaagaggcgaaactggtacgttgatgatccttatcagaagtrtcatgatcgaacaaacctgaaagtatagatcagaagtttcacttgtttctcagttattggatatgtatctttgtgtacatatctttgcaaaaatggataa

SEQ ID NO: 540521 - DNA, 201 bp, Homo sapiens
aaaaaaaaaatctgggtagatgaattcaaactaatgtgtaaaacaaagtattttccatgacacggtttcatccagcagtccttggtatttattgttcattmcctccttccatttttgaatctagagattgtctaaaaaatttcaagcattttcatagtggttccattctgtgaataatctttaaaggatactggtggtaat

SEQ ID NO: 540522 - DNA, 201 bp, Homo sapiens
caaggaagaagcgattgagggaatttgtattctgcaataaaacccagagtaaactcttagataaaatgacgacgtccttctggaagaggcgaaactggtaygttgatgatccttatcagaagtatcatgatcgaacaaacctgaaagtatagatcagaagtttcacttgtttctcagttattggatatgtatctttgtgta

SEQ ID NO: 540523 - DNA, 201 bp, Homo sapiens
attaacaagccattgttcccagcttgctttttgggaaaattgataaatatgtcttatgcagcctcaggatcttcataaaaattgagaacaaaagaatttcrtaggttttaattttttaaccaagagataccaaaatctgatgacgtgtgaaaattggaacattttcttgtctacagtcctccaatgcacttaatcttccaa

SEQ ID NO: 540524 - DNA, 201 bp, Homo sapiens
tttctgaggatgtgggtatgtgtgaaaatcgctgtggaattgcctggtcagagaatatgtatatattcagcattgcctgatattgccaaactgttgaggcyccacatcctcaccaacacctgatattgatattgtcaatagatattgtcagacctacaaatttttgttaatctggtggctttgtaatggtatctcattgag

SEQ ID NO: 540525 - DNA, 201 bp, Homo sapiens
tttgtaatatctgacaggctggctataagaaaaaattatggaaaaagacacctgcaaggaagaagcgattgagggaatttgtattctgcaataaaacccakagtaaactcttagataaaatgacgacgtccttctggaagaggcgaaactggtacgttgatgatccttatcagaagtatcatgatcgaacaaacctgaaag

SEQ ID NO: 540526 - DNA, 201 bp, Homo sapiens
atgcatattttggagtattaaatatatatgctcctatctttacaggaatcctacggtccctgaatattttggcatcttcaacctaccgcaactgtgtcaaraatgcctctcttatttctgcattgtccactggacgttttagtcatattcagacaccagttgtttcctccactcccagacttaccacatctgagagaaacc

SEQ ID NO: 540527 - DNA, 201 bp, Homo sapiens
tgtttttttattaatttagcaagctgtacaaccattaccacattccagctttaggacttttttttttttttttagtcttgtattagtgcatttttttttttatactttaagttctgaggacattttcatcatcctgcggaacttttttaacacacaattttgagtcccaaactggacttcagtcagaatttatgggtggag

SEQ ID NO: 540528 - DNA, 201 bp, Homo sapiens
atgtttttttattaatttagcaagctgtacaaccattaccacattccagctttaggacttttttttttttttttagtcttgtattagtgcatttttttttttatactttaagttctgaggacattttcatcatcctgcggaacttttttaacacacaattttgagtcccaaactggacttcagtcagaatttatgggtgga

SEQ ID NO: 540529 - DNA, 201 bp, Homo sapiens
atggccacatattaatatacaggttaggtatctttaatctgaaactttttgagtaccaacatgacaccacaagtgggaaattcttttttttttttttttttgagacggagtcccgctctgtcgctcaaggtggagtgcagtggcacaatctcagctcactgcaagctctgcctcccaggttcacgccattctcctgcttca

SEQ ID NO: 540530 - DNA, 201 bp, Homo sapiens
attttacagggattgagggggtaggttttagaagattgcgagttggtgatggttgctattctaatttatgcttaatgtcatgggtcattggaagtaatatkgtatatgaaaagttagttccagtccattggagcagctttactcatttctcagtatagataatgaattttaatcctttaatcagtctgattacaagctaaa

SEQ ID NO: 540531 - DNA, 201 bp, Homo sapiens
aatgaattttaatcctttaatcagtctgattacaagctaaaaattttaaaatatatttttagaatggcccccgtgcttccaagtgtcctgaagctgccagycagatctctaacatacttcagtgcaagaaaaggcaagagaaagaccgtgaaagctgtcatcgataggtttcttcgacttcattgtggcctttgggtgagg

SEQ ID NO: 540532 - DNA, 201 bp, Homo sapiens
agtttcacttgtttctcagttattggatatgtatctttgtgtacatatctttgcaaaaatggataagtacaaaacttgatgtaaattgtaccaatgaataygtaaacatacagtgacaacattaaacttagaaaagttttaaaacttaatggatcagactttgccagatttggttagggaaacagaaatttagaatggtgc

SEQ ID NO: 540533 - DNA, 201 bp, Homo sapiens
cgaacaaacctgaaagtatagatcagaagtttcacttgtttctcagttattggatatgtatctttgtgtacatatctttgcaaaaatggataagtacaaawcttgatgtaaattgtaccaatgaatatgtaaacatacagtgacaacattaaacttagaaaagttttaaaacttaatggatcagactttgccagatttggt

SEQ ID NO: 540534 - DNA, 201 bp, Homo sapiens
ccattcattcctttgattcatgccacatagggccattgtaattccccaaatgtacatcgtcacctttgtacgtcctattccctctgtctcttcgtactctktcaaaactctggttttgcgttacctcttttgtgaaaacatctgtattctctatacaacagtgtgtttagagtagactagtctgtatgaaaatgcccagac

SEQ ID NO: 540535 - DNA, 201 bp, Homo sapiens
atagatcagaagtttcacttgtttctcagttattggatatgtatctttgtgtacatatctttgcaaaaatggataagtacaaaacttgatgtaaattgtaycaatgaatatgtaaacatacagtgacaacattaaacttagaaaagttttaaaacttaatggatcagactttgccagatttggttagggaaacagaaattt

SEQ ID NO: 540536 - DNA, 201 bp, Homo sapiens
attggagcagctttactcatttctcagtatagataatgaattttaatcctttaatcagtctgattacaagctaaaaattttaaaatatatttttagaatgscccccgtgcttccaagtgtcctgaagctgccagtcagatctctaacatacttcagtgcaagaaaaggcaagagaaagaccgtgaaagctgtcatcgatag

SEQ ID NO: 540537 - DNA, 201 bp, Homo sapiens
aaagacacctgcaaggaagaagcgattgagggaatttgtattctgcaataaaacccagagtaaactcttagataaaatgacgacgtccttctggaagaggygaaactggtacgttgatgatccttatcagaagtatcatgatcgaacaaacctgaaagtatagatcagaagtttcacttgtttctcagttattggatatgt

SEQ ID NO: 540538 - DNA, 201 bp, Homo sapiens
gaagttggggagaaggatacttttgcacagcctccatgatgtctttattgcaaatatggatgacaagggtctctgttacaggggcctcagagcaccttcgwttctcctctagaccagggacaggtgtagagataaggactggcaaccagagcctcagcatccaaagatggactgaagtgggatggctgacaggcacataac

SEQ ID NO: 540539 - DNA, 201 bp, Homo sapiens
ttgactccgcctccttgctttcccttcattctcttttgctcttgtgcttttaaacccaaagcggccgccgtaggcgaaggtgaagatggctgcctctgcckttgctggtgcagtgagagcagcttcaggtcagtggagagcgacatactccatgcatgccttcacagaaggggaaactggtgcgggatggaatgggcgttt

SEQ ID NO: 540540 - DNA, 201 bp, Homo sapiens
gaaacctgacatgtgggcatacctcagtgatccttaataggtagagtatatttctttgtggggttttttttgttttttgttttttgtttttttttgagacrgagtctcactctgttgcccaggccagagtgcagtggtgcattctcagctcactgcaacctccacctccggggttcaagcaattctcctgcctcagcctcc

SEQ ID NO: 540541 - DNA, 201 bp, Homo sapiens
aattctccatttccagtttggggcaattatgtacaaagctgattgatctcatcctggcgcatgagtccaattgtttctgaggatgtgggtatgtgtgaaamtcgctgtggaattgcctggtcagagaatatgtatatattcagcattgcctgatattgccaaactgttgaggccccacatcctcaccaacacctgatattg

SEQ ID NO: 540542 - DNA, 201 bp, Homo sapiens
ctcttttagttgcaaggaatctcaagtgggacaaacataaaaagactcaaaagctacaagttagctcaagcaatgtgacattatttcaaggatatgtgccrgggaattcaggaaccacctcaccaaccccatctcccactcagaaatcacctcccagcctcaggaagagtagaaattgggtggtgctcctcagcaggggaa

SEQ ID NO: 540543 - DNA, 201 bp, Homo sapiens
tatatacgctttagtatcttcttttacattgtgagattcattcattcattttgcgtagctgtaatgctttctcattgctatataattctttttttttttttgagacggagtttctctcttgttgcccaggctggagtgcaatggcacgatctgggctcactgcaacctcctcctcccaggtttaagtgattcccttggagt

SEQ ID NO: 540544 - DNA, 201 bp, Homo sapiens
ggccattgagaatcacatctttccaagaaatagtccagcccctatggaagtctggtttttgttcttattgggtctataaaccttgagttgtgaagatacckgttgtttcatacatagtatgatgttttacatttctttgtaatatctgacaggctggctataagaaaaaattatggaaaaagacacctgcaaggaagaagc

SEQ ID NO: 540545 - DNA, 201 bp, Homo sapiens
tcagaaatgcaaggcacattctcggcaaagagccatggttttgttcagttggtattgtgccataaagagcccttggcttgaaaggacccaagggctcaccrtgtggttttagccagatgttaattaagctggatggcacctaagatcccttctagtttaaacaggctatgattatagtttttataatcaatcaaattttcc

SEQ ID NO: 540546 - DNA, 201 bp, Homo sapiens
gaattattttacagggattgagggggtaggttttagaagattgcgagttggtgatggttgctattctaatttatgcttaatgtcatgggtcattggaagtmatattgtatatgaaaagttagttccagtccattggagcagctttactcatttctcagtatagataatgaattttaatcctttaatcagtctgattacaag

SEQ ID NO: 540547 - DNA, 201 bp, Homo sapiens
aaacacttcttcataacactgtaccaattcagcttttaaattttattactttgctttcctgtcctttgccaactcttaacctagttaatcctagttctgtygacattggaccaggctcagtaaataaacgaatggatttccagcctttttttcccatctgttcctgcttttagtcctctgaatctgcttcttttcttactg

SEQ ID NO: 540548 - DNA, 201 bp, Homo sapiens
gtgcttttaaacccaaagcggccgccgtaggcgaaggtgaagatggctgcctctgcctttgctggtgcagtgagagcagcttcaggtcagtggagagcgayatactccatgcatgccttcacagaaggggaaactggtgcgggatggaatgggcgtttagactggaggttaacaagcaaaaagggtcattatttaagttaa

SEQ ID NO: 540549 - DNA, 201 bp, Homo sapiens
aggaatcctacggtccctgaatattttggcatcttcaacctaccgcaactgtgtcaagaatgcctctcttatttctgcattgtccactggacgttttagtmatattcagacaccagttgtttcctccactcccagacttaccacatctgagagaaacctgacatgtgggcatacctcagtgatccttaataggtagagtat

SEQ ID NO: 540550 - DNA, 201 bp, Homo sapiens
gcagctttactcatttctcagtatagataatgaattttaatcctttaatcagtctgattacaagctaaaaattttaaaatatatttttagaatggcccccrtgcttccaagtgtcctgaagctgccagtcagatctctaacatacttcagtgcaagaaaaggcaagagaaagaccgtgaaagctgtcatcgataggtttct

SEQ ID NO: 540551 - DNA, 201 bp, Homo sapiens
tcatttcttcgcacttctgagacggcaaagccaaccacttagaagccttccacatctttgtcacctgcctggctcctgctctctgatgtacctctgggtartgagatggaaatggtgcctgcagaagttggggagaaggatacttttgcacagcctccatgatgtctttattgcaaatatggatgacaagggtctctgtta

SEQ ID NO: 540552 - DNA, 201 bp, Homo sapiens
ccatacagggaactggcttcatcttgtctccacgctgtcacttgttgctttgagagtcaacttggcctttcatctgatttgcacttaagaaattaactgtrtaggtgtaagcgtaactgggcttcctctttgccttctgctggatctatgtttcctttatttttctgagttccctttgcctttctgattttgagtagtctg

SEQ ID NO: 540553 - DNA, 201 bp, Homo sapiens
tgctttaaaaatgtgtttctcttaatcaggcctactttccccactcccaaacaatgatacatcttctccaagcattggatgtggccaatcggctagaagtsattcctaaaatttggaaaggtcagttttactttttatgtgtccaggtgcatctcacctcaatatcctctactttgataatgaatgtgctaacattactgt

SEQ ID NO: 540554 - DNA, 201 bp, Homo sapiens
ctttgtgctgccattcaatgccagtcctccgtttcctggtagccatcgttagcatttttctactcattttctttgcctgaagcagaatctcttcctcagcrtccgttctcaaaataactgtgatctctgttttaaggtcatgagaaacaaatagtgtgacttgaaagagttgatctcagaaacttgaaagagttgatctct

SEQ ID NO: 540555 - DNA, 201 bp, Homo sapiens
gagtttaaattacatgtatttaaatctttttctttatatagcgttcatttttactggcaaagaaatccggggagaatgtggccaagtttattattaattcrtaccccaaatattttcagaaggacatagctgaacctcatataccggtaaggagaggtagttacattatttacataatactattttaaatgtaaattaaac

SEQ ID NO: 540556 - DNA, 201 bp, Homo sapiens
gattttattctggtagtgcaaccctctcaaaggttgaaggaactgatgtaacaggtatattttaaaatatattgaattctatttttatatcaacacgttgrattccattgtagtactaggaaactgattcatgttttcttttttacattagggattgaagaagtagtaattccaaaaaagaaaacttggtaagtattctat

SEQ ID NO: 540557 - DNA, 201 bp, Homo sapiens
aaagtggtataggaggaagagagattttaaacagttacttctgtcctagtttactttttaacaatatgttgtcctcacctacttcatattaaggcaaagcrttgatcagaaatgtttgggctggcctgtgccacttagagtaataacatgatgtattctggccagggaaagactccgtggcctgggccccctcaaaaattc

SEQ ID NO: 540558 - DNA, 201 bp, Homo sapiens
tgatctgttctgcactgagccaagcaagttacttttaaaactggtggcaccactcatttgggacttggagactgcttttatccagaacctgttaagagaamaggggatttaaatacaaaggaatatgaaggtggtgtgccttaaagacagtctaaaattaggttttagtttgttacattattttgaaatattaaacatgaa

SEQ ID NO: 540559 - DNA, 201 bp, Homo sapiens
tatatagcttagtaatatttgccatggtctttctgagaaagccaaaattgtggtacattcctgcctctcttaagtttttatgttcttagctttatcttgcmtgttaccagttttgttggcaggatttttgttaatgttactgacttgaaaatatattttatccattgtaaccaaagctcttgtgaactttgattttcagat

SEQ ID NO: 540560 - DNA, 201 bp, Homo sapiens
agtttaatgcaactgcagggtccctttttctgatttcaaaactgacaggctataggtgagtgtcagagacaccgagaaccccagcacccagttgaattgcmgtgtaatcctccattttcttttcttaacagggaagccctaagtaatctaactgcattgaccagtgacagtgatactgacagcagcagtgacagcgacagt

SEQ ID NO: 540561 - DNA, 201 bp, Homo sapiens
aacttgaaagagttgatctctttctgaaatgtccttaacgtagaggggtattcttgttttaaatgatacctgaaaccagatactactggaggaagtatctktctgtgcaatcacatcttgacaattttctgaatgttactgatgccatttagtaaggggaaacacaagataatactaaccgtcacattatctgtggtgtgt

SEQ ID NO: 540562 - DNA, 201 bp, Homo sapiens
aatcgtgatgtaaattttttactgctggtcatggtcaaaaagtaagatacgctaggaaattgagtcactaggagcatggatgtataaggcaggttttatasaaccatttagattcaacattaatggtagagtggcattttaccaaaaaaatgggtgtatttgatttgggtgctgtaaggcaatttgctaggacatgggata

SEQ ID NO: 540563 - DNA, 201 bp, Homo sapiens
gcgaagccctgacaacacattaagatcgttaagtcttgattttccccattttcaaaatgataataaccataataccctgtaagaattgagataatgtatakaaagtacttggcacattgcctagaacataataaaccgtcagtaaatggtggtagctctcattggtatttcttattgcctgggttcacatttactctcttg

SEQ ID NO: 540564 - DNA, 201 bp, Homo sapiens
cctagtttactttttaacaatatgttgtcctcacctacttcatattaaggcaaagcattgatcagaaatgtttgggctggcctgtgccacttagagtaatracatgatgtattctggccagggaaagactccgtggcctgggccccctcaaaaattcatacgtggacttagaggagagaacacactaggctggagacagaa

SEQ ID NO: 540565 - DNA, 201 bp, Homo sapiens
attagggattgaagaagtagtaattccaaaaaagaaaacttggtaagtattctatcagtgttcattcagcaaatggttgagtgcttactatgagagaagtrtaagggttaggtaaggagacagtgacaggaagagcaataggagagcattcttgaagagagtagctgagcggggagaagctaggagtttaaaggacaaaaa

SEQ ID NO: 540566 - DNA, 201 bp, Homo sapiens
taagatgctaactgaaattatatcacagtagaaaaggtgggatagtctataatttctaattgggattctgcgtgttgttgcatttgtttttttttgtgagkggggagaaattcttgctgagagtgtaactataatcttgcttgagtttaaattacatgtatttaaatctttttctttatatagcgttcatttttactggca

SEQ ID NO: 540567 - DNA, 201 bp, Homo sapiens
tttgcattgcagtatagatctgtgcatagatatatgcattaagtgtagcaaatcgtgatgtaaattttttactgctggtcatggtcaaaaagtaagatacrctaggaaattgagtcactaggagcatggatgtataaggcaggttttatagaaccatttagattcaacattaatggtagagtggcattttaccaaaaaaat

SEQ ID NO: 540568 - DNA, 201 bp, Homo sapiens
ggcacacacttgatacaaccaggctgtgatgattggcgcaggggtacggacctcagctgagtcatgggagctgaatgtatgtgtttctcctttgtcctgcrtgtggcaggctgatggggagcacttacatgagactgttgcctcaatctgagcctgcacttcataacagaattctaagacagactgaacccctgctgtact

SEQ ID NO: 540569 - DNA, 201 bp, Homo sapiens
ctttgcctttctgattttgagtagtctgactgggaaatgcattccattgccttaacttttatttcttttgatgattattcatttcaggaagaggaaaatgrtgagacatctaggaggaaagctggtcatcagtttggagttacatggcggtatgtcacacgtaattagaaccttgaattacagtgtcttacagtgcatgga

SEQ ID NO: 540570 - DNA, 201 bp, Homo sapiens
ttataacttacttgctgtcaaccaataatatgttgaatcaacattattttcacaagacactctactgttgttatttatttgtgaaccactggctgacaggktatcagagtgatacttactacttgcatattttcagtgctcatctctcagagatctagaacttgcctaccaagtacatggccttttaaaaaccggagacaa

SEQ ID NO: 540571 - DNA, 201 bp, Homo sapiens
ttgagaagtcagcacacactggcagctcttaaaccaaatattggctcgtttaacttgaaactgtaagtattttgaaattctttgtaacatataatatgctrtaatttcaacccttatttcccctgttgttagacatagggactttagactaaacatactttttgccttcatcacagttccaagttcttcgatttgatttgt

SEQ ID NO: 540572 - DNA, 201 bp, Homo sapiens
ttcatatggtatggttcctttggtagtttcattaacagtgctaccttggaatatatacctctaattctgaaagatttaatacttttgtttactaaaaataycatggacactagagtgtactgctaaattaagaccactgacaacatgtagacatacacagcagtttgaatgaaaggtaataacttaattatattggagaat

SEQ ID NO: 540573 - DNA, 201 bp, Homo sapiens
actttccccactcccaaacaatgatacatcttctccaagcattggatgtggccaatcggctagaagtgattcctaaaatttggaaaggtcagttttacttkttatgtgtccaggtgcatctcacctcaatatcctctactttgataatgaatgtgctaacattactgttagggatgaaaacttccattttgactgaaccaa

SEQ ID NO: 540574 - DNA, 201 bp, Homo sapiens
tcatgttgcatgttggctatcaggagaaaattttgttgaaaatgacttaagtcagtcccttcgtgacataggaatgagctgagttttgtgcacctgttgcrggatatgacccaaagaaaataaatgctaatggcgtggcagaccctaaatctgaataaaggtctttgacccggaagcctgtgtaattcctctgtgccagtg

SEQ ID NO: 540575 - DNA, 201 bp, Homo sapiens
gacccaaagaaaataaatgctaatggcgtggcagaccctaaatctgaataaaggtctttgacccggaagcctgtgtaattcctctgtgccagtgttgcctsacttcactaaccacagtcagtgatgattctgtttccaagtaatagccatgagcatcacgcatcacgggtgtgtgtgtcttatgtgtataacttggctgca

SEQ ID NO: 540576 - DNA, 201 bp, Homo sapiens
cataagcagcttcatctttaccttgccagagttgacaattatgggatactctagtctacttatacttgtgttcccatctgtctgccatcctctgaaggccrggacccagtcatacatccttagaaaccaaagtatggtttttgttttctcttggaatgtcaggtcttaaggcatttaattgagggacaaaaaaaaaaaaag

SEQ ID NO: 540577 - DNA, 201 bp, Homo sapiens
tatgaccgcctaagaaacagaacttcgagaagtcctaacgtaaccacagtaaagcagactcccctttcagcaacctcaaagcaaaaaaaaaaaaaaaaaaaccagttagctgctatataaacactataccaagcactaggcttagaggaaaagatgtcagattgtactgtcactggctatgtacccatattctctaagaca

SEQ ID NO: 540578 - DNA, 201 bp, Homo sapiens
caggacccagtcatacatccttagaaaccaaagtatggtttttgttttctcttggaatgtcaggtcttaaggcatttaattgagggacaaaaaaaaaaaaagccgatatagtagctagctacttaagcatccatgggtattgctccatatcaaagcagatttgcaggacagaaagagtaaattagccttcagtcttggttt

SEQ ID NO: 540579 - DNA, 201 bp, Homo sapiens
tgaattgcagtgtaatcctccattttcttttcttaacagggaagccctaagtaatctaactgcattgaccagtgacagtgatactgacagcagcagtgacrgcgacagtgacaccagtgaaggcaaatgaaagtggagattcaggagcagcaatggtctcaccatagctgctggaatcacacctgagaactgagatatacc

SEQ ID NO: 540580 - DNA, 201 bp, Homo sapiens
cacgtctataatcctagccctttgtaaggcagaagtgagagaactgcttgaggccaggagtttgagaccagcttgggtgacaaagcaagacaccctctctrcaaaaaattttgtgaaatggccagctgtggtggcacacacctgtagcctaggctacttgggaggctgaggcaggagaatcccttgagtccaggagctaaa

SEQ ID NO: 540581 - DNA, 201 bp, Homo sapiens
cagagtgaagcctgtggtttattctcctataactgaatcaagagctaccaattaggatagtaaaggcaacagtagtcccgaaagctgcagtaagaatccayaggaaagtgggtagaggaagtaggccagatagttttatgagggcgggatggaaatcactagccctgggttatggcattatgcaccaggccagagaggaca

SEQ ID NO: 540582 - DNA, 201 bp, Homo sapiens
ctaaaatctataattttttttttctttgagatggaggttcactgtgtcccccatgctggagtgcagtggctcaccgcaacctctgcctcctgggttcaagygattctcctgcctcagcctcccgaatagctgggactacaggtgtgcgccaccacacctggctaatttttgtattttttgtggtagagatgtagtttcacc

SEQ ID NO: 540583 - DNA, 201 bp, Homo sapiens
ggaaaggagtgtagagaaatatttgactgggaatattgcagatgattttctgacctattagtgctcagttcatgttatatttaagaactgccctgtccatwctagtttactttttcttgacctcattctgattatatttaaagggaacacaaatgattactagcaaaaaacatttttagccgggtgcagtggctcatgcct

SEQ ID NO: 540584 - DNA, 201 bp, Homo sapiens
tgaacctcatataccggtaaggagaggtagttacattatttacataatactattttaaatgtaaattaaaccaggctttcatggctaatatttcagtagcyatttgaataccctcaatatttggatgataagccttttaaagtgtggagttagctttgatcacaagactaactttaaaattctttctgtatttatttgctc

SEQ ID NO: 540585 - DNA, 201 bp, Homo sapiens
gggctggatacagtggctcacgtctataatcctagccctttgtaaggcagaagtgagagaactgcttgaggccaggagtttgagaccagcttgggtgacamagcaagacaccctctctacaaaaaattttgtgaaatggccagctgtggtggcacacacctgtagcctaggctacttgggaggctgaggcaggagaatccc

SEQ ID NO: 540586 - DNA, 201 bp, Homo sapiens
taagctgcgtttgccccactgcactccagcctaggtgacagagcaagaccctgtctcaatagtaataataatttctaggaatttacccaaaagagagagcytaaaataacctagaaacaatacattgaaaagagaatattatgtaactaataaaattaagaatattagcaaagggaagcatgcttgagtaaattgtgaaac

SEQ ID NO: 540587 - DNA, 201 bp, Homo sapiens
gaactcctgggctcaaacagtcctccctcctcagcctcctgagtagttaggattacagatgcccaccagcatgcctagctgatttttttttttttttttttggacagggtcttactacctaaaattattcttgagggtagcaatcttgtttgtggtctaaaacttgagctggaggggagagggttatggattgtactggca

SEQ ID NO: 540588 - DNA, 201 bp, Homo sapiens
catcgtaatttctattagtaagtgtgttggaaacatatccttttgcatgagttaccagattctgcaagtgggaggctgttgatgtcccttcatacctcacytctggtttcaggcaacatgccaatgatctaataggacatgttaattgagcacttaggaattaaagcagtggtaaaactgccagatttgaaagactagttt

SEQ ID NO: 540589 - DNA, 201 bp, Homo sapiens
acagtggtgagcaaaacagatgcgcctctgccctcctgagtttgttggtggaagtactaatctcagactcatcatatctaaactgctcccatatccctacrtctctctgcttcccaaagctcacagggaaacacacacttcttgttttcatagtagaacttgcacatagatgaggaagccagtgtgattgtgtaagtcaaa

SEQ ID NO: 540590 - DNA, 201 bp, Homo sapiens
tttttaggggaggctggccatgtagaccacccactggctggcatatattataccaagtttccatactcccagaagggaagcaggtgtttggcacaaaacaygttgtacaaacaggttaggcacagtgaaccattcttagcagttctaggaatggtaagaacccttccaatatccaggttcccagatggcagccaagggcca

SEQ ID NO: 540591 - DNA, 201 bp, Homo sapiens
catgtaccaactaggggaaagaaccagcagttttcttaatttctaatttattctagtgaccttgtgacataaccagcttcagatgagatctgcactatgtkattggccagtacactgagagtagaatcacttgttcggtttgtggctatgaagagccctgatgaggattaacttgtggttcttatttttagggataaagta

SEQ ID NO: 540592 - DNA, 201 bp, Homo sapiens
gcatggtggcatatgcctgtagtcctagttactcaggaggctgaagcaggagggtcacttgagcccaggagttcaagggttcagtgagctataattgcacyacttcactaaaggctaggcaatggagcaagaccctgtctctaaaaaaaaaaaaaaaaaagttttgacagtcttgtccatatcttgtatccattccttaat

SEQ ID NO: 540593 - DNA, 201 bp, Homo sapiens
tgtttgccattcacttaattggatgataatagacagatttcctcatctgcagactagagttggtaataaccatccgaaaagtttgtgaggtataagtgggrtatgtaatttacaatatgtttttatatgtactctcccttagttcccctcaagaaagagaaaccactccatctgatactgcagaaacctttgtgctgccat

SEQ ID NO: 540594 - DNA, 201 bp, Homo sapiens
ccttgaacccaggaggtggaggttgcagtgagccaagaccacgccactgcattccaacctgggcgagagagcgagactctgtcttaaaaaaaaaaaaaaaagaagtcttagtttgcttgggtgagtgttaggcattaactatatgttgtttatcttgctttcaccctaattatgacagtttatctgtatggatcaagccag

SEQ ID NO: 540595 - DNA, 201 bp, Homo sapiens
caggaacaaaagtaagtggtcaccatgaagcatagtttgtaaaatggagacctttcatccatctgcccattcaaaatgttcatagctttctatcccttctrtttcctttcaaaaagtcagaatgtagtaatttaatgactatttcatttgtcatgcaagtcaggaaagcctatagatttgactgttagaagctttttgttt

SEQ ID NO: 540596 - DNA, 201 bp, Homo sapiens
gacataagtgaagccgccctgaaggaacgaattgagctcagaaaagtcaaagcctctgtggacatgtttgatcagcttttgcaagcaggtgactgagttcrattaaagcccctctaataacatgggctttgaagtgggcccaagttatatgattcatatattttgagtaagagttacaggtcctgctgtacttactctgct

SEQ ID NO: 540597 - DNA, 201 bp, Homo sapiens
ggaggctgaggcaggagaatcacctcagcccacgaggcagaggttgcagtgagccaagatcgcaccactgcactccagcctgggcaagaagagcgaaactytgtctcaaaaaaaaaaaaaaaccaaccacttttttatatcatactagtctattatttttgcgtcttttcttggaaaactctcctaggtagaagactgaag

SEQ ID NO: 540598 - DNA, 201 bp, Homo sapiens
acggtggctcatgcctataatcccagcactttgaggctgaggcgggtggattaccttaggtcaggagtttgtgaccagcctgactaacatggtgaaacccygtctctactacaaaaatacaaaaattagccgggcatagtggtgctcgcctgtagtcgcagctactcaggaggctgaggcaggagaatcacctcagcccac

SEQ ID NO: 540599 - DNA, 201 bp, Homo sapiens
gtgtttcagcctcagaactactaacattttgggtcaggtaatttgttgtggggtctgtcctgtgcattgtaggatgttagtagctccctggcttctacccrctggatgtgagtagtgtactcctcccccactttcagttgtgacaaataaaaatatgtttaggcattaccagtggatagaaaatcccactgcactagagta

SEQ ID NO: 540600 - DNA, 201 bp, Homo sapiens
aacccgggaggcggaggttgctgtgagcagagatcgcaccactgcactccagcctgggcaacagagcaagactccgtctcaaaaaaaaaaaaaaaaaaaaagaaacagaagtacatgggctggagacagcatttatgagcatgtgtatggcagtcactgtgtagcagttacctgttcactaccctttccgcagccctggga

SEQ ID NO: 540601 - DNA, 201 bp, Homo sapiens
ctattgaacccgggaggcggaggttgctgtgagcagagatcgcaccactgcactccagcctgggcaacagagcaagactccgtctcaaaaaaaaaaaaaaraaaaaagaaacagaagtacatgggctggagacagcatttatgagcatgtgtatggcagtcactgtgtagcagttacctgttcactaccctttccgcagcc

SEQ ID NO: 540602 - DNA, 201 bp, Homo sapiens
tttaccagaaatacatgggctggccaggtgtggtggctcaaacctgtaataccagcactttgggaggccgaggcgggcagatcacctgaggccaggagttsgagaccagcctggccaacatggtgaaacccgtctctactaaaagtacaaacaattagctgggcgtggtggtgcacgcctgtaatcccagctacttgggaa

SEQ ID NO: 540603 - DNA, 201 bp, Homo sapiens
gtggaggaaggagaaatgtgtccctttgtattaggtacagtgagtttggtggtggtaaaggaagtggattaaacacatttgctttcttgttctgcaggagrccctttaaagagatcatccttcatcatttatgatataatgaatgaattaatgggaaagagattttctccaaaggacccggatgatggcatgtatagaaat

SEQ ID NO: 540604 - DNA, 201 bp, Homo sapiens
tataatgaatgaattaatgggaaagagattttctccaaaggacccggatgatggcatgtatagaaatcacttgtgttttcctcctctaaagacagagggcyggtttacctgagtaccagttagaggccttgtgatccctatagcttagaagtatttttttttttttttaaataaatttgagtacatagtaggtgtatatag

SEQ ID NO: 540605 - DNA, 201 bp, Homo sapiens
tctaaactgctcccatatccctacgtctctctgcttcccaaagctcacagggaaacacacacttcttgttttcatagtagaacttgcacatagatgaggaagccagtgtgattgtgtaagtcaaaatattaaaatcctaaactaagacagtgtctttctccattagattgtgagcaccctgaaggtagagaatgcctttcg

SEQ ID NO: 540606 - DNA, 201 bp, Homo sapiens
agtttccatactcccagaagggaagcaggtgtttggcacaaaacatgttgtacaaacaggttaggcacagtgaaccattcttagcagttctaggaatggtragaacccttccaatatccaggttcccagatggcagccaagggccagccttggacgcagaccttcctaaggataatggtttcaggtctgttaactcttttc

SEQ ID NO: 540607 - DNA, 201 bp, Homo sapiens
acctgggaggcagaagttgcagtgagccaaggtcctgccactgcattccagcctgggtgagttagtgagactctgtctcaaaaaaaaaaaaaaaaaaaaaatttaaaataaaattatcaaatccctttatttggcaaaggaggaagctaaggttttgaaagtggccagtggctggttaggatgttaaaaccttaattaaag

SEQ ID NO: 540608 - DNA, 201 bp, Homo sapiens
accaagcactaggcttagaggaaaagatgtcagattgtactgtcactggctatgtacccatattctctaagacagggtagcatttgtctttcaaactgcakggtttgaaatcagtttttgtgggtgattgcaattttttaatgaaatgcattagaacatctaagcacgtcacctacagttttgtgatggtgcatttttgca

SEQ ID NO: 540609 - DNA, 201 bp, Homo sapiens
cttttggaggccaaagtaggaagaccacttgacatcaggagttcaaaaccagcttgggcaatgtagcaagacccccatctgttttttgtttgtttgtttgktttgttttgtttgagacagagttttgctcttgttgccttaggctgcagtgcaatggcgcgatctcggctcaccgcaacctccacctcctgggttcaagca

SEQ ID NO: 540610 - DNA, 201 bp, Homo sapiens
gtaagtggaggtttgcagcattcctgccttcatgagggcttctaccactgaccactttgcacgtacctggctcccagatttacttaggtaccccacgagtygtccacataagcagcttcatctttaccttgccagagttgacaattatgggatactctagtctacttatacttgtgttcccatctgtctgccatcctctga

SEQ ID NO: 540611 - DNA, 201 bp, Homo sapiens
ttttttctgtctacctggtaatttgagaaccctcgcttgcaacatatcaccatattattcgcctgtttgatcaacctggtatgtatggccttaaattgtgytaatttatatagaaaattgaccagctttcttgagtttatgtgattaattgttgtagttatcttctctgcatatgaattaagaagagagaatttgtaaatt

SEQ ID NO: 540612 - DNA, 201 bp, Homo sapiens
actttcctgtgggtagattttggagttatttcatggagatttttactagtccagactctgcagtgcaggtgtcttttgtgcacttgaccaggtgttgttayaggattaatttttaatggtataattgcttaattaaaataatattgtaataaatttcacagaacttgggatttgtctcccccccatttcttataacttact

SEQ ID NO: 540613 - DNA, 201 bp, Homo sapiens
cctagtatttagtgtggatcctcacaaggtttttactctgggtactcaagcgtatgtatatccaggcatactttcagggtgttttatttgttggcagcaaycagtatttcatagtaagaaccataacttaactttcctgtgggtagattttggagttatttcatggagatttttactagtccagactctgcagtgcaggtg

SEQ ID NO: 540614 - DNA, 201 bp, Homo sapiens
gcctttgccattactttccatggcaaaaaccgcaattacaaaagccgctactttcaatagcaaaaaccacaattacttttgcaccaacctagtatttagtrtggatcctcacaaggtttttactctgggtactcaagcgtatgtatatccaggcatactttcagggtgttttatttgttggcagcaatcagtatttcatag

SEQ ID NO: 540615 - DNA, 201 bp, Homo sapiens
taattgtctgtgtgaaggctttggatcgtgcctcagtcattggcctacactttaccttttcctgaggcgtagatgattgaagcaagagtagagatccagaraggagagtagttttccagttttgtggacatgtgattagttaagggacacataggaatgactgctttgccttaaactcagccatttagggattaatcttca

SEQ ID NO: 540616 - DNA, 201 bp, Homo sapiens
ttttaaataaatttgagtacatagtaggtgtatatagcttagtaatatttgccatggtctttctgagaaagccaaaattgtggtacattcctgcctctctyaagtttttatgttcttagctttatcttgcatgttaccagttttgttggcaggatttttgttaatgttactgacttgaaaatatattttatccattgtaac

SEQ ID NO: 540617 - DNA, 201 bp, Homo sapiens
aggtttacaaatgctgagaaattgatagactatgtgaatcctttactactttcttcaaaaagatgtacatatcgtcaatggggaaaggatttttggttttkgtttctaatacttagggctttttcacactggagtgacccactcagtttaaatggcttgctttttatatatttcaagctgtgtataagatgctaactgaaa

SEQ ID NO: 540618 - DNA, 201 bp, Homo sapiens
tttagtttgttacattattttgaaatattaaacatgaaaatgttaaatcaggatgtgtgagttttaagatgttgaacactgtcctacatcagtgaggaggraggcaataaagtaatttcagagtaaaacagattgaggatgaaaccaagacagaagtgatgatttggctttttatgatttttgctgtggaaatggcagtcg

SEQ ID NO: 540619 - DNA, 201 bp, Homo sapiens
cattagaataatttttttcaaggaagttctctcatatgattcaagagcagacagttactgtctttattatctctaatgaggtaaaaataaagtaaatggtrtggacagcaaaatttagcttttttattcactggatatatccttgaacaaattgcctcatctcatttattcaacatttgttgaatatgcaggaattaaaac

SEQ ID NO: 540620 - DNA, 201 bp, Homo sapiens
gcagatcacctgaggccaggagttcgagaccagcctggccaacatggtgaaacccgtctctactaaaagtacaaacaattagctgggcgtggtggtgcacrcctgtaatcccagctacttgggaagctgaggcaagagaatctattgaacccgggaggcggaggttgctgtgagcagagatcgcaccactgcactccagcc

SEQ ID NO: 540621 - DNA, 201 bp, Homo sapiens
acatttgttttatttatttttgtctttcatttccaccgatcagggtgtttcagcctcagaactactaacattttgggtcaggtaatttgttgtggggtctstcctgtgcattgtaggatgttagtagctccctggcttctacccactggatgtgagtagtgtactcctcccccactttcagttgtgacaaataaaaatatg

SEQ ID NO: 540622 - DNA, 201 bp, Homo sapiens
ttgggaggccgaggcaggtggatcacaaggtcaggagatcgagaccatcctggctaacacagtgaaaccccgtctctactgaaaatataaaaaattagccrggcgtggtggcgggcacctgtaatcccagctacttgggaggctgaggcaggagaatggcgtgaacccaggaggcagagcttgcagtgaggagagatcgcg

SEQ ID NO: 540623 - DNA, 201 bp, Homo sapiens
ccctgtagtcccagctactcaggagtgtgaggcaggaggattgcttgtggccaggaggttgaagctgcagtaagctgcgtttgccccactgcactccagcytaggtgacagagcaagaccctgtctcaatagtaataataatttctaggaatttacccaaaagagagagcctaaaataacctagaaacaatacattgaaaa

SEQ ID NO: 540624 - DNA, 201 bp, Homo sapiens
tctctttttattgtgtatactcttctgtttcagtgacgcttataatccatttggtactcttttgtatatctagcctagatccctttactttgaactccacmttgtatttccagctccctctttgttctgtagttttggagtgaggatttatgcagtgtggtgggtattgtgcttagtgcttgtccatacagtggtgagcaa

SEQ ID NO: 540625 - DNA, 201 bp, Homo sapiens
aatagcggagctgttccctgctccccgcccactgcgccccaccttcctgaaggtcgaggcacgctttcccaacatgctctgcagagaaatcaaagatggckgttgtatctgctgttcgctggctgggcctccgcagcaggcttggccagccgctgacgggtcggcgggcgggtttgtgtgaacaggcacgcagctgcaggt

SEQ ID NO: 540626 - DNA, 201 bp, Homo sapiens
gaattaagaagagagaatttgtaaattaacctgtacagcctgagcagaaagttgtggtttttttagatacaggatcttgcccattgcagccttgaactccygggctcaaacagtcctccctcctcagcctcctgagtagttaggattacagatgcccaccagcatgcctagctgatttttttttttttttttttggacagg

SEQ ID NO: 540627 - DNA, 201 bp, Homo sapiens
caatagcggagctgttccctgctccccgcccactgcgccccaccttcctgaaggtcgaggcacgctttcccaacatgctctgcagagaaatcaaagatggyggttgtatctgctgttcgctggctgggcctccgcagcaggcttggccagccgctgacgggtcggcgggcgggtttgtgtgaacaggcacgcagctgcagg

SEQ ID NO: 540628 - DNA, 201 bp, Homo sapiens
catcttagtgttcattagtattttaggtactttgtttatggatctgttgaatctgaggagaagtgattgctttgagttagctagttttaaattcatgacaytttcccaacataattaggtatttgaacctaagtgtgtgctagtgtattgtatatttttcattaattactttattgaaagttgctttgggaatcaattcac

SEQ ID NO: 540629 - DNA, 201 bp, Homo sapiens
ggatggtgttcgtggtttggctaaaggatgggctccgactttccttggctactccatgcagggactctgcaagtttggcttttatgaagtctttaaagtcytgtatagcaatatgcttggagaggtatgtaattaactttaaaattgaatgttccgagtgtttaagactttccgagtgttcttagatttttgtctgtcttg

SEQ ID NO: 540630 - DNA, 201 bp, Homo sapiens
gagccctggactgagttttttttttttccctagagtaaggaccatttgtcggtctacaaatgacttgatgtttggcctaaacatttactattaacttttasggagggcttgttagtatccttgtgatctattcacagttaagaatttccatgaccacaacatgcttccttagatccacctttgtggatgaatcttgaactg

SEQ ID NO: 540631 - DNA, 201 bp, Homo sapiens
ggcatgcaccgccatgcccggctgatttttgtttttgttttttgtttttttttgagatggagttttacccttgttgcccaggctggagtgcagtggtgcartcttggctcactgcagcctccgcctcctgggttcaagcgattctcctgtctcagcctcctgagtagctgggattgcaggcgtctgccactacgcccggct

SEQ ID NO: 540632 - DNA, 201 bp, Homo sapiens
ctgaggcatagtctcgctctgttgcccaggctggagtgcagtggcatgataatagctcactgcaacctcctcctcctgggttcaagtgattcttctgccgyagcctcccaagtagctgggacaggcatgcaccgccatgcccggctgatttttgtttttgttttttgtttttttttgagatggagttttacccttgttgcc

SEQ ID NO: 540633 - DNA, 201 bp, Homo sapiens
gttcctctagatctggttaaatgcagaatgcaggtttgttttgcatgctggactagagcatattgaagcatgactgactgttaagttataagatatagtcrtctaacaagctgtgtggaaacctaactgtccaggaggtaagtttatgaccagtaacatgagttttatattaaaatgcatggtgtgtcttctcttactaca

SEQ ID NO: 540634 - DNA, 201 bp, Homo sapiens
tgtcaatacgataaagcagaacccagtggagtaagaatacacgaaactgccaggcacagtgggtcatgcctgtaaacccagcattctgggaggccgaggcrggtggatcacctgaggtcgggagttcaagaccagcctgaccaacatggagaaaccctgtctctactaaaaatacaaaattagctgcggtggtggtgcgtg

SEQ ID NO: 540635 - DNA, 201 bp, Homo sapiens
ttttatgaaatgttttgacttttttttttttttccctagagaacagggttcttgctttgtcgcccaggctggagtacagccttgaactcctgggctcaagygatcctcctgcctcagcctcccagttagctgacacaattgggatgtgccactacttgctcctgttttttcatagacgggtcctgctgttgctcaggctgg

SEQ ID NO: 540636 - DNA, 201 bp, Homo sapiens
ccatcctggacaacataatgagaaaagaaaatacaaaaattaaggggtgtggtgacacatgcctgtagtctcaactatttgggaggctgaggcaggaggaytgcttgagcccgagaggttgaggctacagtgagccatgtttacgccattgcagtccagcctgggcgacagagtgaaaccctgtctcaaaaaaaaagtaac

SEQ ID NO: 540637 - DNA, 201 bp, Homo sapiens
aaaacttttaaaaaaattaatatggcagaatacgagctattaatagtatcagatacagaaccctcataatttttaaatgatctgaatttggcagtgaattkttttttaagccacttaattgtggccaaagctattcagctgtgataatagtatctcacagggaaacattttctttcattccagtggccttagtcatctctg

SEQ ID NO: 540638 - DNA, 201 bp, Homo sapiens
tactcaggaggctgaggcaggagaatcgcttgaacccgggaggcggaggttgtggtgagccaagattgcgccattgcactccagcctgggcaacaacagcraaactctgtctcaaaaaaaaaaaaaatatatatatatatatatatatgaagctgatagttgaattatgttgattcagggacaagatagcattgcatagta

SEQ ID NO: 540639 - DNA, 201 bp, Homo sapiens
gaggcaggagaatcgcttgaacccgggaggcggaggttgtggtgagccaagattgcgccattgcactccagcctgggcaacaacagcgaaactctgtctcaaaaaaaaaaaaaatatatatatatatatatatatgaagctgatagttgaattatgttgattcagggacaagatagcattgcatagtaacttccagtagga

SEQ ID NO: 540640 - DNA, 201 bp, Homo sapiens
cctgggttcaagcgattctcctgtctcagcctcctgagtagctgggattgcaggcgtctgccactacgcccggctaatttttagtatttttagtagagacrgtttcactatgttggccaggctggtctcaaactcctggccccaggtgatctgcctgcctcggcctcccaaagtgctgggattacaggcgtgagccaccgc

SEQ ID NO: 540641 - DNA, 201 bp, Homo sapiens
aggcaggagaatcgcttgaacccgggaggcggaggttgtggtgagccaagattgcgccattgcactccagcctgggcaacaacagcgaaactctgtctcaaaaaaaaaaaaaatatatatatatatatatatatgaagctgatagttgaattatgttgattcagggacaagatagcattgcatagtaacttccagtaggat

SEQ ID NO: 540642 - DNA, 201 bp, Homo sapiens
tctgtgggtgaagaactcgggagtatcagactcttctggttctgagtctcatgaagcttttcacttctgagctgaaaggatgctctttgtgcttttcactrttagtggtatagtctttcccgaaaatctctagcatggtggcttcagggcagctggacttaggtggtattttggggctccaggagagcttggcagagttgg

SEQ ID NO: 540643 - DNA, 201 bp, Homo sapiens
gcttgaacccgggaggcggaggttgtggtgagccaagattgcgccattgcactccagcctgggcaacaacagcgaaactctgtctcaaaaaaaaaaaaaawatatatatatatatatatatgaagctgatagttgaattatgttgattcagggacaagatagcattgcatagtaacttccagtaggatcaaatattttgag

SEQ ID NO: 540644 - DNA, 201 bp, Homo sapiens
tcccagattgaggaaaaaaggaacatagtctctacctcttcctgagaggaaagtcagtcaacgtgtaagaggagcagtagaaacgcattagtccagccaaygtgaaagtggaccgtagatctaaaacattttgggtatgcagttcagccagcccttactgaggcagttctgccaatcaggattcaagttttatttcctaag

SEQ ID NO: 540645 - DNA, 201 bp, Homo sapiens
agttttatattaaaatgcatggtgtgtcttctcttactacagagtacagttgtgaatttggctccgcgaagtattatgcactgtgtggctttggtggggtmttaagttgtggtctgacacacactgctgtggttcccctggatttagtgaaatgccgtatgcaggtttgtattgagatgacaacattgaaagtatctctca

SEQ ID NO: 540646 - DNA, 201 bp, Homo sapiens
aacataatgagaaaagaaaatacaaaaattaaggggtgtggtgacacatgcctgtagtctcaactatttgggaggctgaggcaggaggattgcttgagccygagaggttgaggctacagtgagccatgtttacgccattgcagtccagcctgggcgacagagtgaaaccctgtctcaaaaaaaaagtaacatttctatatg

SEQ ID NO: 540647 - DNA, 201 bp, Homo sapiens
aatattcatgttgttcacatagttacgtgttttgttaatgaggttatgagaccacatatatattccatatcatcgtgtgttactttataaaatgtctgaarcttagttgttttctagaactgtcacttcaattgaaaaccaacacaacagcaattcacatcccttccttgtgttttggattttaggagaatacttatctct

SEQ ID NO: 540648 - DNA, 201 bp, Homo sapiens
gctacgggctcggcgctcttctccaccaatgggcgacgcgtacttgcagtggcgcgctgtgtgcgtcacgccgacgacgcgcgaagggcacacatcttagracccggaggacgtccggcctctgtgagccgcaacctttccaagggagtggttgtgtgatcgccatcttagggagtgagtgtggccgggccttctcctgtg

SEQ ID NO: 540649 - DNA, 201 bp, Homo sapiens
gaccacatatatattccatatcatcgtgtgttactttataaaatgtctgaagcttagttgttttctagaactgtcacttcaattgaaaaccaacacaacarcaattcacatcccttccttgtgttttggattttaggagaatacttatctctggcgcacatcactatatttggctgcctctgccagtgctgaattctttgc

SEQ ID NO: 540650 - DNA, 201 bp, Homo sapiens
tcgttcagtttaaaagttaaagctaacattatttgtgtattaaatgtatttgactgcaggaatttgtgcgtatccgtttttatgttacaggagttcttaastggggatagtattggttagtggctgggataaactttgaagttgtttgcaagccttttacatgtcgagtgatctttctgagtttcgtttgtactctgaagt

SEQ ID NO: 540651 - DNA, 201 bp, Homo sapiens
ccactacgcccggctaatttttagtatttttagtagagacggtttcactatgttggccaggctggtctcaaactcctggccccaggtgatctgcctgcctyggcctcccaaagtgctgggattacaggcgtgagccaccgcgcctggcctgatttttgtaaagatggggtttcaccatgttgatgagtctggtctcaaact

SEQ ID NO: 540652 - DNA, 201 bp, Homo sapiens
tggcatgataatagctcactgcaacctcctcctcctgggttcaagtgattcttctgccgcagcctcccaagtagctgggacaggcatgcaccgccatgccsggctgatttttgtttttgttttttgtttttttttgagatggagttttacccttgttgcccaggctggagtgcagtggtgcaatcttggctcactgcagcc

SEQ ID NO: 540653 - DNA, 201 bp, Homo sapiens
agtccttatttacactatctgtcgttcagtttaaaagttaaagctaacattatttgtgtattaaatgtatttgactgcaggaatttgtgcgtatccgtttktatgttacaggagttcttaagtggggatagtattggttagtggctgggataaactttgaagttgtttgcaagccttttacatgtcgagtgatctttctga

SEQ ID NO: 540654 - DNA, 201 bp, Homo sapiens; identical to SEQ ID NO: 113038

SEQ ID NO: 540655 - DNA, 201 bp, Homo sapiens
agacaagctatgttgtggagcaagagtgccctaatgtgatcaaaaaatgataaaacgaaggaaagtttgtctctccccaaccccctagagaaaccattcayaaagatcctattttaccctgccctagaattcaacaaaaacccttaccttaaatttgtagcagtagctcttattctgagaacatcactgcacctcctagcc

SEQ ID NO: 540656 - DNA, 201 bp, Homo sapiens
gacagcccaaatatcctcggaagagcgctcccaggagaaacaagcttgaccactatgctatcatcaagtttccgctgaccactgagtctgccatgaagaakatagaagacaacaacacacttgtgttcattgtggatgttaaagccaacaagcaccagatcaaacaggctgtgaagaagctctatgacattgatgtggcca

SEQ ID NO: 540657 - DNA, 201 bp, Homo sapiens
tgccgattggtgtatttacaatccctgagctagacataaaggttctccaaggccccaccagcctcagaagcccagctggcttcacccagtggatcccgcascagggctgcaggtggagctgcctgccagtcccgcgccatgtgctcgcactcctcagcccttgggtggtcatgggactgggcgccctggagcagggggcgg

SEQ ID NO: 540658 - DNA, 201 bp, Homo sapiens
gctttaaaggccaagaaggcagtgttgaaaggtgtccacagccacaaaaagaagatccacacgtcacccaccttccggcggccgaagacactgcgactccrgagacagcccaaatatcctcggaagagcgctcccaggagaaacaagcttgaccactatgctatcatcaagtttccgctgaccactgagtctgccatgaag

SEQ ID NO: 540659 - DNA, 201 bp, Homo sapiens
ccagatcaaacaggctgtgaagaagctctatgacattgatgtggccaaggtcaacaccctgattcggcctgatggagagaagaaggtatatgttcgactgrctcctgattacgatgctttggatgttgccaacaaaattgggattatctaaactgagtgcagctgcctaattctgaatatatatatatatatcttttcacc

SEQ ID NO: 540660 - DNA, 201 bp, Homo sapiens
aagagatatatgggagctgagtgaacaaggaaaaagggatgaactcatattgtttccggaaccaaactgggtctggctgcgttttcttgaggcccgataargagaagcagacaaactaggaaagaaaggaatttattactgtaaccagacacagggagaaggccagagataattcaaacagaccaactcaaagagttacaa

SEQ ID NO: 540661 - DNA, 201 bp, Homo sapiens; identical to SEQ ID NO: 113017

SEQ ID NO: 540662 - DNA, 201 bp, Homo sapiens
aactgtgtccccactgtaccaaatccttatttatttaaaaaaatttgttttggacccttttcacaagatggtgccgaaagtgaagaaggaagctcctgccyctcctaaagccgaagccaaagcgaaggctttaaaggccaagaaggcagtgttgaaaggtgtccacagccacaaaaagaagatccacacgtcacccacctt

SEQ ID NO: 540663 - DNA, 201 bp, Homo sapiens
actcacctatgttgtggatcaactgtgtccccactgtaccaaatccttatttatttaaaaaaatttgttttggacccttttcacaagatggtgccgaaagygaagaaggaagctcctgcccctcctaaagccgaagccaaagcgaaggctttaaaggccaagaaggcagtgttgaaaggtgtccacagccacaaaaagaag

SEQ ID NO: 540664 - DNA, 201 bp, Homo sapiens
aaacagaactactcacctatgttgtggatcaactgtgtccccactgtaccaaatccttatttatttaaaaaaatttgttttggacccttttcacaagatgrtgccgaaagtgaagaaggaagctcctgcccctcctaaagccgaagccaaagcgaaggctttaaaggccaagaaggcagtgttgaaaggtgtccacagcca

SEQ ID NO: 540665 - DNA, 201 bp, Homo sapiens
gaggccacacacagacactgacatgacagggcttgggcaagactcctgttctacttatccttttgaaatattcaccctgccactccaccatgtgtgatcaytccagagatctttgtgactagagttagtgtcctaggaaaaccagaactcagaacttgcctccatggttgagggtaacaagaagctgtacaagaacccctt

SEQ ID NO: 540666 - DNA, 201 bp, Homo sapiens
aatgctgtctaagtctgattaaaagggtcctagtaccttcaaggcctgtctactgtggtactggagtgactatttctttttctttctttcttttcttttctttttttttttgagacggagtctcactctgtcgcccaggctggagtgcagtggcacaatctcggctcactgcaacctctgcctcctgcgttctagtgattc

SEQ ID NO: 540667 - DNA, 201 bp, Homo sapiens
aatatcctcggaagagcgctcccaggagaaacaagcttgaccactatgctatcatcaagtttccgctgaccactgagtctgccatgaagaagatagaagayaacaacacacttgtgttcattgtggatgttaaagccaacaagcaccagatcaaacaggctgtgaagaagctctatgacattgatgtggccaaggtcaaca

SEQ ID NO: 540668 - DNA, 201 bp, Homo sapiens
ctatcttatctcctttacagcttgacccagagagctgccttagactctccaatgaatctattcaaacagctgcctctgttaccttgacttgtctcagattytgttacccgagatgggtcctggcactaggaatgtaagactgtctctattattttgacttgttccaggttagggagaagcctgtgcaaggctcctactgac

SEQ ID NO: 540669 - DNA, 201 bp, Homo sapiens
gtaaatatgaagacttttaaaaataacttttcatggctgggtgcagttgtgtctggaattggtgggttcttggtctcactgacttcaagaatgaagccgckgaccctcgtggtgagtgctacagctcttaagggggcgcgtctggagtttgtcccttctgatgttcagctgtgtttggagtttcttccttctggtgggttc

SEQ ID NO: 540670 - DNA, 201 bp, Homo sapiens
gccagcagtagcaagatttattgcaaagagcaaaagaacaaagcttccacagtgtggaaggggacctgagtgggttgccactgctggctcctgcagcctgyttttattctcttatctggccccacccacatcctgctgattggtagagcccagtggtctgttttgacagggcgctgattggtgtgtttacaatccctgaga

SEQ ID NO: 540671 - DNA, 201 bp, Homo sapiens
gagtaaggacacaaaggttctccaaggccccaccagagcagctagatacaaagtgtccatggtgcattcacaaaccctgagctagacacagggtgctgacyggtgtgtttacaaaccttgagctagatacagagtgccgattggtgtatttacaatccctgagctagacataaaggttccccacagccccaccagagcagc

SEQ ID NO: 540672 - DNA, 201 bp, Homo sapiens
ctagtgagtggcagagcctggacttgaactcagttgtgctgaagccagaatgtgttccttcctgagcattcaaggacagggaaggtgaaactccagctagygggcagcccgtgtgcttgttctagggagactgcaggccgattcctgggagctgggtcttcatggtgacacagtaagaacaactcacctattggctgggcg

SEQ ID NO: 540673 - DNA, 201 bp, Homo sapiens
tatgttaaacatttttatagcctgtgattatcaggtgttcacccgagtgagaaacttaaattaaaatatgggtattttgtcaacaactcagaagatttagytgtttttattaagctaacaatattaaatgtcttatttattaaaattgcacaaacaaagatcatttggttttgaccagatttatagtcttataacctttgt

SEQ ID NO: 540674 - DNA, 201 bp, Homo sapiens
tttgtcaacaactcagaagatttagctgtttttattaagctaacaatattaaatgtcttatttattaaaattgcacaaacaaagatcatttggttttgacsagatttatagtcttataacctttgtgtcaaacccaggcaccttaaaatatctagtggagagaaatacaaaactttctgaccagtaaactcagacaaaaat

SEQ ID NO: 540675 - DNA, 201 bp, Homo sapiens
attaaatgtcttatttattaaaattgcacaaacaaagatcatttggttttgaccagatttatagtcttataacctttgtgtcaaacccaggcaccttaaartatctagtggagagaaatacaaaactttctgaccagtaaactcagacaaaaatgtacgttgacaattttaaagacatttaaatgtttatcttatcaataa

SEQ ID NO: 540676 - DNA, 201 bp, Homo sapiens
gcgttctagtgattctcctgcctctgcctcctgggtagctgggattacaggcgtgtgccaccatgcctggctaattttgtatttttagtagagatgggggyttcaccatgttggccaggctggttttaaactcctgacctccggtgatctgcctgcctcagcctcccaaaatgctgggattacaggtgtgagtcatcgcgc

SEQ ID NO: 540677 - DNA, 201 bp, Homo sapiens
aaaattagctgggcatggtggcacatgcctgcaatcccaacaactcgagaggctgaggcaggaaggttgcttgaacctaggagatggaggttgcagtaagrtgagactgcgccactgcactccagcctgggtgacaaagaccctgtctcaaaaaaaaaaagaaaagaaaagaaaaactttatgatttataaatataaagca

SEQ ID NO: 540678 - DNA, 201 bp, Homo sapiens
gaaagtctctcatttaatttttccggttctaagactagcaacttttttttttctttcctgaggggtgtctcgctctatcgcccaggctggagtgcagtggygctacctcggcttactgcaagctccgcctcctgggttcaggtttacgccattctcctgcctcagcctccggagcagctgggactacaggcacctgccacc

SEQ ID NO: 540679 - DNA, 201 bp, Homo sapiens
acacacataaagactttatagtatttattttagaattttagtcatgagagagtagcataaacttactagtttataaaagacagttggatccatattacagmtgacaaaattggaacttgtttacatggcttaaactttgtctcaacagataacttaatgaaggctgtggatcaaaattttgggtaaagcaattcttatggc

SEQ ID NO: 540680 - DNA, 201 bp, Homo sapiens
ttactagtttataaaagacagttggatccatattacagctgacaaaattggaacttgtttacatggcttaaactttgtctcaacagataacttaatgaagrctgtggatcaaaattttgggtaaagcaattcttatggcagtttgattttaaaaacatcttctgccccttttttctttagttctaaatgatcttagggtta

SEQ ID NO: 540681 - DNA, 201 bp, Homo sapiens
atttattaaagacttctttaagtcatataaacttggaacatacttgggtttagtaatttatgagcactcatctatttataagtcagttttgtagcatataratacaacatataacaatatatgtacatatatttaaacacatctaaacaaacatatacacacacataaagactttatagtatttattttagaattttagtc

SEQ ID NO: 540682 - DNA, 201 bp, Homo sapiens
tgacaattttaaagacatttaaatgtttatcttatcaataatttgaacatcaacttatttattaaagacttctttaagtcatataaacttggaacatactkgggtttagtaatttatgagcactcatctatttataagtcagttttgtagcatatagatacaacatataacaatatatgtacatatatttaaacacatcta

SEQ ID NO: 540683 - DNA, 201 bp, Homo sapiens
tacgttgacaattttaaagacatttaaatgtttatcttatcaataatttgaacatcaacttatttattaaagacttctttaagtcatataaacttggaacwtacttgggtttagtaatttatgagcactcatctatttataagtcagttttgtagcatatagatacaacatataacaatatatgtacatatatttaaacac

SEQ ID NO: 540684 - DNA, 201 bp, Homo sapiens
aacctgggaggcggagcttgcagtaaacctagatcgcaccactacgctccagcctgggtgacagagcgagactctgtctcaaaaacaaaaacaaaaaaacrgcattcttagttattttattcttttgtggctattgtgaatggggttgcattcttgatctggctctcagcttggacataattttttcttaattagaaatga

SEQ ID NO: 540685 - DNA, 201 bp, Homo sapiens
gcccacgagaggacacagggggaagatggccatctgcaagccaaggagaaggacttcagaaggaaccaactttcctgacactttcatttcaaacttactgyctctagaatcataagaaaataagtttgtgctgtttaagccactcagtctgggttactttgttatggtagacctcgcaaactgacagatactaagcccttg

SEQ ID NO: 540686 - DNA, 201 bp, Homo sapiens
caagtgaaaaccaatagctgaaaaattgtaagatgatgccataattgtccaaatgttgctcagttcaccaacaggcttactgagtaggttctttagaaagraattctgccaggtagtttgtaataagaagtatctgctatggatcatgcctttacaaagtttacattccagcagggaggaaagcatgtacacaattggcac

SEQ ID NO: 540687 - DNA, 201 bp, Homo sapiens
aagccccgtctctactaaaaatacaaaaaaaattagccgggcttggtggtgagtgcctgtaattccagggaggctgaggcagaagaatcacttgaacccgygaggtggaggttgcagcgaaccaagattgtaccattgcactctagcctgggcgacaggagtgaaactctgccttagaaaaaaaaaaatgaagatagtaat

SEQ ID NO: 540688 - DNA, 201 bp, Homo sapiens
attagccgggcttggtggtgagtgcctgtaattccagggaggctgaggcagaagaatcacttgaacccgcgaggtggaggttgcagcgaaccaagattgtrccattgcactctagcctgggcgacaggagtgaaactctgccttagaaaaaaaaaaatgaagatagtaatacgccttatttcatgaagttgttatgagaat

SEQ ID NO: 540689 - DNA, 201 bp, Homo sapiens
ccctcaacagcccatggccacagctattgcctgggactgaccatccctactaggaatgtgtcacgcccctaaatgagactgtgagttttctctgcttaaaracaatcagaaaccaaaagctattatagctttctccttccagagatccaaggggcctcaaaaaatcttaaaatagggaaagctttgaaaggcagtataggc

SEQ ID NO: 540690 - DNA, 201 bp, Homo sapiens
cttcaatttgaggactctgcttccaggtaatatcatgaacggggttgataaaaaaaaaattcctggaagtccacattatgttggtgtatgctctggaatgkttttatcatttatttatagtttagagtgtttgaattccaacccccagactaagactgtcattcaagggcccatgtatacttaaaagttactcagtaaatg

SEQ ID NO: 540691 - DNA, 201 bp, Homo sapiens
aaatgtcaggtctcagattttctgatatgcaagaaactctacagagtggagcagcagccatgtggtcttgtagcctatggtcagagcacagaaaatacctscagcatagctggagactggccagaggccctgacagctgcacactgtgtcctgtaacatatttgactttagggcaccttgcatttctgcatcacactgtgc

SEQ ID NO: 540692 - DNA, 201 bp, Homo sapiens
tatgttagtcatttctctctggctgtgctcgggctgtgaaactgcaagatgcacctgtgtgcgtataggatggtggacgtgtgcataggtggatatgtgtsgtgggaggacacaggaggtactgctaaggcactctccaaggacacatgctctcaatgacaacccagaatggttttcttgccactcaaagatgctactcac

SEQ ID NO: 540693 - DNA, 201 bp, Homo sapiens
caataccgtgttcatagagtgaaggtatgaataactgactctaattaatccttaaattgctgtgggagacaggctgagaatatatgactaaacttgttttsaaataaggaaaatgaggtttgggaaaatcaaatgacttgtctaaggtcatattgctttgaatatgagctcatcgtaactaaaccagtggtttaaaaaaaa

SEQ ID NO: 540694 - DNA, 201 bp, Homo sapiens
ttacaggtgtgagccactgagcctggctggagttttctcttatcatagaagcattctgtgtttctatgagttttaggcccattcgatccacataaaaaccrcagcaggtattaccacctccctcttgacaaacgggggcatggaggcacaggcagttcagtgattcttttctgaagatcacgtggtgactgtgggacgtgg

SEQ ID NO: 540695 - DNA, 201 bp, Homo sapiens
atttaattatcacaacaactttttgaggtagctatcattattaagccaagtttgcaaatgaggaaaggagacagggagagtttcagcacttaccccaattrcagcacaagctgatgccagagggagatttgaacccaggctggctcactccagctaacacccaaccatcacatgcagggccaccctgctctgctaacacat

SEQ ID NO: 540696 - DNA, 201 bp, Homo sapiens
ccaaaagagcctctgccctaggggaacactttacgtatttggaagaaagtgggtttctaaaggttcagagaatatgctgacctcacatcctgaaaaagctkggcaactgaagagggaatgcaaccctcatggcttgatgttgcttaggtcaacaagcaaatatttcctggacacctaccataggctcagacctggaccctt

SEQ ID NO: 540697 - DNA, 201 bp, Homo sapiens
ggtttcaccatgttggccaggctggtctcaaactcctgacctcaggcgatccacctgcctcggcctcccaaagtgttgagattatagacatgagccaccaygctcagctgaccaggactagtaatagcaaatactgggttggtgcaaaagtaattgtggtttttgccattgaaagtaatggcaaaatcacaattacttttg

SEQ ID NO: 540698 - DNA, 201 bp, Homo sapiens
aggaggtcaaggatgcagtgagctatgatgataccactgtactcagcctgggtgacagagcaagactctgtctcttaaacaaaacaaaagacgtgtctacmactccagggaagtgaaaaagcagataagtaaattcctgctaagagtgatcatgaccctctcctattcaacaaccttcagtggctctccgccacttaagaa

SEQ ID NO: 540699 - DNA, 201 bp, Homo sapiens
actgctcgctctttgggtccctaccatctttaagagctgtaacactcactgtgaaggtccgtggctccattcttgaagtcagcaagaccacaaacctatcrgaaggaaccaactccagacacaggctcaccgcaacctccacctcctaggttcaagcgattctcctgcctcagccgcctaagtagctgggattacaggcat

SEQ ID NO: 540700 - DNA, 201 bp, Homo sapiens
aattttagtatgattccttctggttggaaacatcttcctaccagatttaactacaaaactgacctctactctggaatgttcaactggccaagaaaagtgtyacatcaacaccaatcactttttttttttctattccatcacaagattggggatatcattgtgttcctttcctcttatgtccactgaaccctctgctgtatt

SEQ ID NO: 540701 - DNA, 201 bp, Homo sapiens
cccagctgcaacacaggcattaattacgtgtgctctgggagaggggagtcttctattttttgattcccctccccagaatcagtgctatttgaaaatcccaygtaggtaagaggacagggaggcatacaaagcctagccatgttatttttacaagtcaaatatgctactgcgtttatctaatacttagataaaaattatttt

SEQ ID NO: 540702 - DNA, 201 bp, Homo sapiens
aatagttatttaccaaagaagattctttttgtaatacaatcaatcacttcctcctgtgtttagggttcaaatctagaagtccatatgtcagtctagcttasagcaaaatgtagctttcttcaccttggactagaacaacctatgagagaaagatggtgcccaatgggccagcacacagctgctttctaaattgacagccct

SEQ ID NO: 540703 - DNA, 201 bp, Homo sapiens
attattcattctttaaactgtaaaaactaaaatgttctctaagcattatcaagtcctaaacaaaaatataatttcacaaagcaaagacattcattttatckttcaataaattattttaagagcagaaagcactgactttagctttactggtatatttatttgttatctctgttcttaaaaatggaatatttccagggacaa

SEQ ID NO: 540704 - DNA, 201 bp, Homo sapiens
gaatgggaagagggcggccgggaaagggaccaccccccaaccccagccgccgcctcccccctgcgccacccggagggaggaggacatggctctccgcactygcgaccggaccagcagccgggggagcggggcgccgccgccgctctccccgcccgcgccccccgcccgggcgcgccccctagcccggcgggcgcccaccca

SEQ ID NO: 540705 - DNA, 201 bp, Homo sapiens
aggatacacagagaaggtgccatctgtgagccttagaagaagccttagaataggccgggtgtggtggctcaagcctgtaatcccagcactttgggaggccraggcgggcagatcacctgacatcaggagttcgagaccagcctggccaatatggtgaaacctcatctctactaaaaatacaccgggcgtggtggcacgcac

SEQ ID NO: 540706 - DNA, 201 bp, Homo sapiens
aacctcatctctactaaaaatacaccgggcgtggtggcacgcacctgtagtcccagctactcaggaggctgagacagtagaattgcttgaacctgggaggyggaggttgcagtgagccgagatcatgccactgcactccagcctgggcgactgagcgagactctgcaaatatgtactttatatgattaatctatttgtaac

SEQ ID NO: 540707 - DNA, 201 bp, Homo sapiens
tgcaaaagaggaccagtctctgcgcaggagttttggtggtaaacatgtgagggtatccagagagtgatggaaatggtggataatctatttattttgaaatrccaaatggtactaatataaaaacttgttcaacctactttggcaacattaaatatgaagggaatgtaccttcttcccctcctccaaaagtatttacttcaa

SEQ ID NO: 540708 - DNA, 201 bp, Homo sapiens
gctcatgctgagaatatcatcatgaaatcaacgaggatatgcaaatctctctgttccatagctcatttgcatggttttcattggttttgtagaacctctayactaaatgtcaatttccttttctttcctaaagcttattagctgtgtgtgatgtttacagcttgaagaccaaacagatttaatagttaaaacatttaaact

SEQ ID NO: 540709 - DNA, 201 bp, Homo sapiens
caaggagattttagaggtgggcaaaaaacagcaacctgcccctacaagcaaagagagatgtccctcctggttaagcacccctttgtcacgtgcagcccagrggaagttgtgataaagcatcatttgaaagttttaatgccgttggggctacaagcacattgtcttgatggaattcagctgtacagctccttactgtcaaat

SEQ ID NO: 540710 - DNA, 201 bp, Homo sapiens
cctgtttggaactggataccattattctaagtgaagtaactcaggaatggaaaactgaacaccgtaatgatggcagtggctgctgccatcaagctggctgygcggctggtgctgcatactccatggagctggtggcagccctgttcattccgagttgggatgggagctccgcgtgccactgcagccacctgaactgcagct

SEQ ID NO: 540711 - DNA, 201 bp, Homo sapiens; identical to SEQ ID NO: 365937

SEQ ID NO: 540712 - DNA, 201 bp, Homo sapiens
agaaagggtgggaggggggtgagggataaatgactacaaaatgggtacagtgtatagtgctcgggtgatggctgcaccgaaaatctcagaaatcaccaccraagaacttattcatgtaaccaaacaccacctgttcccccaaaacctatggacgtaaaaaataaaaataaaaaagacagaagaaaattaagacatcaatta

SEQ ID NO: 540713 - DNA, 201 bp, Homo sapiens
ctgtgtggtgtgttggaggaacaccatcgaggtggtgttcctggcactgagtaaagggggtggggagcaggaaatgaagtcagagggtgggggtgacaagytctttgagccacaataaagtctgaggtccttactctgagtgagctgagaggcactggagggttttgatcagaggaggtacagggtctggactacattttc

SEQ ID NO: 540714 - DNA, 201 bp, Homo sapiens
cgaaaatctcagaaatcaccaccgaagaacttattcatgtaaccaaacaccacctgttcccccaaaacctatggacgtaaaaaataaaaataaaaaagacrgaagaaaattaagacatcaattatattaaatgcagcagagaaacagaaagactaagaatggccattggattagaccatgggttctcaatatctgctgaat

SEQ ID NO: 540715 - DNA, 201 bp, Homo sapiens
ttccaccatgattgtgaagcctccccagccacgtggaactgtgagtccattaaacctctttttctttataaattacctaggcttgggtatgtctttattarcagcatgaaaacagactaatacagggcatcacacccaaattagacctgtttctcctctacttccatatgaactctgtaatgcttttcctattgctgataa

SEQ ID NO: 540716 - DNA, 201 bp, Homo sapiens
aataacgttgagtcatggtttctcagctgaaagaaaatgatatcgttttttcctatattcttggtaagaatcagaagatacctccaagccagcccaaccayaaatcctatgaccacatatatatgacactgatgactaccttcaggtgacaacaggtttccccatgctgccaaaataaagtagaaggctgggtaatggttt

SEQ ID NO: 540717 - DNA, 201 bp, Homo sapiens
tattcagtaaatacttaaaacagtaatatctactacataagctttattgttttcaaagtgaatagcttgcagtcaacatcactacattatatatacggttytaaaaatagtatttcttaaacacctagaacagccaaaggttggcaaactttttctataaaggaccagggagcaaatgctttaggctgtgtgggccagaca

SEQ ID NO: 540718 - DNA, 201 bp, Homo sapiens
ggtccttcgtctcttcctcctttctgctttctggaatggtaatgttaaaggctagagctatgcagccatcttgtatgtgagacataggctgaggcgggtgsatcacttgaggtcaggagttcgagaccagcttggccaacatgtgaaaccctgtctctactaaaaaatacataaaaattagccagacatgttggtgcgcac

SEQ ID NO: 540719 - DNA, 201 bp, Homo sapiens
tggccatatgaaaacatgttgtgtgattatctggtgaaattgggggactcctcatccagcgaactaggaggttctgtgtgttccttcacctgaattgctgrgtctgacgtgtggatggcctttgttcccttgctgggtgagccgggtcagccctgctgtgtcttgtcataactgtagacattccgtaactggtgttcatgt

SEQ ID NO: 540720 - DNA, 201 bp, Homo sapiens
cgggtcagccctgctgtgtcttgtcataactgtagacattccgtaactggtgttcatgtaactgctggagcttgcttcaaaccaaggcagaaacccgtgaygatggagaccattcttgccttcccctcacattaaccagttcgtgactatggagaaacagggcaagtagctcttgatctgactggacggatggctttggag

SEQ ID NO: 540721 - DNA, 201 bp, Homo sapiens
tctgagcactgtcttctcacgctcacactcctcctgttcctggcccccaccctcccgctctcagcagttacccccattatcaccatcatcacttcgctccygcccggtccctctcctgtcatcacccccgctccggagtgaaagaaaggagacaccttaccacggctcttcccaccagcagcaccaggaagctgctactgc

SEQ ID NO: 540722 - DNA, 201 bp, Homo sapiens
gtttaaaaattccagttgacctttccctagcccccagtatacttttgggctacttcctccctaagatgagctatgtgcacacatgtggcacaattttaatwctatctaagcaaaaccacaaaccaataaaagcatcatccggtgcttctcaaagccaaaggaaatgattttggagcaacacatcactgattacattccatt

SEQ ID NO: 540723 - DNA, 201 bp, Homo sapiens
gaagctgctactgccatttctatttaaatggatagggatgttgggcagagagacactttcggagcctgtaagtttaagtgttcagatcattctttgcagartataatgtgaacatcttgctcttgcttgtactgtagaaggttctctagcatatagatgtgatattcagtttatgtataggtttacatttcagcactaaat

SEQ ID NO: 540724 - DNA, 201 bp, Homo sapiens
catgaaatttggtagatatctgttcttaaggaattaaaacatataaatataaaaataaggaaatactcctctgatattggctgaagaaaatcattttcaargagactcttaccaaagctctattttcaacattaaagcttaaaatgtaaggggcagagagtattttgagaatggttttcaaggaaagtaattaaaatcaac

SEQ ID NO: 540725 - DNA, 201 bp, Homo sapiens
caaaatgcatttggaggatcactaaatctaacagtgttcactgctgtagtgttatgagagtgtttcactttcaggaaatttcaaaagggaaaggtgggaarcaatgtgtgtcctacatggaaatctcacatgtggttcattgcgtcttttttcttacacagctgccattatataattcttggccattgttttttatttaat

SEQ ID NO: 540726 - DNA, 201 bp, Homo sapiens
gatgttgggcagagagacactttcggagcctgtaagtttaagtgttcagatcattctttgcagagtataatgtgaacatcttgctcttgcttgtactgtaraaggttctctagcatatagatgtgatattcagtttatgtataggtttacatttcagcactaaatctcccacccactcatgtcgcaaacctttatggagtg

SEQ ID NO: 540727 - DNA, 201 bp, Homo sapiens
cgagagttacttcgtaagatgacggttactttaccaccttcaaacatggcattaactaatgacttagattggactgagggttaataatttgaagactcccmatgaccttctttcctagtcattcaattcttaagcaaggtggataccaaaagtgtccaaaaatgccctagcgtacatgaagtgccaggggccaaaaccacc

SEQ ID NO: 540728 - DNA, 201 bp, Homo sapiens
tgtcttgagtaggacaaagtatatttggccactccccactttgtggtcaccctgctctgcctgatgcatgggcaccttctgcccatgacaactgtcattcrccctgaatagtctatgccatcacacctccttatggctactaacataaaaggtaagtgactaataaatggtatcatgaattaatatgaaaccttttataca

SEQ ID NO: 540729 - DNA, 201 bp, Homo sapiens
aaaaaaaaattacaggactatgcagtcaaaaaaagtggatgagacaaatgagaacaaaataaaactgttcactgtataataattagataaatagaaaaacycaagtaatacaaatccacagaagtcccactaataatcactattaacagtctggttatatgaccccagactctctcctatgcccaagtatacagagtatat

SEQ ID NO: 540730 - DNA, 201 bp, Homo sapiens
cccatggtcctgtgacttctcttactctttcaaatgcaaaatgtcacagctgaagggaaggaacctccaaggatgatctgggctactgctttcttcttcayaggggaggaaactgagattccagagaggttggtaactttcccaaggttacaaaattagcagtgcagccggaactgaaacctacattgtgtgaccactctc

SEQ ID NO: 540731 - DNA, 201 bp, Homo sapiens
ccgcacccagccagttctagatattttgaggtggtaagaataaggtatggttcccctactgctcaaggatacttgtttctcatgtgccagggacccaggcrttgagcccaatagaaagccatagaaataagcctggatgtgatgctattcatgaatgtcacagtctccttaaaccccattttattaaactgttcagggatc

SEQ ID NO: 540732 - DNA, 201 bp, Homo sapiens
aggatggcccaccagcctgcaggaagattcccagactcagttcctcagaatctgaagggcactcctccaagtcccacagagcagcccacaagtgtttaacrtgacacttactatgcagtcagactatcctaggctaggtggggctgcaaagacaaaggttatgctccaattgaaaaaaactgccagaaagccatgcaaaca

SEQ ID NO: 540733 - DNA, 201 bp, Homo sapiens
gggaaagaaacttcctttctgtgagctggacaaggtaatagcaacgatgatgacctcgcacgaggcaaagcatgtgaacggcaaaaaagaaatcgcagaaraatctacaagggaaaccatcctctccaaaggacccagtgatgaggagagtcaaagaataggaaaaataccttggttccaagcaggagaaaactagagagt

SEQ ID NO: 540734 - DNA, 201 bp, Homo sapiens
gacatttatcttgtaagtaacaaagagatgggaagatttcctaagttctcatgctatcccacctcctgcttgtgttactcactattcaaaatttaagaatragaagtcatctgggagaaaggggatgggaccgagcatccctgaaacacggctcagggcttggttccctcctatgcccatcacctgctccctcactcaacc

SEQ ID NO: 540735 - DNA, 201 bp, Homo sapiens
agaatttcagtactcaaagcagcagaacatcagtcccaacttacattttccacttccattgtcattcttattcctatatgggcttatttctcacatatccrcctttgatttttcaagatcgaacctttgagcaggtgagggcctggctgcctaacatattacatcatcacgcatatgccggactcctgcctcactcagaag

SEQ ID NO: 540736 - DNA, 201 bp, Homo sapiens
agcttcctgagctccactgtcctcatctgtaaaaatgggataccagcggccttgcttcctttccagaacatcacaagaaacaagcaatggaagacaaggtrtgtgaaagggctttggaagctaaaaagtgctatatataccatgtacatgtgaattatcgtcatcaactttcagcctctcaaagccaaagaggtcaatctc

SEQ ID NO: 540737 - DNA, 201 bp, Homo sapiens
cactggcctggctttgaaagagaggatcagctgggatctctgaatagatgaggagtcagggtgaagacagaaacaaagaagtgtttcaggtgcaaaggaamtgtgggtgctccatgactctctgaagggagtccaagggctggaccattcagaaccttcaggaagactcagaacagctccagcctgcctgagctggaagca

SEQ ID NO: 540738 - DNA, 201 bp, Homo sapiens
ctgtgcaggtgatggggatcatgcaggattggtgcctggaaaggaatgcatggcactaagctattgggcatgcacagttaaactttcaagccatgaggtcyaggctggttagggggcaggaatacggagcctgaagaaagtggctatagtgaccaagagtgggggatgagtcagggctcacaataaggagacaactgagtt

SEQ ID NO: 540739 - DNA, 201 bp, Homo sapiens
agtaagttagtattatgctcctgagaagaggaaattaacatttagtttactgggtaagttttgtcacttcttttttttttttcttttttttttttttttargagacggagtctcgctctgtcgccaggctggagtgcagtggtgtgatcttggctcactgcaagctccgccgcctcctggttctagcaactctcctgcctc

SEQ ID NO: 540740 - DNA, 201 bp, Homo sapiens
gctactcagaagacggtggaaggaatgctgaagtaagcttctgtaagagctcactggcctggctttgaaagagaggatcagctgggatctctgaatagatkaggagtcagggtgaagacagaaacaaagaagtgtttcaggtgcaaaggaaatgtgggtgctccatgactctctgaagggagtccaagggctggaccattc

SEQ ID NO: 540741 - DNA, 201 bp, Homo sapiens
ggttctatgcagcaaactcaatgttaccttctaagatgtgagagatggcacagaggtgtgtctgtttttccctggctacactgagccactggcagtaggcytcccaaacacttcccatctgcttcttgaaccatttcatacatatcacccaacatcccattaaagacagggtcctcggccaggcgcggtggctcacacttg

SEQ ID NO: 540742 - DNA, 201 bp, Homo sapiens
  misc_feature (1)...(201): n = A,T,C or G
taagtctccaagaaaaaaagttaaattatattcactatatagtagcactctacttaggaagggaggaaattttataatacattttacaatgatttctgccngaaaatgttgagttttctcccctttctaacaatgtcagcattaatgcatttaaataatattctgagtaaatatactatctggaagcagttatttcaggag

SEQ ID NO: 540743 - DNA, 201 bp, Homo sapiens
gtgccttctcgttttaagctagtgagctggaacccagccaggcagtgttaaacaggagcgagagactttccttcttcgtcaaggaagcttttgcagccccrttattttgtttttttatttttcagagactgaatctagctctgtcacccaggctgtgcaatggcacgatcatagctcactgcagcctctaactcctgggct

SEQ ID NO: 540744 - DNA, 201 bp, Homo sapiens
aataaaccttttgctaaagtggattaaaacatctcaacagctacggcacacatgcagtcattaaagactgttcagcatatagacagataatttccacagtrtatggtttaagaagttaaacagaaagttaacagagaaactgttcttgaagtatgagaatgattaagtggaaatgttaaattttcaaggcaaagtattttt

SEQ ID NO: 540745 - DNA, 201 bp, Homo sapiens
cttccatgaatggcagtttctggtacctttgcagactattccctaacatgccctttacacataaattcagccaactgaaatcagagcaatatttgagctayggccttttttccctctaaaatgctaccaaacactagatctcttagttctttcatattttaaagtgcacagatgcctgatttcagattctgtgaaacagag

SEQ ID NO: 540746 - DNA, 201 bp, Homo sapiens
ctctctctctgtctctctctctcgtgtgtattttaattaaagacttaaactgctaagagacaaaactgaaaacatgtacgtaatccaattttgcataatgyctctgcggttttgtagttgattttccccatctgaccctgacttacatgtgatacacacacatttactggtttatggtaggaaaactgctctggctgggta

SEQ ID NO: 540747 - DNA, 201 bp, Homo sapiens
tctttttcttttttcatatatatatatattttattacactttaagttctagggtacatatgcacaatgtgcacgtttgttacatatgtatacatgtgccayagcagagcaaggagttccaaaacagaattaccggttttcttttttttcttattgagacaaagtctcactctgttgcccaggctggagtgcagtggtgcaa

SEQ ID NO: 540748 - DNA, 201 bp, Homo sapiens
gatactggggagggggcagagatgggaaaggggcagttataaattgctaagttattgtgtttatattcagcacatcttgcagccaagattctgtttctctytctctctctctctctctctctctcacacacacacacacacacacatacagacacacacacaatcagtgtaaagattctgacctatgcctggaaatacaat

SEQ ID NO: 540749 - DNA, 201 bp, Homo sapiens
gactgcttacctctcaaaaccacttttatgtgagagaaaaataaatgtctatttctttggcttgacttcttcttctttttttttttttttttttttttggkgatatggaactgaacctaatcctaactgttacaaatagaccttagaggtcataatagacttcattttacagattaggaaactaatgattaaagatcaact

SEQ ID NO: 540750 - DNA, 201 bp, Homo sapiens
tatcttggtttgtacaacagaagaagaaattattttaaaatatatggaatataataaaatagaaatttggccaattaattaatattaggcagtgaaacaayaagtggtttttttgtttgtttgtttttggtttttttgagacagggtctcactctgtcgcccagactggagtgaaatggtgcgatctcggctcactgcaac

SEQ ID NO: 540751 - DNA, 201 bp, Homo sapiens
catgcagctaggagccaaacacaccagtatcaaaatcctagctctgctactctccatgaagccccataaaggtgatgtgagcctctgggcctcagatgccycatctgtacatagggcctttgccagacaagctctcaggtctcatctggtgctcatatcctgttattcttggtcatggaattcaagagacatcacagtcac

SEQ ID NO: 540752 - DNA, 201 bp, Homo sapiens
ttatttttatttttatttttatttttttcagtagagattgggtcttgctatggtacctaggctggtctcaaaatcctgggctcaagtgatcctcctgcctyagcctcccaaagtgctggaattacaggcatgagccaccatgcccagcccatacaggtgttttaatttggtttaatcccaaatgtctacagaggtcacagg

SEQ ID NO: 540753 - DNA, 201 bp, Homo sapiens
aaacacaagctcttaatactaccctttgaccactccctaggtgagatgaaatgttttggaaataagtgcacttagttcaccaacctaaatgaacacaattygaagccagatttaacctaggatgtctaaaaaaacaaacaaacaaacaaacaaaccacacacacagtcaagtttaccttctgggattctaactgagaatca

SEQ ID NO: 540754 - DNA, 201 bp, Homo sapiens
atcatctgggttagcagggttgaaaggacacctgtgagcatcgtgaggtttggatggcaagtgtgcccccttgatcagcagctcccacctctgtctgatayagagcgaagctggggcctgggatgaaagaagaaagccccagcacataaatattaggggaatgctatagaaggaggaattctgaaagaagagaaatacatc

SEQ ID NO: 540755 - DNA, 201 bp, Homo sapiens
cccaaggcactttggactaaatcctttctttgtacccacagcatatctgaaaggagaagcaatgctcacttggggtgtgtggggattgtattttgactagyctgtctacccacagaatttcatttaatctaggtggagttgttatcaatctgtttagtctttcacaaatttgaagggactgtagcttaaaccaacaatcac

SEQ ID NO: 540756 - DNA, 201 bp, Homo sapiens
ttgaccctaatgtctttaggtctatttaatgattttggtctgggcttctaaaattctcattcagtcatttgttcattcacacaaatacagtagtcagtttytgagaggtagcagagaaaaaaagctatggagtcaggctagctgtgagactgtgggccagccacttgacctcttcatgtccccagtttcctttcccacaaa

SEQ ID NO: 540757 - DNA, 201 bp, Homo sapiens
ccttcccgctttccttttcatttaaaatctacagcttttcaagacaatttccctttatttcaggagaatcgagaatacaaaaataaatgtcttaagcacaycatttacattatttttttctgacacttgaatagttgacaaactctgaaatcacttcttttaaacctaatgttgataccaaattctactttttggactcaa

SEQ ID NO: 540758 - DNA, 201 bp, Homo sapiens
gacttccaccttttccctgtaacacaatacattacaatctataaatagcttaggctgtctgtttaaatatgcacctcccccggaaaagatagaggcttccratcatcttgctatttgcaaggaatcttactcacaaatcaatctaacaggccacggtgatattatggggatgtaaaagggactgaaatgatcaagagcgtc

SEQ ID NO: 540759 - DNA, 201 bp, Homo sapiens
cggggagacagacaccaagaaaccatcacagctcactgggattagtgctccactgggggtagctgaatggtgctctaagagcagagaggaacaagactatstctgtacgcctgtgtgcacaggagcgggtggtgtgaggtggctgctgacaggaatgtggcacagagaagacaagatgtaagctgaatcctgaaagatgag

SEQ ID NO: 540760 - DNA, 201 bp, Homo sapiens
ctaaatgtttaaagtctctaggactagcaagaaaatatgcttgaaactataggaaatggggaacagaacattactgttgacttccaccttttccctgtaamacaatacattacaatctataaatagcttaggctgtctgtttaaatatgcacctcccccggaaaagatagaggcttccgatcatcttgctatttgcaagga

SEQ ID NO: 540761 - DNA, 201 bp, Homo sapiens
tcaatgcattatctcatttgatcatcacaatacccctgtgagacagatattataattatttctattttatagagatgcggaaaaaaccctcagattttgartgatttccctaaggtcacaaagctgataagttgcagaactgagattcaaaactagaatttctgatattgtatttcattttctcccactacattaatttta

SEQ ID NO: 540762 - DNA, 201 bp, Homo sapiens
taggattatcaaatgacacaagatagcagtcttctgctttaatgttgttattcaaggtttactcacaggcaatatttactataaaatcttgtggtttggcygggcacggtggctcatgcctgcaatcccagccctttgggaggccgaggagggtggatcacctgaggccaggagttcgagaccagcctagccaacatagtg

SEQ ID NO: 540763 - DNA, 201 bp, Homo sapiens
gctggtccttcaatcagggatgtcctcattcattcaagcattgctcttcctttaagattcagctcgatgtcacttcctttgtgacatgctcccatacataytgtattttccctgccgtgtaatgatctgtctccctttctagactatgagctccttaggggccccagcgaggtctctgtatttttcataacaaactgcaca

SEQ ID NO: 540764 - DNA, 201 bp, Homo sapiens
tctcttgactttatttatttatttatttatttatttatttatttatttagagacagggtctcactctgtcaccgaggctggagtgcagtggtgcaatcacrgctcaccgcagccttgactgccctggctgaaatatcctcccacctcagcctcctgagtagctgggactacaggtgcacaccaccacccctggctaatttt

SEQ ID NO: 540765 - DNA, 201 bp, Homo sapiens
actcagttaaggtgatgtctgccaggattcttcaccgtaaacttttatttttctccttgtaattactaaatgtttggggtagggatattttaaaattctaygaatttcctgtttctgcatatacttttgcccgctcattctaatccatctaatccacatctgcccatctaatgcatccatcggtgggactttctcgtggca

SEQ ID NO: 540766 - DNA, 201 bp, Homo sapiens
tcacacaagaatactatcttcaagaacaaaaacgccactggatatttgtatcatccttcaccacggccacagaatttgacggattacctcattaactcctygcaaccattgctatgttgagtttcattgtccctgtttgacaggtgagattaggtgatctgtccaaggccacatatctagtaagttgcatagacaggactc

SEQ ID NO: 540767 - DNA, 201 bp, Homo sapiens
tcttcaaaggaggtcctcaacatgccagcgggtacttccctgattttggtcaggatgcaatccaggtgtacatcactggcttgtgacatctgtaatctgcycagatcacagatgcgcagaaacaaggcatcagattccctctgcttagaacagaagccaggagaaggggctgaatacatgcatctttaagattcataccca

SEQ ID NO: 540768 - DNA, 201 bp, Homo sapiens
cctcactgactcctactcgcatgtattgctaggagccagctttcactcctgggactggtttgggcttccagaaagcatgccttgtaaagaacagggcctgygtgtcaaacagcctgtatacaacacacatagcttatatatgacaaccatgtgatttttgtcattttaacatttctgaactcaggacttattttatatatg

SEQ ID NO: 540769 - DNA, 201 bp, Homo sapiens
gacatcatttagccttagaaacaggaacggcgggaagggtgctcgcctcggccactcgcgggattccaccccgaggattacaggcagggtaaaaatggctwattgtgctcattggaaaagttcagccttctttctagactttcatcagctgcctctccttccataaactctttttagaacacgaggcctttgatttatttt

SEQ ID NO: 540770 - DNA, 201 bp, Homo sapiens
ggctgggcgcggtggctcacgcctgtaatcccagcactttgggaggtcgaggcaggcggatcatgaggtcaggagttcgagaccagtctagccaacatggygaaaccctgtctctactattacaaaaattagcctggcgtggtggcgggcgcctataattccagctactcgggagaatgagggaggagaatctcttgaacc

SEQ ID NO: 540771 - DNA, 201 bp, Homo sapiens
agggctgggctctgcacacagggcagtcaccaactatctattttttgatacattaggattcatcgccaccaagctcggcatgttcaatgttggcaagtggrtctgccttggctgcaaagggactgactctacaggctcatgtgccgcctgcatgagggcctcggctatttttaggtaccagctaatccattcaatgcataa

SEQ ID NO: 540772 - DNA, 201 bp, Homo sapiens
ccaggtacggtggtgtgcacttatagtcccagcaacttgggaggctgaggtggaagcatcacttgggcccagaagtttgaggatgcagtgagctatgatcrtgccagtgctctccagcctgggtgacaagagtgagactctctccctaaagaaaagaaaaagaattcccttggaaggttttgcttttttagaaataagatt

SEQ ID NO: 540773 - DNA, 201 bp, Homo sapiens
ttacaggtccctataatggctgttcttatgttccccactccctaccccgcaccatatcttctcttaaggaggaatttggcctaatctaagtttaatcattracctttctgacctcacaaggaatagcaagctaaataagcacagaacttgtcctccttagatggtgaggaaagagaattgtaaatgtttatgacttgctat

SEQ ID NO: 540774 - DNA, 201 bp, Homo sapiens
ttattcatttaacatctacacaccaggcacccagctagtctggggacaaaaacgggtaagacagcatcttttctgccccaaagggatgatggaatggaggmacgaggacattactttgacatggggcactcctttggccaatgaagtaaaggtcagtgagtgaacacacaaagaaatgattaacctgtcatagaaaaggtc

SEQ ID NO: 540775 - DNA, 201 bp, Homo sapiens
agtgaacacacaaagaaatgattaacctgtcatagaaaaggtcatgaatgtagtgccagctacaggatacttcactttgctctcatgagatttggtcagtraaggaattatccgtgtaaagagaaaatcaggagcaaccttgccagcctgtgaacaaaagactagccaatgccacttcttaccagcaaggtccaaacagtc

SEQ ID NO: 540776 - DNA, 201 bp, Homo sapiens
ggatgtggaggttgcagtgagccgagatcatgccattgcactccagcctgggaaacaagagcgaaactgtgtctcaaaaaaaaaaaaaaaaaagtgctacmcatgttagaaaccttttggtcacatctggtaacagccccagtggtgctaaggacatgaaagccattgccccaatcaaaaaacaaaggcaaagaacacagc

SEQ ID NO: 540777 - DNA, 201 bp, Homo sapiens
gtgtgaccatgagatatgagatggaacaaatggcacagatagcaaggaatgcaggtgtgtggtatctcttcatattcattcccacttcagttcagcctaayacttcattcaccaaatgagtgatcaccaactgcctactatgcatcagacatataaaacagaagatctaaaagacacagttcctgttctcaaggagctcca

SEQ ID NO: 540778 - DNA, 201 bp, Homo sapiens
ccacctgctgtatatcttgtgcctttcagccccacttagggcatctttagcaagaaatgtggtaaatgtggttgagacatgtggtcaatgaaactcctgcytactagcttagctactagctagcagtttgggctgctcaaaatgaatttcctggataattttcctaagccctcactgactcctactcgcatgtattgctag

SEQ ID NO: 540779 - DNA, 201 bp, Homo sapiens
tatctcttcatattcattcccacttcagttcagcctaacacttcattcaccaaatgagtgatcaccaactgcctactatgcatcagacatataaaacagamgatctaaaagacacagttcctgttctcaaggagctccattgatatggttggcatttgtgtccccacccaaatctcatgtcaaattgtaatccccagtgtt

SEQ ID NO: 540780 - DNA, 201 bp, Homo sapiens
acatccactacatgccaggtagtgtacaatacacaactaaatcttaacaacaacaacaatgaatttagtggatactttttaaaactcccaattgcataaaytcagccagagaggaaaaaagcaactaatctaagcaacttaccagtcagtggaggagccaagatgtgaatccaggttcctccgaccccaagtccatagatg

SEQ ID NO: 540781 - DNA, 201 bp, Homo sapiens
caaataaggaaaatgaggtttgggaaaatcaaatgacttgtctaaggtcatattgctttgaatatgagctcatcgtaactaaaccagtggtttaaaaaaawttttttttaaccacaggacctttctaagaaaactattttacatagcctcagaatatcacagagctgaaggagaagctgccccgctgccccggtcaataga

SEQ ID NO: 540782 - DNA, 201 bp, Homo sapiens
gggcaaatcacttaacctcactgttttcagatataaaatttacataacaaaagttgtgaggattaaagggttaatatagcacaaagcacttagagcagtaktataggtgtttgcttttattgaccaacatacaaagagctgactgttattcaatgattccaaaataattgttctttttatttttttaatcttttttttgtt

SEQ ID NO: 540783 - DNA, 201 bp, Homo sapiens
tcagaataatatttatgagatagactgaaatttaatagcaacacttcttaagtagatggactatcaagaaactcttaaaataacagaatgaaaaataaggyagtggctctgtatataagccccgtcagccagtacacgggaggtactcgatcaatgccaaatgaaggagtgacttcgtaagagggactaagaagcaattca

SEQ ID NO: 540784 - DNA, 201 bp, Homo sapiens
ctcagaataatatttatgagatagactgaaatttaatagcaacacttcttaagtagatggactatcaagaaactcttaaaataacagaatgaaaaataagrtagtggctctgtatataagccccgtcagccagtacacgggaggtactcgatcaatgccaaatgaaggagtgacttcgtaagagggactaagaagcaattc

SEQ ID NO: 540785 - DNA, 201 bp, Homo sapiens
ggctggtgggggggaccccggggtgatgagccccggagccctgctgaggctgctgctgctgctgctgctgctgctgctgctgctgctgctgctgatgctgmtgctgctgctgctgctgctgctgctgctgctgctgctgctcagccttgtgtcccggcgtctggctcagactgcccatgttggccagcagagtggaatagg

SEQ ID NO: 540786 - DNA, 201 bp, Homo sapiens
atctagttttatcggttcctcccactcctcatccatcaccaccaagtacttctgaaggcagccccacagaggttcacagggcagaggttgggagactgagraatcctcaggctactggagaatgtggtctgacctccaccgagctgaggagtctgtactccttaacatggcctatgagaccctctatggtttgctcctggc

SEQ ID NO: 540787 - DNA, 201 bp, Homo sapiens
gccagaactctgccttcaaacaaaatcttatatagaaatctaatacacaagataaataaaattgaggctacttacactatctagttttatcggttcctccyactcctcatccatcaccaccaagtacttctgaaggcagccccacagaggttcacagggcagaggttgggagactgagaaatcctcaggctactggagaat

SEQ ID NO: 540788 - DNA, 201 bp, Homo sapiens
cagcccaactgtctacacataaatttatatctgctgtataggaataaactatatttctaattctggaaaatgaggtgcagagaggattaagtaacatgctygaattcaagtatgcttcaataattaaatcgaagctgggcgagatggctcacacttgtaatcccagcactttgggaggctgagtcaggcggatcacttgag

SEQ ID NO: 540789 - DNA, 201 bp, Homo sapiens
gtgtgaagatcccgagaagccggggcagagccttgaccactgacagtctcttaaccaaagaatctgcagtcacggtgaaaggggctgcaggtcccatgcartgctgtcagctgcaggcctgggaagagttccatcagcagtaatgatgaacagcttattatgtgtatctatctcactgccttcttgacaggatctctgcta

SEQ ID NO: 540790 - DNA, 201 bp, Homo sapiens
gaggatatcagtttaagtgttggtttttaaactgtaactctgaaggcaaacaactggcaagagagagttttcaggaagaatgctggctctggaaggcagcrgaaggttctggaaaagcaatgtgtcctatgaactagacttttcacctgtaagcatggcaggaagaggctgtgcaaggtggtggatgactacagggctttg

SEQ ID NO: 540791 - DNA, 201 bp, Homo sapiens
ttctcccctcctgttaggatcctggatgcttgtaatgctatttatcaatggttattttgtgcttactgatgtgcagacattttttccaacccattcttttytttttttgagatggagttttgctctatagcccaggttggagtgaagcggtgtaatcttggctccctgcaacctccgccttctaggttcaagcgattctcc

SEQ ID NO: 540792 - DNA, 201 bp, Homo sapiens
aaattgtacaaccctactccagagcagtcaaagtgctgcttctggacacgtcagtgtaccacacacacacctgccccgtccctgagaaagaggtgtgaaargttccgcagagtccctttaggggagaaggagggatgctgccacttcctggtggggggaaaaaacccaacacactcacctaacagaaaacatagaggctca

SEQ ID NO: 540793 - DNA, 201 bp, Homo sapiens
tcagcctcctgagtagctaagactacagagatgtacaaccatacccggctaatttttaaatttttttgtagagaggagttttgcttttttgcccaggccgstcttgaattcctgacctcaagtgatcttcctaccttggccttccaaagtgttggaattgtaggtgtgaaccatcatgatggttcatagtgagttgtttag

SEQ ID NO: 540794 - DNA, 201 bp, Homo sapiens
gactttcactctcctaagtttgcaggaattgcctgtgcctgctgggaaacgccgtgcaagttcctccatctgtttccaagacttaacattccttggtgacrgtgcaatggacgagtccagcctggtggcagggccatgctgggaacttgatttctaatgtcaatcactggaatgcccttctagtaaggaagaggtgcccaa

SEQ ID NO: 540795 - DNA, 201 bp, Homo sapiens
tacagtggggtacagtgatacagtgatgtcctaggccttcacattcactcaccacccactcactgactcacccagagcaacttccagtcctgcaagctccrttcatggtaagtgccctatataggtgtgcccttttaaaatcttttctacttcatttttactgtacctattctatgtctagatgcacaaaaactatgttta

SEQ ID NO: 540796 - DNA, 201 bp, Homo sapiens
gcgtagaaagcaggtagaaagggaacacctgaagacttaggaaggaggggccagaaagggatgatggcacccgaagacagtggtgttcaggaagccaaggraggaaggtatttagacaggagggggagagcagaattggcaaagctgtggagaaagtgagatgagaactcctattaaaaacacacaactggtccaatgaca

SEQ ID NO: 540797 - DNA, 201 bp, Homo sapiens
tgtatgtgtgttggcaagaactcacacaagaatactatcttcaagaacaaaaacgccactggatatttgtatcatccttcaccacggccacagaatttgayggattacctcattaactcctcgcaaccattgctatgttgagtttcattgtccctgtttgacaggtgagattaggtgatctgtccaaggccacatatctag

SEQ ID NO: 540798 - DNA, 201 bp, Homo sapiens
gttaaaagcactttaactctgctagtaacagcatcacgtcttctcacacaaatttacattcttgttcgtgtgactttcactctcctaagtttgcaggaatygcctgtgcctgctgggaaacgccgtgcaagttcctccatctgtttccaagacttaacattccttggtgacagtgcaatggacgagtccagcctggtggca

SEQ ID NO: 540799 - DNA, 201 bp, Homo sapiens
cacaaatacgtgtgttttgtgagtgtgtatgtgtgtgtctagtttgtttttcgcctcctccaggagttatacagcaaaaaagaagaaaaaaatccctgccytttatcagatatgtacacattttatccttgcaatatgtctaaaatgattttatgactaaatcctgggaaaaatgtgaagaatgcttggctagatggcaag

SEQ ID NO: 540800 - DNA, 201 bp, Homo sapiens
tttgtttttcgcctcctccaggagttatacagcaaaaaagaagaaaaaaatccctgccctttatcagatatgtacacattttatccttgcaatatgtctaraatgattttatgactaaatcctgggaaaaatgtgaagaatgcttggctagatggcaagcttttccagtaaaaacacaacactgcttatgaattgtagcac

SEQ ID NO: 540801 - DNA, 201 bp, Homo sapiens
tttctaaagacggaaatagcgaaaagagtgttgcgttccaagcatatcagacttaagtcatttctgcctcatggttctagaagacaagaggtggaggtggsagcaagcggggagggaagacacataattctccttctaaccctctggctctcaaccggaagcaattttgctctgcaagggacacctggaagtgtctgagga

SEQ ID NO: 540802 - DNA, 201 bp, Homo sapiens
ttttaagtgtgcatcaaccgtccctgaattccgatgcttgacaaattcattagcaataacaaatgttaaacctgtctagagtatttccttgctattctacrcagcaaatcaatggcctcgccaaccgccacaggataaaagtgtgtgtattctgccaacgtgatgccaccgacagggagagccaactctgctcaccctccg

SEQ ID NO: 540803 - DNA, 201 bp, Homo sapiens
tcagagagacaagatgggaccagatgacttgtgaactgtgagttgagctctggactgttagacagtgatgtgtctaagacaaggccaatgtctggcaggcyggggctttagcgtaagtttagccacctgctaaattgagtttaatttgcccgtgtccttatgattgtcccatcaccatagctaattaatgttaactatgtt

SEQ ID NO: 540804 - DNA, 201 bp, Homo sapiens
ctggataacaggtgtggccaccgtgcccagcctcagacctccttttctcccctatccaaagcctggtaaacaaagtgagctgatttgcatatctaaaatcsggtgctggatgcctgcaaatatgatagggaaatatgtatttggaacctcaggtgaaaccccagcaaaaacattaaaatcatcacatttgaaggagccctt

SEQ ID NO: 540805 - DNA, 201 bp, Homo sapiens
agagacactttcggagcctgtaagtttaagtgttcagatcattctttgcagagtataatgtgaacatcttgctcttgcttgtactgtagaaggttctctakcatatagatgtgatattcagtttatgtataggtttacatttcagcactaaatctcccacccactcatgtcgcaaacctttatggagtgcctactacatat

SEQ ID NO: 540806 - DNA, 201 bp, Homo sapiens
tatgtctgagcccctatggagaataagtagtgcaatacccaaagacatttaactgtctctgagaggcaagaagaatctgtgttaggggtgtggctctatayatagagacattaaattcatagccaaaagggtaatagtgattattacaaaattcaggggtaacaagggtgaaagagaaaagagagggatgagagaacgtaa

SEQ ID NO: 540807 - DNA, 201 bp, Homo sapiens
gcatctttgggattcattctatgagctgtggaaggccacagctttcccgcccttttcatcagaggacgtggacggcatgtggccggccaccagggcaggayagagctttttcaggatggcccaccagcctgcaggaagattcccagactcagttcctcagaatctgaagggcactcctccaagtcccacagagcagcccac

SEQ ID NO: 540808 - DNA, 201 bp, Homo sapiens
tatatgaatgacttacttaatcttcctcttctttttcactgtttgggagcaagtaggcaaagcctggaacaatcactgatgcaacatgtgtttacacacaygcatggttcttagagaatggaaggacaggagctgaatagttccatctgccagtgataatgtagctcccatcacccttcccatctagtgctctctgattca

SEQ ID NO: 540809 - DNA, 201 bp, Homo sapiens
agtgaagaaagtttgcttcaaatgaaagactcagactaatcaactgatgtgaatactttttaaataaagagctattaagatggaacaaaaaagataaagcrtaagagagagaacattttccattttgccctataagtaggtaatgcatgggtttcccttgtgtgattcttgataaatactttctccacccaagctgaaaag

SEQ ID NO: 540810 - DNA, 201 bp, Homo sapiens
tatgttttctccgagttcagggtgtattgctggcattcaataaatatttagggaatgaatacatgcagggatgaatatgtgatgaacaggttacaaatacrgttcagaattcataactagtaatgaatgatatgagaaagtaaacctttccagattttgttgatagcataagattaaattcagctggaaaaggaaaacatt

SEQ ID NO: 540811 - DNA, 201 bp, Homo sapiens
cactaacaacccccgactgtttggagtcaggagcattggtttgcctggaaccagcttctgcttttcctgcacttccgggctaagcctagggtcgacagagrggaaagccattcagctccggggtctcaacaaaaagttggttggccctgcagccatgagcagaactctcaaagttacatagcccaaacaagactcacccat

SEQ ID NO: 540812 - DNA, 201 bp, Homo sapiens
ttattgatgcaaaatgtttagataatgcttataagctttctttaaatgcaatcatagaaaatgtcagcgcttaaaattcaaggtgactttgcgctacttcstcagtattttagtattcataagacacttaaacttgcctaacatactataaaaacctaggtctcttctcaataagctgcccatattgaccaagagatatga

SEQ ID NO: 540813 - DNA, 201 bp, Homo sapiens
gtgtggtacatgtgcctgcagtcccagctactcagaggctgagggtggagaatcgcttgagagagctgtggctaggacttttagttggggcagatgaaatrgtctaaggttagacagcaacaaaaacaactttggcagattttgcctccattgggaagagtgctcctggtggacacacttttgagtctcaaaaaggaaaat

SEQ ID NO: 540814 - DNA, 201 bp, Homo sapiens
tctgtaagaagcaggccctaaatgtgatagaagttcataaagagagactgctcagggccgggcgcagtggcttacacctgtaatctcagcactttggaagrccaaggcagatggatcatgagatcaagagatcaagaccatcctggccaacatggtgaaaccccatttctactaaaaatagaaaaattagctgggcacggt

SEQ ID NO: 540815 - DNA, 201 bp, Homo sapiens
ggcaagaggttgaaatcccaggtcctcggcttctcagctgacacatcagagtttatgcgttttctaagaagaggaagttattcaagctctttaaaaaaaawttttttaagacagggtctcactttgtcactcaggttggagtgcagtggtgtaatctcagctcacttcagccttgaccttctgggttcaagcaattctcct

SEQ ID NO: 540816 - DNA, 201 bp, Homo sapiens
aaccctctctcttcacagccttatcttcttttctctctcttttttctccctatgactttccttcattaagttaaaatgagagactaaaaaagtggaacatrtgaaggaatgatgaggtcaacagcattctcagattcctttctctctaaattaatcataccaaggagaacccaagttaaataattttttcaagaatctaaa

SEQ ID NO: 540817 - DNA, 201 bp, Homo sapiens
tgtggtggcagacacctgtagtcccagttactggggaggctaaggcacaagaatcgcttgaacctgggagccagaggttgcagtgagccaagattgtgccmctgcactttagcctgggaaacagagtgaaaccccatttcaaaaaaaaaaaaaaaaaaaacaaatctacataaagaagaatgttaaatactactgagggac

SEQ ID NO: 540818 - DNA, 201 bp, Homo sapiens
catgtgaaggaatgatgaggtcaacagcattctcagattcctttctctctaaattaatcataccaaggagaacccaagttaaataattttttcaagaatckaaataaaactttaaataaagctttatttggttttactcacagccaaccaataattgagtcatctctatttttaaagtaatgtgaagatcagttagttcaa

SEQ ID NO: 540819 - DNA, 201 bp, Homo sapiens
aaaaaaaaagtgctacccatgttagaaaccttttggtcacatctggtaacagccccagtggtgctaaggacatgaaagccattgccccaatcaaaaaacaraggcaaagaacacagctctggacacaaaattggaattcagtaaatacttaaaagcagtaatgtaacaggggtctatcttattcagtaaatacttaaaaca

SEQ ID NO: 540820 - DNA, 201 bp, Homo sapiens
gggacaaatacagaatgtgaggtcccattccagccaatggaaactggacatagcagtagggtggacgcgtcaggttataatgaccctgtctcctttgttcygtgtactcttgtggcaaaactgctggcaagtgtaccctttctgcagaaagtaaaaatggtcttgctgaggaaattaaatttatgttcaaggtctatttct

SEQ ID NO: 540821 - DNA, 201 bp, Homo sapiens
tgggcaatagagtaagactaggtctcaaaaaaaaaaaaaaaaaagaactcgacttgccgtttatgcaatttcaaaagctggcttttgtaggtctaaaattrttgtaagacaattttaaaagcttccagacgtgcagaatctggggctcttctttgccccccaccccacagcctcacatgtcttggtttgcggcttttaaac

SEQ ID NO: 540822 - DNA, 201 bp, Homo sapiens
gtctaaaattattgtaagacaattttaaaagcttccagacgtgcagaatctggggctcttctttgccccccaccccacagcctcacatgtcttggtttgcrgcttttaaacagcgagttctagagaagttccacaaaactgtgctccacctgctggccttctggggaagctgcgtctgggctgatgatgctggttgcgggt

SEQ ID NO: 540823 - DNA, 201 bp, Homo sapiens
caaggtgtttccttctggcacaagaaaagagaaaagacagaacagggaaggggcagggggaagtctgataaaaatggactatctgttcaattacctacagwtttcccactgggctttactttagaaagttgtacaggttaatgctatccacaagccctgggcactggtgccccatggcacagctgcctgcgggatggcaca

SEQ ID NO: 540824 - DNA, 201 bp, Homo sapiens
cttgaatctttgaccctacattttttcgcttttcctaaaaaaatcattaaatgtctcaaaataatgcctttacccaaactggctatgaattatggaggctrtctacagattgaaggaagggtgggagaaaagggaagggcatatttatgctgaaagataaattttggggaagtctgtgttttaaatacttaatatcagtag

SEQ ID NO: 540825 - DNA, 201 bp, Homo sapiens
tgttatcagtgtggtttgcaaggacaccttaaaaaagactgtccaacaagaaacaagctactccctcacccatgtccactatgccaaggcaatcactagamggggtactgccccagaggacaaaggttctccgggccagaagcccccaaccagatgatccaacaacaggactgagggtgcctggtgcaagcaccagctcat

SEQ ID NO: 540826 - DNA, 201 bp, Homo sapiens
taagtagatggactatcaagaaactcttaaaataacagaatgaaaaataaggtagtggctctgtatataagccccgtcagccagtacacgggaggtactcratcaatgccaaatgaaggagtgacttcgtaagagggactaagaagcaattcaagttgctattctggaatctcttgtgtaagatgggaatcaagtctaaca

SEQ ID NO: 540827 - DNA, 201 bp, Homo sapiens
tcctcccacagcacctaggtgggggcctgggggatgcatagacgctttgctcgagtggagaaaagctgtactgggcagggcaatgccacagggatagtgayaaacacggaaaagcatttttctcctacattgcctcgtctggagcgtcagctgggacaatgctgggggcatctttccacagtcttaatgaggaattcagcc

SEQ ID NO: 540828 - DNA, 201 bp, Homo sapiens
caccagagtggcacagcgaggccctgctggaaaaggattggataactttttgtttatttgctgttgcttttaatgaaaagacttattcatatcctgatcaytaatattttccacacctggatttcttgatttttttccccctttcaaggctgacccaggaacagcttctcctggaacgatactatcaacttatttcgcctt

SEQ ID NO: 540829 - DNA, 201 bp, Homo sapiens
agcttctcctggaacgatactatcaacttatttcgccttgtatacttttgagaagcacacttgaggcaaaggaacttgtattagcagctttgaggatgacragaaacagaatttaagtgctacactagaatcttgttgcttcccaaatacatcatcgacaaaggccagtcatgtttttcctttcaaatcatgagcatgcac

SEQ ID NO: 540830 - DNA, 201 bp, Homo sapiens
cacctgcatgccacagctgaagttaagaaaaccctcccccaaaaaggactgaaaacagatcacattacttgtagacttctgaaaaacatctttaggacctyggatcaggtaccagatttctggcttccccttgatgattacggtatttttactatttctctcttggacttaaacagcttttatgcccaccgttaacagtgt

SEQ ID NO: 540831 - DNA, 201 bp, Homo sapiens
aaccttccttctcctccaaaggtcaagaatggtttcctgccttctaaatgcagtgacctttgctgagtcctcctcttaacttctctaacaatgtctgatasagttcactagtaatagttccttccattttcttttccttttatttagtagactagcatttttgcctgaacagcatcttttctggaatgatctctccccttg

SEQ ID NO: 540832 - DNA, 201 bp, Homo sapiens
cactccagcctggtgacagagcgagactccgtctcaaaaaaaaaaaaaaaaaaaaaaaaaagccaattaactgtaaacagcctcaggcaggtccctctggwggtgttcaagaagaaggcattgttatcatcgcagatgatggctccattcatggtattgcctctgaagaccttacagatggaaaagataaggaggtagaag

SEQ ID NO: 540833 - DNA, 201 bp, Homo sapiens
ctgcctcagcctcccaaagtgccgggattacaggtgtgagccatggcgcccggcctgatccctggaatttttagttatattatgatagaccaaattctaaygtagcccacaagattgccatgtcccctgccagacacacacctcttcccagttagtcagtgggacagtaatcaaggttctgctgttgtgaagggattttgc

SEQ ID NO: 540834 - DNA, 201 bp, Homo sapiens
ctgtgctccacctgctggccttctggggaagctgcgtctgggctgatgatgctggttgcgggttgagcgaaaacaaggaacagatttgagtttgtccaaarcatgcttggtacttgaaaattaacccttcaagactgggcatgtgtccagtgatgctctgaagctggcaaagatgagcatcaaatcaccagacgtgcatgg

SEQ ID NO: 540835 - DNA, 201 bp, Homo sapiens
accagactgctcagattcatactatactaattttctctttccaaaagaaaccaaacaacaaaataaaactccaccaagtgactaaactaaattcaaatatycatacaattctatccacggcaacagcgtcagtttctcagaaatttcattgccaggctcccccacttcaatggacaatagaagaaaatgtgcctcaatgtc

SEQ ID NO: 540836 - DNA, 201 bp, Homo sapiens
aatagaagaaaatgtgcctcaatgtcgcaaacttcagtgccgctcaaggagctaattaaatctcctaggatgccctcacccacaccctaagaaatttgaasggtacgcaaaatccaaactcaattcaacaccattaaaataaaaggcctttacatataaagcttaatcttgactttctttgtccttttctccccacaaagt

SEQ ID NO: 540837 - DNA, 201 bp, Homo sapiens
tctggttatatgaccccagactctctcctatgcccaagtatacagagtatattgtacacatacatatagaaataaatctatatatatatatatatatatayacatacatacaatctatttataatgtactatgatagtattcatagtattttgctgtctcattttttttacttattaattatattgaaaacctcctttaac

SEQ ID NO: 540838 - DNA, 201 bp, Homo sapiens
gcatccccagagtgactgccttggggagagagtttgctcctctcttggccatgccgtgggggctgttgtctctcttgggagctgcaagcatcatcaaagtrgatgagggctggccacagcaagaagtatggtctctgtcctatagttttctagtgttagggtgatgaggtctctatctattcacaagaagaaaaagagtca

SEQ ID NO: 540839 - DNA, 201 bp, Homo sapiens
agtctggttatatgaccccagactctctcctatgcccaagtatacagagtatattgtacacatacatatagaaataaatctatatatatatatatatatayatacatacatacaatctatttataatgtactatgatagtattcatagtattttgctgtctcattttttttacttattaattatattgaaaacctccttta

SEQ ID NO: 540840 - DNA, 201 bp, Homo sapiens
aatgaacaggttggaactgtttggaactgttttatatttttaagtgctgtgcatttacaaaacaaaaaaaaaagtagtttctaagtaagaaaacaataaamccaagtagcaaattagttataaacacagaaagaaaacaaaatagacggcatccagttaagaattttgaaagcagaatagggctaaaacctaacagaactt

SEQ ID NO: 540841 - DNA, 201 bp, Homo sapiens
tgtttttgttttttttttaaggtacaaatatagtttgtgcatttggaagaagatgcggctcgggacccattctttttgttataggcttgtgctataaacayccatcttactcttagtttgacctttgtgccgtgggctcatgtctgtaatacaggaacccaatcatttctgaaagtctgtctaacagtgatattgtgtgca

SEQ ID NO: 540842 - DNA, 201 bp, Homo sapiens
ttagacacttggtacaggaacggatttctgctcttccctatctctcactgttcagggacctttggtcagttcctcagcatattgtaccctaaatgaggtgmtgagacagcatcgagccaactgaactatcagagagtgaggtcgtaatgcttatcggtcactgttaaaacccatccaacccattttggtatgattcttgca

SEQ ID NO: 540843 - DNA, 201 bp, Homo sapiens
gctcatgcctgtaatctcagcactttgggaggccaaggtaggtggatttcttgtggtcaggagttcaaaaccagcctggccaacatggtgaaaccccagcyactccggaggctgacgcaggagaatcgcttgaacccaagaggcggagattgcagtgagccaagatctcaccactgcactccagcctaggcaaccgacaga

SEQ ID NO: 540844 - DNA, 201 bp, Homo sapiens
gtatttttaggagagatggggtttggccatgttggccaggatggtctcgaactcctgacctcagatgctccaccctccttggcctcccaaagtgctgggaktacaggcgtgagccaccgcgcccagcccaagtggttattatttcaacacagaagtccttgtttacccgaagcagctgggaaatagggcttcgcataaaac

SEQ ID NO: 540845 - DNA, 201 bp, Homo sapiens
cagcactttgggaggccaaggtgggcagatcacgagttcaggagatcaagaccatcctggctaacatggtgaaactcaatctctactaaaaatacaaaaarttagccggacgtagtggcgggtgcctgtagtctcagctattcgggaggctgaggcaggagaatggcgtgaacccgggaggcggagcttgcagtaagcaga

SEQ ID NO: 540846 - DNA, 201 bp, Homo sapiens
ctattcccattataaaagtaaatattgttcctgtgtacaattagtcccttcctctagactattaatccctggctcctggcaaaaactccttgcatttgtayagaaatggaatcggtttttggccacattaagcgatacttctttccttaagcacatcaactccctctgtggctttcaggaatgcttagcctttggaataaa

SEQ ID NO: 540847 - DNA, 201 bp, Homo sapiens
ataacgtgagctgcagtgttctatgctgcattttacttccccggtatgaaggcagctagagagatggtgggatgactttcactgtctctggggaccttcaracaaattagctatcttgtgaacagtcccaggatgccaactttctaaataaacatcaaaatgcatttactgtctgtatcacttaagaggttgagaatggag

SEQ ID NO: 540848 - DNA, 201 bp, Homo sapiens
ccccggtatgaaggcagctagagagatggtgggatgactttcactgtctctggggaccttcagacaaattagctatcttgtgaacagtcccaggatgccawctttctaaataaacatcaaaatgcatttactgtctgtatcacttaagaggttgagaatggaggggggagcctaactgcaaacatttgcgtgtttttattt

SEQ ID NO: 540849 - DNA, 201 bp, Homo sapiens
cacggcaaatgcctcccttcaaagctctcaaattgtcactaaagaaggggacctaccatgtaaatcagcatctgttttgatgatgcctgttagaagaaagyacattgcatttcctgaatgggtgtggttttactcacagctatacaaaaccacacagcttctctgaaggacttagacaatcattagcctgtgatagcatca

SEQ ID NO: 540850 - DNA, 201 bp, Homo sapiens
cccatctctactaaaaatacaaaaattagctgggcatggtggcaggcacctatagtcccagctacttgggaggcttgaacccaggaggcggagcttgcagygagcagagatcgtgccactgcactccagcctggcaacaaagcaagactcccaactcaaaaaaaaaaaaaaaagacacaatatctctgagctatgcctgtg

SEQ ID NO: 540851 - DNA, 201 bp, Homo sapiens
agaaaaagttgaaccgattgtacaacatgggtctttgggccctccaacgtggactcaccatgagaggacgatcgtgtgctattccattaaacatgcctccstctcacgactccagccagggttaaaaccttcagatgttttctcaacacattaagcagaactaaccatcacaaaggcaaaaactaaacccatctgtcccct

SEQ ID NO: 540852 - DNA, 201 bp, Homo sapiens
gatttgctgtattgcaatacttgctttactgctgtggtctataagtgaacccaaaatatctctgagtgtccaggcacagtggctcatgcctgtaatcccarcactttgggaggctgaggtgggtggatcacctggggtcaggagttcgagaccagcctcaccaatatggtgaaaccccatctctactaaaaatacaaaaat

SEQ ID NO: 540853 - DNA, 201 bp, Homo sapiens
agcagaactaaccatcacaaaggcaaaaactaaacccatctgtccccttgtcaggatttttgagattgtcaatggactgaccttgtggctggaaaacattktggaggccgtgtaacaaaagttaaatgtggcagtgaatgcacagagaaattcttagaggtcactagtgaattactaacaccattaccctggcaagagatg

SEQ ID NO: 540854 - DNA, 201 bp, Homo sapiens
agcaaatagggccaaggcgctcactggtctatgccgaggacaccttaaagtaatcaggccgtcaaataaaggcaaacactttctcaacatttctaaagacrgaaatagcgaaaagagtgttgcgttccaagcatatcagacttaagtcatttctgcctcatggttctagaagacaagaggtggaggtggcagcaagcgggg

SEQ ID NO: 540855 - DNA, 201 bp, Homo sapiens
ctggaatgcccttctagtaaggaagaggtgcccaagcttctgtttgagttaacacagacctttccaggtcaggtgtagaatctggagtgatgaatggaagkgctggaaaggaaatgaagaccagtgtagatgtctctttgcagaagttgaacattagaggaaaaaacagaataagatgaaaatggaatcacaaagggtaaa

SEQ ID NO: 540856 - DNA, 201 bp, Homo sapiens
tctaattccagaagattgtcatcatcccccttatccatgaaacagtcactccctgtcccccactcctctcagcccctggcaaagactaatctactttctgwctctaaggagttgtctattctggatgttgtgtataaactgaatcatacaatatgtggccttttgtgtctggctgctttctcttggcataatgttttcaag

SEQ ID NO: 540857 - DNA, 201 bp, Homo sapiens
gccctttggttcacaaaggctttgatactgatgaagtccaatgcatctatttttttcttttgttgtttgtgcttttggtgtcacatctaagaatctattgycaaatccatggtcatgaagatttactcctgttttcatttaaaagttttatagtttcagttcctacatttagggtattgatccatttttagttcatttttg

SEQ ID NO: 540858 - DNA, 201 bp, Homo sapiens
tctccttcctttttatttaccctttaatgttttcacaaaacagggacaatgtgcataggccagaggattttatggtttttctaattcgtttttaaaactthgagacaactggcttatagcaattttccagttaacaacacgaacacaacccacaagccaagaacaacagaagaggagagacagaaagaacataaaacatta

SEQ ID NO: 540859 - DNA, 201 bp, Homo sapiens
atagtttcagttcctacatttagggtattgatccatttttagttcatttttgtatatggtgtgaggtaagggttcaacttctttctctggcatgtgtcccrggtgactttttccattgtctcagcaccaattgttgaaaagaggtaagagagattttgagtatgaagtgattttagtcttttctcttgaaaaaacaaaact

SEQ ID NO: 540860 - DNA, 201 bp, Homo sapiens
tggggtttcgccacattggccaggctggtctcgaactcttgagctcaagtgatcctcacaccttggcctccaaaagtgctaggattacaggcgtgagccayggcgcccggccctaagctctttaaatgcagcaactttcataccatatttattaccctgtcccctcctgagtcccatcctctgaccacttcatcttcttct

SEQ ID NO: 540861 - DNA, 201 bp, Homo sapiens
tttacatgattttaaaagtcttatgatgtccgattaaaactaacaaaacttgaatttcttgtatcagttatcattcactcttctcaacaaccgtgtgaaartaagtttattgttcccatatgacacacgaggaaacaaactctgagagattaattaagcgacagccctagatcacagaacttggaagtggcagaaaattga

SEQ ID NO: 540862 - DNA, 201 bp, Homo sapiens
gcaggaatggacaatctataggttgtggggctgcatgtgatatttctggctttcacgttctgttcttgaagtaagcttaaagacaataacatactctcccwgctatggttaaaagaattcttaggatctttgggaaaaaaaaaaatctcaaagtaaatatgacaatatagagacactggagggagctctaaacatctagtg

SEQ ID NO: 540863 - DNA, 201 bp, Homo sapiens
ctttctttctctatattgtatgcatgtgggtgtgtgagtgtacataagtgtatgtccacctaaggaaagtggacctcaagggtatatctgaattgagaaamatatggcccaactacaagaaggtacctgggtagggttttcagagatgtagtaattctttccaagatgtgataagactggtaaaaggtcatgaaatatctt

SEQ ID NO: 540864 - DNA, 201 bp, Homo sapiens
ttgaactaatttacagtcccccaacagcataaaagcattcctatttctccacagcctcgccagcatctattaggaaactggaagaattctatacaatagawttaggagctgcaaaggagtaaggatttgctgaagattttcttaggcaagtattagaagttggttagatgagaaaagttttcacaagtgggagttgtacct

SEQ ID NO: 540865 - DNA, 201 bp, Homo sapiens
gagtatgtctacacagcctgcatagaggcagatgtatataaatgatcatgttactctgcctaaaatggataaaactcggaacaaaacaatccacatttagyaataccctgaagctgactctaatttgtattcactgtgacaactccttactttcaaatctgaagtaattattagaaagtgagaaaacagacattacttttg

SEQ ID NO: 540866 - DNA, 201 bp, Homo sapiens
aaggacacaggaaaaaaaaaagaatgaaatcatttactgaactaacagttacatttgtcccctcctgccttggataaataatgactaatttttaaataacrgattggtacagctctgagattaggagacagaaagcatggaaaggtcctcagaccttttaggtttggtgctttcctgttcctctgaatgggcatttttcaa

SEQ ID NO: 540867 - DNA, 201 bp, Homo sapiens
aatttttaaataacggattggtacagctctgagattaggagacagaaagcatggaaaggtcctcagaccttttaggtttggtgctttcctgttcctctgamtgggcatttttcaaaaccattttgaatgtaaaaggctgtagagttcaacactgggcttcttcctactttatgaggttatacacaggttcaagggtgaggg

SEQ ID NO: 540868 - DNA, 201 bp, Homo sapiens
tcacggccttctactacgcaaggtctcatgatataaatgaaggttatcttcttttccttccagtcactcctctttacagaaatctcctacataattgagaygctgtcatcaatcagtcaaccaaccaagccccctgaactgggtccttgtgatgttccaggggtttaattacaaggaatgctagctcctaacatctcagat

SEQ ID NO: 540869 - DNA, 201 bp, Homo sapiens
tcagccaactgaaatcagagcaatatttgagctatggccttttttccctctaaaatgctaccaaacactagatctcttagttctttcatattttaaagtgsacagatgcctgatttcagattctgtgaaacagagcacaaattaatatttacaaatgctttctgtctcaggacccctctgtagctactaacttcacatttg

SEQ ID NO: 540870 - DNA, 201 bp, Homo sapiens
atggccttttttccctctaaaatgctaccaaacactagatctcttagttctttcatattttaaagtgcacagatgcctgatttcagattctgtgaaacagmgcacaaattaatatttacaaatgctttctgtctcaggacccctctgtagctactaacttcacatttgggaaaaagtagaccctactccatcccactgtgc

SEQ ID NO: 540871 - DNA, 201 bp, Homo sapiens
tctgccagcagaggccaagctcagaacaagcccttcaatgccgctcacctaaagccccgccccctcaccaataaagtctattctcatggaccagattgtaygtcggagaagagcaggaggcatctttgtggatggacacggtctagatccagacatggaactctccatgtccttgactgggggccatgcttctctccagta

SEQ ID NO: 540872 - DNA, 201 bp, Homo sapiens
ccagggtttctcagccttggcactgttgacatcttgtgctggatgattctttgtggtgggggctgtcctgtgtgttgcaggatgtttagcagcattcctcrcttctactcactagatgctggtagctcctccccagtcgtgacaagcaaaaatgacttcagacattcagacattgccaacttgcccacggcggagggagca

SEQ ID NO: 540873 - DNA, 201 bp, Homo sapiens
gcaaagtcccgtcccggctgcaggagcagtcccttccccgcccgcagccgcacacccggcgaggccggccctccgaggggagacccccgccccagggcgcsgaggccgggcgaccacccgcggagaagtccagccctccgtgagaccccctctctctcaccgccctctccggggaggaggaatgggaagagggcggccggg

SEQ ID NO: 540874 - DNA, 201 bp, Homo sapiens
agtctccggcccggcccagagtgaacgagcagtggggctccagggcgcatcccaatccccgcagcgcctcctccgcggcggccgccgcctcctcctccttycctcctcctggcttcattcaccctcccagcagccgcgcagccgttcactcccggctcagggcagcgcctgccgcggctcctcgtctcctgccgcgggtgc

SEQ ID NO: 540875 - DNA, 201 bp, Homo sapiens
gcagagtctccggcccggcccagagtgaacgagcagtggggctccagggcgcatcccaatccccgcagcgcctcctccgcggcggccgccgcctcctcctycttccctcctcctggcttcattcaccctcccagcagccgcgcagccgttcactcccggctcagggcagcgcctgccgcggctcctcgtctcctgccgcgg

SEQ ID NO: 540876 - DNA, 201 bp, Homo sapiens
atttcttcactttctcaaggcccttaattgcccccttcttttagtctaattaatctcttgactctaaagagacctttacagtccccagagagcaacaggtrtcagtgacccacattgtactgtggtgtgctctgagaataaactttttgggcttttctcagataagacaggaaaatggaaaccttcacagttctaatgaat

SEQ ID NO: 540877 - DNA, 201 bp, Homo sapiens
aaaaatccagcagtcaggttaccaggatcagtgacaactatgcaataattaggggcaggcaccaggaggcagagaaacagagctgggtggcagaaactctmtgataccccaaaggaaacatcaactcttctcagaggtggtcaagaacatgccagaagctttgcctgcctggttggcagcagaaatggcactagccagtga

SEQ ID NO: 540878 - DNA, 201 bp, Homo sapiens
atattttcttggagagttctttaaagcagaaagatttaagaggcaggaacataacaaaggaagtactggaccaaagtgagccttgtttgaactgagcatgwtttgttttcacattttccactaaaaggtgctttgtcctttgggaggaatgtgccctcttcatcccacctttccctcccagagcccccagcaatgagaggg

SEQ ID NO: 540879 - DNA, 201 bp, Homo sapiens
gtctttttatttctctgccctcaaagcccagcagcctggaggggagaaggcagtgcccttgactgcagcctgatgtttcctcctggcttctggtggcctayggtctcctttactgtaggtttctggagcaaaaatccagcagtcaggttaccaggatcagtgacaactatgcaataattaggggcaggcaccaggaggcag

SEQ ID NO: 540880 - DNA, 201 bp, Homo sapiens
cctgtttctagcctgggaaactttcttccttcattcagcactatttattgcacacctaaaacattaatgctactgtgtggggcttggaagatgtcctggtrtttgggtactttctcagaagcaagactttctcatttgggtctctgaatatcaaatgtgaccagccaacaagtatgtacatttcagtccctcaccttttcc

SEQ ID NO: 540881 - DNA, 201 bp, Homo sapiens
ttaaattttccagcctatctccttcccattccactcagtctcatttgacattgcttcccccaagtccactgtgatgtcatgcaccttgtggatggcaatgwtctgtgctataattcaaaatgctctcagggagctgggagcagaaagaaaacacattggtgatgcaggaagcaataaaacaatctgtttgaaaagcacagg

SEQ ID NO: 540882 - DNA, 201 bp, Homo sapiens
gggtgagcgtgtgtgggatcatcgtctggtgggggtggaggtggacggggatggccggaggagaggcggtgcggccggtgttctgcggagaactggaaatrtggacgtactggttctgctgggctggtgggggggaccccggggtgatgagccccggagccctgctgaggctgctgctgctgctgctgctgctgctgctgc

SEQ ID NO: 540883 - DNA, 201 bp, Homo sapiens
atttgacattgcttcccccaagtccactgtgatgtcatgcaccttgtggatggcaatgatctgtgctataattcaaaatgctctcagggagctgggagcaraaagaaaacacattggtgatgcaggaagcaataaaacaatctgtttgaaaagcacaggtttcataaaatgttagcgctggaatggaagcgatttcagaga

SEQ ID NO: 540884 - DNA, 201 bp, Homo sapiens
ttgacattgcttcccccaagtccactgtgatgtcatgcaccttgtggatggcaatgatctgtgctataattcaaaatgctctcagggagctgggagcagaragaaaacacattggtgatgcaggaagcaataaaacaatctgtttgaaaagcacaggtttcataaaatgttagcgctggaatggaagcgatttcagagatg

SEQ ID NO: 540885 - DNA, 201 bp, Homo sapiens
caagagagtgaggcagagggaggcagagaaaaagagaccctcactcgccgccacagcgcctgtgcacccccacatgcgtgcaaccctgcacccctgcaggrcccttcccacgggacttttctcctgacactagcgggagtcagcgcccccggctgcttctgtgccgctagagaaggcaggcactgtgaagccccgttcctt

SEQ ID NO: 540886 - DNA, 201 bp, Homo sapiens
tagctgattgttcaacgtgaggtcttaaaacaaccctctctcttcacagccttatcttcttttctctctcttttttctccctatgactttccttcattaarttaaaatgagagactaaaaaagtggaacatgtgaaggaatgatgaggtcaacagcattctcagattcctttctctctaaattaatcataccaaggagaac

SEQ ID NO: 540887 - DNA, 201 bp, Homo sapiens
tctgtgccgctagagaaggcaggcactgtgaagccccgttcctttcttccccggggatgcctggagccctgaccgctcctgctgtgcccttcctcccgccsgctcactgacagacactcgtggaaaaagcatatgcaccagtctcctgcgacacacctgctgtaactctaatgacaaggttagaacagaaacctaaaatta

SEQ ID NO: 540888 - DNA, 201 bp, Homo sapiens
aacgtgaggtcttaaaacaaccctctctcttcacagccttatcttcttttctctctcttttttctccctatgactttccttcattaagttaaaatgagagwctaaaaaagtggaacatgtgaaggaatgatgaggtcaacagcattctcagattcctttctctctaaattaatcataccaaggagaacccaagttaaataa

SEQ ID NO: 540889 - DNA, 201 bp, Homo sapiens
ctttcccgcttctattcatatgctttatatgtatttatttgttgagttatatattttagctgaacttggaatgacagttatttttaagaggctaccaacaygggtcaggaagaacctcagaaacctggctcacagttgctctggcataaaaagccttgaccgccaaaaccaaccagggagttgatgagatctaggtttcca

SEQ ID NO: 540890 - DNA, 201 bp, Homo sapiens
tctgacttctccagtttgcggctctctggcgccgaccacctcctcttcctcgttgccgcgggcttgctgggttctattttggtgaggaagggcgctgcagrcaatcccattttctctggaaacttcagttcgccattctcagagagcatctgggcactcccctggttgattccgttttcctgctcggcatacctgtgtctg

SEQ ID NO: 540891 - DNA, 201 bp, Homo sapiens
tgctttgacatttattttctaaaacttactcagttttgccccgatatttatacatcagcaggagatggttaccccgagaagctgctctgttccacacaatwgccttagcgtctgtcctctttatgaaactaaaaaaaaaaaaccacagtaactgtagttgttatgagcaccaacattttaagtctaattaaaaatttgact

SEQ ID NO: 540892 - DNA, 201 bp, Homo sapiens
atcacaagactgcactccagcctggacaacagagtgagactctgtctctaaaaaaaaaaaaaataaataataataataataataattaattaattaaaaarggtctatgagaattgtagaattaaaatatacaccactgaaatcaagaatgcaatgagctttccagttgaatagacatggattaagaaagaattcaggaac

SEQ ID NO: 540893 - DNA, 201 bp, Homo sapiens
agacaattttaaaagcttccagacgtgcagaatctggggctcttctttgccccccaccccacagcctcacatgtcttggtttgcggcttttaaacagcgarttctagagaagttccacaaaactgtgctccacctgctggccttctggggaagctgcgtctgggctgatgatgctggttgcgggttgagcgaaaacaagga

SEQ ID NO: 540894 - DNA, 201 bp, Homo sapiens
gctgctggtatcatgcatacacatgcaggactatttagtggtacctgattattctgatcacaaacaatggtgtttttatgcatcatttatcttcagagagwgtctatctgagctgcttgaagcaaacgaaacttatggattggactagccttacgagaatgctagtttcagagctatggctgtgcctatagcagtttgtag

SEQ ID NO: 540895 - DNA, 201 bp, Homo sapiens
tctttgccccccaccccacagcctcacatgtcttggtttgcggcttttaaacagcgagttctagagaagttccacaaaactgtgctccacctgctggcctkctggggaagctgcgtctgggctgatgatgctggttgcgggttgagcgaaaacaaggaacagatttgagtttgtccaaaacatgcttggtacttgaaaatt

SEQ ID NO: 540896 - DNA, 201 bp, Homo sapiens
gaagctttgtgagtggacagaaattaaataaaggggtttccaagttaagtacagtgctcctggagaagcaagttggaggctgctggtatcatgcatacacmtgcaggactatttagtggtacctgattattctgatcacaaacaatggtgtttttatgcatcatttatcttcagagagtgtctatctgagctgcttgaagc

SEQ ID NO: 540897 - DNA, 201 bp, Homo sapiens
tggtgtaaaagtaatacaaattatagtcttttacgtgaactgcttccactaatgcccaattactatgcagcacagtatcaatttagtggatcatgaactaygtatccgattgactcacttgtataagttacattttatgacaacactaaattctcctttatatgttcaggctccctattttgtgatgcgtgtaattgcaga

SEQ ID NO: 540898 - DNA, 201 bp, Homo sapiens
gagctttccagttgaatagacatggattaagaaagaattcaggaactggattctctaattagagctttagaagagactccacagagtgaacatagagacaraaagatggtcaatatggaggagagggtaagagacacataggatacattgagaggggctaacagacacataatttgaatcctaggaggaggaagagaggga

SEQ ID NO: 540899 - DNA, 201 bp, Homo sapiens
aggtgaagctttgtgagtggacagaaattaaataaaggggtttccaagttaagtacagtgctcctggagaagcaagttggaggctgctggtatcatgcatmcacatgcaggactatttagtggtacctgattattctgatcacaaacaatggtgtttttatgcatcatttatcttcagagagtgtctatctgagctgcttg

SEQ ID NO: 540900 - DNA, 201 bp, Homo sapiens
aggagaattctactaaggattaaaagtcactgccgtgatttataagctatttcaactaaacattgtaaactttggactatttacttttcagtgggagagawcattccttccagagatagagtaacatactatattatcatttttcctacttttaagtttccaggtgtaacatctctggggacattttcattttattaaaaa

SEQ ID NO: 540901 - DNA, 201 bp, Homo sapiens
gggaggactgcttgaggccagggagttcgagaccagcctgggcaacatagtgagacctcgtctctacaaaaaatttgaaaatgagccagctatggtggcaygtccttgtagttctagatattcgggaggctggaacaagaggactgcttgagcccgggtatttgaggctgcagtgagctatgatcatgccactgcactcca

SEQ ID NO: 540902 - DNA, 201 bp, Homo sapiens
agtgcttcagcaggacgctggcgggatccacgggctggccctttttaacagagccgttcttcaggttcttgagggtaagcgagatgcagacatccccaacygagagtttggaacacggcaaatcaaagagctggctggttctctccggacagcaggatgaccagccctgtccaaacacaaaaaaaggatactctaccaaaa

SEQ ID NO: 540903 - DNA, 201 bp, Homo sapiens
atcagagattatgtttatttttgtggctaaatcttggtctgcccaacagcaatctttaaagaaacaatcttggatgtttaccttttcttacctatgaggcyttggtgatatatggaaaaggggacctctatggcaagtttcatgacaggtctgcttgttaaaaacaacaacaataataacagttctaatactatctccacc

SEQ ID NO: 540904 - DNA, 201 bp, Homo sapiens
actcattctgatctcttctcagcatcagagattatgtttatttttgtggctaaatcttggtctgcccaacagcaatctttaaagaaacaatcttggatgtytaccttttcttacctatgaggctttggtgatatatggaaaaggggacctctatggcaagtttcatgacaggtctgcttgttaaaaacaacaacaataata

SEQ ID NO: 540905 - DNA, 201 bp, Homo sapiens
caaggacaacgtcaacaactgtggcctgagtaactggaaggagatgggaaggcagtgggagaagcaggttggggtagaatatcaagagttcatcccactgraggcagttaagagacagtgggatatgcaagcctgaggttcaaagaaaaggcccaggctggagaaggtgtcagttttgagatggtttgaaggcatcaacaa

SEQ ID NO: 540906 - DNA, 201 bp, Homo sapiens
tgtttctctgagaaacttagacttacaatctttctgaaaaggatacattataaattagtatttctacttttgggaaaaatctgtttcatgagaaacaaggygtaatttatcactctgtcttttaagcagtcttatgagccaagtcagtgttttgatgcatgcataaaaattccatagctcctcctcctgcagtagaagcag

SEQ ID NO: 540907 - DNA, 201 bp, Homo sapiens
tcacacctgtaatcccaacactttgggaggccaaggcgggtggatcacttgaggccaggaacttgagactagcctggccaacatggcaaaaccccgtctcyaccaaaaatccaaaaattacctggtcgtggtggcgcacacctgtaatcccatctactcaggaggctgaggcacgagaattgcttaaacccaggagggtga

SEQ ID NO: 540908 - DNA, 201 bp, Homo sapiens
ggcactttgtaatggcagccctggaaaaatattacaggcatataatgccgtttgtgtgtgaaggaatgacttcatcatccagtggctggaatttaattatkatgtgatgctatcaacaacattcacttcctcttcacatatattgtgcccctcacctgactgcaaaattcccattgcaagttaagacaggtgccttacaca

SEQ ID NO: 540909 - DNA, 201 bp, Homo sapiens
tgaattgggaaaattccttagcatattattagcatattatcatatcagcataacaacaagtattaaggacacaaaaattctaattacaagtaagtttttgycaccaaacttataatttccacttcttcaactatctgtttgcttttttacccttggacttgtctaagactctactcaggccttctcttcccttcaaatccc

SEQ ID NO: 540910 - DNA, 201 bp, Homo sapiens
taaaaatgaaagatatgcctaaaaatggtaaaaaggagaaaataaagcagacaggcatgaaagacagacttcaacgacttcaccttgttttgtgggttttrtttcaggaaaatttaaatatttttatataattattgaacaagaatcacttttcaaaagcctcttaggaagtctcaaattaaagtaagtgaactcaaatgt

SEQ ID NO: 540911 - DNA, 201 bp, Homo sapiens
taagttgcatagacaggactcaaatccagaaatccaaatcttgtattctttagactttaccacaggttattgcttttatgccaatctgtcatgaaaatggracttttttttcaaaaggtcaacatctgggctcacttctctccttcctttagttagcaacgcagccaactttgaggcacccacatctacgtttacaaatac

SEQ ID NO: 540912 - DNA, 201 bp, Homo sapiens
gcgcactgagttaaaaataaaaaacatggaatttattttcatttcctatctaatttggtctccagagcctgctaagtacagtttccatttctactcgggtrcaagagcaatggcttatttgctgttttacggagcagttccttaactatcattgcctctgaaccccctttccccccaagattgactgtcggtctacagaat

SEQ ID NO: 540913 - DNA, 201 bp, Homo sapiens
tgtgtccagtgatgctctgaagctggcaaagatgagcatcaaatcaccagacgtgcatggagagcatgagctgaacgaccgtcgtgataggcttggcagargatgaagcagagggtggcaccggagccctacctgggtgctggcactgcctcggcctcttgcttactatgacgccgtgtgaatcacagcatctagcggccc

SEQ ID NO: 540914 - DNA, 201 bp, Homo sapiens
gtacaatggtcaaaaagatactatgaacttagtaacgctgtgaatgaattctggctaatgacttacaatatcagccagctacatatatttggaagaaagcycctatttctgttagtgattctgatgaccaaatctacagaccatgctttgtgtcggtatgaatgtgcaggtcctcttttacaagaaatgtggtctcccata

SEQ ID NO: 540915 - DNA, 201 bp, Homo sapiens
taaatctgacttacaaaggtgaggagcagggagtacatttctttcctaatgcttgcactgggatttctgacgaatacctcagaggctatgttgggcttttkctgatgtagcgatattttggagattatggttcaaccagtgatttgtctaaacctgtttgaggattctttctaacatatcattcccttccctacataaaga

SEQ ID NO: 540916 - DNA, 201 bp, Homo sapiens
aaggattttgacgggctgggtcagatggagggaaatatggcgatgaacacgcacagaacattagaattacaatgtgaagtaaggtttggttgggacatagsctgccagtggagcagtgggggcggcgagggtaggggggtgggaggtcacctgctggacaccctggcgacctgttcctgcacctgttccctcctcactagg

SEQ ID NO: 540917 - DNA, 201 bp, Homo sapiens
gaacactggcttaagtacctgaagggaactacactcctctaagctggaaagcactgcgagagctttctaacgatggtctttagtgggggtactggactggygcttttcctatttacatctgttccaaaagcagtacctatgatttaggtggctgtttggaaatcatgtacctctcaaggatgcctcacggtaaacgataca

SEQ ID NO: 540918 - DNA, 201 bp, Homo sapiens
catttctagaatgacagactttactggatccatacaaggcatatttttagaagagacaacttgagtacattcatatggcagcttgtaagcatgaacccctwctcctgtgtgtattactgggggaaagtttcattgttctgggctatttttataatgtgaagcaagctaaaagtttttgagtgcctactctctgtcaagctc

SEQ ID NO: 540919 - DNA, 201 bp, Homo sapiens
aaaaaaaaaaaaaaaaaaaaaaagttatgaaggtcttctgaaaacaagaaaacactattcagatgaaaactattatatttatagattactatttttttttwaaaaaaagaagctcttctttgaattacctataatgcaacagcagcaccatcaaaattgtgcacaattcaatcagaggttctcaaacatggctgcccatca

SEQ ID NO: 540920 - DNA, 201 bp, Homo sapiens
cttaaaatgacgttaggctacgtagccaacactttcttggaaaggactttccctgctgttctattaaaactgtcagcaaatagggccaaggcgctcactgrtctatgccgaggacaccttaaagtaatcaggccgtcaaataaaggcaaacactttctcaacatttctaaagacggaaatagcgaaaagagtgttgcgttc

SEQ ID NO: 540921 - DNA, 201 bp, Homo sapiens
gcaaactgtatgggttccttttccaaatacacctagaatgatactatttttttactacctccaccacctttgtcctggccaagctgcatctcactcgctcrgtcaccacatgcaagcctgatgtggtctgcatgtgccccttactccctacactgtagcaacagtggtctccttgctggttctttaacccctcttgcgcct

SEQ ID NO: 540922 - DNA, 201 bp, Homo sapiens
acagccaagcgttcaacatagccaatgttaaaaattaacttatataaacttatggtttaataaattatattaaaaactcctgaggcgaggcggatcacccragatcggggagttcgagaccagtcggaccaacatggagaaatcccgtctctactaaaaatacaaaattagctgggcatggtggctcatgcctgtaatcac

SEQ ID NO: 540923 - DNA, 201 bp, Homo sapiens
acaacatccgtggagcaaagtgaatttgaagttaagtctcctcttagtgtagcagtacgtattttgaatgagaacggccagtgctaaagatggaaaatagrtgggtggccaggcacagtggctcacgcctgtaatcccagctctttgggaggccaatgcaggcggatcacttgaggccaggagtttgagaccatcctggcc

SEQ ID NO: 540924 - DNA, 201 bp, Homo sapiens
aagacaaggtgaagctttgtgagtggacagaaattaaataaaggggtttccaagttaagtacagtgctcctggagaagcaagttggaggctgctggtatcrtgcatacacatgcaggactatttagtggtacctgattattctgatcacaaacaatggtgtttttatgcatcatttatcttcagagagtgtctatctgagc

SEQ ID NO: 540925 - DNA, 201 bp, Homo sapiens
tttttcatgacactatcccagacatacaaatttcgcctgttgctgggagcaatgaattctctcataagctaggtttcagtaagtatgtcttgttttttggygaaattattaaattgggcattcttaactttgtctgcaagtgaaattctcagtcttgttttacctgtagagaaaggccggtctgctttcctggaaggctaa

SEQ ID NO: 540926 - DNA, 201 bp, Homo sapiens
tcactaaatgatttgaatagaaaggaaatcaccatagcaccactgttctccataacgtgagctgcagtgttctatgctgcattttacttccccggtatgarggcagctagagagatggtgggatgactttcactgtctctggggaccttcagacaaattagctatcttgtgaacagtcccaggatgccaactttctaaata

SEQ ID NO: 540927 - DNA, 201 bp, Homo sapiens
aaaaatagcagctttcccctcttcgaaaaatgcagagtacacataactaatccagtcactgagtgagcattctggcaatgaaaaaacatatttggaatgaraatagtgatcttcagaactctaggtaccaagcattccagatacataaatgttctgatccccttgagtggcaattgaccggctgacactgaggcaaacttg

SEQ ID NO: 540928 - DNA, 201 bp, Homo sapiens
aatttctgaacatttaacacttggctcataaaagtgcaagctggctccactacaccactggtccatttcctcatcccaccaagatcagtaaaccctacttyctacctaaaataaacccaagaagcaaagtccttcattattttcggctttcttcttatccatagatatttaagagactatctgttcccacttccatgtctt

SEQ ID NO: 540929 - DNA, 201 bp, Homo sapiens
taaaggtatcccgtcatctcagtgacatcctgtttctcaggtagaaaggttgtagcgctaccattgctttttttaaacatataaacttaagttctccctaygtccacttgcatgaaatttcacaagtgagcaccctagtacagcatgagtgtatcatggacaattaacggccaagaccagacaaaacaccctgagttcttg

SEQ ID NO: 540930 - DNA, 201 bp, Homo sapiens
aactcggtagaaaagaaacacgatgtttggtcaactgagcaccagactgtgagctttttgagggtaaagattatgttttctccgagttcagggtgtattgmtggcattcaataaatatttagggaatgaatacatgcagggatgaatatgtgatgaacaggttacaaatacggttcagaattcataactagtaatgaatga

SEQ ID NO: 540931 - DNA, 201 bp, Homo sapiens
gtgtaatcttacataatcatgttacttttctcagcatcagtctcatcgatagagggggtacactctcagcactttgggatgccgaggcgggtggatcacamggtcaggagatcgagaccatcctggctaacacggtgaaaccccgtctctactaaaaatacaaaaaaattagctgggcgtagtggcaggtgcctgtagtcc

SEQ ID NO: 540932 - DNA, 201 bp, Homo sapiens
aaggtccgtgcctccattcttgaagtcagcgagaccatgaatccaccggctggaaccaactctggacacatcttgggggatcctcccagatattgcaacgyggtgagtaccatcagaccccttttgcttgctattctgtcctatttttccttagaattcaggggctaaaactaggcacctgtcagccagttaaaagcaact

SEQ ID NO: 540933 - DNA, 201 bp, Homo sapiens
gcgatttacattccacaggaggacctctcagattacctccatatcctagcctccctacagctccccttcctattaatgatgagcctcctctaatctcctcyatccagaaggaaacaagcaaagaaatttccaaaggaccaccaaacccctcaggctatcagttatgtctcctttaagctgtagggggaggggaatttggcc

SEQ ID NO: 540934 - DNA, 201 bp, Homo sapiens
ctggaggcattattaaacctggcaaccgcggtgttctctaataggaaccaagaggaacaggcagaaaaggaaaagcgagataagagaaaggccgcagcctyagtcatggccctcagacaaacaaaccttggtggttcagagaggacagaaaatggagcaggccaatcacccagtagggcttgttatcagtgtggtttgcaa

SEQ ID NO: 540935 - DNA, 201 bp, Homo sapiens
tacacaaggaacaagtgcatatgggcaggaacgactggtaaatatttgctaaataaaggcagctgatatttctctgcccgctttgcccctagccctctgastcctcctccccacaatacccacataattttccttttggccataatatagaactcaatcaccatattaagatgaagccctagaaagtagcttcttataccc

SEQ ID NO: 540936 - DNA, 201 bp, Homo sapiens
ttgagaacactcatcaaatggccaaatccctatttatggggccatatctcctccagaccatccaacaagtagtcaaagcctgtgaggtgtgccaaaggaawaatctcttggtccatcgtaaggccccttttggggaacaaagaataggtcactatcctggagaggactggcagttagacttcacccatatgcctaagtcaa

SEQ ID NO: 540937 - DNA, 201 bp, Homo sapiens
ctttgcgatttcaggtcaccgaatgttctctgtacagcaggacagccaacagctgtgtttggtcatttacacatattaaaaaaccctccctccaggacttmaagatgatatgaactgtgtcatggagtttagtctgaggaaggctcatatactactggtgagacccacatttcaaggtcctactcagaaagacgtttcttc

SEQ ID NO: 540938 - DNA, 201 bp, Homo sapiens
ggaggttaaaatgaaatctgaaagacagagtcactccagactctgggaaagctcatgatgcaatcaaaatgatgtaccaagaggtgtctctgctaagtccsggccacataaagacatgagagatggggaggcccactacaggtgaggtcatgagtccttgctttgagggaaagtaaacagaaaatacaaggattctaaggg

SEQ ID NO: 540939 - DNA, 201 bp, Homo sapiens
ggagcaatgaattctctcataagctaggtttcagtaagtatgtcttgttttttggcgaaattattaaattgggcattcttaactttgtctgcaagtgaaawtctcagtcttgttttacctgtagagaaaggccggtctgctttcctggaaggctaagtctgcatggttacgttctcagcatgaaaaaaatcagaaaacccc

SEQ ID NO: 540940 - DNA, 201 bp, Homo sapiens
catgaaaaaaatcagaaaaccccgtctcaaagatgaagggggtaagcgagagacccatttactgcaatgtttaaaaatcattaataaaaacagtcaaaackctttggctgagtgtaagaatctctgtgagtgttctatttaaaacactgaatcatgttcacgcaaagcctgactcagtccttggtggaagtgtttcagggt

SEQ ID NO: 540941 - DNA, 201 bp, Homo sapiens
cgtcactaacagcctcttgcagaagaggagcctgggagcccttgtttctgcattggttgtcttactgatctggagggctggagcaccaatgcacccctcamatccagttcatactcagaaatacagattgatatgctcacgcaggctggcatgacatcatttagccttagaaacaggaacggcgggaagggtgctcgcctc

SEQ ID NO: 540942 - DNA, 201 bp, Homo sapiens
cgcagtaacaatggacaacacctggcattcccctttcctcccacagcacctaggtgggggcctgggggatgcatagacgctttgctcgagtggagaaaagmtgtactgggcagggcaatgccacagggatagtgacaaacacggaaaagcatttttctcctacattgcctcgtctggagcgtcagctgggacaatgctggg

SEQ ID NO: 540943 - DNA, 201 bp, Homo sapiens
aaacctacagtgacatctcataatacaaagaaaagtattcagggctaaaagctctcggcaatgcagggccccggctttgtgcaagcccccatatccagtcrttcacgagtggttctggaaaactgatttggtcctttcctcacttgggcatttaagaaatgctcaaaaaagccagacatagggactcgtgtctgtaatctc

SEQ ID NO: 540944 - DNA, 201 bp, Homo sapiens
ggctagtgcactgaatgttttctcagtgggttacatgcttggtttgtccatctctctcttccttttcaagttgtcattgaagttccccttcacaccgtccyctttctcattggaaagtaacaactcgccattaacactagagacgacagctctttcagacaaatcagatcagtgtgttcaaacctggacatacaaatggtg

SEQ ID NO: 540945 - DNA, 201 bp, Homo sapiens
aaaagaaaaaaaaaaaaggaaagaaaaagatgatagcatcccttggtagcaaatatacacggaaaatttccatgtggtttatgcagttctaaaagaaagcracagatattgcatttactgtagacccacttcccaatttcatttgacttccttttgccttgagagtccttaattttcttgtcttctttaggctgtaagact

SEQ ID NO: 540946 - DNA, 201 bp, Homo sapiens
acagtgcctagtataacacacactcagtacatggtcgccatcgtagttataattcaataaacatttcctcatgaattctcagtgatcacccacacttatcygttgctcatctctcctggccatgatgtaatcaatacaacaccttcaaactatcaattctttcaaacatctgttttttcctcacatctgtgatagaaaaag

SEQ ID NO: 540947 - DNA, 201 bp, Homo sapiens
ttctggtgcacagatacaaagactggggatggggaggacagtaatcttttatacaaggacacatgaaccaccacactggtgccttagagaacataggcaaygaatactctgctgcagcataagtgatcgaaagtcacacgttaatgcaaattatgtaaatcctcactaaatgatttgaatagaaaggaaatcaccatagca

SEQ ID NO: 540948 - DNA, 201 bp, Homo sapiens
tttgtcttccttacaagctggttattaaaaggcaaaggatttctggatcattttctagattttggatgtgatgataaaaaactgaactcattacggagggmcataaaataatgttgtggtatctgcaaagaatctgccccttgagattccatttcaaacatactttctcacgtgagattattaactcctgttacttctcgg

SEQ ID NO: 540949 - DNA, 201 bp, Homo sapiens
cacctcacaccagattttgtattaataataatcacgtctccactcacctgtttctagcctgggaaactttcttccttcattcagcactatttattgcacayctaaaacattaatgctactgtgtggggcttggaagatgtcctggtatttgggtactttctcagaagcaagactttctcatttgggtctctgaatatcaaa

SEQ ID NO: 540950 - DNA, 201 bp, Homo sapiens
taggagtaaccactgaataaaagcttactagtttgagtccatcttaggccagtgaagacattgggccgagaagtttccagtgcttggatgacagagaagawctggtgactaagacttcagtgggtggtaataatctggatgaatagaacacagactatgttttcaaaacatgttgaggttaaagaaagaatagagaaatgg

SEQ ID NO: 540951 - DNA, 201 bp, Homo sapiens
catgtgcaccatacgcacatgcacgcgcactcgcgcgcgcgcacacacgcacacacactccacgttgttagttttctgggtcatttcctgtgaaatgtcastgttccctctttagtggccggatctcagcctgggagtccgactgagagcaaggggctgtcggtacagcctggggagagggtcccacccccacctcacacc

SEQ ID NO: 540952 - DNA, 201 bp, Homo sapiens
tctgtatccagtgtgcagagatggtcaagagaacagacactaaaaatcttacatatgagtttcatgggtgggaagcacagagtggctcagtgagaccaggrgggaaaagttagggtgggctccttggagctgatggcagggttgagttttgaagagtacacaggaatgtgtgactgcatgtgatgtgagagggaacattgt

SEQ ID NO: 540953 - DNA, 201 bp, Homo sapiens
gagacctgaccatactgtggggcagaatctcccctccaatccccttcataaagcacgatgatgctgttcaaacacaacctgtgcctcctgtccttagagcyccagatttcattttaggagaggattacgaaataatgactaagctctgaaaactgagaatgagacaaaggaagaaagggagataagaaggaagacagtaag

SEQ ID NO: 540954 - DNA, 201 bp, Homo sapiens
acaacatactcattagggaatcttctccctttccccctttcagatattttaaaattaaaacgaagggtggagggaatttatatgtaatgatattggcctgrtggcagtcaacttatggcacacatgaaggcgaaaggagcagggaaagttttttcagggagaggtggagatggagcctacatatatttaaaattggaggcc

SEQ ID NO: 540955 - DNA, 201 bp, Homo sapiens
tgctatccctgggctaggagttgctggtatatactgaagtacacagttacaaatcaatgcaaagcaaattagccaaaagaggcaaaagtcactcccctttstaagcagattgttaacaatgtcctaagagaatgcaagcatttaaaaactgtacatggctgatattggaaatattgagatttagagcaactagagaagttt

SEQ ID NO: 540956 - DNA, 201 bp, Homo sapiens
tccccttatgaggaccctaaaccaagatgctgattgcttaataaaaaggtagtatgggctggggatggtggctcatgcctgtaatcaaaacattttgggamgcagaggcgggaggatcacttgagctcagtagttcaagaccagcctgagcaacatggtgaaactctgtctctaccaaaaatacaaaaaattagccaggca

SEQ ID NO: 540957 - DNA, 201 bp, Homo sapiens
aacatcttggcccggcagtccccacattctgcctggactacccattaattcatttgttattctccgtgggattctatctgtaccagaaagaccatgtggtycatgatccttagtaagtgacactcccatgatacacttagtaagtgacgttttcctcctggaggcctgcccagatgagggaaatggaaaatcctctttgag

SEQ ID NO: 540958 - DNA, 201 bp, Homo sapiens
tttgtaacgctggagaatttggtatcacagatggcaaatctaaaaggtacaaactgacagacacagagggaaattcccagattgctcttattagagtgtgygtgtgtgtgcaattctcttagtctggagattcagagtaagagaaattcagctcccattttttaagacttacacagacagcataatgctgtttacacaggt

SEQ ID NO: 540959 - DNA, 201 bp, Homo sapiens
gcctcctggttctagcaactctcctgcctcagcctcccaagtagctgggattacaggtgtgtgccaccacgcccagctaattttttgtattttagtggagrtggggtttcaccatgttgcccaggctcgtcacaattgtcccttctttaaaagaaattatgtctatgttaatgaggaacgtaacaaaataatgaaaggcta

SEQ ID NO: 540960 - DNA, 201 bp, Homo sapiens
gtgcaattctcttagtctggagattcagagtaagagaaattcagctcccattttttaagacttacacagacagcataatgctgtttacacaggtacagagktatttattttagtctctccatttcttcctaggaataaagtaatgcctgcactcagagcagttattctgaaaagggagtccatagacacacaaaattccag

SEQ ID NO: 540961 - DNA, 201 bp, Homo sapiens
aaataaatatataatatgtaaggtgcttaaaagaaaaacacagaaggctagaggactgagagggatggggtggatgctattttatgtagatcagggaaggstgctttgataaggtaactcaagaattcctacttaaggaagcagagaagcttaggaatgaaatatggatcactttctccttgcttagactctaaccaatat

SEQ ID NO: 540962 - DNA, 201 bp, Homo sapiens
aaaacctgtatcccacagtcatttatcaggcagcaatgtctagcttatggaaacccatctgcaggttcctaagcaagtagcccagattaatatcatagtgyagctagtcggtggctataattaaatgcagaagtggtattgagaggtgaagccagctggacttcttgggtcgagtggggacttggagaacttttctgtctt

SEQ ID NO: 540963 - DNA, 201 bp, Homo sapiens
caactgttctccataccttgaaataagagatgattcatctttctgactgctaggccatcagagcaacacacaccttctctgtgattaatttcggtgagagraacacccctgatgcaggtattattcttgatgtgacagcaaataatgaccctgctctctaatgcaccccaagtcactccgttatcacagtgaagtaaaagg

SEQ ID NO: 540964 - DNA, 201 bp, Homo sapiens
gccctccacaaactcaaaaaaaattaaattacaacttagcctttctattctgttcttccaatccattacatcttaagtcattagtggaatttgaacagttgtcatctcctttcaagatttacaaactcccccatttcctcatcaccagcagcttacatcactagctctcatagcttctcaaagccactattaaggaaacct

SEQ ID NO: 540965 - DNA, 201 bp, Homo sapiens
ggaaaacctgtatcccacagtcatttatcaggcagcaatgtctagcttatggaaacccatctgcaggttcctaagcaagtagcccagattaatatcatagkgcagctagtcggtggctataattaaatgcagaagtggtattgagaggtgaagccagctggacttcttgggtcgagtggggacttggagaacttttctgtc

SEQ ID NO: 540966 - DNA, 201 bp, Homo sapiens
atgcttcaaataacactactaggcagaaagtctacctacagttctatcatgaaaaaaggttcaaagtgggtagatgcaaggcttcttcaaacacttgtatytaataaagacgtgaaagagagttggtgaagactgggtgcggtggctcatgcctgtaatcccagtgctttgggaggccgaggcaggcagatcacctgaggt

SEQ ID NO: 540967 - DNA, 201 bp, Homo sapiens
aaaatacaaaaaaaattagccgggcttggtggtgagtgcctgtaattccagggaggctgaggcagaagaatcacttgaacccgcgaggtggaggttgcagygaaccaagattgtaccattgcactctagcctgggcgacaggagtgaaactctgccttagaaaaaaaaaaatgaagatagtaatacgccttatttcatgaa

SEQ ID NO: 540968 - DNA, 201 bp, Homo sapiens
aataaaattcaaatgtgctcatgttttcaatttaagtatgtctgttgtttgctgtttattcctttggtataaatagaagctttctggcttatttgaacgcrgaacacatagtacactgtttagatacaattattcattataaattaaatcaatgcttttcctttttagaataccatgccctaactagaatctctacaacat

SEQ ID NO: 540969 - DNA, 201 bp, Homo sapiens
atttatacattaggcacagtatgagattaatgataatagctaataataaaatagaacgattgtaacagtatgccagcatcactaagtgctttgggaccatsattaagtaaaataaaggtgacttgaacacaagcacttccatcccaccacagtggatctaagcaccaagatggccgctaggtgactcaccggcggggagcg

SEQ ID NO: 540970 - DNA, 201 bp, Homo sapiens
tgacactgggagaaatatccaagaaaggcaatcaaaaggcaagaagagcaaacacctaccataattttggttagagagaggaaaagtagtcaagaagggcraagatgcaaaaatggccataataaaaaaaatgatagatattgatggggatgtggtgaaacgggaacacttttacattgctggtgggaatgtagactaata

SEQ ID NO: 540971 - DNA, 201 bp, Homo sapiens
ccctgggttatccagtttttaaaaatccctgcatactagacaaacttcttttggaccacgtttctttcctaagagaagcttgaagacagcaaactaatttkcaaattaggcatttgtcaaacatttttaggaagatgaatcttgagcaaaacaaacttttgattatattcaaaaaacaccaaaaaaattctggagatctag

SEQ ID NO: 540972 - DNA, 201 bp, Homo sapiens
acctgaactgcagctgcagacccaggcctcctgctccacagagcaagcaggagccccgccctcttggggccacagccacccaaactgcagctgtagatccragtctccctgtgctcttgggggagcctggaacaggcaggatctgccttcccaggtgcagctgcagctgccgcacccacggctgcagacctgggcctccca

SEQ ID NO: 540973 - DNA, 201 bp, Homo sapiens
gccaaccctcccaggcacaggacctgggcgtctctgcagcctgcacccttgggcgccccaggaaggaccctccccatctctgcatgctcagatgtgtctgygcccactgcctggcctctctccgttccaggcacccactcagatctcagagctgggttggggccaagccccggggccatgaatggcagcaggaggaagaca

SEQ ID NO: 540974 - DNA, 201 bp, Homo sapiens
tacccatttcagagcagggagattccagagaagtcacctgggtgtcggcttctgagcactgtcttctcacgctcacactcctcctgttcctggcccccacyctcccgctctcagcagttacccccattatcaccatcatcacttcgctcctgcccggtccctctcctgtcatcacccccgctccggagtgaaagaaaggag

SEQ ID NO: 540975 - DNA, 201 bp, Homo sapiens
tctgtaggcatgcaaatgagaattggtctgactgactttgcggcagcagctgagccctgctaacttcccttcagaactcagcttgggctagcaaagaaaasacgcccactcacccacctaccccagcagctttgcagaagtgctgcagggtgaagacaatgaagaaaggcaaggctgaagaaagccgaggcattctgccct

SEQ ID NO: 540976 - DNA, 201 bp, Homo sapiens
cgtgatgatggagaccattcttgccttcccctcacattaaccagttcgtgactatggagaaacagggcaagtagctcttgatctgactggacggatggctytggagaccaggctctgaagagatgcttgtaaaaatctggagcttaacacaagaagcttaaaacaagaagctcctttaagtgttggagcttcagagaaagg

SEQ ID NO: 540977 - DNA, 201 bp, Homo sapiens
cttgacttattaagttattatgatgccgattcagcaagcccactactgggtatctacccagaggaaaataagtcattattcgaaaaagatacttgcacacrcatgtttatagcagcacaattcacaattgcaaaatcatggaaccaacccaaatgcccatcaattgagtggataaaggaactgtggtacatatatatgatg

SEQ ID NO: 540978 - DNA, 201 bp, Homo sapiens
agcttttggactcttggacctacactaatggttggccagggctcttgggcctttggccacaggctgaaggctgcactgtcggcttccctacttttgaggtyttgggactcagactggtcaaccactggcttccttgctcctcagcttgcaggtggcctattgtaggacttgaccttttgatcatgtgagtcaatattcctt

SEQ ID NO: 540979 - DNA, 201 bp, Homo sapiens
tttatttatttatttatttatttagagacagggtcttgctctgtcacttaggctggagtgtagtggtgtgatcatagctcacggcaacctcgaactcctcractcaagcagtcctcccagctcagcctcccaagtagctgggattacaggtgtgacccatcatgtccggccaggaacatgtttttgatccatactgatgga

SEQ ID NO: 540980 - DNA, 201 bp, Homo sapiens
tcttcctctattcctcgtcccctgccccgagatattatctgtgcccaagctgcaggggttgaggtcacacatctggtgccaaggagctgtcagtgcctccrgcagtggcacagttcatggttcacggttcttctcctggcccctcccttggtctggcatgctgacagaaaattgttctttttttcatcatttgtctgtgac

SEQ ID NO: 540981 - DNA, 201 bp, Homo sapiens
cacagaagaaccaagggagtaaggaagctgctggtttccaaagaaaatgcttacttcccatttgcaaagcgtttcgctggaaatgctgtgttgagttacaycatccaactaggaattaaatatattatgctctttggtaaattatcaaaatgtaaaccaacagctacagtggagaccatctgaactgccaagagttttaac

SEQ ID NO: 540982 - DNA, 201 bp, Homo sapiens
tgagttgcagagtatgaccacgagagcacttaaaggagactgatcaaagtcagaaaacagatgttaagaacgtgaacctcaaattcatttattcattcgaygcaatagctgcatttctaaaaatcttcatataatcgaaattcagtaggaattttttcaatgaggaggaagacagtcttagatgttcaaaaacaaaagcat

SEQ ID NO: 540983 - DNA, 201 bp, Homo sapiens
aaggccacagctttcccgcccttttcatcagaggacgtggacggcatgtggccggccaccagggcaggatagagctttttcaggatggcccaccagcctgmaggaagattcccagactcagttcctcagaatctgaagggcactcctccaagtcccacagagcagcccacaagtgtttaacgtgacacttactatgcagtc

SEQ ID NO: 540984 - DNA, 201 bp, Homo sapiens
gctggctatttacaaccttgctctgctctaaaactttctacgggacaaccattcagacccgagttctatgtacaataggtttcagccttagcaaattagayagatgcactgacttacttgctaaagaacctgaggaatgacgccttaatttttattataggatatattaatagtgtttggtaaagctgatatagagtcagg

SEQ ID NO: 540985 - DNA, 201 bp, Homo sapiens
ttcatttattcattcgatgcaatagctgcatttctaaaaatcttcatataatcgaaattcagtaggaattttttcaatgaggaggaagacagtcttagatrttcaaaaacaaaagcatttttcctgtattgaatttcaataataatagtgttttgtgtggttataagtgcagtactataaaacttaaatatgattgagcga

SEQ ID NO: 540986 - DNA, 201 bp, Homo sapiens
ctgcatatcaagaataaaatgaaaataaaatgtaagttgaacatatagatgataaatacccaatctgtgctgagcagctgtagaacgacgtctcaggaaaytagtattttaaagacaagatgtcatgtgctcctattgacaacttattcctggccttatttgttcaacacgcaggtccttcaggtattgctgtagcacaac

SEQ ID NO: 540987 - DNA, 201 bp, Homo sapiens
tataatcataatcataataagactgatgtaaaaagaaaaaaaaaaaagattcccattcctgctgaccccagcagaaaaagagagaaagaaagaaaattaaraaaatgattaatacagcttccttccacttttagaccgttctgtgggcttggagatccaccttcgaggcaatcagagcagactatccattatccaaagtta

SEQ ID NO: 540988 - DNA, 201 bp, Homo sapiens
ataatcataatcataataagactgatgtaaaaagaaaaaaaaaaaagattcccattcctgctgaccccagcagaaaaagagagaaagaaagaaaattaagwaaatgattaatacagcttccttccacttttagaccgttctgtgggcttggagatccaccttcgaggcaatcagagcagactatccattatccaaagttaa

SEQ ID NO: 540989 - DNA, 201 bp, Homo sapiens
gaatcggaattgtcaaccaggtccaaagcatcaaattataaaacctgatgtctcagaaatagacaagaaaactcagaaaaaataattattacagtccaatygcacacaaagaaaagtgagaataaaaggcaagttatatagtttatatttctacaaattccttttgagttactgggcaacattctatttaagtggaccctt

SEQ ID NO: 540990 - DNA, 201 bp, Homo sapiens
agacactagaaaatattttctggcccatcccttatccctaaaaatacaagaaaactcattccacttaaaaatgagtaacaaaataggattgtggtcaaatrcagtgcacagttattataagaagaaaaatcagagtagcattcttaccacagagacatgcccccaaaacagatgaaaactttaatatttcaaaagagctaa

SEQ ID NO: 540991 - DNA, 201 bp, Homo sapiens
tttttggctcaccacgctggctggtaattattgttcatatggctttcacttaaactaacctcagagtaacacaagcacagaaaatgtattcatagttataytccagcttggaacacagatgttgacctaacagtggcttcataaatatttgttgaatgaatgaataaagatggatgggtgagtggatgacatgacaatata

SEQ ID NO: 540992 - DNA, 201 bp, Homo sapiens
tatgtaactcagctcccactcaaatgtgtaaggcaacatactgatagaaatcaacataagccaggaagttcaaagcatgacaaactgtctttactttaccrgcttggtaaaaacagaatttggagagaggaggaggatttaaacaagttcactgcaagttactggcttgtatcaatcttttcttttttaactaaaaatatc

SEQ ID NO: 540993 - DNA, 201 bp, Homo sapiens
acctaacagtggcttcataaatatttgttgaatgaatgaataaagatggatgggtgagtggatgacatgacaatatactttcatcaaactagggaaaaatmtttatgtaaatatacatatatattacatatatacttctaaaaattgtggtaaactacacaaatataaaatgtaccatcttaaacatttttaactatacag

SEQ ID NO: 540994 - DNA, 201 bp, Homo sapiens
ttttattttttggatgctatcagtacccacagaaaatggggttgtaaggattttattagttttatgtaactcagctcccactcaaatgtgtaaggcaacayactgatagaaatcaacataagccaggaagttcaaagcatgacaaactgtctttactttaccggcttggtaaaaacagaatttggagagaggaggaggatt

SEQ ID NO: 540995 - DNA, 201 bp, Homo sapiens
ttttaacatacgtacatttaaaaaattcttaaaaatgtaattgaatgatctagggtgtggggtacccaggttcttcacttcccccttgcccccacctgctrtatatcttgtgcctttcagccccacttagggcatctttagcaagaaatgtggtaaatgtggttgagacatgtggtcaatgaaactcctgcctactagctt

SEQ ID NO: 540996 - DNA, 201 bp, Homo sapiens
caatctataacgtttccaacgtagaagataaaatgaacccataataaacatatttgggaaaatatacaaagaacttcacagaaagctctcaacggagagcmtgaagggaccagccagggagtctaatgcaagccaggaacagccaggcatgagtaatgccttagatgggtgggttttgttttctttcacagctgatttgaa

SEQ ID NO: 540997 - DNA, 201 bp, Homo sapiens
gacagcagatacctacacagagaaatgatctgattgtacaatcttcccatccacaaggacttctcagagcagatgacattaaatttcaagattccatataygagatcaatttgatttcctgatgttttcaaccttgctgtcatgggtgcattaaaggaaatacacctcaaaaagctcaactttaaaggtgcagtggctgca

SEQ ID NO: 540998 - DNA, 201 bp, Homo sapiens
aaatgcactccctccacctggagaaggcgtcctcacctaccaccaacagtgcaacttcgagatgaagtcatttacaacccagaggagatggatggtcaccyggccggccaactcaaaagggcacagataagattagatggacctcctaccccaccggtttcatacttgacgagcagggtttgcagaagaaggtttcatggt

SEQ ID NO: 540999 - DNA, 201 bp, Homo sapiens
agccttttagaaagcaattcagagcaagctccctctaacttagtattgagccttctgatgtgagtgtgtcctcggtaaatacttgtgtgcaaagacattcrctgcggctttacaacagtaaacaattagaaacaactcgaatgtccaaaaatgataggaaacttaaaaattaagataaaacaacctgatagaatgttatgt

SEQ ID NO: 541000 - DNA, 201 bp, Homo sapiens
tacagagtcaagtagatggcacattgtgatttacgcatatcatgtgagatgaataaatcaacggtagaaaagatcaaagaaatgctggaattgttgttaaracgtacagggcttcactgaaaatcttaataaaactgtttagaggaaaatagaaggatcatttgtttaacgagataccgcatacgctgaatttcaaacgca

SEQ ID NO: 541001 - DNA, 201 bp, Homo sapiens
gccaagtggaattaatcaggcaaggtgcaacggctgggtgtggtagctgatgcctgtaatcccagcactttgggaggccaaggcaggttgatcaccaaagrgcaggagaccagcctggccaacatggtgaaaccccgtctctactaaaaatagaaaaattagctgggcatggtggcaggtgtctgtagtcccagctacttg

SEQ ID NO: 541002 - DNA, 201 bp, Homo sapiens
gggaaaggggcagttataaattgctaagttattgtgtttatattcagcacatcttgcagccaagattctgtttctctttctctctctctctctctctctcwcacacacacacacacacacacatacagacacacacacaatcagtgtaaagattctgacctatgcctggaaatacaatcctaagtctagataaaggggaga

SEQ ID NO: 541003 - DNA, 201 bp, Homo sapiens
gccacatcaatgttgaagctactctccgctgcctcttaccttctctctacacattctacaccagctgacgtcatccctgaattcagtcatccccctcctgbgtgtcaaactttttgccaggcccaagaacccaatttcaaagatcacttttatgccaaggactcctccaaatttatcttcagacttgacctctcggcagtt

SEQ ID NO: 541004 - DNA, 201 bp, Homo sapiens
acataaatgacttcaacagccacatcctgatgcacaagggaaaacaaaggaatggaaatttcaaaaagctaaagtcacaaaaagtaatggaaggagtagtracaacagcagcaaagggaaatgccctgggcggggagacagacccccacccacacatccccagcacttgttttcttgactctggaggcgctttcttgatta

SEQ ID NO: 541005 - DNA, 201 bp, Homo sapiens
gaaaggggcagttataaattgctaagttattgtgtttatattcagcacatcttgcagccaagattctgtttctctttctctctctctctctctctctctcwcacacacacacacacacacatacagacacacacacaatcagtgtaaagattctgacctatgcctggaaatacaatcctaagtctagataaaggggagagc

SEQ ID NO: 541006 - DNA, 201 bp, Homo sapiens
cctattggccacataattcttaaacaaccagaaaaaagctgaagtatgaccatcaatacgggacatggaacatgccaaaagatcgaaagattctttcttcyccctctttaggactaaacagctgtgggcataaagaaaaaatcaattccattattttagaaagcataatattccacccttcattatttctttgagaatggt

SEQ ID NO: 541007 - DNA, 201 bp, Homo sapiens
ccaggtcggctgaggacggggccccgtaccgccggctcttctccatctcaccgttcaggacctccttggcctggatggcctgctgcagccggctgctctcrgctttcttggtggcctcccgagggacaaagtggctgccggagtcggcgtattgcatgacgacctgggaggggggccccagggtgagcgtgtgtgggatca

SEQ ID NO: 541008 - DNA, 201 bp, Homo sapiens
tcttttccttagaagtagaaaccttggttttgaggtagacacattgctgcccaactgaatgacctgatcttcttcttgccttgcaagaaggtatgcctagmcttgcaagaaggtatgcctagccttgcagctaggtatgcctagactaaattcttgttgacatgaagtaaacaaaaatgtggtatggttcctctggcaagt

SEQ ID NO: 541009 - DNA, 201 bp, Homo sapiens
cgatctgctaacgtatttttttagccctatccattaaaattatattcttaaataccggtaattaccaattatccacattaaacagaaaaaaaaattttttwaaaatcagtagcagggttactataaaatcatccccaaactagtgaatgctggactgattttcagtctttgattactggaactgatctgcacatttgctta

SEQ ID NO: 541010 - DNA, 201 bp, Homo sapiens
agtatgaccatcaatacgggacatggaacatgccaaaagatcgaaagattctttcttctccctctttaggactaaacagctgtgggcataaagaaaaaatmaattccattattttagaaagcataatattccacccttcattatttctttgagaatggttggaattattacatctacgagaggttagcctctatcgattga

SEQ ID NO: 541011 - DNA, 201 bp, Homo sapiens
agggacacctggaagtgtctgaggacatttttgattgtcacaactgccgggtgctaccagcatccagcgcatagaggccaggaatgctgctaaatttctcmcaatgcacgggacacctccaccccctccatctccctgcttccccaaataggatgatctgggccccaaatgtcaacagtgctgttgagattccctgctcta

SEQ ID NO: 541012 - DNA, 201 bp, Homo sapiens
aagacaagaggtggaggtggcagcaagcggggagggaagacacataattctccttctaaccctctggctctcaaccggaagcaattttgctctgcaagggrcacctggaagtgtctgaggacatttttgattgtcacaactgccgggtgctaccagcatccagcgcatagaggccaggaatgctgctaaatttctcccaat

SEQ ID NO: 541013 - DNA, 201 bp, Homo sapiens
ggagacagaggctatagggagctgtgattgcacactgcactccagctggacagcaaagtgagacactgtatcaaaataaataaataaataaataaacaaayaaacaaacaaacaaacaaacaaataaatgaacctgtggtagagtagagaatgtagagacagaagtttatgtggtaggaaggggacatgtgatacgaggtt

SEQ ID NO: 541014 - DNA, 201 bp, Homo sapiens
gtacacatccacccagcaggctatagaatgtttctctcccaagggcaatgaattggtttagccacaggattttcttcaaaggaggtcctcaacatgccagygggtacttccctgattttggtcaggatgcaatccaggtgtacatcactggcttgtgacatctgtaatctgcccagatcacagatgcgcagaaacaaggca

SEQ ID NO: 541015 - DNA, 201 bp, Homo sapiens
aaagccaaaaatacatccacctcaaaggaagaaaagtttgaaaccattcaactggagtgaatgtggcacactcttgttctctgcctgggagaacaagtcasctgatatgagcctgcttttctgtgtgaagaatgtacagagtttgaaaagatccttcttcttccctcatccttcccattgctgtgcaccttcatgggtcat

SEQ ID NO: 541016 - DNA, 201 bp, Homo sapiens
ccatgcggtttagattctaacatccaaatccaattgtgtgtctctggtaaacatgacttgcccagtaaaaccgtgctgatactacatgttccacagttacrttatcattatattttcggactaacttttggaaatgttgtcttgtcgttgtattgtatcatcctgagtaagtgttaaattccttaatatttgccacaacca

SEQ ID NO: 541017 - DNA, 201 bp, Homo sapiens
ctggaaacttcagttcgccattctcagagagcatctgggcactcccctggttgattccgttttcctgctcggcatacctgtgtctgctgcccgccaggccrtcggcctttgagtgcttcagcaggacgctggcgggatccacgggctggccctttttaacagagccgttcttcaggttcttgagggtaagcgagatgcaga

SEQ ID NO: 541018 - DNA, 201 bp, Homo sapiens
tggccaacatggtgaaaccccatctctactaaaaatacaaaaaattagccaggcgtggtggtgggaggctgtaatcccagctacttgggaggctgaggcargtgaatcacttgaacccgggaggcagaggttgcagtgagccgagatcacgccactgcactccagcctggcgacagagcgaggctctgtctcaaaataata

SEQ ID NO: 541019 - DNA, 201 bp, Homo sapiens
acaccatgcatgggaattaatggggctctgcttcactcttcctttccctttataaatgtccagagagctaacaactgcaaagatgtggaagtatatctaarctctttttatgttttaacacaatagacatttaagggaataaacttgagccatgctagctccaggactaggattgacatatgtttccttcagggtgcccga

SEQ ID NO: 541020 - DNA, 201 bp, Homo sapiens
tccctgagtatggtggccacatcatacttgtaaccctaaactccataaatctccaaaggtcccacggtgatcatcaaagattggatcaagtgaccaagttrtaagaaagaggatatgctcgtatgcctcagaagcttactgtgtgaataactaattccttgaaagccttctgtaactattactttatggaatagtcaacct

SEQ ID NO: 541021 - DNA, 201 bp, Homo sapiens
aataatagcctgtcttacttcactattgtcactttaccgatgcaagtatttaagctgttcagatcctaatctatgtgttattttcagataactacagtttraagaattaacattcactcccacatttacctacttacgtgagtttcagaattttagtaaaatatgtttattgcttaacttttaataggaaacaaaatgagt

SEQ ID NO: 541022 - DNA, 201 bp, Homo sapiens
ttagttggattgcctgagcagcacagagcttcagcaactaaagcaacttttccttttttcctttttgccataatattatttctctttgcttagccagcttyatcagtggtgccctaatgcaaagactagaatactgctttctaactgctcactaaattacatcctaaaataaagtacatgtttattgtccaaaagcaccat

SEQ ID NO: 541023 - DNA, 201 bp, Homo sapiens
cgtttctcgcttagctaaggaaaaaaaaatccttttaacttactaccaaagatcattcaaatcacagccaatagatccaaattaagaatgaatacattcasaatgtctgcctactgtcagtaccagtttttgttatgatggctgtcaagttttaaaatgtgacaatgggaatatattttccgaataagttattcccctgag

SEQ ID NO: 541024 - DNA, 201 bp, Homo sapiens
gagttctagagaagttccacaaaactgtgctccacctgctggccttctggggaagctgcgtctgggctgatgatgctggttgcgggttgagcgaaaacaargaacagatttgagtttgtccaaaacatgcttggtacttgaaaattaacccttcaagactgggcatgtgtccagtgatgctctgaagctggcaaagatgag

SEQ ID NO: 541025 - DNA, 201 bp, Homo sapiens
cagagccaggcagaagcaatatctgtgcaagagaaagttggaggagaggcagtgggcatctgaaggttttggcacaacgggctcccaagcttccaaaggtycttacggcacggtcagcagggtggtgagctattttgagcacagcagcatcattggcaaggggtcctgcagaatccaattcatggggtgagggcaaggaac

SEQ ID NO: 541026 - DNA, 201 bp, Homo sapiens
tccatgtcagtgctgccgaccgggatgagcaggggctgtgtgccggggatcaccaggtgctggggcaggctgccggcgtaggtgattgcttgctgctggcygctcaggtagccgatgacagggggttgagtccctgcgtagaaggccgtggctggcagtcccaccgggagtggctctgaagcactgtgtgtggtctgaatg

SEQ ID NO: 541027 - DNA, 201 bp, Homo sapiens
gaaacaacagaagacggagttctatggcctagacactagaaaatattttctggcccatcccttatccctaaaaatacaagaaaactcattccacttaaaartgagtaacaaaataggattgtggtcaaatacagtgcacagttattataagaagaaaaatcagagtagcattcttaccacagagacatgcccccaaaacag

SEQ ID NO: 541028 - DNA, 201 bp, Homo sapiens
atgtcagtgtctggggtgggtgggaaatccaaagggaagttctaagagtgaagcctgtttccatctgataggtcaaaatacatgaatatgtacccatctcyctaggcaaccatggtcaactgttgaaaaccacttcttgctttacatcaaaatgtgttagtagaaaacaaaaataccttgggtcaagcatatccccaaatt

SEQ ID NO: 541029 - DNA, 201 bp, Homo sapiens
ttccttagatgaaggctgtctcccaataaaagccacaacttggggtcatacttctctctagtctgggttgcagtgacccaggcagctccagaggtgaactrgacacagagcctggaaaaggggaagaataatcaaaacaaaattcatccagagtcatttctgcctccccttggaacctgccagggcagggcaaggttaaaa

SEQ ID NO: 541030 - DNA, 201 bp, Homo sapiens
gagttttcttcctggcaaattgctctgccgccaccatgggtattaacactccaggatccctgcaactttcccttcttcctctattcctcgtcccctgcccygagatattatctgtgcccaagctgcaggggttgaggtcacacatctggtgccaaggagctgtcagtgcctccggcagtggcacagttcatggttcacggt

SEQ ID NO: 541031 - DNA, 201 bp, Homo sapiens
cgggtacatacgaacagctccccaaagccattagcaaaggttatttgtaagtggaaaatcaagagacataaagatttcaaagtcaaaatgcaatgttattyagttttctgcagcacataacaaggcaaaaactttcagtcagagagaaaagcaaaagcaagatcattgctccttcacagagactggtaaataaagaatgta

SEQ ID NO: 541032 - DNA, 201 bp, Homo sapiens
caaaaaaaaaaaaaaaaaaaaaaagttatgaaggtcttctgaaaacaagaaaacactattcagatgaaaactattatatttatagattactattttttttwaaaaaaaagaagctcttctttgaattacctataatgcaacagcagcaccatcaaaattgtgcacaattcaatcagaggttctcaaacatggctgcccatc

SEQ ID NO: 541033 - DNA, 201 bp, Homo sapiens
gggaggtggaggttgcggtgagccaagattgcgccattgcattccagcctggccaacaagagcgaaactccgtctcaaaaaaaaaaaaaaaaaaaaacaaraacaaaaacaaaaactcatcatcatccctcattttactctattttactattatctgtatgactgaggttaattacatctacttgtatagtggatataaag

SEQ ID NO: 541034 - DNA, 201 bp, Homo sapiens
attgcattccagcctggccaacaagagcgaaactccgtctcaaaaaaaaaaaaaaaaaaaaacaagaacaaaaacaaaaactcatcatcatccctcatttwactctattttactattatctgtatgactgaggttaattacatctacttgtatagtggatataaagtcatgcaccacataacaacatttgggtcagccgcg

SEQ ID NO: 541035 - DNA, 201 bp, Homo sapiens
agcctggccaacaagagcgaaactccgtctcaaaaaaaaaaaaaaaaaaaaacaagaacaaaaacaaaaactcatcatcatccctcattttactctatttwactattatctgtatgactgaggttaattacatctacttgtatagtggatataaagtcatgcaccacataacaacatttgggtcagccgcggattgcatat

SEQ ID NO: 541036 - DNA, 201 bp, Homo sapiens
aaaaaaaaaaaaaaaaaaaaacaagaacaaaaacaaaaactcatcatcatccctcattttactctattttactattatctgtatgactgaggttaattacwtctacttgtatagtggatataaagtcatgcaccacataacaacatttgggtcagccgcggattgcatatgtgacagcggtcacataagattataatggag

SEQ ID NO: 541037 - DNA, 201 bp, Homo sapiens
tgcaagactccgtcttaaaaaaaacaaaaacaaaacaaaaaaaaaactgaaagaatagttctgtttgccttctgtatggaaaaacattgcaatggtacaastggacaacagggggcaatagagagactgcctgtctttttttttttttttttttttttttttaaccagccagaactaaagtgggctgtgacctcccccagg

SEQ ID NO: 541038 - DNA, 201 bp, Homo sapiens
gaacaaaaacaaaaactcatcatcatccctcattttactctattttactattatctgtatgactgaggttaattacatctacttgtatagtggatataaaktcatgcaccacataacaacatttgggtcagccgcggattgcatatgtgacagcggtcacataagattataatggagctgaaaattttctactgcctactg

SEQ ID NO: 541039 - DNA, 201 bp, Homo sapiens
gaggttaattacatctacttgtatagtggatataaagtcatgcaccacataacaacatttgggtcagccgcggattgcatatgtgacagcggtcacataarattataatggagctgaaaattttctactgcctactgatgctgtagctgtccaatgtaatagtgtaatacattactcatatgtttgtggtgatgctggtat

SEQ ID NO: 541040 - DNA, 201 bp, Homo sapiens
tagtggatataaagtcatgcaccacataacaacatttgggtcagccgcggattgcatatgtgacagcggtcacataagattataatggagctgaaaatttyctactgcctactgatgctgtagctgtccaatgtaatagtgtaatacattactcatatgtttgtggtgatgctggtatatataaacgtcctgcagtgccag

SEQ ID NO: 541041 - DNA, 201 bp, Homo sapiens
cctggtgacagagcgagactccgtctcaaaaaaaaaaaaaaaaaaaaaaaaaagccaattaactgtaaacagcctcaggcaggtccctctggaggtgttcwagaagaaggcattgttatcatcgcagatgatggctccattcatggtattgcctctgaagaccttacagatggaaaagataaggaggtagaagacagtgat

SEQ ID NO: 541042 - DNA, 201 bp, Homo sapiens
cctctgaagaccttacagatggaaaagataaggaggtagaagacagtgatactgaccatcatgaccctgtgtggggctaggctaatgtatgtgtttgtgtyttagtttttaacagaaaacttaaaaaaaaaaaactttttttaataagaaaaagcttataaactggatgtggtggtgtacacctgtaatcccagcattttg

SEQ ID NO: 541043 - DNA, 201 bp, Homo sapiens
atctgtttggtcaggcactgtcccaagatctaggccacttctcaagtccaggcatgctggtccttcagtatgtggatgatttacttttggctaccagttcrgaagcttcatgccagcaggctactctagatctcttgaactttctagctaatcaagggtacaaggcatctaaatcgaaggcccagctctgcctacaacaag

SEQ ID NO: 541044 - DNA, 201 bp, Homo sapiens
aggaaagacaactaagccaaggatcttatacccagccaaaatgatcttccagccaacaacaatctgttatgaatatgcaaggacccaaggaatattgttcrcagaaacccttagtaatctgcaagggagaagagtcaggcaaccagtctggctggaaaggcactgatacaaagactgggtgagcatttaacacataatcag

SEQ ID NO: 541045 - DNA, 201 bp, Homo sapiens
accctggctgtcagtagagagatttagtgatctcactatgggaaaaaacatgagaacagggctctgacttcacagggaagccaatttctctttcatttaakcattaattttgcaaagtttggagtagggaaaaacacacctagatcttcctccccaagaacagaagagggctgtaaggggctgggcgcagtggctcacgcc

SEQ ID NO: 541046 - DNA, 201 bp, Homo sapiens
acgtattagtcactgttgggacaatgaatatgggttttccaagaggtgatcaagcctttacttgatggattttcttttctccacgccccaagattttctargcttttggtaggaagcactatacagaaagcacccacgtctcctagctgattctgtgtctggagttggttccttctggtgggttcgtggtctcgctgactt

SEQ ID NO: 541047 - DNA, 201 bp, Homo sapiens
gacaaagaagttctcaaccttcttgaaccctcactggtgcccaaatgtctatggtcctcagtctcctcgatactaaccccttcgtctccccccataccccsctcccataaaaaccctccaaccagcctaaaaaattggagattttacttaatttttacaaaattattatttcttgagatggattctctgttgcccaggctg

SEQ ID NO: 541048 - DNA, 201 bp, Homo sapiens
cagtgtcaaaggtagcacagtttaaaaaaatttttcagaatccctgccctcctcctccctgccagtaacaatagcaatgataacaacaaaaacagagaaaytggaattacacagccaaaaacccatggaccacatcaagacaaaatgaggttactgtgtagtccataaacctgaagacaggaatgggtgtggccgaaccat

SEQ ID NO: 541049 - DNA, 201 bp, Homo sapiens
tgggtgtgatggtaggcacctgtaatcccagctactcgggaggctgaggcaggagaatcacttgaacccgggaggcggaggttgcagtgagctgagacggygccattgcactccagcctgggggacaagagcaagacttcgtctcaaaaaaaaaaaaaaattgaagtggggccaggtgcggtggctcatgcctgtaatccc

SEQ ID NO: 541050 - DNA, 201 bp, Homo sapiens
gggggaagtgttccaccaggtgaaactggcctggtggctgtggggtacaggggaagaggtgagcaggctggggtggggatgaggacagtggcagaagattsacgaaggcattgtgcagcaccccatgcaaaggggcgcctctccgtcacacaggtactggcatgagggtgtggggaccgagtcctatgagttcctgggtct

SEQ ID NO: 541051 - DNA, 201 bp, Homo sapiens
aggcctcatttggaggtctgagttgaatttcaaaaatcaaatacaaaaacactggcagaagtttagagaggcagaaaagagcattaccacaagaaaagacrcgggaggcttcaccagaacaggcaggaggaagtaggtgaggcacagcaggtgaagtgggggaagtgttccaccaggtgaaactggcctggtggctgtggg

SEQ ID NO: 541052 - DNA, 201 bp, Homo sapiens
ccaccatgccctgctaatttttgtatttttagtacagatggggtttcaccgtgttggccagaatggtcttgatctcttgacctcatgaaccacccgcttcrgcctcccaaagtgctgagattacaggcgtgagccactgagcctggccgcagcccaaattctgaacggggaaagaggataaggtaacgtctcctacttttg

SEQ ID NO: 541053 - DNA, 201 bp, Homo sapiens
agagagaaaaagaaacgaaagaagaaaaaagaaaaaaggagagtgggatttctgctcttagagtctctagttgcagacaactggcctctgtgtcctgaatygccctcccaggggacccccgaggagtttatctctggaagcacctgccacaacaaaaagatttcttccaaacatggggccatgcacaattatatcaatgcc

SEQ ID NO: 541054 - DNA, 201 bp, Homo sapiens
taagttatgtgacacagagcatttagcctacatcaaaagctaaaactgaaaaatgaaattcttatttaagtatgttgctatcttcactctaatgagatacrtggaacaaattactggggctagaatgtattataacaatagtaaggaagaaggttcctgctggatacttggtaagaggtgggtggggtccaggatttccag

SEQ ID NO: 541055 - DNA, 201 bp, Homo sapiens
aaacagcctcaaaatactttacaagtttaatcacctataagttatgaattaggcagcaacttcaatcattcccaaatgattgaatcatttacctcgctggkgtaaggtatatgtctggcaagccaaagccagaactagaaactcaagtaattcctttgattcttagaaaatgacgcagttgttagagctggttgcctgctg

SEQ ID NO: 541056 - DNA, 201 bp, Homo sapiens
ttaaaagttgactgtataataatgttaaatagcaggcataactttttttgaaaatttctccgtgatattagctatgcaaaaacactgactgaatgttcaaygctaatcaaattcatctcctcttaagagcagcgtataataaatgggtagcctaaaaggaatgctttgaacagaatgcttcactattgtctgattattcta

SEQ ID NO: 541057 - DNA, 201 bp, Homo sapiens
tccatggctcccagcataggctaaagttttattaggagaccaggagtgcacacatctctggccagggacagcaaagaaaggcagctgagtcctacaacacygctggaaggagaagccaacagtctaggatttaaaaaaaaaaagaagctgagtctgccattaagaatgaagtaaattgctaacacagatttttaatgttct

SEQ ID NO: 541058 - DNA, 201 bp, Homo sapiens
ccttctcgttttaagctagtgagctggaacccagccaggcagtgttaaacaggagcgagagactttccttcttcgtcaaggaagcttttgcagccccgttwttttgtttttttatttttcagagactgaatctagctctgtcacccaggctgtgcaatggcacgatcatagctcactgcagcctctaactcctgggctcaa

SEQ ID NO: 541059 - DNA, 201 bp, Homo sapiens
aaaggcaggcagtgaggggagagggaggaatgagagactttcacctgtacgaaggatgtctctggaaaacggaatgttgacagagagtaaacaagcaacawatgctattaatgcctgttaagtcacctttttgagattttttggtgactatcagtgaagtcttatgcctcttattaaattctcacactgttttaattaagt

SEQ ID NO: 541060 - DNA, 201 bp, Homo sapiens
ctggagaacctttgtgtctagctcagggattgtaaatgcaccaatcagtaccctgtcaaaacagaccactgggctctctgtaaaatggaccaatcagcagracatgggtagggccagataagagaataaaagcaggctgcccgagccagcagtggtaaccttctccgatccctttccacactgtggaagctttgttctttt

SEQ ID NO: 541061 - DNA, 201 bp, Homo sapiens
gagcccttcaccccgccgctgcactgtgggacctctttctgggctggccaaggccagagccggctccctcagcttgcgcggaggtgtggaaggagaggcgygggtgggaacccgggctgcgcgcgttgcttgtgggccagcgcgcgttccaggtggctgtgggctccgtgggccccgcactcggagcagcggcggaccccg

SEQ ID NO: 541062 - DNA, 201 bp, Homo sapiens
ccggcgtctggctcagactgcccatgttggccagcagagtggaataggcctccagctgggagcgctgggatggagtggtggcccctgcggccgaggccacygcactggtgacggggttggcggttggggggatcagctgtgatgggatgaagctggcataggttccactgtattgggaggacccaatgaactggaaggtgt

SEQ ID NO: 541063 - DNA, 201 bp, Homo sapiens
tggctaacgttacctgggctcggtgctccccgacggcgaactgtatcacggccacgcccgggctatggctgtcttcaatcctctctacggtgctggagtcratcttcaggtcgttgcttatctctgcactctggatgaaatcttctgtttttaagtcttccaccttctttagctccccgttggccaactggatgatggagc

SEQ ID NO: 541064 - DNA, 201 bp, Homo sapiens
gtggttattatttcaacacagaagtccttgtttacccgaagcagctgggaaatagggcttcgcataaaaccagagcagaagtagcagagaaagggacctgygagtgagtcctgcctggttctcggctcacactagtccagccttgggaaagagctgggacaccacaggtaaccaccttaatttaccctttgcctgtctggc

SEQ ID NO: 541065 - DNA, 201 bp, Homo sapiens
attatggtctctttcttactggttaactacaaaaagcaaggaaatggctgaaaggcaggcagtgaggggagagggaggaatgagagactttcacctgtacraaggatgtctctggaaaacggaatgttgacagagagtaaacaagcaacatatgctattaatgcctgttaagtcacctttttgagattttttggtgactat

SEQ ID NO: 541066 - DNA, 201 bp, Homo sapiens
accacacccagctaatttttgtatttttagtaaagatgcagtttcaccatgatggccaggcttgtctcgaactcctgacctcaggtgatctgtccgcctcrgcctcccaaagtgctgggattacaggtgtgagccaccgcgcctggcctctctggggttttctgaagccacatagacttacatgtttgaggatttcccatt

SEQ ID NO: 541067 - DNA, 201 bp, Homo sapiens
ctcagaagaccacgtgttgctcagaaaagaaaggtgggcaccaaaagaacaggtttctcataatatcctacccaggcccacagttagacgtattagtcacygttgggacaatgaatatgggttttccaagaggtgatcaagcctttacttgatggattttcttttctccacgccccaagattttctaggcttttggtagga

SEQ ID NO: 541068 - DNA, 201 bp, Homo sapiens
tatttaaatttactattaatttcattaccatgatgcttatgtttgcgtcataacatctgatggaatcttagtaatataaggcaaaattctttgttcattaygctggtccttcaatcagggatgtcctcattcattcaagcattgctcttcctttaagattcagctcgatgtcacttcctttgtgacatgctcccatacata

SEQ ID NO: 541069 - DNA, 201 bp, Homo sapiens
gcaccaccacgtccagctaattttgtatttttagtagagatggggtttctccatgttggccaggatggtctcgaccagcatgtggtctcccaaagtgctgkgattacaggcgtgagccactgcgcccaactatttttttaattttttagtagagacagggtcttgctatgtcgcccaggctggactcaaactactggtctc

SEQ ID NO: 541070 - DNA, 201 bp, Homo sapiens
atattaaagcattaattagcattagcatctgtgtaagaacataaaatgcctagaaaggagctcagaaaattaaggataaagaagagtcttatccgttgcarctgaaggactaatgattgtttcggtaatctgtgatatatgtgtgaaggaagcaaagcatcaacaacaaagcatttctgtacaaaaattatctatgaagtc

SEQ ID NO: 541071 - DNA, 201 bp, Homo sapiens
atattcaaccatgcagccatactcctcaactccctccgctcctctccggcaccaccctggctcatctggactctttccctggccccctaacacgtctcccygcgtccaccctgccaccctactaccttccttggctcctgcctaaggcattgcagtggctttccatttctaaacatggcccccaaaacctgcattctcttc

SEQ ID NO: 541072 - DNA, 201 bp, Homo sapiens
accttgagcttaaatagcttaaattccattgtgatgtcatcctcatctatcccctaatgttttctggaaatctaagcagaatagattctgcctcacctacrtttcctagctcagtgatggcatcaacatcactctgacgtcttcctctcccaaattatgccccatattcaaccatgcagccatactcctcaactccctccg

SEQ ID NO: 541073 - DNA, 201 bp, Homo sapiens
caacagcggaactctgtctaaaaaaaaaaaaaaagaaaattcctactcatttttcaaggccaaccttgagcttaaatagcttaaattccattgtgatgtcrtcctcatctatcccctaatgttttctggaaatctaagcagaatagattctgcctcacctacgtttcctagctcagtgatggcatcaacatcactctgacg

SEQ ID NO: 541074 - DNA, 201 bp, Homo sapiens
tagccatgacaaccaacacagctcaagaagcccggccttcggtaccgagagctctgcttcctcacccatatctgaaatagcacggtattagtgtcttcaaragcattggagatttttctctctatgaaagaaataggtttccttagtagtcacagatgttaaagggtattgtcaatcgtttccttaaaaaacaaaacaaaa

SEQ ID NO: 541075 - DNA, 201 bp, Homo sapiens; identical to SEQ ID NO: 365932

SEQ ID NO: 541076 - DNA, 201 bp, Homo sapiens
cttgtatagaatgaccctccctggttatagtagtcattttgtaacttttacattttttggttgattcattgattaatgcttgttttcccccacgaatcaayaaactccagaaagggagaactgtgtccactctcacccctcctttcatctttgggattcaatggaaagctttgcacattatgggcactcaataaaatcttc

SEQ ID NO: 541077 - DNA, 201 bp, Homo sapiens
catgtcagtctggtagtgccctcaacccaagttctggtgtctgttttcccttggcctgtgggaggcatatggtgggtaatgatctgatattaaaacatccrgtagtacgagtctcagagatggctctggagccaggactccactggctggaaatgaagactgtctaatctgaaggtcaccacaaatactgacaggactatc

SEQ ID NO: 541078 - DNA, 201 bp, Homo sapiens
cccctcagttttatatgccatggctttagttcccatgaggtctgtgtgccgcttagcatgaggtcagtacatgttcatcttaatgctcttcttggtttttkgttaaccgacgctaataaatttttacaagggctgtgctgttctggaaagtataaaagtgaagcattaaaaaacggaaccctctcaagagattatctccta

SEQ ID NO: 541079 - DNA, 201 bp, Homo sapiens
ggctgaagcaggagaattgcttgaacctgggaggcggaggttgcagtgagccaagatcacgccattgcaccccagcccaggtgacagtgcaagactccgtyttaaaaaaaacaaaaacaaaacaaaaaaaaaactgaaagaatagttctgtttgccttctgtatggaaaaacattgcaatggtacaagtggacaacagggg

SEQ ID NO: 541080 - DNA, 201 bp, Homo sapiens
gaacaaaaatataagcaaacaaataaatttaaaaactctggacaaaatgtttaaactttttttcttatagtactggacagcaaataagatagtaaaaaggycaggcgcggtggctcatgcctgtaatcccagcactttgggaggccaaggcgcgtggatcacctgaggtcaggagtttgagaccagcctggctaccatggc

SEQ ID NO: 541081 - DNA, 201 bp, Homo sapiens
agtgctggcattacaggtgtgagccactgcacccagccatgactttttttttagcaaacactttcttccaatctaggctttaagaatctagttaaaatttmttttaactaaaggaataaacttttaaagtacatggaaagagattcagaaagacctttttcatgaaatcaattcatgaagtaactaggtaaattataaatc

SEQ ID NO: 541082 - DNA, 201 bp, Homo sapiens
cgggaagagatgagccaactagggcagctcacatatggtgccagacggtgagggactctgtgcccaaggcacttgctgtaccacaggagctaggcagcccyggctgggaaggaagctctgctctcacccaacggctgctccaagggtgcccccagccaggtgatccagacagccatggtttcaaagctctgtgaaaaatgg

SEQ ID NO: 541083 - DNA, 201 bp, Homo sapiens
agcacacggcatcagcactgaattcttgttttgtttggctatgtttatttgtttaggtactcaggaaaatctccaccaggaaaaaatacagggtgttgaayagagggggaacagaacacagtagatacagtagcaagaaatgtttattgagcattgactatgtgccaggccaggcaatgttctcaggtttatatgtataca

SEQ ID NO: 541084 - DNA, 201 bp, Homo sapiens
tttccctaaggtcacaaagctgataagttgcagaactgagattcaaaactagaatttctgatattgtatttcattttctcccactacattaattttattamatttttcttgaattcatttttggttctattttataatagtagactctataaattctgctcattacataaacattttatgtgcttctaaatgaaactgact

SEQ ID NO: 541085 - DNA, 201 bp, Homo sapiens
caccctctctttgacaaagcatggcctgatttcccaatccttatggagctctgttgagggttacacagcaaggattctgcctgcctttaccttgcaattgmtatgagaataaattcaaaatggttcccgagttcagcatgtgactcccacttctgctgctaaaaaaacaagacagctattgtattgaatgcactctactca

SEQ ID NO: 541086 - DNA, 201 bp, Homo sapiens
agaccacaccactgaagctgaccaccccatgacccccaaccaagaaagggtaagccaacacagagaagccagggtgggcgctcagagagactcctgggtcyggtcacttctgtgggtccactaagcctgttcctggtaccccaatatcactaagtggcccaacttagaaatactagaatcaactcctctgccttccccctt

SEQ ID NO: 541087 - DNA, 201 bp, Homo sapiens
tgcacgggacacctccaccccctccatctccctgcttccccaaataggatgatctgggccccaaatgtcaacagtgctgttgagattccctgctctaaagrgaagcagaaaagatcagctgcagccagagaattttccattgaccttctaactgttgcctgggctcctggaggacatcctctgaagatgcttgtttccttg

SEQ ID NO: 541088 - DNA, 201 bp, Homo sapiens
tgcaccctctctttgacaaagcatggcctgatttcccaatccttatggagctctgttgagggttacacagcaaggattctgcctgcctttaccttgcaatwgctatgagaataaattcaaaatggttcccgagttcagcatgtgactcccacttctgctgctaaaaaaacaagacagctattgtattgaatgcactctact

SEQ ID NO: 541089 - DNA, 201 bp, Homo sapiens
gtgcatttttgtgtactttcgtgaaaaatatatgtatacttttttgagatggagtctcactctgtcgctcaggctggagtgtagtggtgcaatctcagctyactgcagcctcgacctcccaggttcaagcaattctcctgcctcagcctcctgagtagcggggaccacaggcgtgtgctaatttttgtattttagtaaaga

SEQ ID NO: 541090 - DNA, 201 bp, Homo sapiens
aatgtgttgaatcactaatcttactttgagtgtccttgtgagtcaacagggctctgggttcaccagggcttcatctataagtataattcagaatttttttrttggtcatttttctccttcccaagaaggtttttcctatcatttccaggtttcaagtaggacccacgtagattagggtcacagaaatatgtattctgccta

SEQ ID NO: 541091 - DNA, 201 bp, Homo sapiens
ttaagtgattagtacagtgactgacacatcctaaatcctcaatatgccagccagccattattattgttagaagaacaggctccctgcattgtgggcttttytgagtgtgtacactccctccttgtgtttctgatcgcaaataaatatttattaacaatgatttattgaataaaactatcagcaatcaagttccactttttt

SEQ ID NO: 541092 - DNA, 201 bp, Homo sapiens
catcactcttggtggaaattttcaacaaccacaaaggtgggggaaagggcgtggcgtacactgactccttagtcatgtttcctgatgttgccattttagtrtattttaagtatttacttatggcaacaattatagttcacaaagcactgttctctttttccatccggcagacccccttggtgtgctctactacaaaaggca

SEQ ID NO: 541093 - DNA, 201 bp, Homo sapiens
caggaaatgtcctttacattcacctgccctggacaatccactaggtttgtttgtcctcaaacgaaatggcctcacaccgctgagattttataatacttcargtttttataggttttctccttccttcactgtggttagtaagtttaacccaagaaagccctcttattccttctaatctatttgggaaactgaagaagtgaa

SEQ ID NO: 541094 - DNA, 201 bp, Homo sapiens
ggcttttctgagtgtgtacactccctccttgtgtttctgatcgcaaataaatatttattaacaatgatttattgaataaaactatcagcaatcaagttccrcttttttaagagccactccgtgtgtcactagaagatgcccaaatgaatggaggaaacaaatctaatggtttataagaaaagtgtgaagaatctgaatatc

SEQ ID NO: 541095 - DNA, 201 bp, Homo sapiens
tttacctgcagttgactatgtccacatgactaaattctggtcaagggaacatggaaggaagtggtatatgccaatttcaccaacaaacctcccaggagacygctcactctctcgcttccccacttctctcttctgccaggtgcagaagatccttagggtctcccaacactgagggaatgtctgagccttgcgatacaagga

SEQ ID NO: 541096 - DNA, 201 bp, Homo sapiens
gggttacatgaagatggtggcttccatcttgggatcttgcatcctcttctgggttactcacctgggggaggctgactgccaggctgtgatgcagtcctgtrgaagggcccacatggcatatcactgaggcctgctagcatctatgtgagtggatttggaagcagatccctaccgcccccaccctatccttcagatgaaacg

SEQ ID NO: 541097 - DNA, 201 bp, Homo sapiens
ttctaggttttgacagcagatctaatcttgagagagaggaatggggacatgaccaagctctgggtatacacacaaagaatgaaccatctgggaggactggmtaatttcaggaatttccccgtaatttagtaatggtaaacaagaacaggacccagctcctaagaagtgcagatgaatgaagtaaagtagaagcaggttcct

SEQ ID NO: 541098 - DNA, 201 bp, Homo sapiens
aatgtgagcatgttcaatctacagctttgatttcagtgtttaattttattatcaaagtattaagaatatgcctacctggtaagtttttagaaacataaagraactgacaactttgggaaatatatacgttctgaaagaacgaaattaaggcatttgctttgtgttctttctttaacagttcctaatctcccttcagtgtat

SEQ ID NO: 541099 - DNA, 201 bp, Homo sapiens
tgatctgccttacattttaagggctcatttggtctgattgtcaggaatagaccataaggggatataaattaaagcacaagttactgttataagcagcctgyaggatggcttccagtgatcccacctcttggaattcatgcccttgtaaagccttcttgagtgtggactggatttagtgactcaattctagcaaacagactg

SEQ ID NO: 541100 - DNA, 201 bp, Homo sapiens
ggggacaggaggtgaagaaatcatgaggaggtgggtgacttacaaatgaactttctttttcggtacctggaaacaaccaaagttttttttttctggcatcygtctgcctctcctatacttctcccactgtctaaatgcttcatcccagcccatataagagagcaccaaaaaaatttaatatagttaaccctttttcccaaa

SEQ ID NO: 541101 - DNA, 201 bp, Homo sapiens
atttacaacccagaggagatggatggtcacccggccggccaactcaaaagggcacagataagattagatggacctcctaccccaccggtttcatacttgaygagcagggtttgcagaagaaggtttcatggtcaccctacccctttaagcagttctcctttccatgtggtaccttaacctaaatctaaccaaccaacctca

SEQ ID NO: 541102 - DNA, 201 bp, Homo sapiens
ttcaaaaatgcaacaattagacacagattgcataataagagacaaacaggttctcagtagaatatcaactcagggaaaaaagaggtttattttgttttggktttttttttttttttttttttttgagacagagttttgctctttcacccaggctggagtgcagtggagtgatctcagctcactgcaacctctgccttctgg

SEQ ID NO: 541103 - DNA, 201 bp, Homo sapiens
actctaagctgagatttcaagaatgagggaaaggtagccagacagtgcagagagaggagctgggttctaaggaggaagaacaacatgtctaaaggctggarcaaaaaacagagtatggcgcttgaaggaggaagtgcgatgggaccgacgtgggacgaatacagggcaacatgtgagtgatgaggctggagagataaggaa

SEQ ID NO: 541104 - DNA, 201 bp, Homo sapiens
tgaaaacccatcggctgactgtcatccagttccctgagtatggtggccacatcatacttgtaaccctaaactccataaatctccaaaggtcccacggtgawcatcaaagattggatcaagtgaccaagttgtaagaaagaggatatgctcgtatgcctcagaagcttactgtgtgaataactaattccttgaaagccttct

SEQ ID NO: 541105 - DNA, 201 bp, Homo sapiens
ttatttgaaactccaaacacattttctcagagaaacagtgttataaatagtgcttagttttgcaggaaggcaaaaagagctatagagcttataatatagayaaactctagtaccatgagcaggggacaggaggtgaagaaatcatgaggaggtgggtgacttacaaatgaactttctttttcggtacctggaaacaaccaa

SEQ ID NO: 541106 - DNA, 201 bp, Homo sapiens
agaatgagggaaaggtagccagacagtgcagagagaggagctgggttctaaggaggaagaacaacatgtctaaaggctggaacaaaaaacagagtatggcrcttgaaggaggaagtgcgatgggaccgacgtgggacgaatacagggcaacatgtgagtgatgaggctggagagataaggaaggtcctcaaaacctacgga

SEQ ID NO: 541107 - DNA, 201 bp, Homo sapiens
ttttttagccttttatgagctcatcctcatctatgttgaaaacccatcggctgactgtcatccagttccctgagtatggtggccacatcatacttgtaacyctaaactccataaatctccaaaggtcccacggtgatcatcaaagattggatcaagtgaccaagttgtaagaaagaggatatgctcgtatgcctcagaagc

SEQ ID NO: 541108 - DNA, 201 bp, Homo sapiens
ggctatcatcaaaacgaaggcagagagaagtacacataagtcaacctgacaagcccatattgataaagcagagataaaagttatctccaggttacatgccyggtacaggcagttctcaatgtatgaatgagttgtatacagaaagttcatttgtaagtcatttatttgaaactccaaacacattttctcagagaaacagtg

SEQ ID NO: 541109 - DNA, 201 bp, Homo sapiens
ggcgcttgaaggaggaagtgcgatgggaccgacgtgggacgaatacagggcaacatgtgagtgatgaggctggagagataaggaaggtcctcaaaacctayggagccaggctaaggattctagactttatcctgaggaccatgagaacccagggagggagttaagaaaaacagagatgtcagcagatttcaaatacgaaca

SEQ ID NO: 541110 - DNA, 201 bp, Homo sapiens
tgctttctaccacattcatgtggtttcctgcacttcataatttaatatttgtaagagaaaaaaaaatgctgttatgaaaccccaataatgcatcacttgarggcagaaagccagctgctaacaagagtgacatctgagcatcatttctgaagctctgcttcagaaaggggatgtttagtaagaaagaacaataataaatgc

SEQ ID NO: 541111 - DNA, 201 bp, Homo sapiens
cagcaggggcttccctgtccaccacaacaccctggtgacatcgctgcactagtaaaaagcagaaatgaaatcccgcatgtggcagttgctctttaaaaaawatatatatcagtgcagtcaggccccatagggggaaatatatatctatacaattaaaagttgcttttattgtaaaatatgttggagagaaaaatgttcttt

SEQ ID NO: 541112 - DNA, 201 bp, Homo sapiens
cctacggagccaggctaaggattctagactttatcctgaggaccatgagaacccagggagggagttaagaaaaacagagatgtcagcagatttcaaatackaacaaatgttcattttggcttcaaagaggaaaaacatgttggaccagaacaacaatacatctagacaggccatttaggaggtatatcatatgccaaacca

SEQ ID NO: 541113 - DNA, 201 bp, Homo sapiens
aggaggctgaggcaggagaatcccttgaacctgggaagcagaggttgcagtaagctgagatggtgccactgcactccagcgtgggtgacagagagagactstgtctcaaaaaaaaaaaaaaggcagaactccagcatatgagctagggatgaagcagaggaagaggaggtgtccagcatcaacaaatggtgagctagtgac

SEQ ID NO: 541114 - DNA, 201 bp, Homo sapiens
aattaaaaaaggtctatgagaattgtagaattaaaatatacaccactgaaatcaagaatgcaatgagctttccagttgaatagacatggattaagaaagarttcaggaactggattctctaattagagctttagaagagactccacagagtgaacatagagacaaaaagatggtcaatatggaggagagggtaagagacac

SEQ ID NO: 541115 - DNA, 201 bp, Homo sapiens
ataagacagtttcaagaaggcctagccccaaacaggaaaaataaacaaaaagaaatcctcactgaggcagatgagaattaaactgctataaatcaaagacwtcttgtaaactaaacaggaaaaaatatcgttaaaagcctctagaacaggctgggtgtggtggctcctgcctgtaatcccagcactttgggaggccgaggt

SEQ ID NO: 541116 - DNA, 201 bp, Homo sapiens
ccccaaacaggaaaaataaacaaaaagaaatcctcactgaggcagatgagaattaaactgctataaatcaaagacatcttgtaaactaaacaggaaaaaawatcgttaaaagcctctagaacaggctgggtgtggtggctcctgcctgtaatcccagcactttgggaggccgaggtgggtggattacctgaggtcaggagt

SEQ ID NO: 541117 - DNA, 201 bp, Homo sapiens
catgccattgaaattattctcacagttttgacagtagagaaaaaccatcaaaagataccacaaaatgcataaaattaaagggaaatgtttcttgcatgggytgcagtactgttttaaacagaagggaaagaccattaaacatgactggtattcactaaattttaactacactggcatcaaagtctgagcctgtgagtgcaa

SEQ ID NO: 541118 - DNA, 201 bp, Homo sapiens
ttcttggaaaggactttccctgctgttctattaaaactgtcagcaaatagggccaaggcgctcactggtctatgccgaggacaccttaaagtaatcaggcygtcaaataaaggcaaacactttctcaacatttctaaagacggaaatagcgaaaagagtgttgcgttccaagcatatcagacttaagtcatttctgcctca

SEQ ID NO: 541119 - DNA, 201 bp, Homo sapiens
tgatttatattccttactttttaggatacaattgggagaagctcacgaatagaaagagaattctctaagatttcaacaggtgtatgatctgggatcatatyatgagggagtcaacagacagcatggaccttgctgagtaaacaggatgtgggtccaaatcccagctcttctaccttttcagctgaatgacctccaggctta

SEQ ID NO: 541120 - DNA, 201 bp, Homo sapiens
cactttgagaccagccttcctcaaaaaattcaatccctaggaagttgttcccaaccttccactggaagagctatccccggagaagagctacaacaggaaasgaatcagggtagcatcgtgcctctctggttcctacatggatgaaaaccagcgccaaggagcccattccttagcagggcagcctgctacgtagcagaaatg

SEQ ID NO: 541121 - DNA, 201 bp, Homo sapiens
cgtgcctctctggttcctacatggatgaaaaccagcgccaaggagcccattccttagcagggcagcctgctacgtagcagaaatgtaagacagaagttgtraagaccccgaccccagagacttggataatggttagactttggccaggcctgagattcctgactgatctctctaggccctagtcagggaggctgccagaca

SEQ ID NO: 541122 - DNA, 201 bp, Homo sapiens
aggtcaggagtttgagaccaacctgaccaacatggtgaaaccccatctctaccaaaaatacaaaaaattagccaggtgtggtggtgcgcacctgtaatccmagctactcaggaggctgaggcaggagaatcccttgaacctgggaagcagaggttgcagtaagctgagatggtgccactgcactccagcgtgggtgacaga

SEQ ID NO: 541123 - DNA, 201 bp, Homo sapiens
ttgggaggccgaggcaggcggattgcttgagctcagagttggagaccagcctgggcaacacagcaaaaccctgcctctacaaaaaatacaaaaattagccrggtgtggtggcctgcacctgtagtcccagctatttgggaggctgagatgggaagatcacttgagcccgggaggcagaggttgcagtgagccaagatcacc

SEQ ID NO: 541124 - DNA, 201 bp, Homo sapiens
atgcaatcatagaaaatgtcagcgcttaaaattcaaggtgactttgcgctacttcgtcagtattttagtattcataagacacttaaacttgcctaacataytataaaaacctaggtctcttctcaataagctgcccatattgaccaagagatatgactttttgctgcctgttttttcacaataaaattcttgagatatttc

SEQ ID NO: 541125 - DNA, 201 bp, Homo sapiens
cagtgtaaattcctaaaccaagtttgtaggaaggcatgaagaataaacactggaaaaattttaccacaaactgagtaactaacgaaattccatgaaagtgrtatgataataacagctaccattttttgaaagctttacgtgcatcaagactcatttaggtttttttgtttgtttgtttgtttgttttgttttttttgagaa

SEQ ID NO: 541126 - DNA, 201 bp, Homo sapiens
catggtgaaaccccgtctctactaaaaatacaaaaatttgctgggcatggtggcaggtgcttgtaatcccagctactcgggaggctgaggcaggagaatcrtttaaacggggaggcggaggttgcagtgcaccgagatcacaccattgcactccagtttggatagcaagagcgaaactccacctcaaaaataaaaataaaa

SEQ ID NO: 541127 - DNA, 201 bp, Homo sapiens
cctgttttttcacaataaaattcttgagatatttctgttatcacaaatgactccctttcaacaccacaggttaaaaaaaatgcacgtgtactcaacccatytgcaattaaactatttccccaaagatctaaatgtgaggattttcagcctagcacataaccgttaaaatgagtatcatccctaagagataaagtagcagta

SEQ ID NO: 541128 - DNA, 201 bp, Homo sapiens
ataaatgtggcaaacgtcattgttgtctaattttaagaaattgccaccgccaccccagctttcagcaaccacctccctaaatcagtcagcagccatcaacrtaaagaccctttaccaacaaaacgattatggttcaatgaagatgatcgttaacagtttttagcaataaagcattttaaaattaaggtatgtacttttgtt

SEQ ID NO: 541129 - DNA, 201 bp, Homo sapiens
acaaaaagaaatcctcactgaggcagatgagaattaaactgctataaatcaaagacatcttgtaaactaaacaggaaaaaatatcgttaaaagcctctagaacaggctgggtgtggtggctcctgcctgtaatcccagcactttgggaggccgaggtgggtggattacctgaggtcaggagtttgagaccagtctggccaa

SEQ ID NO: 541130 - DNA, 201 bp, Homo sapiens
gtacgtggtctaattttggatagctttgttatttttagtatgtttaataaaaaaaaaataaagttttttaaaccctcaaaattgactgcccaggaaactgrtttcaacttttcccaaacagaggcatttggctaagcttcctgtacacatgtctgcaccgcctccccaccccaccatcacaggagacgggaccacctccaa

SEQ ID NO: 541131 - DNA, 201 bp, Homo sapiens
tcctaaggccattatgggatattttggactttactggggtcctgccatcacatacactgtttctctgagaaacttagacttacaatctttctgaaaaggayacattataaattagtatttctacttttgggaaaaatctgtttcatgagaaacaaggcgtaatttatcactctgtcttttaagcagtcttatgagccaagt

SEQ ID NO: 541132 - DNA, 201 bp, Homo sapiens
gggaacctctaatctagtctgtcttcacagtttcaagcaggtccatttccaaggcaaatagaaattgatcccctattttctatttcacaatctcccttggytacatacactcaaacccttgtgttcccaagcccttactgccccaagttctagcaaacctctttttccttcctgatttaatttgaggcaatatcctctggc

SEQ ID NO: 541133 - DNA, 201 bp, Homo sapiens
caggatggtctcgatatcctgacctcatgatccacccgcctcagtctcccaaagtgctgggattacaggcgtgagccaccgtgtcaggcctccattggatyttatacacattcagacacacaaaaacacacatgcataattgaagtaccaaaaaaactttaaaagtagtagatttccacagattgttgcttttctacttca

SEQ ID NO: 541134 - DNA, 201 bp, Homo sapiens
tggacacagaccagaagccatctctagtctccaaaagcaggggcagaaggcggcgatcgtatgcagatccagccagccctcgctgacagcatggcttacaygccacttctggctctactcactttcaactgattttcacagagctgtttaggatgatgaagccaaagaacctggtgcttcaggacaaagtttctgtttgct

SEQ ID NO: 541135 - DNA, 201 bp, Homo sapiens
tgaggcaatatcctctggccctttcttcaatagagaaccatgagtcatcaccattgcatacaccctatgtctgcatgactctccaggccagaaaaacttastgtacgtgggaaaatcaggaagttgtaaaatccaaacagacacaaagaaattcaagattcaacaaatactggttcccctaaacaaataggtctctgtttt

SEQ ID NO: 541136 - DNA, 201 bp, Homo sapiens
gttcagttctgctaaacacctaaaaaactctgatatactacagctacgccaggcaaatcgcaagttgttggggggcgattcccagaaatatgtgaatcacrattgtgactcatcagtttgggaaatttaggacatgatcactatcagtcaaacatgatattattatctgccaaatgtccaagatataaatttccttggaaa

SEQ ID NO: 541137 - DNA, 201 bp, Homo sapiens
ggttggagtgcagtggcaccatctcagctcactgcaatctctgcctcctggattcgagcgattctcctgcctcagcctcccaagtagcagggattacaggygcccaccaccacccctggctaattttttatatttttagtagacacggggtttcattcaccatgttggccaagctagtcttgaactcctgatctcaggcga

SEQ ID NO: 541138 - DNA, 201 bp, Homo sapiens
aaagaaagaaaagaaaccaagcataccaaggacactgaaatataaaaggagcaaagtacgtggtctaattttggatagctttgttatttttagtatgtttmataaaaaaaaaataaagttttttaaaccctcaaaattgactgcccaggaaactgatttcaacttttcccaaacagaggcatttggctaagcttcctgtac

SEQ ID NO: 541139 - DNA, 201 bp, Homo sapiens
ggaaaattaaaatgaaagtatgttaacttcctatggctttaaatggtgtgtcttgcttgtaatgttggacactggactcctctagagccttcttaagtacsagagctgagttttctgtgtttatttaggtttcgagaactgctatttattactccgatactgcgtgttttcattccagaggagtgtgattgttaatttgtt

SEQ ID NO: 541140 - DNA, 201 bp, Homo sapiens
atatagattaaaccaaatagatagatactttaatcgaagttttaaaaaacaatcttggcaatttctcaacttcccacactatgcccaaacagagtttgcamagaaaatgatattcaacagccaacaaagtaagggagcatggctaggaggcaattttccaggtcaggactttatcctcagatggaaaacagagagcatcgc

SEQ ID NO: 541141 - DNA, 201 bp, Homo sapiens
cataaaatagctattaaattaattttcttgaattggcatgggacaagaagctatatagttcagttctgctaaacacctaaaaaactctgatatactacagmtacgccaggcaaatcgcaagttgttggggggcgattcccagaaatatgtgaatcacgattgtgactcatcagtttgggaaatttaggacatgatcactat

SEQ ID NO: 541142 - DNA, 201 bp, Homo sapiens
gtgcccaccaccacccctggctaattttttatatttttagtagacacggggtttcattcaccatgttggccaagctagtcttgaactcctgatctcaggcratctgcccgccacagcctcccaaaatgctaggattacagaagtgagtcaccgcgcccacctggcctgttaatgaaatttatgttaacctagataggcttg

SEQ ID NO: 541143 - DNA, 201 bp, Homo sapiens
ctccagaattcactgatacattaataatgaaatgtattcctctctccttaatttcacttaatgtgagcatgttcaatctacagctttgatttcagtgtttrattttattatcaaagtattaagaatatgcctacctggtaagtttttagaaacataaagaaactgacaactttgggaaatatatacgttctgaaagaacga

SEQ ID NO: 541144 - DNA, 201 bp, Homo sapiens
aacagaaaaaaaaattttttaaaaatcagtagcagggttactataaaatcatccccaaactagtgaatgctggactgattttcagtctttgattactggarctgatctgcacatttgcttaggctgattttaaacttagtttgggtttcctaagctcacgccaggtaacagtaggaagaaggaggcccaggtttatattgg

SEQ ID NO: 541145 - DNA, 201 bp, Homo sapiens
ctaattgagcacactagaagtcaacagctgtttctccaattagagtcacctataacaagtgaattcttagcagggaaaatcaccttaaaatatccatgtcragttaggaaaaaatgtttcataaaatagctattaaattaattttcttgaattggcatgggacaagaagctatatagttcagttctgctaaacacctaaaa

SEQ ID NO: 541146 - DNA, 201 bp, Homo sapiens
cctgaccaacatggtgaaaccctgtctctactaaaaatacaaaaaaattagccaggcgtgggagcaggtgcctgtaatctcagctactctgaaggctgaarcaggagaattgcttgaacctgggaggcggaggttgcagtgagccaagatcacgccattgcaccccagcccaggtgacagtgcaagactccgtcttaaaaa

SEQ ID NO: 541147 - DNA, 201 bp, Homo sapiens
acatggcagactctcaaaaatatcagttgacagactgattgaaaatagaatccgtggttctgaataatggctatttactcaccccagtccagcatgcataycactgtctgttaccgcatgggccctcaccatggccctcaacagcccatggccacagctattgcctgggactgaccatccctactaggaatgtgtcacgcc

SEQ ID NO: 541148 - DNA, 201 bp, Homo sapiens
gcaacataatacaatactattaatattggaagattaacaagaaagacggcctaaacaaaactgaggtaatggtcagtaagtaccaggagataatgtgagaraggggaacaaaattaagggcacaagaaaataaagtttgccatacacagtgacagaaaaatatattttctttgaacgttagaaggatagatgctataggtt

SEQ ID NO: 541149 - DNA, 201 bp, Homo sapiens
aattagcttttacacctaacgacggcctgggaataataaaggaactctttgaaaaaggaagaaagtggagaaataggaacacttttacactgttggtgggmctgcaaactagttcaaccattgtggaagacagtgtggcgattcctcaaggatctagaactagaaataccatttgacccagccatcccattactggggata

SEQ ID NO: 541150 - DNA, 201 bp, Homo sapiens
agaaaataaagtttgccatacacagtgacagaaaaatatattttctttgaacgttagaaggatagatgctataggttagtagctacaataactgtcacgaraaacttctgctacctaactcattcaaaacttgtcatgttaaagggcacctaagtgtaaaaaaaaaaaaaaagagttcctcttagcccaaatcaaaacatc

SEQ ID NO: 541151 - DNA, 201 bp, Homo sapiens
tatttgattcctcagttatattttcttgggatcttttcttcccaggtcatagcagtgctgtttcaacaggaaatgtcatagcttgaatgccaggtgcactwtaaaaaataatctaaactaaattagcttttacacctaacgacggcctgggaataataaaggaactctttgaaaaaggaagaaagtggagaaataggaaca

SEQ ID NO: 541152 - DNA, 201 bp, Homo sapiens
actatggactttagttaaaaataaggtatcggtactggctcatcagttgtaaccaatctatcacaccaatgcaagattttaataacagggaaaactgttaggtgtgtgagacctctctctacttgctgtacacctaaaactgctttaaacaatagtctttaatttttttctaaatgctataaacaacaacagtctgagaga

SEQ ID NO: 541153 - DNA, 201 bp, Homo sapiens
tcccctccctgaggttcctgccttgcgagagtgtgtcatgtggctgccagggcaaggcagaagtgtaggaaaaggcacatctcacaggttgtccaggaggrttagagcaaatatgtccagagcagtttcaagttgactatagaaccaaggctccgagctaattaatagaaagtgaagcaatgatagtgacagctcaaggca

SEQ ID NO: 541154 - DNA, 201 bp, Homo sapiens
ctatggactttagttaaaaataaggtatcggtactggctcatcagttgtaaccaatctatcacaccaatgcaagattttaataacagggaaaactgttaggtgtgtgagacctctctctacttgctgtacacctaaaactgctttaaacaatagtctttaatttttttctaaatgctataaacaacaacagtctgagagaa

SEQ ID NO: 541155 - DNA, 201 bp, Homo sapiens
tatggactttagttaaaaataaggtatcggtactggctcatcagttgtaaccaatctatcacaccaatgcaagattttaataacagggaaaactgttaggtgtgtgagacctctctctacttgctgtacacctaaaactgctttaaacaatagtctttaatttttttctaaatgctataaacaacaacagtctgagagaat

SEQ ID NO: 541156 - DNA, 201 bp, Homo sapiens
acaagggctgtgctgttctggaaagtataaaagtgaagcattaaaaaacggaaccctctcaagagattatctcctatgaagaatcatacgtggccgggcgccgtggctcacgcctataatcccagcattttgggagaccgaggtgggtggatcgcttgagcccaggagttccagaccagcacgggcaagatagcaaaaccc

SEQ ID NO: 541157 - DNA, 201 bp, Homo sapiens
aaaggttaggtaagtcagccatggacacacagctaataaaccacagagccaaaatactcatctcttcgaatgtcaagttctatacattttttgcaacatayagtatgacacagtctgtattagattatcaaaaaggattaagtttttttcttgactataagcaatatggtagcaataatatcacctcatgtttgtattcca

SEQ ID NO: 541158 - DNA, 201 bp, Homo sapiens
ttaacaaccctaataaatagtaacataattattcccaatttatagaaaagaaactgaagctcaaaaaggttaggtaagtcagccatggacacacagctaakaaaccacagagccaaaatactcatctcttcgaatgtcaagttctatacattttttgcaacatatagtatgacacagtctgtattagattatcaaaaagga

SEQ ID NO: 541159 - DNA, 201 bp, Homo sapiens
ctcactcactgcaacctctgactccgagttcaagcaatactcctgactcagcctcccgagtagctgggattataggcatgtgccaccacacctggctaattattattattattattattattattattattattattattattttttgatacaaggtttcgctcttgttgcccaggctggagtgcaatggcgcaatctcag

SEQ ID NO: 541160 - DNA, 201 bp, Homo sapiens
gaattttaatctcagctttgccatttttctgagccttaattgtcccaactataagtagagatatgaaattgctactacaagatataattacttctgacatwcttataaaaagggttgactttcaacttgtaacagttatgtttaaggtattttcatggagtttcgtaaaagctgttagaagccataaagcttagactatga

SEQ ID NO: 541161 - DNA, 201 bp, Homo sapiens
actctggggactgtagtggggtggggggagcggggagggatagcattaggagatatacctaatgctagatgacgagttaatgggtgcagcacaccagcatkgcacatgtatacatatgtaactaacctgcacattgtgcacatgtaccctaaaacttaaagtataataataataacataaaaaataaaaaaagaaaagatg

SEQ ID NO: 541162 - DNA, 201 bp, Homo sapiens
ggtggttgacatggaccgagagctaacaagagaacactggaattagcttctcagtttcaaaataggacctaaaggagtttgcgctataggagaagagttgytgcattttgtttaatggaactaaatttgtgcccatttaaatcatgagcaggtggcacttggtagcaaagaaagcctgaaaatattcacatttagtgaatg

SEQ ID NO: 541163 - DNA, 201 bp, Homo sapiens
agaaattactacaatagaacagtagacaccttcattaattattttctcctgcaatattagcactaatgattagaaaatcttcaatagcagcacaaataaarataaacagacaccaatccttggtacagcctccgtacagatccatactggactgttcattcagcacccagtattctggaatttgcctattaatgcaggtgg

SEQ ID NO: 541164 - DNA, 201 bp, Homo sapiens
tacctaatgctagatgacgagttaatgggtgcagcacaccagcatggcacatgtatacatatgtaactaacctgcacattgtgcacatgtaccctaaaacytaaagtataataataataacataaaaaataaaaaaagaaaagatgcacacacaaaaaaaaataaataggtgttgtttaagtcactatatttgtagtttgt

SEQ ID NO: 541165 - DNA, 201 bp, Homo sapiens
ttcctccttgcctgcagcttgcatctgagatcctaataagggaggatcactggaaagtattaccattatttttagcttttctaagggagggaggagttttygaaaggacaaaatggaaaggaatttagggcaagggtgtgtgtaggtggggaggtggtgtggaaggaggcgagaagatgagtagaaataagactttcagga

SEQ ID NO: 541166 - DNA, 201 bp, Homo sapiens
taatcccaacactttgggaggccgaggcgggaggatggcttgaggccaagagttcgagacaagctttggcaacatagcaagaccctgtctctacaaaaaawttttaaaaattagttgggtgtggtggtgcacagcggcagtcccagctaatcgggaggctgaggtaggaggatcacttgagcccaagggttcaaggctgca

SEQ ID NO: 541167 - DNA, 201 bp, Homo sapiens
tgaacaaatccagacttgaagaaatttccattctgttaaatttctagccaactcatcacaatcaactacgcaagcaaacaataccccataagaacaacaayaagtaatcacatattgctggctccaggaagcaaaatgaagacatttaaattaaagcaaacatgcttacaaaaatattctggctatctcaattaatctgaa

SEQ ID NO: 541168 - DNA, 201 bp, Homo sapiens
gtgggaggatcgctggagcctaggaggtcaaggccacagtgagctatgattgcaccactgcattccagcctaggagacaagaaacactgtctcaaaaatgaaaaaaaaaaatgcccaaaacaattcaaaccattaattagtttatcttttttttcttgttttattttatctgaatgtcccaaatagcagctatttcatgac

SEQ ID NO: 541169 - DNA, 201 bp, Homo sapiens
actttctataatgatttccttctactgtttatcgttcttaaatctgtatcctggtccctggtatctccccctacaaactcctggatatatgcagtggaaayaaattatgtttatttcaaactttcccagtcccttgctccaaacccagctcctcctctttaatttctgatggaagctgacagcatcatcatcttctactct

SEQ ID NO: 541170 - DNA, 201 bp, Homo sapiens
gacagcaaaatgctcaagttgggaataaattgataggtgtatctattaaaaccatctcttaaggccttctgggggaaaacgccaccaccaagaattacttsaaggcttgtcaagtgctttaaggcgctataaggcaagatgcaacactgagagacattaaaaaaagataaccttttccccactgcctgagttgctcttgag

SEQ ID NO: 541171 - DNA, 201 bp, Homo sapiens
cctcagcctctggagtagctgggattacaggcacacaccaccatgcccggctaatttttgtatttttagtagagacagggtttcaccatgttggccaggcyggtctcgaactcctgacctctggtgatccacccgcctcagcctcccaaagtgctgggattacaggtgtgagccactgtgcccagcccttccacctgtatt

SEQ ID NO: 541172 - DNA, 201 bp, Homo sapiens
gctgcaacacctgctattctactttgcatggttggttcaggctctagaaaatagcaagagcccacctcctcctcctcctgcaatcagctctcctgtttccttttttttttttttttttagctttagctctacttctattttccaactgggatcatggctactgccttctactactcagcagctaattacacacaccctccg

SEQ ID NO: 541173 - DNA, 201 bp, Homo sapiens
gaaagtacaatgtgaactacagaagtaaccaaaggactttctggtgatgtcaaatgatgcaagacagcaaaatgctcaagttgggaataaattgataggtktatctattaaaaccatctcttaaggccttctgggggaaaacgccaccaccaagaattacttgaaggcttgtcaagtgctttaaggcgctataaggcaaga

SEQ ID NO: 541174 - DNA, 201 bp, Homo sapiens
gccactgcactgcagcctgggtggcagagcgagactccgtctcaaaaaaaaaaaaaaaaaggattcaactgtgggaaaaaaaaaaagcaaaacactttttraaaattattaatatgcttgactacacagatattttgattttgtaaataaaaatcaacgtaagtaaaattcaaaggaaaatatcaaagtgggaaaaatatt

SEQ ID NO: 541175 - DNA, 201 bp, Homo sapiens
tgcggccggtgttctgcggagaactggaaatgtggacgtactggttctgctgggctggtgggggggaccccggggtgatgagccccggagccctgctgagbctgctgctgctgctgctgctgctgctgctgctgctgctgctgctgatgctgatgctgctgctgctgctgctgctgctgctgctgctgctgctcagccttg

SEQ ID NO: 541176 - DNA, 201 bp, Homo sapiens
aatacaaaaaattagccaggcgtggtggtgggaggctgtaatcccagctacttgggaggctgaggcaagtgaatcacttgaacccgggaggcagaggttgyagtgagccgagatcacgccactgcactccagcctggcgacagagcgaggctctgtctcaaaataataataataataataattaataataataatatccat

SEQ ID NO: 541177 - DNA, 201 bp, Homo sapiens
agtccagtctcctcatttaatgaacacggaaattgtatcctgctaacgtaaagtgacttggtcaaagctacgcagtggcacaactaaaactcaggatttcygacatcttgcccctgagcacccaaaactcaaaggacagaaagtacaatgtgaactacagaagtaaccaaaggactttctggtgatgtcaaatgatgcaag

SEQ ID NO: 541178 - DNA, 201 bp, Homo sapiens
gcggccggtgttctgcggagaactggaaatgtggacgtactggttctgctgggctggtgggggggaccccggggtgatgagccccggagccctgctgaggctgctgctgctgctgctgctgctgctgctgctgctgctgctgctgatgctgatgctgctgctgctgctgctgctgctgctgctgctgctgctcagccttgt

SEQ ID NO: 541179 - DNA, 201 bp, Homo sapiens
gcaagatacataaaagttattttaaattttaaaataaagcagtactgggcatgttgtaagtgcttagaatgctaatattatcatatactgagcacctactwcatggcagatattagaggaacaagaatgattaacaggttccccagttcttcaagcatttgcaatctagtaagggtaaaagatatgtaaacaaataagtga

SEQ ID NO: 541180 - DNA, 201 bp, Homo sapiens
ccacctctgtggcttagtcatcggatcagcctcaaggtcaccgactagagtaacctgatgacaattacctcattcacccactatagaacagttctatcacygatcaatacaggacacctctgcacaacatcaacaaagccttctcaagggggcaccctgcatgcatcagaaacaaattacacccttagaggcagatgacac

SEQ ID NO: 541181 - DNA, 201 bp, Homo sapiens
aacatgctgtgattctgagagctgtgggattgggctttgggaattccacacccttgggttttggtatctcacatccagaccctcttttcaatgatctgattttctttctttctttctttctttctttggagagatggggtcttgctatgttaaccaggctggtcttgaaatcctggcctcaagaaatcctccttccttggc

SEQ ID NO: 541182 - DNA, 201 bp, Homo sapiens
gaaactggatggttcccccttgcctacagctgtatctctgtgcaccagttgctgagggaaagaaacttcctttctgtgagctggacaaggtaatagcaacratgatgacctcgcacgaggcaaagcatgtgaacggcaaaaaagaaatcgcagaaaaatctacaagggaaaccatcctctccaaaggacccagtgatgagg

SEQ ID NO: 541183 - DNA, 201 bp, Homo sapiens
tccttcacctgccaacccactctaagtctgttcatttagacttctacccattcccatgcagaaaggaccagttcagcaacagcagggatgctggcaggtasgttttagaaactcttaatcacagggctaatgtgttgatccagcttaaatgtatagctaatgattcattccacttttcattttataacaagggtttttttg

SEQ ID NO: 541184 - DNA, 201 bp, Homo sapiens
aaaatcaagttagccaggcgtggggctgtgtgcctgtagtcccagctacttaggaggctgaggtgggggatcctttagagccaggaggtcaaggctgcagygagttatgatcccaccagtgcactccaggctgcaccacagagcaagaccctgtctctagagaaaaatatatacacatataaggagagcatataacaaaca

SEQ ID NO: 541185 - DNA, 201 bp, Homo sapiens
acatgctgtgattctgagagctgtgggattgggctttgggaattccacacccttgggttttggtatctcacatccagaccctcttttcaatgatctgattttctttctttctttctttctttctttggagagatggggtcttgctatgttaaccaggctggtcttgaaatcctggcctcaagaaatcctccttccttggcc

SEQ ID NO: 541186 - DNA, 201 bp, Homo sapiens
gtagatactggcaaaatctctgagtatcttcttcgttttaaagcaacactttataatccactcacacgcattgaccttttcatcctaacaacagacgagaygtctacagtacgaattcttgagaccacgaaaactgatttcaaagtcagacctcagtctgagcctcagctgagtcacagaggagctgtgtggttccagtta

SEQ ID NO: 541187 - DNA, 201 bp, Homo sapiens
catgctgtgattctgagagctgtgggattgggctttgggaattccacacccttgggttttggtatctcacatccagaccctcttttcaatgatctgattttctttctttctttctttctttctttggagagatggggtcttgctatgttaaccaggctggtcttgaaatcctggcctcaagaaatcctccttccttggcct

SEQ ID NO: 541188 - DNA, 201 bp, Homo sapiens
tactcctggggaccattacagggatacaggtgtagcttacaatatacaaaagctgtgtgtctgacaatctacgtgtaagcctaactttttacattacttgrtgtgctaagtgtcctgagggagttcattatttagagaactccataaatacttttgtaaaattcacattcctctccatttgtgttttgtaaatttcccctc

SEQ ID NO: 541189 - DNA, 201 bp, Homo sapiens
gaaagacacaggagagactttggtgacttaataatttgccagaatgtgactgggcgtggtggctcactcctataatcccagcactttgggaggccaagccrggtggatcacctgaagtcaggagttcaagaccagcctggccaccatggtaaaaccccatctctactaaaaatacaaaattagccgggcatggtggcatgc

SEQ ID NO: 541190 - DNA, 201 bp, Homo sapiens
atgctgtgattctgagagctgtgggattgggctttgggaattccacacccttgggttttggtatctcacatccagaccctcttttcaatgatctgattttctttctttctttctttctttctttggagagatggggtcttgctatgttaaccaggctggtcttgaaatcctggcctcaagaaatcctccttccttggcctc

SEQ ID NO: 541191 - DNA, 201 bp, Homo sapiens
tctgtgagggtgttgccaaaggagataaacatttgggtcatgggcttggagaggaagacccaccctcaatctgggtgggcacaatctaatcagctgccagygaggctagaatgaaagcaggcagaagaacgtagaaggactagactggctgagtcttctggccttcatctttttctcgtgctggatgcttcctgccctcga

SEQ ID NO: 541192 - DNA, 201 bp, Homo sapiens
ctggtcccttatcatgccaaatgcatagcactaacagaatgaaatcactgaaacacacacctgacttttcacatccctacagtccttgaatgggtctacaytgcatccaagataaaatccaagatctctgcttggctcacaagggcccttcctgatcgagaccctgagcccctctagcggtgtcaggcctgcctcactatg

SEQ ID NO: 541193 - DNA, 201 bp, Homo sapiens
tcacctcccgctagacgagcttctacagttttcctaacagctattgaatctctatcatctcttttcaatcctagacttagatatacaattttctgtcaccyaaatgtctcattggcagctcaaattcaaaagatgaagaaatgaaataattacatttctaaccaccctgccaccaagaaaaagaagttgttcctcctcagg

SEQ ID NO: 541194 - DNA, 201 bp, Homo sapiens
ttggtcagcacagtgaaacactgtcactactaaaaagacgcaaaattagctggacgtggtggcaggtgcctgtaatccctgctagtcggcaggctggggcrggagaatcgcttgaacccaggaggtagaggttgcagtgagccgagactgcaccactgcactccagtctgggcaacaagagtgaaactctgtctcaaaaaa

SEQ ID NO: 541195 - DNA, 201 bp, Homo sapiens
ttacattatcttaacatattccacttaatggtttttgattgtgttatgaagtgccctcacattggttcccaaaaatgtttgctattttaagagccacactrttaagaaccacaagtcagccaggcacggcagctcatgtctgtaatcccaacactttgggaggccgaggcgggaggatggcttgaggccaagagttcgaga

SEQ ID NO: 541196 - DNA, 201 bp, Homo sapiens
aaaacaacccccaaaacaagaaaataacaaatgttggcaaggatgtggacaaattggaactctgtgtacattactgatagaaatgcaaaatggtacagctrctgtgaaaaataccatgatggttcctcaaaaaatttaaaaaatactacatgattcaccaattccacttctaggtatatacccaaaaaaactgaaaggagg

SEQ ID NO: 541197 - DNA, 201 bp, Homo sapiens
gctgtcacagaaaagtactttagagtactcaaacacggcttttaaaccggcaacactcatgctacatttgccaagacttttctagttgtcatatttttatrgcatgtttttgagacaatggactaactgcaacaaagtgtcatatgtagctcttttttcatatttgaagctttataggcacactgtagtctttcaacataa

SEQ ID NO: 541198 - DNA, 201 bp, Homo sapiens
tggccaccatggtaaaaccccatctctactaaaaatacaaaattagccgggcatggtggcatgcacctgtaatcccagctatttgggaagctgaggcaggmaaattgcttgaactcgggaggcagaagttgcagtgagccaagatcatgccactgtactccagcctgggcaacaagagcaaaacaaaaacaacaacaacaa

SEQ ID NO: 541199 - DNA, 201 bp, Homo sapiens
catgctgcagggtgaaattttgacttttgattggtgttttcaaaattcctttgtgtatttaaaagtagctcatattgacaagatagaaggaagaagcttgracaaatgtcattaacgttgcacaatttcacattcctggacctatcacaggtgccactggttattaacatatgcatgtaaaactccctgaaagacactgta

SEQ ID NO: 541200 - DNA, 201 bp, Homo sapiens
ctaacacatataccacagggaatagaatcacacattagaatattcagtaggtggccggacgcggtggctcacgcctgtaatcccagcactttgggaggccraggcgggtggattacctgaggtcaggaggtcaagaccagcctggccaaaatggtgaaaccctgtctctactaaaaatacaaaaattagctgggcttggtg

SEQ ID NO: 541201 - DNA, 201 bp, Homo sapiens
cacagctaaagatcagagctacttcaccaaagtttagtacgaataggaaatatcacagaggaaaggcagaattcagattctgtgactttaaaaagtgcaayccaggcaggacgcagtggctcacacctgtaatcctaacactttgggaggccgaggccagtggatcacctgaggtcagaagttcaagaccagcctggccaa

SEQ ID NO: 541202 - DNA, 201 bp, Homo sapiens
gaggtgataagaaattccagcccctagcactttggcctttattaggtgcacaataaatgtctgaagaacaatagatgcgtgattatttggctgactatatkaattttaaaagcagagctttgaacaatcaatatgtagagaacaatcacaggcatgattcatttatcatgagatgtatggtccttgtgacaaggagtccat

SEQ ID NO: 541203 - DNA, 201 bp, Homo sapiens
aaataccttggttccaagcaggagaaaactagagagtgcatgctgtcacacactttttcttggtgcatcatagtaattggataatattttgatgtgggtaraaatacatgaaagattcaaaggatcactcaccctatgaaaacagcacgtcgatttctttctcacgaagaaaatggtctaatttctttggaaaactggaat

SEQ ID NO: 541204 - DNA, 201 bp, Homo sapiens
tgaggaaacattagagaaatgtgaaagccccaaccacacatcagtagagaaactgcaattagaaactgcctctctggtaagagctcccagaagatgagaamtgggtattgcatttctttgtgcagtcctactgggcctggcattgcaggctccactggtaggtgtctcctcaatctgcagcatattaaatgagcactctgt

SEQ ID NO: 541205 - DNA, 201 bp, Homo sapiens
gaacatggggtgtttggttttttgtccttgcgattgagatagtctcgctctgtcacccaggatggagtgcaatggcactatctcggctcactgcaacctaygcctcccaggttcaagcaatcctctcgcctcagcctcccaagtagctgggactacaggcatgagccaccacacctggctaattcttgttttttcagtaga

SEQ ID NO: 541206 - DNA, 201 bp, Homo sapiens
catggaagcatcccagacaggttaactttgccttaataaagcttcttaatttttaacaagcctaatgatctccatctcattcaggaggaacaaggtcagaragacaagatgggaccagatgacttgtgaactgtgagttgagctctggactgttagacagtgatgtgtctaagacaaggccaatgtctggcaggccggggc

SEQ ID NO: 541207 - DNA, 201 bp, Homo sapiens
gagcgccgccccctgctccacagcgcccagtcccatcgaccacccaaggactgaggagtgcgggcgcacggcactggcaggcagctccacctactgcctcygtgaagatccactaggtgaagccagctgggctcctgagtctggtggggccttggagaacctttatgtctagctaagggattttaaatacaccaatcagca

SEQ ID NO: 541208 - DNA, 201 bp, Homo sapiens
atgttcaagtagcaaagtggaggtttgagtccagtgacttctggggagacagttgtatgggctaagaacacataacattttgaggaaggatttcttgtctttttttttttttggcaatagaaagtaaaaagtctcctgagctgaaaaggccacagcatgtattcttcaattcagggtcctggtaatcactggaaccacaag

SEQ ID NO: 541209 - DNA, 201 bp, Homo sapiens
gcccctgtctggaagcccctcttcgttgatctggagctgaattgtggtctgttcaccaggaccccagatgaaagatgaaagcatgagagaagcggatgcasgagggggatggtatagggtggtccatacacctgggatggaatcatggaagcatcccagacaggttaactttgccttaataaagcttcttaatttttaaca

SEQ ID NO: 541210 - DNA, 201 bp, Homo sapiens
cctgctccacagcgcccagtcccatcgaccacccaaggactgaggagtgcgggcgcacggcactggcaggcagctccacctactgcctctgtgaagatccrctaggtgaagccagctgggctcctgagtctggtggggccttggagaacctttatgtctagctaagggattttaaatacaccaatcagcactctatatcta

SEQ ID NO: 541211 - DNA, 201 bp, Homo sapiens
cataagtgggagttgaaaaatgagaacacatggacacaggaaggggaacaacacacaccggggtctgttggggactggggtggggaggggagggaacctaratgacaggttaataggtgcagcaaaccaccagaacacatgtatacctatgcaacagacctgcatgttctacatatgtaccccagaacttaaagtaaaata

SEQ ID NO: 541212 - DNA, 201 bp, Homo sapiens
gcagcttattttataggtggcgaaacaggcctagagacaaatatgcactactaaggtcctatgggtttgagacatttttatttttattttattattttttwttttattttattttatttattttattttatttttttttgctttttgagacgcagtctcactctgtcacccaggctggagtgcagtggcgtgaccccggct

SEQ ID NO: 541213 - DNA, 201 bp, Homo sapiens
ggtggtgcacgcctgtacagctactcaggaggctggggcaggagaatcacctgaacccgggagatggacattacagtgacgtgagattgtgccattgcacyccagcctgggcaacagagtgagtgaggctccgtcccaaaataaataaattaataaatggaaatgaacaataacttggaatttcctttataaaattagatg

SEQ ID NO: 541214 - DNA, 201 bp, Homo sapiens
tgcacatgcatgtttacagcagcacaattcgcaattgcagaaatatggaaccagcccaaatgcccatcaatcaatgagtggataaattattgtatgtatayatcacagaatactactcagccataaaaaggaacaaaataatagcattcacagcaacctgtttggaactggataccattattctaagtgaagtaactcagg

SEQ ID NO: 541215 - DNA, 201 bp, Homo sapiens
ctaaacttgggagctgctggctttgtatttactcaccctgaaactgcatctgggactccggagtcaagctctgaataacattcaaagcctgtattctttcrttcgaattttaggcattgcaacttgtcatacctatgtcttttacagcaatgcaacttaaatgaggcaataactgaaatggcttaaccagggagatgtggt

SEQ ID NO: 541216 - DNA, 201 bp, Homo sapiens
caccatgttggccaggctagtctcgaactcctgacctcaggtgatgcacccacctcagcgtcccaaagtgctgggattacaggcacatgccaccacgcccrgctaatttttttgtatttttagtagagatagggtttcaccatgttggctaggctggtctcgaactcctgacctcaggtgatgcacccgcctcagcctccc

SEQ ID NO: 541217 - DNA, 201 bp, Homo sapiens
tagagaattctgtagggtaactgaaacaaaagaatatacaaaaatcaataacctttctaaaggacaaccagtaaaaaggtatcccatatttaaataacaayaaaaatataaaatgcctagggataaactgaaggaggactatatgcaagatctacataaagagggctgggtgcagtggctcaggcctattattccagcact

SEQ ID NO: 541218 - DNA, 201 bp, Homo sapiens
agcctggaacaggcaggatctgccttcccaggtgcagctgcagctgccgcacccacggctgcagacctgggcctcccattccaggaagcaggcaggagccrggaacaagcgggagccctgccccttccgagttgtcagggcgggagctcccgggtgcagctgtggccaaccctcccaggcacaggacctgggcgtctctgc

SEQ ID NO: 541219 - DNA, 201 bp, Homo sapiens
ctaaattctcctttatatgttcaggctccctattttgtgatgcgtgtaattgcagaacttgggagctagaatggaccttgaggagatcccttacgccaacsctttcacttcacagatgtagacaccgaggcttaaagagggtatgactttcccaaggccacaagaggactagtttacagcagagctgggcttatataacag

SEQ ID NO: 541220 - DNA, 201 bp, Homo sapiens
gcatattgcacagtaaactagagtaactgccattatgcaacttcccaagaacatacagagagcatttacagtgaggccacagtgccagcaaaatgtgcaayggagactatttatcagcaattataagaactgtgcatttaaatgccaaataaaatatacacgtggcagatacagaagttgagggggaaaagatgcatgatt

SEQ ID NO: 541221 - DNA, 201 bp, Homo sapiens
acagaaaataattccccaaactgaattgcctgaatttgactaagtatagggcaccattttaaaaatggcttcatgctgaggttctagattttttttttttkgagatggaggctcgttctgtcgccaggctggagtgcagtggcgcgatctcagctcactgcaagctccgcctccacgttcacaccattctcctgcctcagc

SEQ ID NO: 541222 - DNA, 201 bp, Homo sapiens
gttgacacctttatagtagtatttatagctcagacactttaaaacatgactgtgggctgggcacagtggctcatgtctgtaatccaagctctttgggagtmtgaggcagaaggatcacttgagcccaggagtttgagaccagcctgggcaacccagtgagaactcatctctacaaaaaaaaggtaaaaattagctgggcgt

SEQ ID NO: 541223 - DNA, 201 bp, Homo sapiens
gagcctgggagacagaggctatagggagctgtgattgcacactgcactccagctggacagcaaagtgagacactgtatcaaaataaataaataaataaatmaacaaacaaacaaacaaacaaacaaacaaataaatgaacctgtggtagagtagagaatgtagagacagaagtttatgtggtaggaaggggacatgtgata

SEQ ID NO: 541224 - DNA, 201 bp, Homo sapiens
aatttcatcaattttaagaggaaagaaaatcttacataaattctttcagaaaatagtaaaaaacaggaggactccacgaatacattttatataatcagtawtactaacactaacactaaaccctagtaaatattatataaagaaacaaaattacagaccaatgttcttaataaacatagtcgcaaaaatacttaataaaat

SEQ ID NO: 541225 - DNA, 201 bp, Homo sapiens
aggcacatgccacctcacccagctgatttttgtatttttagtagagatggggttttgctatgctgcccaggctggtctcaaactcctgagctcaagcaatmtttctgcctcggcctcccaaagtactgggattacaggcatgagccaccacacccagcctattattattatttttaatagagacacggtctcactctgctg

SEQ ID NO: 541226 - DNA, 201 bp, Homo sapiens
aaatccagactatataaagaactcatatatatacacatatatatacacatatatatatacacacatatatgtaagttcacaaaataaaaaaaaaaaaccayctatatctatatagatataggttgtttgttttgcgacacgtcattctgttgcccaggctggaagtgcagtggcaccatcatgactcactgcaggcttgac

SEQ ID NO: 541227 - DNA, 201 bp, Homo sapiens
tgacaggaagggggcagaggggctctggggtgatggaaatgtcccatatcttgattaggatgctgattatgtggatgtatgcattcatcaaaactcattgygctgtacgcttaagatgtgttgatttcactgtatgttctccctaaatagaaactaatttattagtgaaaagaaagatgtactttcttttcactattaata

SEQ ID NO: 541228 - DNA, 201 bp, Homo sapiens
tttcggaggtaggccgcccatcactagatttagcagagcatccgctgactgaaatgagacacagctgggaggcacccaccaccacccgcctttgtagaacrgctacccaaaaagacaaggatagcaagtcccctgaagcttttccaatctattcctttttgtgattgttttccttttgaaatagtgttaacacattttaaa

SEQ ID NO: 541229 - DNA, 201 bp, Homo sapiens
taacagtatatacatgttacttaatttttaaaatttgtaattgtatatgtattttcttgtatacattcctttgaaagctctgtgatgggtgtaggctgaaytgctgggctgtactgttttagagcaaaaaaagatactcatgctgtaattctaatttttctgtgtttcaaagggggggctattaatttattaaattaattt

SEQ ID NO: 541230 - DNA, 201 bp, Homo sapiens
ctccttccctaacctatcccctgcccaccctggccccattatttctcacttggataacaggaaggtcgtacaactctcccttttgaactcatcgtccacaytgggtcaaatctaaaatacatctgcatatgccacatctgctaaaaatcattacaatagcttctatttaaacatgagtatatcccatcagcctggccccat

SEQ ID NO: 541231 - DNA, 201 bp, Homo sapiens
ctgccagggcaaggcagaagtgtaggaaaaggcacatctcacaggttgtccaggaggattagagcaaatatgtccagagcagtttcaagttgactatagamccaaggctccgagctaattaatagaaagtgaagcaatgatagtgacagctcaaggcaagggtgtgaagctcatgtcattcggtaaagacagtccaaggaa

SEQ ID NO: 541232 - DNA, 201 bp, Homo sapiens
actatagaaccaaggctccgagctaattaatagaaagtgaagcaatgatagtgacagctcaaggcaagggtgtgaagctcatgtcattcggtaaagacagyccaaggaaaaaggacatttacgcttgcaccttatttgctttgcagactaacacatttctgttagaaatatgtctttacactccagagagatgttacaagg

SEQ ID NO: 541233 - DNA, 201 bp, Homo sapiens
taatgttttaaaactcttgatattttctgaggcactacacagttcaatcctcacctctcagttcagagtgaatatacagcaataattctgcttgaaagaartgcaaagaaggtcttttgctgtgcagcatgtagctcgatctaccgcaacaatacaatgaataggttatgggttttgtattattattttcctttgtgcatc

SEQ ID NO: 541234 - DNA, 201 bp, Homo sapiens
tgagatggaagaggaataacttcttaaaagtactaaatgtggccaggcgcggtggctcatgcctgtaatcccagcactttgggaggccaaggcgggtggaycacaaggtcaggagatcgagaacatcctggctaacacagtgaaaccccatctctactaaaaatacaaaaattagctgggcgcagtggcaggtgcctgtaa

SEQ ID NO: 541235 - DNA, 201 bp, Homo sapiens
gaaccttgaaaacattacgctaagtggaaaagtcagttgtgtaaggccacacattatatggttccatttatatgagatgtctaggacaggcaaatccatasagataaaacatagattaagtggataccaggggccagaaggtagaggaaatgggggagtgggtgcttaatgggtaaaggttttctttttggagtaatgaaa

SEQ ID NO: 541236 - DNA, 201 bp, Homo sapiens
gggatattttaaaattctacgaatttcctgtttctgcatatacttttgcccgctcattctaatccatctaatccacatctgcccatctaatgcatccatckgtgggactttctcgtggcaattcttactatgagttctaatgatgttttcatactgcttccttcctcgtttgtttattaactgaaattctgctgcagggaa

SEQ ID NO: 541237 - DNA, 201 bp, Homo sapiens
gaggttctgaccagcaagggtagcctagggcatgggagggagggagacagtgactttaaagctttcctgttctgtcacacttcctgcacctctgcccagargtggctgctccacagacccaagcagaaagcagacaagaaaggcaagatgtcaggaattctcttctctcccagtagcatctttcctgttctagcctaaatg

SEQ ID NO: 541238 - DNA, 201 bp, Homo sapiens
tgacatatggtccaacatatggtcgctcacaccatcaaccacaaatgcactccctccacctggagaaggcgtcctcacctaccaccaacagtgcaacttcsagatgaagtcatttacaacccagaggagatggatggtcacccggccggccaactcaaaagggcacagataagattagatggacctcctaccccaccggtt

SEQ ID NO: 541239 - DNA, 201 bp, Homo sapiens
aatacaaaaaaattagccaggtgtggtggcagacacctgtagtcccagttactggggaggctaaggcacaagaatcgcttgaacctgggagccagaggttkcagtgagccaagattgtgccactgcactttagcctgggaaacagagtgaaaccccatttcaaaaaaaaaaaaaaaaaaaacaaatctacataaagaagaa

SEQ ID NO: 541240 - DNA, 201 bp, Homo sapiens
gcacctcccccggaaaagatagaggcttccgatcatcttgctatttgcaaggaatcttactcacaaatcaatctaacaggccacggtgatattatggggaygtaaaagggactgaaatgatcaagagcgtcacgtgtcttccaagccaagtggggtcctatgccttgctggtttgaagaagtgggagaaacttcatcaaga

SEQ ID NO: 541241 - DNA, 201 bp, Homo sapiens
taaggcacaagaatcgcttgaacctgggagccagaggttgcagtgagccaagattgtgccactgcactttagcctgggaaacagagtgaaaccccatttcaaaaaaaaaaaaaaaaaaaacaaatctacataaagaagaatgttaaatactactgagggacagaggaggagataggaacaactgcaaaggtctatcttctt

SEQ ID NO: 541242 - DNA, 201 bp, Homo sapiens
ttcttgcagtgcaaagcacatttcaaaagttcagccaacggctaggaaaatgtttggggcacgcagaatcccttctacgccaacagaactaatctcatgtrtgcatttttcagctcctgagttgagaagacatattaaaaacccagcaacatgtttatcttcattaaacagcaaatgtcctttcaaacaatatacaacagg

SEQ ID NO: 541243 - DNA, 201 bp, Homo sapiens
ctaattcacatcctgcactaaaataaatcccaaggtgaccaaagatttgaacgtaaaaaatgaaagcataaaaatatgagaaagaaccttgaaaacattaygctaagtggaaaagtcagttgtgtaaggccacacattatatggttccatttatatgagatgtctaggacaggcaaatccatagagataaaacatagatta

SEQ ID NO: 541244 - DNA, 201 bp, Homo sapiens
ccctctaatctttgtacatactcatgggttcaattaccaggcaggatgccctgaggcagccaggtgttagttggcaacagaacacacaaaggcctcccccmctccattcagcgtcagggtgataaagatatcattaccctcaaagccagctcctcagaagttctgccaccacggcagatatgaaaggctttaccacatagt

SEQ ID NO: 541245 - DNA, 201 bp, Homo sapiens
aaacatatgaaagtatattcaaccaccactataataacagaaacccatattaaagctactagaatatagtagttttcacctctcagattggcaaagatcgkgaagtttaaaaacatcgtctgtggagaaaagcacactcaaacagtgctagcaggaacatacaataggacgaatgccaaattggagggcaatttggcaagg

SEQ ID NO: 541246 - DNA, 201 bp, Homo sapiens
agctggacagcaaagtgagacactgtatcaaaataaataaataaataaataaacaaacaaacaaacaaacaaacaaacaaataaatgaacctgtggtagagtagagaatgtagagacagaagtttatgtggtaggaaggggacatgtgatacgaggttgaacaagaggcccaagtggagggacacatagggccatgtaggt

SEQ ID NO: 541247 - DNA, 201 bp, Homo sapiens
gaaagaaaagaaaccaagcataccaaggacactgaaatataaaaggagcaaagtacgtggtctaattttggatagctttgttatttttagtatgtttaataaaaaaaaaataaagttttttaaaccctcaaaattgactgcccaggaaactgatttcaacttttcccaaacagaggcatttggctaagcttcctgtacaca

SEQ ID NO: 541248 - DNA, 201 bp, Homo sapiens
gacagcaaagtgagacactgtatcaaaataaataaataaataaataaacaaacaaacaaacaaacaaacaaacaaataaatgaacctgtggtagagtagagaatgtagagacagaagtttatgtggtaggaaggggacatgtgatacgaggttgaacaagaggcccaagtggagggacacatagggccatgtaggtgtcct

SEQ ID NO: 541249 - DNA, 201 bp, Homo sapiens
cccttctacaactatgttctcaagaaaaatcatttttgggagagtgagataggtaagaagagagaggaggccatcgtgaagcgaacaaatgtgtaaaatgaaaaaaaaatcacttacaatcttaatttgtaactacctaaaagtaggctgcacagagaaatgaaactatgtctacacaaaaacttggaaaggaatgttcat

SEQ ID NO: 541250 - DNA, 201 bp, Homo sapiens
acagcaaagtgagacactgtatcaaaataaataaataaataaataaacaaacaaacaaacaaacaaacaaacaaataaatgaacctgtggtagagtagagaatgtagagacagaagtttatgtggtaggaaggggacatgtgatacgaggttgaacaagaggcccaagtggagggacacatagggccatgtaggtgtcctg

SEQ ID NO: 541251 - DNA, 201 bp, Homo sapiens
ccagccctccgtgagaccccctctctctcaccgccctctccggggaggaggaatgggaagagggcggccgggaaagggaccaccccccaaccccagccgcygcctcccccctgcgccacccggagggaggaggacatggctctccgcactcgcgaccggaccagcagccgggggagcggggcgccgccgccgctctccccg

SEQ ID NO: 541252 - DNA, 201 bp, Homo sapiens
gacaacccaaatgtccatcaactgataaatgaataaacaaaataaggtatagccatacaatgttacattattccatcataacaagaaatgaatgactgatrtatgctgaaatgtggatgatccttgaaagcattatgctaagtgaaagaagtcagtcacagaagtccgcatattgcatgattctatttatatggaatgtct

SEQ ID NO: 541253 - DNA, 201 bp, Homo sapiens
cagcaaagtgagacactgtatcaaaataaataaataaataaataaacaaacaaacaaacaaacaaacaaacaaataaatgaacctgtggtagagtagagaatgtagagacagaagtttatgtggtaggaaggggacatgtgatacgaggttgaacaagaggcccaagtggagggacacatagggccatgtaggtgtcctgt

SEQ ID NO: 541254 - DNA, 201 bp, Homo sapiens
tggggcagaatgaggacaggtaaaggcagaggggctgggaaccctcacagcaaagcagggtggtcagaaacaaacaggatatgtatgggcaacatctgggwtgtaggacagaaaccaggttctgcccaccctttctacaactcaaggtctccctctcaccaactccactacacgccatcacccatatgcctggtattttgc

SEQ ID NO: 541255 - DNA, 201 bp, Homo sapiens
attaagaatgaatacattcagaatgtctgcctactgtcagtaccagtttttgttatgatggctgtcaagttttaaaatgtgacaatgggaatatattttcygaataagttattcccctgagtaaaccctttagaaatccagccatcgctatgggcaatggaggttccaaatgatgaacgctcttcacacttgaaagggtta

SEQ ID NO: 541256 - DNA, 201 bp, Homo sapiens
agcaaagtgagacactgtatcaaaataaataaataaataaataaacaaacaaacaaacaaacaaacaaacaaataaatgaacctgtggtagagtagagaatgtagagacagaagtttatgtggtaggaaggggacatgtgatacgaggttgaacaagaggcccaagtggagggacacatagggccatgtaggtgtcctgtt

SEQ ID NO: 541257 - DNA, 201 bp, Homo sapiens
cagaagaatcgcttgaagccgggaggtggaggttgcagtgagccaagatcatgccattgcactccagcctgggcgacaagagcgaaactccatctcaaaaraaaacaaagaataatttcttaacagggtcctacttcagatggattgctcaagagttcaggccatatggagtacaattagacactgaacatactactttct

SEQ ID NO: 541258 - DNA, 201 bp, Homo sapiens
caaacaaacaaacaaacaaacaggctgggcgcggtggctcacgactgtaatcccagcactttgggaggccacggcgggcggatcacgaggtcaggagatcragaccatcctggctaacactgtgaaaccccgtctctactaaaaatacaaaaaaaaattagccgggcatggtggtgggttcctgtaatctcagctactcgg

SEQ ID NO: 541259 - DNA, 201 bp, Homo sapiens
tagtcccagcactttgggaggccgaggcgggtggatcacttgaggtcaggagttcaagactagcctggccaacacggtgaaactccatctctactaaaaakacaaaaaacagctgggtgcctgtaatcccagctactctactcaggaggctgaggcagaagaatcgcttgaagccgggaggtggaggttgcagtgagccaa

SEQ ID NO: 541260 - DNA, 201 bp, Homo sapiens
taaactaacctcagagtaacacaagcacagaaaatgtattcatagttatactccagcttggaacacagatgttgacctaacagtggcttcataaatatttrttgaatgaatgaataaagatggatgggtgagtggatgacatgacaatatactttcatcaaactagggaaaaatctttatgtaaatatacatatatattac

SEQ ID NO: 541261 - DNA, 201 bp, Homo sapiens
aacaaacaggctgggcgcggtggctcacgactgtaatcccagcactttgggaggccacggcgggcggatcacgaggtcaggagatcaagaccatcctggckaacactgtgaaaccccgtctctactaaaaatacaaaaaaaaattagccgggcatggtggtgggttcctgtaatctcagctactcgggaggctgaggcagg

SEQ ID NO: 541262 - DNA, 201 bp, Homo sapiens
tacattgtaatgacactctaaaaatgtagtaatcactcaataaaatccttagcatctgctatatacctcgaattataccagaagcttttaggatatgagcaaaaaaaaaaaaaaaaaagacatagaccctgctaaaaaggaacttacaatccagcttgaagaaataaagcccacacataaaaaaattagggaacaagacca

SEQ ID NO: 541263 - DNA, 201 bp, Homo sapiens
ccagaactctgccttcaaacaaaatcttatatagaaatctaatacacaagataaataaaattgaggctacttacactatctagttttatcggttcctcccrctcctcatccatcaccaccaagtacttctgaaggcagccccacagaggttcacagggcagaggttgggagactgagaaatcctcaggctactggagaatg

SEQ ID NO: 541264 - DNA, 201 bp, Homo sapiens
cggtggctcacgactgtaatcccagcactttgggaggccacggcgggcggatcacgaggtcaggagatcaagaccatcctggctaacactgtgaaaccccrtctctactaaaaatacaaaaaaaaattagccgggcatggtggtgggttcctgtaatctcagctactcgggaggctgaggcaggagaatcgcttgaatctg

SEQ ID NO: 541265 - DNA, 201 bp, Homo sapiens
aaggaacttacaatccagcttgaagaaataaagcccacacataaaaaaattagggaacaagaccatattcagttaagtgcaaaaattgaaaagtatgctcrattagcaagctagagggtttattagaaataacagtagcttaaaaacttccctactataaaaaccatagtttaagcctgctttaacattagatctggtttc

SEQ ID NO: 541266 - DNA, 201 bp, Homo sapiens
gagcacagaatatgtaacttgtggagccaggactagaaaacaaatctacagattctatgaacagtgctcttccattacaccactgggcccctctcttgacwttatttatttatttatttatttatttatttatttatttagagacagggtctcactctgtcaccgaggctggagtgcagtggtgcaatcacggctcaccgc

SEQ ID NO: 541267 - DNA, 201 bp, Homo sapiens
ggtccaaacagtcatgccaaggttatgtggggtatgtagaatgtgttctctctgtaccctgtcttgaattctattttgcacatccaggaaagccaagaaaygcatgcacctgattgcaacatatatagtcatattttgataccacagtttggatggcaagattattcaatcctttttcctatcagagagcttcatctgttt

SEQ ID NO: 541268 - DNA, 201 bp, Homo sapiens
ctatctctagcgtcatatctccctgatgatccgtggtagtggcgttaatccatttacgaaaaacaagacaacatagattcaaggagtcaaataaacacatmacacacacacacacacacacacacacgcatgcacacaagcaatgaagatggaacagcagagagtacaccagacaagaagccgtaagtgtcggttctagtt

SEQ ID NO: 541269 - DNA, 201 bp, Homo sapiens
ctccatgctcttatctaagatgccagagaatttatatgtaacttaaaaattggctcttacggtaaagaggcagctctttcttcaaagaaatctggtcaatyattgtttaaatgaacctgttataaagcaaatatccatctacctcttgaaaaatgagttttgaaaattcaaattttcaaatgggagatttgctaaaagtag

SEQ ID NO: 541270 - DNA, 201 bp, Homo sapiens
aaagtctgtacattcaaaccattcctcttttaaaattaagtattgtatcactacagttaaacggggggattagataaagataagtaaaatattggtgtttyccagcaagtattacttcattctgttgtaatagtaagcttctttaactttaatgaatattaacaaatgtactgttgttaaagttaaaggaactgtaggatc

SEQ ID NO: 541271 - DNA, 201 bp, Homo sapiens
ttatttctcacttggataacaggaaggtcgtacaactctcccttttgaactcatcgtccacactgggtcaaatctaaaatacatctgcatatgccacatcygctaaaaatcattacaatagcttctatttaaacatgagtatatcccatcagcctggccccatgctacatgcgttcagacattatcatatctttataacaa

SEQ ID NO: 541272 - DNA, 201 bp, Homo sapiens
acatgtaaaagtggcatttaatttatcaggacccttagtcacattcacatacattgcccatgataagccagtgacaaatataattgaagttttaaagtacrtgtgcaagggatcagctacttgaaacctcccagcaggaaaacaagaaataagggaccatgaggaagagatccaggtctccacatttactgtacaagtaat

SEQ ID NO: 541273 - DNA, 201 bp, Homo sapiens
ttagagataaagactcttacagctgaggtatgttaaataacttgctcaaagtcacaaagctagtaaaatttagggcagctgactctggaacctataacatktgttaattcaaaaaatttcatgactactgccatcaacggcagtggttcccaacattttcttcaatcaaaaatgttgcagacttcaggcactagatgttta

SEQ ID NO: 541274 - DNA, 201 bp, Homo sapiens
aactcatcccactcccttgttccgattccctgctcaccaagcaaacacctgactccatatggatcttccttagagagcatgtgcactgtgactgctgctgmtacctgcagccagagagcagcaatttctcaaggcacatcaataaagtagcttccagttaggatttacattcccatgcagcttaacacagagagagaatgt

SEQ ID NO: 541275 - DNA, 201 bp, Homo sapiens
gctaatgacttacaatatcagccagctacatatatttggaagaaagctcctatttctgttagtgattctgatgaccaaatctacagaccatgctttgtgtyggtatgaatgtgcaggtcctcttttacaagaaatgtggtctcccatatgttttggaatctacagattagaaaacccctagaatataagccaaagtccata

SEQ ID NO: 541276 - DNA, 201 bp, Homo sapiens
tggaatctacagattagaaaacccctagaatataagccaaagtccatactccttagcatttgaaatgccgtaagtttcccagtttggctccaacttacttytccaactagatttcctgtaaccccataccacgtcccctaagccctacctctagttgtgttagacaagcattcccaaattactggataccatgcacactca

SEQ ID NO: 541277 - DNA, 201 bp, Homo sapiens
ggatttggcccatggaccatagtttgcctactcctggtctggatgaatgcctccttgttgccattcagttcacagagcttgatatgaagatacagttcacsagatgtccatcccaaagcctctatccattccaaagggacttataagaaggacaataaagattaccattccccaaccaagaacttgacaacggggaagaga

SEQ ID NO: 541278 - DNA, 201 bp, Homo sapiens
ttgatatgaagatacagttcacgagatgtccatcccaaagcctctatccattccaaagggacttataagaaggacaataaagattaccattccccaaccargaacttgacaacggggaagagattgcctagttagcggtttatagtaagaacaaaatttagtggatgagaacatggacatacaaagccaactgaagaaaga

SEQ ID NO: 541279 - DNA, 201 bp, Homo sapiens
tgtaaaccaacagctacagtggagaccatctgaactgccaagagttttaacactgtgattttagtgagaaagaacatttcccctgctgtttagttttcagmtaagttcagcctagctgtttagttttcagctagcttcatacaaagctgtgcattgtacgcacagatgtgtgcacacaatgtatacatgaagacaaccaca

SEQ ID NO: 541280 - DNA, 201 bp, Homo sapiens
tgtctttatttcccataacatttgcagagtgccatgcacacaatgagcacttaataaacatttgttgaatgattcatctccacaatatcaacgcaattaaragaaatctggcctttcacgtgaatttatgatacaagcaaaataagcacaacaaattttaaagctctttagtcctctgtcttcttatatagaaaactattc

SEQ ID NO: 541281 - DNA, 201 bp, Homo sapiens
cgagaccagcctgggcaacatagtgagacctcgtctctacaaaaaatttgaaaatgagccagctatggtggcacgtccttgtagttctagatattcgggargctggaacaagaggactgcttgagcccgggtatttgaggctgcagtgagctatgatcatgccactgcactccagccagggtgatagagggagaccctgcc

SEQ ID NO: 541282 - DNA, 201 bp, Homo sapiens
aataaacttttaaagtacatggaaagagattcagaaagacctttttcatgaaatcaattcatgaagtaactaggtaaattataaatcattatctatttagwaagaaaatacgcaaagaactactaaacaacactggttatctttgggtgttaatggacacatgcaatgataatagctaacattcacatgttaagcccttga

SEQ ID NO: 541283 - DNA, 201 bp, Homo sapiens
cctagctaaatgaacagtctgccttttcaaaggaaccaaacatttcttccttctgagtattttaaactcttctaacaaagccaaacatggattaaacagcrttacataagtctcttcacagcacctaagttcaaattaggaatcaagtcccaataaccaatgggacatggatactgttttcaccaataaatagccacccca

SEQ ID NO: 541284 - DNA, 201 bp, Homo sapiens
aatgtgaaagccccaaccacacatcagtagagaaactgcaattagaaactgcctctctggtaagagctcccagaagatgagaaatgggtattgcatttctytgtgcagtcctactgggcctggcattgcaggctccactggtaggtgtctcctcaatctgcagcatattaaatgagcactctgtttccctggatttcacat

SEQ ID NO: 541285 - DNA, 201 bp, Homo sapiens
ccagggagaggtaagccaacctacactgcatgagccagcagagcagacactgaaaggtgataagaagaaaaagaagcacttgtttttattaacgtaagacytcaccaacttcctcagacttccccaaatgaaatgtcagactcgcatgattctgagtaagaatcaactgtgtcccttagaagaaaaacatcccaaattcag

SEQ ID NO: 541286 - DNA, 201 bp, Homo sapiens
tttaatcaattcagatccaagtacacaaggaacaagtgcatatgggcaggaacgactggtaaatatttgctaaataaaggcagctgatatttctctgcccrctttgcccctagccctctgactcctcctccccacaatacccacataattttccttttggccataatatagaactcaatcaccatattaagatgaagccct

SEQ ID NO: 541287 - DNA, 201 bp, Homo sapiens
aagttgcagggagccgagattgcaccattgcgctccagcctgggcgacagagcaagactccatctcaaaaaaaaaaaaaaaaaggaagaaagaaagaggamcctgagagggttaagtgctttattcagggctaaataaaccagactgggacaagaattcaggcctcctaactttctctgatggatcctccttcttccaatc

SEQ ID NO: 541288 - DNA, 201 bp, Homo sapiens
gctcagtcacccaggccggagtgcagtggcatgatcacagctcactgtagcctcaacctcctgggctcaagcgatcctcccacctcagcctcaccagtagmtgggactacaggcacatgccacctcacccagctgatttttgtatttttagtagagatggggttttgctatgctgcccaggctggtctcaaactcctgagc

SEQ ID NO: 541289 - DNA, 201 bp, Homo sapiens
cggcgggcggatcacgaggtcaggagatcaagaccatcctggctaacactgtgaaaccccgtctctactaaaaatacaaaaaaaaattagccgggcatggkggtgggttcctgtaatctcagctactcgggaggctgaggcaggagaatcgcttgaatctgggaggcaaaggttgcagtgagccgagatcacaccactgca

SEQ ID NO: 541290 - DNA, 201 bp, Homo sapiens
gggtaagcaaaaatgttataaagacacaaaaagcatatatcttaaaaaatgataaattagacttcattaaaatttaaaggggctcatcaaacacagtttaraaaatgaaaaaggtaagccaaacactgagaaaaaattcatatttctgataaatgacttaaatccagactatataaagaactcatatatatacacatatat

SEQ ID NO: 541291 - DNA, 201 bp, Homo sapiens
actctagtaccatgagcaggggacaggaggtgaagaaatcatgaggaggtgggtgacttacaaatgaactttctttttcggtacctggaaacaaccaaagttttttttttctggcatctgtctgcctctcctatacttctcccactgtctaaatgcttcatcccagcccatataagagagcaccaaaaaaatttaatatag

SEQ ID NO: 541292 - DNA, 201 bp, Homo sapiens
aggcggaggttgcagtgagccaagatcacaccactccatgccagcctgggcgacagagtaagactgtagaaaaaaagaaagaaaaaaaaaaaccacacaccacacacacacacacacacacacacacacaccaaaacctggccccatttgcatgtactactgctacactcatccctcactcccacccacctttcggaggta

SEQ ID NO: 541293 - DNA, 201 bp, Homo sapiens
gtagctcacacctatagtcccagcactttgggaggccgaggcgggtggatcacttgaggtcaggagttcaagactagcctggccaacacggtgaaactccrtctctactaaaaagacaaaaaacagctgggtgcctgtaatcccagctactctactcaggaggctgaggcagaagaatcgcttgaagccgggaggtggagg

SEQ ID NO: 541294 - DNA, 201 bp, Homo sapiens
gtggtgtgagccttgtaatcctagctactggggaggctaagacaggagaatcgcttgaacccaggaggtggaggctgtagtgagccaagctcacaccactrcactccagcctgggcgacagagtgagactccgtctcagaaaaaaaaaaaaaaaaaacagttccgattgactcagtggtctcctgctgttcctgagacaga

SEQ ID NO: 541295 - DNA, 201 bp, Homo sapiens
ggcggaggttgcagtgagccaagatcacaccactccatgccagcctgggcgacagagtaagactgtagaaaaaaagaaagaaaaaaaaaaaccacacaccacacacacacacacacacacacacacacaccaaaacctggccccatttgcatgtactactgctacactcatccctcactcccacccacctttcggaggtag

SEQ ID NO: 541296 - DNA, 201 bp, Homo sapiens
tggagctgtccaccctcatcactttgttgcatctctagaaagatccagggattaaataattatgtgcttcctgtgtggtggcctaagaattaagagaagtracctgtttgatgcctgtgtgcaccctctctttgacaaagcatggcctgatttcccaatccttatggagctctgttgagggttacacagcaaggattctgc

SEQ ID NO: 541297 - DNA, 201 bp, Homo sapiens
ttcgggtggctgaggcagaagaatcacttgaaccagggagtcggaggttgcagtgagctgagattgtgccactgcactccagcctggtgacagagcgagamtccgtctcaaaaaaaaaaaaaaaaaaaaaaaaaagccaattaactgtaaacagcctcaggcaggtccctctggaggtgttcaagaagaaggcattgttat

SEQ ID NO: 541298 - DNA, 201 bp, Homo sapiens
gcggaggttgcagtgagccaagatcacaccactccatgccagcctgggcgacagagtaagactgtagaaaaaaagaaagaaaaaaaaaaaccacacaccacacacacacacacacacacacacacacaccaaaacctggccccatttgcatgtactactgctacactcatccctcactcccacccacctttcggaggtagg

SEQ ID NO: 541299 - DNA, 201 bp, Homo sapiens
tggataactttagatttttcctgttattttggtactgggttgcagcacacaggtggcacctagtcttagggctgtgaggatcccgccatggcctgagctcrgtcactattaccagcttcaccagagaaagacaggaagtggagaagtccaggctaacatgagtttcccagagaaacacaacttattttaatgtcaaacctg

SEQ ID NO: 541300 - DNA, 201 bp, Homo sapiens
tagctaatttttgtattatttatttatttatttatttgagacggagtctcgctctgtcgcccaggctggcatgcagtggcgcgatctcggctcactgcaamctctgcctccggggttcaagtgcttctcctgcctcagcctcttgagtagctgggattacaggcatgcgccaccatgcccagctaattttatttgtatttt

SEQ ID NO: 541301 - DNA, 201 bp, Homo sapiens
ccaattaactgtaaacagcctcaggcaggtccctctggaggtgttcaagaagaaggcattgttatcatcgcagatgatggctccattcatggtattgcctytgaagaccttacagatggaaaagataaggaggtagaagacagtgatactgaccatcatgaccctgtgtggggctaggctaatgtatgtgtttgtgtctta

SEQ ID NO: 541302 - DNA, 201 bp, Homo sapiens
cggaggttgcagtgagccaagatcacaccactccatgccagcctgggcgacagagtaagactgtagaaaaaaagaaagaaaaaaaaaaaccacacaccacacacacacacacacacacacacacacaccaaaacctggccccatttgcatgtactactgctacactcatccctcactcccacccacctttcggaggtaggc

SEQ ID NO: 541303 - DNA, 201 bp, Homo sapiens
tgtattatttatttatttatttatttgagacggagtctcgctctgtcgcccaggctggcatgcagtggcgcgatctcggctcactgcaacctctgcctccrgggttcaagtgcttctcctgcctcagcctcttgagtagctgggattacaggcatgcgccaccatgcccagctaattttatttgtatttttagtagaaacg

SEQ ID NO: 541304 - DNA, 201 bp, Homo sapiens
attaactgtaaacagcctcaggcaggtccctctggaggtgttcaagaagaaggcattgttatcatcgcagatgatggctccattcatggtattgcctctgwagaccttacagatggaaaagataaggaggtagaagacagtgatactgaccatcatgaccctgtgtggggctaggctaatgtatgtgtttgtgtcttagtt

SEQ ID NO: 541305 - DNA, 201 bp, Homo sapiens
atgatggctccattcatggtattgcctctgaagaccttacagatggaaaagataaggaggtagaagacagtgatactgaccatcatgaccctgtgtggggstaggctaatgtatgtgtttgtgtcttagtttttaacagaaaacttaaaaaaaaaaaactttttttaataagaaaaagcttataaactggatgtggtggtg

SEQ ID NO: 541306 - DNA, 201 bp, Homo sapiens
acctcgtctctacaaaaaatttgaaaatgagccagctatggtggcacgtccttgtagttctagatattcgggaggctggaacaagaggactgcttgagccygggtatttgaggctgcagtgagctatgatcatgccactgcactccagccagggtgatagagggagaccctgcctcttaaaaaataaataaataaatacgt

SEQ ID NO: 541307 - DNA, 201 bp, Homo sapiens
gcacccggcctaatttttgtattttcagtagagatggggtttcaccatgttggccagtctggtctcgatctcctgacctcaagtgatctgcccacctcggcctacctaagtgtcaactaggtttttttgaagataattttagatttacagaaagcggcaaaaatagtacagagctcccttgtaccttccacccagtttccc

SEQ ID NO: 541308 - DNA, 201 bp, Homo sapiens
gtggctgaggcaagagaatcgctggaacccgggggagcagaggctgcagtgagtcaagattgcatcactgcactccagtctgggtggcagagcaagactcygtctcaaaaaaaaaaaaaaaaagggaagggttcccagttctgcccactaacattaagagattttcatatgtataatatcttagtgtcactgctaaactaa

SEQ ID NO: 541309 - DNA, 201 bp, Homo sapiens
gaactggatgttcattttctcttccaccgctgaatcctataatgtcaaaagctctcctatctcacattcctgaatttagaaaacatatttaaatgcttcatttcatttgataacctctaagagaaaaaaatagtgatttgaaaagtaccatagaatactgtcattttgataaagctgtatgaaagttggatttctacctcg

SEQ ID NO: 541310 - DNA, 201 bp, Homo sapiens
ggctccattcatggtattgcctctgaagaccttacagatggaaaagataaggaggtagaagacagtgatactgaccatcatgaccctgtgtggggctaggstaatgtatgtgtttgtgtcttagtttttaacagaaaacttaaaaaaaaaaaactttttttaataagaaaaagcttataaactggatgtggtggtgtacac

SEQ ID NO: 541311 - DNA, 201 bp, Homo sapiens
tgaatcctataatgtcaaaagctctcctatctcacattcctgaatttagaaaacatatttaaatgcttcatttcatttgataacctctaagagaaaaaaayagtgatttgaaaagtaccatagaatactgtcattttgataaagctgtatgaaagttggatttctacctcgagttttgcccgcactttgagtagtatggtt

SEQ ID NO: 541312 - DNA, 201 bp, Homo sapiens
ttaaaatcttttctacttcatttttactgtacctattctatgtctagatgcacaaaaactatgtttaggaacattgtgttacaagtgcctacagtattcaktacagtaaggtgctgagtgctgtaggcaatcgtaaccctatgtccaagtttgtatcctaggagcaacaggctgcattatatagcttagatgtgtagcagg

SEQ ID NO: 541313 - DNA, 201 bp, Homo sapiens
acgtagcagaaatgtaagacagaagttgtgaagaccccgaccccagagacttggataatggttagactttggccaggcctgagattcctgactgatctctytaggccctagtcagggaggctgccagacatgtttctacccactgctcccaggacagggctccctgagaaacacacaggtcagcaacggagggttgagaac

SEQ ID NO: 541314 - DNA, 201 bp, Homo sapiens
catttcctaagagctgaggggcggggtgggttacatacggtgcctgaaggggaaaagaccccatgttcgagaatgcactgtgtgtgtgtgtgtgtgtgtgygtgtgtgcgcgcgtgtgtgtgtgtgtgtgtgtgctgggtgggtgtgtggatggggagtaggggatgatatgggcaactcaactggacatgttaaagaaag

SEQ ID NO: 541315 - DNA, 201 bp, Homo sapiens
cctgggagtccgactgagagcaaggggctgtcggtacagcctggggagagggtcccacccccacctcacaccagattttgtattaataataatcacgtctccactcacctgtttctagcctgggaaactttcttccttcattcagcactatttattgcacacctaaaacattaatgctactgtgtggggcttggaagatgt

SEQ ID NO: 541316 - DNA, 201 bp, Homo sapiens
cctgaccacaattatacacaccacaattatatacatcacagtccatattaatagatggaatcacatccaatttgtaacataagcatcacagggggaatgcycgtatgtattgcccattcactagatgccacatactggaaagagggcagtccctcctatcgctgggccaggaaaggggttgtgaagtattatacaagggga

SEQ ID NO: 541317 - DNA, 201 bp, Homo sapiens
ccattattaagtatgttaaagaagtattgtcttaaatactttccttcatcaagtgagaaccctggaagaagatgagaatgaggaacatgatgaggatggtaaaaaaaaaaaaaaaagttaacagtaactcaggcctatcatctgacaggcactaagtgtgtatcacgtattttgtcacttacaaccttttcagggttttaa

SEQ ID NO: 541318 - DNA, 201 bp, Homo sapiens
cacattatggatgcagaattcaaacccaggcctgtctagttcttaaatccgtgttcttcccatataccatgctgcctctcaaaaggaaacactgtttttgttttttttttaaggtacaaatatagtttgtgcatttggaagaagatgcggctcgggacccattctttttgttataggcttgtgctataaacacccatctta

SEQ ID NO: 541319 - DNA, 201 bp, Homo sapiens
ttttaattgaataaaataggtagcttatggcttgttttctgtaactcagccttaacattttgttaagcctttcatttgttttcctcagaagatgtgcctayctttcaattctaaataaatggttcctatgaaccttttgagaaacagaattcttggaggatctgattgaaagctacaatcctctcccagaaaaacccacat

SEQ ID NO: 541320 - DNA, 201 bp, Homo sapiens
caaagcaatatcatgttgcaaactatgcagcattaactgatgttgaggaaatgaaaggagataacgagtccaagcacgcacattacacacttctcccaaayggcactgcagcagggggcggctgtaagccaggcaacaggagatgcattcattagccatgacctcccaatgccaagaaagggcccaaagttcagcaaatgg

SEQ ID NO: 541321 - DNA, 201 bp, Homo sapiens
aggaaagttcaaagtaacctcaagcatgatgacttcacgttcaaaagatctttctcatgttaataacatttaaatctctgcctgtgtgtgactcacatgcytcagactggaagttcagcccaatcagctctcccaactgattggtgagggaagtacatacttcattgtcttaaaccccgagtgactggcattccctttaac

SEQ ID NO: 541322 - DNA, 201 bp, Homo sapiens
aacttcatgagaaactgaaacaggcaaagaggaaaaatattactggcaccagtccttcagtatgaatcgagagaaaattcatgaagtctccaaaagaattytttaggtgtctttttgatgagtaggaattccagtgcctagggctttcagttctttgtgcatcaaagttttcttctaagcatgtatggtcatggaagagct

SEQ ID NO: 541323 - DNA, 201 bp, Homo sapiens
ggcaaagaggaaaaatattactggcaccagtccttcagtatgaatcgagagaaaattcatgaagtctccaaaagaattttttaggtgtctttttgatgagyaggaattccagtgcctagggctttcagttctttgtgcatcaaagttttcttctaagcatgtatggtcatggaagagctggagtatctttcatgacaatgg

SEQ ID NO: 541324 - DNA, 201 bp, Homo sapiens
ggaggctgaggcagaagaatcgcttgaagccgggaggtggaggttgcagtgagccaagatcatgccattgcactccagcctgggcgacaagagcgaaactycatctcaaaaaaaaacaaagaataatttcttaacagggtcctacttcagatggattgctcaagagttcaggccatatggagtacaattagacactgaaca

SEQ ID NO: 541325 - DNA, 201 bp, Homo sapiens
aagtctgttttctctttctctcctctagtaaattatgttaattaagcaaattaagatgattaaagttcaaaatctttcataattgtttacaattttcaagyatcagtaaaaccacaaagcaaatagatgtattaaatataataaaaaagcaattaattttggatccatatatactagtaggtaagagaaaaaatggaaata

SEQ ID NO: 541326 - DNA, 201 bp, Homo sapiens
caattattgtaacacacaaaaaagttactacatactcagtaactgggctcagagaagacatctaatatgaataagaaaacaagtccaaattacaatgtttyaagaagaaatatagttttaactctcttaagtacttataaaaaaatttcaaaatgatcatcaaattacttaatgaatagactaagagagcttatataataa

SEQ ID NO: 541327 - DNA, 201 bp, Homo sapiens
gggcaacatctgggatgtaggacagaaaccaggttctgcccaccctttctacaactcaaggtctccctctcaccaactccactacacgccatcacccataygcctggtattttgccctaaatgctacacaaataagttagaaaactccaaaggagaatggtaatatcatcatagcaggtgaagtgtgaatactaggggtat

SEQ ID NO: 541328 - DNA, 201 bp, Homo sapiens
tgggaaaggccgagtctaaggtctaggtgtacccgagaacccttaatcctgcctcatagaagcaattcgtcttgccaggagatgatgatggcatcacggtrtggtgtcccatccctgtgccaccctggctaacgttacctgggctcggtgctccccgacggcgaactgtatcacggccacgcccgggctatggctgtcttc

SEQ ID NO: 541329 - DNA, 201 bp, Homo sapiens
actgcacgggggacaccggggtccctggctgcggggtggcgtacgcggcaggcagcgtggtggccacggggacagacctgggagcgctgggcggggagtartccagccctgtggacaatgctttgtgtaaacctattccctgttgtaaaccaagctccaccgaggtccctgccggcccatgcctcccgcccccgtggcccc

SEQ ID NO: 541330 - DNA, 201 bp, Homo sapiens
taaattcaagattatcactaaaaatccctttataggtagaagttagggaaaaagatgtgtgaacgcaaagctttctggagttaaagggtaaaacagtatgratatatatatatatatataaatgtatttatacatatataatgtaatataaaatatttatgtacaataatatatttcttaattctacaaaatacagaaaga

SEQ ID NO: 541331 - DNA, 201 bp, Homo sapiens
tcttgctgagtgttctgggtgccgggccatgctgcagggtgaaattttgacttttgattggtgttttcaaaattcctttgtgtatttaaaagtagctcatrttgacaagatagaaggaagaagcttgaacaaatgtcattaacgttgcacaatttcacattcctggacctatcacaggtgccactggttattaacatatgc

SEQ ID NO: 541332 - DNA, 201 bp, Homo sapiens
gtgtggtctgaatgaccgtgtggggtgagagcgcgtaggaccggtggccaggcttccctaaatgcaggccacttttgtcgttgagggtagaaggggaggcytcacgatgagtggcctgttgcacctccaggtcagctgcgggcgtgttgctgttgggcaggaccatcacagaggcccggacccccgaaggatcacgactgc

SEQ ID NO: 541333 - DNA, 201 bp, Homo sapiens
aattgcttgaactcaggaggcagaggttgcaataagccgagatggcaccactccactcaagtctgggtaacagagtgagactccatctcacacacacacamaaaaaaatcactccatttgataaagctccaaatcataatagctgataaaagagtcccccaacactagttctataaagggtgcacactgtatttacacata

SEQ ID NO: 541334 - DNA, 201 bp, Homo sapiens
gctgaggggcggggtgggttacatacggtgcctgaaggggaaaagaccccatgttcgagaatgcactgtgtgtgtgtgtgtgtgtgtgtgtgtgtgcgcgygtgtgtgtgtgtgtgtgtgtgctgggtgggtgtgtggatggggagtaggggatgatatgggcaactcaactggacatgttaaagaaagaagaaaacatct

SEQ ID NO: 541335 - DNA, 201 bp, Homo sapiens
ttatgaagtgccctcacattggttcccaaaaatgtttgctattttaagagccacactattaagaaccacaagtcagccaggcacggcagctcatgtctgtwatcccaacactttgggaggccgaggcgggaggatggcttgaggccaagagttcgagacaagctttggcaacatagcaagaccctgtctctacaaaaaatt

SEQ ID NO: 541336 - DNA, 201 bp, Homo sapiens
tgaagcttgcaatcttatctacagcttttccatcatatggcactaacatagttatatttaatcatgttcccgatattggacatatatatatatatatatayacacacacacacacacacacacacacacatatacacatatatatatatacacacacacatacatatataggcacatacatatttttaaactaatgagcag

SEQ ID NO: 541337 - DNA, 201 bp, Homo sapiens
tctgatcttctgtttgttcactgaattgtggcagggttgtgggggtgcaaaaggagggcttctagttcttccctgatgcaattctctgacgtgcaaaggtrtagactacagttggcaaacattttctgatgaggatcagatagtagatatttcaggctttcttggactatggtctctttcaccatgactcaaatcaaattc

SEQ ID NO: 541338 - DNA, 201 bp, Homo sapiens
ttaagagccacactattaagaaccacaagtcagccaggcacggcagctcatgtctgtaatcccaacactttgggaggccgaggcgggaggatggcttgagsccaagagttcgagacaagctttggcaacatagcaagaccctgtctctacaaaaaatttttaaaaattagttgggtgtggtggtgcacagcggcagtccca

SEQ ID NO: 541339 - DNA, 201 bp, Homo sapiens
aagcttgcaatcttatctacagcttttccatcatatggcactaacatagttatatttaatcatgttcccgatattggacatatatatatatatatatatayacacacacacacacacacacacacacatatacacatatatatatatacacacacacatacatatataggcacatacatatttttaaactaatgagcagta

SEQ ID NO: 541340 - DNA, 201 bp, Homo sapiens
taatcaaagattaatctgtttgaaaccatgggccacaacttattccgcattatttttccctgctagcatagtactctgcatatagtaggctgagaaaaaayagaattaaattgaatgcaaaatgagattagacaaaaagatgtttaaagacccttctgatttaaatttcatgaattacaaactgcctaaatactcaaactg

SEQ ID NO: 541341 - DNA, 201 bp, Homo sapiens
gcttgcaatcttatctacagcttttccatcatatggcactaacatagttatatttaatcatgttcccgatattggacatatatatatatatatatatacayacacacacacacacacacacacacatatacacatatatatatatacacacacacatacatatataggcacatacatatttttaaactaatgagcagtata

SEQ ID NO: 541342 - DNA, 201 bp, Homo sapiens
ttcacatgcagctaaggatgagattattcaaactgaaaccaaccccacatatcaaaccgtggtgtcattttcgtcactttaacagtagaaaggacacaggaaaaaaaaaagaatgaaatcatttactgaactaacagttacatttgtcccctcctgccttggataaataatgactaatttttaaataacggattggtacag

SEQ ID NO: 541343 - DNA, 201 bp, Homo sapiens
cacttgttctattgtagtttgtctttgttgcaaattttccattttgaccctttcctgacaaaacattaatatatacattttggttgtgttacgacttgttaaaaaaaaaaaaaaaaaaaaccctgacatttttattctgtaccaccttgaagcacccataactttttaaaataagccctgctatttaaatcagtgatcaaa

SEQ ID NO: 541344 - DNA, 201 bp, Homo sapiens
ttgcaatcttatctacagcttttccatcatatggcactaacatagttatatttaatcatgttcccgatattggacatatatatatatatatatatacacayacacacacacacacacacacacatatacacatatatatatatacacacacacatacatatataggcacatacatatttttaaactaatgagcagtataac

SEQ ID NO: 541345 - DNA, 201 bp, Homo sapiens
aaatttatgagtaatgagccattttgggagaaggaagttgattctgtcattcattttgacagggcttattaacacaaaaggaggagagggctggtggggagggtggggcacttgtgggaaggtgcagagaggacagaagggtgaagccagccaggcaaatgagaatgagaaattgcaattatggaccttatggaggagctg

SEQ ID NO: 541346 - DNA, 201 bp, Homo sapiens
gaggcaggagaatcacttgaacccgggaggcggaggttgcagtgagctgagacggcgccattgcactccagcctgggggacaagagcaagacttcgtctcaaaaaaaaaaaaaaattgaagtggggccaggtgcggtggctcatgcctgtaatcccagcactttgggaggtctaaatgggtggatcgcttgaacccaggag

SEQ ID NO: 541347 - DNA, 201 bp, Homo sapiens
agaggtcatgcttaggattctagtactataccatctcttcaaggctgatctttctaccaacacttctgtagttagtattaaaacatatcggggctggggcrtggtggctcatgcctgtaatcccagcactttgggaggctgaggtgggcggatcatgaggtcaggagatcgagaccatcctggccaacatggtgtaacccc

SEQ ID NO: 541348 - DNA, 201 bp, Homo sapiens
cccctgaagcttttccaatctattcctttttgtgattgttttccttttgaaatagtgttaacacattttaaaattatatacatattcattttgaaaaatayagaaatggcaaagaagaaagtaaaaacctcccagctgacacttaacatttgtcccatctttttctaagcatcaatatataaatatttaacagtatataca

SEQ ID NO: 541349 - DNA, 201 bp, Homo sapiens
agatcgagaccatcctggccaacatggtgtaaccccatctctactaaaaatacaaaaattagccacgcatggtggtgcgtgcccgtaatcccagctactcrggaagctgaggcaggagaatcacttgaaccggaaggcagagtttgcagtgagctgagatcatgccactgcactccagcctggtgacaaagcaagactctg

SEQ ID NO: 541350 - DNA, 201 bp, Homo sapiens
caggagccagaggttgcagtgagccaaaatagcaccactgcactccaacctgggaaacagagtgagaccctgtcttaaaaaaaaaaaaaaaaaaaaaaaagaaagaaaagaaaagaaaaaattaaagcgggaattcagggaagatgatggcaccagtgtcaaaggtagcacagtttaaaaaaatttttcagaatccctgcc

SEQ ID NO: 541351 - DNA, 201 bp, Homo sapiens
agtaactcatgcctataatcccagtactttgggaggccaaagcgggtggatcacatgaggccagaagtttgagaccagcctggccaacatgtgaaatctcrtctttataaaaatacaaaaattagccaggcgtggtggtgtgcacctctagtcccagctacttgggaggttgaggcagagaatcacttgaacccaggaggc

SEQ ID NO: 541352 - DNA, 201 bp, Homo sapiens
atataatcgaaattcagtaggaattttttcaatgaggaggaagacagtcttagatgttcaaaaacaaaagcatttttcctgtattgaatttcaataataayagtgttttgtgtggttataagtgcagtactataaaacttaaatatgattgagcgaattcagcactctattacgtacagctttctttccagaaaattcatc

SEQ ID NO: 541353 - DNA, 201 bp, Homo sapiens
ctttgattaacatgctttgcctctccttgccatttagaaaattcctactcatttttcagctggacacagtggctcatgcctgtaaatccagcactttgggrggccaaggcgggaggatcacctgaggtcaggagttcgagaccagcctggccaacatggtgaaaccccatctatactaaaaaaaaaaactagccaggcatg

SEQ ID NO: 541354 - DNA, 201 bp, Homo sapiens
aggagccagaggttgcagtgagccaaaatagcaccactgcactccaacctgggaaacagagtgagaccctgtcttaaaaaaaaaaaaaaaaaaaaaaaagaaagaaaagaaaagaaaaaattaaagcgggaattcagggaagatgatggcaccagtgtcaaaggtagcacagtttaaaaaaatttttcagaatccctgccc

SEQ ID NO: 541355 - DNA, 201 bp, Homo sapiens
aacatttctcctttttccagctgaattactaagacaagcaagagatgactcataataagcatagttgatgaagcaattaatgccaactcttcctctctgartcatcccttccagtgaaagaatcgctaggagtattaaccctggctgaaaaagtagatgccatgtgagcacattaaactttaccaaacaatggagtggtaa

SEQ ID NO: 541356 - DNA, 201 bp, Homo sapiens
attcatttattcattcgatgcaatagctgcatttctaaaaatcttcatataatcgaaattcagtaggaattttttcaatgaggaggaagacagtcttagaygttcaaaaacaaaagcatttttcctgtattgaatttcaataataatagtgttttgtgtggttataagtgcagtactataaaacttaaatatgattgagcg

SEQ ID NO: 541357 - DNA, 201 bp, Homo sapiens
gcctgtaaatccagcactttggggggccaaggcgggaggatcacctgaggtcaggagttcgagaccagcctggccaacatggtgaaaccccatctatactaaaaaaaaaaactagccaggcatggtggtgggcgcctgtaatcccagtgacccgggaggctgaggcaggagaatcgcttgaacctgggaggcagaggttgc

SEQ ID NO: 541358 - DNA, 201 bp, Homo sapiens
tcatgaggtattttaccttaaaaaatacgtacacacggccaggcacgatggctcatgcctgtaatcccagcactttgggaggccaaggagggccgatcacraggtcaggagatcgagaccatcctggctaacacagtgaaaccccgtctctactaaaaacagaaaagattagccaggcgtggtggcaggcgcctgtagtcc

SEQ ID NO: 541359 - DNA, 201 bp, Homo sapiens
gactgatcaaagtcagaaaacagatgttaagaacgtgaacctcaaattcatttattcattcgatgcaatagctgcatttctaaaaatcttcatataatcgraattcagtaggaattttttcaatgaggaggaagacagtcttagatgttcaaaaacaaaagcatttttcctgtattgaatttcaataataatagtgttttg

SEQ ID NO: 541360 - DNA, 201 bp, Homo sapiens
ttcaaggccaaccttgagcttaaatagcttaaattccattgtgatgtcatcctcatctatcccctaatgttttctggaaatctaagcagaatagattctgcctcacctacgtttcctagctcagtgatggcatcaacatcactctgacgtcttcctctcccaaattatgccccatattcaaccatgcagccatactcctca

SEQ ID NO: 541361 - DNA, 201 bp, Homo sapiens
ggagggccgatcacgaggtcaggagatcgagaccatcctggctaacacagtgaaaccccgtctctactaaaaacagaaaagattagccaggcgtggtggcrggcgcctgtagtcccagctactcgggaggctgaggcaggagaatggcgtgaacctgggaggtggagcttgcagtgagccgagattgcgccactgcattcc

SEQ ID NO: 541362 - DNA, 201 bp, Homo sapiens
aaaccggtccttgtgggaactatgctcccctatatgattgcaaacactcagatataagtaatatatgaatgacttacttaatcttcctcttctttttcacwgtttgggagcaagtaggcaaagcctggaacaatcactgatgcaacatgtgtttacacacatgcatggttcttagagaatggaaggacaggagctgaatag

SEQ ID NO: 541363 - DNA, 201 bp, Homo sapiens
aaatttaccagtagcatgatacttcctcatagtactctctttctgttttgtttttgccataagaaaataaattcatttctggattatattattttcaactrtcttgcagcaaaatcgatctgggagaggcagaatggtcccatttgttactttaacaaccttcaccagctgccaaagctaggtgtccagaaaagtaaggtt

SEQ ID NO: 541364 - DNA, 201 bp, Homo sapiens
tggcacatgcctgtaatcccagctactcagaaggctgaggcaggagaaccacttgaacccaggaggcggaggttgcagtgagccaagatcgtgccattgcyctccagcgtgggcaacaagagcaaaactccgtctcaaaaaaaaaaaaagaaagaaaatagtatagttgaaagaaacgtggagtttgtaattagagttctc

SEQ ID NO: 541365 - DNA, 201 bp, Homo sapiens
ctgggttcaagtgattctcctgcctcagcctcccaagtagctgggactacaggcgcctgccaccaaacctggctaattttttgtatttttagtagagatgsggtttcgccgtgttagccaggacggtcttgatctcctgacctcgtgatccgcccgcctcagcctcccgaagtgctgggattacaagcatgagccatcacg

SEQ ID NO: 541366 - DNA, 201 bp, Homo sapiens
cgggaggcagaggttgaagtgagccaagattgcgccactgcactccagcctgggcgacagagtgagactccgtctcaaaaataaaataaaataaagagggrgtaaaaaaccataattgtctaagaattgctctgaggattacatcagtgtaaggtaatgaactttactgaaatgtatgcaaaaaatatcactttcattatc

SEQ ID NO: 541367 - DNA, 201 bp, Homo sapiens
gtcctatgctccaactgcctaaaccttaaaatgaaacaaatacaagtaatgggtgtttttcactgttatatacaaggcagcctattggccacataattctwaaacaaccagaaaaaagctgaagtatgaccatcaatacgggacatggaacatgccaaaagatcgaaagattctttcttctccctctttaggactaaacag

SEQ ID NO: 541368 - DNA, 201 bp, Homo sapiens
ctggtatacccaaccacagatgagggacgcaggcacaaccttcaccaagtgtggatcccagctgcaggacagcttggcattcccttccccgtcacccagcytctattccttcccattctccttctatttattcctagttactaagaatttttaaggtgctatcacacctccagggctacttccaaaagcctagtcgagctg

SEQ ID NO: 541369 - DNA, 201 bp, Homo sapiens
ggttaaccagagagttttcttcctggcaaattgctctgccgccaccatgggtattaacactccaggatccctgcaactttcccttcttcctctattcctcrtcccctgccccgagatattatctgtgcccaagctgcaggggttgaggtcacacatctggtgccaaggagctgtcagtgcctccggcagtggcacagttca

SEQ ID NO: 541370 - DNA, 201 bp, Homo sapiens
aggcacaaccttcaccaagtgtggatcccagctgcaggacagcttggcattcccttccccgtcacccagcttctattccttcccattctccttctatttaktcctagttactaagaatttttaaggtgctatcacacctccagggctacttccaaaagcctagtcgagctgactcaaagggaaggttctttagggacctca

SEQ ID NO: 541371 - DNA, 201 bp, Homo sapiens
aactgagaatgggttttaaaaacatcctcctttactgtacaaagtatctggtcacaaagtttgttattggcagaaccaggattaaaaattatgacctctgycttttttctctctcacccttattctcccaaggtgtatatttatatgttttgcaaagtagccaaaggcagacttcaaaaggagctttcctgtggggtgagc

SEQ ID NO: 541372 - DNA, 201 bp, Homo sapiens
gacctctgccttttttctctctcacccttattctcccaaggtgtatatttatatgttttgcaaagtagccaaaggcagacttcaaaaggagctttcctgtkgggtgagcggtaaatgaataacggctggactgagagagcaaagagaaaatgagtcatggatattgtgttaaatatataagcgttcgctggctttctttga

SEQ ID NO: 541373 - DNA, 201 bp, Homo sapiens
aaccccgtctctactgaaaatacaaaaattaaccaggcgtgctaatgggtgcctgtaattccagctactttggaggctgaggcaggagaattgcttgaacycaggaggcagaggttgcaataagccgagatggcaccactccactcaagtctgggtaacagagtgagactccatctcacacacacacaaaaaaaaatcact

SEQ ID NO: 541374 - DNA, 201 bp, Homo sapiens
ggtgcacactgtatttacacatacaaatgcatgcagcacttgaaaaatattaagcaaccaaaacatacatatgtaaatatgtgcaaagactaatatacttctacatgtatgcccttattaagtacttttatgtttgactagatgtgcttcttttgaaatctttttagcttcattacatgtttttgtaatttcatggaagta

SEQ ID NO: 541375 - DNA, 201 bp, Homo sapiens
aggtgtacccgagaacccttaatcctgcctcatagaagcaattcgtcttgccaggagatgatgatggcatcacggtgtggtgtcccatccctgtgccaccmtggctaacgttacctgggctcggtgctccccgacggcgaactgtatcacggccacgcccgggctatggctgtcttcaatcctctctacggtgctggagtc

SEQ ID NO: 541376 - DNA, 201 bp, Homo sapiens
catgtgtttatacaaatatacatatatagcatttattatacatatatattattttacaaaatatagaaaaataattttataagcatgaaaggccttgtagrccattgtaaagataccgacttttaagtaaaatgggaagaccagagataatttttaatgcagtagtatcatgatctgccttacattttaagggctcatttg

SEQ ID NO: 541377 - DNA, 201 bp, Homo sapiens
atttttttaattttttagtagagacagggtcttgctatgtcgcccaggctggactcaaactactggtctccagcaatcttcccacctaggcctcccaaagwactgggactacaggtgtgagccacagtgcccagctgtaacctattcatttaccatgagactattaaactccttttaaattgaattataattctattccat

SEQ ID NO: 541378 - DNA, 201 bp, Homo sapiens
ggctgctctgagaagctcctcctaccctgactatacctcaaatgcagcactttcctttgttcttgctttttttattcagctcttaaatgctatgccttccrtgtgtgtgtgtgtgtgtgtgtgtgtgtgtgtgtgtctgtttttattagttattgagatactaccataagcaacatctagagagtgagtgcacatttaatc

SEQ ID NO: 541379 - DNA, 201 bp, Homo sapiens
ctgataaatcatttcagaatcaagaaagagatctatttgtgctgaagttggtgttacaggctcaaattcctttttttcctttttttttttttatttatttwttttttgagacggagtctcattctgtcgccaggctggagtgcagtggcacgatctcggctcactacagcctccacctcctgggttcaagtgattctcctg

SEQ ID NO: 541380 - DNA, 201 bp, Homo sapiens
gtgaggattttcagcctagcacataaccgttaaaatgagtatcatccctaagagataaagtagcagtaagacactctacctttttcttttctttcctctcttttttttttttttttttgagatggagtctcactctgtcgcccaggctggagtgcagtggcgagacctgggctcactgcaacctctgcctccaggattcaa

SEQ ID NO: 541381 - DNA, 201 bp, Homo sapiens
tcattctgtcgccaggctggagtgcagtggcacgatctcggctcactacagcctccacctcctgggttcaagtgattctcctgcctcagcctcccgagtakctgggactacaggtgcgcaccaccacccccacctaatttttgtatttttagaagagacgaggtttcactatgttggccaggacggtctggatctcttgac

SEQ ID NO: 541382 - DNA, 201 bp, Homo sapiens
gaaacgcatcctaagccattgggaccaatttgtcccgcaaaccctgaaaaagaagcggcttattttttctgcactacggtctggccttaatattatctctytaatagggaaaaatggtcacctgagggaagtataaattacaacactattctgcaggttgaccttttctgtaagagggaagggaaatggagtgaaatacct

SEQ ID NO: 541383 - DNA, 201 bp, Homo sapiens
taggagaccaggagtgcacacatctctggccagggacagcaaagaaaggcagctgagtcctacaacactgctggaaggagaagccaacagtctaggatttaaaaaaaaaaagaagctgagtctgccattaagaatgaagtaaattgctaacacagatttttaatgttcttacacacacacaaaatgataaactggtgaggt

SEQ ID NO: 541384 - DNA, 201 bp, Homo sapiens
taatattatctctctaatagggaaaaatggtcacctgagggaagtataaattacaacactattctgcaggttgaccttttctgtaagagggaagggaaatrgagtgaaataccttatgtccaagctttctttttactgaaggataatccacaactatgcaaagctggcgatttacattccacaggaggacctctcagatta

SEQ ID NO: 541385 - DNA, 201 bp, Homo sapiens
agaagataaaccctccaaagatttccttctatcattgttattcattaaaaaaaaaacaagcttaggccgggcatggtggctcacacctgtaatcccagcaytttgggaggctgaggcgagcggatcatgaggtcagaagatcgaaaccatcctggccaacatgctgaaaccttgtctctactaaaaatacaaaaattagct

SEQ ID NO: 541386 - DNA, 201 bp, Homo sapiens
cttcgagatgaagtcatttacaacccagaggagatggatggtcacccggccggccaactcaaaagggcacagataagattagatggacctcctaccccacyggtttcatacttgacgagcagggtttgcagaagaaggtttcatggtcaccctacccctttaagcagttctcctttccatgtggtaccttaacctaaatct

SEQ ID NO: 541387 - DNA, 201 bp, Homo sapiens
tcagtggagactagtgcaagatcctagactcatcagtgaggaagtaattcctctatatccggttgtacccaacccctataccctgctctctcaaataccaraggaagcagaatggtttcactgttctggacctcaaggatgctgccttctgcgttcctctgcacttggactcccagtttctctttgcctttgaggatccca

SEQ ID NO: 541388 - DNA, 201 bp, Homo sapiens
tttccttctatcattgttattcattaaaaaaaaaacaagcttaggccgggcatggtggctcacacctgtaatcccagcattttgggaggctgaggcgagcrgatcatgaggtcagaagatcgaaaccatcctggccaacatgctgaaaccttgtctctactaaaaatacaaaaattagctgggtatggtggcacgtgcctg

SEQ ID NO: 541389 - DNA, 201 bp, Homo sapiens
catatggtcgctcacaccatcaaccacaaatgcactccctccacctggagaaggcgtcctcacctaccaccaacagtgcaacttcgagatgaagtcatttrcaacccagaggagatggatggtcacccggccggccaactcaaaagggcacagataagattagatggacctcctaccccaccggtttcatacttgacgagc

SEQ ID NO: 541390 - DNA, 201 bp, Homo sapiens
cctgcttaacaaacagtccaggttttgtaatggcaaacatactccctgtatgactattcacccctggaccccctgcagcagcacccccaccactaaggaawaccttctcatcctctctttcaatcactctcttgaatggttcctagtagatacaaaacagttttttctccaatgggaaaatagagcacagggagtcactca

SEQ ID NO: 541391 - DNA, 201 bp, Homo sapiens
ggagggtgagacaggagaacagcttgaaccagggagtcagaggttgcagtgagcagagatcgcgccactgcactccagcctggtgacagagtgaaactccrtctcaaaaaaaaaaaaaaagcttaacttgaatgaatgggaacaagagggttatttaaaaaataataaacagtaacagctatcacacctaaaggtgacatt

SEQ ID NO: 541392 - DNA, 201 bp, Homo sapiens
aactatagactttagttaataataatgtatccatattagttcaatttcaacaaatgtaagatgcaagatgttagcagtagggacactgtttgtcaggggtsggggaggctaggaatataggaactctttgtactttcaaatcaatttttctgtaaacctaaaactgttctataaaaaagcctattaattaaaaaacaaaaa

SEQ ID NO: 541393 - DNA, 201 bp, Homo sapiens
aaggaagaaggttcctgctggatacttggtaagaggtgggtggggtccaggatttccaggggactttgagtttattcttccaacactgctaaaatgcatctattttctattctgactttctaacaggatgcaatctgagagccagccagccacttaaaatctatttatttcagctgtgcgcagtggctcacgcctgtaatc

SEQ ID NO: 541394 - DNA, 201 bp, Homo sapiens
gaacaccagtgaaacaccacagtgtttcaatatgaatacacttcagtcactgtttttgctccgcccaccaaaaaaaatccatactttaaagcttttaattyttttaagcttttaatttttttaattgaagcatcactttactttcttttaaattctaacatcagtgagcagccaaaattctttttttttttttttagatgg

SEQ ID NO: 541395 - DNA, 201 bp, Homo sapiens
ggtcaggagatcgagaacatcctggctaacacagtgaaaccccatctctactaaaaatacaaaaattagctgggcgcagtggcaggtgcctgtaatcccakctactagggaggctgaggcaggagaatcgcttgtacccaggcgggggcagagattgcagtgagccgagattgcgccactgcactccagtctgggtgacag

SEQ ID NO: 541396 - DNA, 201 bp, Homo sapiens
ggcctgaacccgtgaggcggagcttgcagtgagccgagatcacgccgctgcactcctgcctgggcaatagagagaaactctgtctcaaaaaaaaaaaaaaraaaaaaaaagaaatatactcatgtttctaaaaacatttagtttttattagtacttaataaagatgatgtctcctctcagtggggcaaaagactaataaat

SEQ ID NO: 541397 - DNA, 201 bp, Homo sapiens
tccccttggaacctgccagggcagggcaaggttaaaagggccttagggtactctcctctgggggtgctgcagcggtcaaaggacccagggcttcagtttcyaatgggaggcatttccatacctgtcagaatctcttaacaggttctgacatatggtccaacatatggtcgctcacaccatcaaccacaaatgcactccctc

SEQ ID NO: 541398 - DNA, 201 bp, Homo sapiens
gatggaaagacattcacaacttttgcaatgtgagagaagaaatttcggaaaagtagatcaagcatgattctatttctgtaaagctacatgtatttatttgtatatatatatatatccatagaaaatcttctggaagaaaacacactcaaatgctaacggtggtgaacatctatgggcaggtagataataatgacatggcag

SEQ ID NO: 541399 - DNA, 201 bp, Homo sapiens
tatactactggtgagacccacatttcaaggtcctactcagaaagacgtttcttcattttaatgttgtttattactcacattctgctaatcactaggatgaytgaaacagctttgcagctcgctgggaggaaaattaaagaaagtagtcttcctccttttatatctgtttacacagattgttaaaatagtacggttcatttg

SEQ ID NO: 541400 - DNA, 201 bp, Homo sapiens
atggaaagacattcacaacttttgcaatgtgagagaagaaatttcggaaaagtagatcaagcatgattctatttctgtaaagctacatgtatttatttgtatatatatatatatccatagaaaatcttctggaagaaaacacactcaaatgctaacggtggtgaacatctatgggcaggtagataataatgacatggcaga

SEQ ID NO: 541401 - DNA, 201 bp, Homo sapiens
tatcagcttaatgtgagtgtctcaacaagactgtttttctccacaggccaaccaaggtacctagactgatgtgaggcatttggaagaggggaaagattcgwctggaaagggaacagagagtgaccagccactgaaaggacaggcaggaaccactggaaacaaactgcgcctactttgaaatttcccccacagcacagatga

SEQ ID NO: 541402 - DNA, 201 bp, Homo sapiens
ttgcaaaatagaatccaggacctccaaggcattgtgtaatattgacatccttgcttcccatctatttaccaccttataaaagttgagtagctagaagaaayaatagctcattttaactacagcagtgcttcatctgaccaggccacaatgaatttaccaaccacataaactcacaaaacggtaaaaactcataaaccccct

SEQ ID NO: 541403 - DNA, 201 bp, Homo sapiens
tataatgtcaaaagctctcctatctcacattcctgaatttagaaaacatatttaaatgcttcatttcatttgataacctctaagagaaaaaaatagtgatktgaaaagtaccatagaatactgtcattttgataaagctgtatgaaagttggatttctacctcgagttttgcccgcactttgagtagtatggtttgccaac

SEQ ID NO: 541404 - DNA, 201 bp, Homo sapiens
atcctataatgtcaaaagctctcctatctcacattcctgaatttagaaaacatatttaaatgcttcatttcatttgataacctctaagagaaaaaaatagkgatttgaaaagtaccatagaatactgtcattttgataaagctgtatgaaagttggatttctacctcgagttttgcccgcactttgagtagtatggtttgc

SEQ ID NO: 541405 - DNA, 201 bp, Homo sapiens
ccatatacctttccatcagggagcttggtgcttgtagtagtttttgtgaggtaaaacctatgcatagaaacggaagaagttgaggactcgatctgctaacrtatttttttagccctatccattaaaattatattcttaaataccggtaattaccaattatccacattaaacagaaaaaaaaattttttaaaaatcagtagc

SEQ ID NO: 541406 - DNA, 201 bp, Homo sapiens
ggaggctgaggcaggagaatcacatgaacctgggaggcggaggttgcagtgagccgagattgcgtcactgcactccagcctgggtgacacagcaagactcyatctcaaaaaaaaaaaaaaaaaaaaaaagttatgaaggtcttctgaaaacaagaaaacactattcagatgaaaactattatatttatagattactatttt

SEQ ID NO: 541407 - DNA, 201 bp, Homo sapiens
gataacccctattccgtacaaaggaacagtgaacatgcttgagtgaaaacggccacgcaaggcagacagcaagtgagaaacgcctaaggcaggggaagaayggtggtctgctacagtgagaagagaaatagagaagactgagtcagaaggggaaggtatacaccaaacaggaagacacgagtgaactgaacgcaagaagta

SEQ ID NO: 541408 - DNA, 201 bp, Homo sapiens
aatttattagtgaaaagaaagatgtactttctacctggagggtctgtggggataacccctattccgtacaaaggaacagtgaacatgcttgagtgaaaacrgccacgcaaggcagacagcaagtgagaaacgcctaaggcaggggaagaatggtggtctgctacagtgagaagagaaatagagaagactgagtcagaaggg

SEQ ID NO: 541409 - DNA, 201 bp, Homo sapiens
taaatggtcctctaccaaagtgagggtgagggtaagttttgaagagactggaaaagtttggaatagatcccataagaaatgtgactatgagcccactagaraagcaatgatgactctcctcagattaacagtaagaatttacatcaggacccatcagttgggtttgggggcctctaagcagctgtgcaggtgatggggatc

SEQ ID NO: 541410 - DNA, 201 bp, Homo sapiens
atatacacatatatatatacacacatatatgtaagttcacaaaataaaaaaaaaaaaccatctatatctatatagatataggttgtttgttttgcgacacrtcattctgttgcccaggctggaagtgcagtggcaccatcatgactcactgcaggcttgacccctcccaggctcaagtgatcctcccacctcagcctcctg

SEQ ID NO: 541411 - DNA, 201 bp, Homo sapiens
caaagtgggaaaaatatttccaataccattaaacaaagagttaatatccttaatacaaaataaatacatgtaattgtgagtaaaaggaaaaactttctaasacaaaaataagcaatgaacacgaatggccaatttaaaaaagaaatgtaaaaaacagagaaacataaggaaaatatccaccctcacttgaaactacactaa

SEQ ID NO: 541412 - DNA, 201 bp, Homo sapiens
atagctctatcactttaagatctgccaccttgggcaagttgcttatcctctctgagcctcaacttcctgttctgtcaaatggggctaataacactatgctrttgggctgctgtggcaattgaattttacatgtatgtaaagcacttagtacagcatctggaccataataagagctcattatatattagtattattttgatt

SEQ ID NO: 541413 - DNA, 201 bp, Homo sapiens
gccgaggtgggcagatcacctgaggtcaggagtttgagaccaacctggccaacatggtgaaaccctgtctctactaaaaatacagaaattagccaggcgtsgtggcaggttcctgtaatcccagctacttgggaggctggggcaggaggatcacttgaacccaggaagcagaggttgcagtgaactgagatcacaccatca

SEQ ID NO: 541414 - DNA, 201 bp, Homo sapiens
cccacagcacagatgaccttttgccacaagttttcatacaagctttgctttctcattccaataatctccctgctatctgaaagacttctggcaattaaaamacacacacacacacacacacacacacacaattcaaaacttgaaaagggcttcatcagaagatgaacaggtcttctgcgaaataattcccaaccatcacaa

SEQ ID NO: 541415 - DNA, 201 bp, Homo sapiens
gaatggtagttctgcttttagctctttgcagaattgccacactgccttccacaatggctgaactaatttgtacactcaccaacagtgtataagtgttccctttctccgcaacctcatcagcatccaactggttattttttgactttttaacaacagccattctgactggtatgagatagtatctcattgtgcttttgattt

SEQ ID NO: 541416 - DNA, 201 bp, Homo sapiens
ctccaaactgaaaaccatggtgactgcagtatactctccaaactatcactaaagaggaagggggatgtgaaacatatacagtacattactctctgcgatcytcctctgtgctatcaacaagcaagaaaaaagagatctggagaaaacagatgtggaggatacatgcagaggaccaagaaccaagattttattcagatttcc

SEQ ID NO: 541417 - DNA, 201 bp, Homo sapiens
tttttttgagatggagtctcactctgttacccagactggagtgcagtggcatgatcttggctcactgcaacctccacctcccgggtccaagtgattctccygcctcagcctcccgagtagctgggactacaggcatgcaccaccatgcccagctaattttatatatatttttagtagagataaggtttcaccatgttggcc

SEQ ID NO: 541418 - DNA, 201 bp, Homo sapiens
gttggtaactttcccaaggttacaaaattagcagtgcagccggaactgaaacctacattgtgtgaccactctcctcctcccaaagcaatttagtttccaaytggacctcatctgcctacttgtttctcccccagcccccaggcagcccttcactgtggctgctgagtcatcaggatgagctttgttctcaagcaagccact

SEQ ID NO: 541419 - DNA, 201 bp, Homo sapiens
caggaatatacaatgtcttctatcatttaaatcattttgtcaatttaaaataatgacctggctgggcacactacaccctgtcaaacaaaactgatttactytatctcatacaaaacatcctgaaaatatgggatgctctgaaagtgccaacagctacccttggagtttttctttttccaaaaattatttctttcaattcca

SEQ ID NO: 541420 - DNA, 201 bp, Homo sapiens
atgtttattgcggcactattcacaatagcaaagacttggaaccaacccaaatgtccatcaatgatagactggattaagaaaatgtggcacatatacaccayggaatactatgtagccataaaaaaggatgagttcatgtcctttgttgggacatggatgaagctggaaaccatcattctcagcaaattatcgcaaggacaa

SEQ ID NO: 541421 - DNA, 201 bp, Homo sapiens
gagcttcttctaatctcttctgtaacatctagtagaaagacagcagatacctacacagagaaatgatctgattgtacaatcttcccatccacaaggacttstcagagcagatgacattaaatttcaagattccatatacgagatcaatttgatttcctgatgttttcaaccttgctgtcatgggtgcattaaaggaaatac

SEQ ID NO: 541422 - DNA, 201 bp, Homo sapiens
tctaggcaaggccactttggacagggactttaagatacaatccacagtatttctatgttctttggatccaaatcggaaaatggcagaaaaagtcatttagkgccaattcaatgtggcataatgagaggagagcaattaagaagattacaaagtgagccatattcctcttcaaggctgggtgcatggataaattaccagagc

SEQ ID NO: 541423 - DNA, 201 bp, Homo sapiens
ttttctgtcttacaaggggattgtaaaatgcaccaatgagtgctctgtaaaaacacaccaatcagcgctctgtagctagcttgaggtttgtaaaatggacsaatcagcactctgtaaaatggaccaatcagtgctctgtagaatggaccaatcagcaggacatgggcagggacaaataagggaataaaagctggccacgcc

SEQ ID NO: 541424 - DNA, 201 bp, Homo sapiens
tggctattagctttcagctgggctggttgacatggcaagacccttagaagggcacatccatatttgtgggtaattatggaatttcaacaattggaagcaaytcagggagccatcatgaggagaagaaaaaaggtaatctgtttcagaaagtccaaaataaagtgactttattatatacatattcatattcctcctctatta

SEQ ID NO: 541425 - DNA, 201 bp, Homo sapiens
ctaggtgacaaagcctcagagaagtcagggtagagagggatccagaaaacgaggggtcttggagccttgcggagtgggaggtcttcttgctcctctgggaygcgtgagcacagcatgcaacacttgtctgcaactgtgagacaggagcaacggacagaattaaagggaaaaagagagtagaaggattcatgcctggattct

SEQ ID NO: 541426 - DNA, 201 bp, Homo sapiens
tgctgggaggcatcattctttaggcatcccaagttcttgcttcaacttttacatataaagatccaaaatgtgccaggcgtagtggctgatgcctataatcmcagcattttgggaagccgaggtgggcagatcacttgagctcaagagtttgagatcagcctggccaacatggtgaaaccttgtctctacaaaaaatacaaa

SEQ ID NO: 541427 - DNA, 201 bp, Homo sapiens
acaaaaagttagccggacgtagtggcgggtgcctgtagtctcagctattcgggaggctgaggcaggagaatggcgtgaacccgggaggcggagcttgcagkaagcagagatcgtgccactgcactcaagcctgggtgacagagcgagactctgtctcaaaaaagaaaaaaaaaaaagaatattgaaattaggccaattaat

SEQ ID NO: 541428 - DNA, 201 bp, Homo sapiens
gtgaatttgatgcatattccaggtataaatcccctttccagagagcagaaattcctaatctgccacacttcaaactgaaatagattcatcagcatttcggrtacatacgaacagctccccaaagccattagcaaaggttatttgtaagtggaaaatcaagagacataaagatttcaaagtcaaaatgcaatgttatttagt

SEQ ID NO: 541429 - DNA, 201 bp, Homo sapiens
aaagcaaaccactcaaatggaaaaggagaggaaatacagacagtgcagacttttaaaaaaagtattagaaaatccccaaactctactgataggtctagaatttttttttttttacacaaattgttccctcctcacatttctttatacacatcaagtatccacttctaaggaaaatagtctagactctccatcccttcccca

SEQ ID NO: 541430 - DNA, 201 bp, Homo sapiens
aagttagccggacgtagtggcgggtgcctgtagtctcagctattcgggaggctgaggcaggagaatggcgtgaacccgggaggcggagcttgcagtaagcwgagatcgtgccactgcactcaagcctgggtgacagagcgagactctgtctcaaaaaagaaaaaaaaaaaagaatattgaaattaggccaattaataaccc

SEQ ID NO: 541431 - DNA, 201 bp, Homo sapiens
cagagagatgctgaggatcttttgagtacatttaatcaccatttgatagctacattgaaagcaatgatacctgtctatttcaaagaagcgacaaatgaccaaaaaaaaaaaaaaaaccaaaaaccaaacaacaaaaaacttcacacactatattacccaggttattacactgtgtgtggcctctctacttggagtctgaat

SEQ ID NO: 541432 - DNA, 201 bp, Homo sapiens
tatatcaaagcatcgtgttgtacacaaattttgtcaatcataactcaataatgctggaaaaataaaataaggccgggcgcagtggctcacgcctgtaatcycagcactttgggaggctgagacgggtggatcatctgaggtcaggagtttgaggccatcctggccaatacggtgagaccccctctctactaaaaatacaaa

SEQ ID NO: 541433 - DNA, 201 bp, Homo sapiens
tccttcctcacctagaatacattattcctcgatgtaggcatgcaaatatctgctgaatggattatttcagttatggacaccaatagtacctgtccagtaartatgacccagaaatcatctttgactccttcctctccattctccaaatccaacaattactaagttatattattttatcccttcaaatacctttgaatatgt

SEQ ID NO: 541434 - DNA, 201 bp, Homo sapiens
cagacagagcagtggcacggtctcactcactgcaacctctgactccgagttcaagcaatactcctgactcagcctcccgagtagctgggattataggcatrtgccaccacacctggctaattattattattattattattattattattattattattattattttttgatacaaggtttcgctcttgttgcccaggctgg

SEQ ID NO: 541435 - DNA, 201 bp, Homo sapiens
tcttgagtaataagtggaaattcgtgaaataagtgatgaaaacaagggtataaaggctacagaaaccctttcctacccaacacagagtgagacacaagccyaagagaaaacaaaaagaacacagcaaagccagccagagcatgacttcagggtgtgctcactaggtgatattatctacgttgaaaagacatggtacctgaa

SEQ ID NO: 541436 - DNA, 201 bp, Homo sapiens
gtctcactcactgcaacctctgactccgagttcaagcaatactcctgactcagcctcccgagtagctgggattataggcatgtgccaccacacctggctaattattattattattattattattattattattattattattattttttgatacaaggtttcgctcttgttgcccaggctggagtgcaatggcgcaatctc

SEQ ID NO: 541437 - DNA, 201 bp, Homo sapiens
tctcactcactgcaacctctgactccgagttcaagcaatactcctgactcagcctcccgagtagctgggattataggcatgtgccaccacacctggctaattattattattattattattattattattattattattattattttttgatacaaggtttcgctcttgttgcccaggctggagtgcaatggcgcaatctca

SEQ ID NO: 541438 - DNA, 201 bp, Homo sapiens
tccctctaatctttgtacatactcatgggttcaattaccaggcaggatgccctgaggcagccaggtgttagttggcaacagaacacacaaaggcctccccscctccattcagcgtcagggtgataaagatatcattaccctcaaagccagctcctcagaagttctgccaccacggcagatatgaaaggctttaccacatag

SEQ ID NO: 541439 - DNA, 201 bp, Homo sapiens
agtcccaacttacattttccacttccattgtcattcttattcctatatgggcttatttctcacatatccacctttgatttttcaagatcgaacctttgagmaggtgagggcctggctgcctaacatattacatcatcacgcatatgccggactcctgcctcactcagaagaccacgtgttgctcagaaaagaaaggtgggc

SEQ ID NO: 541440 - DNA, 201 bp, Homo sapiens
ctcatatatatacacatatatatacacatatatatatacacacatatatgtaagttcacaaaataaaaaaaaaaaaccatctatatctatatagatatagrttgtttgttttgcgacacgtcattctgttgcccaggctggaagtgcagtggcaccatcatgactcactgcaggcttgacccctcccaggctcaagtgatc

SEQ ID NO: 541441 - DNA, 201 bp, Homo sapiens
cagtcccaacttacattttccacttccattgtcattcttattcctatatgggcttatttctcacatatccacctttgatttttcaagatcgaacctttgarcaggtgagggcctggctgcctaacatattacatcatcacgcatatgccggactcctgcctcactcagaagaccacgtgttgctcagaaaagaaaggtggg

SEQ ID NO: 541442 - DNA, 201 bp, Homo sapiens
aactatgtgaggtgatgaaagtgttaactaacttgatgataataaacatttcacaatatatatgtatatcaaagcatcgtgttgtacacaaattttgtcartcataactcaataatgctggaaaaataaaataaggccgggcgcagtggctcacgcctgtaatcccagcactttgggaggctgagacgggtggatcatctg

SEQ ID NO: 541443 - DNA, 201 bp, Homo sapiens
attaaaaaggcagagaaagatataccgtgtttttgaattgaagtttcaatattgttaaggtgaattttccttaaatttctctcttatgattcagtgcaatmtgaactaacttctaacaggcttttttggggggtagggggatttatatggaactctgaaggagatagaacaccaccaaaataatcttgagggaaaaaacaa

SEQ ID NO: 541444 - DNA, 201 bp, Homo sapiens
tttactacctcatcaggaaaacctgtatcccacagtcatttatcaggcagcaatgtctagcttatggaaacccatctgcaggttcctaagcaagtagcccrgattaatatcatagtgcagctagtcggtggctataattaaatgcagaagtggtattgagaggtgaagccagctggacttcttgggtcgagtggggacttg

SEQ ID NO: 541445 - DNA, 201 bp, Homo sapiens
aaaagtcaaaccagaggaaatcttgtcatttttaacatccaccgccagcaaatgcctaccatgtggagtctcaccacaagacccaagctgtgcaccaggcrtcagagagaagcggtggtgtgtgtggatggtctacctgcctgtgttagtttcctggggttgcaataacacagtaccacagactggggggcttcaacaata

SEQ ID NO: 541446 - DNA, 201 bp, Homo sapiens
acactgaacgaactacattttttaatgtatgtctatgcaataacctgtatatgatttttccatcattaagaatcttcaacagtcccagatgcaaggaagamaggccatcctggagggggctagggatttagggatggcattcctattatttacaaggcgctgagttagacagaccatgtgtgaccatggtgttcctgctca

SEQ ID NO: 541447 - DNA, 201 bp, Homo sapiens
ttgtacacaaattttgtcaatcataactcaataatgctggaaaaataaaataaggccgggcgcagtggctcacgcctgtaatcccagcactttgggaggcygagacgggtggatcatctgaggtcaggagtttgaggccatcctggccaatacggtgagaccccctctctactaaaaatacaaaaattatctgggtgtagt

SEQ ID NO: 541448 - DNA, 201 bp, Homo sapiens
ctgggctcaagaaatcctcttccctcagcctctcaaaatgctgacattacagatgtgagacaccatgcttggccaggaatttcaattaggcctcaacgaaygagtgggagtttaccaggcagagaacaagagtctcatgcgagaagaaacaacagggacaggtgcatggttattatatacatagtatgtttaagaagaaaa

SEQ ID NO: 541449 - DNA, 201 bp, Homo sapiens
ggttttccctaaaaatctactatgcgtttagccctgtgctaagatttgtggaaaatatggaagaaatcattaccctgggccagagctcatttcctccccamtctctaaacccacccgagagacattactgtcacatttccaaaatgcaaatgaaatgctgtccctcatgtctacagcttttttattttttgagatggagtt

SEQ ID NO: 541450 - DNA, 201 bp, Homo sapiens
gaacaggccacagaggactaaaagtgctggccctatagcagcctcatgcaaaaacagatttgtgcactgagaagacttttgaaatttgaaaggccgctacyaagaagataaaccctccaaagatttccttctatcattgttattcattaaaaaaaaaacaagcttaggccgggcatggtggctcacacctgtaatcccagc

SEQ ID NO: 541451 - DNA, 201 bp, Homo sapiens
cctgggaggcgaaggttgcagtgagccaagattgccactgcactccagcctagcaacagacccaagactctgccttaaaaaaaaaaaaaaaaaaaaaaaargagagagagagagagaccagtcagtgaagtcctgaggattcagggaagactttgtaagtgacagccaggatttgtggtgaggcagaactttgatagagat

SEQ ID NO: 541452 - DNA, 201 bp, Homo sapiens
atatgtaaagatcccattaaaacacagccattctccacaactacaaaaatctttgatttaaaaatgactttggattcctatgtcacgttaaaagtgtgttrggcattttatccagtgacttagattatcctttcaggagaaatactgtacttcattgtaagtccttaatgagggaccaattagtccttcccctccacttca

SEQ ID NO: 541453 - DNA, 201 bp, Homo sapiens
cattacagatgtgagacaccatgcttggccaggaatttcaattaggcctcaacgaatgagtgggagtttaccaggcagagaacaagagtctcatgcgagargaaacaacagggacaggtgcatggttattatatacatagtatgtttaagaagaaaacaaatattatatggagagatggaagggatgggagtcacgggaga

SEQ ID NO: 541454 - DNA, 201 bp, Homo sapiens
ctgggaggcgaaggttgcagtgagccaagattgccactgcactccagcctagcaacagacccaagactctgccttaaaaaaaaaaaaaaaaaaaaaaaaagagagagagagagagaccagtcagtgaagtcctgaggattcagggaagactttgtaagtgacagccaggatttgtggtgaggcagaactttgatagagata

SEQ ID NO: 541455 - DNA, 201 bp, Homo sapiens
gggaggcgaaggttgcagtgagccaagattgccactgcactccagcctagcaacagacccaagactctgccttaaaaaaaaaaaaaaaaaaaaaaaaagagagagagagagagaccagtcagtgaagtcctgaggattcagggaagactttgtaagtgacagccaggatttgtggtgaggcagaactttgatagagatagt

SEQ ID NO: 541456 - DNA, 201 bp, Homo sapiens
cctgagtatggtggccacatcatacttgtaaccctaaactccataaatctccaaaggtcccacggtgatcatcaaagattggatcaagtgaccaagttgtwagaaagaggatatgctcgtatgcctcagaagcttactgtgtgaataactaattccttgaaagccttctgtaactattactttatggaatagtcaaccttt

SEQ ID NO: 541457 - DNA, 201 bp, Homo sapiens
aagagattgctatcttacaccatatggaaaataaattctagatatataactaaacatataaacatgtgtttatacaaatatacatatatagcatttattayacatatatattattttacaaaatatagaaaaataattttataagcatgaaaggccttgtaggccattgtaaagataccgacttttaagtaaaatgggaag

SEQ ID NO: 541458 - DNA, 201 bp, Homo sapiens
tcaccatgttggtcaggctggtctctaactcctgacctcaggtgatccacccacctcggcctcccgaagtgctaggattacaggcaggagccaccgtgccyggctggatttttttttaatataggaaaaaatcaattttcagttggcaatagaaagtcactaaggattcaaactgtacgaagtgtttcagtaggaaccggc

SEQ ID NO: 541459 - DNA, 201 bp, Homo sapiens
cagttttctgaatcactgctattaatcagtaaagaattgatgtccctatttggtgaatagcaaactgctcctattgctctctgaactgaactgaacaatcttttttttttttttttttttttactttaagttctgggacaaatgtgcagaacgtgcaggtttgttacataagtatacatgtatcacggtggtttgttgtac

SEQ ID NO: 541460 - DNA, 201 bp, Homo sapiens
agttttctgaatcactgctattaatcagtaaagaattgatgtccctatttggtgaatagcaaactgctcctattgctctctgaactgaactgaacaatcttttttttttttttttttttttactttaagttctgggacaaatgtgcagaacgtgcaggtttgttacataagtatacatgtatcacggtggtttgttgtacc

SEQ ID NO: 541461 - DNA, 201 bp, Homo sapiens
caggctataagaccccaccacttttccttatcaaaggcaatatctcttaaggcctgaagctcataaaggattacaggatattgttatacatttaaaagttygaggcttagtaagaaaatgcagtagcccctgcaacaccccaattctaggagtacaaaaactgaatcgtcagtggagactagtgcaagatcctagactcat

SEQ ID NO: 541462 - DNA, 201 bp, Homo sapiens
aatattcactgttaaacaatagtgccaaattgctttcccaaatgactatatcaacctacactcccaccagcagtgcaccccaccattttttaaaactgatraatcatttcagaatcaagaaagagatctatttgtgctgaagttggtgttacaggctcaaattcctttttttcctttttttttttttatttatttattttt

SEQ ID NO: 541463 - DNA, 201 bp, Homo sapiens
gcatattcatccacttctgttaattactggacagagtaatgtgacttcataaataaatactaaggatttgactaatgaatatgccataaaatgtctgaatwaatagcaagcacatttcatatgtggtctattagatgctattctaatttagaattgcagaaatttaatgaaatagactgcaaacaggaaaatacaggcaag

SEQ ID NO: 541464 - DNA, 201 bp, Homo sapiens
gctgcaatgcactatgatcacgccactgtaccccagcctgggcgaaagaacaagactccgactcaaaaaaaggaaagaaacgaatagaaatggctagaggktcttgttaaatcagagaatgctaagacccatctgtagaatttctgattcagtaggcttggggtggggtcagataatttgtatttctgacaagttcccagg

SEQ ID NO: 541465 - DNA, 201 bp, Homo sapiens
gtgaaaaactccctgacaccttctgggaagtgggggcccttttctctcatttttctacaacccctgtacctatccctattaaagcaattatcatattttcytgtacttgttccttaaccaagtccatctctcccaccacaacctaagtcccttaaaggcaagaaagaggtatcccctcatcatagtaccccagagtttcgt

SEQ ID NO: 541466 - DNA, 201 bp, Homo sapiens
ggaaggtcatcccttaatcatactgatttaattagtgttgattggattcatctgtaaatcgttttccagcacacagagtatgacatctacattcctttggrtaacatgcaaggctccttgagctctgaccccagccagccgggtctctcctcctgctgcacttgaccctcagcacctccaagtccctccctgtagctccct

SEQ ID NO: 541467 - DNA, 201 bp, Homo sapiens
gccgcagtgcaatgtgattctacacccggggtgaaacaattccttacggggagcctttggagagcaccccaaacaagggggctgctggaatgcaagtgtgmtgcccaaggagactgtctccctacctcagagctgaagtgatcaaatgcttcttgacaaccttcacgagaagtctcaaagttacacacacaggcttagtca

SEQ ID NO: 541468 - DNA, 201 bp, Homo sapiens
acatgtttcaaatagacttttgttcttgctaagaatgaattcaattgtttgaacaaaaaataacacaaatatatcactatccgattatcagtactcaaaartataaaaacagaggagtaagttagtattatgctcctgagaagaggaaattaacatttagtttactgggtaagttttgtcacttcttttttttttttcttt

SEQ ID NO: 541469 - DNA, 201 bp, Homo sapiens
atccagatgccaaaacactaagcagaaacctaaaatccacgtcctgcctaagcggctaaatttcattagaaacaagtcagatgataacatcaaaaggcatrtatgaattccaaagtaaagatatgaaaatgaagagaggaatttcgatatctaatacagccatgtcttaaaaaattcttaaacatgtttacctgttcacaa

SEQ ID NO: 541470 - DNA, 201 bp, Homo sapiens
tatgcaaattcagtgcatgtatttaccattccggcctcactttcacttttgaaactacacatgcctctttgttaataactcagttaagacatgatgtcagygatggccaaggtcatcacgaacattgattaaacatttactatgttctgggccatgtgctaagggctttacacacattgccccactccactgcagtctgtg

SEQ ID NO: 541471 - DNA, 201 bp, Homo sapiens
gtgctgatactacatgttccacagttacgttatcattatattttcggactaacttttggaaatgttgtcttgtcgttgtattgtatcatcctgagtaagtrttaaattccttaatatttgccacaaccatttgctgagtggctaatttgtatggacacatttttatctattatctttaatcctgacaaaatctctgtaaaa

SEQ ID NO: 541472 - DNA, 201 bp, Homo sapiens
aacttgtatagtagaattttttttccaagtcctatttatctcatctgttttgcctgtatcttgcttcattcacaccagaaaaagctgacacatttgtgcckttgtctgctgaaggttagtcttcatgaaatttaacatgaacatttgtcctttcaagcagctaattcctttttaagcagctaaatgttcacctatgtcttt

SEQ ID NO: 541473 - DNA, 201 bp, Homo sapiens
ccaaggacattggagtctggcaggatcccacaaaggagcgaggtgaggaacactggtggagttctcccaccagattcatacggatattgctgatgacctgmgcctctgtcttttctgctctaccttgaagggcctccaacctcttttctggtcacattgttctgaaagtacacgtcagctttgagccacctctcagtcaag

SEQ ID NO: 541474 - DNA, 201 bp, Homo sapiens
tactattattatccgaattttacatgcaaagtaacttgcccaatgtcacacttcaagaaaacagcagagctggaatttgagcccaggcagcctgaagcttkcaatcttatctacagcttttccatcatatggcactaacatagttatatttaatcatgttcccgatattggacatatatatatatatatatatacacacac

SEQ ID NO: 541475 - DNA, 201 bp, Homo sapiens
gcttccaaaggtagctccatatcctctgaaggtatacatgggagggcccataacatatcatgtattccagatctagccataaaaccatgcggtttagattytaacatccaaatccaattgtgtgtctctggtaaacatgacttgcccagtaaaaccgtgctgatactacatgttccacagttacgttatcattatattttc

SEQ ID NO: 541476 - DNA, 201 bp, Homo sapiens
aactgtattatatgcaggaatgggcttaacacttggaatacaaggtttaagataagtcaatttctgtcttcatgaatcatttaccaagatagctatatgarcagaaaattgcaatataatagcggtaacacagcaagaggataatttctgttttgtttttttttttccttgagacgagctctctatctgttgcccaggctg

SEQ ID NO: 541477 - DNA, 201 bp, Homo sapiens
ccacagtgccagcaaaatgtgcaacggagactatttatcagcaattataagaactgtgcatttaaatgccaaataaaatatacacgtggcagatacagaasttgagggggaaaagatgcatgattaaagtaccaatatctgctcttctgaatgtattagagcctgaaaatgaaagtccccctgaaccagaagcgaatcttg

SEQ ID NO: 541478 - DNA, 201 bp, Homo sapiens
cttcgcttcctgaattaagtccagagtttccatcccagactgtctgacagtctacaatatggcttccacttaccttcccaactgttatctcccacttttcyccatcacaggcatacgggtggccccttgttccagaacgtactcttcactttccagaatctgcgtctctggtctcaatggccctcgcacgcctccccgcaa

SEQ ID NO: 541479 - DNA, 201 bp, Homo sapiens
ctgagtctttattgattttgtagtttgggaggaagctaagtgctattcaaataccaaatgttccatatggtagtgttattaccattcccactaccgttacktgaggccttctacctacactcatgaggtgcctcatcagaatctggcagaacattatgaactcttttcctgacctatatttgctaacacatttgttgtcct

SEQ ID NO: 541480 - DNA, 201 bp, Homo sapiens
aataacaaatcttagatttggaattggtaacacactgacaagtatatctcaaaataaagaactaataaaaaatggagagacaaaattgggacagaagagasaaaggaggtgtctgctactcacataattaaccatcactttcataatgaatacagtttaccaagtgctttctcattaattaaatcattcgcttgatacaat

SEQ ID NO: 541481 - DNA, 201 bp, Homo sapiens
aatatcttacctgaaggattatttctgtatttctaaatgggctctttcctttcttcttacctttgtaaatatttattaaactgtattatatgcaggaatgrgcttaacacttggaatacaaggtttaagataagtcaatttctgtcttcatgaatcatttaccaagatagctatatgagcagaaaattgcaatataatagc

SEQ ID NO: 541482 - DNA, 201 bp, Homo sapiens
cagcaattataagaactgtgcatttaaatgccaaataaaatatacacgtggcagatacagaagttgagggggaaaagatgcatgattaaagtaccaatatytgctcttctgaatgtattagagcctgaaaatgaaagtccccctgaaccagaagcgaatcttgaactcagtctcagttagcttggttagccgctgttctcc

SEQ ID NO: 541483 - DNA, 201 bp, Homo sapiens
ttgatattgcgctgcatggtaattgagcttggaaagcatgtcccaatgtgtcagtgttatattcatgtgtaacttcaaaatggaatgtcagtgtctggggygggtgggaaatccaaagggaagttctaagagtgaagcctgtttccatctgataggtcaaaatacatgaatatgtacccatctctctaggcaaccatggtc

SEQ ID NO: 541484 - DNA, 201 bp, Homo sapiens
caaataaaatatacacgtggcagatacagaagttgagggggaaaagatgcatgattaaagtaccaatatctgctcttctgaatgtattagagcctgaaaaygaaagtccccctgaaccagaagcgaatcttgaactcagtctcagttagcttggttagccgctgttctccttccgaatgcccccatacctgccaacatctg

SEQ ID NO: 541485 - DNA, 201 bp, Homo sapiens
tcacgggaaacaaatcagaagcacaagtgagtgaaattttctttaggacaacgaaagaaatggtcaatgaactaacatatttgttaacttctacagacaamacacacacacacacatacgtacatgcacacacacatacacacacaccctcccacttctggctccagaaattacttgttacttactatgtgggaaggaatt

SEQ ID NO: 541486 - DNA, 201 bp, Homo sapiens
tcccactttgatcactaatgccatttgtatattagcttgtaatacacactgatcataaagcaataaaactgcattttgctaaactttaaaaatgaaggctkttgcccaatgacactgacatcctcacgccaccacctccccgcccccattattcagaataagtggagtgtggagcattgggttttccctttctggggagga

SEQ ID NO: 541487 - DNA, 201 bp, Homo sapiens
tccatacctgtcagaatctcttaacaggttctgacatatggtccaacatatggtcgctcacaccatcaaccacaaatgcactccctccacctggagaaggygtcctcacctaccaccaacagtgcaacttcgagatgaagtcatttacaacccagaggagatggatggtcacccggccggccaactcaaaagggcacagat

SEQ ID NO: 541488 - DNA, 201 bp, Homo sapiens
tacacacacacacacacacacacacacacacacggaggatacagcaccgtgaagaatgaagacacaaatgcatacaaatttagtctgtatatttatatttrgaatacaaatggcttctacggtctttttgtgcctttatcatacctaactttatctggtactcatagaggtcaccaaagctgtataaaatcatagcaacca

SEQ ID NO: 541489 - DNA, 201 bp, Homo sapiens
tattaataattgcaatgaatcaagaggcatctgtatgaactgcttatgaattaaccaaaaagacaaggcaatgctgcacacactaattgggaaagttgacrcagaagagaaaaggaattacctagagactaaaacctgcacctgcaggtaaaaccaaatgacatcaaaacgatttctacttgcaaattaaaagcagaatat

SEQ ID NO: 541490 - DNA, 201 bp, Homo sapiens
tacatgtgtattgcatgtgtatgtacatatatagtatgaatatgtgcgcatatgtgtacgtgtatatgcagatgtgtatatgtgtactctgtgtgtgtgtrtgtgtgtgtgtgtccatgtatttaaacacactgcttttcctatatgcagcaggaatttcctatctggcatatgaagacaatacatactcttttggatgga

SEQ ID NO: 541491 - DNA, 201 bp, Homo sapiens
aaagtatttgtgttgctgcactagttaggataatacagagagtttacataacttgtattccatcagagggaagaaggcaagaatacaagcaaggcagcacrtattcactgcaaaaacttacaaaataatataccagaaaataatttataggacattttatacaataatatacaccaaaaatggaatactcaatatttttaa

SEQ ID NO: 541492 - DNA, 201 bp, Homo sapiens
acatcctccaaatgttttctgtgtcatactgcattaaaagaaaaattacttctaaacactaaaattataccacaggaaaaaaaaaggcttttttaaaaacycatttttataacacttcttttgctacatctagctcaagtcagcaaaatgtggctctagtaaatgccttggagtctgtggtaggcacaacaagggaccttc

SEQ ID NO: 541493 - DNA, 201 bp, Homo sapiens
tgtggctttactacctcatcaggaaaacctgtatcccacagtcatttatcaggcagcaatgtctagcttatggaaacccatctgcaggttcctaagcaagyagcccagattaatatcatagtgcagctagtcggtggctataattaaatgcagaagtggtattgagaggtgaagccagctggacttcttgggtcgagtggg

SEQ ID NO: 541494 - DNA, 201 bp, Homo sapiens
cagatcaacaggtctgtctcccctggtttctccagtttccaatttcagatgcacctcttgcctccttttagaatggtccagttcatctcccctgttccccyaaaccagttatgatggtgttgactgtatctccctgagaactgtaaactccattagggccagtcttttgtcaatcttgttttcctccattatcttcaatgc

SEQ ID NO: 541495 - DNA, 201 bp, Homo sapiens
aaatggcctagagtttaggcaggttagaaagaaattttgctacatttatttatgctcgttcagtcccccaaacctttcccacaatgttattggataaaaaytgcaggaatatcacacaagttataaactcaatatgtgcaaatcgcaaggttctttaaaagttcatcttaaaaagaaaaacactggacaaaaatgagtatt

SEQ ID NO: 541496 - DNA, 201 bp, Homo sapiens
ggcataaagaaactatactttcattggccacttttaacatagccatgcttctacctgtgaaggtatgggacaattccatgaaaactgagttcacggagggycctcctgtgggttatgtatcctgggttccagcataacccctggttgagaacttactattaacattagctcttcaatttattttcatgatccagggacttg

SEQ ID NO: 541497 - DNA, 201 bp, Homo sapiens
gcccccccccccccgccgattcattcccaagtccaagggcgtttcacttgaattttgaatttggctttatctgcagacacactcagagtatcacatctccrtcagtcaagtcaagcacagacccagcttctaaagcacacggcatcagcactgaattcttgttttgtttggctatgtttatttgtttaggtactcaggaaa

SEQ ID NO: 541498 - DNA, 201 bp, Homo sapiens
gacacacacaggctgaatgggggaaaatgactcagtttgcaaacctccctctcccccagccacacactataaatgaggctcttctctttgggttgtacctstacttgccataggcagaagccagtgaaaaggtcatcaatattcaaaatattccatcaagtgttagctctatagctggtctctgttagaaccagtcaatcg

SEQ ID NO: 541499 - DNA, 201 bp, Homo sapiens
  misc_feature (1)...(201): n = A,T,C or G
tggagcatatttacaaaattatttaactttataaagtatttcaatgaataatgcagtcttccaaaatgtgcatggggctgtaattccatctagtgtttacnatgacactataagccttggatggaattacaatcttaatgggaacaatcagagtgcactactccatatgctcagagaattcaggatgaactcaacttctaa

SEQ ID NO: 541500 - DNA, 201 bp, Homo sapiens
attctaatccatctaatccacatctgcccatctaatgcatccatcggtgggactttctcgtggcaattcttactatgagttctaatgatgttttcatactscttccttcctcgtttgtttattaactgaaattctgctgcagggaagagtcattccttttcccttatttatttattcattggactcgttggatattttatt

SEQ ID NO: 541501 - DNA, 201 bp, Homo sapiens
tctctgttagaaccagtcaatcgaaccccagtaatgacagagcacccacttagctttcagcaccaagctaggctctgcaggtggctcacaagcccagcgcrgtcttagattttatgagctcaatggacaactgctattatcatacaggacaggactaaacatggatcagagtgagactgtgagttccaagaagcaggcaca

SEQ ID NO: 541502 - DNA, 201 bp, Homo sapiens
agtctggtctcgatctcctgacctcaagtgatctgcccacctcggcctacctaagtgtcaactaggtttttttgaagataattttagatttacagaaagcrgcaaaaatagtacagagctcccttgtaccttccacccagtttccccctatattaacagcttacaaagccatagaaccacgatcaaaactagaaagttaac

SEQ ID NO: 541503 - DNA, 201 bp, Homo sapiens
ctcactgcaatctccgcctcccgggttcaagcgagtctcctgcctcagactcccaagtagctgggactacaggtatgcaccaccaccaccacgcccagctrctttttgtatttttagtagagtgggggcttcaccatgttggccaggatggtctcgatatcctgacctcatgatccacccgcctcagtctcccaaagtgct

SEQ ID NO: 541504 - DNA, 201 bp, Homo sapiens
tgaacctgggaggcggaggttgcagtgagccgagatcatgccactgcactccagcctgggcgactgagcgagactctgcaaatatgtactttatatgattaatctatttgtaaccattgaagtaaacatttttctttgtgcttttaaattcaaacctctaccttagcagccatatcacagtcacaaattaactatatggca

SEQ ID NO: 541505 - DNA, 201 bp, Homo sapiens
aagtataaaaacagaggagtaagttagtattatgctcctgagaagaggaaattaacatttagtttactgggtaagttttgtcacttcttttttttttttcttttttttttttttttaagagacggagtctcgctctgtcgccaggctggagtgcagtggtgtgatcttggctcactgcaagctccgccgcctcctggttct

SEQ ID NO: 541506 - DNA, 201 bp, Homo sapiens
taaacaagaactgggaactctgtgtcacctcctgcattaacttcacattcctccgccaggtcttagtgatcctttagctctgttatccccacagctgtcawattctctttcataccaatctccagcaatgcacatataactccgctggcccctccaacatatcccatgcaggccatctgtgtcccttcctcatgcttttgt

SEQ ID NO: 541507 - DNA, 201 bp, Homo sapiens
ctctttacagaaatctcctacataattgagatgctgtcatcaatcagtcaaccaaccaagccccctgaactgggtccttgtgatgttccaggggtttaatyacaaggaatgctagctcctaacatctcagataccatgggctcgaagacttgtaacatgtgatattagggcagcaatggtttcctctactggtccgggatt

SEQ ID NO: 541508 - DNA, 201 bp, Homo sapiens
acagaaagttaacagagaaactgttcttgaagtatgagaatgattaagtggaaatgttaaattttcaaggcaaagtattttttaaataacctcaaaaattaaaaaaaaaaaaaaaaaaaagatcttcactgaagctaaaaagacatgaccaatgaaggaaaagcattaaattaggagtctggagtctggttttcagcctca

SEQ ID NO: 541509 - DNA, 201 bp, Homo sapiens
ccaccctacatacattgtcaccggtttcagatatatacacacaaactcactgagccccttccataaacaagaactgggaactctgtgtcacctcctgcatwaacttcacattcctccgccaggtcttagtgatcctttagctctgttatccccacagctgtcaaattctctttcataccaatctccagcaatgcacatata

SEQ ID NO: 541510 - DNA, 201 bp, Homo sapiens
gatcagattgtctggggccaagcagaagtcctgagatagctgctgaatcctggccatttacagagcagcacaaaactagtcctgttccttttcctgccgcrgttgccatggccgacccaaacaatataccccagcttcagcctcctttggcttcctaaccgccacccacagacctccaaacgtgggcaggaggaggtgaaa

SEQ ID NO: 541511 - DNA, 201 bp, Homo sapiens
  misc_feature (1)...(201): n = A,T,C or G
cctccccaagactgactctgtgagggctaacaggctataattgctgacagggaggttttcagcttgtcatagagataaaaaaatatggttattcttgagtnataagtggaaattcgtgaaataagtgatgaaaacaagggtataaaggctacagaaaccctttcctacccaacacagagtgagacacaagcccaagagaaa

SEQ ID NO: 541512 - DNA, 201 bp, Homo sapiens
gccagtcatgtttttcctttcaaatcatgagcatgcacagaaaaaacagagttgtagtattagcattgtgggtgtcattaatagcatttctgaggaaaaamaacaaaaaagagtggtcctttatctctaaaaaaaggcaagaatgaataataacaaatcttagatttggaattggtaacacactgacaagtatatctcaaa

SEQ ID NO: 541513 - DNA, 201 bp, Homo sapiens
cctagagcagagtagcctttcagaattgaaaatgttacatcaaccctttaatgttacccagtctttttaaattcccttaagaaaaaaataccagatattcmcaaaatgtggccagaactggatgtgtcatttatttggatttctgatttggccgacatggttatgcatgacataaaacagtttaaaaaaatggtttttagt

SEQ ID NO: 541514 - DNA, 201 bp, Homo sapiens
ttggtaataccttgttacacagattatttatagtcatcccaaaacatatataacacagagtcttaaattttaaaaccatatcagatactaaaatatacaayttatccttccaggtctttcctaaaaggtatacatacacttccgaagtagtataaaaaaaagaggtcatttcaaatctgataacgcactgtgaattagtga

SEQ ID NO: 541515 - DNA, 201 bp, Homo sapiens
cagaattggaaaaaactactttaaagttcatatggaaccaaaaaagagcccacattgccaagtcaatcctaagccaaaagaacaaagctggaggcatcacrctacctgacttcaaactatactacaaggctacagtaatcaaaacagcatggtactggtaccaaaacagagatatagaccaatggaacagaacagagccct

SEQ ID NO: 541516 - DNA, 201 bp, Homo sapiens
cagagatggccagctgccagcagcatcatttagaagaattctggtcctgaggacagattattgaaaataatctatttccatttaacctctgcaaagtagaytgggtccttgtggggctttcgtttccttaaaagcaactgtgtacttgcttagcaacgtggacttaaaccagtggaagaaatacttagtggagactggaaa

SEQ ID NO: 541517 - DNA, 201 bp, Homo sapiens
gagacataggaacatttttacactgtttgtgggactgtaaactagttcaaccattgtggaagtcagtgtggcgattcctcagggatctagaactagaaatwccatttgacccagccatcccattactgggtatataccaaaaggagtataaatcatgctgctataaagacacatgcacacgtatgtttattgcggcactat

SEQ ID NO: 541518 - DNA, 201 bp, Homo sapiens
gcccttactaatgctgggaggcatcattctttaggcatcccaagttcttgcttcaacttttacatataaagatccaaaatgtgccaggcgtagtggctgakgcctataatcccagcattttgggaagccgaggtgggcagatcacttgagctcaagagtttgagatcagcctggccaacatggtgaaaccttgtctctaca

SEQ ID NO: 541519 - DNA, 201 bp, Homo sapiens
tcacttgagcctgggaggttgaggctgcagtgagccaagatcacaacactgcaatccagcctggatgacagagctagacgctgcctcaaaaaaaaaaaaamaaaaaaaaactgcacaaaattatcaacataaaattaggtacagggtcttacaaagggcctgcaggagcgagacgccttgacgctgaagtgtcactagctt

SEQ ID NO: 541520 - DNA, 201 bp, Homo sapiens
aaactagttcaaccattgtggaagtcagtgtggcgattcctcagggatctagaactagaaataccatttgacccagccatcccattactgggtatataccmaaaggagtataaatcatgctgctataaagacacatgcacacgtatgtttattgcggcactattcacaatagcaaagacttggaaccaacccaaatgtcca

SEQ ID NO: 541521 - DNA, 201 bp, Homo sapiens
aggagtataaatcatgctgctataaagacacatgcacacgtatgtttattgcggcactattcacaatagcaaagacttggaaccaacccaaatgtccaacratgataaactgcattaagaaaatgtggcacatacacaccagggaatactatgcagccataaaaaatgatgagttcatgtcctttgtagggacatggatga

SEQ ID NO: 541522 - DNA, 201 bp, Homo sapiens
atgtttattgcggcactattcacaatagcaaagacttggaaccaacccaaatgtccaacaatgataaactgcattaagaaaatgtggcacatacacaccakggaatactatgcagccataaaaaatgatgagttcatgtcctttgtagggacatggatgaagctggaaaccatcattctcagcaaactatcgcaaggacaa

SEQ ID NO: 541523 - DNA, 201 bp, Homo sapiens
gaggcaagtggatcacgaggtcaggagttcaagaccatcctgaccaacaaggtgaaaccctgtctctactaaaaacacaaaaaaatggtccgtgcgtggtrgtgcacacttgtaatcctagctactcaggagactgaggcaggagaattgcttgaacccagaggcggaagttgcagggagccgagattgcaccattgcgct

SEQ ID NO: 541524 - DNA, 201 bp, Homo sapiens
ctgtggtaggcacaacaagggaccttcaaacatacccacgtcctaatccccagaatcagtctgtgaattcgtggtaaaagcgatttcacagatgtgatgayattaaggatctggagatggggagatgatacaggtgggtccaatgtaatcgcaaggaagtttaaaagtctgagaaggaggaagaagtgtcagaggaagatt

SEQ ID NO: 541525 - DNA, 201 bp, Homo sapiens
gtggccaagctacaagaccaaaaattgtgtgtggtcaacaggtgagaggaatgtggaatataggagctacctaatcaattccaaaggaagggagacatgaygatgatgattgttatttctccccaccaatgggacagtgctccagtagaccccaggatcttctatttaatggctgttgtaagactctatctctgttcctct

SEQ ID NO: 541526 - DNA, 201 bp, Homo sapiens
ctaatcaattccaaaggaagggagacatgatgatgatgattgttatttctccccaccaatgggacagtgctccagtagaccccaggatcttctatttaatsgctgttgtaagactctatctctgttcctcttggaagaaaaggtgccactgaggacaagggaacaagaatctgtgtcaatcaacaatgcccctgaagtaaa

SEQ ID NO: 541527 - DNA, 201 bp, Homo sapiens
cagcaggaatttcctatctggcatatgaagacaatacatactcttttggatggagctggtgagtcaggcagtgttttggaactgcaatacttgagtctgcrtgactcatgaggaaagcaagtctggggtctgggactgttgtatcaaaatgggaaggagtgggaaagaagatggctttttataatttaaatttttattttt

SEQ ID NO: 541528 - DNA, 201 bp, Homo sapiens
aagttcttagtctacatctaacaggcctgtctttcctccttgctgtggttaacactgaagttctagaaaatgtcctattagtaccttcatcttgagaggtsaatgatttaagaagagaagtgactgtatttatttttattttacccaatgtccatttgggcagttactaaacttaaaaatgcagcctgggcaatggaatga

SEQ ID NO: 541529 - DNA, 201 bp, Homo sapiens
agtcacagacccaaactgaatgatggagcagaataaaatcaagtaacgtaaacatccacatagtccaattctttccctgatccagtaagtcacggaggcckttcctgagatccagacctatttatacaagtgcaggctgggcacctttccctgaaggtcccactcagttattctcttggttccccaatcacagtgagtggt

SEQ ID NO: 541530 - DNA, 201 bp, Homo sapiens
aaacatgagtatatcccatcagcctggccccatgctacatgcgttcagacattatcatatctttataacaatcttaagagacagaggctattattttaacrttagagataaagactcttacagctgaggtatgttaaataacttgctcaaagtcacaaagctagtaaaatttagggcagctgactctggaacctataacat

SEQ ID NO: 541531 - DNA, 201 bp, Homo sapiens
cctgcagaagccgcagcacacagacctgtgattagcatgaagcaggtgctctgtggttctggaattttcaacattcctctgtcacctggatttctacaacygcttcctctctggtctccttgcccaccacctggtcccttatcatgccaaatgcatagcactaacagaatgaaatcactgaaacacacacctgacttttca

SEQ ID NO: 541532 - DNA, 201 bp, Homo sapiens
ttccagagagcagaaattcctaatctgccacacttcaaactgaaatagattcatcagcatttcgggtacatacgaacagctccccaaagccattagcaaargttatttgtaagtggaaaatcaagagacataaagatttcaaagtcaaaatgcaatgttatttagttttctgcagcacataacaaggcaaaaactttcagt

SEQ ID NO: 541533 - DNA, 201 bp, Homo sapiens
cagtccttgaatgggtctacactgcatccaagataaaatccaagatctctgcttggctcacaagggcccttcctgatcgagaccctgagcccctctagcgstgtcaggcctgcctcactatggacctaccaaactgcttattgctccttcagcccatccatataatactattttgcacttcttttgtctttctttgcccaa

SEQ ID NO: 541534 - DNA, 201 bp, Homo sapiens
ccgtttttacttggctcatctatattttgggtcagttttttagaactcaatttgacttttaatcattaaaaatgatcctagaagcatgtcctgtgaggcaytgccaagtcgcattgatgcatttcattactgcttgaaaggccacatattcaaaacactactagaagtcaggctaaagaaaataaaatgattttggatatt

SEQ ID NO: 541535 - DNA, 201 bp, Homo sapiens
cttctctttttctcaaactcctcaaatacaacaccaaatcctcccggttgttccaccagtcctcccactctactgccactactctaacctggaccctcctraagtctcctggacttcttcaagagtacctagatggtctctctgtctcaataacaccccaatgaattctatcttctactctgcccagagaatgaactttct

SEQ ID NO: 541536 - DNA, 201 bp, Homo sapiens
ccagttaagtcttaattatctagtggaagattatccaagattcttactgtttctcccttttcctgttgcccatttttagccttttttggcaattcctccaytattaaagaaaagagatggcatgcaaatcaatcaacccctttccttcttcactgtaatttcaattatctgtgctacctcagcctccgttggcatggatgg

SEQ ID NO: 541537 - DNA, 201 bp, Homo sapiens
tgcgttccaagcatatcagacttaagtcatttctgcctcatggttctagaagacaagaggtggaggtggcagcaagcggggagggaagacacataattctycttctaaccctctggctctcaaccggaagcaattttgctctgcaagggacacctggaagtgtctgaggacatttttgattgtcacaactgccgggtgcta

SEQ ID NO: 541538 - DNA, 201 bp, Homo sapiens
agacagagctcaaacatctccaaccctatggagccattcctgacaacacccccacccactcaaggctaaattaacgcatccttcgtccatatgatcacagycctatgatgataagtaacacactacagataaaatgacatgcatctctgtatctagctatctgaccactcttctcatccaaacttcccaagggcagggatt

SEQ ID NO: 541539 - DNA, 201 bp, Homo sapiens
gtatagaagctctttctttgactgaagtctccaaagccaaatttacaattattatgtatgcctgaataaaaggtaatataatataaggtaatttttctccraagaaagccctcagaaaagcctaagtacccttaatttttgagttcttacaaagtttattgtatctattggtctcttaaataaagtagtctttatggaaga

SEQ ID NO: 541540 - DNA, 201 bp, Homo sapiens
gtcactagtgaattactaacaccattaccctggcaagagatgatggagtttccattttatctcagaggtttggtgggtgtatggtgatgacttaaaatgaygttaggctacgtagccaacactttcttggaaaggactttccctgctgttctattaaaactgtcagcaaatagggccaaggcgctcactggtctatgccga

SEQ ID NO: 541541 - DNA, 201 bp, Homo sapiens
aaaattatttctttcaattccagtcccagatcttcactaccagcccttatttcagctatggtagaaggagtgaatataccttctgttgagtatacaaaacrtgctagaaatggtcagttacaccctaaatgtctttcccatcataagcacacagtttcatgcaattatctcgacttgagtgtggtcattcagtggaacaaa

SEQ ID NO: 541542 - DNA, 201 bp, Homo sapiens
aaaaagcaaccatcaaacccagagaagaatttgaagcttctaactttaatgccattcacattagttgtatttcttattcatatgagagaactatctttatkacctgtgcactataaagaatgatgagtatttaaacactaagtgttgaattaacagttatataataatccaaaaaaaaaaacaaaaaacaaaaactgtact

SEQ ID NO: 541543 - DNA, 201 bp, Homo sapiens
ttaaattcaagattatcactaaaaatccctttataggtagaagttagggaaaaagatgtgtgaacgcaaagctttctggagttaaagggtaaaacagtatrtatatatatatatatatataaatgtatttatacatatataatgtaatataaaatatttatgtacaataatatatttcttaattctacaaaatacagaaag

SEQ ID NO: 541544 - DNA, 201 bp, Homo sapiens
aagaagacatggaagaacctgaaatgcatatcgctaagtgagagacgccaatgtgaaaaggcgacataccggatgattccaactgcatggcattctggaamaggcaaaactatggagagagtaaaatgatcagtgggtgccaggagtttcaggtggggtgtgggggacaaatagttgatgcataagggatttttagggtgg

SEQ ID NO: 541545 - DNA, 201 bp, Homo sapiens
cctctcaccacagctaaagatcagagctacttcaccaaagtttagtacgaataggaaatatcacagaggaaaggcagaattcagattctgtgactttaaaragtgcaacccaggcaggacgcagtggctcacacctgtaatcctaacactttgggaggccgaggccagtggatcacctgaggtcagaagttcaagaccagc

SEQ ID NO: 541546 - DNA, 201 bp, Homo sapiens
  misc_feature (1)...(201): n = A,T,C or G
ccacccataatcaaatgtgtatgtctaagtcttccacaggtgaatacacctacggttctgcccctgaaccgcaaggccatacctccccaagactgactctntgagggctaacaggctataattgctgacagggaggttttcagcttgtcatagagataaaaaaatatggttattcttgagtaataagtggaaattcgtgaa

SEQ ID NO: 541547 - DNA, 201 bp, Homo sapiens
catcctgcttaaactctttcaatgaccactcccctgtcttcaagataaactctaaactcctcagcagaacttactgaaaagacactttatgatctggcttyttcttcatgagacttcacatatgcctgactccagccactccaaactacttgctgtcttccaacatgccatgttctctcttacctttgagctttgctcatg

SEQ ID NO: 541548 - DNA, 201 bp, Homo sapiens
cgcttcctgatactatattttgcagtgcatggtggcaaaggcaataaggtttttggtaataccttgttacacagattatttatagtcatcccaaaacatayataacacagagtcttaaattttaaaaccatatcagatactaaaatatacaatttatccttccaggtctttcctaaaaggtatacatacacttccgaagta

SEQ ID NO: 541549 - DNA, 201 bp, Homo sapiens
cagcaagcccataaagggaatctagaggctacttcatggagtattctgccatttccaatgtccgctctacaaaagatgtcattcttttatacattattttmttttattttatttttctagagacagggtctcactttgccacccagactggtgtgcagtggtgcaatcatagctcactgtaaccttgaactcctgggctca

SEQ ID NO: 541550 - DNA, 201 bp, Homo sapiens
tgatagatgaaggataagctaaatgtggtctacacatacaacagaatattattcagtctaaaaaggaaggaaattctgacatgctatagcacagacagacytgaaggacattatgctcagtgaaatgagccaggcacaaaaggacaaatactacatgattccacttatatgagccacttacagtagtcaaaataatagaca

SEQ ID NO: 541551 - DNA, 201 bp, Homo sapiens
gaactcccataacccaatcataccccaagcactgaagcagagaaaacactagccaacactttgggaggccgaggcaggcagatcacgaggtcaggagattragaccatcctggctaacatggtgaaaccccgtctctaccaaaaataaaaaataaaaaacaaatttagcctggtgtaacattagctggcacacggctgtag

SEQ ID NO: 541552 - DNA, 201 bp, Homo sapiens
agtgtttatgacagacagactcttggatttaggcttaggacaagcaaacctttcatatgagtccttaaaaacagacagtgctctgtttgtaactttgaacyccattctagtacaaacatgcttggcaactagtgccggagggttaaccagagagttttcttcctggcaaattgctctgccgccaccatgggtattaacact

SEQ ID NO: 541553 - DNA, 201 bp, Homo sapiens
tattcatttattcagtttacctttaatggaagaggggagaagagactgaagaaagacagatgaaagtgaagaagagaaataagttgtaaccattccccacrcctaactctctatatattccccttattttattcataagttgttagagggtacaataaaaactaagttaagatgtaatttgaaatggagtctgtctaatcc

SEQ ID NO: 541554 - DNA, 201 bp, Homo sapiens
tgcacaagggaaaacaaaggaatggaaatttcaaaaagctaaagtcacaaaaagtaatggaaggagtagtaacaacagcagcaaagggaaatgccctgggyggggagacagacccccacccacacatccccagcacttgttttcttgactctggaggcgctttcttgattagtctatttaaaaaaatgttattgttttaaa

SEQ ID NO: 541555 - DNA, 201 bp, Homo sapiens
tctccttcccaagaaggtttttcctatcatttccaggtttcaagtaggacccacgtagattagggtcacagaaatatgtattctgcctaagataactaggrtcatatcacttttataactaaatccatggaagtggcaccaagtgaactttgttgaaaacagcttgctcacttcattcattcactattcatttattcagtt

SEQ ID NO: 541556 - DNA, 201 bp, Homo sapiens
ggcttcatctataagtataattcagaatttttttattggtcatttttctccttcccaagaaggtttttcctatcatttccaggtttcaagtaggacccacrtagattagggtcacagaaatatgtattctgcctaagataactaggatcatatcacttttataactaaatccatggaagtggcaccaagtgaactttgttg

SEQ ID NO: 541557 - DNA, 201 bp, Homo sapiens
cccattgtaccatcatctctttgttgcatctcaggaaatgtcctttacattcacctgccctggacaatccactaggtttgtttgtcctcaaacgaaatggyctcacaccgctgagattttataatacttcaagtttttataggttttctccttccttcactgtggttagtaagtttaacccaagaaagccctcttattcct

SEQ ID NO: 541558 - DNA, 201 bp, Homo sapiens
acgaaagaagaaaaaagaaaaaaggagagtgggatttctgctcttagagtctctagttgcagacaactggcctctgtgtcctgaattgccctcccaggggmcccccgaggagtttatctctggaagcacctgccacaacaaaaagatttcttccaaacatggggccatgcacaattatatcaatgccaaattaccagagag

SEQ ID NO: 541559 - DNA, 201 bp, Homo sapiens
cagttccgattgactcagtggtctcctgctgttcctgagacagagatataatgccctgcaaattacagggtactcatggccaaatctcgggtggggctggratgggagtaaagatgacgtcaggaaggtatccagttgtggcagaaactggttagttgttgaaaaaacagtttccctgtactccttgacatacaggctgac

SEQ ID NO: 541560 - DNA, 201 bp, Homo sapiens
ccagaactctatttttagttctgttctattcaatactaatacagtgttttggttatcatatttcgaagtaacagaaggctagaagggatatatgttgcgawtaagattcaaatatatcttaagaagccggaagtgatggtaccaaaccaggaaaattaagatcaatgagaataaatgtaaatgcctgcccttggtttcaac

SEQ ID NO: 541561 - DNA, 201 bp, Homo sapiens
gggactgaaggccctgtctagagacatccaggccagaaaccaccagagaggcgagctgggacctggcacaactttgtagaagatgctgtctgagagcctckccccaacgcgctcgggtttcccttctcggctctgcacccctgggacatgggatcttgctcttcacggaagtgtagtgagtgagaagagaaaaagcaagaa

SEQ ID NO: 541562 - DNA, 201 bp, Homo sapiens
taatcacacacctctctctgaatacatttcacttgttagccatcaggtctgaaaactgtagtgctggctctgttcagttattgttcaagtgtgatctcaaygaccctgaaattcttctttgtcattttgcatcaggctgtttttcatgatttcactttgttcccatcctcacggccttctactacgcaaggtctcatgata

SEQ ID NO: 541563 - DNA, 201 bp, Homo sapiens
gctgaagacctgagtcctttgtcttcccctattctggagatcacattgaagggatttttgggctacctgaaagtgtttatgacagacagactcttggattyaggcttaggacaagcaaacctttcatatgagtccttaaaaacagacagtgctctgtttgtaactttgaaccccattctagtacaaacatgcttggcaact

SEQ ID NO: 541564 - DNA, 201 bp, Homo sapiens
atctaatcttgagagagaggaatggggacatgaccaagctctgggtatacacacaaagaatgaaccatctgggaggactggctaatttcaggaatttcccygtaatttagtaatggtaaacaagaacaggacccagctcctaagaagtgcagatgaatgaagtaaagtagaagcaggttcctgaccaacaggtatagatca

SEQ ID NO: 541565 - DNA, 201 bp, Homo sapiens
cctgtattgatcaccccagcaccagcagccagacaactaaggacagcccctacaccccagagcacactggaattatccactctaaccaatcctaaacccgyttaccctgcctcccatgaaaccacaataaaggctgttgtttgccacatttcccctcactccctccacctcctgacccacctggggcttccccaggtgccc

SEQ ID NO: 541566 - DNA, 201 bp, Homo sapiens
caccagatatctgtaaaagcaaatataaaatccatgaattatgtctctgtattgaaaaaccataaaatgctcaggacctttatgttaactaaagtattttscttccatgtgttagattttccccttatatgtgtagaacacacacacaaaagagaattataaacgtcagagctcttttaacctttaaaaaccaacacagta

SEQ ID NO: 541567 - DNA, 201 bp, Homo sapiens
ctttcttcttgattttataagtcagcattacacgctgaaatctaacatacattatgctaacaaaattttcctttattcgtttcatatgttgaggtttcaasattgtgtttgaaaaagaagtagagactaaaaatatttgtaaacctccaagtaaaggcaatgaatgatacagaatttgtacctgtgggtgatcactgccat

SEQ ID NO: 541568 - DNA, 201 bp, Homo sapiens
aacaagtcacccattgacaagcctagaaaaaaatgccacccaatgtttgttttatcagttttcttttccagttttggaagggaaagcccttgaaacaaacwtgaccacacgacccatatgagtcctcattgtaatgtttttccccaagcacccacaattccaggtcctcccaatttgcttccagttcttgcccaagtttaa

SEQ ID NO: 541569 - DNA, 201 bp, Homo sapiens
gatctgtcgttgactgaaacttcattatgtggcacatgactgtatttgatcacaagacgcaaaaaacttgccattaaattgaatctacttcctctcgtgcrattaatcccttatgttttcagctaaaatggagtatctggtagatgtagtttatttgctgtttgtgtgtttagttgtttgggtttgctttgtttttgcttt

SEQ ID NO: 541570 - DNA, 201 bp, Homo sapiens
actgataagactccctggatacttttgttgtattattttctaacagaaaacatagataatccaagctccttgtgtctcttcctgctttaattataatttgrttaacttacaaattattggtattcccttttgttccagcccatttgaggatataatttctcttcatctcttcctaaatgcataagttggctcagcataaag

SEQ ID NO: 541571 - DNA, 201 bp, Homo sapiens
ctactgtagtgaatactgtaggcaactgtaacacaatggtaggcatttgtgcctctaaacacatctaaacatagaaaaggtacaaccaaaatacagtattrtaatcttttttttttttttttttttgagatggagtctcgctctgtcgcccaggctggagtgcagtggtgcaatctcggctcactgcaagctctgcctccc

SEQ ID NO: 541572 - DNA, 201 bp, Homo sapiens
tgcgtatcagcaccacccccgtggaaggctacttgatgcggataagttccatccactggcaaacccaaaagctacacatgtctacatgggaagggctgtgyggcacaggtgcacagcagatctcagcgctcttcccctgatgtttctgctcttcccatgcactaaggagctgagcaaacagcaagtcagaaggcagggcca

SEQ ID NO: 541573 - DNA, 201 bp, Homo sapiens
actttacgtatttggaagaaagtgggtttctaaaggttcagagaatatgctgacctcacatcctgaaaaagcttggcaactgaagagggaatgcaaccctyatggcttgatgttgcttaggtcaacaagcaaatatttcctggacacctaccataggctcagacctggaccctttgctgtgggagaggaggcaaagaggag

SEQ ID NO: 541574 - DNA, 201 bp, Homo sapiens
gatgttacaataagcagcacgtgtcccatttcctcccataaggaataatcctctttttgtgattctccttttcacttcatctggagggcagtgtcttcccwcctagaagagaggcccaggctgagagcatcatggttttggcagggaactcagaaaatcttggcatcagggcttactataagctgagttaaacaggaatgg

SEQ ID NO: 541575 - DNA, 201 bp, Homo sapiens
agccagaaaaatattttgaaaatctgtaataattcagatggaaagacattcacaacttttgcaatgtgagagaagaaatttcggaaaagtagatcaagcaygattctatttctgtaaagctacatgtatttatttgtatatatatatatatccatagaaaatcttctggaagaaaacacactcaaatgctaacggtggtga

SEQ ID NO: 541576 - DNA, 201 bp, Homo sapiens
acagagaatccatgtaaaagactaatgttttcaatgaaaggattaatgttctttccatctcataactcaagtttccaataacgtcttcctcgctgagggtrgaatagtcagtgccttacacaaaagccagtgtttgcattaaatgactgtggtgcagcctcgcataacataaatgacttcaacagccacatcctgatgcac

SEQ ID NO: 541577 - DNA, 201 bp, Homo sapiens
acacagtaagaactggggtcaggaggatgagaacctgtcactttgactctcacttgaatgtttcttaccaccactgtgatagatctcactacccgatgcaygaagcattcacatccactgtcctatttagaatatcaagataaatattaatattattattactaacaatgatgataatagatcaataatattccactgcta

SEQ ID NO: 541578 - DNA, 201 bp, Homo sapiens
aggactatttagtggtacctgattattctgatcacaaacaatggtgtttttatgcatcatttatcttcagagagtgtctatctgagctgcttgaagcaaaygaaacttatggattggactagccttacgagaatgctagtttcagagctatggctgtgcctatagcagtttgtaggaatttattatataaagtccttttaa

SEQ ID NO: 541579 - DNA, 201 bp, Homo sapiens
aaagttgtaatctctgcctttaaaatggggaagaattaacatgcacagtgcctagtataacacacactcagtacatggtcgccatcgtagttataattcartaaacatttcctcatgaattctcagtgatcacccacacttatctgttgctcatctctcctggccatgatgtaatcaatacaacaccttcaaactatcaat

SEQ ID NO: 541580 - DNA, 201 bp, Homo sapiens
aaacacacacacacacgccaactcagcagaggccgccagaaataatcctgttctctgcaagtttcaaaagaattcccagtacagccactcatatgatgacrgagtgagactgttaaaaaccgaatttgattatggttaaaaaacccaaataccatacaaaaatagggctagtgcactgaatgttttctcagtgggttacat

SEQ ID NO: 541581 - DNA, 201 bp, Homo sapiens
tgagtgcaagtcagaataacttgcgcttattctgaaataaatgtttctttccactgcaagggtgcatgtgtgaggggggaacaaagtattctttttaatayggaagcacatcaccctgacaatctaactctgacaagcttgcatagtcctaggcattctatttctacctcctaacagaacagcatcagcaacatttgtgat

SEQ ID NO: 541582 - DNA, 201 bp, Homo sapiens
tccttagcaccctgctccaacattctcatccacacaccgttcaggaaccgtttcctcgactatcctccaaggctccaattagtctaacaccagccaccccygcatgccttcaccatggtgggcatgatggttaatactgagtgtcaacttgattggattgaaggatgcaaagtattattcttggttgtgtctgtgagggtg

SEQ ID NO: 541583 - DNA, 201 bp, Homo sapiens
ctgacactttcatttcaaacttactgtctctagaatcataagaaaataagtttgtgctgtttaagccactcagtctgggttactttgttatggtagacctmgcaaactgacagatactaagcccttgtttgagatggagctgtggccctataaatggctattttagaaagacaatgtgaactggcagcaacggtactggaa

SEQ ID NO: 541584 - DNA, 201 bp, Homo sapiens
tgaaaaccaatagctgaaaaattgtaagatgatgccataattgtccaaatgttgctcagttcaccaacaggcttactgagtaggttctttagaaagaaatwctgccaggtagtttgtaataagaagtatctgctatggatcatgcctttacaaagtttacattccagcagggaggaaagcatgtacacaattggcactttt

SEQ ID NO: 541585 - DNA, 201 bp, Homo sapiens
tcatcctacaatcccatcctgcagatgggaagataggggacctgcccaagatcccagagtgagcccaggagaagacttgggcccagtctcatcggttccckccactctccccctcacccggcccacctgtgtcagatgctgttcagaggcaaagcccaggccgtagactgtgttggcgcgactgtcggcccactgcccgaa

SEQ ID NO: 541586 - DNA, 201 bp, Homo sapiens
agctactagggaggctgaggcagaagaatcagaagaatggtgtgaacctgggaggcagagcttgcagtgagccaagatcgcgccactgcactccagcctgkgcgacagagcgagactccgtctcaaaaaaaaaaaaaaaagtaaattgtctgggtgcagtggctcaagcctgtaatcccagcactttaggaggccaaagtg

SEQ ID NO: 541587 - DNA, 201 bp, Homo sapiens
agataactcagagcaagcagaccccatctttctttgtctaggggaagcccccacaacaccctgtacaggagatggccctctgagaggagcctggtggccgytgacatccagatgtaaatttctcattgtcctggttattgcacccccgtgaagtcccctccatcccaggctgagctgtggaggccaaatctctgctgagtt

SEQ ID NO: 541588 - DNA, 201 bp, Homo sapiens
gggaagacaggtgggggaggggaggccctggcccagcggcctctgtggtcaaaggggggatgccccccctatcctgtcctgggcagctgctgtcctggtcrcagggtctgaaaccggagcccctgagtgggggtggggcggcagctctggcctggactgggggcgggtcctgcgccgggtgggagttggggaacacagggg

SEQ ID NO: 541589 - DNA, 201 bp, Homo sapiens
gcccaggagaagacttgggcccagtctcatcggttccctccactctccccctcacccggcccacctgtgtcagatgctgttcagaggcaaagcccaggccrtagactgtgttggcgcgactgtcggcccactgcccgaacttctgggaagttttggtgaaggtcatgttgggagtgacagtgctgttgatgatggcctagg

SEQ ID NO: 541590 - DNA, 201 bp, Homo sapiens
tcctctgtggtccctgctgtgggtctaaccttaggtcatctggaagcattgggtcttgacgaccagcagagtgccccggtctcccaatatcaaggtccccyaatatcagttgagcgcctggctgactcacaggtgcccaggcaggcataggggagtagggagtgctgacctggtgggaggcgagccccagggctggactgg

SEQ ID NO: 541591 - DNA, 201 bp, Homo sapiens; identical to SEQ ID NO: 378091

SEQ ID NO: 541592 - DNA, 201 bp, Homo sapiens
aatgctcggttagggggcggggccagggtgggtggcgctgggctgaggcggagtcacgggcgatgctgggctagggggcggggccagaggaggggtggctytgggctagggcacggagtcagggccacgcagggctggggatgtggcgacactgattgctgagcttggggatggggcagtcccgcagaagcggggtcttgt

SEQ ID NO: 541593 - DNA, 201 bp, Homo sapiens
tgaggcaggagaatcgcttgagctcagaaggcggagcttgcagtgagccgagatcgcgccactgcactccagcctgggtgacagagtgagactccatctcaaaaaaaaaaaaaaaaggctgggcgcagtggtttacgcctataatcccagcactttgggaggccgaggcgagtggatcataaggtcaagagatcgagacta

SEQ ID NO: 541594 - DNA, 201 bp, Homo sapiens
cccttgggcacacagcaagccagccaccagacccaaggttgtcaccaggactcctggtgcctctgccccacccagaccccaccctgaccttggcgcctccratgctgatgatgcggtacacattgcgggtggcatcgtagaaataggagacagtgagtgcgtgcttgcccgctgggatccagtttcgcttggtggctgggt

SEQ ID NO: 541595 - DNA, 201 bp, Homo sapiens
tcctggctaacatggtgaaaccccgtctctaccaaaaaatacaaaaaattagccgggcatggtggcgagcacctgtagttccagctactcgggaggctgargcaggagaatggagtgaacctgggaggcggagcttgcgccactgcactccagcctgggcaacagagtgagactccgtctcaaaaaaaaaaaaaagtaccc

SEQ ID NO: 541596 - DNA, 201 bp, Homo sapiens
tgagggcagattgctcacggtcaggagttcgagaccagtctggccaacatgaggaaaccccatctctactaaaaacacaaaaaatgcccgggcacggtggygcatgtctgtaatcccagcactttgggaggccgaggcgggcaaatcatgagatcaggagttgagaccagcctggccaacatggtgaaaccctgtctctac

SEQ ID NO: 541597 - DNA, 201 bp, Homo sapiens
ggtgggcaaggcagttggctggctaggcttggctgatccaaggctgacttgctcatgtttcagcagtttgccgggtctagtttgggatgattttaatcagwgggatgagtggactttatgtcggttatcatttagcaggttaccctgggctgttcacttggttcagagacagcagaaaagatgtaggataggtctttggag

SEQ ID NO: 541598 - DNA, 201 bp, Homo sapiens
ctcaagggatcctcctgcctcagcttcccaagtaactaggactacaggtgtatgctgtcatgcctagatactttttaaagaacattttcatagagacagtrtcttgccattttgcccaggctggtcttgaagtcttggcctcaagcaattggtccccctgcctcagcctcccaaagtgctaggattacgggtgtgagtcac

SEQ ID NO: 541599 - DNA, 201 bp, Homo sapiens
ctattgctaataacataccatttcaaaatgtagtggtttaaaacaataaccatttattattgttcacaagtctgtaggtgggcaaggcagttggctggctrggcttggctgatccaaggctgacttgctcatgtttcagcagtttgccgggtctagtttgggatgattttaatcagtgggatgagtggactttatgtcggt

SEQ ID NO: 541600 - DNA, 201 bp, Homo sapiens
ttctacgtctggcttatttcacttaccataatgtcctccagattcatccatgttgttgcaaatggcactatatcctttttcaaggctgactcatactcctdgtgtgtgtgtgtgtgtgtgtgtgtatgtgtctgtctgtatatatgtctatgcgtatatatatgtacacatatggacacatacacataccacaatttatcc

SEQ ID NO: 541601 - DNA, 201 bp, Homo sapiens; identical to SEQ ID NO: 263154

SEQ ID NO: 541602 - DNA, 201 bp, Homo sapiens
taaacagatgagtacaataatttataggtagctttgtgagtgggtattttgtttccagctatacagaagttgcataatagctacccactcaggtattttasattggcatggtagtaactgtttaataataagactgctactacataatagcatatttgtgcatcttttcgacactacacatgaatgacctttatgaataaa

SEQ ID NO: 541603 - DNA, 201 bp, Homo sapiens; identical to SEQ ID NO: 263155

SEQ ID NO: 541604 - DNA, 201 bp, Homo sapiens; identical to SEQ ID NO: 263156

SEQ ID NO: 541605 - DNA, 201 bp, Homo sapiens; identical to SEQ ID NO: 263157

SEQ ID NO: 541606 - DNA, 201 bp, Homo sapiens
ttcgtgttcttttacatttgctgaggagagctttacttaaatgaatatagaagaagaataccacttccttaattactaatattctattgtaggctacttgmactccctccctgtgggattttttttcacagtgacctttcagagagtatgagctgtgaaagaagaaatccacagggatagtatggcagtgtgccaactgta

SEQ ID NO: 541607 - DNA, 201 bp, Homo sapiens; identical to SEQ ID NO: 263158

SEQ ID NO: 541608 - DNA, 201 bp, Homo sapiens; identical to SEQ ID NO: 263159

SEQ ID NO: 541609 - DNA, 201 bp, Homo sapiens; identical to SEQ ID NO: 263160

SEQ ID NO: 541610 - DNA, 201 bp, Homo sapiens
ctatgggtagtatggacattttaacaatgttaattcttccaattcatgaacgtgggatatcttgctatttaattatgtcatcttcaatttctttaatcagygtgttatagttttcagagctttcacttctttagctatatttatttataggcattttattctttttgctctcctagcaatggtatagtagcggggggctgg

SEQ ID NO: 541611 - DNA, 201 bp, Homo sapiens
tatttgttcatttaacttttttgtggcgttttaagggttctttttctttaaatgtaggataatgtcatctgcaaacaggaataattttattgtcctctctmaagtgaaatgattttttaatattgcctgcctttttttaaaaatcatgattcatttttctgttaccaaagctgtatgtgcttactgtagaaaacttagaaa

SEQ ID NO: 541612 - DNA, 201 bp, Homo sapiens
ttctttttctttaaatgtaggataatgtcatctgcaaacaggaataattttattgtcctctctaaagtgaaatgattttttaatattgcctgccttttttwaaaaatcatgattcatttttctgttaccaaagctgtatgtgcttactgtagaaaacttagaaattatagaaacgtgaaaggaaaaactgttaaacttacc

SEQ ID NO: 541613 - DNA, 201 bp, Homo sapiens
gaaggagcttatgacagtgattgggaaggaacagccaaataccaaaggaagagagcatttcttaggggtgaatcatgtcacatgttgctactaagtaaagwtagagggaagcagggtcagagagagaagataataattctcacagccatgaagtaggtgctagtattttcctattaactagatgaagaaacccagactcag

SEQ ID NO: 541614 - DNA, 201 bp, Homo sapiens
ttctctaaattggatactagaaagtgatggtgctataatttgaacccaggtctgtctgactccatagtctgagcttataatcactacatagtgttaaaaartgaatttagtgacatggagatcattggtgatcagtttgtgggacaggagaaggaaatatttcaagatggagggcagtattggatgctatttgagaggtca

SEQ ID NO: 541615 - DNA, 201 bp, Homo sapiens
tcatttgccttgcaaacagttgtttttttttttccccccctgaggtcagactaatttattgacagttttgttgtgcttgacaagtaacaggtgctaacatytttttcagtcttgtcacagggactagagggtctaggtcaccatgttcattaatgtagtccaggaaattttatttctcctgtggctaatcatttacatttg

SEQ ID NO: 541616 - DNA, 201 bp, Homo sapiens
ttcaagaaatgactgctgatcatgaaatgaaatgggagaattatgaaaatcagacccaagaaacataaaaggacagaagtctgagatttctgtttgctctrgttaaaaattatccatgtatctcagcagttctttaggatagatgagccccttagcacagggctctgatgcttgtaattatgacctgcgtcaccacaagat

SEQ ID NO: 541617 - DNA, 201 bp, Homo sapiens; identical to SEQ ID NO: 263162

SEQ ID NO: 541618 - DNA, 201 bp, Homo sapiens
gttgttcagtttccatgtagttgagtggttttgagtgagtttcttaatcctgagttctagtttgattgcactgtggtctgagagacagtttgttataattygtgttcttttacatttgctgaggagagctttacttaaatgaatatagaagaagaataccacttccttaattactaatattctattgtaggctacttgaac

SEQ ID NO: 541619 - DNA, 201 bp, Homo sapiens
ctttttttttttttttagtcaaccatttgaatatctacttttgtgaaagggaaggggaggtgtgcctccaaagtctgtgttaccttttgggctgccatttyttctagatcctggcctgtaaatcatgacttgttaactctccaaggccttcaagcagatgcctgcctgcctgcagattccttcctccctccctcccttgcc

SEQ ID NO: 541620 - DNA, 201 bp, Homo sapiens
atatataaatataaagacatatatatgcacagacttaactccaacacgactggagtgtcgggagggcaactgggctgccctctccgccctccaggactgcrggacaagtctcccggcgcccgggtcgcaggagacccggagccctaaaacggcccctgcgcggcttgggccttccggctttccgtccgccgcggccgccat

SEQ ID NO: 541621 - DNA, 201 bp, Homo sapiens
ttgtataaggtgtaaggaagggatccattttcagctttctacatatggctagccagtttccccagcaccatttattaaatagggaatcctttccccatttcttgtttttgtcaggtttgtcaaagatcagatagttgtagctatgcagtgttacttctgagggctctgttctgttccattgatctatatctctgttttggt

SEQ ID NO: 541622 - DNA, 201 bp, Homo sapiens; identical to SEQ ID NO: 263163

SEQ ID NO: 541623 - DNA, 201 bp, Homo sapiens; identical to SEQ ID NO: 263166

SEQ ID NO: 541624 - DNA, 201 bp, Homo sapiens
aactattttccttagtcaatataacactctgaggccaggcctggtggctcacgtctgtaatcccagcattttgggaagctaaggagggcggatcacctgaygtcaggagttctggactagctctgcaaacatggtaaaaccctgcctctactaagaatacaaaagaaaattagctgggtatggtggcgcacgcctataatc

SEQ ID NO: 541625 - DNA, 201 bp, Homo sapiens; identical to SEQ ID NO: 263169

SEQ ID NO: 541626 - DNA, 201 bp, Homo sapiens
ggggtaattgacagttgttcacacaaaggttaggtaattctataattaatttttcattggtttagagaagtcttctcagtgagcatgcctttgttgtcaamtgttcatgccattactgctaatgaaataaaaatgttaagcaagaacagtaactgtctattttagtaactgtctattttcagttactttttaaaaccctaa

SEQ ID NO: 541627 - DNA, 201 bp, Homo sapiens
tgtctcttattgtttctttttcttttttcttaccttgttattttctaatctagtcttcagagagatggtgtctcttcttataaaggcactcatcctaacasatcagtgctgtacccttgtgacctaatttaaccttaaatacttccttagaggccccatctccaaatgcaactacactgctgtttagggctataacatgaa

SEQ ID NO: 541628 - DNA, 201 bp, Homo sapiens; identical to SEQ ID NO: 263170

SEQ ID NO: 541629 - DNA, 201 bp, Homo sapiens
tttttcttaccttgttattttctaatctagtcttcagagagatggtgtctcttcttataaaggcactcatcctaacagatcagtgctgtacccttgtgacmtaatttaaccttaaatacttccttagaggccccatctccaaatgcaactacactgctgtttagggctataacatgaattttggggtatacaagaattcag

SEQ ID NO: 541630 - DNA, 201 bp, Homo sapiens
tcttcttataaaggcactcatcctaacagatcagtgctgtacccttgtgacctaatttaaccttaaatacttccttagaggccccatctccaaatgcaacyacactgctgtttagggctataacatgaattttggggtatacaagaattcagttaataatacttgattaccctttatctgcccctgagagggtggttcatc

SEQ ID NO: 541631 - DNA, 201 bp, Homo sapiens
acaggcgtggcaggaggccaatctaataagcccaaagggagaattcgcagagtatgcaggttaaaagagccctggaactgactttctgtgaagcctaggcyatccatatacattcctgctgagtggagatttgcttaaagttgactgttttcttccttctgtaccatctgattccaatctgcacctgtcttttatagctag

SEQ ID NO: 541632 - DNA, 201 bp, Homo sapiens
ctgtacccttgtgacctaatttaaccttaaatacttccttagaggccccatctccaaatgcaactacactgctgtttagggctataacatgaattttgggrtatacaagaattcagttaataatacttgattaccctttatctgcccctgagagggtggttcatcttacccttttttagtcaaatcacatttggtaacatg

SEQ ID NO: 541633 - DNA, 201 bp, Homo sapiens
cctgccttttttgctggctgtcatctgtttttatttcactcagatttaccatatagcattcagagttgttggaatgaaaacttatagacaactatagaaastgcagttcaacttggaaaactcatttcaaaactctgttttataattttgtttagcatgaagaaagcagtgtcactgataaatgcaatagatacaggaaga

SEQ ID NO: 541634 - DNA, 201 bp, Homo sapiens
gtgggtcaactatggtggcagactcactaagagtgtcatcctcaactatcctgtattgcttgtggcatacctagacattctatggccgaaagagcttgcaygtttaaatatttctatagttttagtccttggcacatggacttgagtccatttctctgtcaaatggcgatagtaatagttgttcctcagagttgttactgg

SEQ ID NO: 541635 - DNA, 201 bp, Homo sapiens
ggctgtcatctgtttttatttcactcagatttaccatatagcattcagagttgttggaatgaaaacttatagacaactatagaaagtgcagttcaacttgsaaaactcatttcaaaactctgttttataattttgtttagcatgaagaaagcagtgtcactgataaatgcaatagatacaggaagatttccacggttgctc

SEQ ID NO: 541636 - DNA, 201 bp, Homo sapiens
gcctgaatatgtgctaatataatagattgctatttgtattataggctgagagcagtttcagtgaagaagaggaagaaaaacttcaagcggcattttctctrgagaaacaagatcttcacctagttcttgaaacaatatcatttattttagaacaggtatttttattgcatcaaattttctagccatgatttgtttactaca

SEQ ID NO: 541637 - DNA, 201 bp, Homo sapiens
gtgggtaacccgacctttgtctctggctgcccttaacattttttcctttgtttcaactctggtgaatctgacaattatgtgacttggagttgctcttctcyaggagtatctttgtggcgttctctgtattacctgaatttgaatgttggtctgccttgctagctttgggaagttctcctggataatatcctacagagtgtt

SEQ ID NO: 541638 - DNA, 201 bp, Homo sapiens
cctcagcctcccaaagtgtgggcttacaggcgtgagccactgcgcccggacttttttcactttttaatagccattctgactagggtaagatgatagctcaytgtggctttgatttgcatttctctgatcagtgatgttgagcatttttaaatgtatctgttggccatttttatgtcttcttttgaaaaatgtctattcatg

SEQ ID NO: 541639 - DNA, 201 bp, Homo sapiens
gctagtaacagtctttttagttttagctattttggtgggtgtctagtggtattttattgtggttttaatagtctcaattgctaagatggctttcctttacyttttttttttttttagtcaaccatttgaatatctacttttgtgaaagggaaggggaggtgtgcctccaaagtctgtgttaccttttgggctgccatttct

SEQ ID NO: 541640 - DNA, 201 bp, Homo sapiens; identical to SEQ ID NO: 263174

SEQ ID NO: 541641 - DNA, 201 bp, Homo sapiens
gaatacttgcctgctaagaagacgtcaggaaaggtctaattgtttttttcctgtacagtttcaggggatcttcttttagaggggctcctattttgataagkgcttttcagtcaagtttgcagtgcatttcaggatctgcctactttcatttatgtatcccgactccatcgagttggcctttaccttgagacagaattctta

SEQ ID NO: 541642 - DNA, 201 bp, Homo sapiens; identical to SEQ ID NO: 263175

SEQ ID NO: 541643 - DNA, 201 bp, Homo sapiens; identical to SEQ ID NO: 263176

SEQ ID NO: 541644 - DNA, 201 bp, Homo sapiens; identical to SEQ ID NO: 263177

SEQ ID NO: 541645 - DNA, 201 bp, Homo sapiens; identical to SEQ ID NO: 263178

SEQ ID NO: 541646 - DNA, 201 bp, Homo sapiens; identical to SEQ ID NO: 263179

SEQ ID NO: 541647 - DNA, 201 bp, Homo sapiens; identical to SEQ ID NO: 263180

SEQ ID NO: 541648 - DNA, 201 bp, Homo sapiens; identical to SEQ ID NO: 263181

SEQ ID NO: 541649 - DNA, 201 bp, Homo sapiens; identical to SEQ ID NO: 263182

SEQ ID NO: 541650 - DNA, 201 bp, Homo sapiens; identical to SEQ ID NO: 263184

SEQ ID NO: 541651 - DNA, 201 bp, Homo sapiens; identical to SEQ ID NO: 263186

SEQ ID NO: 541652 - DNA, 201 bp, Homo sapiens; identical to SEQ ID NO: 263187

SEQ ID NO: 541653 - DNA, 201 bp, Homo sapiens; identical to SEQ ID NO: 263188

SEQ ID NO: 541654 - DNA, 201 bp, Homo sapiens; identical to SEQ ID NO: 263189

SEQ ID NO: 541655 - DNA, 201 bp, Homo sapiens
aagaaaaacttcaagcggcattttctctagagaaacaagatcttcacctagttcttgaaacaatatcatttattttagaacaggtatttttattgcatcarattttctagccatgatttgtttactacatatttgtattgttatgatatctatgacattctgttttttttaattaaaaagtatgcaagatggaagctgtga

SEQ ID NO: 541656 - DNA, 201 bp, Homo sapiens
ttcaccatgtatttttctttaaagttctcatctcatatacgaataaatgaatcttctgtcaagtatgaattttgaatgcctgaatatgtgctaatataatmgattgctatttgtattataggctgagagcagtttcagtgaagaagaggaagaaaaacttcaagcggcattttctctagagaaacaagatcttcacctagt

SEQ ID NO: 541657 - DNA, 201 bp, Homo sapiens
cagaggagcagggggcaaaactccacagagagaagtaaatctctagctgaactttgtaacaatttgaatggggtgagaagcctcctggccagaactcgggkgaggacacaaatctggagggcacactcaacaggtgggggaagaatgaagccctattcttttgcaactgggtggcggatagcctggggcaagttttcaagc

SEQ ID NO: 541658 - DNA, 201 bp, Homo sapiens
caatctgcacctgtcttttatagctagagaccgttggatggcagcttaaccttcagatggctcactctgctcaagcaaaactaaaatctcctcaagctgtrttacaactcggagtgaacaatgaagattcaaaggtaagaaatggtatcccattaaaaggatgtattttgtttgttaggacttaaactttttattcttagc

SEQ ID NO: 541659 - DNA, 201 bp, Homo sapiens
tttgatatgatattggctgtgggtttgtcataaatagctcttattattttgagataatcaatacttagtttattggaataccatcaatacctagtttattycaacaaaagccaatggaaactaatacaaatggaatctaatacctctaataccatcgatacctaatttattgagtgattttagcatgaagggctgttgaat

SEQ ID NO: 541660 - DNA, 201 bp, Homo sapiens; identical to SEQ ID NO: 263191

SEQ ID NO: 541661 - DNA, 201 bp, Homo sapiens; identical to SEQ ID NO: 263192

SEQ ID NO: 541662 - DNA, 201 bp, Homo sapiens
taggacttaaactttttattcttagcagtctttgctctctggatttagaatttaaacataattcagttaaacagttattaataagtggatcttttttgacrgaaatagcttatcttgcaaggtgcctttcttacaaaaacatttcataatgtcttcttttaaattctgcagtgaaaaaaaattgttgaagaccatataaaa

SEQ ID NO: 541663 - DNA, 201 bp, Homo sapiens; identical to SEQ ID NO: 263193

SEQ ID NO: 541664 - DNA, 201 bp, Homo sapiens; identical to SEQ ID NO: 263195

SEQ ID NO: 541665 - DNA, 201 bp, Homo sapiens; identical to SEQ ID NO: 263194

SEQ ID NO: 541666 - DNA, 201 bp, Homo sapiens
aactccaacacgactggagtgtcgggagggcaactgggctgccctctccgccctccaggactgcgggacaagtctcccggcgcccgggtcgcaggagaccsggagccctaaaacggcccctgcgcggcttgggccttccggctttccgtccgccgcggccgccattggctgggttcggcgcagctaacagacggcggcagt

SEQ ID NO: 541667 - DNA, 201 bp, Homo sapiens
cttaggtttattgtttttgccttatcaagtccacttgacttaaagtatgttctacaggcggaatacactgggggtggcgggcatggaatttttttttgctrgaattagagctaataagtttgatttagagtaatcagtttttgcctctgttctcccaacaattgtgtgatattaggaatatctttcttgtgtttcttttta

SEQ ID NO: 541668 - DNA, 201 bp, Homo sapiens
ccacctcccggctcaagcaatcctcccacctcagcctcccaagtagctgagactacaggtgcacaccaccacacttgactaatctttgtatttttttgtaragagggggtttctccatgttgcccaggctagtcgtgaacttgtgagttcaagcagttcacccaccttggccttccatagttctgggattataggcgtaag

SEQ ID NO: 541669 - DNA, 201 bp, Homo sapiens
tttttctactatatatatttttttgtacccatcactccaccctttttgcttgtactgtttctgaggaaaaattggatgtaattatctttgctcctctgtamgtaaggtgtttttttcaccactttggcatctttcaggatttgtctttatcttcgattttctgtaatttgaagatggtatccttaagtgtagtttctttgg

SEQ ID NO: 541670 - DNA, 201 bp, Homo sapiens
caattagagaacattcatcttagacaagacaaagctgaagcatttgtcaatacttggtcttctatgggtcaagaaacagttgaaaagttccggcagagaaktctggctccctgtaaggtatagaacatactgtcttaaatatgtttttcaataacataaggcataaattattatacctgaagagtttttaaagtgataata

SEQ ID NO: 541671 - DNA, 201 bp, Homo sapiens; identical to SEQ ID NO: 263196

SEQ ID NO: 541672 - DNA, 201 bp, Homo sapiens; identical to SEQ ID NO: 263197

SEQ ID NO: 541673 - DNA, 201 bp, Homo sapiens
aagtgttttttcttcagtcctacagagttttagtctgatactttagaaaacagaactgagttcctattcgaaaagatttactcacagtgttttgtgttatraagtcatactccagggtatcttttagagcaacagccctgaaccaggctaagaggcatggagaagagcagcacagggcttctgaatcctggctgtgcatag

SEQ ID NO: 541674 - DNA, 201 bp, Homo sapiens
tctttagttaagcactcagaatacatttatgtatcttttaacattggtatcatctttagcacacatgagatcctggaaacacatgagaccttggcatacaytgactgagtaaacagcagattcaccttttccatctcacagtcactctagggcttacactttttcaggggaattgtggacttaattgtctgcattatttag

SEQ ID NO: 541675 - DNA, 201 bp, Homo sapiens; identical to SEQ ID NO: 263199

SEQ ID NO: 541676 - DNA, 201 bp, Homo sapiens
gacataattcaaatataaataaaatcattctctcacatatttaacattgttgagtggattttaaattgtatatatttaaggtatacggcatgctgttttgrtataaatatacatagtaaaatgattgctactattaagaaaattaacccacccatcacctgccattattaccttttttgtgtttgtggttaaagcacgtaa

SEQ ID NO: 541677 - DNA, 201 bp, Homo sapiens; identical to SEQ ID NO: 263200

SEQ ID NO: 541678 - DNA, 201 bp, Homo sapiens
tacagaaattgctaccatattttatagtttgataaatacccagctattttaaaaactatttctaatcctacagtttcagttccataacccattacactgcwtttttgcctatgccagtttgggttagattttctgtcactggcaaccaagagttctctgtttctttggaatataaatgctaaatcatcttgagttgggatt

SEQ ID NO: 541679 - DNA, 201 bp, Homo sapiens; identical to SEQ ID NO: 263201

SEQ ID NO: 541680 - DNA, 201 bp, Homo sapiens
tgggaaagtaccacattggatcccagtataacatttctaaataagtccatgatagctatgttatttttctttagcagttttgttggaactgttgctgtttytttagttaagcactcagaatacatttatgtatcttttaacattggtatcatctttagcacacatgagatcctggaaacacatgagaccttggcatacatt

SEQ ID NO: 541681 - DNA, 201 bp, Homo sapiens
gttctctgcaacctccacctacaagattcaagcaattctcatgcctcagcctcctgagtagctgagattacaggcatgtgccaccacgcctagctgattgkttttctatttttagtagagacagcgtttgccaggctgactaggctggactggaattcctggcatcaagtgatccactctcgtcggcctcccaaagtgttg

SEQ ID NO: 541682 - DNA, 201 bp, Homo sapiens; identical to SEQ ID NO: 263202

SEQ ID NO: 541683 - DNA, 201 bp, Homo sapiens
tcagagacaaggctgttcttgagagggagcgggagtgctttgggaaagtaccacattggatcccagtataacatttctaaataagtccatgatagctatgytatttttctttagcagttttgttggaactgttgctgtttctttagttaagcactcagaatacatttatgtatcttttaacattggtatcatctttagcac

SEQ ID NO: 541684 - DNA, 201 bp, Homo sapiens; identical to SEQ ID NO: 263203

SEQ ID NO: 541685 - DNA, 201 bp, Homo sapiens; identical to SEQ ID NO: 263204

SEQ ID NO: 541686 - DNA, 201 bp, Homo sapiens; identical to SEQ ID NO: 263205

SEQ ID NO: 541687 - DNA, 201 bp, Homo sapiens
gaagccttttatctcttgcctgatggctgtggctaggacttccagtactatgttaaataggagtagtgaaaatgggcatccttgtcttgtccaacgttttygaggaaatgtttttaacttttccctgttcagtgtgatgttgtctgtgggcttgtcatatatggcatttaatattatgatgcatatttcttctatgcccag

SEQ ID NO: 541688 - DNA, 201 bp, Homo sapiens
ataattcagattatttctttgctctgtatattttacaggctttccttataactcaaagtgaaacccaaaggcctgtaagaacccacatgatctaaactcakgctgcctatttgatttcacctcttaccttgtttcccagcccctccactctgttatgaccatagaagttgccttgtttttcctgacactccaaaatgctct

SEQ ID NO: 541689 - DNA, 201 bp, Homo sapiens
ttcagtgagttaaacttttagagtatgcgtataaattagctcatacagtgttttgtctttctgtgcctggcttatttcacttagcataacaccctccaggwtcatccattttgtcacaaatggcagtgttttctttttaaaggttgaataatattccattcattatctgttcatttgttgacagacacttaggttgtttcc

SEQ ID NO: 541690 - DNA, 201 bp, Homo sapiens
tcctacataactgcaagtttatatgctttaacctgcttctccccattttttccctttccttgtctctgataatctctgttctaataggcatttttaaaaawttccacatataagtgagatcatgcagtatttttctttctacgtctggcttatttcacttaccataatgtcctccagattcatccatgttgttgcaaatgg

SEQ ID NO: 541691 - DNA, 201 bp, Homo sapiens
tttaataggcagtgtatcacaatgtgaagccagcagctttgcagcagcaattagagaacattcatcttagacaagacaaagctgaagcatttgtcaatacktggtcttctatgggtcaagaaacagttgaaaagttccggcagagaattctggctccctgtaaggtatagaacatactgtcttaaatatgtttttcaataa

SEQ ID NO: 541692 - DNA, 201 bp, Homo sapiens
tacttgagctgtgaccccttatacttcctttatttggatttttaaaaatccttggctcatcacagtagagcacattgttagtctttcagcagttcatatgygttagttatacctccttcaccagattctaatttgtggggagcaggatcatattttttgtgtatcttatataagcctaccacattggtgtgcttaaaatag

SEQ ID NO: 541693 - DNA, 201 bp, Homo sapiens; identical to SEQ ID NO: 263206

SEQ ID NO: 541694 - DNA, 201 bp, Homo sapiens
cctattaaatacagacacacacccctatccaggtatgtacatacatatataatatataaatataaagacatatatatgcacagacttaactccaacacgaytggagtgtcgggagggcaactgggctgccctctccgccctccaggactgcgggacaagtctcccggcgcccgggtcgcaggagacccggagccctaaaac

SEQ ID NO: 541695 - DNA, 201 bp, Homo sapiens
ttttaaattatggaacttttcagagtattttatatgctagtgtttgtggtatgtattcgagggtgattatggcaggtaacattttccaaatgtgtttgacyttggatctgttttattatggtatatattttgggactaaagttctaaaaatatactttagggaaaaattctgatgtcttggttttatttttccgcttaaaa

SEQ ID NO: 541696 - DNA, 201 bp, Homo sapiens
gatttgatttttaaaaatttgttgaggcttgttttgtggcataacatatggtctatattggagaatatcccatgtgttgatgagaagagtatttattctgyagttgttggatagaatgttctataaatgtgtgttaggtacattttgtctgaagtccaatttaagtctgatgtttgttgattttatgtctcagtgagctgt

SEQ ID NO: 541697 - DNA, 201 bp, Homo sapiens
attctaggtcaaatctttagtacctcttttttagatgacaatagttaccttcaagctggtttccctgcctatagtcttcttgctttctactgcttcataatactatgtaaattactttctaaattttttttcctgaaacaaagatgtattatattttttacagtgttcaaagccatcagtgactgtccattgccctatgga

SEQ ID NO: 541698 - DNA, 201 bp, Homo sapiens
aaggtccaatttcattgttttcacatggatattcagttttcccagcaccatttattaaagagacaattctttcgttattgcatcttctcggtagccttgasaaaaattaattgaacatgtatgcttgggttatttctgggctctctatagtattccttttgtctgtgtatctggctttatgccagtaccatactattttgg

SEQ ID NO: 541699 - DNA, 201 bp, Homo sapiens
tgacattctgttttttttaattaaaaagtatgcaagatggaagctgtgaatgtattttagttaagaatttcagtgtaaaaatatttgaatattgtaaagtmtttaaatatgaattgagacttcattgatttgagacagttatacaagattttaattcattggtacttggtataatggaaaaatggacatattttacttaag

SEQ ID NO: 541700 - DNA, 201 bp, Homo sapiens
ttttactttctcaagattattttggttattccatgcgaattttagaattttttttctctatttctgtgaaaaaatgccattggaattttgatggaattgcmttgaatccatatattgctatgggtagtatggacattttaacaatgttaattcttccaattcatgaacgtgggatatcttgctatttaattatgtcatctt

SEQ ID NO: 541701 - DNA, 201 bp, Homo sapiens
gtatttgtctttctgtgtctgacttgtttcacttaagataatggcctccagtttcatccaagttgctgcaaaagatatgattctgttcttttttatggctsaatagtgttccattgtctgtatatacacaccatattttctttatccagtcatccaatgatggacacttaggttgatcccatattgttgttattatgaata

SEQ ID NO: 541702 - DNA, 201 bp, Homo sapiens
gctattcctctcctcccacccctttcagagttccatttttgggttaagtgtttatataaacgctctactaaattaaggctcttccctgcgcagtacaaggyttccctagtagtttggtttgcccaaaagaaagagaaaatttgccaaatggaccttttcagcagaagtaattttgggggcatctttttggaaatgtccccg

SEQ ID NO: 541703 - DNA, 201 bp, Homo sapiens; identical to SEQ ID NO: 263210

SEQ ID NO: 541704 - DNA, 201 bp, Homo sapiens; identical to SEQ ID NO: 263211

SEQ ID NO: 541705 - DNA, 201 bp, Homo sapiens
caccatttatccaagtatgtatacacgggcttgcttaaacctgccctattaaaaataataatgtatatatttatgcacgaacatacacacatatatctatmcaggtctgtacatagacttgcttaaacctgccctattaaatacagacacacacccctatccaggtatgtacatacatatataatatataaatataaagac

SEQ ID NO: 541706 - DNA, 201 bp, Homo sapiens
ggctaatatccagaatctacaaagaacttgaacaaatttacaagagaaaatcaaacaaccccatcaaaaagtgggcaaaggatatgaacagacacctctcmaaagaagacatttatgcagccaacagacacatgaaaaaatgttcatcatcactggccatcagagaaatgcaaatcaaaaccacaatgagataccacctca

SEQ ID NO: 541707 - DNA, 201 bp, Homo sapiens; identical to SEQ ID NO: 263212

SEQ ID NO: 541708 - DNA, 201 bp, Homo sapiens
caaagggctaatatccagaatctacaaagaacttgaacaaatttacaagagaaaatcaaacaaccccatcaaaaagtgggcaaaggatatgaacagacacytctccaaagaagacatttatgcagccaacagacacatgaaaaaatgttcatcatcactggccatcagagaaatgcaaatcaaaaccacaatgagatacca

SEQ ID NO: 541709 - DNA, 201 bp, Homo sapiens
acttaaaaattagacctaaaaccataaaaaccctaagaggaaacctaggcaataccattcaggccataggcatgggcaaggacttcatgtctaaaacaccraaagcaatggcaacaaaagccaaaattgactgatgggatctaattaaactaaagagcttctgcacagcaaaagaaactaccatcagagtgaacaggcaac

SEQ ID NO: 541710 - DNA, 201 bp, Homo sapiens; identical to SEQ ID NO: 263213

SEQ ID NO: 541711 - DNA, 201 bp, Homo sapiens
ttgcaatttaccaaaatatatgtgtttaattttaaagtagttgtacagtttatactcccaccagcagtgtatataagttgtgattgttctacatcatgtcyagaactgctagtaacagtctttttagttttagctattttggtgggtgtctagtggtattttattgtggttttaatagtctcaattgctaagatggctttc

SEQ ID NO: 541712 - DNA, 201 bp, Homo sapiens
aaggcttccctagtagtttggtttgcccaaaagaaagagaaaatttgccaaatggaccttttcagcagaagtaattttgggggcatctttttggaaatgtmcccgttgccctgccttttttgctggctgtcatctgtttttatttcactcagatttaccatatagcattcagagttgttggaatgaaaacttatagacaac

SEQ ID NO: 541713 - DNA, 201 bp, Homo sapiens
tgtctggttttggtattgggatgatactggagaatgagttagggagaattcctttcccctgttccaactttttggaacagttttacaagaattggtattakttctttgtatgtttggcagaattcagctgtgaatccgtctggtcctgcgtttttggggggaagattttattactgatttaatctcactacccattattgg

SEQ ID NO: 541714 - DNA, 201 bp, Homo sapiens
tgtgagacagaagcaccaggtaactaacttataaaggaaagcctattggattaacagcagatttctcagcagaaaccctataagctagaagggattagccytatcttcagcctcctcacacaaaacaattatcagccaagaattttgtatccagcgaagctaagcatcatatataaaggaaagatagtctttttcggaaaa

SEQ ID NO: 541715 - DNA, 201 bp, Homo sapiens
tggtcgtgtattttattatttgtaaaataaccaaaaatgttggtaataggactatgaagttttcttttgacttaagtcatttaaaaatagttttgtatttrgtatagtttaaagtttcagtatgaagatgagggacatatgtaattttttgtttctttttaataggcagtgtatcacaatgtgaagccagcagctttgcag

SEQ ID NO: 541716 - DNA, 201 bp, Homo sapiens
tatggcatttaatattatgatgcatatttcttctatgcccagtttgttgagagtttgtatcatgaaggggtactgcattttatcaaatgctatttctcagwctattggtttgatcataaagtttttctccttcattctttttatgtgatgaatcacatttattgacttgtgtattttgaaccactcttagatcccttgact

SEQ ID NO: 541717 - DNA, 201 bp, Homo sapiens
tataaatgctaaatcatcttgagttgggattgtaaagtcttgctaccatgttttgaggaatacctcttatttatgttttagttacatataacttttgtacstaaaatattaacaaggaaagcaactaacaactttaagctgaaatactaatcctgaaagataagaatgaaaactcaaaccttaagttctataaaactttga

SEQ ID NO: 541718 - DNA, 201 bp, Homo sapiens; identical to SEQ ID NO: 263216

SEQ ID NO: 541719 - DNA, 201 bp, Homo sapiens
cttctatgggtcaagaaacagttgaaaagttccggcagagaattctggctccctgtaaggtatagaacatactgtcttaaatatgtttttcaataacatawggcataaattattatacctgaagagtttttaaagtgataatattttgttgagaggtagagtcaggcaaaagaaacacagatgctcctcaacttacaatgg

SEQ ID NO: 541720 - DNA, 201 bp, Homo sapiens
atgggtcaagaaacagttgaaaagttccggcagagaattctggctccctgtaaggtatagaacatactgtcttaaatatgtttttcaataacataaggcayaaattattatacctgaagagtttttaaagtgataatattttgttgagaggtagagtcaggcaaaagaaacacagatgctcctcaacttacaatggcctta

SEQ ID NO: 541721 - DNA, 201 bp, Homo sapiens
ttttctttttgcgtatttagcatcaacccagcaccatcggttctgtgtttttggtgtgtatctggatgatgtatttgagaatctgctgaagacagctgttcggttagtgcacaaggaacagtcaattttagttactttatcatatgctggagattgatattcataaagcagtgggaatataccgtaactagggtcattgat

SEQ ID NO: 541722 - DNA, 201 bp, Homo sapiens
ccctagctgtccacattcttgctgcagactcctgtaatcctaactgtgggagagttcttgaaccccatgggccccgagactggcatagggagctccctgargttcatgcaatggtattgctctagaaagggtgctcttgctgggttccatgctccccctgagtcttaggtagctggagcacggctccattttaagagtcta

SEQ ID NO: 541723 - DNA, 201 bp, Homo sapiens
aggggcatattgtttaatttttctgtatttgtatagtttccagagtttttcttgatattgatttcttggtattggttttaatctactgtggtctgagaagwtacttggtatgatttgatttttaaaaatttgttgaggcttgttttgtggcataacatatggtctatattggagaatatcccatgtgttgatgagaagagt

SEQ ID NO: 541724 - DNA, 201 bp, Homo sapiens
ttcctctcggtacagtctcttacggcttcccttggctggggaagggggatctcctgacccgttgtgcttcccgggtgaggcaatgccccaccctgcttctkctcaccatccgtgggctgcatccactgtcctatcagtcccattgagatgaactgggtacctcagttggaagtgcagaaatcacctgccttctgcatcgat

SEQ ID NO: 541725 - DNA, 201 bp, Homo sapiens
aataacccatatccttatgaaagtgaattataggcctccttgaaattaataaaaatcttcaaagtagtatttaatttaaacttgtaactttctttgtgttmtgagagagtgctgtttctttatattttaaagaaatagaccatttctgttttgttcaccaatatattcactgcacttagcacactgacacagagtaaccat

SEQ ID NO: 541726 - DNA, 201 bp, Homo sapiens
aacttttggattttgtgtggattttaattattttaatcagtctcccgttaagggttaataatccagttaactatgttgttctcaaattccaaatactaaaytactgaggtcatgatgctttggggaacaaatactattaatgactagtgaaagaagtttcatagatctcacattgtttctggaagaccaatagatgtattt

SEQ ID NO: 541727 - DNA, 201 bp, Homo sapiens
aatccagttaactatgttgttctcaaattccaaatactaaattactgaggtcatgatgctttggggaacaaatactattaatgactagtgaaagaagtttyatagatctcacattgtttctggaagaccaatagatgtatttattaccataataacacgtagaaaaaggacagacatttctatgtggttcttagttctgtc

SEQ ID NO: 541728 - DNA, 201 bp, Homo sapiens; identical to SEQ ID NO: 263218

SEQ ID NO: 541729 - DNA, 201 bp, Homo sapiens; identical to SEQ ID NO: 263219

SEQ ID NO: 541730 - DNA, 201 bp, Homo sapiens; identical to SEQ ID NO: 263220

SEQ ID NO: 541731 - DNA, 201 bp, Homo sapiens; identical to SEQ ID NO: 263221

SEQ ID NO: 541732 - DNA, 201 bp, Homo sapiens
gggtgggagttagggtggggaagtagggaggaattccattctgtcttattgcatggagttctctgagaacaaaacatagcaaaaggacaagggtcctatgyaaagagggcatttctggtggaaaaattccttgacctccttagctcttgcgttgaactctatcaacaaagagctatgttttgagccttgattacaaatttt

SEQ ID NO: 541733 - DNA, 201 bp, Homo sapiens
atgttaaacaacaaacctaagaataatcagtattactgaggaagaagagatttctacaagcttggaaaacatatttgatggaatcatccaggaaaacttcrccagccttgctaggaacctagacatccaaatacaagaagcacagagaacacttgggaaatttatcacaaagagatcatggcacactgactgtcatcaggt

SEQ ID NO: 541734 - DNA, 201 bp, Homo sapiens
tatgaaattctgggttgaaaattcttttctttaagaatgttgaacattggcccccactctcttctggcttgtagagtttctactgagagatgcgctgttartctggtgggtttccctttgtgggtaacccgacctttgtctctggctgcccttaacattttttcctttgtttcaactctggtgaatctgacaattatgtga

SEQ ID NO: 541735 - DNA, 201 bp, Homo sapiens
attccttgacctccttagctcttgcgttgaactctatcaacaaagagctatgttttgagccttgattacaaattttaaaactggtaaataacaaatacatmttgcctctgattgcttcctcctctgactacattgagatatctttattagacccttaatattttcattatcttcttatcttagactctaatcactttactc

SEQ ID NO: 541736 - DNA, 201 bp, Homo sapiens
gcagccagcagacatacgaaaaaaagctcatcatcagtggtcattagagaaatgcaaatcaacatcacaatgagataccatctcacgccagttggaatggygatcattaaaaagtcaggaaacaccagatgctggagagggtgtggagaaatagaaatgcttttacactgttggtgggagtgtaaattagttcaaccattg

SEQ ID NO: 541737 - DNA, 201 bp, Homo sapiens
tacctacagaatgagaaaaattttgcaatctgtccatctgagaaaggtctaatatccagaatctacaaataacttaaataaatttacatgaagaaaactgyatcaaaaaatgggcaaaggataggaacagacacttcttaaaagaagacatttatgcagccagcagacatacgaaaaaaagctcatcatcagtggtcatta

SEQ ID NO: 541738 - DNA, 201 bp, Homo sapiens
aaaagcaatggcaacaaaggccaaaattgacaaatgggatctaattaaactaaagagcttctgcacagcaaaagaaactatcatcagagtgaaaagactasctacagaatgagaaaaattttgcaatctgtccatctgagaaaggtctaatatccagaatctacaaataacttaaataaatttacatgaagaaaactgcat

SEQ ID NO: 541739 - DNA, 201 bp, Homo sapiens
tgtgtgccatccgaattgtttcctacttaacttaaccagaaatcacttccattctttgtgaccaagaactggactagtacaattctcttggaaaaattggycttaatccctagctgtttggcaatatcttattatgattaattttttatagccacagctgccagaaccctaaatttcagttaacactgtaaagagaattta

SEQ ID NO: 541740 - DNA, 201 bp, Homo sapiens
ttgacttcctcttttcctaactgaataccctttatttctttctcttgcctgcttgccctggccagaacttccaacactatgttgaataggagtggtgagaragggcatccctgtcttgtgctagttttcaaagggaatgcttctagtttttgcccatttgatatgatattggctgtgggtttgtcataaatagctcttatt

SEQ ID NO: 541741 - DNA, 201 bp, Homo sapiens
ttatatgtttccatgcactgcagagcatactggtgttattttaaacaaaatataaataacttttggattttgtgtggattttaattattttaatcagtctyccgttaagggttaataatccagttaactatgttgttctcaaattccaaatactaaattactgaggtcatgatgctttggggaacaaatactattaatgac

SEQ ID NO: 541742 - DNA, 201 bp, Homo sapiens
attatatgtttccatgcactgcagagcatactggtgttattttaaacaaaatataaataacttttggattttgtgtggattttaattattttaatcagtcwcccgttaagggttaataatccagttaactatgttgttctcaaattccaaatactaaattactgaggtcatgatgctttggggaacaaatactattaatga

SEQ ID NO: 541743 - DNA, 201 bp, Homo sapiens
acttacagatatactttttgtatgtgtctggcttcattcactgattataatgattttgagactgatcattttgttacttgtattagtacttttttttttttattacagagtagtattctaccatttggatatacctcagtttgcttatctgttcacctgtttgtggatatctgggctatttctaggttttggctattatga

SEQ ID NO: 541744 - DNA, 201 bp, Homo sapiens
ccacgcctagctgattgtttttctatttttagtagagacagcgtttgccaggctgactaggctggactggaattcctggcatcaagtgatccactctcgtsggcctcccaaagtgttgggattacaggtgtgagccaccgtgctcagcctggacttattcactgttctgctttaggcttttacaaatagaatctaaaacat

SEQ ID NO: 541745 - DNA, 201 bp, Homo sapiens
tggcacgatcttggttctctgcaacctccacctacaagattcaagcaattctcatgcctcagcctcctgagtagctgagattacaggcatgtgccaccacrcctagctgattgtttttctatttttagtagagacagcgtttgccaggctgactaggctggactggaattcctggcatcaagtgatccactctcgtcggcc

SEQ ID NO: 541746 - DNA, 201 bp, Homo sapiens
aaagaaaagctttggattattaaaggtgtgggaaagctatttacactgcttcagggataaataggagggaaggagtactcagacagagggagcgagtgatyatatgaagaaaaatactatgatgatactaattgtgttttgtaggaatatggatgctgcctctttgtctctaaatgtgctaccctgaattacaagttacct

SEQ ID NO: 541747 - DNA, 201 bp, Homo sapiens
taaagaagttggaatgatctgattaattgtacattgtcccattgagaatgctggaaattatcttttggtaattctgggtatatcataggattgctaatatrctattttaaagtctgaaatgcttaaataatataatgataacaagcatttattgtgcttattgtgggtcagatgttataatgagttctttgtatcttacaa

SEQ ID NO: 541748 - DNA, 201 bp, Homo sapiens; identical to SEQ ID NO: 263227

SEQ ID NO: 541749 - DNA, 201 bp, Homo sapiens
agacttaactccaacacgactggagtgtcgggagggcaactgggctgccctctccgccctccaggactgcgggacaagtctcccggcgcccgggtcgcagragacccggagccctaaaacggcccctgcgcggcttgggccttccggctttccgtccgccgcggccgccattggctgggttcggcgcagctaacagacggc

SEQ ID NO: 541750 - DNA, 201 bp, Homo sapiens; identical to SEQ ID NO: 263229

SEQ ID NO: 541751 - DNA, 201 bp, Homo sapiens
tgacttaatttttgtataaggtgtaaggaaggggtccattttcacttttccacacagggctagctagttttcccagcaccatttattacatagggaatccyttccccatttcttgtttttgtcaggtttgtcaaaggtcagatggttgtagatgtgtggtgttatttctgaggcctctgttatgttccattggtctatatg

SEQ ID NO: 541752 - DNA, 201 bp, Homo sapiens; identical to SEQ ID NO: 263231

SEQ ID NO: 541753 - DNA, 201 bp, Homo sapiens
agggggatctcctgacccgttgtgcttcccgggtgaggcaatgccccaccctgcttctgctcaccatccgtgggctgcatccactgtcctatcagtcccaktgagatgaactgggtacctcagttggaagtgcagaaatcacctgccttctgcatcgattttgctgggagctacagaccggagctgtttctttttggccgt

SEQ ID NO: 541754 - DNA, 201 bp, Homo sapiens
agaaatatgggactatgtgaaaagaccaaatctacgtctgattagtgtacctgaaagtgacagggagaatggaaccaagttggaaaacactctgcaggatrttgtccaggagaacttccccaatctagcaaggcaggccaacattcagattcaggaaatacagagaacgccacaaagatactccttgagaagagcaactcc

SEQ ID NO: 541755 - DNA, 201 bp, Homo sapiens; identical to SEQ ID NO: 263234

SEQ ID NO: 541756 - DNA, 201 bp, Homo sapiens; identical to SEQ ID NO: 263233

SEQ ID NO: 541757 - DNA, 201 bp, Homo sapiens; identical to SEQ ID NO: 263236

SEQ ID NO: 541758 - DNA, 201 bp, Homo sapiens; identical to SEQ ID NO: 263235

SEQ ID NO: 541759 - DNA, 201 bp, Homo sapiens; identical to SEQ ID NO: 263237

SEQ ID NO: 541760 - DNA, 201 bp, Homo sapiens; identical to SEQ ID NO: 263239

SEQ ID NO: 541761 - DNA, 201 bp, Homo sapiens; identical to SEQ ID NO: 263238

SEQ ID NO: 541762 - DNA, 201 bp, Homo sapiens; identical to SEQ ID NO: 263241

SEQ ID NO: 541763 - DNA, 201 bp, Homo sapiens; identical to SEQ ID NO: 263240

SEQ ID NO: 541764 - DNA, 201 bp, Homo sapiens; identical to SEQ ID NO: 263243

SEQ ID NO: 541765 - DNA, 201 bp, Homo sapiens; identical to SEQ ID NO: 263242

SEQ ID NO: 541766 - DNA, 201 bp, Homo sapiens; identical to SEQ ID NO: 263245

SEQ ID NO: 541767 - DNA, 201 bp, Homo sapiens; identical to SEQ ID NO: 263244

SEQ ID NO: 541768 - DNA, 201 bp, Homo sapiens; identical to SEQ ID NO: 263246

SEQ ID NO: 541769 - DNA, 201 bp, Homo sapiens; identical to SEQ ID NO: 263247

SEQ ID NO: 541770 - DNA, 201 bp, Homo sapiens; identical to SEQ ID NO: 263248

SEQ ID NO: 541771 - DNA, 201 bp, Homo sapiens
accaacaaatgaataaagaaaatatggtatatatacactatggagtactactcagccataaaaaggaatgaagtagcgttttttgcagcaacttgggtgamactggaggccagttttctaaatgaagtaattcaggaatggaaaaccaaatatcttacgttctcccttattgggagctaagctatgaggttgtggtggcat

SEQ ID NO: 541772 - DNA, 201 bp, Homo sapiens
aaccaacaaatgaataaagaaaatatggtatatatacactatggagtactactcagccataaaaaggaatgaagtagcgttttttgcagcaacttgggtgrcactggaggccagttttctaaatgaagtaattcaggaatggaaaaccaaatatcttacgttctcccttattgggagctaagctatgaggttgtggtggca

SEQ ID NO: 541773 - DNA, 201 bp, Homo sapiens
gattctgaattcaaagagggtaagatcaatgaaataatgttaaaaaatcaaaaggtgtttatttttattccattttaaaaacttcttttttaagctttatygaggtataattgataaacaaaaattatgcgtattcagggtgtgcaatgtgatgatttgatagctgtatacattgtgtaatgattaccataatcaaattaa

SEQ ID NO: 541774 - DNA, 201 bp, Homo sapiens; identical to SEQ ID NO: 263249

SEQ ID NO: 541775 - DNA, 201 bp, Homo sapiens; identical to SEQ ID NO: 263250

SEQ ID NO: 541776 - DNA, 201 bp, Homo sapiens; identical to SEQ ID NO: 263251

SEQ ID NO: 541777 - DNA, 201 bp, Homo sapiens; identical to SEQ ID NO: 263252

SEQ ID NO: 541778 - DNA, 201 bp, Homo sapiens
tggattaaagacttaaacataagacctaaaaccataaaaaccctaggaaaaaatcttggcaatgccattcaagacataggcatgggcaaagatttcatggstaaaacaccaaaagcaatggcaacaaaggccaaaattgacaaatgggatctaattaaactaaagagcttctgcacagcaaaagaaactatcatcagagtg

SEQ ID NO: 541779 - DNA, 201 bp, Homo sapiens
tgttagtttgatggactttcctttatagatgacacttttctcttgattgtagaatttgttctttcactttgacattagacactcattataatatgttgtaytgaagtcccttttatgttgtatttgcctgcagatcatggagcctcctgtatctattatgtctgtatctcttgctagccttgggagtttttcagtctatta

SEQ ID NO: 541780 - DNA, 201 bp, Homo sapiens
tagggcagtgtgtgctggcacatgagttggcagttccatgcaggctgattattgggggctctgggtggctcttttggataccagttgtggtagcagtgtastgggcaagtgagtgggctcatgagctcttgggtagctgggtggcctcagtaatggtggcagcagtagtggtaagatgctctccccagtgcccttgtgttg

SEQ ID NO: 541781 - DNA, 201 bp, Homo sapiens; identical to SEQ ID NO: 52493

SEQ ID NO: 541782 - DNA, 201 bp, Homo sapiens; identical to SEQ ID NO: 263261

SEQ ID NO: 541783 - DNA, 201 bp, Homo sapiens
ccctgggagaagtgcttgggtgtctcaggcagtgggctggactgtgggacctccagaagtccagatcctgcattgtgtctcagagagtagggcaaagctgrgtaaatctggattgggaaagcctgggcttgtcctatgaaatgcttgcatgaggggtgacaacacctttgctgaagtactgccatgatgggagagtggggc

SEQ ID NO: 541784 - DNA, 201 bp, Homo sapiens; identical to SEQ ID NO: 263262

SEQ ID NO: 541785 - DNA, 201 bp, Homo sapiens
atgcttgcatgaggggtgacaacacctttgctgaagtactgccatgatgggagagtggggctactggtcccagtggtttcagcattggctggcaagtgggraatctgtgtccctctcatgtctcagtcctggtggggcttcctcccttatcccgactcttgcagctgatcctgtagtttagtcggactgggtagttgtcac

SEQ ID NO: 541786 - DNA, 201 bp, Homo sapiens; identical to SEQ ID NO: 263263

SEQ ID NO: 541787 - DNA, 201 bp, Homo sapiens; identical to SEQ ID NO: 263265

SEQ ID NO: 541788 - DNA, 201 bp, Homo sapiens; identical to SEQ ID NO: 263264

SEQ ID NO: 541789 - DNA, 201 bp, Homo sapiens; identical to SEQ ID NO: 263266

SEQ ID NO: 541790 - DNA, 201 bp, Homo sapiens; identical to SEQ ID NO: 263267

SEQ ID NO: 541791 - DNA, 201 bp, Homo sapiens; identical to SEQ ID NO: 263268

SEQ ID NO: 541792 - DNA, 201 bp, Homo sapiens; identical to SEQ ID NO: 263269

SEQ ID NO: 541793 - DNA, 201 bp, Homo sapiens
tttttcagtttgttgagatttgtatttgttgttaggatgaaatggtgacttccaagcttcttacatgccagaccagaaaccagaaatcccagcttaatgtmacagactgacatggactgcactgcagcattaaagagaataagaagttgtcgttgggttttaagtctgtgaaacaaagtaaggtttttaatttatccaaag

SEQ ID NO: 541794 - DNA, 201 bp, Homo sapiens; identical to SEQ ID NO: 263270

SEQ ID NO: 541795 - DNA, 201 bp, Homo sapiens
accaaaatctcacaaatctccactaaagaacttactcatgtaaccgaataccacctgtaccccagtaacttatggaaaaataaatatgttaaaaaaaaaaagtaatagccaaatctgttaactctgtgattcctgctttggttaatgtagattattatcacatgatattaaagagtcaggattatggagttaatgttttac

SEQ ID NO: 541796 - DNA, 201 bp, Homo sapiens
aatctagcaaggcaggccaacattcagattcaggaaatacagagaacgccacaaagatactccttgagaagagcaactccgagacacataattgtcagatwcaccaaagttgcaatgaaggaaaaaatgttaagggcagccagagagaaaggtcgggttacccacaaagggaagcccatcagactaacagcggatctctcg

SEQ ID NO: 541797 - DNA, 201 bp, Homo sapiens; identical to SEQ ID NO: 263271

SEQ ID NO: 541798 - DNA, 201 bp, Homo sapiens
attcaacaaacatctattgaaaatatgccatgtgccatatacttccaggtattgaagatacagcagtaaccaaagcaaagtccttctctcttagagcattyattctaataagtggaaaaagaacatagattgaataagtgtatactctatcaggttgtgattaacactatgaagaaaaattaagtaggatatggagatgga

SEQ ID NO: 541799 - DNA, 201 bp, Homo sapiens
cccaatctagcaaggcaggccaacattcagattcaggaaatacagagaacgccacaaagatactccttgagaagagcaactccgagacacataattgtcasatacaccaaagttgcaatgaaggaaaaaatgttaagggcagccagagagaaaggtcgggttacccacaaagggaagcccatcagactaacagcggatctc

SEQ ID NO: 541800 - DNA, 201 bp, Homo sapiens
aatatgggactatgtgaaaagaccaaatctacgtctgattagtgtacctgaaagtgacagggagaatggaaccaagttggaaaacactctgcaggatattrtccaggagaacttccccaatctagcaaggcaggccaacattcagattcaggaaatacagagaacgccacaaagatactccttgagaagagcaactccgag

SEQ ID NO: 541801 - DNA, 201 bp, Homo sapiens
acctccaagaaatatgggactatgtgaaaagaccaaatctacgtctgattagtgtacctgaaagtgacagggagaatggaaccaagttggaaaacactctkcaggatattgtccaggagaacttccccaatctagcaaggcaggccaacattcagattcaggaaatacagagaacgccacaaagatactccttgagaagag

SEQ ID NO: 541802 - DNA, 201 bp, Homo sapiens; identical to SEQ ID NO: 263272

SEQ ID NO: 541803 - DNA, 201 bp, Homo sapiens
actgctgttattttcactacttttggtctttgggagatagtagagtgtcagtaaatatttgttgaatgaatgcatgtgcaatattccatccttacaaactkctatttttaagttcactttattcggtttccttatgaagagggatatttttatttattggcagagaaaggacaataaaaggaggaggctatgaactgcatt

SEQ ID NO: 541804 - DNA, 201 bp, Homo sapiens
tgttaagtgcctaatggagagggataggatcaattaaataaggtaaatgcaacattttacaggtctatataaatacctagaaagtgcttttcaattaagayggcatgtatgccagtgcttttttatatatgagaatggttatgacatttattcctattttattggagagtctattgcatgggacttgataatagtggcagg

SEQ ID NO: 541805 - DNA, 201 bp, Homo sapiens
cctcatctctgccagccttgaccacagaacttacttttctttttctttttctttttgcacatacattttaaagtgagtgatagcccttcatttttttttttaatatacagtgggacctcgtttagggagggatggaatttagggtctcactttagtgcaaaaggtaataatctcagagacaaggctgttcttgagagggag

SEQ ID NO: 541806 - DNA, 201 bp, Homo sapiens; identical to SEQ ID NO: 263279

SEQ ID NO: 541807 - DNA, 201 bp, Homo sapiens
atgtacgattaagtgataaagtattaagactataagtgttgtgggagttaaataattttaaaacagattttaggaataatctaatatctcattttattgaygaggaaacaaaagtctggactagctgtttaactcaaaaatctgcccagagttacactactggataatgtcagaaccagactaagaacgcaggtttcctga

SEQ ID NO: 541808 - DNA, 201 bp, Homo sapiens
cttttatcttcaggaagtttataacctaataaataagattcaatacacataaaacctttaatgtacgattaagtgataaagtattaagactataagtgttstgggagttaaataattttaaaacagattttaggaataatctaatatctcattttattgacgaggaaacaaaagtctggactagctgtttaactcaaaaat

SEQ ID NO: 541809 - DNA, 201 bp, Homo sapiens; identical to SEQ ID NO: 263281

SEQ ID NO: 541810 - DNA, 201 bp, Homo sapiens
atgtttacctatgtaattttatgattccataggtaaaatagctgaaagagaaccattatgttatcaaacactgtgtcatgcttgctgagtttgcaaaaatrtaaaacgtacaatgtgtaacttttatcttcaggaagtttataacctaataaataagattcaatacacataaaacctttaatgtacgattaagtgataaag

SEQ ID NO: 541811 - DNA, 201 bp, Homo sapiens
attacttaaagcataggtaagagtgagaaaaaaattcatcttgaataatttaggccatttaatcctgaatcttccagcccttggtcgtgtattttattatktgtaaaataaccaaaaatgttggtaataggactatgaagttttcttttgacttaagtcatttaaaaatagttttgtatttagtatagtttaaagtttcag

SEQ ID NO: 541812 - DNA, 201 bp, Homo sapiens
catgaagcctgccggttggttggtttgtttttggtatatgtgtatgtgcatgtgtatctgtgtatcgtactgatctgtgaaatctaaatgtctgaaaactrctgattatgtagaaggatcatgggctttggattcagcaaacctggtttaaattctttctctgctttgttcttatcttcgtcatctttaaaatggggatgt

SEQ ID NO: 541813 - DNA, 201 bp, Homo sapiens
cagttttcccagcaccatttattaaatagggaatcctttccctatgaatgaaatgaagcgagaaggaaagtttagagaaaaaagaataaaaagaaacgcasaaaacctccaagaaatatgggactatgtgaaaagaccaaatctacgtctgattagtgtacctgaaagtgacagggagaatggaaccaagttggaaaacac

SEQ ID NO: 541814 - DNA, 201 bp, Homo sapiens; identical to SEQ ID NO: 263282

SEQ ID NO: 541815 - DNA, 201 bp, Homo sapiens
gtctccatcagtgttgggttatcgcacagaacaccttctagggtctacttcagagtagtagttttggaactattttagatacaacacctttttaaaaaatgtatcagatattcagagccctaatatgtatctgacaaaaatggagcaactcttgttgggtgaatgggagtgaaggagccaggcattgttaagaatttgtcc

SEQ ID NO: 541816 - DNA, 201 bp, Homo sapiens
ttgcttttggtgttttagacatgaaggccttgcccatgcctatgtcctgaatggtattgcctaggttttcttctagggtttttatggttttaggtctaacrtttaagtcttgaatccatcttgaattgatttttgtataaggtgtaaggaagggatccagtttcagctttctacatatggctagccagttttcccagcacc

SEQ ID NO: 541817 - DNA, 201 bp, Homo sapiens
tggtttaattaaatcccatttgtcaattttggcttttgttgccattgcttttggtgttttagacatgaaggccttgcccatgcctatgtcctgaatggtawtgcctaggttttcttctagggtttttatggttttaggtctaacatttaagtcttgaatccatcttgaattgatttttgtataaggtgtaaggaagggatc

SEQ ID NO: 541818 - DNA, 201 bp, Homo sapiens
ccaccgtgctcagcctggacttattcactgttctgctttaggcttttacaaatagaatctaaaacatttaacctaacatctgagatgtgggtttaccactrttattccaagtcctttaattttgtatgtcttcattttaaagtccctaagttcatgttattaatggttattttcctatatgttttactttctcatgtatat

SEQ ID NO: 541819 - DNA, 201 bp, Homo sapiens
caaaagaaaggaaataaccaagatcagagcagaactaaatgaaatggaaacaaaaacaatgaaaaagataaatgaaacaaaaagctgattctttgaaaagwtaaaaaaattgatagaccattagcaagtttaaccaagaaaagaagggagaaaatccaaatgacctcactaagaaacaaaacaggagatattacaactgac

SEQ ID NO: 541820 - DNA, 201 bp, Homo sapiens; identical to SEQ ID NO: 263283

SEQ ID NO: 541821 - DNA, 201 bp, Homo sapiens
ttattaatggttattttcctatatgttttactttctcatgtatataaaattcatattttaaagtcttaaattctgttttctgatgttgagggtcctataargttgtactcttaatgggtggcttactttcattttctcatttaattattatttttaaaaaatttcctagttattgattctcatgttatttcttatgattgt

SEQ ID NO: 541822 - DNA, 201 bp, Homo sapiens
cacaggatgtgatattgtgcagacaacccccagtaccagcctggagccgggtagactcggtggctagacccagaagagagacagtaatcactgcacacagkaatcacaggaagccacgtccataggaaaatggagagagtactacatcaagggaacaccccatgggacaaaagaatctgaacaacagccttcagccctaga

SEQ ID NO: 541823 - DNA, 201 bp, Homo sapiens
tcttatgattgttgtcagtatctccctaaatctaataaggagacagaaaccacaaagtaattttaaacaggggaagtttaatataaagaattagaaagctrtgatacgtgagtaactataaaagtgtaaagagaactgtaacaaacatactaggcctgaaggaggagagtatttaaggaaaagaacaacttggaagagggt

SEQ ID NO: 541824 - DNA, 201 bp, Homo sapiens
acccatagatggttcacatcacaggatgtgatattgtgcagacaacccccagtaccagcctggagccgggtagactcggtggctagacccagaagagagayagtaatcactgcacacagtaatcacaggaagccacgtccataggaaaatggagagagtactacatcaagggaacaccccatgggacaaaagaatctgaac

SEQ ID NO: 541825 - DNA, 201 bp, Homo sapiens
gtgctggtatctacggagaagagacccatagatggttcacatcacaggatgtgatattgtgcagacaacccccagtaccagcctggagccgggtagactcrgtggctagacccagaagagagacagtaatcactgcacacagtaatcacaggaagccacgtccataggaaaatggagagagtactacatcaagggaacacc

SEQ ID NO: 541826 - DNA, 201 bp, Homo sapiens
aatagcaaactgggggttgaaggtactgtcatggggcatgtaggcagcttcaagaaatgactgctgatcatgaaatgaaatgggagaattatgaaaatcasacccaagaaacataaaaggacagaagtctgagatttctgtttgctctagttaaaaattatccatgtatctcagcagttctttaggatagatgagcccctt

SEQ ID NO: 541827 - DNA, 201 bp, Homo sapiens
agccttgattacaaattttaaaactggtaaataacaaatacatcttgcctctgattgcttcctcctctgactacattgagatatctttattagacccttamtattttcattatcttcttatcttagactctaatcactttactctcatttcagtgtctgcaagttcttttcccattagtcttctctgtaccaaccagcaag

SEQ ID NO: 541828 - DNA, 201 bp, Homo sapiens
aaaattccttgacctccttagctcttgcgttgaactctatcaacaaagagctatgttttgagccttgattacaaattttaaaactggtaaataacaaatayatcttgcctctgattgcttcctcctctgactacattgagatatctttattagacccttaatattttcattatcttcttatcttagactctaatcacttta

SEQ ID NO: 541829 - DNA, 201 bp, Homo sapiens
atatacattcctgctgagtggagatttgcttaaagttgactgttttcttccttctgtaccatctgattccaatctgcacctgtcttttatagctagagacygttggatggcagcttaaccttcagatggctcactctgctcaagcaaaactaaaatctcctcaagctgtgttacaactcggagtgaacaatgaagattcaa

SEQ ID NO: 541830 - DNA, 201 bp, Homo sapiens
tgaaatactttttgttactgcggcatatagggaaatatatctttcagatatgataagagctttttatcatattttatactgtaatggattatcttttaagrtagaaaagggggagtgactttttcctcctaagtagataagactatctcatcttaagacaaaatagaattgagaatgaggtattagagaagatctgaggca

SEQ ID NO: 541831 - DNA, 201 bp, Homo sapiens
atgatgagtctggtttgggtgttttctttttgcgtatttagcatcaacccagcaccatcggttctgtgtttttggtgtgtatctggatgatgtatttgagratctgctgaagacagctgttcggttagtgcacaaggaacagtcaattttagttactttatcatatgctggagattgatattcataaagcagtgggaatat

SEQ ID NO: 541832 - DNA, 201 bp, Homo sapiens
tgagattttggatagatgcatatatgcacattgattaatcttataacttgcagagctagagcaccattttcattaacaaatatgctgaggaagaagaggakaagcacacatacataaaagatatttctctttcatcttgtatgtagacttaagtgacttctttgtattgtctttctcttctatggcattgtacacattttg

SEQ ID NO: 541833 - DNA, 201 bp, Homo sapiens
gtggccatcccgagatagctaatgatgatgagtctggtttgggtgttttctttttgcgtatttagcatcaacccagcaccatcggttctgtgtttttggtrtgtatctggatgatgtatttgagaatctgctgaagacagctgttcggttagtgcacaaggaacagtcaattttagttactttatcatatgctggagattg

SEQ ID NO: 541834 - DNA, 201 bp, Homo sapiens
tttgtttttcaaagtttctcagctgtccttaatacttatgatccaaagctgcaacctttcagaaatgccatgtccatattttaaaaaactaaaatgctttraggatttaatcagatcctcgagtcttatatcacaggacttatttggaaatgtggccatcccgagatagctaatgatgatgagtctggtttgggtgttttc

SEQ ID NO: 541835 - DNA, 201 bp, Homo sapiens
tagaatccatactggattttattagagcttagccactcaaccacaataaaagtaggcaagaggtcagctgagatactgattgacttcatatgcccttggarcagacaggcagtgtctgaggggacctgagttcccagccacccagcctcaagctgcgttattacttaactgctttgtagagtgtaaacattatcattttct

SEQ ID NO: 541836 - DNA, 201 bp, Homo sapiens; identical to SEQ ID NO: 263284

SEQ ID NO: 541837 - DNA, 201 bp, Homo sapiens
atagtcgttcctgaaaaaatataagcctttcccatgaggacattttctgtcaagaggtaagtgtgggtcagggctcatttggaggctgagggggcatctgrtttcttcataatattatataaaatttgtgagtggctaagctacctcattgtttcttctgtggataagggcctgctgccttgaattctagtcagcctggat

SEQ ID NO: 541838 - DNA, 201 bp, Homo sapiens
tgaatgacatttcagtgtcctcaaacttgtgctattatcttcatatattcttggtatgcagaggtgacaaacaatttgaaaaaaaaatacattggtgattyccctcacttccctccaacttgaatatgaaggccagtcttatgatttggtactttggtcaagtctgtgggtcaagggatataattaagttccttgtcaccc

SEQ ID NO: 541839 - DNA, 201 bp, Homo sapiens
gatctaagagacccttaatcagtcttatttgaaacagaatgtatttctccactgcataagtaattggctgaaaccagaaccattaacaaattgaatgaagwtttcgttaatgccagggaactgtgctgttagcaaaatcactcttattatgtcacagtattcaaagatgtgcatttgttaaatagagttgatgtacttttt

SEQ ID NO: 541840 - DNA, 201 bp, Homo sapiens
taaatatttgttgaatgaatgcatgtgcaatattccatccttacaaactgctatttttaagttcactttattcggtttccttatgaagagggatatttttwtttattggcagagaaaggacaataaaaggaggaggctatgaactgcattttgtatttcctaatattcttttgtgttttcatttttggttgtacttcaagc

SEQ ID NO: 541841 - DNA, 201 bp, Homo sapiens
tatagtgattggtttgccacctgttttaagtgtgggccatggcttctctaataaaccctattctttatcttgctcttaaacattttgttttgatagccatraaaccctcctcagggtaggtgatttatttccatttgccaaatgtgaagagtgagagaatgaccttgataaagggttgggttgagaattgttcctgttttt

SEQ ID NO: 541842 - DNA, 201 bp, Homo sapiens
tgacttgtttcacttaagataatggcctccagtttcatccaagttgctgcaaaagatatgattctgttcttttttatggctgaatagtgttccattgtctrtatatacacaccatattttctttatccagtcatccaatgatggacacttaggttgatcccatattgttgttattatgaatactgtgataaacaggagtgc

SEQ ID NO: 541843 - DNA, 201 bp, Homo sapiens
tttactctacaataagttgaattgatttgggcttctttttctcatgatcctattatttagtgactgttttcttcaaatatttgtttccatgacttttgttmcttctttatagacatatttttagtagttgcaatttcacctccaccccgcctttctgggttgataatattggttaacactgactcctagggtacagtctca

SEQ ID NO: 541844 - DNA, 201 bp, Homo sapiens
cttagttctgtctctctttttttttttaatccaggatgtcaatccttttgtgttcactccctaattatgtatttacattttctttatttttcttaactatrtatctgacctttttttttttctcaaggtcttgattaaaatcagctttactctacaataagttgaattgatttgggcttctttttctcatgatcctattat

SEQ ID NO: 541845 - DNA, 201 bp, Homo sapiens
atagatgtatttattaccataataacacgtagaaaaaggacagacatttctatgtggttcttagttctgtctctctttttttttttaatccaggatgtcartccttttgtgttcactccctaattatgtatttacattttctttatttttcttaactatatatctgacctttttttttttctcaaggtcttgattaaaatc

SEQ ID NO: 541846 - DNA, 201 bp, Homo sapiens
ccccatgtttacctatgtaattttatgattccataggtaaaatagctgaaagagaaccattatgttatcaaacactgtgtcatgcttgctgagtttgcaaraatgtaaaacgtacaatgtgtaacttttatcttcaggaagtttataacctaataaataagattcaatacacataaaacctttaatgtacgattaagtgat

SEQ ID NO: 541847 - DNA, 201 bp, Homo sapiens
cagacttaactccaacacgactggagtgtcgggagggcaactgggctgccctctccgccctccaggactgcgggacaagtctcccggcgcccgggtcgcargagacccggagccctaaaacggcccctgcgcggcttgggccttccggctttccgtccgccgcggccgccattggctgggttcggcgcagctaacagacgg

SEQ ID NO: 541848 - DNA, 201 bp, Homo sapiens
gtttctggaagaccaatagatgtatttattaccataataacacgtagaaaaaggacagacatttctatgtggttcttagttctgtctctctttttttttttaatccaggatgtcaatccttttgtgttcactccctaattatgtatttacattttctttatttttcttaactatatatctgacctttttttttttctcaag

SEQ ID NO: 541849 - DNA, 201 bp, Homo sapiens
tgtttctggaagaccaatagatgtatttattaccataataacacgtagaaaaaggacagacatttctatgtggttcttagttctgtctctctttttttttttaatccaggatgtcaatccttttgtgttcactccctaattatgtatttacattttctttatttttcttaactatatatctgacctttttttttttctcaa

SEQ ID NO: 541850 - DNA, 201 bp, Homo sapiens
aaaattccctaaaccagaatgcccattctcctccaaaggatcacagctcctcaccagcaagggaacataactggttggagaatgagtttgacgaattgacrgaagtgggcttcagaaaatgggttataacaaacttctccgagctaaaggagcatgttctaatccaatgcagggaagctaagaaccttgaaaaaaggttgc

SEQ ID NO: 541851 - DNA, 201 bp, Homo sapiens
ttgtttctggaagaccaatagatgtatttattaccataataacacgtagaaaaaggacagacatttctatgtggttcttagttctgtctctctttttttttttaatccaggatgtcaatccttttgtgttcactccctaattatgtatttacattttctttatttttcttaactatatatctgacctttttttttttctca

SEQ ID NO: 541852 - DNA, 201 bp, Homo sapiens
ctttaaagcaacaaagatcaaaaaagacaaagaagggcattacataatgataaagggatcagtgcaacaagaagagctaactttcttaaatatatatgcaygcaatacaggagcacccagattcataaagcaagttcttagagacctatgaagagacttagactcacacacaataatagtgggagactttaacaccacact

SEQ ID NO: 541853 - DNA, 201 bp, Homo sapiens
gatctcacattgtttctggaagaccaatagatgtatttattaccataataacacgtagaaaaaggacagacatttctatgtggttcttagttctgtctctctttttttttttaatccaggatgtcaatccttttgtgttcactccctaattatgtatttacattttctttatttttcttaactatatatctgacctttttt

SEQ ID NO: 541854 - DNA, 201 bp, Homo sapiens
agggcaggaccaagtagatgtaattggatcatgggggcagtttcccccgtgctgtccttatgatagtgagtctcaagagatctgatggttttttaagcatrtggcatttcccctgcttgcactcactccatcctgccaccctgtgaagaaggtgcctgcttctcctttgccttctgccatgattgtaagtttcctgaggcc

SEQ ID NO: 541855 - DNA, 201 bp, Homo sapiens
tgtgtctcctcacccaaaatctcatctttaattgtaatccccataatcctcaagggcaggaccaagtagatgtaattggatcatgggggcagtttcccccrtgctgtccttatgatagtgagtctcaagagatctgatggttttttaagcatgtggcatttcccctgcttgcactcactccatcctgccaccctgtgaaga

SEQ ID NO: 541856 - DNA, 201 bp, Homo sapiens
ttggggaggtttaagggaatgttgacatatacaaatactaaaaaattagaaagccaagtaaaaagggattaaaattctatctccaagtggaaaaaatcagrttgtccagaaaataataaatacatgattgatatggtttggctgtgtctcctcacccaaaatctcatctttaattgtaatccccataatcctcaagggcag

SEQ ID NO: 541857 - DNA, 201 bp, Homo sapiens
gattttatgatttggtattctattctttgtactcttcatcttattccttatgttaatttttatgtgactcctgttattaaggaccacaaactacttttctytcaaatatttacaaatatgaaatgagaattcttcacaggttggaatattaagtaaaaaggaatgagggtatagagcatgttttaaaaaacaagtttatta

SEQ ID NO: 541858 - DNA, 201 bp, Homo sapiens
tcaggaaacaacaggtgctgaagaggatgtggagaaatagcaatgcttttacacctttggtgggagtgtaaactagttcaaccatcgtggaagacagtgtrgcgattcctcaaagatctagaactagaaataccatgtgacccagccatcccattactaggtatatacccaaaggattataaatcatgctgctataaagac

SEQ ID NO: 541859 - DNA, 201 bp, Homo sapiens
gccctgcccaggtcaggaccagactgctttggcggctcttattctgctcacatcttgggggttgcctagctcccaagctgggggctggagtttatgtcacrcttgcttttcagtcctggttgcagaatcccatttcctacacaggccccagttcagcaaaccacagattgagttactctgatacttaggactggtgctata

SEQ ID NO: 541860 - DNA, 201 bp, Homo sapiens; identical to SEQ ID NO: 263313

SEQ ID NO: 541861 - DNA, 201 bp, Homo sapiens
tggttgcagaatcccatttcctacacaggccccagttcagcaaaccacagattgagttactctgatacttaggactggtgctataggttcccaggtcacasaatttgttaaaccctaggattgagaatggcatcttactgtagctgcttaggtctcagggaaggtgtggaacccagggtgtgttatttccctatagcagtt

SEQ ID NO: 541862 - DNA, 201 bp, Homo sapiens
cagttcctttatacagtctcctggttgcttcccaagtcaaattcaaggtttgggagggtcaagatacactcccatggcctggattatacaattgattctcyagtaggaaagtgaaccacagaaagacactcagttaccttctcccacgttgcagactcccttttggttgccagcctgccctgtccacattagctgtttgtt

SEQ ID NO: 541863 - DNA, 201 bp, Homo sapiens
atttttaatgttttaaggaacctccatactgtttttcataaaggctgtaccaatttacattcccaccaacactgtacaatggtttctttttctctgctgtyttcctaacacttgctgtctcttgtctttttgataataggtattttaacgatgtaacgtcatgttgtattatgcttttgatttgcatttctttgatgatta

SEQ ID NO: 541864 - DNA, 201 bp, Homo sapiens
cctatatgttttactttctcatgtatataaaattcatattttaaagtcttaaattctgttttctgatgttgagggtcctataaggttgtactcttaatggrtggcttactttcattttctcatttaattattatttttaaaaaatttcctagttattgattctcatgttatttcttatgattgttgtcagtatctccctaa

SEQ ID NO: 541865 - DNA, 201 bp, Homo sapiens
gagtgggattgttggattgtatgatagttttatttttaatgttttaaggaacctccatactgtttttcataaaggctgtaccaatttacattcccaccaayactgtacaatggtttctttttctctgctgtcttcctaacacttgctgtctcttgtctttttgataataggtattttaacgatgtaacgtcatgttgtatt

SEQ ID NO: 541866 - DNA, 201 bp, Homo sapiens
ggactggaattcctggcatcaagtgatccactctcgtcggcctcccaaagtgttgggattacaggtgtgagccaccgtgctcagcctggacttattcactsttctgctttaggcttttacaaatagaatctaaaacatttaacctaacatctgagatgtgggtttaccactgttattccaagtcctttaattttgtatgtc

SEQ ID NO: 541867 - DNA, 201 bp, Homo sapiens; identical to SEQ ID NO: 263319

SEQ ID NO: 541868 - DNA, 201 bp, Homo sapiens
tagggaatcccttccccatttcttgtttttgtcaggtttgtcaaaggtcagatggttgtagatgtgtggtgttatttctgaggcctctgttatgttccatkggtctatatgtctgtatggtaccagtactacactgttttggttactgtagcctcgtagtgtagtttgaagtcaggtagcatgatgcctccagctttgttc

SEQ ID NO: 541869 - DNA, 201 bp, Homo sapiens
ggatacttaggacttgaactcagcgctggaccaagcagacctaatagacatctacagaactctccaccccaatcaacagagtatatattcttctcagcacygcatcccgcacttattctaaaattgaccacataattggaagtaaaacagtcctcagcaaatgcaaaagaatggaaatcataacagactctcagaccacag

SEQ ID NO: 541870 - DNA, 201 bp, Homo sapiens
tgagagagtttgagcaaaaaaaaagtcagttgaggtgattaaaaattgatacattaaagtgagaaatcaaagaagaaactttgttgctgagacatttagamtatttctcagatattaataaaatttagagaacaaaacagtattctagagaaacactaaggttattaattaagaggaaagcaatctatttggggaggttta

SEQ ID NO: 541871 - DNA, 201 bp, Homo sapiens
aaactactttaaatttcatgtggaaccaaaaaagaacccgtatagccaagacaatcctaagcaaaaagaacaaagctggaggcatcacactacctaacttmaaactatactacaaggctacagtaaccaaaacagcatggtactggtaccaaaacagatatatataccagtggaacagaacagaggcctcagaaataatgc

SEQ ID NO: 541872 - DNA, 201 bp, Homo sapiens
tcctgccttcagaatcttcctcttccaacctagtgtcatttttctaaaacaaagttctgatatgatactttcctgcttaaaatgtctaagtgaccccccccaccccactgcagaataatgtgactttgtaggatcagatctctgcctactctgttagtttcttttcatcccactttcccatagtcatcctaggaactttct

SEQ ID NO: 541873 - DNA, 201 bp, Homo sapiens
ttgttttatttgtctcagttgtatttaatatatgatatatatatttgttttttatttttgtgtctgtatcacctcactaaaatacaaatttcttaagggcrgtggctttaaaaaaaaattgctgcagctcagtgggctaggtagttagtaacttactataaatgaattgaatgaatagatggttttaagtagatgtcctta

SEQ ID NO: 541874 - DNA, 201 bp, Homo sapiens
actgcagaagccaaagcattgggtatcaccttccttgttaatccattttttttccaactgtttttgggtttttgttttgttttgttttgtttttgtttttktttttttggaacaaggacagtcataatatagtaatatgaattcattccttaattctttattcaacaaacatctattgaaaatatgccatgtgccatatac

SEQ ID NO: 541875 - DNA, 201 bp, Homo sapiens
aaagactacctacagaatgagaaaaattttgcaatctgtccatctgagaaaggtctaatatccagaatctacaaataacttaaataaatttacatgaagavaactgcatcaaaaaatgggcaaaggataggaacagacacttcttaaaagaagacatttatgcagccagcagacatacgaaaaaaagctcatcatcagtgg

SEQ ID NO: 541876 - DNA, 201 bp, Homo sapiens
aattaactcaagatggattaaagacttaaacataagacctaaaaccataaaaaccctaggaaaaaatcttggcaatgccattcaagacataggcatgggcmaagatttcatggctaaaacaccaaaagcaatggcaacaaaggccaaaattgacaaatgggatctaattaaactaaagagcttctgcacagcaaaagaaac

SEQ ID NO: 541877 - DNA, 201 bp, Homo sapiens; identical to SEQ ID NO: 263329

SEQ ID NO: 541878 - DNA, 201 bp, Homo sapiens
atggaaactgaacaacctgctgctgaatgactactgggtaaataacgaaatgaaggcagaaataaaaagttctttgaaaccaatgagaacaaagacacaaygtaccagaatctctgggacacagctaaagcagtgtgtagagggaaatttatagcactaactgcccacaggagaaagcgggaaagatctaaaattgacacc

SEQ ID NO: 541879 - DNA, 201 bp, Homo sapiens
aaaaattaataaggatacttaggacttgaactcagcgctggaccaagcagacctaatagacatctacagaactctccaccccaatcaacagagtatatatkcttctcagcaccgcatcccgcacttattctaaaattgaccacataattggaagtaaaacagtcctcagcaaatgcaaaagaatggaaatcataacagact

SEQ ID NO: 541880 - DNA, 201 bp, Homo sapiens; identical to SEQ ID NO: 263330

SEQ ID NO: 541881 - DNA, 201 bp, Homo sapiens
ccatttctctgtcaaatggcgatagtaatagttgttcctcagagttgttactggtcataatttaagggaaaatatattttgaaccataagatgcaaagatdgttttttataaaaatgtacaatgttcctttttctattatttgtagagcttaaggacttgaatccagatcttctaattacaagtataagactctaagtagc

SEQ ID NO: 541882 - DNA, 201 bp, Homo sapiens; identical to SEQ ID NO: 263331

SEQ ID NO: 541883 - DNA, 201 bp, Homo sapiens
tagacattctatggccgaaagagcttgcacgtttaaatatttctatagttttagtccttggcacatggacttgagtccatttctctgtcaaatggcgatartaatagttgttcctcagagttgttactggtcataatttaagggaaaatatattttgaaccataagatgcaaagattgttttttataaaaatgtacaatgt

SEQ ID NO: 541884 - DNA, 201 bp, Homo sapiens; identical to SEQ ID NO: 263332

SEQ ID NO: 541885 - DNA, 201 bp, Homo sapiens
gtgggatcggtggtgatatcccctttatcatttttgttgtgtctatttgattcttctctcttttcttctttattagtcttgctaatggtctatcaattttrttgatcctttcaaaaaaccagttcctggattcattaattttttgaagggttttttgtgtctgtatttccttcagttctgctctgattttagttatttctt

SEQ ID NO: 541886 - DNA, 201 bp, Homo sapiens; identical to SEQ ID NO: 263335

SEQ ID NO: 541887 - DNA, 201 bp, Homo sapiens; identical to SEQ ID NO: 263338

SEQ ID NO: 541888 - DNA, 201 bp, Homo sapiens; identical to SEQ ID NO: 263341

SEQ ID NO: 541889 - DNA, 201 bp, Homo sapiens; identical to SEQ ID NO: 263339

SEQ ID NO: 541890 - DNA, 201 bp, Homo sapiens; identical to SEQ ID NO: 263343

SEQ ID NO: 541891 - DNA, 201 bp, Homo sapiens; identical to SEQ ID NO: 263344

SEQ ID NO: 541892 - DNA, 201 bp, Homo sapiens
attgtttacatttgttttacgtttttaatctgtaaaatgggggtaataagcattacctgtctcacagggttgttagttttctttgtcttcttttttgtatrtatagtatagtatatatatgctatatactatagtattttatatatattagtatatatacactatatactatgtaatatacattagtatatatatactata

SEQ ID NO: 541893 - DNA, 201 bp, Homo sapiens; identical to SEQ ID NO: 263347

SEQ ID NO: 541894 - DNA, 201 bp, Homo sapiens; identical to SEQ ID NO: 263345

SEQ ID NO: 541895 - DNA, 201 bp, Homo sapiens
gccataatgatgtaaggaagccccatatattctttatcctgattcaccaattgtttacatttgttttacgtttttaatctgtaaaatgggggtaataagcrttacctgtctcacagggttgttagttttctttgtcttcttttttgtatgtatagtatagtatatatatgctatatactatagtattttatatatattagt

SEQ ID NO: 541896 - DNA, 201 bp, Homo sapiens; identical to SEQ ID NO: 263348

SEQ ID NO: 541897 - DNA, 201 bp, Homo sapiens; identical to SEQ ID NO: 263349

SEQ ID NO: 541898 - DNA, 201 bp, Homo sapiens; identical to SEQ ID NO: 263350

SEQ ID NO: 541899 - DNA, 201 bp, Homo sapiens; identical to SEQ ID NO: 263352

SEQ ID NO: 541900 - DNA, 201 bp, Homo sapiens; identical to SEQ ID NO: 263351

SEQ ID NO: 541901 - DNA, 201 bp, Homo sapiens; identical to SEQ ID NO: 52491

SEQ ID NO: 541902 - DNA, 201 bp, Homo sapiens
tgttgtattgaagtcccttttatgttgtatttgcctgcagatcatggagcctcctgtatctattatgtctgtatctcttgctagccttgggagtttttcartctattattttgttaaagatttttgatgtttctgtccctttgggaataccagtaattcataagttcaatgctgtatgcagtcctaaacacttggaaagct

SEQ ID NO: 541903 - DNA, 201 bp, Homo sapiens; identical to SEQ ID NO: 263354

SEQ ID NO: 541904 - DNA, 201 bp, Homo sapiens; identical to SEQ ID NO: 52492

SEQ ID NO: 541905 - DNA, 201 bp, Homo sapiens
aatatgaaataataaagaaattacattaatataattcattgatatgatgtacacaggatagttttattttaaatagaagcaaatataattagctaacaagkcaaaactctatactgggttttatttcacatgtaactaaaatattggtgattgtcttatttgcttagttatgagtctcaggaataattaaatggtatgaga

SEQ ID NO: 541906 - DNA, 201 bp, Homo sapiens; identical to SEQ ID NO: 263357

SEQ ID NO: 541907 - DNA, 201 bp, Homo sapiens; identical to SEQ ID NO: 52494

SEQ ID NO: 541908 - DNA, 201 bp, Homo sapiens; identical to SEQ ID NO: 263358

SEQ ID NO: 541909 - DNA, 201 bp, Homo sapiens; identical to SEQ ID NO: 263359

SEQ ID NO: 541910 - DNA, 201 bp, Homo sapiens
tgccctgtgcccactttttaatgggattatttttgttgttgttgttcagttgtttgggttttttgtacattctggatattggtcctctgtcaggtgcatartttgcaaatattttctcccattttgcaggttttctatgtactatgttgattatttcttttcctgggcaaatcttcttagtttaactaagttccatttgtc

SEQ ID NO: 541911 - DNA, 201 bp, Homo sapiens
agcatggaatgttcttccatttgtttgtatcctcttttatttcgttgagcagtggtttgtagttctccttgaagaggtccttcacatcccttgtaagttgsattcctaggtattttattctctttgaagcaattgtgaatgggagttcactcatgatttggctctctgtttgtctgttattggtgtataagaatgcttgtg

SEQ ID NO: 541912 - DNA, 201 bp, Homo sapiens
atgttggtcaggctggtctcgaactcctgaccttgtgatccgcttgcctcagcctcccaaagtgtgggcttacaggcgtgagccactgcgcccggactttyttcactttttaatagccattctgactagggtaagatgatagctcactgtggctttgatttgcatttctctgatcagtgatgttgagcatttttaaatgta

SEQ ID NO: 541913 - DNA, 201 bp, Homo sapiens; identical to SEQ ID NO: 263360

SEQ ID NO: 541914 - DNA, 201 bp, Homo sapiens; identical to SEQ ID NO: 263361

SEQ ID NO: 541915 - DNA, 201 bp, Homo sapiens
aaagctttggattattaaaggtgtgggaaagctatttacactgcttcagggataaataggagggaaggagtactcagacagagggagcgagtgattatatraagaaaaatactatgatgatactaattgtgttttgtaggaatatggatgctgcctctttgtctctaaatgtgctaccctgaattacaagttacctttggc

SEQ ID NO: 541916 - DNA, 201 bp, Homo sapiens
tatgatgatactaattgtgttttgtaggaatatggatgctgcctctttgtctctaaatgtgctaccctgaattacaagttacctttggctttttgattctrcaaaatcataggagctccctgaaatctggagcatttgctcagactattgctttctgttatctaccctaggtcggaaatatttaagtgttttttcttcagt

SEQ ID NO: 541917 - DNA, 201 bp, Homo sapiens
aagtatataggcaaaatagtgttcggaagtaatttctttgtgcttggattgggtagaaatctttcagaagaaaagagttattttaaagtttttccttcttyctggattccttttgttaccagtggagggtgtccaggttcttggcgtcttgaacaaagaactggagaagacgcacaaagaaagcgaggaaagaatgaagaa

SEQ ID NO: 541918 - DNA, 201 bp, Homo sapiens
ctgcaggactgattgagctcaggagttcaagaccagcctgggcaacagggcaaaactctgtctctacaaaaaatacaaaaattagccagcgctgtggcccrcgcatgtagttctagctacttgggaggctgaggcacgaggattcttagaacccaggaggcagaggctgtagtgagctgagatcgtgccactgcactccag

SEQ ID NO: 541919 - DNA, 201 bp, Homo sapiens
gaaaacgttttatgggcttttagccagaagattttatatataaatggtagtagaggaacattgttaaattcatgaatcttggaggcaatgtaatataatcrattttggggcttttaaatcagctttgaatcctgaccccttcacttattaacttcgtgactttaggcaagttacttgactcctctgggccttaacttccta

SEQ ID NO: 541920 - DNA, 201 bp, Homo sapiens
ggagaactgcttgaacccaggaggaggagtttgcagtgagccgagattgggccactgcactccagcctgggcaacacagtgaaactcggtctcaaaaaaaataaaaataaaataaaaaaccactctggattaatttctattttgtatttctggttaatttttcccctacctccaaataagtgggggtaattgacagttgtt

SEQ ID NO: 541921 - DNA, 201 bp, Homo sapiens; identical to SEQ ID NO: 263364

SEQ ID NO: 541922 - DNA, 201 bp, Homo sapiens
tggtcagaagtttgagaaactctgtcttcaataaagttaaatgttttaaattatggaacttttcagagtattttatatgctagtgtttgtggtatgtattygagggtgattatggcaggtaacattttccaaatgtgtttgaccttggatctgttttattatggtatatattttgggactaaagttctaaaaatatacttt

SEQ ID NO: 541923 - DNA, 201 bp, Homo sapiens
ggaacattgttaaattcatgaatcttggaggcaatgtaatataatcgattttggggcttttaaatcagctttgaatcctgaccccttcacttattaacttygtgactttaggcaagttacttgactcctctgggccttaacttcctattttgcaaaatgagaataatatgacttcctgacaagaattttgaaagaatagaa

SEQ ID NO: 541924 - DNA, 201 bp, Homo sapiens
agataaaaaggatattaaggttcctgctctggacaaagtcagtgatgtgagagaaaaaggcttgtatgcagtgcagttaattgggaaatgtgttaagcccctaaagtggtgccccaaacactagatgcttgtacatgataatgaactgtggaggtttattccaagtacaggctgagtgcagagatgcatggggttgatatt

SEQ ID NO: 541925 - DNA, 201 bp, Homo sapiens; identical to SEQ ID NO: 263365

SEQ ID NO: 541926 - DNA, 201 bp, Homo sapiens
ccatagaagttgccttgtttttcctgacactccaaaatgctcttgcctcatggcatttgcacttttcatttcctcctctagaatgcttcttccctagatakacacatggattgctgtttcccttctgttaggtctctactcaagtatcattggagagaggcctttcctgaacatacattgcaaatacttgcagtgtccctc

SEQ ID NO: 541927 - DNA, 201 bp, Homo sapiens; identical to SEQ ID NO: 263366

SEQ ID NO: 541928 - DNA, 201 bp, Homo sapiens
ttcattaatctaatggatttgaggatccacatctaaaactttaagaattaatgtacattatgtaatgtcatttgccttgcaaacagttgtttttttttttycccccctgaggtcagactaatttattgacagttttgttgtgcttgacaagtaacaggtgctaacatctttttcagtcttgtcacagggactagagggtct

SEQ ID NO: 541929 - DNA, 201 bp, Homo sapiens
tttcattaatctaatggatttgaggatccacatctaaaactttaagaattaatgtacattatgtaatgtcatttgccttgcaaacagttgtttttttttttccccccctgaggtcagactaatttattgacagttttgttgtgcttgacaagtaacaggtgctaacatctttttcagtcttgtcacagggactagagggtc

SEQ ID NO: 541930 - DNA, 201 bp, Homo sapiens; identical to SEQ ID NO: 263367

SEQ ID NO: 541931 - DNA, 201 bp, Homo sapiens
gtttaatcttgggagggtatatgtgtcgaggaatttatccatttcttttacattttctagtttatttgcatagaggtgttcgtagtattctctgatggtastttgtatttctgtgggatcggtggtgatatcccctttatcatttttgttgtgtctatttgattcttctctcttttcttctttattagtcttgctaatggt

SEQ ID NO: 541932 - DNA, 201 bp, Homo sapiens; identical to SEQ ID NO: 263368

SEQ ID NO: 541933 - DNA, 201 bp, Homo sapiens; identical to SEQ ID NO: 263369

SEQ ID NO: 541934 - DNA, 201 bp, Homo sapiens
gagagtcaacttcttcctggtttaatcttgggagggtatatgtgtcgaggaatttatccatttcttttacattttctagtttatttgcatagaggtgttcstagtattctctgatggtagtttgtatttctgtgggatcggtggtgatatcccctttatcatttttgttgtgtctatttgattcttctctcttttcttctt

SEQ ID NO: 541935 - DNA, 201 bp, Homo sapiens; identical to SEQ ID NO: 263370

SEQ ID NO: 541936 - DNA, 201 bp, Homo sapiens; identical to SEQ ID NO: 263371

SEQ ID NO: 541937 - DNA, 201 bp, Homo sapiens; identical to SEQ ID NO: 263372

SEQ ID NO: 541938 - DNA, 201 bp, Homo sapiens; identical to SEQ ID NO: 263374

SEQ ID NO: 541939 - DNA, 201 bp, Homo sapiens; identical to SEQ ID NO: 52486

SEQ ID NO: 541940 - DNA, 201 bp, Homo sapiens; identical to SEQ ID NO: 52487

SEQ ID NO: 541941 - DNA, 201 bp, Homo sapiens; identical to SEQ ID NO: 263378

SEQ ID NO: 541942 - DNA, 201 bp, Homo sapiens; identical to SEQ ID NO: 52488

SEQ ID NO: 541943 - DNA, 201 bp, Homo sapiens; identical to SEQ ID NO: 263380

SEQ ID NO: 541944 - DNA, 201 bp, Homo sapiens; identical to SEQ ID NO: 263382

SEQ ID NO: 541945 - DNA, 201 bp, Homo sapiens; identical to SEQ ID NO: 263383

SEQ ID NO: 541946 - DNA, 201 bp, Homo sapiens; identical to SEQ ID NO: 263381

SEQ ID NO: 541947 - DNA, 201 bp, Homo sapiens; identical to SEQ ID NO: 263385

SEQ ID NO: 541948 - DNA, 201 bp, Homo sapiens; identical to SEQ ID NO: 263386

SEQ ID NO: 541949 - DNA, 201 bp, Homo sapiens; identical to SEQ ID NO: 263387

SEQ ID NO: 541950 - DNA, 201 bp, Homo sapiens; identical to SEQ ID NO: 263384

SEQ ID NO: 541951 - DNA, 201 bp, Homo sapiens; identical to SEQ ID NO: 263389

SEQ ID NO: 541952 - DNA, 201 bp, Homo sapiens; identical to SEQ ID NO: 263390

SEQ ID NO: 541953 - DNA, 201 bp, Homo sapiens; identical to SEQ ID NO: 263391

SEQ ID NO: 541954 - DNA, 201 bp, Homo sapiens; identical to SEQ ID NO: 263388

SEQ ID NO: 541955 - DNA, 201 bp, Homo sapiens; identical to SEQ ID NO: 263393

SEQ ID NO: 541956 - DNA, 201 bp, Homo sapiens; identical to SEQ ID NO: 263394

SEQ ID NO: 541957 - DNA, 201 bp, Homo sapiens; identical to SEQ ID NO: 263392

SEQ ID NO: 541958 - DNA, 201 bp, Homo sapiens; identical to SEQ ID NO: 263396

SEQ ID NO: 541959 - DNA, 201 bp, Homo sapiens; identical to SEQ ID NO: 263395

SEQ ID NO: 541960 - DNA, 201 bp, Homo sapiens; identical to SEQ ID NO: 263398

SEQ ID NO: 541961 - DNA, 201 bp, Homo sapiens; identical to SEQ ID NO: 263397

SEQ ID NO: 541962 - DNA, 201 bp, Homo sapiens
agggttttttgtgtctgtatttccttcagttctgctctgattttagttatttcttgccttctgctagctttggaatatgtttgctcttgcttttctagttsttttaattgtgatgttagggtgtcagtttttgatctttcctgctttctcttgtgggtatttagtgctataaatttccctctacacactgctttgaatgtg

SEQ ID NO: 541963 - DNA, 201 bp, Homo sapiens; identical to SEQ ID NO: 263400

SEQ ID NO: 541964 - DNA, 201 bp, Homo sapiens
ttgttctacatcatgtctagaactgctagtaacagtctttttagttttagctattttggtgggtgtctagtggtattttattgtggttttaatagtctcarttgctaagatggctttcctttactttttttttttttttagtcaaccatttgaatatctacttttgtgaaagggaaggggaggtgtgcctccaaagtctgt

SEQ ID NO: 541965 - DNA, 201 bp, Homo sapiens
tgagtactatgttaaatccacagaaatgatgtgttgtcattgtattagttattataaataatctagagatgatttaaagtataaaggaggatatgtgtagrttatatttaaatactgtgtcattttatatgagggacttgagtatctgcagttttgggtgtctgtagggggtcctggaaccagccctcgctagatactgag

SEQ ID NO: 541966 - DNA, 201 bp, Homo sapiens
tatttaaatactgtgtcattttatatgagggacttgagtatctgcagttttgggtgtctgtagggggtcctggaaccagccctcgctagatactgaggaawgactgtgattctgaattcaaagagggtaagatcaatgaaataatgttaaaaaatcaaaaggtgtttatttttattccattttaaaaacttcttttttaag

SEQ ID NO: 541967 - DNA, 201 bp, Homo sapiens
atctgacaattatgtgacttggagttgctcttctctaggagtatctttgtggcgttctctgtattacctgaatttgaatgttggtctgccttgctagcttkgggaagttctcctggataatatcctacagagtgttttccaacttggttccattctccctgtcactttcaggtgcaccaatcagatatagatttggtcttt

SEQ ID NO: 541968 - DNA, 201 bp, Homo sapiens
gctcttctctaggagtatctttgtggcgttctctgtattacctgaatttgaatgttggtctgccttgctagctttgggaagttctcctggataatatcctrcagagtgttttccaacttggttccattctccctgtcactttcaggtgcaccaatcagatatagatttggtcttttcacatagtcccatattttttgaagg

SEQ ID NO: 541969 - DNA, 201 bp, Homo sapiens; identical to SEQ ID NO: 263402

SEQ ID NO: 541970 - DNA, 201 bp, Homo sapiens; identical to SEQ ID NO: 263403

SEQ ID NO: 541971 - DNA, 201 bp, Homo sapiens; identical to SEQ ID NO: 263404

SEQ ID NO: 541972 - DNA, 201 bp, Homo sapiens; identical to SEQ ID NO: 263405

SEQ ID NO: 541973 - DNA, 201 bp, Homo sapiens; identical to SEQ ID NO: 263406

SEQ ID NO: 541974 - DNA, 201 bp, Homo sapiens
atttgttgaatgacatttcagtgtcctcaaacttgtgctattatcttcatatattcttggtatgcagaggtgacaaacaatttgaaaaaaaaatacattgrtgattcccctcacttccctccaacttgaatatgaaggccagtcttatgatttggtactttggtcaagtctgtgggtcaagggatataattaagttccttg

SEQ ID NO: 541975 - DNA, 201 bp, Homo sapiens; identical to SEQ ID NO: 263407

SEQ ID NO: 541976 - DNA, 201 bp, Homo sapiens; identical to SEQ ID NO: 263408

SEQ ID NO: 541977 - DNA, 201 bp, Homo sapiens
ggcatgagaatgatataatggactttggggatttgtggggcaaggttgggaggaagatgagggataaaagactacacattgggtacagtgtacactgcttsggtgacggttgcactaaaatctcagaaatcactgctacagaacttacccatgtaagcaaataccacctgtaccccaaaaactattgaaataaaattaaaa

SEQ ID NO: 541978 - DNA, 201 bp, Homo sapiens; identical to SEQ ID NO: 263409

SEQ ID NO: 541979 - DNA, 201 bp, Homo sapiens; identical to SEQ ID NO: 263411

SEQ ID NO: 541980 - DNA, 201 bp, Homo sapiens; identical to SEQ ID NO: 263414

SEQ ID NO: 541981 - DNA, 201 bp, Homo sapiens; identical to SEQ ID NO: 263413

SEQ ID NO: 541982 - DNA, 201 bp, Homo sapiens; identical to SEQ ID NO: 263417

SEQ ID NO: 541983 - DNA, 201 bp, Homo sapiens; identical to SEQ ID NO: 263416

SEQ ID NO: 541984 - DNA, 201 bp, Homo sapiens; identical to SEQ ID NO: 263415

SEQ ID NO: 541985 - DNA, 201 bp, Homo sapiens; identical to SEQ ID NO: 263418

SEQ ID NO: 541986 - DNA, 201 bp, Homo sapiens; identical to SEQ ID NO: 263419

SEQ ID NO: 541987 - DNA, 201 bp, Homo sapiens; identical to SEQ ID NO: 263420

SEQ ID NO: 541988 - DNA, 201 bp, Homo sapiens; identical to SEQ ID NO: 52485

SEQ ID NO: 541989 - DNA, 201 bp, Homo sapiens
agagtaatcagtttttgcctctgttctcccaacaattgtgtgatattaggaatatctttcttgtgtttctttttaatagtttttattttatttaaaaaaaatggaacacttcacaaatttgtgcaggggccatgctaatcttccctttgtctttccaattttagcatatatgctactgaagtaagtgagcacatggttttt

SEQ ID NO: 541990 - DNA, 201 bp, Homo sapiens; identical to SEQ ID NO: 263422

SEQ ID NO: 541991 - DNA, 201 bp, Homo sapiens; identical to SEQ ID NO: 263423

SEQ ID NO: 541992 - DNA, 201 bp, Homo sapiens; identical to SEQ ID NO: 263424

SEQ ID NO: 541993 - DNA, 201 bp, Homo sapiens
ctgccaggttttggtattaggatgatgttggcctcgtaaaatgaattaggaaggattccctctttttctgttgtttggaatagttttagaaggaatggtaycagcttctctttgtacctctggtagaatttggctgtcattctgtctagtctgggactttttttggttggtaggctattaactactgcctcagtttcagaa

SEQ ID NO: 541994 - DNA, 201 bp, Homo sapiens; identical to SEQ ID NO: 263425

SEQ ID NO: 541995 - DNA, 201 bp, Homo sapiens
ccttgcatcccagggatgaagccgacttgatcatggtggataagctatttgatgtgctgctggatttggtttgctggtattttattgaggatttttgcatygatgttcatcagggatactggcttgaaattttctttttttgttgtgtctctgccaggttttggtattaggatgatgttggcctcgtaaaatgaattagga

SEQ ID NO: 541996 - DNA, 201 bp, Homo sapiens; identical to SEQ ID NO: 263426

SEQ ID NO: 541997 - DNA, 201 bp, Homo sapiens
agagaaacaagatcttcacctagttcttgaaacaatatcatttattttagaacaggtatttttattgcatcaaattttctagccatgatttgtttactacrtatttgtattgttatgatatctatgacattctgttttttttaattaaaaagtatgcaagatggaagctgtgaatgtattttagttaagaatttcagtgta

SEQ ID NO: 541998 - DNA, 201 bp, Homo sapiens
gatgtttttccatttgtttgtgtcgtgttcagttttctttcgtcagtattttgtagttctccttgtgaagattgtgcatcttggttaaaaaaatattcctrtgtatttggctgagcactgtgggctcatgcctgtcatttcagcactttgagaggctgaggtgggtggatcaccactcctgggtgatccccaagagtttga

SEQ ID NO: 541999 - DNA, 201 bp, Homo sapiens; identical to SEQ ID NO: 263428

SEQ ID NO: 542000 - DNA, 201 bp, Homo sapiens
cgatagtaatagttgttcctcagagttgttactggtcataatttaagggaaaatatattttgaaccataagatgcaaagattgttttttataaaaatgtamaatgttcctttttctattatttgtagagcttaaggacttgaatccagatcttctaattacaagtataagactctaagtagccagacatacccattttttt

SEQ ID NO: 542001 - DNA, 201 bp, Homo sapiens; identical to SEQ ID NO: 263429

SEQ ID NO: 542002 - DNA, 201 bp, Homo sapiens
acattgggtacagtgtacactgcttgggtgacggttgcactaaaatctcagaaatcactgctacagaacttacccatgtaagcaaataccacctgtacccyaaaaactattgaaataaaattaaaaaaaattttttttaaagatagagtattttcattaccctcaaaagtttcattttcctttgcagtcccttactgccct

SEQ ID NO: 542003 - DNA, 201 bp, Homo sapiens
aagcaacccctgctctacattctgtcactatagatggcattctctagtattttatataaatggacttacagatatactttttgtatgtgtctggcttcatwcactgattataatgattttgagactgatcattttgttacttgtattagtacttttttttttttattacagagtagtattctaccatttggatatacctca

SEQ ID NO: 542004 - DNA, 201 bp, Homo sapiens
ttaataatacttgattaccctttatctgcccctgagagggtggttcatcttacccttttttagtcaaatcacatttggtaacatgaattgaggtgggtcarctatggtggcagactcactaagagtgtcatcctcaactatcctgtattgcttgtggcatacctagacattctatggccgaaagagcttgcacgtttaaat

SEQ ID NO: 542005 - DNA, 201 bp, Homo sapiens
ttctctgctttgttcttatcttcgtcatctttaaaatggggatgtgaatgcttatctcctagggtggttgtgagaattgactaagataatggatatataawggtttagtgccggctgtataatagaagctgaataaatgtatttcttcctttttcttataagttgttggggatagagagaatttcaggtgaagttacaagt

SEQ ID NO: 542006 - DNA, 201 bp, Homo sapiens
gatttcctgaggtctgggttcgaccccttttaatcatctgaggaatttttctttcctccatcttcattatctttctccctgtagactttttactgtcaacrtttaaacatgttcaaataaatccaagcatcgaatgaaggtaacaaattaatcaacttattggttcagctgcaactctgtttctcaccccgcagtcaaact

SEQ ID NO: 542007 - DNA, 201 bp, Homo sapiens; identical to SEQ ID NO: 263432

SEQ ID NO: 542008 - DNA, 201 bp, Homo sapiens; identical to SEQ ID NO: 263433

SEQ ID NO: 542009 - DNA, 201 bp, Homo sapiens; identical to SEQ ID NO: 263434

SEQ ID NO: 542010 - DNA, 201 bp, Homo sapiens
gttattttggatattggacaattgaacaaactgggtattttagggtatttttactattactacacagtgctgattgcccaattgtgatttgtgatcacgamtttgagaggagaactgttggcaggttgtgtagttttcttcatctatttttaattgctcaggtgcacatgtggagtaggtggataattgggtttaatcatg

SEQ ID NO: 542011 - DNA, 201 bp, Homo sapiens; identical to SEQ ID NO: 263435

SEQ ID NO: 542012 - DNA, 201 bp, Homo sapiens
attatccaaaattagtgaatgtgtatgcgtttttctgagacaagtttctatacttttcattcagttatcaaatagtctgtgacccaaaatatttaagtggygactctaatttgtcttttcttctagccacatggctaaggagttttgtgaatgagtaacacagtcttgattaacatgaggtttgcaggctagcctttgtgt

SEQ ID NO: 542013 - DNA, 201 bp, Homo sapiens; identical to SEQ ID NO: 263436

SEQ ID NO: 542014 - DNA, 201 bp, Homo sapiens
tgaatgtgtatgcgtttttctgagacaagtttctatacttttcattcagttatcaaatagtctgtgacccaaaatatttaagtggtgactctaatttgtcytttcttctagccacatggctaaggagttttgtgaatgagtaacacagtcttgattaacatgaggtttgcaggctagcctttgtgtacctatctctagtta

SEQ ID NO: 542015 - DNA, 201 bp, Homo sapiens; identical to SEQ ID NO: 263437

SEQ ID NO: 542016 - DNA, 201 bp, Homo sapiens; identical to SEQ ID NO: 263438

SEQ ID NO: 542017 - DNA, 201 bp, Homo sapiens; identical to SEQ ID NO: 263439

SEQ ID NO: 542018 - DNA, 201 bp, Homo sapiens; identical to SEQ ID NO: 263440

SEQ ID NO: 542019 - DNA, 201 bp, Homo sapiens
caatgcctagtttattgagagttttttttagcacaaagggctgttgaattttatcaaaggtcttttctgcatctgttgagataatcttgttgttttttcaytggttctgtttatgtgatggattacttttattgacttgcatatcttgaaccagccttgcatcccagggatgaagccgacttgatcatggtggataagcta

SEQ ID NO: 542020 - DNA, 201 bp, Homo sapiens
agatcttagtcatgaattctttgcttagaacaaggtccaaaagagttttcgctaggtttcttctagtattttaaatttcaagtattccattgaagtctctyaattcatcttgagattttttttatatgatcagagacaggggtctagtctcattcttctgcttttggcaatgcagttttctcagcaccatttattgaaaac

SEQ ID NO: 542021 - DNA, 201 bp, Homo sapiens
gtgggcaaggcagttggctggctaggcttggctgatccaaggctgacttgctcatgtttcagcagtttgccgggtctagtttgggatgattttaatcagtrggatgagtggactttatgtcggttatcatttagcaggttaccctgggctgttcacttggttcagagacagcagaaaagatgtaggataggtctttggaga

SEQ ID NO: 542022 - DNA, 201 bp, Homo sapiens; identical to SEQ ID NO: 263441

SEQ ID NO: 542023 - DNA, 201 bp, Homo sapiens
ttattatatttggatcttctttcctctggttagtcttgctagcacttgatcaattttgcttatctttttaaagaacgagctttttgtttcattaatttttwaatttttttttggtctctgttttatttagttttgctctgatccatgttacttctttacttctgctaattttgtgtttggttcgttcttgcttttctagtt

SEQ ID NO: 542024 - DNA, 201 bp, Homo sapiens; identical to SEQ ID NO: 263442

SEQ ID NO: 542025 - DNA, 201 bp, Homo sapiens; identical to SEQ ID NO: 263443

SEQ ID NO: 542026 - DNA, 201 bp, Homo sapiens; identical to SEQ ID NO: 263444

SEQ ID NO: 542027 - DNA, 201 bp, Homo sapiens; identical to SEQ ID NO: 263445

SEQ ID NO: 542028 - DNA, 201 bp, Homo sapiens; identical to SEQ ID NO: 263446

SEQ ID NO: 542029 - DNA, 201 bp, Homo sapiens
gatgagccccttagcacagggctctgatgcttgtaattatgacctgcgtcaccacaagatatttgtttaatctaatttattttgtttacaaaggtctagaratgagcatcatatgttttataaatttacatgcacatcagtttcttttcaccatgtatttttctttaaagttctcatctcatatacgaataaatgaatctt

SEQ ID NO: 542030 - DNA, 201 bp, Homo sapiens
tttctctgctttgttcttatcttcgtcatctttaaaatggggatgtgaatgcttatctcctagggtggttgtgagaattgactaagataatggatatatamtggtttagtgccggctgtataatagaagctgaataaatgtatttcttcctttttcttataagttgttggggatagagagaatttcaggtgaagttacaag

SEQ ID NO: 542031 - DNA, 201 bp, Homo sapiens
cagtttcttttcaccatgtatttttctttaaagttctcatctcatatacgaataaatgaatcttctgtcaagtatgaattttgaatgcctgaatatgtgcyaatataatagattgctatttgtattataggctgagagcagtttcagtgaagaagaggaagaaaaacttcaagcggcattttctctagagaaacaagatct

SEQ ID NO: 542032 - DNA, 201 bp, Homo sapiens
aaacttctttatttttaaagcctgtataattttcttggtcatcagaaccttggcatataaaaatttcagaaatctcatggctttaattaaggcaacatgcrttctctgtaatgaaagtaggaagaggatgtaggagaatgtttcaggttctgttttctgcctctctgttacgggaagcagtgtgattcagtacaattgttc

SEQ ID NO: 542033 - DNA, 201 bp, Homo sapiens
gctcaaattcatttgttaatgaatttgttcctgcatttggcaatgagctaaatccattgtattctgaccttctcatagtaacttagcatcctaatatcagrtgctgtattaaaatgtgaagaagacaagatgctctttttaattaaatgtgattgataaagctagaaagacaggaatgcaactgaagttggatgagtctct

SEQ ID NO: 542034 - DNA, 201 bp, Homo sapiens
gctaatataatagattgctatttgtattataggctgagagcagtttcagtgaagaagaggaagaaaaacttcaagcggcattttctctagagaaacaagakcttcacctagttcttgaaacaatatcatttattttagaacaggtatttttattgcatcaaattttctagccatgatttgtttactacatatttgtattgt

SEQ ID NO: 542035 - DNA, 201 bp, Homo sapiens
cactctggattaatttctattttgtatttctggttaatttttcccctacctccaaataagtgggggtaattgacagttgttcacacaaaggttaggtaatwctataattaatttttcattggtttagagaagtcttctcagtgagcatgcctttgttgtcaactgttcatgccattactgctaatgaaataaaaatgttaa

SEQ ID NO: 542036 - DNA, 201 bp, Homo sapiens
tgatccacccccctcagcctcccaaagtgctgggattacaggcgtgagccaccgcgcccggcctacaattttttttataccacaggattttactttattawtaatttcagaacaacttgaacgtgattattaaagatcaaagcattgctatgaaatactttttgttactgcggcatatagggaaatatatctttcagatat

SEQ ID NO: 542037 - DNA, 201 bp, Homo sapiens
tattcttattttattgataaatggagacacggaagcacagagaagttaaataatattcccatgttatacagatagtaaacagtagacctaggatttgaatmcaggcaattttatttgagttccagtttatcagtaggatgctgtatcaccttgttaatttaataacttagcagttgaaattgtaatatgtgtatatgtttc

SEQ ID NO: 542038 - DNA, 201 bp, Homo sapiens
atttgaatccaggcaattttatttgagttccagtttatcagtaggatgctgtatcaccttgttaatttaataacttagcagttgaaattgtaatatgtgtwtatgtttcaaggtgttgaaagctgttgtaaaatgtaaggttgttcataggattatcgttacatggactctagatttaatttttctttcccctttatttga

SEQ ID NO: 542039 - DNA, 201 bp, Homo sapiens
gcaattttatttgagttccagtttatcagtaggatgctgtatcaccttgttaatttaataacttagcagttgaaattgtaatatgtgtatatgtttcaagktgttgaaagctgttgtaaaatgtaaggttgttcataggattatcgttacatggactctagatttaatttttctttcccctttatttgactaagttgaaac

SEQ ID NO: 542040 - DNA, 201 bp, Homo sapiens
aataactgcatcagttaaaaagaaaagatgtcctcagatctatttaggatagatttctcagagaaaaatatgtatgctattcaaatcatgaattcttgttrtagaaatttaaatcttttcatcttaaaggtggtgttagtattgactgatttggaatgaccttcacattttttagctacttatgtgagttcgtctgcattt

SEQ ID NO: 542041 - DNA, 201 bp, Homo sapiens
tgttgcaaatggcactatatcctttttcaaggctgactcatactccttgtgtgtgtgtgtgtgtgtgtgtgtatgtgtctgtctgtatatatgtctatgcrtatatatatgtacacatatggacacatacacataccacaatttatccattgatagatagttacgttgtttccatatcttggctgttatgaataatgctgc

SEQ ID NO: 542042 - DNA, 201 bp, Homo sapiens
taagaatttttttacttatatagacatccataattatatgaatgatgagaaaacaccattaagaagtaaaactaacttaaaaacaataataattctaagayagtaattagatactgttctaaacttaaccattgtagttttcatgactcaaaatcctagcagccttttgagtcttttgaaatgtagtagtttgtgagtctt

SEQ ID NO: 542043 - DNA, 201 bp, Homo sapiens
ctttctgtccatataaatgaaatgacaccacctgtttctaaaaggggctttgagctggctttctggaaattagcacaggtctgtgcaacatcaccccacawcccaccagtcttctttctagaagcagcatgcagctgtgagccgccaaacagcatggccagctctagaggagaattaattaattaattaatttttgagaca

SEQ ID NO: 542044 - DNA, 201 bp, Homo sapiens
aacagaagaaattatttttcttgattaagcacccacatttctcttgggagggaacaaaacaaacaattaatctttccttatttgttctcagaagtccctgmctctttaaactcaggctatccaggtacctgtggcagccagtcggcagcaattaggcctgagtggaaaatgaatgcactccaggctgagggcctaatctgc

SEQ ID NO: 542045 - DNA, 201 bp, Homo sapiens
ccttaaaaactatgaaaggaaatgccatacgttgttctaagaaattatctgtagccttcataaagagttttcagcttagcacaaaaaaagtcttatagaaytaccataaaatctacaaatctataggtcactgtctacaaaaactaaatttacaaaacaaaagcttctaaagtttttttcattttcatattttgtgaatac

SEQ ID NO: 542046 - DNA, 201 bp, Homo sapiens
gctgaataatactaacaagaaaaagatttccccaacctatattttacctttagaaagtgctctgtttaaaaaaaaaaaaaaagtactgttaaactaaaatgaagtgatttactgaaacttagcatttgtagctcaataaatttattaagcatttatttactgaggagtatttaatttaaaaggtttctttttatttttact

SEQ ID NO: 542047 - DNA, 201 bp, Homo sapiens
atcccataataatagacatttttaaaaacatccatgttcaaattattctctccaagatttgttttctttcaaaagtcacctactttcccacttggtgtccsaagggcctttactctgaagggtcagattaagggagggctgcagagaactttcaggaggacttgcagaagcgacagcgcaggtgctactgccattcacgtg

SEQ ID NO: 542048 - DNA, 201 bp, Homo sapiens
gaataatactaacaagaaaaagatttccccaacctatattttacctttagaaagtgctctgtttaaaaaaaaaaaaaaagtactgttaaactaaaatgaagtgatttactgaaacttagcatttgtagctcaataaatttattaagcatttatttactgaggagtatttaatttaaaaggtttctttttatttttacttgg

SEQ ID NO: 542049 - DNA, 201 bp, Homo sapiens
taagtgaaatacatatcatttaaaggtgatatgtcatatttaaagtatataccatattttgagatcaatggaaagcatgtaaatcactgggaaaaataaartgtatttgaaattaagtagtacaattctccatggttataatgcaagccttaaaaatatgaaaagaaatatcatgcattgttctaagaaattatttgtagc

SEQ ID NO: 542050 - DNA, 201 bp, Homo sapiens
atgaagtaataaacaaattttattttattgtatctattactggtacaaaaaaccctgctgttcttattctaatatgagtagtgataatattttaatttgtragtactgtgaatagatatgctctattaggttgcaacacagtgattgctgttgcttgtgttcaacagtgactgaaaattcagcttatctcatcaatacctg

SEQ ID NO: 542051 - DNA, 201 bp, Homo sapiens
tagaaaagagagtgtactgttttcctttaaagaaataatacgtatagatggtttcagaaatttaaaacactgctctgcactaaaaattattttaagtgaartacatatcatttaaaggtgatatgtcatatttaaagtatataccatattttgagatcaatggaaagcatgtaaatcactgggaaaaataaaatgtatttg

SEQ ID NO: 542052 - DNA, 201 bp, Homo sapiens
cctgatttgacaattttaccgtgattatgttaagagattttttgtccttaggaataatgaaaaaatgaagggagaagaggtataatgtatatatatacacatatatatatatacacatacatatatatatacatatatatacacatacatatacatatatatacacatatatatatacacatatatatacatatgtatgtg

SEQ ID NO: 542053 - DNA, 201 bp, Homo sapiens
atcaagatactactgtgccaactagataccgtataaaacacatacaaaaagatattttaaaataatatgaagatgaagtaataaacaaattttattttatygtatctattactggtacaaaaaaccctgctgttcttattctaatatgagtagtgataatattttaatttgtgagtactgtgaatagatatgctctattag

SEQ ID NO: 542054 - DNA, 201 bp, Homo sapiens
gcacactgtactgagtagagtggtgaaatcttacactgtcccacggtgtcttgcccggtcccagccagcacacgagccctccctttttctggcagctttaygatgtctgcacccccacccattagtcacttaactagctgtaggagctcagttatcagatcgactgttgcagtattgcagtgcttgtgttcaaggaattct

SEQ ID NO: 542055 - DNA, 201 bp, Homo sapiens
ctgatttgacaattttaccgtgattatgttaagagattttttgtccttaggaataatgaaaaaatgaagggagaagaggtataatgtatatatatacacatatatatatatacacatacatatatatatacatatatatacacatacatatacatatatatacacatatatatatacacatatatatacatatgtatgtgt

SEQ ID NO: 542056 - DNA, 201 bp, Homo sapiens
ctcccaggttcaagcgattctcctgcctcagcctcctgagtagctgggactacaggcgtgtaccaccaggtctggctaattaatgtatttttagcagagasgaggtttcactatgttggccaggctgatctcaaactcctgacttcaagtgatccgcccaccttggcctcccaaggtgctgggattacaggcatgagccac

SEQ ID NO: 542057 - DNA, 201 bp, Homo sapiens
aagggagaagaggtataatgtatatatatacacatatatatatatacacatacatatatatatacatatatatacacatacatatacatatatatacacayatatatatacacatatatatacatatgtatgtgtatatatatatatgtgtatatatatatgtgtgtatatatatatacacatacacggattgagtatccc

SEQ ID NO: 542058 - DNA, 201 bp, Homo sapiens
aggatgtctgccttcctaaaatcttctctgaatggaagattgcagtactgaaagagagtagagcccacagccaccttaaaaggactaatattcacagaaayataatgccaactcagggattatgttttcatcagataaaaccatctaccttttaagagaagtctgagtgtgaagaaaaggtaatatgtggtctttctgtcc

SEQ ID NO: 542059 - DNA, 201 bp, Homo sapiens
tagaaagcttctccctcattctgttcagttgttgttccaggtcatgttttcagagaggtgttatctacccaccccatctaaaacagcaactagctcccatmattctctatccccagacctggctttacttttcttctgtgcatttaccatggtctggtgtgtgcatgcacacacacacacacaaacatacacactcacata

SEQ ID NO: 542060 - DNA, 201 bp, Homo sapiens
gtttttggcactaaaaatcataggaaatacgataacatttaatcaattttcctttttgatatgccagaggtacaaatgacacagttaccatgccataaacygcaagattcattaacaatgttggttcacattccctattataagaaatctagaactaattgctctccattaatctggctccactctttgatagcttattta

SEQ ID NO: 542061 - DNA, 201 bp, Homo sapiens
tatatatatatacacatacatatatatatacatatatatacacatacatatacatatatatacacatatatatatacacatatatatacatatgtatgtgtatatatatatatgtgtatatatatatgtgtgtatatatatatacacatacacggattgagtatcccttatccgaaatgcctgagacaaaaagggttttag

SEQ ID NO: 542062 - DNA, 201 bp, Homo sapiens
catgattgcaccactgcactccagcttgggccacaaagtaagaccttgtctcctcccacctcaaaaaaaaaaaagaaaaaagaaaagccaacgtccttatygctgcctaccagacctatgctctgccctcccaccccaccattccatctcccattatttcccccaccacactatatatgaccttatctcttatcactctct

SEQ ID NO: 542063 - DNA, 201 bp, Homo sapiens
aagataaatagcctacaaaaaacctatttagtcccaaatatgcacaaattacaatattgatatcattaatttaacccataagatttgcagtataacgcagsggttaggagttctagttcttgaatcaaactccttggatttgaatcttatgtcttccattgctctcttctgggctctgctaatactctatgatttggagca

SEQ ID NO: 542064 - DNA, 201 bp, Homo sapiens
atatatatatacacatacatatatatatacatatatatacacatacatatacatatatatacacatatatatatacacatatatatacatatgtatgtgtatatatatatatgtgtatatatatatgtgtgtatatatatatacacatacacggattgagtatcccttatccgaaatgcctgagacaaaaagggttttagt

SEQ ID NO: 542065 - DNA, 201 bp, Homo sapiens
cccaaaatccccttttcagatggtttaaaactcagcacaaattttcccacagaaacagtataaaagataaatagcctacaaaaaacctatttagtcccaamtatgcacaaattacaatattgatatcattaatttaacccataagatttgcagtataacgcagcggttaggagttctagttcttgaatcaaactccttgga

SEQ ID NO: 542066 - DNA, 201 bp, Homo sapiens
aacagttcctggcacatgattggtgatcaataaatactgaatcatgtcgctcctctgcctcctacttcccaaagtaaaagccaacatgggctgggaacagwgccactgaatcacgtcgctcctctgcctcctacttcccaaagtaaaagccaacatgggctaggtacggtgcctcatgcctgtaatcccaaaactttggga

SEQ ID NO: 542067 - DNA, 201 bp, Homo sapiens
attgcaacacagccatatggctcacatggcctaaaatatttactatcgaatctttcacagaaaaagtttgctaacttcaaccaacatggcacatgtatacytatgtatcaaacctacacgttgtgcacatgcaccctagaacttaaagtataataataaaaaaaagaaaaagtttgctaacttctgcctagtctagacatt

SEQ ID NO: 542068 - DNA, 201 bp, Homo sapiens
tctgaggcaagagaatcgcttgaaccagggaggcggaggttgcagtgagccaagattgcaccactgcactctagcctaggcaacagcgagactctgtctgaaaaaaaaaaaaaaaaaaaagaaaaagaaacaattgagggtaattattcaaggcagcaataagtagaggaaaaaaatccagaattcaaatcagactaactg

SEQ ID NO: 542069 - DNA, 201 bp, Homo sapiens
actagatctgatcacctagaaacagaagtcaaataggggcctttagatcatatcagggtgtatggttttatcatttcagcaacaagaagattttgcttcaytttaaatgcctttctcttccaaattaaacttttctaactcctatacctgtctttcagatgacatggttttcaggtcttacactataccttctagaataaa

SEQ ID NO: 542070 - DNA, 201 bp, Homo sapiens
tatttgtacggtgagttctcactatgttgcccaggctactcctcaaatccctgggctcaagggatcttcccaccttggccttccaaagtgctgggatcacrggcatgagctaccacacccagacaaatttattttgttgggggaacaggatctccatatgttgtgcagtctggtctccaactcctgggctcaagtctgctt

SEQ ID NO: 542071 - DNA, 201 bp, Homo sapiens
cgttgtctactgaggaaaactgatgtattttacagataggcttacacctgtggttttaaacaaaatagctcatatttaggcagaccgacttccaataccasatgctgctgctgagctagtatggtggtgagggctaggagataataagggtaaagcacctgcagagagtctggcccagcacaggttcttaaaagacgttta

SEQ ID NO: 542072 - DNA, 201 bp, Homo sapiens
caattcatttcacttttttaatagggccactaaaaatttttaaatctctttgtagctcacatttgtggcttgcattatatttcttttttttaatttttaattttttttttttttgagacagagtcttgctctgtctggatcacagttcattgcagccttgacctcctgggctcaaacgatcttccttcctcagcctcttga

SEQ ID NO: 542073 - DNA, 201 bp, Homo sapiens
accattgtgtgccaagagttatccagagagagaacagttagagggaaggtctgagtggcagtgggaagaggtgagtgaaagtagaaccaacaggataagcygatgactgcatgtggaaaaatgtaaaaatacataaaaatgttatgtaaaagtacataaaaataaaagggagaaagtgagagaatgaaatgcaatggtgag

SEQ ID NO: 542074 - DNA, 201 bp, Homo sapiens
gacaagaaaaagtagagaaggcaaaaccaggaaatgttttagaaagtgttagactttcttaagaccttaactccattgccacaactagaattcactctggwttcagctatgtggaagtgaggcccttcatctagcctgaaaataacccaccacttacaccccacaagcaagaggtggacacattctgaatgggaaagaact

SEQ ID NO: 542075 - DNA, 201 bp, Homo sapiens
agcattgtgggaggccagggcgggtggatcacatgaggtcaggagttcaagaccaggctggacaacatggtgaaatcccatctctactaaaaatacacaawaaaattagccagacgtggtggccggtgcctgtaaccccagctactcaggaggctgaggcaggagaatcgcttgaacttgggaggtggaagttgcagtaag

SEQ ID NO: 542076 - DNA, 201 bp, Homo sapiens
catcaatttctactgacaatgagatctaattgttcaccgataataaacaaggaaaacagagcttttctataaacttttatcctgcactatattcacatttwaaaaatttggttgcacactttccacaggtatgcatttattatttccaactgcaaataaatatcagataataaaatgtaaaaacgtttctcattttatatt

SEQ ID NO: 542077 - DNA, 201 bp, Homo sapiens
aacaaaatacctatgtaagagttggacgtgattaaatgtatgtgtgtgtgtattgatatgattctgctttcgaaagaaaattcatgatagcaaaaagaacrtcaggaagatcatggatgaaagagaataaatatccaatctacaatgagaagaatccctgatgaaagaacaaaaaaattagaacaagagcaaaaatcaaag

SEQ ID NO: 542078 - DNA, 201 bp, Homo sapiens
tccataaacagctacatttaaaggtcatttaccaccaaattatgaacaactgttgcatttattagctcaggctcaatagtttggaagctgcagtcatcaayttctactgacaatgagatctaattgttcaccgataataaacaaggaaaacagagcttttctataaacttttatcctgcactatattcacattttaaaaat

SEQ ID NO: 542079 - DNA, 201 bp, Homo sapiens
tctaaagcaaaaaaaaaagagaaaaagaaaaaagaaaagaattctctataacagattaaaagtatctaataaataattcaagtgcttgccaaatacagacrggggttctatatacaaataaagatttaagcccaaggttccaagtagtttaggtcagtgtatcgttacgctgggaatctgaaatatacatgaaggacaact

SEQ ID NO: 542080 - DNA, 201 bp, Homo sapiens
cccgaagtttttccacgtctcaggcacttcccccaactccctgcacacgtgcatgcccgcttacaagaaatgctgcatgagtctcccctctgtcctaaagmatcattcctatgattggatgattcattccacatgcacacgcgtttgtcattcttccaccactttccattttattatctccacttccgtttctctcttatt

SEQ ID NO: 542081 - DNA, 201 bp, Homo sapiens
tctcccttagggtcaggcacctgaagtggtgctaacacccgaagtttttccacgtctcaggcacttcccccaactccctgcacacgtgcatgcccgcttamaagaaatgctgcatgagtctcccctctgtcctaaagaatcattcctatgattggatgattcattccacatgcacacgcgtttgtcattcttccaccactt

SEQ ID NO: 542082 - DNA, 201 bp, Homo sapiens
  misc_feature (1)...(201): n = A,T,C or G
accagcagcaccaccacatcaacagcctttttctcaaactccctgccttctcccttagggtcaggcacctgaagtggtgctaacacccgaagtttttccangtctcaggcacttcccccaactccctgcacacgtgcatgcccgcttacaagaaatgctgcatgagtctcccctctgtcctaaagaatcattcctatgatt

SEQ ID NO: 542083 - DNA, 201 bp, Homo sapiens
caatgtgccatccaccagcagcaccaccacatcaacagcctttttctcaaactccctgccttctcccttagggtcaggcacctgaagtggtgctaacaccygaagtttttccacgtctcaggcacttcccccaactccctgcacacgtgcatgcccgcttacaagaaatgctgcatgagtctcccctctgtcctaaagaat

SEQ ID NO: 542084 - DNA, 201 bp, Homo sapiens
tctgaacctgtaacatcgaatgcaacatactgcaaacagcttgcagcctgagatttttacatgcaaatgattttaacagaaaatctacctattcagaaagmatacctttaaggaactgaataacttattccaaaaagaaatttactttatgataaaagaaaatgtatatacatacacaagaaatatcaatggtcttagaac

SEQ ID NO: 542085 - DNA, 201 bp, Homo sapiens
ggttaggaagggcttctggatcatgtgaaggatttttttcttttctctgtagacttgggagtcattgagtgatcttatgtgggtgggtggtagatggggtrtctcactgtacatgacacaatctgatttgtattttgactacaactacaacatatgtagtagtgttcatcagatccagggaccacgcattaaatcctctct

SEQ ID NO: 542086 - DNA, 201 bp, Homo sapiens
atcttaaacacctgaggaaaaaatttaaaagattaattatattagttcaaaaccctcaattgtctgatgtggtaagtttgtgaccatgatatatttcatcyctttaattacagtagctgatcccccaaaacccagaaggctcaggacaccctggcccaacagcactgattaatgagcactcgaaccaaaggctcactaaca

SEQ ID NO: 542087 - DNA, 201 bp, Homo sapiens
aagatggattaaagacttaaacgttagacctaaaaccataaaaaccctagaagaaaacctaggcattaccattcaggacataggcatgggcaaagacttcrtgtctaaaacaccaaaagcaatggcaacaaaagccaaaattgacaaatgggatctaattaaactaaagagcttctgcacagcaaaagaaactaccatcag

SEQ ID NO: 542088 - DNA, 201 bp, Homo sapiens
tacgtacctgtaagagaaacctaagatcaggagactacggtatttaatattagtgttttacaacaagcgaaccaaaacagatttaataattcaaataatayggtaaggcatttagttaaatacaaacaatagaatggaaatgctgttttactactttatagaagaaacagtaatcagaactaggcttataaaatgttccct

SEQ ID NO: 542089 - DNA, 201 bp, Homo sapiens
aactaccatcagagtgaacaggcaacctacaaaacggaagaaaattttcacaacctactcatctgacgaagggctaatatccagaatctacaatgaactcwaacaaatttacaagaaaaaaacaaacaaccccatcaaaaagtgggcaaaggatatgaacagacacatctcaaaagaagacatttatgcagccaaaagaca

SEQ ID NO: 542090 - DNA, 201 bp, Homo sapiens
cagttagaatggcaatcattaaaaagtcaggaaacaacaagtgctggagaggatgtggagaaataggaacacttttacactgttggtgggactgtaaactmgttcaaccattgtggaagtcactgtggcgattcctcagggatctagaactacaaataccatttgacccagccatcccattactgggtatatacccaaagg

SEQ ID NO: 542091 - DNA, 201 bp, Homo sapiens
cgagttaatgggtgcagcacaccagcatggcacatgtatacatatgtaactaacctgcacattgtgcacatgtaccctaaaacttaaagtataataataaytaaaaaacaaaacaaaaaaaagtctgtctttcctcaggctgggccttggaggagcagtagggatgaccttaattttgaactattccctatattctaataa

SEQ ID NO: 542092 - DNA, 201 bp, Homo sapiens
aaaaaatttaaaagattaattatattagttcaaaaccctcaattgtctgatgtggtaagtttgtgaccatgatatatttcatccctttaattacagtagcygatcccccaaaacccagaaggctcaggacaccctggcccaacagcactgattaatgagcactcgaaccaaaggctcactaacaaagtgtgacatcctcca

SEQ ID NO: 542093 - DNA, 201 bp, Homo sapiens
aaaaatacaaaaattagcagggtgtggcggcacatgcctgtaatcccagctactggggaggctgagacaggagaatcccttgaactcagggggcagaggcygtggcgagccgagattgtgccattgcactccagcctgggcaacaagagtgaaactccatctcaaaaaaaaagaaaacaaaaaaaaaagactaggtattcc

SEQ ID NO: 542094 - DNA, 201 bp, Homo sapiens
ctcaattgtctgatgtggtaagtttgtgaccatgatatatttcatccctttaattacagtagctgatcccccaaaacccagaaggctcaggacaccctggmccaacagcactgattaatgagcactcgaaccaaaggctcactaacaaagtgtgacatcctccaaaaacctgtctaaaaacaagggaaacttaaatgcata

SEQ ID NO: 542095 - DNA, 201 bp, Homo sapiens
ttagccagatgtagtggcacatgcctgtagtcccagtgactagggaggctgaggtgggaggatcctctgagcctggggaggtcaaggctgcagtgagccaygatcgtgccactgcactccagcctgggtgacagactaagacgctgtatcaaaaaaaaacaaacaaaaaaacgtacaaaggagagtacaaccacctctgtc

SEQ ID NO: 542096 - DNA, 201 bp, Homo sapiens
tgaggtgggaggatcctctgagcctggggaggtcaaggctgcagtgagccacgatcgtgccactgcactccagcctgggtgacagactaagacgctgtatmaaaaaaaaacaaacaaaaaaacgtacaaaggagagtacaaccacctctgtctgggacatttaggcaatgattcacagaaatgcatgtttctgagtggggt

SEQ ID NO: 542097 - DNA, 201 bp, Homo sapiens
gcaatattttgctttttttttttttttgagatggagttttgctcttgtcacccaggctggagtgcaatagcacaatcttggctcactgccacctccacctytcaggttcaagcgattctactacctcaacctcctgagtagctgggattacaggcgtgcaccaccacacccagctaatttttgtatttttaatagagacgg

SEQ ID NO: 542098 - DNA, 201 bp, Homo sapiens
atctctacaaaaaatacaaaaatcagccaggcatggtggtgtgtgcctgtagtcccagctatttgggaggctaagatgggaggacagatggagcctgcgarttcgaggattcagtgagctgtaattgtgccactgcactctaacctgggcaacagaaactaacctgtctcaaaaaataaataaaaataaaaatattcaaca

SEQ ID NO: 542099 - DNA, 201 bp, Homo sapiens
tgggcatggtaacaggtgcttgtaatcccagatactccagaggctgaagcaggagaatcacttgaatccgggaggcagaggttgcagtgagccaagatcaygccattgcactccagcctgggcaacaagagcgaaactccatctcaaagaaaaaatacagtgactgaaatcaagaactctggttcagttaaacaaccaatt

SEQ ID NO: 542100 - DNA, 201 bp, Homo sapiens
atatattacatttaccctgtagattacacagaatacattctcattgaattaaatcaaaacagtaacatcaacaggcttgaatgttactgattcaaggcagyagttcccaaagcctgagaaaaagtaattttggtttatatgccttttagaatttcaaagacaaatattggatgagatcactgacatgggcctttggacagc

SEQ ID NO: 542101 - DNA, 201 bp, Homo sapiens
ggtgtatgagagataaaaaaagaaatgtcaatttatttgtgtatcagttacatgaaaggcactctggaacaagagatgttacgatttcatcctgaatcctscaagggtcgggaaatagcaaaaatggaatactagccacaattccctctcagaacaccaccatcctctgtggaaaaagtaaagttttttttttgaaaacca

SEQ ID NO: 542102 - DNA, 201 bp, Homo sapiens
acaataattaattttatgtgtctacttgactgagccattgggtgcccagatattcagtcaaacattctgggtgtttctgtaagagtgtttttggatgagaygcagatttaatcctataggctgagtgaagaacattatgattcataatgtgagtggacctctttgaatctcggaggcaacatattcctcatttgggtgtgt

SEQ ID NO: 542103 - DNA, 201 bp, Homo sapiens
ttttattattcttttaaatttaatgtcagtttttattctactaaaggactttgctgaaagcaaagtaaattctttgagccacctacaaagcaaagcaaacscctccccctttagtaactgtatcactgtacatatttctttcaaacacacatattacattgtaataatctgtttaggtatctaaaaggccaacctaaattc

SEQ ID NO: 542104 - DNA, 201 bp, Homo sapiens
gagcaccatggttttagcagacaacgacgtgcaccagaagcccaaaccctcctttgctggtgttccaatgtgccatccaccagcagcaccaccacatcaayagcctttttctcaaactccctgccttctcccttagggtcaggcacctgaagtggtgctaacacccgaagtttttccacgtctcaggcacttcccccaact

SEQ ID NO: 542105 - DNA, 201 bp, Homo sapiens; identical to SEQ ID NO: 365642

SEQ ID NO: 542106 - DNA, 201 bp, Homo sapiens
tgtattatccattatagataatacaagaaaatctatggacagacttaatttttattattcttttaaatttaatgtcagtttttattctactaaaggacttygctgaaagcaaagtaaattctttgagccacctacaaagcaaagcaaacccctccccctttagtaactgtatcactgtacatatttctttcaaacacacat

SEQ ID NO: 542107 - DNA, 201 bp, Homo sapiens
gcaatgcttctgccaagactaccatccatggactcacagaatgccttatccacagtcatggtatttcacacagcactgcctctgatcaaggcactcacttyacagctaaagaagtgcagcagtcagctcatgctcctgaaattcactggtcttacaattttctccatcatcctgaagcagctggattgaccgaacgatgta

SEQ ID NO: 542108 - DNA, 201 bp, Homo sapiens
atcaacacagatctctctgactctaaagcctgtgctctaagcctgagatcctgagcttctcaaacttaaatgtgcgtatgaatcccctggtccgattttgyaggtctgggatagggcctgacaatctgcatttctaacacactctcaccaatgctgctgatccataccacattttgaacagtaagggaccaaataaaccat

SEQ ID NO: 542109 - DNA, 201 bp, Homo sapiens
aatatccaatgcctacacaatatttaatgtattatccattatagataatacaagaaaatctatggacagacttaatttttattattcttttaaatttaatrtcagtttttattctactaaaggactttgctgaaagcaaagtaaattctttgagccacctacaaagcaaagcaaacccctccccctttagtaactgtatca

SEQ ID NO: 542110 - DNA, 201 bp, Homo sapiens
tggtgagcagagatcgtggaaaaaaaaaaaagaaaaaaagagttgaatgtgttgcctctggaatttcagactggctgtgggtggacaaggactgttttcaytcctattgaaaaacaaacaaacaaacaacaaaaaaaccccacacactttaaggtgaaaaccaaggtctcttctggccaagatagagtaacaggaaggaga

SEQ ID NO: 542111 - DNA, 201 bp, Homo sapiens
ttgaataaatcaaatagtgtttgctaaatctgtttcttccgaagaaccaatggaattatcacagaaaatagtcaccaatccactcaagcaaagttctaatktaacagtcaatgatgtggcgaggagtactggctcatgcctgtaatcccaacactttgagagactaaggtgagaggattgcttgagcccaggagttcaata

SEQ ID NO: 542112 - DNA, 201 bp, Homo sapiens
actttaaaatcataatcttagaagtatacctaattcctctactctgatgtttaaacactatatattcttaacaatttaaatacttatttaagtcaaataaytgtgatgaaattaacagcaacagcatgactatagaagtgcagtagctttgagtcaaccagcagcaagggtataatttaaaggcagaaatttccagtgcat

SEQ ID NO: 542113 - DNA, 201 bp, Homo sapiens
ccactcctagatgcacttttgcggaatcagaatgtgaaccagccctttaaagctttaaaacaaagctgatgcttctcctttatgctaaatatacactctayagggcatcttttccacaacagggaagctatctaccctacaatctgcaggcttagctacaaattaaaatcacctggagagtttttaaacagtaccagagcc

SEQ ID NO: 542114 - DNA, 201 bp, Homo sapiens
aaggctgatgaggtgaaaattcacatctccaggctagacttcttgtctgggatccagactcatcaaaactaaatacctatttaacatctccacttgaattkcttacagacatctgcaattcaaaatgtccaaagcagaactcagtatttctttgaacaacaataaaaaaccctgcctctctatgacccatcactgtccact

SEQ ID NO: 542115 - DNA, 201 bp, Homo sapiens
ttttttaaatctcaagtttataatggaaatttcttaaactgtacagacaaaaaaagtagattctatgggcatgaggcaaatattgaggctgttataaataytctaaaactatattgtactgatggtcacacaactctgtaaatttcctaaaaatgatttaatggtatacttataatatgtgcattttatgctatgtaaatt

SEQ ID NO: 542116 - DNA, 201 bp, Homo sapiens
gggaggaggatgggtagagaatgtggggagagaaggagaaggggaggggaagacgaaggggaaagaggggagaagggtgagggaagggaaagggaagagtrgggagggaaggccaggcctttaatcaataagaaactacccgtcttaataattagtgctattctgagaagctacatgatatggtagaaagagcaccagtct

SEQ ID NO: 542117 - DNA, 201 bp, Homo sapiens
tccactaactgccatggattttaaaaccttaaggctgatgaggtgaaaattcacatctccaggctagacttcttgtctgggatccagactcatcaaaactmaatacctatttaacatctccacttgaatttcttacagacatctgcaattcaaaatgtccaaagcagaactcagtatttctttgaacaacaataaaaaacc

SEQ ID NO: 542118 - DNA, 201 bp, Homo sapiens
gctggagtgcaatggcgtgatctccgctcactgcaacctccgcctcccacgttcaagtgattctcctgcctcagcctcccgagtagctgggattacaggcrcatgtcaccacacccggctaattttttgtatttttagtagagacgggggtttcaccatgttagccaggctggtctcgaactcctgacctcaagtgatcca

SEQ ID NO: 542119 - DNA, 201 bp, Homo sapiens
agtcattcttccctggaaaacaaatgtgtgtgccaaaggaaatgacaaaggcacaaacagaatgaacgttacattactctcttccgcttcctgccttctawctttttctcttgactatctggaagggcaggttccaaaatccacattttaagatatagccataaccttccaaggtggtctatattccaaggacaagccacc

SEQ ID NO: 542120 - DNA, 201 bp, Homo sapiens
cacttgaggtcaggagtttgagaccagcctggccaacatggcgaaaccctgtttctattaaaaatacaaaaattagcagggcatggtggcaggtgcctgtratcccagccacttgggaggctgaggcaggagaatcacttgaacccatgaggtggaggttacagtgagctgagattgtgccactgcactccagcctgggtg

SEQ ID NO: 542121 - DNA, 201 bp, Homo sapiens
ataacaagatttgacttgtttacttctaaactgtttataccactctcatttcaacatgttcttttccataatagcgtgcttctgaaatggccaacgggtcyctaagaatacacgtgccaatttggtacaatggtcctaagcagaaatgttcgtacaaatgcattttgttttccacaatggaggcatttttctgaccagctg

SEQ ID NO: 542122 - DNA, 201 bp, Homo sapiens
tccttgactttctcaaatattcatttctttagttattttgctcttctttctcctagttattcactagtcccatccatccctccatccatccatccatccayccacccacccacccacccatgcatttacctatctgtctcttcacctttccatctctgctgaatcattcctatcagcacataaacatgcactctcactata

SEQ ID NO: 542123 - DNA, 201 bp, Homo sapiens
atctgaacctgaacgaacactgataggagtcaaaattctacttctgcttagagcaaagcactgaacagtgaatgggtctcggtgggaactggccccattcyaccgccagctagagctgtatactgtgatacagtcggccctcagtatctgtgggttctgcatccacagattcaaccgactgtgaatagaaaacaaaaggga

SEQ ID NO: 542124 - DNA, 201 bp, Homo sapiens
aaaattaatacagaaaaggcttctattatctaccagtcattcttccctggaaaacaaatgtgtgtgccaaaggaaatgacaaaggcacaaacagaatgaaygttacattactctcttccgcttcctgccttctatctttttctcttgactatctggaagggcaggttccaaaatccacattttaagatatagccataacct

SEQ ID NO: 542125 - DNA, 201 bp, Homo sapiens
tgcactccccctcacctaccactaaactcctggcactttggagtacaaccacttgctctgaaccctgtccctgtcctctagcacaggggccctcaaccccygggccgcggggaaacggtctgtggcctgttaggaaccagccacacagcaggtcggatcagcgggggcattagattctcataggagcatgaaccctactgt

SEQ ID NO: 542126 - DNA, 201 bp, Homo sapiens
tgtgcctcacactccacacctctgtgccttcacccagccctcatctactgccacctcttacagctcctgcctggcacttctgcctgactgtccctgccagycctctcttcaggccctaccaaggacccagcatgcaaacatgctcacagcaaatcacataaactctgagctaaatttccaattaaacagactgcctgcctc

SEQ ID NO: 542127 - DNA, 201 bp, Homo sapiens
aacaacttgttctgtgctgggcagctgccacagtagctttctcaatatctactgaacattggcatctttctcctaatttgttgacagcatgccctatattstgataactacaaaatttcatttcataaaaaatgctttttatatcagttttcattttagattacccataggtcccatttttttccagtagcacaaataatt

SEQ ID NO: 542128 - DNA, 201 bp, Homo sapiens
ttacagttgaaaaaacacacaatatgcctaatactatcaagactttcttctaaattctgggaaaacatcttggaaaggaagttgttcatcaggattttcaygacaaagtgaagaaagaaatggagtcaatttaataaatccggccaggcgcaatggctcacgcctgtaatcccagcactttgcgaggccgaggcaggtgga

SEQ ID NO: 542129 - DNA, 201 bp, Homo sapiens
agatcacgccattgcactccagcctgggcaacaagagcgaaactccatctcaaagaaaaaatacagtgactgaaatcaagaactctggttcagttaaacamccaattagacaaagctgaagagaaaactggtgaagtggaagaggaatcttataaaattacccagaacatagcaagagagataagggcataaaaaatatga

SEQ ID NO: 542130 - DNA, 201 bp, Homo sapiens
tagaaatccagaaacataaaatctgtttgcatttttgtgcttctttgaatcagaaacaaaatcttctgctgcatgactgagtttaagaaacctctttttastaagtggtaaatttttaacaatttaatcaatattttatattttgtttttcaagaaatacccctgaataaatactttcctttggtgaactattagaaatat

SEQ ID NO: 542131 - DNA, 201 bp, Homo sapiens
gggaaataataaagcaaaagtggaaagatgttaaaaattgaggaatgctgagaattctttgtattagttttgcaactttctggtacacttaaaattatttmaaaataaagttatttaaaaagttgtcctggccaggcacggtagctcaatgcgtgttatccagaactttgggaggccaaggcgggcagatcaattgagatc

SEQ ID NO: 542132 - DNA, 201 bp, Homo sapiens
gagaaatattgtgaaatgctcatgaaaatacaattttaaggtcggatggggagggatggttagcaggatctaaagaggagctctgtcattccaaaagtttrtatttgacttgtgttttgctaagtgagagtttataaacactaagatgaaggaatattgtttaattacttaataagcctaattttctatttcaatcgccct

SEQ ID NO: 542133 - DNA, 201 bp, Homo sapiens
gcagccccactgacactgcttgagtaatgtcagtgacagggcattctctcatctccacccctcccctgaaagcaactcatacattctccctaccagaatgygccctcctctccccagtgcccatcaaaagtctaagggttaactttgacagcttcaacaatggcagatgcccaccctccaggaggacaaagaacaaaggta

SEQ ID NO: 542134 - DNA, 201 bp, Homo sapiens
cagcactttgtgaggccgaggtgggtggatcacttgagaccaggagttcaagagcctccagcctggccagcatggtgaaaccccacctttactaaaaatamaaaaattagccagaggtggtggcgcattccacccaactattcgggagtctgaggcaagagaatcgcttgaaccagggaggcggaggttgcagtgagccaa

SEQ ID NO: 542135 - DNA, 201 bp, Homo sapiens
tgtggccagctcaaaaacctactgcctacccatattcatctaagaaaatcacttgaagaaaagcaatggggccaggcgctgtgactcatgcctgtaatccyagcactttgggaggccaaggcaggtggatcacttgaggtcaggagtttgagaccagcctggccaacatggcaaaaccccgtctctactaaaaatacaaaa

SEQ ID NO: 542136 - DNA, 201 bp, Homo sapiens
ggtggcggacacctgtaatcccagctgtagctacagttgctggaattataggcgcccgccaccatgcagggctaataaggccacttgggcggctgaggcargagaatcgcttgaacctgagagcagaggttgcagtgagccaagactgcaccattgcactccagcctgggcgctaagagcaagactgtgtctcaaaaaaat

SEQ ID NO: 542137 - DNA, 201 bp, Homo sapiens
aaaatacacaaaaaaattagccagacgtggtggccggtgcctgtaaccccagctactcaggaggctgaggcaggagaatcgcttgaacttgggaggtggargttgcagtaagccgagattgcgccattgcactccagcctgggtgacaagagtgaaactccatctcaaaaaaaaaaaaaaaaaaaaaagattccctttgaa

SEQ ID NO: 542138 - DNA, 201 bp, Homo sapiens
tgctggttcttagaattttggagcaaagccctgcctacctctatgaataaccactctacttttgagaaacagcgcttaccctgctactgggtcttagtagwgactgaatgcttaaccatgggccaccaagttaccatgtgacctaagctggccatcatgaacagtgtgttatctgacccatcaagctataaagttgggcat

SEQ ID NO: 542139 - DNA, 201 bp, Homo sapiens
gaataaaatgactccttctgtgcctacaagtcagcctctttccccagtcaccactgtcatcacacaaatgggctcataaagtagccatggtggcaggaatrgaggttatgcacaggctcagaaatatggacttccactcaccaaagccaacctggctacagccactgcagagcacccaatctgccaggagcagagatcaac

SEQ ID NO: 542140 - DNA, 201 bp, Homo sapiens
ctgaaacatcagttttgtaaagtggccctttacaattcaaaaaaaggctaagagcctcttttaacttgtgttcccctgtctttgaatatacaagtacatgyatatgttactttgaatacagaagtacatgtatatgatcttttccaggtacatgtaagtataagttgactttaataagttacttcctgtaagataatcatt

SEQ ID NO: 542141 - DNA, 201 bp, Homo sapiens
ctgagtgcaggctgacctaaccttgggaggaacttagtctacagtttatagtttaaaacaaagacgataacagccctttcccaaagcaaacctccttcttkcctggggactatactgcctttgtaggactaagaaattagccacaagattagaaattatggtttaggagtcatgcagctggaggctgcaagattctgccct

SEQ ID NO: 542142 - DNA, 201 bp, Homo sapiens
ttcttgtgcctcagcctcccaagtagctgggattacaggggcgcaccaccatgcccagctagtttttgtatttttagtagagacagggtttcaccacgttsgccaggctggtctcaaactcctgacctcaagtgatctacccatcttggcctcccaaagtgctgggattataggcgtcagccactgcacccagcctcaagt

SEQ ID NO: 542143 - DNA, 201 bp, Homo sapiens
tcatgatttactttccaacctgactctggcataacattaggagagaaagaagaacatcaaaatattttaccctgaaacacgtttctttgccatgttttgayggccctgcaaagctgttctttgtggggaaaactttgcatctgtaaagaatctgtattaacacagctagaagatctttttcttccagaccctcccaatcct

SEQ ID NO: 542144 - DNA, 201 bp, Homo sapiens
tacaatctttatcttaacctgaacattccctttttatctatcccaggtttttaggcaaactcaaccaactgtcaaccagaaaatatttaaattcacttatwgcctagaagcttttggctttgagttgtttcacctttctggacaaaccaatgtatttcttaaatgtatttgatgtctcatgccactctgaaatgtataaag

SEQ ID NO: 542145 - DNA, 201 bp, Homo sapiens
ccaacccagagagtttctgatctagctggtcttgggtggggcctaagaattttcatttcaaataagttaccaagtttctaggtgatgccgaagctactgayccaggaaccacactcgaaaactattgctctagaagaatcagcctttacccattttcaaaacttatcctcttctccttttatctccctcatcccttcctcc

SEQ ID NO: 542146 - DNA, 201 bp, Homo sapiens
tttgcatctatgcaagatccagtcttcccttcttctttactaatggaataccaattttcttggggtatgtggcaagctgccaagctaaaaataacaaagarcaatatcaaaaactaatgaaaataatataccctgccctactcttccccaacatttcccaataacacctgcccccgcccccccacccggtcccttagcatg

SEQ ID NO: 542147 - DNA, 201 bp, Homo sapiens
taggtatatatattcttactgtactatagtttagacatagtatactaggctaacatcatttttttaaatgaagacttccaacaccattttatatttgttcrgttataagaatatatttagtcacctgtttaaatgctacagtaatgtaattgatgctttacatgaatttaggaaccctcaatgagcaaacttcaaagtgca

SEQ ID NO: 542148 - DNA, 201 bp, Homo sapiens
cattgtaataatctgtttaggtatctaaaaggccaacctaaattcctcaaaggcattatgtgttaacaacttgttctgtgctgggcagctgccacagtagmtttctcaatatctactgaacattggcatctttctcctaatttgttgacagcatgccctatattctgataactacaaaatttcatttcataaaaaatgctt

SEQ ID NO: 542149 - DNA, 201 bp, Homo sapiens
aaaatttcacaaaatgagccataatcaggttagcaaaggaacacttttaaaaaggcagccagtaggccgggcatggtggctcacgcctataatcccagcaytttgggaggctgaggcgggcagatcaccaggtcaagagatcgagaccatacctgctatcacagtgaaaccccgtatctattaaaaaatacaaaaaaatta

SEQ ID NO: 542150 - DNA, 201 bp, Homo sapiens
gggcagggggaaataataaagcaaaagtggaaagatgttaaaaattgaggaatgctgagaattctttgtattagttttgcaactttctggtacacttaaarttatttcaaaataaagttatttaaaaagttgtcctggccaggcacggtagctcaatgcgtgttatccagaactttgggaggccaaggcgggcagatcaat

SEQ ID NO: 542151 - DNA, 201 bp, Homo sapiens
ctgatgaagtactaccatgctgcccctgttataagaggggcattctgaactgcagggtagcgatgggatcaggcccagtgctatctacttaattacccagygactctggtggtgaagttctgatgctgctcatcccattcctggatgcaagttggcacacatggcctgtcaactaatttatgcagtaaaacatcaagaatt

SEQ ID NO: 542152 - DNA, 201 bp, Homo sapiens
aaatttgtaatacagactacaaaatactgtttcaatattaaacttcctgatttgacaattttaccgtgattatgttaagagattttttgtccttaggaatwatgaaaaaatgaagggagaagaggtataatgtatatatatacacatatatatatatacacatacatatatatatacatatatatacacatacatatacat

SEQ ID NO: 542153 - DNA, 201 bp, Homo sapiens
atcatattagaaataaacatctatgtgaatgtgtgagaggttttgtgtgtgcacatatgtgtgtgtgtgtgtaaacagacagatacaaaccatgtttccartgaaatcttaggagaagacaaactcaaatgtttccttgttctgtttttatttaactccaaatagctaataacataaaaacattttaaaaaaatctccaat

SEQ ID NO: 542154 - DNA, 201 bp, Homo sapiens
aattaggttaatttgtctttagtttttaaatcctattatcctaataagtgctaaaaactcatgtcaaaattgcaaacatttcctgactttttttacacagyccactacgtcttcatttctaatagaggaaaatagctactcactaaagcaatctgtcttgagtacaattttgcaactggaatataactgagtcagacagca

SEQ ID NO: 542155 - DNA, 201 bp, Homo sapiens
aaaacctacctaattttttaataaaataatatttcttgcttaaaatgatttcaccaagtgaatatgatagcattgaaacaatactctttaccagagtattrcaagaggaatactctggtaaaaagctcaggcatgtggtattccattatgggcatttcaacgcaggcagtactgtgtcatctataagacaatcatgcaaac

SEQ ID NO: 542156 - DNA, 201 bp, Homo sapiens
attatcttggtaaatcatcaaatatttaatgaacatctactgacttaatagatgagataatttattataataatttatcttatcatattagaaataaacayctatgtgaatgtgtgagaggttttgtgtgtgcacatatgtgtgtgtgtgtgtaaacagacagatacaaaccatgtttccagtgaaatcttaggagaagac

SEQ ID NO: 542157 - DNA, 201 bp, Homo sapiens
attcttactctctgataacctctttcttgctcccttatttgtttccttcagagtgctagcaattatttccttgataggtttacttggcttctgtccactgractccagctccaagagggcagggctgagtccgcctcatcatcactgtatctctgcagcaaagaaagggctctgaacgcatgagggttgttccagaggcag

SEQ ID NO: 542158 - DNA, 201 bp, Homo sapiens
tggttacacaaattatagaagatccatacagctttttttttttaaaaagagaatagcactttatatactgatacagaaagattgccaagatattgttaaataaaaaaaaatagaaagcaatgggtattgcgtgctaccatttttgtaaaagaggagaaattaaatatatgtacactaaacatacaatatctgcttgtatgt

SEQ ID NO: 542159 - DNA, 201 bp, Homo sapiens
tgtatttagtcttttcctttgtttccaagtgaaatcttttgaaaacagtcctattatggctcaaataagcagaaatggggattttcttaggctagttgagraacatggtgagggtggcagggacgactgctgacacagggcacgctggcctggagaagcagcagctgctggcatgcgtggacacactttgcagacgtgtcc

SEQ ID NO: 542160 - DNA, 201 bp, Homo sapiens
tgaatttcttacagacatctgcaattcaaaatgtccaaagcagaactcagtatttctttgaacaacaataaaaaaccctgcctctctatgacccatcactrtccactttcctcatctctgccaatgatagccacatccacccatctgcttcctttctctcacctctgacaaccaggctatcacagcatcctctggagctcc

SEQ ID NO: 542161 - DNA, 201 bp, Homo sapiens
catgatatatttcatccctttaattacagtagctgatcccccaaaacccagaaggctcaggacaccctggcccaacagcactgattaatgagcactcgaaycaaaggctcactaacaaagtgtgacatcctccaaaaacctgtctaaaaacaagggaaacttaaatgcataaaaaaaaacctacctaattttttaataaaa

SEQ ID NO: 542162 - DNA, 201 bp, Homo sapiens; identical to SEQ ID NO: 365611

SEQ ID NO: 542163 - DNA, 201 bp, Homo sapiens
gactgcagaggttctaggtgataacaggttcctgcaataggatccctgcagttgtgagactgaggcccccacctttttgctagctgtttccagctcctagmagccacctacattcctggaatcatgagccgctttctccatcttcaaggcctgcaacagtagctcacgcccctcccttgtcatatttctctaacctactct

SEQ ID NO: 542164 - DNA, 201 bp, Homo sapiens
ctgagatttttacatgcaaatgattttaacagaaaatctacctattcagaaagcatacctttaaggaactgaataacttattccaaaaagaaatttacttyatgataaaagaaaatgtatatacatacacaagaaatatcaatggtcttagaaccacagaaaggagtgttagttaacattataccatctgccacatagaga

SEQ ID NO: 542165 - DNA, 201 bp, Homo sapiens
tggagataacaggtcctttttgattctacttgctgatccctggattgcagctctcatgctgtttacctcaagagcttcgctcacagccccctaactccctrtattcctgcttacagcacaggctgtagctccccaggcaggtcagtgctagaagttgctggggcattctggaatttgttcttggacacctaccaggagtgc

SEQ ID NO: 542166 - DNA, 201 bp, Homo sapiens
tagggttctctgacaaaaagtgaatgggatggaggtgttttaaagcaaggtccaccaactagcgatcagaaataacataatcagggttttgggttgttttytcatccgttccactctactttaaactgtggattttggcttcatcatatgcatgatttactacaatgtccattattgccagcattactcagtaaactgtcc

SEQ ID NO: 542167 - DNA, 201 bp, Homo sapiens
gtttccctttcttatctccagttcattcactctttcatgctctgcaaattggcttcggcttccaccatcctcagcttgccatggccacaggttgcttttgrgttgctaaatcacttctaacctcactttactcagcttctgagcagtcaccactcaccctgaaaaccaccctcccacttctcttttttctgtgactctttg

SEQ ID NO: 542168 - DNA, 201 bp, Homo sapiens
gtccatccgctgggtgggcgcttcactccttgtcagttcacatctgccactagcggggcaagcatcttgcgggctgattctagtgttaaaagttatgtgcttttttttttttttttttaacaaaatggcccctaaacaaacaccaacaacttcacttggtcttcaaacaaagaaacagtctttttttccaacataggagga

SEQ ID NO: 542169 - DNA, 201 bp, Homo sapiens
atatactcatcacttatctcacagtactacagatcagaagtccaatgggcttggttggtttatctgttcaagtctcatgggctaaaatcaaggtactggcwggggtgtgtgactgcagaggttctaggtgataacaggttcctgcaataggatccctgcagttgtgagactgaggcccccacctttttgctagctgtttcc

SEQ ID NO: 542170 - DNA, 201 bp, Homo sapiens
ggcttaattggcagtcacccagctgtgcctggtgtggagctggttcctgagtatccggagagtacagctgggctgtgctagggtcatggagtcctaggtgytgacttgggaggttagcaaggggcctgcatgtgacaggctgcctcctctagactggtcaacagaggctgggcaaggcagggggtgctggttttaatccca

SEQ ID NO: 542171 - DNA, 201 bp, Homo sapiens
cacgagccaccacacctggccatattttgcctttcaagacatataaatcatttttccctctgaaaaaggaacattacttataatgataactgaataaattwttggctcttaggtctttaaaaacattttatcctttccctgttgttttatttcttttttctttcttttttgagactgaagtttcactctgtcacccaggct

SEQ ID NO: 542172 - DNA, 201 bp, Homo sapiens
ggtgctgctatgaggccgcacctcatagagagatcgccattatatttcctgggagctccgtatctcatggagataacaggtcctttttgattctacttgckgatccctggattgcagctctcatgctgtttacctcaagagcttcgctcacagccccctaactccctgtattcctgcttacagcacaggctgtagctcccc

SEQ ID NO: 542173 - DNA, 201 bp, Homo sapiens
ccaagagctgaacatatgctagatgctggggatttagaggacaaagccaaagaacaaagataagatagtctgtgaccattactatgaaggaagcaaatagsgttctctgacaaaaagtgaatgggatggaggtgttttaaagcaaggtccaccaactagcgatcagaaataacataatcagggttttgggttgttttctca

SEQ ID NO: 542174 - DNA, 201 bp, Homo sapiens
ccaataagttccaataaaggccttctgtgcaatggtgttgccccgctactattggcgagacttccaatctactgacccagtactttctgactcccattagmcccctctaaattttctgccctcttgtccagcttaaggagctgtgatctaccatcagaatcagtcccctgaaccacctccaaacccatcagcctctctccc

SEQ ID NO: 542175 - DNA, 201 bp, Homo sapiens
ttgggctccatcacaaagattctaattcagtacatctagggtgttgcccagcaatttgcccttagataatcaaagttcacattttgaaaaatacaatctasaaaaactaaaagaaaatggaatcaaatactcatcatagctcaagaagaaatgactaattttaagatagaatctgaaagggtaaaaacagacacatcagta

SEQ ID NO: 542176 - DNA, 201 bp, Homo sapiens
tgataggcaattgtgatgcaggcccagtcaccagcttcctgggtgctgctatgaggccgcacctcatagagagatcgccattatatttcctgggagctccrtatctcatggagataacaggtcctttttgattctacttgctgatccctggattgcagctctcatgctgtttacctcaagagcttcgctcacagcccccta

SEQ ID NO: 542177 - DNA, 201 bp, Homo sapiens
atatgtaatccacttgtgttgtaacttcctagccccttaatgcatgcacacaggccaaagaaagtatttgttctatagacttggtatgcaaactcatttaytcagatctcaaaaagcactatctctgtgggccaataagttccaataaaggccttctgtgcaatggtgttgccccgctactattggcgagacttccaatct

SEQ ID NO: 542178 - DNA, 201 bp, Homo sapiens
gtaaattagcctgtatttcctaagcctcctgagtgagtggctgaggcaggccacctgtgatcaatacagtgaagacccaaaatcacagccttcagctcagsagtggtgggacctctcagggtgcgctggcagaatgaacccaactgtcagatactaatcgtcccacataccccttccctcctcccacctcccaatctccca

SEQ ID NO: 542179 - DNA, 201 bp, Homo sapiens
gccactttgggctgtggttgctggcaagcaaggccacggatgttgataggcaattgtgatgcaggcccagtcaccagcttcctgggtgctgctatgaggcygcacctcatagagagatcgccattatatttcctgggagctccgtatctcatggagataacaggtcctttttgattctacttgctgatccctggattgcag

SEQ ID NO: 542180 - DNA, 201 bp, Homo sapiens
atgaaaatgaaaaattaagtagtgtgtattataagaatttggaagataatgcaaggtaacagaaaagtaggaacacacttgaaggtttaaaaccttgagaygtgtggttctaagctttgtaacttcagtgtgtgtgatggaggtaggttaggaagggttgtgtctaagtgataatcatactatagaaattctcaaacttca

SEQ ID NO: 542181 - DNA, 201 bp, Homo sapiens
tcatgcacagtctataaaaagaaaaggcctaatacataaaaagtttgtaaacctaactcagcaggtgccaagaacacccattacaggacagtaaagaaatmaagaatataggtaatgagatgaacctaaacaaagaaaaatgtaagctgattatctagaaaaatatcctcccaaatttggtcttttaaacaaatcatagac

SEQ ID NO: 542182 - DNA, 201 bp, Homo sapiens
ctttacgtcacaaatagatatgagaagccagtatcacttgctataaataggtgagtataaaaatgaaatactcattttaaaattacatttcttgtttaagrtttggagcctgaagttactccttccttagagagataagcaaagtaaagccaagttaaagttcttggagaattttttagggtggtggagaaaatgacgtag

SEQ ID NO: 542183 - DNA, 201 bp, Homo sapiens
ctaagtagcatgattgctataaaaagagagagaaagagaaaagaaaaagaaattctgatattctatttttaatttactgctttagtactgggtagaacacktaggggaaaaaagaaaaaataacgttgatatgctatttttaatttactactttaaaaaagtccataacacaaataatagcatatgaaaaataaaaaagca

SEQ ID NO: 542184 - DNA, 201 bp, Homo sapiens
tgtgcacatttgaacagtcagtcttaagtccttcccttcaacacaagaggcagcacaggacattccgttccacctcttgctttttcactcagcagaggacsctgacgatcttcccctatcaggacatagaaacagtcctcttcttccttttactgctacataatattctattgcatgaatactgttataataaatgtcttt

SEQ ID NO: 542185 - DNA, 201 bp, Homo sapiens
ttccctttgaagagaatgtacagggtgctgtgctactggtttgaccccacatggcaggtttttggttcttattgtctacttcatggaattaaacacaggaraatgaagtcttttattcaagccaaaggtagtcaataataaaaaatgaagacagttaatttaaaaatgaaccagcaccatatttcactgaaacctttgtga

SEQ ID NO: 542186 - DNA, 201 bp, Homo sapiens
agcacttggcagtaagttgagaccatttcagatttcagatttttcagatttggggcactcagccactaagtataatgcaaatattccaaagtctaaaaaamccctgaaatctgaaacatttctggtcccagacattttggatcacggacactcaacgtgcatctgttagtagcacttcctcccacctccacctcaactgga

SEQ ID NO: 542187 - DNA, 201 bp, Homo sapiens
cttaagttattttaaaacatctgcactgtattttacacataacaggataatttttcttcgtgtttatatgggaaaagtgccggctgctacagtatccaatyagttaccccaaggagatgtcagctgtcaaccatgtctattgtagtgatttccctctcctctctcccttccctctctgggtgagctgtcaagtttctagtt

SEQ ID NO: 542188 - DNA, 201 bp, Homo sapiens
actttctctaaagctatagtaaatgaaaacaggtggtactggcatatgatagacatatagaccaatgtaatggcataaacagtacagaaataaatcctcayatatatggtccaacggttttttgagaagagtgccaagatcattcaaatgggtaaagataatcttttcaacaaattgtgctaggaaaactggatgtccaca

SEQ ID NO: 542189 - DNA, 201 bp, Homo sapiens
gataccacaaacacaatctccttttcctggtgtgaccactcccttttccttttttatactgctagaagaatttacacagaacttattccacacagacctaycactgcatacattggttatagtaaccattttccacaaagaagcagaaatacttttcccaagtacatgaataaaaagaatgaaaaagaaaagaaaagttaa

SEQ ID NO: 542190 - DNA, 201 bp, Homo sapiens
cggaacagatgaggttgtatcacagaaatgcagccacattcaggtgatgacattttgctccccgtacacaagagcttaatggaatacaacttcattatatmgtgccacttgtgcttacagcaccaaacccatctcctgactgttttgtctatgtggtgatgaggacaatctatttgtgctggtttcaatgtattactaacc

SEQ ID NO: 542191 - DNA, 201 bp, Homo sapiens
gctatccacaatagcaaagacatggaatcaacctaaatatccatcaaaggaagactaaataaagaaaaggtcctgtaatcccagcacttttggaggccgargtgggcggatcatgaggtcaggagttcgagaccagcctgaccaacatggtgaaaccccgtctctactaaaaatacaaaaattagccgggcatcgtggcac

SEQ ID NO: 542192 - DNA, 201 bp, Homo sapiens
tttgagctatttacagcttttaaccattaagtaacagaccaggtgcagtagctcatgcctgtattcccagcactttgggaggccaaggtgggcagatcacytgaggtcaggagttcaaaaccagcctggcaaacatggtgaaaccccatctctactaaaaatgcaaaaattagccaggcatgttggcgggcacctgtaatc

SEQ ID NO: 542193 - DNA, 201 bp, Homo sapiens
tctgttgcccaggctggagtgcagtggcatgatctcagctcactgcaagctccgcctcccgggttcacgccattctcctgcctcagcctcccaagtagctrggactacaggcacccgccaccacgcccagctaattttttgtatttttagtagagacagggtttcattgtgttagccaggatggtctcgatctcctgacct

SEQ ID NO: 542194 - DNA, 201 bp, Homo sapiens
ttgcatgccagaggttgagaaataaatctgactaaaattcaggtaccttctacctcagtgaaattcctaggggtccagtggtgtggggcctgttgagataytccttgtaaggtgaaggataagttgctgcatttggcccctcctacaaccaagaaagaggcacaatgcttagtggacctatgtagattttggaggcgacac

SEQ ID NO: 542195 - DNA, 201 bp, Homo sapiens
aggggtccagtggtgtggggcctgttgagatattccttgtaaggtgaaggataagttgctgcatttggcccctcctacaaccaagaaagaggcacaatgcytagtggacctatgtagattttggaggcgacacattactccagcccatttattgagtgacccaaaaggctgccagtttcgagtccagaacaggagaaggct

SEQ ID NO: 542196 - DNA, 201 bp, Homo sapiens
gatattccttgtaaggtgaaggataagttgctgcatttggcccctcctacaaccaagaaagaggcacaatgcttagtggacctatgtagattttggaggcracacattactccagcccatttattgagtgacccaaaaggctgccagtttcgagtccagaacaggagaaggctctgcaacaagtccaggctgttgtgcaag

SEQ ID NO: 542197 - DNA, 201 bp, Homo sapiens
aacaaagtggccatggtgtcagggatggaggttatgcatgggctcagcaacatggacttacactcagcaaggccgacctagctatggccaccactgagtgyccaatttgccagcagcagagactatcactgagcccgtgatatggcaccattccttggggtgatcagccagctacttggtggcaggttgattatactggac

SEQ ID NO: 542198 - DNA, 201 bp, Homo sapiens
tttttcccttatcatgtgatataagataaatggatttcttatcagcatttaaatgttaactttatgtaataacatttaggttaagattagtgagcttctgrttgcatgaagaatagctgtattacgttacacataattatgacctcattattgtctttatttgaagattaagtatgatttcaggagatgtgtatgggttca

SEQ ID NO: 542199 - DNA, 201 bp, Homo sapiens
tcacatgccttctcatccaactggcttttccaaacttttcacacctctctctcccttgacctgaaaaagaaggcaatcaagcctgtacatgacaatctacytgaattttctactttctagatgtttcctcttgccttggagagacacataaactatcccacctctaaacgttgtaaacaaacacctgccctcattctcagg

SEQ ID NO: 542200 - DNA, 201 bp, Homo sapiens
tcacatcaaagactattacaaatatcttacaaaatatttggctgagactaaaattttccccaaagttctccattatgaaacaggctaaattttatggtgaytgtgggaagtaatttccttgtgatattcctatcatcataagaactcaaacaatagaactctctatttccagctattactttaaaatcataatcttagaag

SEQ ID NO: 542201 - DNA, 201 bp, Homo sapiens
tgtccttgactttgattctcattgagaggtgatgagaaggaaggtgatttagggcaggttttgctgttatttttgttggtttttgcttatttaatgaacatgtattgtgaatgggtagaggggctcgtggagagggagaatcagcacaggctctctgaagccgtggcattcaatgtgagccctggaagatgagaggcagcc

SEQ ID NO: 542202 - DNA, 201 bp, Homo sapiens
gtccttgactttgattctcattgagaggtgatgagaaggaaggtgatttagggcaggttttgctgttatttttgttggtttttgcttatttaatgaacatgtattgtgaatgggtagaggggctcgtggagagggagaatcagcacaggctctctgaagccgtggcattcaatgtgagccctggaagatgagaggcagccg

SEQ ID NO: 542203 - DNA, 201 bp, Homo sapiens
tccttgactttgattctcattgagaggtgatgagaaggaaggtgatttagggcaggttttgctgttatttttgttggtttttgcttatttaatgaacatgtattgtgaatgggtagaggggctcgtggagagggagaatcagcacaggctctctgaagccgtggcattcaatgtgagccctggaagatgagaggcagccgg

SEQ ID NO: 542204 - DNA, 201 bp, Homo sapiens
actaagtagcatgattgctataaaaagagagagaaagagaaaagaaaaagaaattctgatattctatttttaatttactgctttagtactgggtagaacayttaggggaaaaaagaaaaaataacgttgatatgctatttttaatttactactttaaaaaagtccataacacaaataatagcatatgaaaaataaaaaagc

SEQ ID NO: 542205 - DNA, 201 bp, Homo sapiens
ccttgactttgattctcattgagaggtgatgagaaggaaggtgatttagggcaggttttgctgttatttttgttggtttttgcttatttaatgaacatgtattgtgaatgggtagaggggctcgtggagagggagaatcagcacaggctctctgaagccgtggcattcaatgtgagccctggaagatgagaggcagccggc

SEQ ID NO: 542206 - DNA, 201 bp, Homo sapiens
ctagctcacgttactttatttattcagtgaaaaattattgatcacttttatgtgtaaacatgtgctacaggatgggaatacagtgaactaaggacacaatsaatcatcttcgccatgctatgaggggaagataaactactgagagggcatgaaacaggagagcccagccagggctaaatctctgaggaggccatgacgaaa

SEQ ID NO: 542207 - DNA, 201 bp, Homo sapiens
cttgactttgattctcattgagaggtgatgagaaggaaggtgatttagggcaggttttgctgttatttttgttggtttttgcttatttaatgaacatgtattgtgaatgggtagaggggctcgtggagagggagaatcagcacaggctctctgaagccgtggcattcaatgtgagccctggaagatgagaggcagccggct

SEQ ID NO: 542208 - DNA, 201 bp, Homo sapiens
ccttaaagtgactggtcaggctgcagtggcccccatctttttgctcatttctccacccctttcctccttcctcttggctagaatatgggcatggtctttgrgcttagttgtcatcttataattatgaggaaaaggccaaaagaatcaaggaaatgcaatccctgataatcttgagccagtgagccaaaacccacaactacc

SEQ ID NO: 542209 - DNA, 201 bp, Homo sapiens
cctatgcagactcagactactaataatgaaacaaaaaccagatacagtggaaagtctgtgtgttttgtcttaattctgatattaagtggccatgctatctyggatagatcatttactctcacttctagctcacgttactttatttattcagtgaaaaattattgatcacttttatgtgtaaacatgtgctacaggatggga

SEQ ID NO: 542210 - DNA, 201 bp, Homo sapiens
atagcaagaaagatgagaaattagggctgtctacacatggctggtaaggactacacagggggtccaagctggaacctgttctctgagttcagggaaagaaraacatatgtaccctagcccttctcccaaatctaacattgaaatgaatccttctataacttgggagttaaattacagacatttgttcagggacctatacac

SEQ ID NO: 542211 - DNA, 201 bp, Homo sapiens
catgatccacccgccttggcctcccaaagtgctgggattttaaaaatgcctggccgggaagaggcatttttaaaaaggactagagccttgaatttgaaccytggcatctggacaaaaacaagcagaggccaaaatgacatgatcagaaaaattaaggaccataaatacctttcttccttattactctaattcaaaatagtc

SEQ ID NO: 542212 - DNA, 201 bp, Homo sapiens
aagaggcatcagtgttgcttatttcaattaatatcattatattttagttttaattattttcctaacatgtaaaaaatcctgagttaatccaccattgggayatttttaatatgctttctgaaacgcaaaaaaaaaaaactaaaatgactaatttttctgaccatgaagtcaaaacaccacatcaactactacagaagctac

SEQ ID NO: 542213 - DNA, 201 bp, Homo sapiens
tatattcttactgtactatagtttagacatagtatactaggctaacatcatttttttaaatgaagacttccaacaccattttatatttgttcagttataasaatatatttagtcacctgtttaaatgctacagtaatgtaattgatgctttacatgaatttaggaaccctcaatgagcaaacttcaaagtgcacagtactt

SEQ ID NO: 542214 - DNA, 201 bp, Homo sapiens
atatgtttccagtagggctcagctgcttacaagataaatactcctctgtcacttcatccgatgattaacggtcctggccctgctgtgtccaggcaaactgmctgtctgatccacgcagataagtaccagattccacgataccacaaacacaatctccttttcctggtgtgaccactcccttttccttttttatactgctag

SEQ ID NO: 542215 - DNA, 201 bp, Homo sapiens
ttaaaaaggactagagccttgaatttgaaccttggcatctggacaaaaacaagcagaggccaaaatgacatgatcagaaaaattaaggaccataaataccwttcttccttattactctaattcaaaatagtctggtaagagagaaagaaaaattacatttcctcctgaaaggccagccccaattaaaattctaagtgtcgc

SEQ ID NO: 542216 - DNA, 201 bp, Homo sapiens
ctaatcaagtttctactacatgcaatcaaagacattcctaatataaaggaatcacttgttctattttaagtcagagatgctcaacaggcatccaagtagasatgctgggtaggtagttgggtacaagtctgtaaatgtgggggtcagaatatataggtaattagagctgtggaaatagaggagatgacattaggagttagg

SEQ ID NO: 542217 - DNA, 201 bp, Homo sapiens
aatatttcaaaacctggcaacatcaataatactgttaagatatgtatatcaaattttctttactgagtgataaagtggtctgatatacattatgtatacakgtgtgtgtgtgtgtgtgtgtgtatctccccacaggagaccactactatttaggaaatatgataaattattttttaactggaagatttagtcaagaaccct

SEQ ID NO: 542218 - DNA, 201 bp, Homo sapiens
cctggcttaattcttcttctaaaaaaataaagatagatagatagatcaggtattttactttcccaggatatgcatggtttaaaaatagttgcactgtaaaratgtgattactcctttatccaagtatttttgagcacataccatgtgctagaccctattcaaggtgtctgaagtctatcactgaagtaaaatgacaaagag

SEQ ID NO: 542219 - DNA, 201 bp, Homo sapiens
tgaggcaggagaatggcatgaacccgggaggcagagcttgcagtgagccgagatcgcgccactgcactccagcctgggcaacagagcaagactctgtctcaaaaaaaaaaaaaaaaaaaggcagccactaaacagatttaagaaggatcctgaccacctgaaaaataaaaatcagatgtgctctgaagaacccattgtacc

SEQ ID NO: 542220 - DNA, 201 bp, Homo sapiens
cactccagcctgggcgacagagcgagactctgtctcaaaaaatggaacaaaactaaacaaaacaaaaaacaaaaggatctggactcataacatttcaaaayctgtttgacaacttctgaacagctcaattcttttcagcaaataactgggtacaattactttaaagtcacatattatacatatttgatccacttaaattac

SEQ ID NO: 542221 - DNA, 201 bp, Homo sapiens
tatttgtttagcacctactaactacaagcattatgctggggacacaatggttagcccaacaaatatagtcctgtcctcccagggtttaccattgggtaggraagatgaatgctgattcacagcaatgaatgtgaaattacaaactgaattagtaccttaaaggggagtagctagtttccttgatcattagtaacaaagcac

SEQ ID NO: 542222 - DNA, 201 bp, Homo sapiens
cactgcctctttaagtgcaatgtgcttaattgctaattaaaaacttgaaaaaaacctaccaacgttactcctttactacacatgcacagaaacagcatagyaatgaataagaaaattcatacaattaaacctgggcagctaaactatagtaaaaaattctttccatatgtaagagtatattcacccttaaccattctaggc

SEQ ID NO: 542223 - DNA, 201 bp, Homo sapiens
tctgaggacctgcactaaacgctgaatgccgaaaagggcccatttaaaataataatgaatctgtgcaaagaaataatataatttggcttaagaagatttgaaaaaaaaaaaaaggaatacatttctgataatgtggctaaaaggaaaaactaaccagggaacaaaagaaattggaaaatcaatagtctttggagctatttt

SEQ ID NO: 542224 - DNA, 201 bp, Homo sapiens
attctcattaaaaacctatgtaattcaaaagatcaaaaaactttaaaagtgttttctgtctctctcacacacatatgatggatgaatggatgaatcattawttttttaaccaaaagaagggtaaagcgtaagctcgggtggatgcgaattttcttgtttcattcctaatgagtcaggctcctttctatgagcatcaggaag

SEQ ID NO: 542225 - DNA, 201 bp, Homo sapiens
ttacccagatgcaagacagagagtagctgtttatgtgcgagaatcatgggtctcaaattgtaggtctgcaagaagtgttccttccacatggtgtcaaatgmgctgaacagttctctcaccccacttaaggcaatattatcaagcaccccctgccaccacaaaagagaaataagaataaacctaggaagagctagaggcaag

SEQ ID NO: 542226 - DNA, 201 bp, Homo sapiens
atgtaatcacaaggatccttataaaagggaggcagcagaatgagttggaaagagactaggagaaacaatgtctctgactctgacgatggagaaagaggccrcgagccaaggtgacctctagaagctggaaagaatggtttctgccctagagcctctagagcaaacgtcatcctgctgacaccttgattttagcccagtgaa

SEQ ID NO: 542227 - DNA, 201 bp, Homo sapiens
ataaagctatcctaattggaatggaagaagtaaaattatctttgtttgcatgtgatatgatctcacatgtagaaaatccttaagactctacaaaaaaactrttataactaacaggcaaattcagcaaagtagtatgatacaaaatcaatacataaaaatcaattacattttgatatactaacaataaacaatccaaaaagg

SEQ ID NO: 542228 - DNA, 201 bp, Homo sapiens
tacagagatacaaaagaggaattaaatctttttgttcatacacacatgatcatattcatgagaaactgaacagtaaggctggacctcacaactgttccatytacaacttcttcagtttcttgaaaggcttttgctctgaaggaaccaccccttcttgaagctgtaccctgggtcatcctatagaataaatgtcagttgggt

SEQ ID NO: 542229 - DNA, 201 bp, Homo sapiens
tagaagaaatggcatactagctccacagtcctcagtttccctcctcaacagaatccaccctagggttaatgcttaaagggccatgaagatatcaaagggargacacagtcatggctgctgatttgtttgatgtaacgtgtcttagatgggtcaatcattaattcatagctcttaggtgggagtccagctcttttgttttaa

SEQ ID NO: 542230 - DNA, 201 bp, Homo sapiens
cctctcactcaccctggtccagccacaccagcttcctcaccggcaactataataggcacgttccctcactgccacctataacaggcttttgagtgcttctycctctacctagaaagcttctccctcattctgttcagttgttgttccaggtcatgttttcagagaggtgttatctacccaccccatctaaaacagcaacta

SEQ ID NO: 542231 - DNA, 201 bp, Homo sapiens
gatctcacccccagagagagacagtgaaggattcttctaccaagttcaaaagcaaaagagcaaaaacagtaaagagagcctgcctcagatgtcttcagggkccttctgcatgtcagctttcctattagagcactgtaaagaccaggaaaactacaagggccaggaacggaattctggcatctttctactgagagatagtcc

SEQ ID NO: 542232 - DNA, 201 bp, Homo sapiens
atacttatttgaataataaagcctaatgttgtaacacatgcagacttgttaccccaggcaatagttttaattatctgtacaagtggttgctttcagatttwaaaaaagaggggagggtataacattcttatctccacccccaccttcttaaaataaattaaatcaataacaagtgtgggacacttttaatgacctgaacta

SEQ ID NO: 542233 - DNA, 201 bp, Homo sapiens
cccttctgcatgtaaggtaacatattcagaggttctggggattatggtgtggacattgttgaagatccattatttcattcactacagacctgaatgacagragggagtgagtcctgagtctacctgggatgggaggaggttggtccaggcagatggaagagtgaatagtcacagaatctaatttaactttcagcattacca

SEQ ID NO: 542234 - DNA, 201 bp, Homo sapiens
gtgctttatggaacagttttccaactagagagagcatctactgaatgttttcagttggataacacacttaattctaagaactctcatgtgttcttggattrttccttttacacagcatcctattgtaatcttaaggatgtaataccactctgaagctctctggatttattacatcaatttttgagatatattttatgtccc

SEQ ID NO: 542235 - DNA, 201 bp, Homo sapiens
tggcttacaaataagaatgcattgtttacctattccatttaattatagagaacatgcatttttactctttgcatacaatttctgaagtctaattttttggrggggtttgttttttgctctgcagtgttgcctgaagctatggaaggatcatagctcctcagtctcaaaaaccatggccacacacattcttgtgatttgtaa

SEQ ID NO: 542236 - DNA, 201 bp, Homo sapiens
atgacacctaggctaggatttgcatttcatttaagattaagtgttcaggcttatctttgcaacttccatctacctcccattgcctgcaaatagaatcaagyggaaaagaaaactaactcccttaaactcctgggggaattaagtgacaacaaattgactattaaatgcacaacaggaagcaagccctctgagcccttcgac

SEQ ID NO: 542237 - DNA, 201 bp, Homo sapiens
tataccacaccatttttacatggccatatagaatgaaaatttgaatttaatttccaatgcacagacctgcatgttctctgttcttcatttttttaaaaaamacgttttaatagttcacattttaaaaattgctgctacacacactctcaaaattgtaactatgtgaggtgatagatatgttaattcgcttgattgtggtaa

SEQ ID NO: 542238 - DNA, 201 bp, Homo sapiens
taatcccagctactcaggaggctgaggcaggagaattgcttgaatctggggggcagaagttgcagtgagctgagattgcaccattgcactccagcctgggygacagagtgagaccctgtctcaaaaaaacaaacaaacaaaaaccccacaaaaacaaaaaaacctgcctgatactttaaatactaagctttaaatactaaa

SEQ ID NO: 542239 - DNA, 201 bp, Homo sapiens
agctataaagacagaataggaaaagaaaaagaaaaaaaaaaacagagatgtctgttaattatagtgatattatttggggaaaaaaggccaataaaagaaartgaactactgctatctgcaataaaaaatagaggaaaatataattacactgcaattttgtcaaacaattctttatttaggtatcttgactgttcagttttc

SEQ ID NO: 542240 - DNA, 201 bp, Homo sapiens
aagataaagcaggcagaagaaggtgacttgctgagtcttccagtcttcatctttctcccatgctggatgcttcctgcccttaaacatcagactccaagttyttcagcttttggactcttaaagttacaccagtggtttgccaggggctctcaggcctttggccagagactgaaggctacactgtcagcttctctgcatttg

SEQ ID NO: 542241 - DNA, 201 bp, Homo sapiens
cacacgggccaagtcaagaggttagttagtaaactagtgtggctgacacataagatttgtgcagaatatggccaggcgcagtggctcatgcctgtaattcyagcactttgggaggccaagacgggcggatcacgaggtcaggagatggaggccatcctggctaacacggtgaaaccctgtctctactaaaaatacaaaaaa

SEQ ID NO: 542242 - DNA, 201 bp, Homo sapiens
gtgctgaggctctgtatgtatgtccaccaagagctgaacatatgctagatgctggggatttagaggacaaagccaaagaacaaagataagatagtctgtgwccattactatgaaggaagcaaatagggttctctgacaaaaagtgaatgggatggaggtgttttaaagcaaggtccaccaactagcgatcagaaataacat

SEQ ID NO: 542243 - DNA, 201 bp, Homo sapiens
tagttagtaaactagtgtggctgacacataagatttgtgcagaatatggccaggcgcagtggctcatgcctgtaattccagcactttgggaggccaagacrggcggatcacgaggtcaggagatggaggccatcctggctaacacggtgaaaccctgtctctactaaaaatacaaaaaattagccgggcggggtggcgggc

SEQ ID NO: 542244 - DNA, 201 bp, Homo sapiens
ctagtgtggctgacacataagatttgtgcagaatatggccaggcgcagtggctcatgcctgtaattccagcactttgggaggccaagacgggcggatcacraggtcaggagatggaggccatcctggctaacacggtgaaaccctgtctctactaaaaatacaaaaaattagccgggcggggtggcgggcacctgtagtcc

SEQ ID NO: 542245 - DNA, 201 bp, Homo sapiens
gacgggcggatcacgaggtcaggagatggaggccatcctggctaacacggtgaaaccctgtctctactaaaaatacaaaaaattagccgggcggggtggcrggcacctgtagtcccagctactcgggaggctgaggcaggagaatggcgtgaaccctggtggcggggcttgcagtgagccaagatcatgacactgcactcc

SEQ ID NO: 542246 - DNA, 201 bp, Homo sapiens
agcgagactccgtctcaaaaaaaagatttgtgcagaataaggctggaattccgaatacctggcctaagaatatcacaattttgtagttggcaaggagccaygaaaggttttcggtaggtagttatcacgatcagagatatataccccacaagcaagagtatgccgcattctaaacgggaaaggactttaaaaataaagttt

SEQ ID NO: 542247 - DNA, 201 bp, Homo sapiens
taaaatatttactatcgaatctttcacagaaaaagtttgctaacttcaaccaacatggcacatgtatacttatgtatcaaacctacacgttgtgcacatgyaccctagaacttaaagtataataataaaaaaaagaaaaagtttgctaacttctgcctagtctagacattcttgtgtttgcaagtctatcccttcctatta

SEQ ID NO: 542248 - DNA, 201 bp, Homo sapiens
ttgccaaatgttccctgtgaggcaaaaactgtccctgattcagaactattgttctttttttttttttttttttttttttgagatggagtcttgttcttgtygcccaggctggagggagtgcaatggcaggatctcggctcactgcaacctccacctcctgggttcaagcgattctcctgcctcagcctcccaagtagctgg

SEQ ID NO: 542249 - DNA, 201 bp, Homo sapiens
actcttggtggtcaggcatggtggctcacacgcctgtaatcccagccctttgggaggccaaggtgggtggatcacctgagatcaagagtttgagaccagcytggccaacatggtgaaaccctgtctctactaaaaatacaaaaattagccgggtgtgatggcaggtgcctgtaatcccagctacttgggaggctgaggcag

SEQ ID NO: 542250 - DNA, 201 bp, Homo sapiens
tggctcacacgcctgtaatcccagccctttgggaggccaaggtgggtggatcacctgagatcaagagtttgagaccagcctggccaacatggtgaaacccygtctctactaaaaatacaaaaattagccgggtgtgatggcaggtgcctgtaatcccagctacttgggaggctgaggcaggagaatcgcttgaacctggga

SEQ ID NO: 542251 - DNA, 201 bp, Homo sapiens
aaattaccaaaaatgttgccagatttcacccctctaatgtactaagttacactgttatgaataggaatgtctggcccatccttgtcaacatagtcctactytggccaatctggtgcataaaatgagaatttttttttttttttttttttgagacagagtcttgctctgtcgccccggctggagcgcagtggtgcagtcttg

SEQ ID NO: 542252 - DNA, 201 bp, Homo sapiens
aaaaaaaacctcctttatccagaggcataatttcattactatttcaattaaatttccttaaatcatttcactttcatctcagtttttacctattcaaggamattttttaggtgcccagaggtcattatttcagtgcctgtaactcaaaaagttctaggcgtcatcacacatataaaactccgaggtattttggctatgaca

SEQ ID NO: 542253 - DNA, 201 bp, Homo sapiens
caatgcactggctacatctacggcatgatcattaatgacaaaagacaggaaaaaagctatttacactgcaacacagggacgggaattaatcctgctcagcytccccaaacagagttctccaaacagatgatcacattgctttacgtaagatatactggcaaaagcactacagaaaactccagaaatttgcatgaatttact

SEQ ID NO: 542254 - DNA, 201 bp, Homo sapiens
taaacatatatgaagcctaacctgcccgtaaatacatacaagttggaacagaacacactgacaacacagtatttgccaagtgtataatttttgttatgcartaagtggaaagtggctctgagtaaacagtgctcatgaggagctgtgacaggtgtttgcagccccatcatccagcagatggctggggtttaacatgacttt

SEQ ID NO: 542255 - DNA, 201 bp, Homo sapiens
aggatcttataggaaaaagaatatgaggtcatattcctatacagcaaaggcagctcactctgatcggggtgctactaggaagggtccctcaacccttcctrgggaggagcagggctgcgtcctggccacccttcttcaaactgacagctaagtgggtgatgtgagtacgtgtatccttgctatagagagcagttccctttc

SEQ ID NO: 542256 - DNA, 201 bp, Homo sapiens
ctatccataaattatttacactgtggcaattcattaatttgaataatgtgcttgcttttttccccttaagatctgaaatttctatttgaaaataaagtggytttttcaaatacaatgtaaaatatttttaagaaacctacactcaaaaatatacactaggaaaatttcctaatttagttattttaaactaaaattacttaa

SEQ ID NO: 542257 - DNA, 201 bp, Homo sapiens
actattgtttttaatctccaggcaagtaacactaaatagactttgctgtaattgctcaactgttagactctgcaaatatgatcatatggaaatctctagamcggcagaagtttttcaaggtaaattcactgattagaacctatccataaattatttacactgtggcaattcattaatttgaataatgtgcttgcttttttc

SEQ ID NO: 542258 - DNA, 201 bp, Homo sapiens
tctgattaaatttttgacccatttcaacccttcttagcacacagtcttacagtcaaaattacagatttatgtttatttttataccccatcgttatttgtayttcattgccttttaaagttacctttttgccaaatcgaatacaatcacaagggggcaagtaaaggagacttctagcagctgctatccccttgataatacat

SEQ ID NO: 542259 - DNA, 201 bp, Homo sapiens
ctgttatacttaattctacttttacaggagatcgatttcctcattcattaaacctcagggagttttcctggagtatattatttaaggggaaagaggtaagwaaacataataatagttaattgatttcttattcaataaacagaaaatgattctaggaaataaaattaaggttcactgttcatcaggtagactgccatactt

SEQ ID NO: 542260 - DNA, 201 bp, Homo sapiens
tctctctctttcctcaactgtgaaatggatttcataatagtatctaccttacaggctgttttaaaaattggggagacaagcgaatgaacacacaaactatrtcttagaaaatctctaatacatgaatatccagttatttctggttgatgacacttgatttttttagtgcatgcctttccccaacatgaagtaatggttttt

SEQ ID NO: 542261 - DNA, 201 bp, Homo sapiens
aattaatatcaaatattaacttgcttttatcttcaagttaaaacatcctccaaagtagatgaatttctagtttatataatttggaaaaataaaagtttaayagaaaactctttatttggcatagaccttttactgagatgaaaaccaactgattttcttccactcatatagaaaggtactgttatacttaattctactttt

SEQ ID NO: 542262 - DNA, 201 bp, Homo sapiens
cgaccacttaatacctgtgtgaccttaggtgagttattgaacatctctgtctctctctttcctcaactgtgaaatggatttcataatagtatctaccttayaggctgttttaaaaattggggagacaagcgaatgaacacacaaactatatcttagaaaatctctaatacatgaatatccagttatttctggttgatgaca

SEQ ID NO: 542263 - DNA, 201 bp, Homo sapiens
atgaaacagtttatattaagttcttatgtagagaattttcctcttgtggcgtcatgccagcactcaaggtttcaaatttcggggcattccggatgaggaayactcaacctgtgccctgaatggatctacttgttttcagcttccctgcgcaccccatgctctgccttacccgcagactctgagcctagaagctctccagca

SEQ ID NO: 542264 - DNA, 201 bp, Homo sapiens
ctgagaggcagttccagattgaaggagactaaaaagacatggcaagtaaatataatgtactatttggatcttgtaccagcaaaaaaaaaaaaaatactaamaaggacattattgggacaactgacaaatttgtaatacagactacaaaatactgtttcaatattaaacttcctgatttgacaattttaccgtgattatgtt

SEQ ID NO: 542265 - DNA, 201 bp, Homo sapiens
cagaagaggagtaaaatagaagatcatcaactctgtctggaacttgtgtttgaggcacccgtgagacttgccaaaggggaagtcaagtaagtgatagaatrtggtgacaagtttacctcaacatatatttattgagaggcctctgtttcctggatcgaccacttaatacctgtgtgaccttaggtgagttattgaacatct

SEQ ID NO: 542266 - DNA, 201 bp, Homo sapiens
gtagagtgagctgttttcctttctctttcttttgcctatcaaaacctctgctcctaactcctcgtgtgtgtccatgtactaaattttcctggcatgagatratgaaccccgagtatttaccccagacaatgtagctgcttcagttcctttacaggtgtgtaacctaaattaatgcaatcagtgtgatcaaaaaaataaaaa

SEQ ID NO: 542267 - DNA, 201 bp, Homo sapiens
aaagtagcccgggtggcttgggtaggtttcctttgctagtatgtcagcagcagtgcttgcacaggccccttgcctgagtgcaaaccgtatgagtggagcgygcagtcaggtgggcttttccctggggtgagtgcgaagggggttgttaacttgggggccctactatccacattagaagacttagctcttcccagccattct

SEQ ID NO: 542268 - DNA, 201 bp, Homo sapiens
cagtttagttccatcttcacatttagcagtgtgtgtctgtggccgtctcctggtgccagcatttcagaatgtactatcaccggctgagaaaatctcacggygagaagagtagtgtgtcataagatctgaacaaaaaagctaccaaagttgatcagtctcagtatgattcaggatatgattttcaattagcaaatggtgcga

SEQ ID NO: 542269 - DNA, 201 bp, Homo sapiens
tgtgctggctcatacctgtaatcccagcactttgtgaggccgaggtgggtggatcacttgagaccaggagttcaagagcctccagcctggccagcatggtsaaaccccacctttactaaaaatacaaaaattagccagaggtggtggcgcattccacccaactattcgggagtctgaggcaagagaatcgcttgaaccagg

SEQ ID NO: 542270 - DNA, 201 bp, Homo sapiens
gtgataaagaaacaggctgggtgtgctggctcatacctgtaatcccagcactttgtgaggccgaggtgggtggatcacttgagaccaggagttcaagagcstccagcctggccagcatggtgaaaccccacctttactaaaaatacaaaaattagccagaggtggtggcgcattccacccaactattcgggagtctgaggc

SEQ ID NO: 542271 - DNA, 201 bp, Homo sapiens
cacaaaaactaaaacatggaagcaactcaggtgcccactgatgtacagctaaaaaaaatatggtggctgtgtatgtgtgtgtgtgtgtgtgtgtgtgtgtrtatatattttttttttcccaagtgttttaaaggttttatttttacaaattacagcagatggacaactaagccttccctgcagagactgtgttccaaatca

SEQ ID NO: 542272 - DNA, 201 bp, Homo sapiens
aactaaaacatggaagcaactcaggtgcccactgatgtacagctaaaaaaaatatggtggctgtgtatgtgtgtgtgtgtgtgtgtgtgtgtgtatatatwttttttttttcccaagtgttttaaaggttttatttttacaaattacagcagatggacaactaagccttccctgcagagactgtgttccaaatcaggcctg

SEQ ID NO: 542273 - DNA, 201 bp, Homo sapiens
tttatcctcggagcacctttcctatttaaatgctgatggctaggcaaagtagctcatgcctgtaatcctagcactctgggaggccaagacgggaggatcayttgaggtcaggagtttgagaccagcctggccaacatggcgaaaccctgtttctattaaaaatacaaaaattagcagggcatggtggcaggtgcctgtaat

SEQ ID NO: 542274 - DNA, 201 bp, Homo sapiens
ttattttatatttttaaaataaaaataaaggtaagaaatatttctggtctttaagtcaaaagtcaaggatatttatgactttaaattttcttttctttttytttttttttttttttgagacagagtctcactctgtcgcccaggctggagtgcagtggcgcaatctcagctcactgcaacttccatctcccgggttcacgc

SEQ ID NO: 542275 - DNA, 201 bp, Homo sapiens
aggatcacttgagcccaggagttcaagaccagctgggcaatatagggagatctcatttctacaaataataatttttaaaaattagctgggtatggtggcaygtgcctgagatccagctactttggaggttgagtgagcccagggagctagagcccagggggttcatcacttgagcccagggggttgagactgcagtaagcc

SEQ ID NO: 542276 - DNA, 201 bp, Homo sapiens
agcctgagtactctgattaaatttttgacccatttcaacccttcttagcacacagtcttacagtcaaaattacagatttatgtttatttttataccccatygttatttgtacttcattgccttttaaagttacctttttgccaaatcgaatacaatcacaagggggcaagtaaaggagacttctagcagctgctatcccct

SEQ ID NO: 542277 - DNA, 201 bp, Homo sapiens
tgtcagtataatttaatttccagtttagttccatcttcacatttagcagtgtgtgtctgtggccgtctcctggtgccagcatttcagaatgtactatcacyggctgagaaaatctcacggcgagaagagtagtgtgtcataagatctgaacaaaaaagctaccaaagttgatcagtctcagtatgattcaggatatgattt

SEQ ID NO: 542278 - DNA, 201 bp, Homo sapiens
actgcagaatcttttctttaggaaagtgaagaagctcacagaaaagaaagataacaggtggaaaacacagcccgtgtagggaggggaaggcagcctacttyggaggaaaatgttttcttaaacaacaggggtgtttgaaaagggtcaaaggcagacacagagactctatcattcagagattctgctattctttagtaaacc

SEQ ID NO: 542279 - DNA, 201 bp, Homo sapiens
ccactgtatttttggtgatttgttacagcagcaataggaaactcatacaaggtttaagattattagccttgagggtcaatatctatgatgtggtggacaayagagacccgtttcagtgtatttgagtaagagaatggaggtaaaaatggtgttttaggaaaactggtctgcagcagagaatggataaggatctgaaatggt

SEQ ID NO: 542280 - DNA, 201 bp, Homo sapiens
gctcaactacaaaatgagaggagttgcatcaaatcatctctaagatcattcataactttaaaattatatgaatgtgtaccaccaggatatgaattttgttygagtttccactaataaatgagcccataacaagttaattagattcataattcccatcaagtaacatcattctatgtaacagtgtaattgaaaagattgatt

SEQ ID NO: 542281 - DNA, 201 bp, Homo sapiens
ccacaagcaagagtatgccgcattctaaacgggaaaggactttaaaaataaagtttttagaaatagagcagttcatttaataaactataaacaagtagtcyaggaagaatatcttcaaattaaaaagttcagtaggtagtttggtaggtaggcaactagatatcatgaaaaggaatatccacccagaaactctgagagtaa

SEQ ID NO: 542282 - DNA, 201 bp, Homo sapiens
aagtggaagaggaatcttataaaattacccagaacatagcaagagagataagggcataaaaaatatgaaatcgagtaatgaaaaggcataaaggctagatkgagaagactctacatacatctaaaagtagttctaagagctgacaatttcccagaattcaataaagacccgagtcctcagatttaaaaagcacagagaatg

SEQ ID NO: 542283 - DNA, 201 bp, Homo sapiens
cgcgccggccagccggctgagggcgagttgggggcaggctcacggccgcggccgccgctccgcccacggccgggccgccccgcctcccgccccgctgcgcycgcggggccccgaggctgcgggccggactcaggtctgcgggctgacccggccgctcccgcgccctgggcgtgccgggggccggaagcagagggcgcaggg

SEQ ID NO: 542284 - DNA, 201 bp, Homo sapiens
tccgaggactgcagctcgtccgggaggagagggttggaccccgaggggctaggggcgcccgcagccgccgtgcccgggaggggcgcccgtttccttgacarccgcgccaagggcgcagcccttcctctgggccgggggaggggagagaaaacgaggggaccccctgcgccaaggcggctggcggccaagggtgtttcctgg

SEQ ID NO: 542285 - DNA, 201 bp, Homo sapiens
agtgcttatttctgcaggtaattaacttttagcttgaaccggtaagatcaacttcatcttttctttgaaagccaacgcctctaacaagcagcctttttatsttcagatcctaaatgaatgtcccaaagatggtaagccctccatgactgttgatagtgctgatgggagaagtgagatacctgggagaagcaacaacaagca

SEQ ID NO: 542286 - DNA, 201 bp, Homo sapiens
tatgttctaacagtgtgggtgaataatagcacgcagagtaagagtgaacaaatgggcactgctctcatcttctaaacatttctttgtggaatttgaagcavatatacaatctatacaataaatcattgctgaaacgtgatttcctaaaaatcttgtaatacgattgttgataaaacattctgattacttgcatgaaacaat

SEQ ID NO: 542287 - DNA, 201 bp, Homo sapiens
ggggcaggccacagagggccttgcaaacaaaccacaggtaagagtctggagctcccaggacagagttgagatggagatacaatattgtgactcaggtgtayacacgtggtaggcaggccacacacaaggagattatctgaaaggaagtgtagtgagaagaggagagggtctatgacagcattctggtcagctgctagagag

SEQ ID NO: 542288 - DNA, 201 bp, Homo sapiens
atgtaaaagtaattgtgttaatgagcaaatattattttatatttttaaaataaaaataaaggtaagaaatatttctggtctttaagtcaaaagtcaaggakatttatgactttaaattttcttttctttttctttttttttttttttgagacagagtctcactctgtcgcccaggctggagtgcagtggcgcaatctcagc

SEQ ID NO: 542289 - DNA, 201 bp, Homo sapiens
tgattctcattgagaggtgatgagaaggaaggtgatttagggcaggttttgctgttatttttgttggtttttgcttatttaatgaacatgtattgtgaatkggtagaggggctcgtggagagggagaatcagcacaggctctctgaagccgtggcattcaatgtgagccctggaagatgagaggcagccggctatggatgg

SEQ ID NO: 542290 - DNA, 201 bp, Homo sapiens
attataattctaaattctgtaatataaaaagtagtttaatttgtcacaaaatacattttacatgctaaatgcagaatatgattaaacatgtgttcaaagarctgctcaaaacagaggctgaataaatagcagtggaatatgatacaacagctccttcagtttaactcaagtccacacaggaagcactggcatgcccttgac

SEQ ID NO: 542291 - DNA, 201 bp, Homo sapiens
gcctgggcaacatggtgaaattctatctctagcaaaaatacaaaatttgccggacatgatggcatgcacctgtagtcccagctacttgggaggctgaggtrgcggaatcacctgagcctggggaggtcaagactgcagtgaactttgattgtaccactgaactcagcctgggcgacagagtgaaaccctctgtcaaaaaaa

SEQ ID NO: 542292 - DNA, 201 bp, Homo sapiens
ttctttctccctctggcttctgtgctgggacttctttgcttattcaagttctaaggttttacccttggccctccctctttcctcactctttctctgtgggktttttttttttttttttaacttttatgctgaatgtccccttagagccatatttctaagccagacttaaatccaccctagactccaaaatcaaatagctat

SEQ ID NO: 542293 - DNA, 201 bp, Homo sapiens
tgtattaggatacaacagtggagatggacactacctagcctcaaggagtttatagcttggggatacttggggagtttatagcagaggatattaaataagtwagccattgggtagggaatgggacagaataatctccccaggaagtaacatttgggtgcatctgcattttcttacactaccatctcctacttcttcacaaac

SEQ ID NO: 542294 - DNA, 201 bp, Homo sapiens
caatatctgtaaaaactgtaaagggctggaaataccacttctagttaaggttctacagaaatcctagtagtgggcataaaaaatcatgtccaaggatttcytggccatcagcagatacctggggaaaaaattacggcacatcctaccgtggtagagcccatctccagtagttagaaagaggaggcagacctctccatatca

SEQ ID NO: 542295 - DNA, 201 bp, Homo sapiens
atatattaattaagcaattaatcagttcaaaatatgatgccttcaaaaactaatatttttcatttttatacgctgacattaatggccaatgaaaatgaatmcatctctaggcaaaggctgcttttaaaaacccttccaaatctaaaaaattgtaaaatatatacactttcaaaatgtcagtactgtggccagctcaaaaac

SEQ ID NO: 542296 - DNA, 201 bp, Homo sapiens
tctccaccaacaattcacttagtaaacgtgttgctcaaagggcccatgccctggtctctgccctccccttcactcttgagagcaggggtcctgtttcacayttctcggtgaccacagtcctaggtatgaaacaggtgctcagcaagtaattttgccatttcatggaactgcacaactcaaaaagaaaaatctttggaaatc

SEQ ID NO: 542297 - DNA, 201 bp, Homo sapiens
agagctccttccacatcagtttaattcacaacctggagtgtggcacatgcctggtcataaatacaaataataaaaagatacataaagctttgggagaaaarcacagctcgtctaatagaagaaaatcaacaatgggcaatgagccttaattatggtctatttcaaagtgcttatttctgcaggtaattaacttttagcttg

SEQ ID NO: 542298 - DNA, 201 bp, Homo sapiens
tctgtgttgaaaaatcaactagggctaatgagaaagaaactgaagggagacttatttgctcaggggttctagggagaaaagtgtccttactattaaatgcrgctgggcatggtggctcatgcctacaatcccagcactttcagaggctgaggtgggtggatcacttgaacgcagaagttcgagaccagcctgggcaacatg

SEQ ID NO: 542299 - DNA, 201 bp, Homo sapiens
atctttggaaatcatctaaaatcaatacacgtgtttagtttggctaataaacagctgcaaattatgatttaaaaaaaaaaaacaggttttccagctgaackaattgtacagaacttggaagccagcgtgaatctgccgcgaagctactactgtctggactgagggggcagctgtgccagaaaggaacgcagcccatcctgg

SEQ ID NO: 542300 - DNA, 201 bp, Homo sapiens
gatgtgtgattatatactgattcacgggctatagccaatggtttggcttgatggtcagggacttggaagaagcatgattggaaaattggtgacaaagaaayctggggaagaggtatgtggatggacccctctgagtggtcaaaacctgtgaagatatttctatcccatatgagtgttcaccaaaggatgacctcagcagag

SEQ ID NO: 542301 - DNA, 201 bp, Homo sapiens
tataaatagaagcaatacagtcatagttttaaaatatttgctcattgtctgggaaacacatagtgagacctcatctctacaaatttttttaaaaattaacagggcatggttgcacacgcctgtagtccccacctactcaggtagctaaggcgggaggattgcttgagcctaggaggtcaaggctacagtgagctatgatct

SEQ ID NO: 542302 - DNA, 201 bp, Homo sapiens
aaatacaatctaaattgttgcacttgcaaaaaaaaaaaaggctgaaaaatctcacttgagaatatgtctcatttacttccatctttgggactaattatatmattattcacttaactattgagaataaaatattacttactgaaaaatagcaccagtggtcttatttcctcagtttcttggtgaattaggtgtgttttagaa

SEQ ID NO: 542303 - DNA, 201 bp, Homo sapiens
aacaacaacaaaaaacagtcaatgaagttgttcactaaaatacacaggtaggaatagtagcctactgggacagaacacaatagcaagaaagatgagaaatyagggctgtctacacatggctggtaaggactacacagggggtccaagctggaacctgttctctgagttcagggaaagaaaaacatatgtaccctagccctt

SEQ ID NO: 542304 - DNA, 201 bp, Homo sapiens
gtcattttaaaaacaaatgtggttgctaacaaaagattcgggtggaccgctgaataaatggagatggcacaactggtaaacatggaaaggtgggctgtcarcacaacttgtatattcatttttatttaaggccagaatgctcaacggtgggcattatgtggtgtatctaaagattacctaattttaccccgaaggcaggag

SEQ ID NO: 542305 - DNA, 201 bp, Homo sapiens
gaaaaaaatataaacaagaactattattctcaagtgatataagatgtacctttctcagaaagataaattccacgttattgtaataaatggaacaagtaacrtatgcacaactccatgaaaaacctttgtctaaatattacgccagtttacaagttaatgtttctactgaagaatggagggatgtacccactaaacaaccct

SEQ ID NO: 542306 - DNA, 201 bp, Homo sapiens
cttggtagaatgatggaatggccttttgaagactcagttacagtgctagctaagttgcaatactttgcagggctgggtcaagtttcttcccaaggctatayatgctctcaatcaacatataatatatagtgctgtttctcccatagccaggattgataggtccaggaatcaaggggtagaaatgggaatagcaccactcac

SEQ ID NO: 542307 - DNA, 201 bp, Homo sapiens
acagacttaatttttattattcttttaaatttaatgtcagtttttattctactaaaggactttgctgaaagcaaagtaaattctttgagccacctacaaarcaaagcaaacccctccccctttagtaactgtatcactgtacatatttctttcaaacacacatattacattgtaataatctgtttaggtatctaaaaggcc

SEQ ID NO: 542308 - DNA, 201 bp, Homo sapiens
gcaaacaaacaaatcttattttactttgcctttctttaattaagtatggtttaaggaaatgtgtatgaataccaagttgatagggagtaggcttttcatgsttaattttatgtgacaacttcagtgggccacagggtgcccagatatttggtcaaacatttcaaactaagcacctgtgaaatggtacttcagaacctgctc

SEQ ID NO: 542309 - DNA, 201 bp, Homo sapiens
aaaagatcaaaaaactttaaaagtgttttctgtctctctcacacacatatgatggatgaatggatgaatcattatttttttaaccaaaagaagggtaaagygtaagctcgggtggatgcgaattttcttgtttcattcctaatgagtcaggctcctttctatgagcatcaggaagatgagatccaagattcacctgtgttc

SEQ ID NO: 542310 - DNA, 201 bp, Homo sapiens
cctctctaagtgctaggattacaagttagagccaccatgcccagacacctgaaaccaattttggaagaatttctgagggtaaaatactatcaaacagcatyacatgctacagagaaatgtttcaggaagtgtcaactgatagggcaaacttaattgtcttaggaaattggcacagtcggctgggcgtggtggctcatgcct

SEQ ID NO: 542311 - DNA, 201 bp, Homo sapiens
tgtaagattaaaaaaaggaaaggaggaaaaaacagtgtttttcaagggaaaaaattattttatatctggcccttaatttttatctctatattttttcccawaggtccatactaggaaaaaatgactgtgtccccacctgtgacaatcaggatgtttcaagacacagagagccccaagcattcacagtgggtccagaacaca

SEQ ID NO: 542312 - DNA, 201 bp, Homo sapiens
gctcgctacaacctccacctcccagccgcctgccttggcctcccaaagtgccgagattgcagcctctgcccggccgccatcccatctaggaagtgaggagmgtctctgcccggctgccccgtctgagaagtaaggagaccctctgcctggcagccgccccgtctgagaagtgaggagaccctccgcccggcagccgcccca

SEQ ID NO: 542313 - DNA, 201 bp, Homo sapiens
gctatcaggaatccaaccatcttccaacacttccttctacagaactaacatgttgttctaagccatcatcatcttttacttgggatactatagtagcttcctaactgagcttcctaactgcagcactcttccttatagtttattctccacactaaaatgggagtaattcttttaagacatgactcatgtaaccaataggta

SEQ ID NO: 542314 - DNA, 201 bp, Homo sapiens
tatcaggaatccaaccatcttccaacacttccttctacagaactaacatgttgttctaagccatcatcatcttttacttgggatactatagtagcttcctaactgagcttcctaactgcagcactcttccttatagtttattctccacactaaaatgggagtaattcttttaagacatgactcatgtaaccaataggtaag

SEQ ID NO: 542315 - DNA, 201 bp, Homo sapiens
gattctgttcagttagttgtcttagtctgtatctctcttaccaaacagcaaattcacttctcaaggcaggaaaaccctatcctctaccttacttatgctaycttacttctctatcctttgtgtaatttctgatggtgaaatcagagagctctaacaaatttaaattccaagttaatctggccagacaacagttctcaaaaa

SEQ ID NO: 542316 - DNA, 201 bp, Homo sapiens
atcaggaatccaaccatcttccaacacttccttctacagaactaacatgttgttctaagccatcatcatcttttacttgggatactatagtagcttcctaactgagcttcctaactgcagcactcttccttatagtttattctccacactaaaatgggagtaattcttttaagacatgactcatgtaaccaataggtaagt

SEQ ID NO: 542317 - DNA, 201 bp, Homo sapiens
caatgtttgcttgttggttggttggtttattgtctgtttgtctaacaaattataagctccataatgataggaacttcatcggttttgttcactgttaacakcctcactgccttaaacattaccttgcaacacagcaggttgaatccatgaaaaataaggaaggagcagaagaaaaggtgagcaggtaattgacagctggac

SEQ ID NO: 542318 - DNA, 201 bp, Homo sapiens
ttcagtctcaccaatagtgtgttagagaacctgtctcctctcacctccatcctcaaaaggactggtttttatcaatctcttccattttgcctattgaattaaaaaaaaaaaacatgccttgttttacattgggtttctttaattactggtgaaattgactatctttccttcctttctcttttttttttttttttttgagac

SEQ ID NO: 542319 - DNA, 201 bp, Homo sapiens
cccttatctcaaggtccttaactttaaactcttttaccaagtcccttctgcatgtaaggtaacatattcagaggttctggggattatggtgtggacattgytgaagatccattatttcattcactacagacctgaatgacaggagggagtgagtcctgagtctacctgggatgggaggaggttggtccaggcagatggaag

SEQ ID NO: 542320 - DNA, 201 bp, Homo sapiens
gtactaggtttagtacccggatgatgagataatctgtacaccaaaccactgtgacatgagtttacctatataacaaacaggcatatgtacctctgaacctaaaaaaaaaaaagttaacaaataaataaataaatgatgaagggataagtggtagccatatgtagaagattgaaactgaacctcttccttacaccgtacaca

SEQ ID NO: 542321 - DNA, 201 bp, Homo sapiens
gggtttatatatcccagggaaaaacaagacaaggatgtccacacctacccaccctagaatttatttttaattacaagcataaccaaaaaccacttctaatrtacagaagcaaaaagcagaaacaaagatcaggatgaccctaaactttttctctgacatgctaattgccagaaaaagtagagcaatgcctgcggagtttta

SEQ ID NO: 542322 - DNA, 201 bp, Homo sapiens
acagagcttcttggccctctatatttcagggatatttttgagtatcagataaaagctgagtatcctgcttgctggaaaacatacatacatctataattgtrctttcagtggcagggggtttgcagacccctgacagcccagccaagaacacctgcttttagcttagacagggcaatagcactcactgctgggctcactttt

SEQ ID NO: 542323 - DNA, 201 bp, Homo sapiens
gcaaatagaatcaagtggaaaagaaaactaactcccttaaactcctgggggaattaagtgacaacaaattgactattaaatgcacaacaggaagcaagccmtctgagcccttcgaccacatctttcaagccttatttctgagaatagaaaattctaagctcaatttgagtgtcactataaactcctctctgtgccagatga

SEQ ID NO: 542324 - DNA, 201 bp, Homo sapiens
ggagacacaaatatattagtatgtgtttatatttttttcaatggaaggataagccataagattttttttttacataagtaacactatgtttttttttttgttttttttttttgtttttttgagacagagtctcgctctgttgcccaggctggagtgcagtggcatgatctcagctcactgcaagctccgcctcccgggttc

SEQ ID NO: 542325 - DNA, 201 bp, Homo sapiens
acccatcagtacgactaatataaaaaacccagggaacaacaggtgctcgtgaggaggaggagacattggaacccttgcacactgttggtcggaaataaaayggtacagccactgtagataacagtatggtggttcctcaaaaaattaagaatggaattacatgatcaagcaatccacttctgggcatacaccttaaagaat

SEQ ID NO: 542326 - DNA, 201 bp, Homo sapiens
cagcgatcattagaaaaatgcaaatcaaaactacagggagataccacctcacacccatcagtacgactaatataaaaaacccagggaacaacaggtgctcrtgaggaggaggagacattggaacccttgcacactgttggtcggaaataaaacggtacagccactgtagataacagtatggtggttcctcaaaaaattaag

SEQ ID NO: 542327 - DNA, 201 bp, Homo sapiens
tctttctccctctggcttctgtgctgggacttctttgcttattcaagttctaaggttttacccttggccctccctctttcctcactctttctctgtgggttttttttttttttttttaacttttatgctgaatgtccccttagagccatatttctaagccagacttaaatccaccctagactccaaaatcaaatagctata

SEQ ID NO: 542328 - DNA, 201 bp, Homo sapiens
aaacaacaacggcagcggcgaggacaaacaaggaaggcactcttttgactaatcacaaatagcttccagggcacagtcatgggcctgagtttagtgaagasagtagtttttacaaaagaactaagaagggcccagatttttccaaaatagtacaagagaggcccgtggagaaagtcttgaataggggtaggtgggtgggtg

SEQ ID NO: 542329 - DNA, 201 bp, Homo sapiens
catgggccaccaagttaccatgtgacctaagctggccatcatgaacagtgtgttatctgacccatcaagctataaagttgggcatgatcagcagcactccrtcatcaaatggaaatagtatatatgagatgaacccaagcaggccctaaaggcacaagtaagttacaggaagaggtagcccacatgccatagtccctaatc

SEQ ID NO: 542330 - DNA, 201 bp, Homo sapiens
ctttctccctctggcttctgtgctgggacttctttgcttattcaagttctaaggttttacccttggccctccctctttcctcactctttctctgtgggttttttttttttttttttaacttttatgctgaatgtccccttagagccatatttctaagccagacttaaatccaccctagactccaaaatcaaatagctatac

SEQ ID NO: 542331 - DNA, 201 bp, Homo sapiens
gggacagaataatctccccaggaagtaacatttgggtgcatctgcattttcttacactaccatctcctacttcttcacaaacttatttagaggtgcccctcccccccccttttttgggggcatatctgagttttaaaatggcttataagattttgtcctgtatttcctctttctaaaattcacaatcctagcaaaaaccta

SEQ ID NO: 542332 - DNA, 201 bp, Homo sapiens
tccatgactgttgatagtgctgatgggagaagtgagatacctgggagaagcaacaacaagcaaggttttaggcttaagagacttggataaaatctccaagaaaaaaaaaaaaaagccttgaacaaactcgagggtttgtttgtttgtttttaaggaagatacagactatttaacgaaatgtgaatgcactggaaaggatta

SEQ ID NO: 542333 - DNA, 201 bp, Homo sapiens
agtcattttaaaaacaaatgtggttgctaacaaaagattcgggtggaccgctgaataaatggagatggcacaactggtaaacatggaaaggtgggctgtcrgcacaacttgtatattcatttttatttaaggccagaatgctcaacggtgggcattatgtggtgtatctaaagattacctaattttaccccgaaggcagga

SEQ ID NO: 542334 - DNA, 201 bp, Homo sapiens
cttctccttttatctccctcatcccttcctccaccctctctcccagctgataaccacgcttcacacttcagagaatgcagaagccacctggcttgatcctyctcatctttatcccaacaactctacctatactgcacttccatcgatcttctcctcctcctgctatagcggagaaaacgtccctccttccatcagaagcca

SEQ ID NO: 542335 - DNA, 201 bp, Homo sapiens
gagcaccaaccagacacttggaagggaggaaagaatcttaccacttctgtgaacaaaacaaggaagtggcaccaaccttcccactccattttcccaccccrggtcccaaaaaggaggttctctcattatctaggaataatttcactcaaggcagatgtggctcactgcagctgtactggaccctcccaggtcagccatcat

SEQ ID NO: 542336 - DNA, 201 bp, Homo sapiens
aacacaggaggggcctggggcattgaacagtgtgctcccctacccccacctcaccctacctcattggctaggctgtgggcaacaggtttctgctctagagrgaacacagagaatgagcttggggaggagaggcagggaggcaagcaggaaggaagcaacatccaagaaaaatgggaagcccccaatacagaggactggctt

SEQ ID NO: 542337 - DNA, 201 bp, Homo sapiens
gtccatggttggggaccactgcactagcacacactatacttggttttatttcagtacctttgctcttatttttcccaagcccagaatcctccaaacctccrtccttattccaaatccactgattctttaaccttaactggctgctcatctgggaaagtcagggcccaaaggaaaggaggagctgcttggtccagagttaag

SEQ ID NO: 542338 - DNA, 201 bp, Homo sapiens
gggcagacagataccatgtgcctctgaatgtgataccccaagaaggttttccagccccaaatgcgtcacctaaatctacctactataaggaaccatcagaygaagccaaattgaaggacagtctatggcctgtctcaactggcctgtctctttacaaaaatgacaatgccatagaggacaaagaagggctgagaggcagtt

SEQ ID NO: 542339 - DNA, 201 bp, Homo sapiens
ctcaggttcacgccattctcctgcctcagcctcctgagtagatgggactacaggcgcccaccaccatgcccggctaattttttgtatttttagtagagacrgggtttcaccgtgttagccaggatggtctagatctcctgacctcgtgatccgcccacctcggcctcccaaaatgctgggattacaggtgtaagccaccgc

SEQ ID NO: 542340 - DNA, 201 bp, Homo sapiens
cttctaggccacttggaggcatcttctcacagcctgctctgttgctgtcctctctagaaagatttgtggtcaaaggtgcttggcacacagagaaacaaagraatccatagaaaacctgttcaaaattttggctccaaatgtcttcaaagtttgatagtgtgtgagctttaatgcagaattccatgtctagtcaaatcttcc

SEQ ID NO: 542341 - DNA, 201 bp, Homo sapiens
attagccaggtgtgatagcatgcgtccatggtcctagctgcttgggaggctgtgcctcctgagcatcaagtgatcctgctggaggatcacttcagcctggrgcattaaggctgcagcaagtcatgattgcaccactgcactccagcttgggccacaaagtaagaccttgtctcctcccacctcaaaaaaaaaaaagaaaaa

SEQ ID NO: 542342 - DNA, 201 bp, Homo sapiens
tgggacaactgacaaatttgtaatacagactacaaaatactgtttcaatattaaacttcctgatttgacaattttaccgtgattatgttaagagatttttkgtccttaggaataatgaaaaaatgaagggagaagaggtataatgtatatatatacacatatatatatatacacatacatatatatatacatatatataca

SEQ ID NO: 542343 - DNA, 201 bp, Homo sapiens
gaggattttaataatcatgaggatttgaataaaatgactccttctgtgcctacaagtcagcctctttccccagtcaccactgtcatcacacaaatgggctmataaagtagccatggtggcaggaatagaggttatgcacaggctcagaaatatggacttccactcaccaaagccaacctggctacagccactgcagagcac

SEQ ID NO: 542344 - DNA, 201 bp, Homo sapiens
ttttttttaagccatgggtctatagaaatacaagagagtaaggaggaaagagagaagtttctctttgcagaagaatgccagctagtaaatttagaggaaayggggccgagtgcagcggctcatgcctgtaatcccagcactttgggaggccgaggtgggtggattacttgaggtcaggagttcaaaaccagcctggcaaac

SEQ ID NO: 542345 - DNA, 201 bp, Homo sapiens
  misc_feature (1)...(201): n = A,T,C or G
tctaactgtacaaacctaatgaaatatattctaagacaaaatgtgctgcataaaaatcttaaattctatttagtgagtttattgttaaaacagttttgggntgaaatgctagaattattatgcatgagggaaaaagagatacaaaatgaaatgtcataatttaaaatatgtgtatatgctcacactttacatatataacta

SEQ ID NO: 542346 - DNA, 201 bp, Homo sapiens
aatgggggacgcaactcccttggtagtcatccaaattatataatttggccttcaaactacaggcaaataggagagtattcattatatggtcacttaacaayggtcttgggcaaagaacaaactctgtgtatggtgtccactgccctgttataaactgaactgtgcaccccaccaccaccacctcccaattcgtatgctgaa

SEQ ID NO: 542347 - DNA, 201 bp, Homo sapiens
ttagcaaagaagacaagtaaatatgattacttatgaagcaacacataaaagtgctacccaatgttataaagcaaattatctttccaaaagtcctaaggaakagctgtacatgtaaatgggggacgcaactcccttggtagtcatccaaattatataatttggccttcaaactacaggcaaataggagagtattcattatat

SEQ ID NO: 542348 - DNA, 201 bp, Homo sapiens
tgcacgttaatttttttttgtttttacaatattcttgtattgtcacaaataagtatttggagtgataaaatccccactccatcccctgaaaaagatttctsgcagcatagttctatcctaggagagtgacatatgtaagttcaaaatgatccattctttcctttaacatgttagtctatatgctgtcttctaattcttatg

SEQ ID NO: 542349 - DNA, 201 bp, Homo sapiens
ctgcctgcagggcctcagatctgggaaagggtttttactttaagcattcttaattttaaaagttataaatgaaaaggaattttgagtaatccccagtgcaytttaattgctatctgtatcatgtcttgcagacaattttccccttgccaccacatagaacacatcttcatttttattacgtgtatcagggaaaatagggtt

SEQ ID NO: 542350 - DNA, 201 bp, Homo sapiens
gaccatgccattgcattccagcctgggcaacaagagtgaaactctgtctcaaaaaaaaaaatttttttttgcaaaattcaacaccctttcatgacaaaaawattcaagaaaattggaatagacaaaattacctcaacataataaatgtgatatatttaaaacccacagtaaatatcataattaacagtgaaagactgaaag

SEQ ID NO: 542351 - DNA, 201 bp, Homo sapiens
gggaaggggctctttttaaccatatgcatgataaatacacctgatagcaataacttaagcatgacagggtcaccctgaggatgaccctgtatagcagacamacctgaatgtgtgtactgggctagggaatccagtactggccaataggaagattctgttccttgtctgtaaggaacatctgagcccccatcccctcccata

SEQ ID NO: 542352 - DNA, 201 bp, Homo sapiens
aacacttcaaagccaggtctgaagagatcaaattgtttccaggtaacttaaccacatgccagaacaaagctcaagaatatttttaggactataaaaatatmtagaacccaacaaggtaaaattaacaaaagataaattaccaaaaatgttgccagatttcacccctctaatgtactaagttacactgttatgaataggaat

SEQ ID NO: 542353 - DNA, 201 bp, Homo sapiens
ttctgttacaggaaaactaaaaattctgaagagtagcctcataaatgtatagaggacctaaaaatactggttaaaaaagtcctcagctggcaaacgcgcakctgtgtgcacacacacatattcattgcacgttaatttttttttgtttttacaatattcttgtattgtcacaaataagtatttggagtgataaaatcccca

SEQ ID NO: 542354 - DNA, 201 bp, Homo sapiens
agcaaacgtttcctatcttgaagttcttagctgagtttgagggagatatactaatttaattaaaaaataaaaagctggacgatgtgcctctggtatctcargatcaagtttttgaattcacttctcctccctgcctatggttatccctagtacacccccgactaaggagccagacatcactggggctgggcagaagctcag

SEQ ID NO: 542355 - DNA, 201 bp, Homo sapiens
acccacccatgcatttacctatctgtctcttcacctttccatctctgctgaatcattcctatcagcacataaacatgcactctcactataaaacaacaggaaaaaaaaaatcccttagaggctatagcccatttctctgctcttcatggcaaaagttttcaagagtgttcaaccgatgctgtttccctttcttatctccag

SEQ ID NO: 542356 - DNA, 201 bp, Homo sapiens
agcttagacatcctttgctccattaactgtgtcatttatgtaaagaaaaaagaaggatcaatctgatagattgaagtttaaaagtataaaatgcagtggattttttttttctgtattgtagctattctaagaatacagtctgaaatgcctacatacttttaattacataacatgttagctaatcatattttcagggaaaaa

SEQ ID NO: 542357 - DNA, 201 bp, Homo sapiens
ataaatagaagcaatacagtcatagttttaaaatatttgctcattgtctgggaaacacatagtgagacctcatctctacaaatttttttaaaaattaacagggcatggttgcacacgcctgtagtccccacctactcaggtagctaaggcgggaggattgcttgagcctaggaggtcaaggctacagtgagctatgatctt

SEQ ID NO: 542358 - DNA, 201 bp, Homo sapiens
ataagaatatgcaaaatttaaattatattccatttaagagaaaaaaggaaggaatagaaggaaagaataatcaaaatacaatctaaattgttgcacttgcaaaaaaaaaaaaggctgaaaaatctcacttgagaatatgtctcatttacttccatctttgggactaattatataattattcacttaactattgagaataaa

SEQ ID NO: 542359 - DNA, 201 bp, Homo sapiens
ccagatggttccattaccaagttccacagttactcttcacaagcactaaattcacaatgaagggtgggggagggtggatgttccaccacagcaaagtttgygataaactttaattcttatattttataatgttacagttgaaaaaacacacaatatgcctaatactatcaagactttcttctaaattctgggaaaacatct

SEQ ID NO: 542360 - DNA, 201 bp, Homo sapiens
taagaatatgcaaaatttaaattatattccatttaagagaaaaaaggaaggaatagaaggaaagaataatcaaaatacaatctaaattgttgcacttgcaaaaaaaaaaaaggctgaaaaatctcacttgagaatatgtctcatttacttccatctttgggactaattatataattattcacttaactattgagaataaaa

SEQ ID NO: 542361 - DNA, 201 bp, Homo sapiens
tcaaaaccctcaattgtctgatgtggtaagtttgtgaccatgatatatttcatccctttaattacagtagctgatcccccaaaacccagaaggctcaggasaccctggcccaacagcactgattaatgagcactcgaaccaaaggctcactaacaaagtgtgacatcctccaaaaacctgtctaaaaacaagggaaactta

SEQ ID NO: 542362 - DNA, 201 bp, Homo sapiens
ggcgggagaatcacttgagcccgggaggcagaggttgcagtgagcagagatcgtgccactgcactccagcctgggagacagagcgagactgcgtctcaaaaaacaaacaaacaaacaaacaaaaacaaaacaaaacatgtatttgattttttaaatctcaagtttataatggaaatttcttaaactgtacagacaaaaaaa

SEQ ID NO: 542363 - DNA, 201 bp, Homo sapiens
gcgggagaatcacttgagcccgggaggcagaggttgcagtgagcagagatcgtgccactgcactccagcctgggagacagagcgagactgcgtctcaaaaaacaaacaaacaaacaaacaaaaacaaaacaaaacatgtatttgattttttaaatctcaagtttataatggaaatttcttaaactgtacagacaaaaaaag

SEQ ID NO: 542364 - DNA, 201 bp, Homo sapiens
aaatggtgttttaggaaaactggtctgcagcagagaatggataaggatctgaaatggttaaagtaatactgatatatagtagtaatactctggactgggawggtaggaatagaaaatgaaaaattagtctgggcgcggtggctcatgcctgtaactctagcactttgggaggcagaggtgggtggatcacctgaggtcagg

SEQ ID NO: 542365 - DNA, 201 bp, Homo sapiens
cgggagaatcacttgagcccgggaggcagaggttgcagtgagcagagatcgtgccactgcactccagcctgggagacagagcgagactgcgtctcaaaaaacaaacaaacaaacaaacaaaaacaaaacaaaacatgtatttgattttttaaatctcaagtttataatggaaatttcttaaactgtacagacaaaaaaagt

SEQ ID NO: 542366 - DNA, 201 bp, Homo sapiens
aggtgtcaagtcagaggagaggtgatgaaaggagatgttatgatggacacaagctgaagtggagtgactgctagctttgaagatgaaagaggccacgagaygaggaatggtggaaaaggcaaggaaacagattctcttctagaacccagaaaagactcagctacagtcaggtaataaattttaaggctggatgtagtggct

SEQ ID NO: 542367 - DNA, 201 bp, Homo sapiens
atgtttctgagtggggtactgagttctctgtatacagggtgaaaatgagactgaagaggctggggacgtctcaggcctagggaacaataagtagcaagatmcagatccagaattgcaatgatatatttgtgcaacagtggcagactaatatgagttgaaactcagttgagtctgggggaagacagtcatcaaaaggagggg

SEQ ID NO: 542368 - DNA, 201 bp, Homo sapiens
gggagaatcacttgagcccgggaggcagaggttgcagtgagcagagatcgtgccactgcactccagcctgggagacagagcgagactgcgtctcaaaaaacaaacaaacaaacaaacaaaaacaaaacaaaacatgtatttgattttttaaatctcaagtttataatggaaatttcttaaactgtacagacaaaaaaagta

SEQ ID NO: 542369 - DNA, 201 bp, Homo sapiens
tttaacttgtgttcccctgtctttgaatatacaagtacatgtatatgttactttgaatacagaagtacatgtatatgatcttttccaggtacatgtaagtrtaagttgactttaataagttacttcctgtaagataatcatttgctttttctcccctgtctgtaaggaacattaagtgcatttcatggataaaacagagtc

SEQ ID NO: 542370 - DNA, 201 bp, Homo sapiens
tccaaaatttaagcagaaatctgtattctaaatggacaggagttctaagaacaaagagattagggaagaaagggagctaacatggaaaaaggagaacttgmaatgtcttggtttgaatagatcagaacacacaggaaaagacattcgacatggcaaagataggtgggtagccatttttacctcatataatgaggtaatggg

SEQ ID NO: 542371 - DNA, 201 bp, Homo sapiens
aatatgcatgttctccaaatataccatttgccaaatacttatttaatacctaatatgtgcccaagactctactagacactctaacagtgtgaaagatatgmaagacaggacatggtccctacttttaaaaaagtaccttctaattagataaaatttagggataacagttttatctcatatgtttccaaaatttaagcagaa

SEQ ID NO: 542372 - DNA, 201 bp, Homo sapiens
aatttagaagatctagcaactgaaaatatttttccttttttatttatgtcaggagtactgaggaagcggatgatcatagctgctgggatccatgacagcayttgtaggtgagtaatgaattgctttagatgagagacaaacccgagacaatatgtttccagtagggctcagctgcttacaagataaatactcctctgtcac

SEQ ID NO: 542373 - DNA, 201 bp, Homo sapiens
caactctattatatgtctctccttttaaaaaaaatttagaagatctagcaactgaaaatatttttccttttttatttatgtcaggagtactgaggaagcgkatgatcatagctgctgggatccatgacagcatttgtaggtgagtaatgaattgctttagatgagagacaaacccgagacaatatgtttccagtagggctc

SEQ ID NO: 542374 - DNA, 201 bp, Homo sapiens
gaaagttgtggctatgagaataaataacacaggtttcttacacttaaacagcactttaaacaactccaatcataaaaagataagatctttttgcctgtttkttttttttttttaatgactgagtgattacaagatttcccacattttggtcttcacggacctccaaattgtgaatgttactgatcagaagacaaacactat

SEQ ID NO: 542375 - DNA, 201 bp, Homo sapiens
gtttaagtgaaagccaaaagaacaattaatctcagatttattatcaatgtgaaacgtttagctttcttagttgacatgttccttcggtcacagttaacttwaagagcatactgaatagaataagacatattaagccgaattatctgatgatcatgtaaattattaatgagtctataaaatacagaaaaagctgtaactgca

SEQ ID NO: 542376 - DNA, 201 bp, Homo sapiens
aatgtgaaagacataccattagaaaagggaaaagaaaggaaacaacaggagaggaaaagctgccctgcaaacaaaccgctgccatgctctcacaagcaatyatagacatatgaaatatgaattgcaattgatttttcttcctggggtcactgtgctctgcgttttacgcactctaggcatttatttgggcagcaaactgac

SEQ ID NO: 542377 - DNA, 201 bp, Homo sapiens
tccaagactttggggacccagttcctaacatgtttagaagggatttctggagtttttatacatttcttaagctataaagacagaataggaaaagaaaaagaaaaaaaaaaacagagatgtctgttaattatagtgatattatttggggaaaaaaggccaataaaagaaagtgaactactgctatctgcaataaaaaataga

SEQ ID NO: 542378 - DNA, 201 bp, Homo sapiens
cacttcaaaggaaaacaaagtacaccaacccacaccttcaagaatctcaaagcaaaataaccattcctagtgtatggtctatgcctgtctacagtgcaatrcactaccaaatccagtacagggcaccagtaataagaatggtaatgtggataagaaaaaaaaaatccaaattttgctccactgtaaatcagagaatgtgaa

SEQ ID NO: 542379 - DNA, 201 bp, Homo sapiens
ttgtcaagactgtctcttatgtgaaaaccttgagaaattagttgagttttctactactagaagaagagaaggtcaaaaatatgaaatgcaacttcattttrttatagaagaaagtaaattaaatttcaaccccaaactctttattgccagagtaggagtggatattgggaagagacaaagctaacatttacttgggatcaa

SEQ ID NO: 542380 - DNA, 201 bp, Homo sapiens
tcctagggttattacaggctgaatatcctttatccaaattgcttgggaccagaagtgctgcagatttagtatttgtattatacttactggttgagcatccsaaatttgaaaatctgaaatccgaaatactccagtgaacatttcctttgagcatcatgttagcactcaaaaagttttgaatttgggatgctcaacctgtat

SEQ ID NO: 542381 - DNA, 201 bp, Homo sapiens
tttatatagttttaaaccaaataaatgttctatttatttataaatttacatttaaatcaagaggttttggaaaacctcataaaaagagcctaactgcataytaaattgattacataacaatacagaacaaataattcaagttactttttttttttttcgatttggagtcttgctctgttgcacaggctggagtgcaatggt

SEQ ID NO: 542382 - DNA, 201 bp, Homo sapiens
aagcaaagtaaagccaagttaaagttcttggagaattttttagggtggtggagaaaatgacgtaggattaaaagataagtgaaaagggaataacgttttcmtttttgagtcaatgttattcaatgtctaggcaccacttaaatcatctcctgtggcactggtggcctgtagccaaacccagagaacacaagcagagtaagc

SEQ ID NO: 542383 - DNA, 201 bp, Homo sapiens
ctcatatttcaggggcaaagcatggagtaggtattctctgtcacactagatactggaaggggcacagagtaagtaaattagtcaaggcacacacccgactsagcacaccagcatttcaagtgtgcctcttgcaccttaaactccttctgcttgtcaagactgtctcttatgtgaaaaccttgagaaattagttgagttttc

SEQ ID NO: 542384 - DNA, 201 bp, Homo sapiens
actccactcttcttctctgcaagtattaatggtctaccaagtgccaggttcagagctagtcattggagatacaacaatgaacacagacaaaaacccctaamagaccttacttacattttaatgagggtggagggtgggacaatcacacaaattaacagatattagtgtcacagagaaaaataaaccagggtaataggacag

SEQ ID NO: 542385 - DNA, 201 bp, Homo sapiens
gcctttttcgctttggtaatgaagagtctaactggggtactctgagactgcgagtcccttgttaatgtaacaatgctgtacttctcatcaagtattcataygtggaataagtgcatgtctttttataacagtattttgaataggtaatacagtcatatggtttaaaaagaaaaaaaaagatacacagtgaggtcagtctcg

SEQ ID NO: 542386 - DNA, 201 bp, Homo sapiens
atatgtctacgcataacacatgcagtcacgcaggtacttaaaatggacttgaatctaattcaacgctgtgatttttacagctataaaaactgaagtctaagtctgggtgtggtggctcatgcctgtaatcccagcactttgggaggctgaggcatgtggatcacttgaggtcaggagttcaaagaccagcctggccaacat

SEQ ID NO: 542387 - DNA, 201 bp, Homo sapiens
tataaaggaatcacttgttctattttaagtcagagatgctcaacaggcatccaagtagagatgctgggtaggtagttgggtacaagtctgtaaatgtgggrgtcagaatatataggtaattagagctgtggaaatagaggagatgacattaggagttaggtacagatagagaaaaagggctgtgggggacagaatcctaaa

SEQ ID NO: 542388 - DNA, 201 bp, Homo sapiens
ctaaatgcagaatatgattaaacatgtgttcaaagaactgctcaaaacagaggctgaataaatagcagtggaatatgatacaacagctccttcagtttaastcaagtccacacaggaagcactggcatgcccttgacataggagatgctcaagaaattgaggttctccttccttttccccctagcattcactactacaggg

SEQ ID NO: 542389 - DNA, 201 bp, Homo sapiens
caaagctgttctttgtggggaaaactttgcatctgtaaagaatctgtattaacacagctagaagatctttttcttccagaccctcccaatcctaaagagaytaactaagatctgaataggaaacatttgtcacctattgtctctaagggcagccactattagacttcaaaagaactttggtctctacaatctttatcttaa

SEQ ID NO: 542390 - DNA, 201 bp, Homo sapiens
ttaaccagcaaattacatgggatctgagagggcttttagctttgtggaaggttttctgctccttctaaagtttccaggaaggttaaaaaaaaaatcctctragagttttcccaaatcaaatgaaatagcaaatgaagtgaggcaatggtcccgtactcatgaaattcactgcttaccatattccccatcatcctgaaacag

SEQ ID NO: 542391 - DNA, 201 bp, Homo sapiens
tgtgacaggctgcctcctctagactggtcaacagaggctgggcaaggcagggggtgctggttttaatcccacagtagggacttatttcatcaggtacccaraagaaacctcactaggatctgtttcctcccaaaacacataaacaaaaacacacttccctgggaaggaagtgagccccagactccaggtttgtttctcttt

SEQ ID NO: 542392 - DNA, 201 bp, Homo sapiens
taggtatgcacggtttccaaacaaaatttttttctttaggatttgggggtgggctcataagcccttcttggcttccaccctggtccccagatctacacccyttttcacaatgcagtgggcatgccgggttgcaggctgctccttaactatggaagcaaatcaatagcagctgaatgccatctgcttcgggccgcagaacag

SEQ ID NO: 542393 - DNA, 201 bp, Homo sapiens
tcccagcactttagaaggctgaggcaggcagattgtttgagctcaggagtctgagaccagcctgggcaacatagcaagaccccgtctctactaaaaatacaaaaaaaaatttaaaaattaaaaaataaaaagactataaagtatgaccaagtagggtttattcctggaatacaaggatggttctacatataagcatcaatc

SEQ ID NO: 542394 - DNA, 201 bp, Homo sapiens
ttcacaaaaactaaaacatggaagcaactcaggtgcccactgatgtacagctaaaaaaaatatggtggctgtgtatgtgtgtgtgtgtgtgtgtgtgtgtrtatatatattttttttttcccaagtgttttaaaggttttatttttacaaattacagcagatggacaactaagccttccctgcagagactgtgttccaaat

SEQ ID NO: 542395 - DNA, 201 bp, Homo sapiens
actaaaacatggaagcaactcaggtgcccactgatgtacagctaaaaaaaatatggtggctgtgtatgtgtgtgtgtgtgtgtgtgtgtgtgtatatatattttttttttcccaagtgttttaaaggttttatttttacaaattacagcagatggacaactaagccttccctgcagagactgtgttccaaatcaggcctgg

SEQ ID NO: 542396 - DNA, 201 bp, Homo sapiens
tctggtgttcagccagcaagaaaaaaaagggacctcagttctgcaactgcaagccactgaattctgcctgaatgagcttggaagagggccccgagcctcasgtgagatggaacagcagggaggagaagcagggcaatcactgggggaagagggggagtagcttccatcaggaaagtgtttcaagaggacaggcatgatcag

SEQ ID NO: 542397 - DNA, 201 bp, Homo sapiens
agagactaggagaaacaatgtctctgactctgacgatggagaaagaggccacgagccaaggtgacctctagaagctggaaagaatggtttctgccctagakcctctagagcaaacgtcatcctgctgacaccttgattttagcccagtgaaacccactttggactcctcacatcaggaagtgtaagacaataaatttatat

SEQ ID NO: 542398 - DNA, 201 bp, Homo sapiens
agagtcacttacagccaaatctaatcccacatgaataagggatgtggctagcactgctagctgcttagccaatattcatttcctccttctttttttggggraaaaaaaatcaatgtcattcagagggctaagatgctgagctataaactggttttccaggttcccttttaattagggtgaccaggtgacagagttaccaat

SEQ ID NO: 542399 - DNA, 201 bp, Homo sapiens
taaaacatggaagcaactcaggtgcccactgatgtacagctaaaaaaaatatggtggctgtgtatgtgtgtgtgtgtgtgtgtgtgtgtgtatatatattwtttttttcccaagtgttttaaaggttttatttttacaaattacagcagatggacaactaagccttccctgcagagactgtgttccaaatcaggcctggga

SEQ ID NO: 542400 - DNA, 201 bp, Homo sapiens
caaaaataaccaaatcctaatcctgtggatgttaccttatatgccaaaagggactttgaagatttggttaaattcatggtcttaaaatgggaagattctcytggattattggggtgggctcaatgtaatcacaaggatccttataaaagggaggcagcagaatgagttggaaagagactaggagaaacaatgtctctgact

SEQ ID NO: 542401 - DNA, 201 bp, Homo sapiens
atcaaaattaaacttctgaaaacaaaagacaagaataaaatattgaaaacagcctttttaaaataacaccttaaatataggggaaaaacaatatgactgattttttttaaaaatcagaaaccacgaagacaagaaagaagtgtcacaatattttgcaagtgctgaaagacaagaactgtcaacccagattcctatatctag

SEQ ID NO: 542402 - DNA, 201 bp, Homo sapiens
aagaactattattctcaagtgatataagatgtacctttctcagaaagataaattccacgttattgtaataaatggaacaagtaacgtatgcacaactccaygaaaaacctttgtctaaatattacgccagtttacaagttaatgtttctactgaagaatggagggatgtacccactaaacaaccctcaaatgaagaagtga

SEQ ID NO: 542403 - DNA, 201 bp, Homo sapiens
acatctttcaagccttatttctgagaatagaaaattctaagctcaatttgagtgtcactataaactcctctctgtgccagatgattttatgcacatatttrtatccgaagtacaaacaacttaaaatgtttacactgagtagtaatggaaatcatgtgtcaaatacaatgaggggaacagagtagagctttcttcagaact

SEQ ID NO: 542404 - DNA, 201 bp, Homo sapiens
gtaacgtggggtacagagagaagggcagtggggaagtagcagctcctcttctaaggcgttctactaaaagagaaggaaggagtacaacgggatgagcacargagggaagcatggggctgaaggcaggctttattatgtgaaacagaaactactgcgataggttcatatagtgatgagactgattcagtattgagggggaaa

SEQ ID NO: 542405 - DNA, 201 bp, Homo sapiens
attgtaaggcccttgtaatgttcaagaggaaagtaaagataacaggtaactattaaaaaaacaaatataaacaaatgggggaacaatagaaagaaaaaaarcagtattggtcaccaatccaaaagcagacaaaaaaaaaatcatagaaaaagatggagtgatagcaccgatggctgaactaaccccaattatatcaataat

SEQ ID NO: 542406 - DNA, 201 bp, Homo sapiens
ctacagggagataccacctcacacccatcagtacgactaatataaaaaacccagggaacaacaggtgctcgtgaggaggaggagacattggaacccttgcwcactgttggtcggaaataaaacggtacagccactgtagataacagtatggtggttcctcaaaaaattaagaatggaattacatgatcaagcaatccactt

SEQ ID NO: 542407 - DNA, 201 bp, Homo sapiens
tctacttatccagggagttgggggatgatagtcaattaggcagtaatagtttatgattatcaggtcttttcctttatctgttagagccttatgtaaagctrtatgtcaaagttgaaaaatttctcctgacttagaaaaatccacaacacatgaagaaaggagcccatactggatgttaggaaactaaaattccattcccaa

SEQ ID NO: 542408 - DNA, 201 bp, Homo sapiens
cccctctaatgtactaagttacactgttatgaataggaatgtctggcccatccttgtcaacatagtcctactttggccaatctggtgcataaaatgagaatttttttttttttttttttttgagacagagtcttgctctgtcgccccggctggagcgcagtggtgcagtcttggctcactgcaagctccgccccctgggtt

SEQ ID NO: 542409 - DNA, 201 bp, Homo sapiens
gaggcaggagaatcacttgaacccatgaggtggaggttacagtgagctgagattgtgccactgcactccagcctgggtgacagagcaagactctgtttccaaaaaaaaaaagaaaggaaaggaaaggaaagggaaggaaaaaaggaagaaaggaagaaagaaagaaagaaatcgcttatattgtgtaacctgaggaagttt

SEQ ID NO: 542410 - DNA, 201 bp, Homo sapiens
acagtaacactttctccgtgaggacttaagttaacatttataaagcagagtacggtacctggcacagattaagcaataggtactatgtctaagtgtccctsaatcttagtcaatgacaataaactcatttaaactagcatttaatgagatttcaaaacccctcattctaacatatctgaatgcctttttcgctttggtaat

SEQ ID NO: 542411 - DNA, 201 bp, Homo sapiens
aaaacaggttgggtttcctttgtttaaaatctcagatagaacaaaattaattttgaaaataggtaatttgacctttcttgtttttaagttagcctcttacktaaatacagcacagaaaatgaaagcatatgcatagtttttgctattcaagttattgatttaaaaaatcatctatctacttatccagggagttgggggatg

SEQ ID NO: 542412 - DNA, 201 bp, Homo sapiens
ttacagaataataagaaaagaacgtccatttggcataacacttgaaatatttcacactgagcagtacagacttagtaatttataaggcaacgttgtctctaaaaaaaaaaggctattggagctatactcaatataaaatgcttctttttcccctcaaatgaacattccttggaacagttttttaataagagagggcaaaat

SEQ ID NO: 542413 - DNA, 201 bp, Homo sapiens
tacagtgagctgagattgtgccactgcactccagcctgggtgacagagcaagactctgtttccaaaaaaaaaaagaaaggaaaggaaaggaaagggaaggaaaaaaggaagaaaggaagaaagaaagaaagaaatcgcttatattgtgtaacctgaggaagttttcaactatttttccttctattattccctttcctactt

SEQ ID NO: 542414 - DNA, 201 bp, Homo sapiens
catttctattcaacatagtactcaaagtttaagccagagcaattaggcaagaaaaagaaataaagctatcctaattggaatggaagaagtaaaattatctwtgtttgcatgtgatatgatctcacatgtagaaaatccttaagactctacaaaaaaactgttataactaacaggcaaattcagcaaagtagtatgatacaa

SEQ ID NO: 542415 - DNA, 201 bp, Homo sapiens
gcaaaagagacacggtctctgccccatggaaacctcagggatagacagattggccaatggtaagcacatgactgacttaaatgggagctacaaagaaacayagacagtgccaagaagtcatcttaataggtaagcctggcagtgatgaaccaccctagggatttaacactgccctctactcttcacggcaggccaggttaa

SEQ ID NO: 542416 - DNA, 201 bp, Homo sapiens
catgttttcagagaggtgttatctacccaccccatctaaaacagcaactagctcccatcattctctatccccagacctggctttacttttcttctgtgcatttaccatggtctggtgtgtgcatgcacacacacacacacaaacatacacactcacatacacacaccacacacatacaatgtttgcttgttggttggttgg

SEQ ID NO: 542417 - DNA, 201 bp, Homo sapiens
caaccatgaacaaaactatgatgcctgttttccccatttctattcaacatagtactcaaagtttaagccagagcaattaggcaagaaaaagaaataaagcyatcctaattggaatggaagaagtaaaattatctttgtttgcatgtgatatgatctcacatgtagaaaatccttaagactctacaaaaaaactgttataac

SEQ ID NO: 542418 - DNA, 201 bp, Homo sapiens
atttattaagtaccttccctgcatcagactctgagctggggctgagtgggcagcaaaagagacacggtctctgccccatggaaacctcagggatagacagwttggccaatggtaagcacatgactgacttaaatgggagctacaaagaaacatagacagtgccaagaagtcatcttaataggtaagcctggcagtgatgaa

SEQ ID NO: 542419 - DNA, 201 bp, Homo sapiens
aactatttttccttctattattccctttcctacttgtgtattgtacctcccatcccctttccttctgggactccagaaagaagtaggatgttagacctggmttggtcctctatgtcttttgtttgacgtttctgtatctgtgctttatggaacagttttccaactagagagagcatctactgaatgttttcagttggataa

SEQ ID NO: 542420 - DNA, 201 bp, Homo sapiens
tggctttacttttcttctgtgcatttaccatggtctggtgtgtgcatgcacacacacacacacaaacatacacactcacatacacacaccacacacatacratgtttgcttgttggttggttggtttattgtctgtttgtctaacaaattataagctccataatgataggaacttcatcggttttgttcactgttaacagc

SEQ ID NO: 542421 - DNA, 201 bp, Homo sapiens
tttttgggtcagagtaaactcctgagggctgattgacattctctttgaaactaattacattaaacagcagatgcccacttcaagtttgagcaggagagtayaagacgttcagggaattcagtgcagttggggttaatgctctcattttttaggagcttctttaagcttagacatcctttgctccattaactgtgtcattta

SEQ ID NO: 542422 - DNA, 201 bp, Homo sapiens
caaagctctaattcatgccattctcaagagccggaactaaatctaaagcatccaacatctgaaaactcttacattgctaccaatgtaggaagaataaatcttttttcaagccttacatctaggtttcatgtattagactttcaaaactaaatcccctacatcacctggatgtgaattttttttctttctctccatagtgtt

SEQ ID NO: 542423 - DNA, 201 bp, Homo sapiens
atatctttctgccttgaacctacaagctctcaatctactctggcttcaaagttgcattcctcattagtgaaaagcatgcactagaaagaattattccattrggtagtttgtgaaagataaccacaccagtgaaatgtaatcttgtcattactacaagatctgcctgtagtaatggcgcattcctttggtaagtatttatta

SEQ ID NO: 542424 - DNA, 201 bp, Homo sapiens
ggttgcagtgagctgagaccatgccattgcattccagcctgggcaacaagagtgaaactctgtctcaaaaaaaaaaatttttttttgcaaaattcaacacmctttcatgacaaaaatattcaagaaaattggaatagacaaaattacctcaacataataaatgtgatatatttaaaacccacagtaaatatcataattaac

SEQ ID NO: 542425 - DNA, 201 bp, Homo sapiens
ttctaggtgatgccgaagctactgatccaggaaccacactcgaaaactattgctctagaagaatcagcctttacccattttcaaaacttatcctcttctcyttttatctccctcatcccttcctccaccctctctcccagctgataaccacgcttcacacttcagagaatgcagaagccacctggcttgatcctcctcatc

SEQ ID NO: 542426 - DNA, 201 bp, Homo sapiens
attaatatcattatattttagttttaattattttcctaacatgtaaaaaatcctgagttaatccaccattgggatatttttaatatgctttctgaaacgcaaaaaaaaaaaactaaaatgactaatttttctgaccatgaagtcaaaacaccacatcaactactacagaagctactataatcttcctgcacacgtttcttt

SEQ ID NO: 542427 - DNA, 201 bp, Homo sapiens
gaatttcaaaagtaaaaatgaaaacaaaaggcagtagagaagggggtggctgtgaacagagaatagcctgggttgtagaccaagggattagccttggagarctgaggtctcaagacgtcctgacacacagcaaagcatacaaaccctgaacaccacagtggtaggattaaagttctaatgcaactttgttccattggattt

SEQ ID NO: 542428 - DNA, 201 bp, Homo sapiens
agaatacaaaaaagactggtttcactttaaatttaagctcttatcctcaaaatattgtccagaaatcttgttacttttctctagaacagtagttctcaaaytaatcagaatcgcctagagggcttgttaaaacagtttgcttggtccaacccagagagtttctgatctagctggtcttgggtggggcctaagaattttcat

SEQ ID NO: 542429 - DNA, 201 bp, Homo sapiens
cagcctcttcctttaaagtgagtcagtaagggcaggggtgtcatcaggtatggaagtaacaaacacagaatttgggatgcagaatgttaaaaataaaggtyccaaatggactgttcaagcttaaagtatttggtaaggaagcatcaggatcaaggctcagaataaaagcatctaagataaaaaaagcacaaaatattataa

SEQ ID NO: 542430 - DNA, 201 bp, Homo sapiens
tgtgctctctgaaacatgtgctgtgtccactcagggttaaatggattaagggcggtgcaagatgtgctttgttaaacagatgcttgaaggcagcatgctcsttaagagtcatcaccactccctaatctcaagtacccagggccacagggtcctctgcctaggaaaaccagagacctttgttcacttgtttatctgctgacc

SEQ ID NO: 542431 - DNA, 201 bp, Homo sapiens
caaatgagtagaaggaatgtagtgaggttttctagatctcaataacagaattaaagccagctaggaagttttctgaacagtctagagctcagaaagaagaycatgacagagtatgccatgcaagcataaagagcccacatcccaaatcacaccccccgataaggctgaattgacagtttccaagcagcttatgtaaagaaa

SEQ ID NO: 542432 - DNA, 201 bp, Homo sapiens
gagacctttgttcacttgtttatctgctgaccttccctccactactgtcctagaccctgccaaatccccctctgctagaaacacccaagaatgatcaattaaaaaaaaaaaaaaaaacccacatgattatctcaatagatgcagaaaaggcctttgacaaaattcaacaacgcttcatgctaaaacctctcaataaattag

SEQ ID NO: 542433 - DNA, 201 bp, Homo sapiens
tcctaggctgccctctgtcccacactagagcagaaccctcctggtgttcagtccctggagaggggtcatctaaagagccacttccactgggggctgctackgttctttacacagctcaccattcccatggaagcttaaggaataaaagatagaagaaaaaattggggtgttatactttattcactaaataataatttcctg

SEQ ID NO: 542434 - DNA, 201 bp, Homo sapiens
gacaggtgaagaatgcagttttatgatttctgtgctaacagattttgggcagggtccttacacaaaggcctaaaattttatgacgcacatcaccaccaccrtggtttgaagatatagctgcaaacttaaaaccaaaccacagtggctttcttcagatcctccgtcctgaatgtttgaaaactgaatctgaagaaggagaga

SEQ ID NO: 542435 - DNA, 201 bp, Homo sapiens
tagccatggttcacatactgagtggccccaattcctcatcaggttttgtaatactgttacccagttcaggtcatacaaatgaagtgggtaactatacaggytgccagtcctcctaggctgccctctgtcccacactagagcagaaccctcctggtgttcagtccctggagaggggtcatctaaagagccacttccactggg

SEQ ID NO: 542436 - DNA, 201 bp, Homo sapiens
ctatcaggaatccaaccatcttccaacacttccttctacagaactaacatgttgttctaagccatcatcatcttttacttgggatactatagtagcttcctaactgagcttcctaactgcagcactcttccttatagtttattctccacactaaaatgggagtaattcttttaagacatgactcatgtaaccaataggtaa

SEQ ID NO: 542437 - DNA, 201 bp, Homo sapiens
acaggagaaaagcatcaaaggttttatcataatctctgacttcaatacaactattcttaagggtcatttttcataacttatcatgggtaaattttgtccartaagtacatgttgtttaaagaactatgagaatcagtggtgaaatatcactcacacaactgatcaggaatactgtgtaagggtggtgcataagatacataa

SEQ ID NO: 542438 - DNA, 201 bp, Homo sapiens
gtgggagccaccaggcccagcctgttggcattattttatttatttatttatttgtttattattatttttgagatggagtctcgctctgtcgcccaggctgragtgcagtggcacgatctcagctcactgcaagctctgcctctcaggttcacgccattctcctgcctcagcctcctgagtagatgggactacaggcgccca

SEQ ID NO: 542439 - DNA, 201 bp, Homo sapiens
ttactgagtgataaagtggtctgatatacattatgtatacatgtgtgtgtgtgtgtgtgtgtgtatctccccacaggagaccactactatttaggaaataygataaattattttttaactggaagatttagtcaagaaccctcaactatcacctgttttggcattagaatcaactgacatttattgccatttggacagctc

SEQ ID NO: 542440 - DNA, 201 bp, Homo sapiens
ggcctacactatgattatttttatatgcatcttttgatcccataaatctgctagcagtaagggcttctatatacagaagaaaaaataattccctttcatcwgtgtagtgctggggacagcctcataccacttttttttttttaaatagtaatcgatgagagcagaagataacaaagtgaggacaaaagcagatgctgaatt

SEQ ID NO: 542441 - DNA, 201 bp, Homo sapiens
ttcgacatggcaaagataggtgggtagccatttttacctcatataatgaggtaatgggagatattggctcagctgtcactgaagagctcttaggaggagtraaaaataaagtcggccagtaaaggtgttagtagtagacagaataatggttccctcaaagatgcccaagtcctaatccccagaatctgtgaatgtattcgc

SEQ ID NO: 542442 - DNA, 201 bp, Homo sapiens
gaatatttcaaaacctggcaacatcaataatactgttaagatatgtatatcaaattttctttactgagtgataaagtggtctgatatacattatgtatacrtgtgtgtgtgtgtgtgtgtgtgtatctccccacaggagaccactactatttaggaaatatgataaattattttttaactggaagatttagtcaagaaccc

SEQ ID NO: 542443 - DNA, 201 bp, Homo sapiens
taggattacaagttagagccaccatgcccagacacctgaaaccaattttggaagaatttctgagggtaaaatactatcaaacagcatcacatgctacagakaaatgtttcaggaagtgtcaactgatagggcaaacttaattgtcttaggaaattggcacagtcggctgggcgtggtggctcatgcctgtaatcccagcac

SEQ ID NO: 542444 - DNA, 201 bp, Homo sapiens
aggaggagtgaaaaataaagtcggccagtaaaggtgttagtagtagacagaataatggttccctcaaagatgcccaagtcctaatccccagaatctgtgartgtattcgcttacatgggaaagggggctttgcagatgtgattaaattaaggattctgaaaaggggggttatcctggattatctgtgtgggctcagtgtta

SEQ ID NO: 542445 - DNA, 201 bp, Homo sapiens
gtgctaggattacaagttagagccaccatgcccagacacctgaaaccaattttggaagaatttctgagggtaaaatactatcaaacagcatcacatgctayagagaaatgtttcaggaagtgtcaactgatagggcaaacttaattgtcttaggaaattggcacagtcggctgggcgtggtggctcatgcctgtaatccca

SEQ ID NO: 542446 - DNA, 201 bp, Homo sapiens
actctactttaaactgtggattttggcttcatcatatgcatgatttactacaatgtccattattgccagcattactcagtaaactgtccttgactttgatwctcattgagaggtgatgagaaggaaggtgatttagggcaggttttgctgttatttttgttggtttttgcttatttaatgaacatgtattgtgaatgggta

SEQ ID NO: 542447 - DNA, 201 bp, Homo sapiens
ctgaagctagatctacccttctgcctcaaacatcataggtgcttgatgagtgcttatcattaagcaaaactatacaaacacacacacatacaacctttatyggtaaattaatatcaaatattaacttgcttttatcttcaagttaaaacatcctccaaagtagatgaatttctagtttatataatttggaaaaataaaagt

SEQ ID NO: 542448 - DNA, 201 bp, Homo sapiens
ggctcacgcctgtaatcccaacactttgggaggccaaggcaggtggatgtcctgaggtcaagagttcgagaccagcctggccaacatggtgaaaccctgtytctactaaaaatacaaaaaaatagctgagcgtggtggtacatgcctgtaatcttagctactcgggaggctggggaagaagaatcgtttgaacctgggaga

SEQ ID NO: 542449 - DNA, 201 bp, Homo sapiens
ggccaaggcaggtggatgtcctgaggtcaagagttcgagaccagcctggccaacatggtgaaaccctgtttctactaaaaatacaaaaaaatagctgagcrtggtggtacatgcctgtaatcttagctactcgggaggctggggaagaagaatcgtttgaacctgggagacggaggttgcagtgagcttagattgcaccac

SEQ ID NO: 542450 - DNA, 201 bp, Homo sapiens
cgaggccgaggcaggtggatcatgaggtcaggagtttgagaccagtgtggccaaaatggtgaaaccccatttctactaaaaatacaaaaattagctgggcrtagtggtgtgtgcctgtagatccagctgcttgggaggctgaggcatgagaatcgcttgaacctaggaggcagaggttgcagtgagccaagatcgtgccac

SEQ ID NO: 542451 - DNA, 201 bp, Homo sapiens
tccagctgcttgggaggctgaggcatgagaatcgcttgaacctaggaggcagaggttgcagtgagccaagatcgtgccactgaactctagcctgggcaacmgagcgagactctgtttccaaaaaaagaaaaatttaataaatcctattttcctgaataccatgccaggtcatttttgtaaagtctttccaattttcctaca

SEQ ID NO: 542452 - DNA, 201 bp, Homo sapiens
ggcctgcgagccaggaagcccaggggttgttctaggctctgggattcagcactgaacaagacagacaagaggtcagcctttatgggggctgagacgggcgkatcacctgaggtcaggagttcaagacaagcctggccaatatgatgaaaccctgtctctactaaaaacacaaaaattagctgggtgtagtggtgcgtgcct

SEQ ID NO: 542453 - DNA, 201 bp, Homo sapiens
gctgagacgggcggatcacctgaggtcaggagttcaagacaagcctggccaatatgatgaaaccctgtctctactaaaaacacaaaaattagctgggtgtrgtggtgcgtgcctgtaatcccagctacttggcaggctgagacaggagaatcgcttgaacccaggaggcggagggtgtggtgagcagagatcgtggaaaaa

SEQ ID NO: 542454 - DNA, 201 bp, Homo sapiens
agcctggccaatatgatgaaaccctgtctctactaaaaacacaaaaattagctgggtgtagtggtgcgtgcctgtaatcccagctacttggcaggctgagrcaggagaatcgcttgaacccaggaggcggagggtgtggtgagcagagatcgtggaaaaaaaaaaaagaaaaaaagagttgaatgtgttgcctctggaatt

SEQ ID NO: 542455 - DNA, 201 bp, Homo sapiens
ctactttggccaatctggtgcataaaatgagaatttttttttttttttttttttgagacagagtcttgctctgtcgccccggctggagcgcagtggtgcartcttggctcactgcaagctccgccccctgggttcacgccattctcctgcctcagcttcccaagaagctgggactacaggcgcccgccaccatgcccagct

SEQ ID NO: 542456 - DNA, 201 bp, Homo sapiens
gagctgagattgtgccactgcactccagcctgggtgacagagcaagactctgtttccaaaaaaaaaaagaaaggaaaggaaaggaaagggaaggaaaaaaggaagaaaggaagaaagaaagaaagaaatcgcttatattgtgtaacctgaggaagttttcaactatttttccttctattattccctttcctacttgtgtat

SEQ ID NO: 542457 - DNA, 201 bp, Homo sapiens
agaaaaataaaccagggtaataggacagagagggcctggatgagtatacggctataattttgggtgaggtcttgatggtaaaataatacttgagcaagaasagaaaaccatacaaggtctctgctcaagtattattttaccatcaagacctcacccaaaattatagccatatactcatcacttatctcacagtactacaga

SEQ ID NO: 542458 - DNA, 201 bp, Homo sapiens
gctgagattgtgccactgcactccagcctgggtgacagagcaagactctgtttccaaaaaaaaaaagaaaggaaaggaaaggaaagggaaggaaaaaaggaagaaaggaagaaagaaagaaagaaatcgcttatattgtgtaacctgaggaagttttcaactatttttccttctattattccctttcctacttgtgtattg

SEQ ID NO: 542459 - DNA, 201 bp, Homo sapiens
gttattgtaataaatggaacaagtaacgtatgcacaactccatgaaaaacctttgtctaaatattacgccagtttacaagttaatgtttctactgaagaayggagggatgtacccactaaacaaccctcaaatgaagaagtgaagccatgactgaagctcaaccttgcccatcgtttgttttttttttttctggaagatta

SEQ ID NO: 542460 - DNA, 201 bp, Homo sapiens
atgtattttttattatatatatataaaataaaacattttgaaaccccaaagctagcaaaaggaaggaaataaagattagagtagagataaatggaatacaygaaaaaaaaaaaagaaaaatcgtataacctaaatgaaatggacaaatgagaatttgcccattctagaaagaaacacaaaatataccaagactaaaccatg

SEQ ID NO: 542461 - DNA, 201 bp, Homo sapiens
ataagagacattaatctacagattcaagaaaccaggataattcaaaaggggaaaaacttaaatacacaccaagacacatcaaaattaaacttctgaaaacwaaagacaagaataaaatattgaaaacagcctttttaaaataacaccttaaatataggggaaaaacaatatgactgattttttttaaaaatcagaaaccac

SEQ ID NO: 542462 - DNA, 201 bp, Homo sapiens
ggtactcctccctttctcttctatggtggcatcagatgaaatctagcaaagaactttctacatcttaatggtaatgaggagcaagccttaccctccaggtmtcaacgagggccaagtgaggagcctaatcttctaccttaacctgggaaaaacaaggtaatgtcttccacatcccatcttcccctgatggagctgttagag

SEQ ID NO: 542463 - DNA, 201 bp, Homo sapiens
aacctactcatctgacgaagggctaatatccagaatctacaatgaactctaacaaatttacaagaaaaaaacaaacaaccccatcaaaaagtgggcaaagkatatgaacagacacatctcaaaagaagacatttatgcagccaaaagacacatgaaaaaatgctcatcatcactggccatcagagaaatgcaaatcaaaac

SEQ ID NO: 542464 - DNA, 201 bp, Homo sapiens
ggcaacatagcaagaccttgtcttgtctctaatatatatattatgtattttttattatatatatataaaataaaacattttgaaaccccaaagctagcaaraggaaggaaataaagattagagtagagataaatggaatacacgaaaaaaaaaaaagaaaaatcgtataacctaaatgaaatggacaaatgagaatttgcc

SEQ ID NO: 542465 - DNA, 201 bp, Homo sapiens
cagatcgcttgagcccaggagttctagaccagcactggcaacatagcaagaccttgtcttgtctctaatatatatattatgtattttttattatatatatrtaaaataaaacattttgaaaccccaaagctagcaaaaggaaggaaataaagattagagtagagataaatggaatacacgaaaaaaaaaaaagaaaaatcg

SEQ ID NO: 542466 - DNA, 201 bp, Homo sapiens
aacaaatttacaagaaaaaaacaaacaaccccatcaaaaagtgggcaaaggatatgaacagacacatctcaaaagaagacatttatgcagccaaaagacasatgaaaaaatgctcatcatcactggccatcagagaaatgcaaatcaaaaccacaatgagataccatctcactccagttagaatggcaatcattaaaaagt

SEQ ID NO: 542467 - DNA, 201 bp, Homo sapiens
catacagattatatatatacacacttaaatttgtatatggggagacatatttaagacagtatgtaaggaatccccctcttaaatcacgttttagccctcayttaaactttattcaaaggcagtgcagtatgttgaaagagtagaaaactacatttcataaaggccacattctgttctttcttaggattctgtgactttggt

SEQ ID NO: 542468 - DNA, 201 bp, Homo sapiens
aaagattcaaatgacttgtatctaaatcagacctggactctctcttcccaatatgccgatttacatgcaatctcttagagtttctctgcttccataaaatrcggaagccactgcccatcaggcccaggtttgcctctttgcacaaacagtccaaaacagttttcctgatctgtttcaacttgaagtgttgtcaatatatgg

SEQ ID NO: 542469 - DNA, 201 bp, Homo sapiens
taacaccttgaaaggctgaggtgagtggatcacttgagcccaggagttcaagaccagcttgggcaacatggagaaaccctgtctctatttaaaaaaatacraatattagccagatgtagtggcacatgcctgtagtcccagtgactagggaggctgaggtgggaggatcctctgagcctggggaggtcaaggctgcagtga

SEQ ID NO: 542470 - DNA, 201 bp, Homo sapiens
ctatacactagatgctgactaggggacaagacagtggggagccaggtagaaatggttcttgccttcatggagattctaatccagagtgaatatttcaaaayctggcaacatcaataatactgttaagatatgtatatcaaattttctttactgagtgataaagtggtctgatatacattatgtatacatgtgtgtgtgtgt

SEQ ID NO: 542471 - DNA, 201 bp, Homo sapiens
actgtagataacagtatggtggttcctcaaaaaattaagaatggaattacatgatcaagcaatccacttctgggcatacaccttaaagaatcaaaagcagkatctctaagagatatttgtacatccatgttcacagcagcattattcacaaaaactaaaacatggaagcaactcaggtgcccactgatgtacagctaaaaa

SEQ ID NO: 542472 - DNA, 201 bp, Homo sapiens
ctataccacaccatttttacatggccatatagaatgaaaatttgaatttaatttccaatgcacagacctgcatgttctctgttcttcatttttttaaaaawaacgttttaatagttcacattttaaaaattgctgctacacacactctcaaaattgtaactatgtgaggtgatagatatgttaattcgcttgattgtggta

SEQ ID NO: 542473 - DNA, 201 bp, Homo sapiens
ccctgcctgacacttaatgaccatttgtctcaggaggcagatgggatgttgtttaaacattttcatgaagcaatagtgataaaggcagcaaaacagctacygactcaacaattttcaaaataaaataccagtttttactgcatcatggggaaggaaatcaagttactgcagaatcttttctttaggaaagtgaagaagctc

SEQ ID NO: 542474 - DNA, 201 bp, Homo sapiens
tttgatgagatgagcaagagggaaccccttctctggtaagtgaacctggaaagcgctgaagacctgagtctcagttgagtttaatctgttgctctcagctsaattacggcttctctacaattctcatgaagtgatttaaacaaataagaacttgggggtctgcacaggacttaaagaaaaggctccctaaaagaatattaa

SEQ ID NO: 542475 - DNA, 201 bp, Homo sapiens
ccttggcctctctaagtgctaggattacaagttagagccaccatgcccagacacctgaaaccaattttggaagaatttctgagggtaaaatactatcaaamagcatcacatgctacagagaaatgtttcaggaagtgtcaactgatagggcaaacttaattgtcttaggaaattggcacagtcggctgggcgtggtggctc

SEQ ID NO: 542476 - DNA, 201 bp, Homo sapiens
tgtgccacactttatatactgtgcaggataaacaaatgctaactcattcatatcgaaccatgcatgcttactgtaccattcaaaataattattttcaggawcagattctgttcagttagttgtcttagtctgtatctctcttaccaaacagcaaattcacttctcaaggcaggaaaaccctatcctctaccttacttatgc

SEQ ID NO: 542477 - DNA, 201 bp, Homo sapiens
cagtgttgcctgaagctatggaaggatcatagctcctcagtctcaaaaaccatggccacacacattcttgtgatttgtaataatccccatttcctttaagmtctcacccccagagagagacagtgaaggattcttctaccaagttcaaaagcaaaagagcaaaaacagtaaagagagcctgcctcagatgtcttcagggtc

SEQ ID NO: 542478 - DNA, 201 bp, Homo sapiens
gatttgcccaccttggctgtccaaagtgctgggattacaggcatgagccactgtgcccggccttgctgctatatttctgtatcatttctgtactgctgcayttttgtttgtgtatttagtcttttcctttgtttccaagtgaaatcttttgaaaacagtcctattatggctcaaataagcagaaatggggattttcttagg

SEQ ID NO: 542479 - DNA, 201 bp, Homo sapiens; identical to SEQ ID NO: 365643

SEQ ID NO: 542480 - DNA, 201 bp, Homo sapiens
gagttggatggctagaaacagatatgttcatgtctgaccatgtttgacttaagaccacaaaaatggaaggtggaaaaaaagaaagataaacatattttgcrtaagaatttttttacttatatagacatccataattatatgaatgatgagaaaacaccattaagaagtaaaactaacttaaaaacaataataattctaaga

SEQ ID NO: 542481 - DNA, 201 bp, Homo sapiens
gcacaaacctgagttccagatccctctttgacacttattagccacacagataggaaaatcacttttcagctctatggctgtgcatcatctataacatctgrggatttgatggggttgaccagattgttttctagagtcttagcattctacttgcgtataacaactgtgtattgctttgtcatgtatattgctctgcaactc

SEQ ID NO: 542482 - DNA, 201 bp, Homo sapiens
ttttggctgaataatactaacaagaaaaagatttccccaacctatattttacctttagaaagtgctctgtttaaaaaaaaaaaaaaagtactgttaaactaaaatgaagtgatttactgaaacttagcatttgtagctcaataaatttattaagcatttatttactgaggagtatttaatttaaaaggtttctttttattt

SEQ ID NO: 542483 - DNA, 201 bp, Homo sapiens
gtcagatgtggattaaaggagaaattttcaaagaatcctcagccagagttggatggctagaaacagatatgttcatgtctgaccatgtttgacttaagacmacaaaaatggaaggtggaaaaaaagaaagataaacatattttgcataagaatttttttacttatatagacatccataattatatgaatgatgagaaaaca

SEQ ID NO: 542484 - DNA, 201 bp, Homo sapiens
ctacagagtccatttttgttttatttagtaaatacatgtgcataatagtgatgtatgtgtgcgtatatgtatatatatatattctttaccaaaaatgctgrgagaaaaaaatgccaatattggctgggcatggtggctcatgcctgtaatcctagcactttgggaggctgaggcaggaaaatcacttgacgttaggagttt

SEQ ID NO: 542485 - DNA, 201 bp, Homo sapiens
tttggctgaataatactaacaagaaaaagatttccccaacctatattttacctttagaaagtgctctgtttaaaaaaaaaaaaaaagtactgttaaactaaaatgaagtgatttactgaaacttagcatttgtagctcaataaatttattaagcatttatttactgaggagtatttaatttaaaaggtttctttttatttt

SEQ ID NO: 542486 - DNA, 201 bp, Homo sapiens
tatcctgcattgagcaagcctatcggcggcatttttccaatagcatgtgctcactttatgtctctgtgtcacagttttgtaattctccaagtatttcaaaractcttccattattattttatctgttatggtgatctgtgatcagtgatcttacaagttactactgtaattgttttggagttccacaagctacacccataa

SEQ ID NO: 542487 - DNA, 201 bp, Homo sapiens
tgaatactttcaccaattatgatgacaaacttgtctgctaaatcctaaataagtagttagggtttttctgtatgaaaaaccaaccactgaaactaggttayaggatttctaaccaggcacaacagaaacatgtatgtacaacagaatctgaaaacacttgctagcaatgatggatttaagttattaacagatcaaaaagag

SEQ ID NO: 542488 - DNA, 201 bp, Homo sapiens
acaagtcaggacacatagacttaaaagaaactttttgaataagaccttttctgggcttctaaaaatggttcacaagataaggaactaacacctccaaccaygattagtgcctttattttccaaatatttgctctctaggtgaccaacccctctatccctcaccgtggctttgccaaagctatccttttacaaactaaaatt

SEQ ID NO: 542489 - DNA, 201 bp, Homo sapiens
ggctgaataatactaacaagaaaaagatttccccaacctatattttacctttagaaagtgctctgtttaaaaaaaaaaaaaaagtactgttaaactaaaatgaagtgatttactgaaacttagcatttgtagctcaataaatttattaagcatttatttactgaggagtatttaatttaaaaggtttctttttatttttac

SEQ ID NO: 542490 - DNA, 201 bp, Homo sapiens
tctaaaaccatacataaggagccgctaaagagagagagagaaaaaggacattccaagagcttcttgtattgatttcttttaccccaaacaaagagattctsctagttacatgatataccataatcacgtaatttgtttgactgctttaaagaaagaacaatggattcgagaaaaggtgttgacttgcaaaaatacaatcat

SEQ ID NO: 542491 - DNA, 201 bp, Homo sapiens
ggtgtattgctataattttttattttattattattgtaatagttattcttgttaatctcttattgtgcctaacttataaattaaacttcatcacaggtgtstgtatataggaaaaaacatagcacatataaggtttagtactacccatagtttcagccatccactgggggtctttgaacataacacctgaggataaggggg

SEQ ID NO: 542492 - DNA, 201 bp, Homo sapiens
tgcaataaaagggtaaggttgttgatgtggcagcagcagtcagtcaagcctgagtactctgattaaatttttgacccatttcaacccttcttagcacacartcttacagtcaaaattacagatttatgtttatttttataccccatcgttatttgtacttcattgccttttaaagttacctttttgccaaatcgaatacaa

SEQ ID NO: 542493 - DNA, 201 bp, Homo sapiens
attgcagtgcttgtgttcaaggaattcttatttgacttaataatggtccaagtcacaggagaagtgatgttggtgtattgctataattttttattttattrttattgtaatagttattcttgttaatctcttattgtgcctaacttataaattaaacttcatcacaggtgtgtgtatataggaaaaaacatagcacatata

SEQ ID NO: 542494 - DNA, 201 bp, Homo sapiens
tcaaaaggactggtttttatcaatctcttccattttgcctattgaattaaaaaaaaaaaacatgccttgttttacattgggtttctttaattactggtgawattgactatctttccttcctttctcttttttttttttttttttgagacagagtcttgctctgttgcccaggctggagtgcagtggcgcaatctcggctca

SEQ ID NO: 542495 - DNA, 201 bp, Homo sapiens
atgattgcaccactgcactccagcttgggccacaaagtaagaccttgtctcctcccacctcaaaaaaaaaaaagaaaaaagaaaagccaacgtccttattrctgcctaccagacctatgctctgccctcccaccccaccattccatctcccattatttcccccaccacactatatatgaccttatctcttatcactctcta

SEQ ID NO: 542496 - DNA, 201 bp, Homo sapiens
gggggcagaagttgcagtgagctgagattgcaccattgcactccagcctgggcgacagagtgagaccctgtctcaaaaaaacaaacaaacaaaaaccccayaaaaacaaaaaaacctgcctgatactttaaatactaagctttaaatactaaagttatctgatgaaaaatttacaactatatttctgtattaaaccaacta

SEQ ID NO: 542497 - DNA, 201 bp, Homo sapiens
aggcccagcctgttggcattattttatttatttatttatttgtttattattatttttgagatggagtctcgctctgtcgcccaggctggagtgcagtggcrcgatctcagctcactgcaagctctgcctctcaggttcacgccattctcctgcctcagcctcctgagtagatgggactacaggcgcccaccaccatgcccg

SEQ ID NO: 542498 - DNA, 201 bp, Homo sapiens
caagccaaagctggactgtactgctgccatctcggctcactgcaacctccctgcctgattctcctgcctcagcctgccgagtgcctgcgattgcaggtgcrcgccgccacgcctgactggttttagtaattttttggtggagacggggtttccctgtgttggccggggtggtctccagctcctaaccgcgagtgatccgcc

SEQ ID NO: 542499 - DNA, 201 bp, Homo sapiens
ccctccgcccggcagccgccccatctgagaagtgaggagcccctccgcccagcagccgccctgtctgagaagtgaggagcccctccgccaggcagccaccmcgtctgggaagtgaggagcgtctacgccaggcagccaccccgtccggaagggaggtgggggtcagccccccgcccggccagccgccccgtccgggaggga

SEQ ID NO: 542500 - DNA, 201 bp, Homo sapiens
aagtgaggagcccctccgcccagcagccgccctgtctgagaagtgaggagcccctccgccaggcagccaccacgtctgggaagtgaggagcgtctacgccmggcagccaccccgtccggaagggaggtgggggtcagccccccgcccggccagccgccccgtccgggagggaggtggggggtcagccacccgcccagccag

SEQ ID NO: 542501 - DNA, 201 bp, Homo sapiens
cagccaccccgtccggaagggaggtgggggtcagccccccgcccggccagccgccccgtccgggagggaggtggggggtcagccacccgcccagccagccrccccgtccgggagggaggtggggggtcagcccccgcccggccagccgccccgtctgggagggaggtggggggcgcctctgcccggccgcccctactggga

SEQ ID NO: 542502 - DNA, 201 bp, Homo sapiens
tccggaagggaggtgggggtcagccccccgcccggccagccgccccgtccgggagggaggtggggggtcagccacccgcccagccagccgccccgtccggragggaggtggggggtcagcccccgcccggccagccgccccgtctgggagggaggtggggggcgcctctgcccggccgcccctactgggaagtgaggagcc

SEQ ID NO: 542503 - DNA, 201 bp, Homo sapiens
ttgtggaatagaaaagggggaaaggtggggaaaagattgagaaatcggatggttgctgtgtctgtgtagaaagacgtagatatgggagacttttcattttrttctgtactaagaaaaattcttctgccttgggatcctgttgatctatgaccttacccccaaccctgtgctctctgaaacatgtgctgtgtccactcaggg

SEQ ID NO: 542504 - DNA, 201 bp, Homo sapiens
cagaattggaaaaaactactttaaagttcatatggaaccaaaaaagagcccgcatcgccaagtcaatcctaagccaaaagaacaaagctggaagcatcacrctacctgacttcaaactatactacaaggctacagtaagcaaaacagcatggtactggtaccaaaacagagatatagatcaatggaacagaacagagccct

SEQ ID NO: 542505 - DNA, 201 bp, Homo sapiens
cttacaccttatacaaaaattaattcaagatggattaaagacttaaacgttagacctaaaaccataaaaaccctagaagaaaacctaggcattaccattcmggacataggcatgggcaaagacttcgtgtctaaaacaccaaaagcaatggcaacaaaagccaaaattgacaaatgggatctaattaaactaaagagcttc

SEQ ID NO: 542506 - DNA, 201 bp, Homo sapiens
ctggtgcagggatatacgacaagtttgtgcagatgtgttaacacgtgtccacatgtctctgtgtgccactccacttgcggtgttagggatccaggggaggyggtctgcaagggtgtgtcctcgtaggggtgtgtgtgtgtctgtgggtccaccacacatgcgtgggtgaccaggaagtggacccacagacacatgtacacc

SEQ ID NO: 542507 - DNA, 201 bp, Homo sapiens; identical to SEQ ID NO: 360402

SEQ ID NO: 542508 - DNA, 201 bp, Homo sapiens
tgttttgttttgttttgttttgttttgacattgagtctcgctctgtcccccaggctggagtgcagtggtgtgatctcggctcactgcaagctccgtctccyggcttcacgccattctcctgcctcagcctcctgagtagctgggactgcaggcgcctgccaccaagcccagctaaattttttgtatttttagtagagatgg

SEQ ID NO: 542509 - DNA, 201 bp, Homo sapiens
cccagagatgcgtgagaagttgtgcggccaccacttcgtacgcgcgctagtgcgcgtgtgcgggggcccccgctggtccaccgaagccaggaggcctgcgrccggaggcgaccgtgagtggggacgggcagggacagcgctctgggaagccgaggtggggcaggtgcacgtaggcgcagatgcacacgtgcagggaggtgg

SEQ ID NO: 542510 - DNA, 201 bp, Homo sapiens
cgctggtgctgctgggccctgccctggtgttcgcgttgggccccgcgcccaccccagagatgcgtgagaagttgtgcggccaccacttcgtacgcgcgctrgtgcgcgtgtgcgggggcccccgctggtccaccgaagccaggaggcctgcgaccggaggcgaccgtgagtggggacgggcagggacagcgctctgggaag

SEQ ID NO: 542511 - DNA, 201 bp, Homo sapiens
ccaaggcccccagctgggacggcccaggcgcctataaagggggtccccgcttggccccggcgccacccaccaccatggacccccgtctgcccgcctgggcrctggtgctgctgggccctgccctggtgttcgcgttgggccccgcgcccaccccagagatgcgtgagaagttgtgcggccaccacttcgtacgcgcgctag

SEQ ID NO: 542512 - DNA, 201 bp, Homo sapiens; identical to SEQ ID NO: 360405

SEQ ID NO: 542513 - DNA, 201 bp, Homo sapiens
agttcaagcaattctcctgcctcagccttccaagtagctgggattacaggccactccccaggtcacccactaccatgcacagctgatttttttttttttttgtatttttagtagagacaggtgaacaggtgaaacaacaggtttcaccatgttggccagtctggtcttgttttgttttgttttgttttgttttgacattga

SEQ ID NO: 542514 - DNA, 201 bp, Homo sapiens
gggacccacgcagctggggatgtgagtgtggacatgagttgagtggatgagaggattaaccaggtgcctggcgtacagtaggtgcttaataagtgctcgcytttttttttttttttttttttttgagatggagtttcattcttgtcacctaggctggagtgcaatggcatgatcccagctccctgcaacctccacctcctg

SEQ ID NO: 542515 - DNA, 201 bp, Homo sapiens
ctcccacctcagcctcccaagtagctgggactacaggcatgcagaattatgcccagctaatttttgtattttctgcagagatgaggttttgctgtattgcyaaggctggtcatgaactcctgggctcaagcaacgcacccacctaggcttcccaaaatgctgggatgacaggtgtgagccacggtgcctggcctcaaaaaa

SEQ ID NO: 542516 - DNA, 201 bp, Homo sapiens
ctgccaccaagcccagctaaattttttgtatttttagtagagatggggtttcaccatgttagcaaggatggtctcaatctcctgatctcgtgatccacctscctcggcctcccaaagggctgggattacaggcatgagccactgtgcccgggccaggctggtcttgaactcctgacctcaggtgatctgcccgcctcagcc

SEQ ID NO: 542517 - DNA, 201 bp, Homo sapiens
gaggggccagaaacagagtgaggcaggagaggtaggctcttgcaagtacatggtgagatcctgtcttaaaatttcaatattttgatcttcatgaatttttrccttaattttgctttgtttgtttgttttttgagacagggtctcactctgacgcccaggctggagtgcagtggtgagatctcggctcactgcaggctcaac

SEQ ID NO: 542518 - DNA, 201 bp, Homo sapiens
ataaagagtggttatctctggatgatagaattatatttttcttttctccattttccaacttttctgtaataggcagaaaaatatattaagaaaagagggattagaaaatacctgcagaaatgacaaagacagaattatcaagccaggcagttcatgtattttaaaaatggccagtggagcatttccccgtaatccaaactg

SEQ ID NO: 542519 - DNA, 201 bp, Homo sapiens
actctttgaaaaactttgtttctatgtgtcaatttataattcttgcattatctcacatctgatccacaaagaaaagtggaaaaagatgtggaagttcttamaaggtagaaccacatacaagaaggtggatactacagattttctaatacaggctggaggcacactggtaagtgaaggtggcagcaacagctaagacatgaa

SEQ ID NO: 542520 - DNA, 201 bp, Homo sapiens
aaatcagagctggtatgaactgatgacttacaccttcattttttggggaaaagacttctcccaaaccattatacactctctaaaggcataaacaaggtttaaaaaaaagtgacactgtggttgtatttacgcattcgtcaggggcgtcttgcagaaaagcagtgtggtctactggaaagggccctagactagagcctccaa

SEQ ID NO: 542521 - DNA, 201 bp, Homo sapiens
tgtgcctgtctgtaaaatgatggggcagtctgaccagtgggtgtccaagcttttagctctcagattccatattactataattcacttttcaaataatccayagcaaaacaaaaggactaaaattacttcttaacacaaaaagcagaccaggccagaggtgagaatcagattagaatccattcttccagcttccgcaactgg

SEQ ID NO: 542522 - DNA, 201 bp, Homo sapiens
agggtctctttttcattcacaggtatgttcctgaagtgtcgactcacagtctatgtggggggaaaataccaaagttccttaaaccatgcacaaatcacacygcaaattctacattgtacaaagaagcgaatggagttgtttgcatgctgtggcgggaatgacaaatgctgaagaacttcctgccatgtgcggaactcagag

SEQ ID NO: 542523 - DNA, 201 bp, Homo sapiens
ggcaaaaaccagagacatcctggaggatgataggccagaacgaggcagcgaccggatagaggagcacaaaggagggcagtgggaagtgttatcctcaaatmgctctttgctaggcccagccttctggtattagaatccttaacctccctccagagaaagttcaaaagttactgtagtgaatgtgcaatccagcaggttagg

SEQ ID NO: 542524 - DNA, 201 bp, Homo sapiens
aacttgtagtgtcgtttataacgtcgtagggtgttcacctgcagctggaacagatcaacctagggagaagaggagaaaaatgttatccatcacctgaccamccaggactcaccaagagcccactatgtgcctagcactacactaaggtaggggtgaggatggggagggcttcaaaagaggtcttagaaatggtctattgag

SEQ ID NO: 542525 - DNA, 201 bp, Homo sapiens
gcagccgagggtcccagagtccgtctccagcccgggcgctgccctgccccgcgtccgagaggcccggctccctcggcccccggccctccgcctccggaagsccccttcctcccggctcgaggccccggggtcggctcccgcggctcgcagggccccgccgggggtcacccggaggagccttctgccgggggcccagaaccg

SEQ ID NO: 542526 - DNA, 201 bp, Homo sapiens
gcgttgcccgcgggccggacgcagcgctcgccgtcctcgatgaggcagcagctctggccgtagcccggggcggcggcagctggggcggcggggggcccttsgcggctgtcctcctccgtgctgaagccgttcatctccccgccccgggccggtccctctgggggagggtccccggtaggccactccgcggccgcgcttgcc

SEQ ID NO: 542527 - DNA, 201 bp, Homo sapiens
tgaagtgtcgactcacagtctatgtggggggaaaataccaaagttccttaaaccatgcacaaatcacaccgcaaattctacattgtacaaagaagcgaatsgagttgtttgcatgctgtggcgggaatgacaaatgctgaagaacttcctgccatgtgcggaactcagagtgccctttgcccttcctccccagggatgtag

SEQ ID NO: 542528 - DNA, 201 bp, Homo sapiens
aaaaaagcagaaatatgtcaactggaggtatattagtattttaacagatcacagaacactgccaaagtctatataaaatgagttaaacagcctgaattgartttctggtgttgttatttaaaaaggttctctgctagactctcttacaagataaataatcattttctccttaaccattttcaagtacatactggttttcag

SEQ ID NO: 542529 - DNA, 201 bp, Homo sapiens
tttttcaaaacattcctcaaaaccttttttttttttttttttggtgaaaaccacttagaaatcgaatacgtccatttctttgtaaaataacaataacgttraaggcaaaagcaagattctgtaaaccaacattggaaaaggggacacagggaggggcagagggaaagggccagattttcaacggtttcctccacatctgca

SEQ ID NO: 542530 - DNA, 201 bp, Homo sapiens
gacatgaagaatcctccaaggctggctggaggaaccactgaaaaactttacagaaactgaatgcccagcaaatgacttggggttgttgatactgaaacagstgttgcacaaatgttctgcagagacttctgaatttgagtttattccttaaatccttaaagataaaagtaagctggcaggaaatccgcatcaattaattca

SEQ ID NO: 542531 - DNA, 201 bp, Homo sapiens
gcttcaacccgggaggcggaggttgcagtgagtcgagatcttgccactgcactccagcctgggtgacagagtgagactccgtctcaaaaaaaaaaaaaaaraaaaagaaaaagaaaaaaaaaagaaaagaaaaaggacaggggagattttttatttattagagacttaatgaagacttatgtatagggcttggaagtaaat

SEQ ID NO: 542532 - DNA, 201 bp, Homo sapiens
gaaatacatagtttttaattcttttaatgatcctgatttttttagtccagagttatcgtaaaagaaagtctttctatacacatgctgaatcatgagaatayaatcctcctgaccaaaaagatttacagtattcatcattcaaacttttttatttacaataatatttaacagtctttatgggcttaaatgtagtagatatca

SEQ ID NO: 542533 - DNA, 201 bp, Homo sapiens
acagcagcccaccttctccctgacagcccacttgcatcaggcccattcccaggatgtcaactgtgtggcctggaaccccaaggagccagggctactggcckcctgcagtgatgatggggaggtggccttctggaagtatcagcggcctgaaggcctctgagctacctcgactttggacagagtaatgactccccagaaaac

SEQ ID NO: 542534 - DNA, 201 bp, Homo sapiens
ggctcacttctcttcagacttgggtagaagtgcagagccacagaattgctttccttccccgcctttgacatgaggccttcagtaaagagctacagaacatsagtacattgttataccacagatttttcttgcattagggcacagtgttaaattttttggaggtaaatatactatttataatcactatatatagtaggaggg

SEQ ID NO: 542535 - DNA, 201 bp, Homo sapiens
cagtctgcaacagaacagggatgtttcctcggaattctgcttgagaaacgccagtctggctatagtgtgtaaggcagataagcagggatggggacacgaayggagacacagactcataatcagttgaagatgagggtgagggaaggtaagttaggttctcctttgaggtgcccaggacataggaacgtttaagggcaagag

SEQ ID NO: 542536 - DNA, 201 bp, Homo sapiens
gaccaacatggtgaaaccccgtctctactaaaaatacaaaaattagctgggcgtgttggcacgcacccaatcccagctactcagaggctgaggcaggagartcgcttgaacccgggaggcggaggttgcagtgagccgagattgcgccactgcactccagcctggtgatggagcaagactccatctaaagaaaaaaaaaaa

SEQ ID NO: 542537 - DNA, 201 bp, Homo sapiens
cgcttgaacccgggaggcggaggttgcagtgagccgagattgcgccactgcactccagcctggtgatggagcaagactccatctaaagaaaaaaaaaaaawactttatgatggctgggcccagtggctcatggcctgtaatcccagcactttgggaggctgaggcaggtggatcacttgaggtctggagtttgagaccagc

SEQ ID NO: 542538 - DNA, 201 bp, Homo sapiens
ccattagtagagctaaagaagacccatctctcaaggggttcacagtctgctaagacacgtacatgagtcagagcaaatgggggtaaaaggtaagatgtgcyacaagagggctctggatagagtgctggaagaatcaggaaagttttgtagaatgggttgtttcatctgaatttaaaagggtatgtaggattttaacatgag

SEQ ID NO: 542539 - DNA, 201 bp, Homo sapiens
agggctggttcaggaacctgagccaacctgcgccagttgggctgtacccatgggaaggggcttaggggtgttagctgctgttaattctcattttctttccyctttcacagtgtgtaaccactctcgagggccatgaaaatgaggtcaagtcagtggcttgggccccatctggcaacctcctggccacttgcagccgagata

SEQ ID NO: 542540 - DNA, 201 bp, Homo sapiens
tcaactgtgtggcctggaaccccaaggagccagggctactggcctcctgcagtgatgatggggaggtggccttctggaagtatcagcggcctgaaggcctytgagctacctcgactttggacagagtaatgactccccagaaaacgtcatataagactttaccagcccctgagaggaccaggaggagcatccttgaccttc

SEQ ID NO: 542541 - DNA, 201 bp, Homo sapiens
tgggcagttgagtttccggggcgacccaggtcctccggcggaagcgggagcctctgtcggccgcggaagcctggagtgggcggtacgcagacgcgcgcggygagacccgctgtctgctcagcggactctgcccgcccccacctccccctgcgtcgggccgacatgaaggactcgctggtgctgctgggccgtgtcccggcg

SEQ ID NO: 542542 - DNA, 201 bp, Homo sapiens
ctttacctttgccctcacaccccagcaagtgcagcagattcttacatccaggtacatctcttccagtcttcctgcctcatccctggtctctgctttctgaytttcttctcttctgccctgtgctcttccctatccctcctcctatacctacttgtctcttgttcttctgtgtgtctcttctctatctcctggacatctgac

SEQ ID NO: 542543 - DNA, 201 bp, Homo sapiens
agctgtgcccctagtgtccagatgaagatcaaagagctttaccgacgacgctttccccggaagaccctggggccctctgatctctcccttctctctttgcmccctggcacctctcctgtaggctcccctggtcctctagctcccattcccccaacgctgttggcccctggcaccctgctgggccccaagcgtgaggtggac

SEQ ID NO: 542544 - DNA, 201 bp, Homo sapiens
cccagcaagtgcagcagattcttacatccaggtacatctcttccagtcttcctgcctcatccctggtctctgctttctgactttcttctcttctgccctgygctcttccctatccctcctcctatacctacttgtctcttgttcttctgtgtgtctcttctctatctcctggacatctgactttcagcctttctgtgcatt

SEQ ID NO: 542545 - DNA, 201 bp, Homo sapiens
tggacaaagcctggggcaagagaaatgtggaggggacagagagggaacctggggacctgagctgggtgagggcatctgtggtttgctggctgcctcagctyctctctacccacagagtcctgacatctggccaccagccatcctcggtgctaaggagccctgctatgggcacgttgggtggggatttcctgtccagtctcc

SEQ ID NO: 542546 - DNA, 201 bp, Homo sapiens
cccctaagcttctagaggctcatggccctgtagttaggcctggctcattctgcacctttccagggaggtggaaggaccctgtgccctccttcccaatcttytttttcaggctcgccaaggcctaggacctatgttgtaattttactttttatttctaaagttgtagtgaagctctcacccataataaaggttgtgaatgtt

SEQ ID NO: 542547 - DNA, 201 bp, Homo sapiens
tccccagagctacatcagaacccctgttccttctcaaagcctcctgcttctcctgcaaggggccacagtccacagtgctttgtcttttggtggtaaagggrtcagataggaggttaattttgatttttcttttcctgccaggtttagatttattttcatttcttcagacagagagtcaggtaagtggttctttcttcagaa

SEQ ID NO: 542548 - DNA, 201 bp, Homo sapiens
tctctctatttatatatctaagttcacagtgtttcttattcccccctaagcttctagaggctcatggccctgtagttaggcctggctcattctgcaccttkccagggaggtggaaggaccctgtgccctccttcccaatcttctttttcaggctcgccaaggcctaggacctatgttgtaattttactttttatttctaaa

SEQ ID NO: 542549 - DNA, 201 bp, Homo sapiens
cctgcctcctactccagtatgacagaggaggatgtaaggccttagccatgatctgcaggggtctgggagtcaggcccggcctattgcttgggtctctctcyatttatatatctaagttcacagtgtttcttattcccccctaagcttctagaggctcatggccctgtagttaggcctggctcattctgcacctttccaggg

SEQ ID NO: 542550 - DNA, 201 bp, Homo sapiens
ggtgggggtgttctgtggaggaattccaagagaggttgtcctttcctgctttcccccgtgcctgtaaaaactagaccattccagcccagtactgtggagcyctccagtcctttttcacttttacctgcccagatgttgcagccagagcttgagggcaaacttggttccagtgctgactctctctttgtcctctgccatggt

SEQ ID NO: 542551 - DNA, 201 bp, Homo sapiens
agaggctctcctgcttctcaagagaataccttcggatccacaggggttgattgctctcatacggcatttctgagatgagtgactgggaggtggggaagtcrggattgagatcttaaactatgcccttgattcttcctagcactatggcccctctgtcatcacctcactagatgaacaggatgcccttggccacttcttcca

SEQ ID NO: 542552 - DNA, 201 bp, Homo sapiens
atgatctgcaggggtctgggagtcaggcccggcctattgcttgggtctctctctatttatatatctaagttcacagtgtttcttattcccccctaagcttytagaggctcatggccctgtagttaggcctggctcattctgcacctttccagggaggtggaaggaccctgtgccctccttcccaatcttctttttcaggct

SEQ ID NO: 542553 - DNA, 201 bp, Homo sapiens
agcttcagaggcttgggggaaatagctgaggtgaattaaggtggttgggaggggtgggctgaagggcacaatcctccagccacctagcccctttcttcccstggggctgtctggcttgaatcctcttgtctctccctccttctccctgtctcctatcctgttcccaggaggctgggatgggtttgagagtctgagaaaggg

SEQ ID NO: 542554 - DNA, 201 bp, Homo sapiens
ctttgggagtacgaggcaggcagatcattgacgccaggagtttgagaccagcctggccaacatggcaaaaccccatctctactaaaaatacaaaaacttckccaggtgtaatgacatgtgcctgtagtcccagctacttggggcagggggcgggtgaaatgggagaatcacctgagcctggggaggttgaagttgcagtga

SEQ ID NO: 542555 - DNA, 201 bp, Homo sapiens
gggagtacgaggcaggcagatcattgacgccaggagtttgagaccagcctggccaacatggcaaaaccccatctctactaaaaatacaaaaacttcgccargtgtaatgacatgtgcctgtagtcccagctacttggggcagggggcgggtgaaatgggagaatcacctgagcctggggaggttgaagttgcagtgagctg

SEQ ID NO: 542556 - DNA, 201 bp, Homo sapiens
agagattatcgacaatgactatgttacttctataatcagagagagaaatattgtgcttgcttttattttcttaagcaactctacataaattcttgccacarctttctgggccccgtaatgttactgctgtgtctccttcctcccagccctcatggcaggactcatgtgtgacaggctctgggtcttctctcatctgccagt

SEQ ID NO: 542557 - DNA, 201 bp, Homo sapiens
caatgctgagtactgagtggacctttcctttaagagtttgaagaggtcagaaagcacccagtagtcagagctgtgttgcaaagctcccggaaaatttggcygctactttgtatttgtgtgtgtattcattattcatagacatgtattcatagacaacattattgctcaaaagatttgagacatattctccacttcacttta

SEQ ID NO: 542558 - DNA, 201 bp, Homo sapiens
gagcttgtccatggagactaacccttaacaagtcccaggtttctcctctcctagaatgtgaattccacgttcaccagcagaattcagttctgctgaaatartcatggaacagtattgttttaatttctcaaacttttcaaccatatgtttataaaggtttataagacaaataagactatccctggcatataattctttcag

SEQ ID NO: 542559 - DNA, 201 bp, Homo sapiens
tagccagggccaccctagctcagatggggtggtagctgcctctgctccacaatgaggtatttacacttgctccccaccctctcctttgccccattatcttytagttaaagggccaggtgcaccagaacacaggtgccttgagtagcaccagcacctctcagggtcatagggaagagctgtttcctctgggtaaactgaggc

SEQ ID NO: 542560 - DNA, 201 bp, Homo sapiens
tattgatgccagattctgagcaggctgacagtgcatgcatgagaacctttcataaaataggactattttttattccctttgctttttctttgtgttatttyccctcttcactccctgtccttttaccttaccatatacatttgtcacctccttgcctggaaagcctagtgtcacctccctgccttttcacagcctatagga

SEQ ID NO: 542561 - DNA, 201 bp, Homo sapiens
ccctcacagagtggaggagacgggaaccagttaagagaaaatgaacacgcaatgtaacaagtgctgtcatgaatgcaggatgatagagtggtccaggggcmtggcatccaatgaggagttgggggtgggagggcatagtccagaaaggctccctaaagcatagacttagaaggtaaaattgactagacttagagtgtgggg

SEQ ID NO: 542562 - DNA, 201 bp, Homo sapiens
agacatgtattcatagacaacattattgctcaaaagatttgagacatattctccacttcactttatataattttaactttttacagcaaacaggtcaccaytctaaagagtggcttaaccagaaatccttttttaaaaaaaattaaccaaatagtataaagtagataaggtggcagtagcagatttatctgtggtaccaat

SEQ ID NO: 542563 - DNA, 201 bp, Homo sapiens
cccacttagagcaatgagtttccaagtcaaaagacatttcaaggaagaggagcatcttgtccatctgaaattaggcctccactcagaaaaatctgaggagyctggagggttccaaggagcaattgtaaccccaactgatgatggtggagcatttatcaagccttgccaatgacagtggttcacgcttcaatagcactttgc

SEQ ID NO: 542564 - DNA, 201 bp, Homo sapiens
aaagacattaacaggccacatggtgggaaggctaagattccccatggggttgactttgaggaacactagatggttaccatgtctctagaaatgagcctgcycttggtgagtgagatatgcaagctgatgctgattgcaggattgcttgggactatagagagaattttattttattttagaggggattttagagcggtgtga

SEQ ID NO: 542565 - DNA, 201 bp, Homo sapiens
cgaccccttacacttcccgggtgaggcgatgcacccccctacttccactgacactccgtgggctgcacccactgtccaacaagccccagtgagatgaaccyggtacctcagttggaaatgcagaaatcacccgtcttctgcattgctcacgctgggagctgtggactggagctgttcctatttggccgtcttggaacccct

SEQ ID NO: 542566 - DNA, 201 bp, Homo sapiens
agtgagatgaacccggtacctcagttggaaatgcagaaatcacccgtcttctgcattgctcacgctgggagctgtggactggagctgttcctatttggccrtcttggaacccctatccttgctcttattaatacctcaagtgacatacagttcagtgtgccctacatgtggacggagggtgagagtgaaggctgccattta

SEQ ID NO: 542567 - DNA, 201 bp, Homo sapiens
aaagaaaaaagccgggcgtggcagctcacgcctgtaatcccagcactttgggaggccgaggcaggtggatcacctgaggtcaggagttcgagaccagcctraccaatatggtgaaaccccatctctactaaaaacacaaaaattagctgagcatggtagtgtgtgcctgtagtcccagctactcgggaggctaagacagga

SEQ ID NO: 542568 - DNA, 201 bp, Homo sapiens
tgggaggccgaggcgggtagatcacgaggtcaagagatggagaccaccccggccaacagggtgaaaccctgtctctactaaaaaaacaaaaaaattagctrggcatggtggcacgcacctgtaatcccagctactccagagattgaggcaggagaatcatttgaacctgggaggcaaaggttacagaaagccgagattgcg

SEQ ID NO: 542569 - DNA, 201 bp, Homo sapiens
atggcctggtgggaggacagggagctcatgctgccgcatcagtcgggaggagggatttgtcttctccacagggcaggatccctacaggaaacaggacaaaytgagaagggcttgacaatggaactctttacaaaggtgtcagcagagtattcaaaaccacaggagaattgagtgtcagggctagcaactgtacggttccag

SEQ ID NO: 542570 - DNA, 201 bp, Homo sapiens
actgtaggcatccccagaagcttgccttttgtccagtgccatgggaaccacagaaggcactcagctttgcagcttcactcagaattggggcaatgctccayagagtcaagggcatgttattataaagtgctccatttgtttactttggcaagtggaagatgactttgctaagcgatactctgctggggctcagggccagca

SEQ ID NO: 542571 - DNA, 201 bp, Homo sapiens
gattgagtctgccctcagagtttttgtattctgagagtgactagcaactttctctcatcctagagcaacagggctttcagaggacaggttctggggcagcrtgtagccacgatagaattggtttgcttttgtgtccaaagtcatgattatcaggagagctgccatttatcaaccacctctttgatacttggtgtataggac

SEQ ID NO: 542572 - DNA, 201 bp, Homo sapiens
ataacagaggttttggggtcaaggagtgaaaggaattcatcccatcctgtctctaaatacttttttctttaccaatttatgggaatttgagaccagatatmtggaaccaagcagcctcaccctattaagggaaagaaaaagaacagaagaaaagaggagaggagaagagaagagaagagaactaaaagtatctgcaaaaat

SEQ ID NO: 542573 - DNA, 201 bp, Homo sapiens
gaatttagaatttgtgttggagccaaattttactgttattccttgcttagcatttagaatatgaagaaggtttccaagtaatttcctctcaagcttcattragaagctttgggtagataattggtgctttcaagaatggtcctgctcacactggcaatcaagactgtttctttagatatttagaagtgctcattattaaat

SEQ ID NO: 542574 - DNA, 201 bp, Homo sapiens
cccactcaatcacttgtgctggttcattgttacttgttatagtagtcattgttatcaagactttttggttgtaagtgtcagaaacctaactcaaacagagstaagcaaaaataaatctataaataaatataattagctcaaaagtctgaactcactggattgatcttcagacataattgcatgcagtgttcaagcagcagc

SEQ ID NO: 542575 - DNA, 201 bp, Homo sapiens
gtgttgttgaacacctgtagacatgtttacaggtgacagtgtagggggctgaatatgtagatgaagccaaactgagattgttctggaactttgatgatggyattccagacgggacaatggcagtgggtcaggcgttggaggcttccgtcttaatcactgctcttctacttggttaaatgtagtagttaccatctgcagtag

SEQ ID NO: 542576 - DNA, 201 bp, Homo sapiens
ggctgaatatgtagatgaagccaaactgagattgttctggaactttgatgatggtattccagacgggacaatggcagtgggtcaggcgttggaggcttccrtcttaatcactgctcttctacttggttaaatgtagtagttaccatctgcagtaggctgtactggttgtctctggattgtccctagatttgcccaactaaa

SEQ ID NO: 542577 - DNA, 201 bp, Homo sapiens
tcgtatacaacattttactttaccgaatactacatgcaattgtaacacaatggtaagtatttgtgtatctaaacataggaaaggtatagtaaaaacacagyataaaagattttttaaaatggtacacctgtaaagggtacttaccatgaataaagcttgcaggactgggagttgctttgggtgagtcagtgaatgagtggc

SEQ ID NO: 542578 - DNA, 201 bp, Homo sapiens
ttactttaccgaatactacatgcaattgtaacacaatggtaagtatttgtgtatctaaacataggaaaggtatagtaaaaacacagcataaaagatttttwaaaatggtacacctgtaaagggtacttaccatgaataaagcttgcaggactgggagttgctttgggtgagtcagtgaatgagtggcgactgaatgtgaag

SEQ ID NO: 542579 - DNA, 201 bp, Homo sapiens
actcctgacctcatgatctgcccgcttcagcctcccaaagtgccgggattacaggcgtgaaccaccgtgcctggccttgactattttgtaataatacttgscttaaaacacaaacacattgttcagctgtacagaaacattttccttctttatatgcttatactataaacttttttctatttttaaaagtttttttgtttt

SEQ ID NO: 542580 - DNA, 201 bp, Homo sapiens
tttccttctttatatgcttatactataaacttttttctatttttaaaagtttttttgttttactttttaaactttttcattaaaaactaagacacaaacaytcacattagcctagaactacatagtgtctggatcgtccctattgctgtctttcacctccacatcttgtcccacttgaagttcctcaaggatgatagcatg

SEQ ID NO: 542581 - DNA, 201 bp, Homo sapiens
gtgcaagagaggagcagatgaaaatattaatttcagtggttcttaaaaattaggggtgataggtccttttgagaattagctgtgagtcctcttcctggggsaaaatgcatatggcatgtacataaaattttacatgcaatccctgagggtttgtggatactccctgaaagccatgcctgaatcccaggtgacaatccctta

SEQ ID NO: 542582 - DNA, 201 bp, Homo sapiens
aaaccaaattctgatggacatctgatgtttttactattcctatgaatgtattccaaggttctgagagggtagggaaagcaggaataagagtgggaaaatayatttagcaacattcttgagagttttttcttagacttgtcagtgttctcagttgtgcccatcctcaagctccaaagattctcccacaaggcatttggccaa

SEQ ID NO: 542583 - DNA, 201 bp, Homo sapiens
taaataaaatatattaaaattaatttaacctttttcctttaatgtggcttaatagaaatgtttaaattacatatgtgactcacatgatatttccgttgaayagcactgatctagactaataagttgacaaatacatgataggacctttttcccccttcttccaaacgtgacttcttcctctgttcttgtgtcaggctcctt

SEQ ID NO: 542584 - DNA, 201 bp, Homo sapiens
tatatttgcacttttttgttaaatttttacttaactagtatattaatattgatagtactttgtgacttttttcataaatataacttttaaaaaatatggtmtttctaaaaaggtttggtgcattgttaaaatgtggttttgatttattcacagacagaaatcttctctaacagactatacttccatttcgtaattcagtga

SEQ ID NO: 542585 - DNA, 201 bp, Homo sapiens
gagaggaaacagtatgtgtgaaagtgttgttcagtgtcctaaatgttaaaggtcctctttccccagaacatggagtgtgtgtgtgtgtgtgtgtgtgtgtycgcgcgtgggtgtgtgaaggagcagggcagggtggtggtcaagtgtgagcaggaggccactggggaggctgcggcagtccgagagaaagacaatgatgtt

SEQ ID NO: 542586 - DNA, 201 bp, Homo sapiens
ttcatgatttgtccttaaacaacccccacttcctcatcctcttgaacattttatgcctccatcactgtctcttcaggtcttgtgagtccttgaagtgcagwgactaggctggaacatggtgttccaggttggtcacatcacctcttcctaatgatgccccattgtaccttttgactatagcaaggaataaacaaagtcaga

SEQ ID NO: 542587 - DNA, 201 bp, Homo sapiens
atggaataggcttctatattattattttcatttaggcagtataactgacatgattaccaaagtcatgttatagtacatgtatacaaattaatttcataccrggggacttcactggggggaaaaaagggaagtccctatttgtgaaaactatgattttggtttctttctgagtaaagcactgctaatctctttggtgtacag

SEQ ID NO: 542588 - DNA, 201 bp, Homo sapiens
attacatatgtgactcacatgatatttccgttgaacagcactgatctagactaataagttgacaaatacatgataggacctttttcccccttcttccaaaygtgacttcttcctctgttcttgtgtcaggctccttctcatctgcccccatattcagttatttggtgaagcacgagagaaaagaggtccctcttccttctc

SEQ ID NO: 542589 - DNA, 201 bp, Homo sapiens
ttcctagtacattgtctttgtagttttgggcactttgtaaaatcagacgaggagacaactagagcttcatgtttttgtgcaaagctcattaaataagtaayctcatgcagtaataaatgtttctccctgtcctcttgcttaaaacagcatgaacaaaaagtagtcccagttgccagaagggctactccaggggcatcacaa

SEQ ID NO: 542590 - DNA, 201 bp, Homo sapiens
gtaaacacatgcagggagaaagtacagaggcacagacacagataaacatgtttctccatgcgtcctatggagagaaaatggcggcagttttcttctagggrtggggagcccagcattgtaacgctatgttaatgacctaaacggaacaaggggtagccagttctggtttgcactggtttcctgcaggcctcttgtatttgg

SEQ ID NO: 542591 - DNA, 201 bp, Homo sapiens
tatgctagactccacggggaaaatagaagaataaaacatggttcttgctctggaggagcatagttcctagttgggaaggtggacagaaacataaaagaccrgtagcatgtaaagaacattttctaagtgttacataaatgatgcaaacaaagttttgcaattctggagggcagcatgcccataacctctaaggtatattaa

SEQ ID NO: 542592 - DNA, 201 bp, Homo sapiens
ctggaagcctaaagacacaaggagagaaggagagagccacctcacataagaaaaaatgcacagtggtgtggcagtggaaatgtacatgggttcgggggtgsgtgatgtggaaaagaacagttggcttaatccagtggctccagatctgagctttacatcagaatcacctgagaagcttttaaaaattacaaatgcctcagc

SEQ ID NO: 542593 - DNA, 201 bp, Homo sapiens
attttgttttgtttttgtttctgtctcaatttcccagaatattctaatgtgaagtcagagttgagaatcactgagcaaaaaccaagatttttatatcatartcatgggacataaaatgaaagaagtaatcttttaaaggagattaaatggacaaccaagagtgtgacctttaatttgtagaaactgtatatacatgcacat

SEQ ID NO: 542594 - DNA, 201 bp, Homo sapiens
agtgcctacctcatagattttggggagcattaaataagataatgcctgtaaggttcttagcatgatagctggcatattttaagaacttagtaaatgttgtstattattttcggtgaaagtcctcaaatgttgaagcttatcagaggtaattgaattatttaatatggctggtagtgatgattgtactaaagacaaattagt

SEQ ID NO: 542595 - DNA, 201 bp, Homo sapiens
gccaggagactagctggtgatgaaggtgaaatgagaattctcagggaggtgaaattagaatttccagctactgaattccacataccttattaaactcccaragtgagtctacccactctcctgttggtgttagaatgttatttcttacatgaatgaatcagtgtcacagatcagtaggtgaagatgactggtttccctaag

SEQ ID NO: 542596 - DNA, 201 bp, Homo sapiens
ccaggagactagctggtgatgaaggtgaaatgagaattctcagggaggtgaaattagaatttccagctactgaattccacataccttattaaactcccaawgtgagtctacccactctcctgttggtgttagaatgttatttcttacatgaatgaatcagtgtcacagatcagtaggtgaagatgactggtttccctaagc

SEQ ID NO: 542597 - DNA, 201 bp, Homo sapiens
tgtatcttcccaaattccacaattgattataaacctggccaatacagatggactttgaaggttgctcaaatctcttacagctactcaaaaggattattacrgactagaaaaagtattgcctgcagtgaaaagcttcaggaataatagagttcagtagccctttttcttcatttattacattgaataaaactaataaggagc

SEQ ID NO: 542598 - DNA, 201 bp, Homo sapiens
aggagactagctggtgatgaaggtgaaatgagaattctcagggaggtgaaattagaatttccagctactgaattccacataccttattaaactcccaaagkgagtctacccactctcctgttggtgttagaatgttatttcttacatgaatgaatcagtgtcacagatcagtaggtgaagatgactggtttccctaagctg

SEQ ID NO: 542599 - DNA, 201 bp, Homo sapiens
tagaatgttatttcttacatgaatgaatcagtgtcacagatcagtaggtgaagatgactggtttccctaagctgccaacactgtgattatctgagtgtcartgacccataggcagtcacagtggtcccgagagccccgtccctgatgcctgggagctctcagtctagtgaagtttggccttgcatatttatagtttatcca

SEQ ID NO: 542600 - DNA, 201 bp, Homo sapiens
ttgttctttcatttcagtgaacatttgttgagggcctgacatgagctaggcacatggcaaagttttagagatgcaaaggtaaattaagacccctgtgttamttctcatgtgggcaaagcaagcacattttttaagttgcaataatgcaacaatggtggtgtgtacatagtagggcaaaagcatagagaaagccatggaaat

SEQ ID NO: 542601 - DNA, 201 bp, Homo sapiens
gcctgcagtcactgtagtacagactgaatgttcactgtgtcctgctttcagcatttaagatgcctctgagataaagagcctgccttgagtctcacgggacrtgctcacattttctgaaaccatgtagcttgcactgttaacctcttcctcggtttagaggttttaggggctcgtttcacaaagctgccccagcccctcatg

SEQ ID NO: 542602 - DNA, 201 bp, Homo sapiens
cttttatcttgctccccatagtctgaacagaaagagacgccacagaatacaatcacgactctctccctcctacggactccctccccacaagcaatcaatgkgctggtctcagacaaagacacctagtcaaggctggtgaaacctgctctatttcctagtaggcctccacctgtaattctcagcagtttgtgtgtatagata

SEQ ID NO: 542603 - DNA, 201 bp, Homo sapiens
cattatgctgggtataaataaaaagctcccaggacagtggacggcattgagattccaccggtttgtattagtgtggcctcgccagtaatttacatcttctrtcttttttggttggtcagggcttaagccataccaggtaaatattttgaataatactcctagctaaaaggtgcaaggagtagatactgtgggttctgattt

SEQ ID NO: 542604 - DNA, 201 bp, Homo sapiens
agagtcctaggatctaagcctgcacgggttcagtcttctgcaggaacttgggaatgttggggttcacttaggcccccagtgttggcatgtacacccacttkcaggaggctggaggtataagttcctctctgcatttgtctcaggtcatcacaggcctcagaagtttctcaacagaaaaggattgcatgggttggatgtcca

SEQ ID NO: 542605 - DNA, 201 bp, Homo sapiens
catctgggtattggtgggcatgtactttcagcagtgagtttacaaataatctagacagagttaagtatcaggtttaagagtcctaggatctaagcctgcaygggttcagtcttctgcaggaacttgggaatgttggggttcacttaggcccccagtgttggcatgtacacccactttcaggaggctggaggtataagttcc

SEQ ID NO: 542606 - DNA, 201 bp, Homo sapiens
agtgactctttagtggccctggagcttcctttctaaactcaagtgtatatttaatgtggctatttagggatgaacagcagtattttcagagaaaagtataraagaacagatgaaatcacacaagatgcacacatctgggtattggtgggcatgtactttcagcagtgagtttacaaataatctagacagagttaagtatca

SEQ ID NO: 542607 - DNA, 201 bp, Homo sapiens
acctgggaggcggaggttgcggtgagccaagatcatgccattgcactccagcctgggcaacaagtgcgaaactctgtctcaaaaaaaaaaaaaaaaaaaaagaatgtagtttcgtgcaatgttagtttagttgaattataaattgatgtcatcttactgagatgcatttaaaatgtacacacattttgacctaggaatcct

SEQ ID NO: 542608 - DNA, 201 bp, Homo sapiens
attaataaatccatgcccagcctacgcaacatagtaagacccagtctctacaaaaattttaaaaattagccagccatggtgacacgtacctgtagtcctasacacttgggaagctgaagccagaggattgcttgagcccaggaggtcgaggctgcagtgaaccgtgattgtgtcactgcactccagcctgggtgagagagc

SEQ ID NO: 542609 - DNA, 201 bp, Homo sapiens
agtatatcccatttagagatttgcatacttagagattaagcccatgttcattaattatttagttaattcaaaagccattaataaatccatgcccagcctaygcaacatagtaagacccagtctctacaaaaattttaaaaattagccagccatggtgacacgtacctgtagtcctacacacttgggaagctgaagccagag

SEQ ID NO: 542610 - DNA, 201 bp, Homo sapiens
tgaagatcacaagtatatcccatttagagatttgcatacttagagattaagcccatgttcattaattatttagttaattcaaaagccattaataaatccaygcccagcctacgcaacatagtaagacccagtctctacaaaaattttaaaaattagccagccatggtgacacgtacctgtagtcctacacacttgggaagc

SEQ ID NO: 542611 - DNA, 201 bp, Homo sapiens
cctaaacataaaagtaatctgcttttgacatataattttgtataatacgtatgaaaaaatgtgacagctaaggacttgaattaaatccctaaaaaacaccaattagccactcattaagccaagactttaattctatgatcaattagcactgtttatctgaattaagcttttttgtggtctaacaaaaagtttttttgtggt

SEQ ID NO: 542612 - DNA, 201 bp, Homo sapiens
acctaaacataaaagtaatctgcttttgacatataattttgtataatacgtatgaaaaaatgtgacagctaaggacttgaattaaatccctaaaaaacaccaattagccactcattaagccaagactttaattctatgatcaattagcactgtttatctgaattaagcttttttgtggtctaacaaaaagtttttttgtgg

SEQ ID NO: 542613 - DNA, 201 bp, Homo sapiens
agggtctagaggcagaaagcctgagttcaaatcccagcctgcaacactatagttatgtggccattggtaaatctttctttgattcccagttttcttatctkttataacaaagcaatgtaggcaaagagtttaacaccattgatggcttttagtaagaacttaatgttagcttttattattattactgcaaacgaccatgtg

SEQ ID NO: 542614 - DNA, 201 bp, Homo sapiens
agagagcagcttgtccaaagtcacataccctataataagtgataaagccaagacctaggtcagtacctgacccaagtcagaggataagaaaaaagaggccrggcgcggtggctcacgcctgtaatcccagcactttggaaggcagaggcgggcagatcacgaggtcaggagatcaagaccatcctggctaacatggtgaaa

SEQ ID NO: 542615 - DNA, 201 bp, Homo sapiens
aggcagaagcaggtggatcacttgaggtcaggagtttgagaccagcctgaccaacatggcaaaacccagtctctactgaagatacaaaaaacttagccagscatggtggtgagtgcctgtgatcccagctactctgaaggctgaggcaggagaattgcttaaacctgggaggcagagatttcagtgggctgaggtcatgcc

SEQ ID NO: 542616 - DNA, 201 bp, Homo sapiens
aatacctcaaccaggctgggtgcagtggatcacacctgttaatcccagcactttgggaggccgagacaggtggatcacctgaggtcaggagttcaagacawgcctggccaacaggaagaaaccccatctctactaaaagtacaaaaaaattagccaggtgtggtggcgggcacctgtaatcccagctcctcgggaggctga

SEQ ID NO: 542617 - DNA, 201 bp, Homo sapiens
tacaggcatgagccattgcacccggccaacagctacattttaaagaatcctttatatgtgttgggagcttctgggttcactgcccacggtgagactagggstggggacggaggttcttctgaaggacagtgcggggaaaaagccagagtcttggcaatacagcctctttagacaaaaagataggtcaatttgtaccattcc

SEQ ID NO: 542618 - DNA, 201 bp, Homo sapiens
gccattgcacccggccaacagctacattttaaagaatcctttatatgtgttgggagcttctgggttcactgcccacggtgagactaggggtggggacggargttcttctgaaggacagtgcggggaaaaagccagagtcttggcaatacagcctctttagacaaaaagataggtcaatttgtaccattcccaaatggttgg

SEQ ID NO: 542619 - DNA, 201 bp, Homo sapiens
aaggacagtgcggggaaaaagccagagtcttggcaatacagcctctttagacaaaaagataggtcaatttgtaccattcccaaatggttgggttttctttyctctgtctcaaaatccattactgatttaaaacaatttccaaaagctttagcaatagcaaaaagcaagcctcttaaacagtgttgctccacactgattgca

SEQ ID NO: 542620 - DNA, 201 bp, Homo sapiens
aacatgattttgagcataatttaagtttgctacttctatagagagacctcacactcagtagcctcatcactaaaattttctgtgtgcaatttagaaatcasattgccagaagcttgctaattaattatgagactgaaagataaaggttaagctttcctgccacctatatattagatttcccaattgctatgttaatcttta

SEQ ID NO: 542621 - DNA, 201 bp, Homo sapiens
ataatttaagtttgctacttctatagagagacctcacactcagtagcctcatcactaaaattttctgtgtgcaatttagaaatcacattgccagaagcttsctaattaattatgagactgaaagataaaggttaagctttcctgccacctatatattagatttcccaattgctatgttaatctttagttaaccaagacttg

SEQ ID NO: 542622 - DNA, 201 bp, Homo sapiens
attagatttgatggaagaggctgggggacagaaggtgatgtagcattttgttttctggggtgctgagattgtgggattaggagaaaataagaaaaaagatygcaggggagaacgatggacagaggcctcctgttagtcaactatcatgggcatcagaatttctttattcactcaactaatgtttatggaggttctgctttg

SEQ ID NO: 542623 - DNA, 201 bp, Homo sapiens
ctcccaggggaatttggcaatgtctggagacactttttattgtcatgactggggagttgctactggcatctggtgagtagactccatggatgctgctaggmaccctacagtacacaggacagcccctatgacaaaatattatccagtccaaaatgtccacagtgctgaggctgaggaagcctcttctagagattgtcctcc

SEQ ID NO: 542624 - DNA, 201 bp, Homo sapiens
aatgcaatgaactgaagggaatagagtttgctgaaggctgctttcaatagcttgtacaagttgcactgtctgaggaggtgcccttcaagctagcacatcartactaaaaagaaaagcatgccgagagctggcagaaagaaggcttcaggcagaaagaacaacagcaaaagtcctaagactggaaaaggtctgagttgttca

SEQ ID NO: 542625 - DNA, 201 bp, Homo sapiens
gcatgccgagagctggcagaaagaaggcttcaggcagaaagaacaacagcaaaagtcctaagactggaaaaggtctgagttgttcaggaaacagaaaggaraccattgtggctggacccgaggtaagaagcaatgagggaaaggtgggaaaagagcaaggagggcccgaggtcatgggatggagttaggctgttaagtgct

SEQ ID NO: 542626 - DNA, 201 bp, Homo sapiens
catgccgagagctggcagaaagaaggcttcaggcagaaagaacaacagcaaaagtcctaagactggaaaaggtctgagttgttcaggaaacagaaaggagmccattgtggctggacccgaggtaagaagcaatgagggaaaggtgggaaaagagcaaggagggcccgaggtcatgggatggagttaggctgttaagtgctt

SEQ ID NO: 542627 - DNA, 201 bp, Homo sapiens
accagaggagtcttgatgaaatgccctctcttttcctcaaactctttctgcctactattcatagtatctgtgttgtacccacccacctgccacttatcaawgactgaagaaaccaaagttattcaacaagccatgaagcaaattctaattgctccccacggccatctgaggctggcctttggaaacttaaaaaaaaaaaat

SEQ ID NO: 542628 - DNA, 201 bp, Homo sapiens
ttacttctcatttctcccttcctcaagccctggcaatgactgtctgtttctgggagtttgcctcgtctggatatttcatatatatatatatatatatatatggaatcataaaaaatatgaagctgttccacatttttttttttgaaatggagtttcgctcttgtcacccaggctggagtgcaatggtgcgatctcagctca

SEQ ID NO: 542629 - DNA, 201 bp, Homo sapiens
gttacttctcatttctcccttcctcaagccctggcaatgactgtctgtttctgggagtttgcctcgtctggatatttcatatatatatatatatatatatatggaatcataaaaaatatgaagctgttccacatttttttttttgaaatggagtttcgctcttgtcacccaggctggagtgcaatggtgcgatctcagctc

SEQ ID NO: 542630 - DNA, 201 bp, Homo sapiens
atttgcttgtctgtaaagtattttatttctccttcacttatgaagcttagtttggctggatatgaaattctgggttgaaaattcttttctttgagaatgtkgaatattggcccccactctcttctgggttttagagtttctgccaagagatccactgttagtctgatgggcttccctttgtgggtagcctgacctttctct

SEQ ID NO: 542631 - DNA, 201 bp, Homo sapiens
ttggttggtaggctattaattattgcctcaatttcagagcctgttattggtctattcagagattcaacttcttcctggtttagtcttgggagggtgtacgygtccaggaatttatccatttcttctagattttctagtttatttgcatagaggtgtttatagtattctctgatggtagtttctatttctgtgggattggtg

SEQ ID NO: 542632 - DNA, 201 bp, Homo sapiens
gacatttgggttggttccaagtcttgctattgtgaatagtgccgcaataaacatatgtgtgcatgtgtctttatggcagcattatttataatcccttgggyatatacgcagtaatgggatggctgggtcaaacggtatttctagttctagatccttgaggaatcgccacactgacttccacaatggttgaactagtttaca

SEQ ID NO: 542633 - DNA, 201 bp, Homo sapiens
aattgatggcaaattttttttattattatactttaagttctagggtacatgtgcacaacgtgcaggtttgttacatatgtatacatgtgccatgttggtgygctgcaaccattaactcatcatttacattaggtatatctcctaatgctatccctcccccctccccccaccccatgacaggcccctgtgtgtgatgttacc

SEQ ID NO: 542634 - DNA, 201 bp, Homo sapiens
ttttgcaattgatggcaaattttttttattattatactttaagttctagggtacatgtgcacaacgtgcaggtttgttacatatgtatacatgtgccatgytggtgtgctgcaaccattaactcatcatttacattaggtatatctcctaatgctatccctcccccctccccccaccccatgacaggcccctgtgtgtgat

SEQ ID NO: 542635 - DNA, 201 bp, Homo sapiens
tggtggagtgatggcatagactgtgaacatgagtccttttgcaattgatggcaaattttttttattattatactttaagttctagggtacatgtgcacaaygtgcaggtttgttacatatgtatacatgtgccatgttggtgtgctgcaaccattaactcatcatttacattaggtatatctcctaatgctatccctcccc

SEQ ID NO: 542636 - DNA, 201 bp, Homo sapiens
gaggggccattaacagtcttggtggagtgatggcatagactgtgaacatgagtccttttgcaattgatggcaaattttttttattattatactttaagttytagggtacatgtgcacaacgtgcaggtttgttacatatgtatacatgtgccatgttggtgtgctgcaaccattaactcatcatttacattaggtatatct

SEQ ID NO: 542637 - DNA, 201 bp, Homo sapiens
acccagggaggtccaggctgcagtgagcggtgatcatgccactgcactccagcctgggcaacagaacaagaccccgtctcaaaaaaaaaaaaaaaaaaaaagcccaactcctggaaatcaaatggtacctgatgtgaggttttctccctgttatgttagcctcaggccatctaacccaggtagaacaaggcaggtaaggaa

SEQ ID NO: 542638 - DNA, 201 bp, Homo sapiens
tgtgtttttcaactatcttaatagagtgggtctgtatttaagactccattcctcccttctaataaaataacatttgaatgactggagttttcttaatggcmtgcacatggaacactgcacctgcagttgtgtgttcagctgacaagttcacagctgagtgtgaagccaagctacagcaggtcttccaggggtctacttgcc

SEQ ID NO: 542639 - DNA, 201 bp, Homo sapiens
cagcttcctgatttcttttcctctttatatgtgaagggttttgttgtttgttgtttattttttttattttcataggtttttggggaacagatggtgtttgrttacctaagttctttagtggtgatttgtgagattttggtgcacccatcacccgagcagtatacattaaacccaatttgtagtcttttatccctcaccccc

SEQ ID NO: 542640 - DNA, 201 bp, Homo sapiens
tggcagactgatgtactaaagaaccatcttaagttgatagattgttaggctccttttatgttaggggaagggggaataggtagggggttaaggtccacagktgactggtgaccacaggcatctgggcatcagcagggatctaggaggttgcaaaacttctttgttcatggtcaactattttccagattgaccttgtttcta

SEQ ID NO: 542641 - DNA, 201 bp, Homo sapiens
actatgacagtttctgatcttaatatcttagatttaagcgtatttagtattgataataaaaatgacttctgtttaagtttgtggagagttggggtttgcargatgatgtaatggtgatagcacaataatgtcatgatatttacatctgtgtttttcaactatcttaatagagtgggtctgtatttaagactccattcctcc

SEQ ID NO: 542642 - DNA, 201 bp, Homo sapiens
acacctcagcctggacaaaggcctccaggaccgggagctgtgctctgcaggaactgggccccaggcactgaggactgaaaaccagcccaacaaagcatacytgtttccatttgtgagagatgaaatgatatgggttttgtgactcactaaaccacttggaaggccaaacaattacaaaagcaagatgcctggcttcttcta

SEQ ID NO: 542643 - DNA, 201 bp, Homo sapiens
acatgcgtgtgctggggaagtcgagaagcaggacaggaggcaggtctgagagatctggtttgtgtcttgtgccctggttctctctgcattccttctctgtytctttttcccttcctcatgccttttccttagctgatttccctaggacagaattattttctttttcggactgaatggtaaagaagtatttgtttcctaagt

SEQ ID NO: 542644 - DNA, 201 bp, Homo sapiens
gaatctccaaagacatgatgatcagatgactggttaatgggtattttttcagactctacatgattatcagaaatggctgccctggccaattgtatacctaygaagaggtattatgtagaagaacttatattcatctacttaatgtggacctcaaatattaaggatgttcctaatgtgttctagaccggagtcagcaatact

SEQ ID NO: 542645 - DNA, 201 bp, Homo sapiens
gttatctctgagtcgctgtaaggattaaaaagtagagtgttattgcatgcgtcctcaccctcagtaaacgtttgctgatagtattctgcattagaaattgmagagtaccagacattattgaagcatcactttttctttttttctgtctccttctactcatctgcctctgttagaggagctcaggaaaaagtattagctagg

SEQ ID NO: 542646 - DNA, 201 bp, Homo sapiens
ccccagaagggagagttctgtagaaagggccatctggagggaagcagtgaccttcagtcagcccaaggtgacagccaggcagcaaggagatgagtaccctyagcctcactccttcccttcctccaacctcctaccaagcctccctgtgggtcaagctcatcctgggagtcagaaggcaagagagcccctagatgcagtcca

SEQ ID NO: 542647 - DNA, 201 bp, Homo sapiens
ttgagaaagtgcaggggatttaggggagagaaaaatggactacaggaaaagaaaacattgacttttgcaaagtgctctaaactggctacaaatgcattccktaattctttaaaccttaattgtaaccgcagttaagctttccggtgtgttggaataagaacaaaactaaaatccttctttgtatagaaattatcctgcagt

SEQ ID NO: 542648 - DNA, 201 bp, Homo sapiens
atcttggatataatttagcataatgagctaaataactctagactgagcttcgctgcccagacaggactctacttgtgatctgggaagatctacccttgcaytgaattctctcctcttctctcctgactctgtgagaaaagtttgcatgaatttactgagattagttatagaaggaactgtgtgtcattgaaagtcttgtac

SEQ ID NO: 542649 - DNA, 201 bp, Homo sapiens
ggtggcccaagcccatataccatcatggcacagtgaatacgttttccttctggatcgtggaaatgaatattgtgccacacagcttgattgacactccccartgacttttaatactgtgggatctctggcacatacttcagaagatgagaaaggagttttaattaacctctgtttaggaattccatagacataattttcatt

SEQ ID NO: 542650 - DNA, 201 bp, Homo sapiens
cctcccaggggaatttggcaatgtctggagacactttttattgtcatgactggggagttgctactggcatctggtgagtagactccatggatgctgctagrcaccctacagtacacaggacagcccctatgacaaaatattatccagtccaaaatgtccacagtgctgaggctgaggaagcctcttctagagattgtcctc

SEQ ID NO: 542651 - DNA, 201 bp, Homo sapiens
cacatacttcagaagatgagaaaggagttttaattaacctctgtttaggaattccatagacataattttcattaacatctacttggtatttcatctccatraattctttccagtgataaagctagttggtttatcctccaggactgctcagttctgaacagtgggtcttaagtactctttggatttctttgaaggcttttt

SEQ ID NO: 542652 - DNA, 201 bp, Homo sapiens
gaaaaccccggggttaggttctggctagagaagccacaaagcacctggaaagacaggaagatactggagtcagtctgaaactccagggtgtggcaaacacrtgcagaccctcagaagcctaagaggaggttttgcagaaccacgaggaaaaaataactcagggacgagaaataagggtcaggactcaaagcagtggacata

SEQ ID NO: 542653 - DNA, 201 bp, Homo sapiens
tcagttctgaacagtgggtcttaagtactctttggatttctttgaaggcttttttttatttttgttgactacctctctactcattttgccccagaaaaaawgtagtcatttctttgataagtgaaatctaagaaaggcttatttcatttggtacattaaagagatggaagaaagtaactttacataagaatataaatgcca

SEQ ID NO: 542654 - DNA, 201 bp, Homo sapiens
gaagaaagtaactttacataagaatataaatgccagctgtccagcatattacagaatagatttctaaatttgctgaaaggttaggaaaatggattcttatrtaggcttaaaatttttataatttttttggcattctagaatgaaataaagaaaatcggtatcatcttgatctcatcacccagaagaaaaaaaaaacactga

SEQ ID NO: 542655 - DNA, 201 bp, Homo sapiens
agacagagtctcgccctgtcgcccaggctgcagtgcaatggctcgctgcaaatctcggctcactgcaaactccgcctcccaggttcaaatgattctcctgscccagcctcccaagtagctgggattacagatgccagccaccaggcccagctaattttttttgtagttttagtagagacggggtttcaccatgttggccag

SEQ ID NO: 542656 - DNA, 201 bp, Homo sapiens
aaactttcttaaactcattttgactttttttttttttttttttgagacagagtctcgccctgtcgcccaggctgcagtgcaatggctcgctgcaaatctcrgctcactgcaaactccgcctcccaggttcaaatgattctcctgccccagcctcccaagtagctgggattacagatgccagccaccaggcccagctaattt

SEQ ID NO: 542657 - DNA, 201 bp, Homo sapiens
ttttaaatttttttcttcagtaataaattaaccttagcttgctgtaacttaactttataaactttcttaaactcattttgactttttttttttttttttttgagacagagtctcgccctgtcgcccaggctgcagtgcaatggctcgctgcaaatctcggctcactgcaaactccgcctcccaggttcaaatgattctcct

SEQ ID NO: 542658 - DNA, 201 bp, Homo sapiens
atatgttttataaggtatatttatgttttatatgtatatatgttatatatatgttttatatatgttttatatttatatatgtatgtttttatatatatatrtgttttcattcctgaaagggtgtgctttagatatttagacatgatgatgccagaaaaatatgttttaattgtgtgcatttatgaaggaaaaggaagaatg

SEQ ID NO: 542659 - DNA, 201 bp, Homo sapiens
agctgagcatggtagtgtgtgcctgtagtcccagctactcgggaggctaagacaggagaatttcttgaacccgggcattggaggttgcagtgagccaagawtgggccactgcactccagcctgggcaacagagcaagactccgtcaaagaaagaaaagaaaagagaggagaggagaggagaggagaggagaggagaggagg

SEQ ID NO: 542660 - DNA, 201 bp, Homo sapiens
cgattttccaggtactgtctgtcacggcttcccttggctagtaaagggaatttcccgaccccttacacttcccgggtgaggcgatgcacccccctacttccactgacactccgtgggctgcacccactgtccaacaagccccagtgagatgaacccggtacctcagttggaaatgcagaaatcacccgtcttctgcattgc

SEQ ID NO: 542661 - DNA, 201 bp, Homo sapiens
ttctccgatctcaaattccgcggtgggagaaccactactttcttcaaagctgtcagacaggtacatttaagtctgcagaagtttctgctgcctttttttccactatgccctgcccccagtggtggagtatccagagacaggcaggcgtccttgagctcagtgggctccacccagttcgagcttcctggcctctttgtttac

SEQ ID NO: 542662 - DNA, 201 bp, Homo sapiens
ctggtggtgacaaaatctctcagcacttgcttgtctgtaaaggattttatttctccttcacttatgaagcttagtttggctggatatgaaattctgggttkaaaattcttttctttaagaatgttgaatattggcccccactctcttctggcttgcagagtttctgccaagagatccactgttagtctgatgggcttccct

SEQ ID NO: 542663 - DNA, 201 bp, Homo sapiens
tgagcagttattatgctcccaccatcttccctattcccatcatttagaggatttggtcaaggtcatcctctagttcttccagaatttataaggcagtaccrtgtctcaaaggctcagtctctgccatggattacacttggcaccttgtctcttagtgaagacacaggatataagatagacagctccagcaaagcaccttaa

SEQ ID NO: 542664 - DNA, 201 bp, Homo sapiens
tgcactgtggtctgagagacagtttgttataatttctgttcttttacatttgctgaggagagctttacttccaactatgtggtcaattttggaataagtgygatgtggtgctgagaagaatgtatattctgttgatttggggtggagagttctgtaaatgtctattaggtccacttggtgcagagctgagttcaagttctg

SEQ ID NO: 542665 - DNA, 201 bp, Homo sapiens
gattggtggtgatatccctttatcattttttattgcatctatttgatttttccctcttttcttctttattagtcttgctagtggtctatcaattttgttgrtcttttcagaaaaccagctcctagattcactaattttttgaagagctttttgtgtttctatctccttcagttctgctctgatcttagttatttcttgcct

SEQ ID NO: 542666 - DNA, 201 bp, Homo sapiens
ttgtgagtagaatgaggatcgtaatgtctattgttatctctgagtcgctgtaaggattaaaaagtagagtgttattgcatgcgtcctcaccctcagtaaaygtttgctgatagtattctgcattagaaattgaagagtaccagacattattgaagcatcactttttctttttttctgtctccttctactcatctgcctctg

SEQ ID NO: 542667 - DNA, 201 bp, Homo sapiens
caaaagaaatttaatccatttttacttccttccaacctttcctcagtattggtaagaataatttaacattttttattcatgttactgtcagtaaatatttyatattatatgacttctcttttgtgaattatgtgatctgttcagcaacataatcctttacaatacattcctgagcagttctatggttatctgatttctgtg

SEQ ID NO: 542668 - DNA, 201 bp, Homo sapiens
aactggaattagattgcattattccactggggtaataggattggtaaggtaggagtgtctttgaagaataatgctaaataacccagacactaaggctgaawcttcagcacagctcttaaggcatcctgtaagtaccctctgctgcttattagaaatcccaaagccctgctcccttaggaaagcggcccatccccatcctca

SEQ ID NO: 542669 - DNA, 201 bp, Homo sapiens
ccagacactaaggctgaatcttcagcacagctcttaaggcatcctgtaagtaccctctgctgcttattagaaatcccaaagccctgctcccttaggaaagyggcccatccccatcctcatcataagatgcaaggcatagctaaacatctcaacttctcacttgagtattatatactctcaggccaggatactttccaactc

SEQ ID NO: 542670 - DNA, 201 bp, Homo sapiens
ttacacactcaacacaatgttctgctgagcaagacatctgctgtagccactatcacccttggcataaccagatatttaaaggtacctaaaggagtttagcyatattttgccaagatcctaagttctatggcataagaatccatccacttctctattgcctatagaaaaggacagctcagtctttctgaaagaattgttctc

SEQ ID NO: 542671 - DNA, 201 bp, Homo sapiens
acccttggcataaccagatatttaaaggtacctaaaggagtttagctatattttgccaagatcctaagttctatggcataagaatccatccacttctctaytgcctatagaaaaggacagctcagtctttctgaaagaattgttctcaaacaagaaagcatttgaggtaacatgtcaacaaggtggactggtaattggtgt

SEQ ID NO: 542672 - DNA, 201 bp, Homo sapiens
agagccgacatcgcaccaccgcactccagcctggatgacagagtgagactccatctcaaaaaataaaaagaaaataaaattatagggctaatatgtttatycaaacctcctatagctcaactgcctacaaaatttaccttttaactgcatggaaaatattccctctcccatatcaaatttcaaaaagctatgtattttttt

SEQ ID NO: 542673 - DNA, 201 bp, Homo sapiens
gacatattatggtcaccattcttaagagacttaactaaaagacactaatttaatcttttagttacttaaaaatagctgttgctcacccactatgtgccagkctctataccaggcaccaatatgaaaaggtgagtattctctggtctccctaagcacagtctagtggaggagacagacaaaatgcagccatggccagaaggg

SEQ ID NO: 542674 - DNA, 201 bp, Homo sapiens
atattatggtcaccattcttaagagacttaactaaaagacactaatttaatcttttagttacttaaaaatagctgttgctcacccactatgtgccaggctstataccaggcaccaatatgaaaaggtgagtattctctggtctccctaagcacagtctagtggaggagacagacaaaatgcagccatggccagaaggggga

SEQ ID NO: 542675 - DNA, 201 bp, Homo sapiens
gcttggtaggctattaattattgcctcgatttcagagcctgttattggtctattcagggattcgacttcttcctggttgagtcttgggagggtgtgtgttwccaggaatttatccatttcttctagattttctagtttatttgcatagaggtttttatagtattttctgatggtagtttgtatttctgtgggattggtggt

SEQ ID NO: 542676 - DNA, 201 bp, Homo sapiens
gtgggtttgtcataaatagctcttctttttttgagatatgtttcatcaatacctagtttattgagagtttttagcatgaaggggtgttgaattttgttgamggcttttctgcatctattgagataatcatgtggtttttgttgttggttctgtttatatgctggattacgtttattgatttgtgtatgttggaccagcctt

SEQ ID NO: 542677 - DNA, 201 bp, Homo sapiens
gctgtgggtttgtcataaatagctcttctttttttgagatatgtttcatcaatacctagtttattgagagtttttagcatgaaggggtgttgaattttgtygacggcttttctgcatctattgagataatcatgtggtttttgttgttggttctgtttatatgctggattacgtttattgatttgtgtatgttggaccagc

SEQ ID NO: 542678 - DNA, 201 bp, Homo sapiens
tggccagaacttccaatactatgttgaataggagtggtgagagagggcatccctgtcttgtgccagttttcaaagggaatgcttccagtttttgcccattyagtatgatattggctgtgggtttgtcataaatagctcttctttttttgagatatgtttcatcaatacctagtttattgagagtttttagcatgaaggggt

SEQ ID NO: 542679 - DNA, 201 bp, Homo sapiens
gaaattactttgggcagtatggccatttttatgatgttgattattcctatctatgagcatggcatgttcttccatttgtttatgtcctcttttatttcatkgagcagtggtttgtagttctccttgaagatgtccttcacatcccttgtaagttggattcctagatattttattctctttgaagcaattgtgaatgggagt

SEQ ID NO: 542680 - DNA, 201 bp, Homo sapiens
tttccccatttcttgtttttgtcaggtttgtcaaagatcagatggttatagatgcgtggtattatttctgagggctctgttctgttccattggtctgtatytctgttttggtactagtaccatgctgttttggttactgtagccttgtagtatagtttgaagtcaggcagcatgatgcctccagctttgttcttttggctt

SEQ ID NO: 542681 - DNA, 201 bp, Homo sapiens
ccacgctgtcttccacaatggttgaactagtttacagtcccaccaatagtgtaaaagtgttcctatttctccacatcctctccagcacctgttgtttcctrgctttttaatgattgccattctaacgggtgtgagatggtatctcattgtggttttgatttgcatttctctgatggccagtgatgatgagcattttttcat

SEQ ID NO: 542682 - DNA, 201 bp, Homo sapiens
ggaggtggtagggatgctcaaacccctggcaataggcaaagaagtggagttttcaccttgagcccagtgctttccctcccctagcccacctgcctttgaayttccacatcctcctgctttctcctctttctctaccctctttcccggtttaccactctttcaatttccggttcctcttgctttgcatgacaaggactagca

SEQ ID NO: 542683 - DNA, 201 bp, Homo sapiens
ggtctctctgacctggaaagccctatataaagacatggtaccattcttagtgttaggactgaaactacatccctagtgtcctgacacctcataccaatacmcagaaaccctaggctcttccttcaatcccatactccttcctcagctgccaggacagcttggttaagaaaagccttgttcttggggagtatatccatgaaa

SEQ ID NO: 542684 - DNA, 201 bp, Homo sapiens
tcataccaatacccagaaaccctaggctcttccttcaatcccatactccttcctcagctgccaggacagcttggttaagaaaagccttgttcttggggagyatatccatgaaagtatctctatttcgttgcagtttcacattaagtaaaattagagtgcccttcacgaagaatatataattgaaagccctcccactgactg

SEQ ID NO: 542685 - DNA, 201 bp, Homo sapiens
aaccacaagataagtctgtgaagtatttttatccctggtttacaaaggaagaaatgaggctctgcgagacatgccagaaagaacatgctctacacaaccarctggttacaatgtgcggctttgtccagcactacctcttctttcttggcaatcatcagagccactcaaggcttggaggactgtgctggcaaaaaagaaatc

SEQ ID NO: 542686 - DNA, 201 bp, Homo sapiens
tttatgacagtttatcagagcattttttccttatattcactcagtcctgagtttctatttagttgtgataatagatacatttttgaatttttaataccttsgggtgcaaatttggaatctatggaggataagggagtaacaaaatgttatggaaattgaaatatataaattattaattttccctctcctctacagatttac

SEQ ID NO: 542687 - DNA, 201 bp, Homo sapiens
attctactctaaagcttctataaaatatagtttggaaataaaaatgttcttacacaaggggcaaatgaatttcatgtgaatccctttaggatgttttcctscttcatttcagcatgatagataatttattatacaccttagtctttccttagttaaaaaaaaattccctaaagactaacttgaaaagaaaaccacagcagg

SEQ ID NO: 542688 - DNA, 201 bp, Homo sapiens
tcagattttatttagagaactataaaaggtacaacttaagggggaaatatattttagatgatgtttttttttcaatttccaatttttgaagaatgacgtgkttttaaaaacttttaaagaatttctcccacatttcactccctttaaggtaaattgatagctgtgaaaatggcaccttggaaacatttctgtcataatcat

SEQ ID NO: 542689 - DNA, 201 bp, Homo sapiens
ctccaattttttcttaaaatagtttagatatgttaagcatggattttccccctaaattctactctaaagcttctataaaatatagtttggaaataaaaatkttcttacacaaggggcaaatgaatttcatgtgaatccctttaggatgttttcctccttcatttcagcatgatagataatttattatacaccttagtcttt

SEQ ID NO: 542690 - DNA, 201 bp, Homo sapiens
attctcagccatgtagcatcataaagtagatcacagctgtttctttcagaaaatgtcatttgattttcgatcagatgtatggtccatctcacaatctaacygcttccacatctggaatatcttaactgaaaatgtccacagcattacacggcctggctcagggggagaaaagaactagggcctgcatcgaattctgtctct

SEQ ID NO: 542691 - DNA, 201 bp, Homo sapiens
ctactcgggaggccgaggcaggagaatggcgtgaatccagtaagcggagcttgcagtgagcccagatcgcgccactgcactccagcctgggcgaaagagcragactctgtctcaaaaaaaaaaaaaaaagagctaattgatggtacctgggtgcccaaacctctactgttgctatcgtttctccatgtctgagtacgtccc

SEQ ID NO: 542692 - DNA, 201 bp, Homo sapiens
tgacaataggatgttttctaggccaaggatgaaaaaccatcatgggtaaactactaagaagagtgtttacacagataaaaagaaattgactaacattttgwgttttgacttcccaatctctttttttaaacattaatgatttcagagaggaatgtttggaagacacatcattgattatatgctgtacaaagtgatgctctt

SEQ ID NO: 542693 - DNA, 201 bp, Homo sapiens
aggggttgaacctgtagttgattaagattcagagaaagaaaaaacaaaaacagaaaacgatcatagtttcagacactcccaatgagcctgtgacctccccraaatcctatagccaaacacacgggtggatctggcctcactttcccattctcccacttgtgacttttgattccacatcatagctaaggtcctcggcaaatt

SEQ ID NO: 542694 - DNA, 201 bp, Homo sapiens
ccttggcattccttggcttgtagctgcatcactccgatctctgccgctgttttccaaggtgtcctccccgtgtgtctcttctctgtcttataaaaacatcmgtcctattggattaagggcccaccccactccattattacttcatcttaaccaattacatttgcaaggaccctatttccaaatgaggtcacattctaaggt

SEQ ID NO: 542695 - DNA, 201 bp, Homo sapiens
tggaggcaagaagtcctattatgtgccgtctgcaagctggagccccaggaaagccagtggtgtaattcagtcttattctgaaggcctgagaaccaggagakctgatagtgtagctcccactccacggccaaagcctgagaacaagagagaggcctggtataagtctgagagtctaaagccctaagaaccaggggtctgaag

SEQ ID NO: 542696 - DNA, 201 bp, Homo sapiens
caattctgctttggtctctgactcaccaggtgttacatggcttttcagggcctgtgttagtcaacattccccagagaagcagaaccaatgggatatatatrggtatacatgagaggagatttattatggaaattggctcacacgattatggaggcaagaagtcctattatgtgccgtctgcaagctggagccccaggaaag

SEQ ID NO: 542697 - DNA, 201 bp, Homo sapiens
aaaaacatgttcctcagtccaatgttatagatggcttagatgactgggctgcgttacaccagcaccaggaaatatctagagcagtggttctcaaactttgytccacattagaattttaaccctcaggcggcaccccacgccattaaatcagaacatctagggatgggagccaaacagccgtagtttttaaagtttctcaga

SEQ ID NO: 542698 - DNA, 201 bp, Homo sapiens
agaattattttctttttcggactgaatggtaaagaagtatttgtttcctaagtcttcatttcaaaagcaacaggatagaactctctaagaaaaaaaaaaaacacaaatctctaaatgacattaaattacatttttatttatgtagccttgaatggattgttctactttcagtcagtagatttaaaaggggaaaaaaaacat

SEQ ID NO: 542699 - DNA, 201 bp, Homo sapiens
ggagtcagtctgaaactccagggtgtggcaaacacgtgcagaccctcagaagcctaagaggaggttttgcagaaccacgaggaaaaaataactcagggacsagaaataagggtcaggactcaaagcagtggacataatcaggacagaacaggccgaagtgcagacacaaaacagatcaataaaacccaacagctcagcaaa

SEQ ID NO: 542700 - DNA, 201 bp, Homo sapiens
aaccccggggttaggttctggctagagaagccacaaagcacctggaaagacaggaagatactggagtcagtctgaaactccagggtgtggcaaacacgtgyagaccctcagaagcctaagaggaggttttgcagaaccacgaggaaaaaataactcagggacgagaaataagggtcaggactcaaagcagtggacataatc

SEQ ID NO: 542701 - DNA, 201 bp, Homo sapiens
tgattgccgcgtctaacaaagatggtcagaaaaccccggggttaggttctggctagagaagccacaaagcacctggaaagacaggaagatactggagtcartctgaaactccagggtgtggcaaacacgtgcagaccctcagaagcctaagaggaggttttgcagaaccacgaggaaaaaataactcagggacgagaaata

SEQ ID NO: 542702 - DNA, 201 bp, Homo sapiens
ggcatggagctgagaacatctctagatcgcactggaaggcagagagaggccagacagggaactctgaagagctgccacagcctgtgccagggtgacatcarggtgagttgagatgatttttttaacaaacttcattttttgcagcagtcttaggcttacagaaaaattgaacagaaagtacagacagttcccacatacccg

SEQ ID NO: 542703 - DNA, 201 bp, Homo sapiens
gaacaaaacatggctgcccaaggcaggctccctcaggacgggcactggctgaggcaggcatcgtgattgccgcgtctaacaaagatggtcagaaaaccccrgggttaggttctggctagagaagccacaaagcacctggaaagacaggaagatactggagtcagtctgaaactccagggtgtggcaaacacgtgcagaccc

SEQ ID NO: 542704 - DNA, 201 bp, Homo sapiens
aaggcagagagaggccagacagggaactctgaagagctgccacagcctgtgccagggtgacatcagggtgagttgagatgatttttttaacaaacttcatyttttgcagcagtcttaggcttacagaaaaattgaacagaaagtacagacagttcccacatacccgttttcccccacagagtttcttctattaataacatc

SEQ ID NO: 542705 - DNA, 201 bp, Homo sapiens
agaacaaaacatggctgcccaaggcaggctccctcaggacgggcactggctgaggcaggcatcgtgattgccgcgtctaacaaagatggtcagaaaacccyggggttaggttctggctagagaagccacaaagcacctggaaagacaggaagatactggagtcagtctgaaactccagggtgtggcaaacacgtgcagacc

SEQ ID NO: 542706 - DNA, 201 bp, Homo sapiens
gatgaaccgatgttgatatatcattattaactaacaagtccagagtttacattagggtttactttttgggtcgtatggttctatgagttttaacaaatgtrtaatgacctgtatctatcattacagtatcatacagaatagtttcacttccctaaaaatcaccctcccttccttcctgcaaatctctgacaactgctgatc

SEQ ID NO: 542707 - DNA, 201 bp, Homo sapiens
tatttttagtagagacagggttttgccacgttggccaggctggtcttgaactcctgacctcaagcgatccactcgcatcagccttccgaagtgctgggatyacaggtgtgagccaccatgcccagccagaattatttttagtactgtagttaagagggcacattctggagcaaactgcctgctaagtgttcgctgtggggc

SEQ ID NO: 542708 - DNA, 201 bp, Homo sapiens
gccagaattatttttagtactgtagttaagagggcacattctggagcaaactgcctgctaagtgttcgctgtggggcattggggaagaacttaatctcttygtgccttggtttccacatgtaaaatgggataattatattgtccccctgtactggtttgctggggctgccataacaaagtaccacaactgggtggcttaaa

SEQ ID NO: 542709 - DNA, 201 bp, Homo sapiens
gttggccaggctagtctcaaactcctgacctcatgatctgcccgcttcagcctcccaaagtgccgggattacaggcgtgaaccaccgtgcctggccttgamtattttgtaataatacttggcttaaaacacaaacacattgttcagctgtacagaaacattttccttctttatatgcttatactataaacttttttctatt

SEQ ID NO: 542710 - DNA, 201 bp, Homo sapiens
acctccacatcttgtcccacttgaagttcctcaaggatgatagcatgcacggagctgtcagctcatgacaacaatgccttctggaatacctcctgaaggayctgcctgaggctattttacagttaactttttttaataagtagaaggagtacactgtaaaataacaataaaaagtatagtatagtaaatacacaaaccagt

SEQ ID NO: 542711 - DNA, 201 bp, Homo sapiens
ctctgtcacccaggctggagtgcagtggcgtgatctcggctcaccgcaacctctgcctccagggttcaagctattcttcagcctcagcctccctagtagcygggaatacaggcatgcaccatgacgcctggttaatttttgtatttttagtaaagatggggtttcaccatgttggccagactggtctcaaactcctgacct

SEQ ID NO: 542712 - DNA, 201 bp, Homo sapiens
tctgtcacccaggctggagtgcagtggcgtgatctcggctcaccgcaacctctgcctccagggttcaagctattcttcagcctcagcctccctagtagctrggaatacaggcatgcaccatgacgcctggttaatttttgtatttttagtaaagatggggtttcaccatgttggccagactggtctcaaactcctgacctc

SEQ ID NO: 542713 - DNA, 201 bp, Homo sapiens
taggactaaatgtgctgctcattacttttactcaaggacatactaatgaccaatatatgtttaaatacctactatgtacaactgctttcaaaaacactttsaatcttgaattgagaaggtaggagatccatacctgtattaggccatcctcacagtgctataaagaaatatctgagactgggtaatttattaaaaaaagag

SEQ ID NO: 542714 - DNA, 201 bp, Homo sapiens
ctgtcatgggtgagctccccacatgctctctccagagctctaccagcctctgactccaggggacccctcctcacaaccctttttaatgactctcctaaggygacagtccttacccctagaattttcagtcccaccaaccctggagagccatctaaagaggatcgctgtctgaatcagagtgctcttcaggtcacctagctg

SEQ ID NO: 542715 - DNA, 201 bp, Homo sapiens
atcctgctctcccctattcggacaaagcttttcccaccagacaacctcataggcccctggccttcccacaccacagctgccctgggttctggtcaggtccyccatgggatgaggaaggccagtagggagtcaatgtcacccagaacaaaacatggctgcccaaggcaggctccctcaggacgggcactggctgaggcaggc

SEQ ID NO: 542716 - DNA, 201 bp, Homo sapiens
cgcaccccagatttttaagacctagtattcccccaaaaaagtaaactgtcttggccaggtgtggtggctcatgcctgtaatccaagcactttaggaggccraggcgggtggattgcctgagctcaggaattcgagaccagcctggggaacacggtgaaaccccgtctctattaaaaatgcaaaaattaggcaggcatggtg

SEQ ID NO: 542717 - DNA, 201 bp, Homo sapiens
tttttctttttttctgtctccttctactcatctgcctctgttagaggagctcaggaaaaagtattagctaggcttttttttttttctttttctttctttctggaaggcaatagttctcaaagtgtggactcgataccagcaacataaacatcgagtgggaatttaatagaaatgccaaatgtcagaccccaacccagaact

SEQ ID NO: 542718 - DNA, 201 bp, Homo sapiens
ctttttctttttttctgtctccttctactcatctgcctctgttagaggagctcaggaaaaagtattagctaggcttttttttttttctttttctttctttctggaaggcaatagttctcaaagtgtggactcgataccagcaacataaacatcgagtgggaatttaatagaaatgccaaatgtcagaccccaacccagaac

SEQ ID NO: 542719 - DNA, 201 bp, Homo sapiens
actttttctttttttctgtctccttctactcatctgcctctgttagaggagctcaggaaaaagtattagctaggcttttttttttttctttttctttctttctggaaggcaatagttctcaaagtgtggactcgataccagcaacataaacatcgagtgggaatttaatagaaatgccaaatgtcagaccccaacccagaa

SEQ ID NO: 542720 - DNA, 201 bp, Homo sapiens
cactttttctttttttctgtctccttctactcatctgcctctgttagaggagctcaggaaaaagtattagctaggcttttttttttttctttttctttctttctggaaggcaatagttctcaaagtgtggactcgataccagcaacataaacatcgagtgggaatttaatagaaatgccaaatgtcagaccccaacccaga

SEQ ID NO: 542721 - DNA, 201 bp, Homo sapiens
catcactttttctttttttctgtctccttctactcatctgcctctgttagaggagctcaggaaaaagtattagctaggcttttttttttttctttttctttctttctggaaggcaatagttctcaaagtgtggactcgataccagcaacataaacatcgagtgggaatttaatagaaatgccaaatgtcagaccccaaccc

SEQ ID NO: 542722 - DNA, 201 bp, Homo sapiens
attattgaagcatcactttttctttttttctgtctccttctactcatctgcctctgttagaggagctcaggaaaaagtattagctaggctttttttttttyctttttctttctttctggaaggcaatagttctcaaagtgtggactcgataccagcaacataaacatcgagtgggaatttaatagaaatgccaaatgtcag

SEQ ID NO: 542723 - DNA, 201 bp, Homo sapiens
ctctgctccacaatgaggtatttacacttgctccccaccctctcctttgccccattatcttttagttaaagggccaggtgcaccagaacacaggtgccttragtagcaccagcacctctcagggtcatagggaagagctgtttcctctgggtaaactgaggcctcaataaggcataaatgccttctctgggtgaagaagat

SEQ ID NO: 542724 - DNA, 201 bp, Homo sapiens
aaaatccctatttttatgtttgtatctggattattttatagtatgtggggttttttctttctaccacacatcttcaattctaagaggaacttttttctttktttataattgttgaccaggattcattttattattagcacttgttgaaaattgtagggctggcctggtgcagtagctcacgcctgtaatcccagcactttg

SEQ ID NO: 542725 - DNA, 201 bp, Homo sapiens
taattaaagatccttgtgagataattcactgtaactgagagccctaagcttgggaatagctcttcccccatacaggaacaatcccagtcatagtgaaccaractctaaggattctcatctcactgtgattgaaaacaataattaagccttgattgtaaagttcaagagaatgaacaactagaaaatcccaactgctgagag

SEQ ID NO: 542726 - DNA, 201 bp, Homo sapiens
caattctgagccttaggatagtgtgtctgttagaattgtgttacactttgtgtcagttaccaaacctaattaaccaaggacttaagcacattaggggtttktttttttttttcaggtattaaggaatccagatgtaagcaatacatgaatgatgaaatagccaaacaacagtgttggggacccagactccttctatctttg

SEQ ID NO: 542727 - DNA, 201 bp, Homo sapiens
ttcccaattctgagccttaggatagtgtgtctgttagaattgtgttacactttgtgtcagttaccaaacctaattaaccaaggacttaagcacattagggktttgtttttttttttcaggtattaaggaatccagatgtaagcaatacatgaatgatgaaatagccaaacaacagtgttggggacccagactccttctatc

SEQ ID NO: 542728 - DNA, 201 bp, Homo sapiens
aaaaattctcaaagaatataccaccaaatgttaacaatagctgtccctgtttagtgggatttcaggtgacttagatcctttccccctttggcctctcagtrtcttgtaactttgtgtgctaagatcattgatagttgaacaataagaagaagaaagtgagtgtggaaggatgttgctagagaaagtgtattcttgattata

SEQ ID NO: 542729 - DNA, 201 bp, Homo sapiens
ttctcaaagaatataccaccaaatgttaacaatagctgtccctgtttagtgggatttcaggtgacttagatcctttccccctttggcctctcagtatcttrtaactttgtgtgctaagatcattgatagttgaacaataagaagaagaaagtgagtgtggaaggatgttgctagagaaagtgtattcttgattatatggag

SEQ ID NO: 542730 - DNA, 201 bp, Homo sapiens
tcagatcttgtgagaattattcactattatgagaacagcatgggaaatacccgcccccattatttaattatttcccaccaggtccctcccacaacacgtgsgcattatgggggctacaagatgagatttgggtggggacacagagccaaaccatatcaactatctatctatctatccatccatctgtccatccatttatct

SEQ ID NO: 542731 - DNA, 201 bp, Homo sapiens
attaatatataacaatagacaaagttgttatgaatacagtagtgacttttatggcaaagtaaagttattttgtgtttggatgaacagcacattcacacacrtatataatatacacagagctccatctgtgaaaaaataatcttgtttgaagtcttgcaaaacttatgtcctcctcctactcttgccctgtattagttttgc

SEQ ID NO: 542732 - DNA, 201 bp, Homo sapiens
aatttataggcaaaggggctttctttttttagaggtaggttcttgttctgtcacccagactagagtgcattttgcattttgagtgcagtggtgtctgccastcagactagagtgcagtggtgtgatcatagctgactgcagcctcaaacttctcggctcaaacaatcctcccacctcagcttcctcactagcagactacag

SEQ ID NO: 542733 - DNA, 201 bp, Homo sapiens
gtgagccattattaggaagagggctgccttagaggactcagaatctacgaccccaaggtcctctgacctgtccccactcctcacagccagcatggattttrtacttctggagctccttgaaggagggtcattgcacgtttgaaagtgtgatagttagcacagaccccagagatcaaatcctgagttcctcttcctccatat

SEQ ID NO: 542734 - DNA, 201 bp, Homo sapiens
tcagttcttcgttgttcttgctggaatgaaagcctatacaaaacctagcattaatgaagttaatatgaaactaattagctgcaatgctactgcgggaaaayggccaatcatcatttaatgaatgattctcagttaagcacttcagaaaagtatttcctctgccccataatcacccagcttcatgaagatcctgctttccag

SEQ ID NO: 542735 - DNA, 201 bp, Homo sapiens
ggcttttggaaagagagggcctaaacaggatcagcattgatgccaagcaacacaagggagaagggacttttcttggcgttcataccacggtgggccacagygtggtgggaaggcatatttgcatatggtaaggggaggagcttaagggtaagagagtctttgaagattgggaagcaaggaaaccaaggcagctagccacag

SEQ ID NO: 542736 - DNA, 201 bp, Homo sapiens
tataaacgtcaattaagtcatttcttaatcatgttgagaaatcatctatgcccttactaattttttattttcatgtttaatcagatatgagaatggtgcgytaacatcttctatgattgtgtatttgtctatttctgcttttagtcttggaagtttttgctttgtatattttgggtctatgtaattagatgaatgtagatc

SEQ ID NO: 542737 - DNA, 201 bp, Homo sapiens
gcgtggtgggaaggcatatttgcatatggtaaggggaggagcttaagggtaagagagtctttgaagattgggaagcaaggaaaccaaggcagctagccacrggcaaggtgtgggggctgcaaacttgctataaacctgctcttcagatccaccacttgcatttttaaccctcagtcaaaaccaaggagctgctgaggagtg

SEQ ID NO: 542738 - DNA, 201 bp, Homo sapiens
gcagaggtcagaatgacccacaagagaaactaaatactcaagaaatcaatgatcaccctaattggcttccgagtgtgctcattatggaaccataggctttraactttttaaataaacttttctttctacttcacacacttctccccactcatgacaaaagcaaagcaaaacaaaaacttgcattcttgctgtaactcccag

SEQ ID NO: 542739 - DNA, 201 bp, Homo sapiens
aagatggggaaagaggaaggaaaggatgcccagatacagggagctttagcgatgtagtgaacggacagaagatcaggaacaagttgagttcattgtgtggrgatggcagaaagatggagattggtgagctgagtggagaagtgccatagagcggtgttttgccagagtgtctgcggattgctcatacctgggaaggattct

SEQ ID NO: 542740 - DNA, 201 bp, Homo sapiens
agtaatctccaacagtgacagtgtcctttgaagaatttctgaatgatccagaaacctgctgtgaaccatgtattgtttttgactggtgccctattgtatcytcaccaaaatgaagtttaaatctttgaaactggaaaataagacagaataagtatatagatattcttccttttgattctctacacagggtgtttttctcaa

SEQ ID NO: 542741 - DNA, 201 bp, Homo sapiens
attccccaacactaagtgagaaattagaagtaattgttttataattaagttgctgggttttttttttaacaccttctaattcatcactttgtagggttatrcaagagtttctgaataaccattcttacatgtttatattttataaaaaccggctgcaagaaagattcagaaagaatacttagtaagtcatcatatgaaaaa

SEQ ID NO: 542742 - DNA, 201 bp, Homo sapiens
aaatcagtccaaaggctcaaccatcccagctaattaaattacctggttaactctgtggactaccaaatctaaatggatgtaagagaggaagaaatttgaaraaaataaagattacacagttgaaaaaacaagatattctccagttatgaattcttttccccaagagtgtcttttgtgtacattgttattacaaaatccagt

SEQ ID NO: 542743 - DNA, 201 bp, Homo sapiens
ccacaaatctcaggaccaaagtttcacattttcttttgttcgtgttttcctgactggaattattcagtctttacttaaaaccagctgtgagttcatcatcyatttgtgatcttttatttattgcataaaatatttcacaaatacttgaacatatatagaaaaacataacaaaggctcatttacccacatccaaatctttaa

SEQ ID NO: 542744 - DNA, 201 bp, Homo sapiens
aatgaacttctcaggaatgctagggccagagaaagttgatgtttaaaaagttagaaaatgtaggcacttgagaaggattaagaaattaacataagccttcyttgaatttatcattgaaatctattattcaatttacatgtacaatttcagcaatacatatacttcctttagtcaaatacatctccctgtagcacttaccat

SEQ ID NO: 542745 - DNA, 201 bp, Homo sapiens
gcaaggagcaacaatcagttgcaaatacccagaataaagtggtggatgtgcctgaccagactgccatttcacaaaagttacctgctaccttctcttccagkgaacttctgatacatttcctgcagcaagagaaggcagccaacatgaaggaaaatgtggcatctgcaaccgttttcactctgctactttttctcaacacct

SEQ ID NO: 542746 - DNA, 201 bp, Homo sapiens
tttggaaggtatctatatttctaggttttttgtttggccaacctattcacttctgaataggctgaagagatttgccgaaggttggtgtaagcttccaaaaktcacttgtacttaaacattttcacatccagtgaaaaaattaaacattcgagaattgccattttttccaactctgagtgtgggttatgaatagctattgag

SEQ ID NO: 542747 - DNA, 201 bp, Homo sapiens
cccggatatgcttggcacaacctgtgcaaacccacctgaaaagtccatttcagaaagccccaattctgtgatattcagttcaacctaggcatcaaacactyagccctagccctgatactatatatctgctaatttctttggaaggtatctatatttctaggttttttgtttggccaacctattcacttctgaataggctga

SEQ ID NO: 542748 - DNA, 201 bp, Homo sapiens
tgtatgaaattcgattaaaacccgagaaagcagctgagtgggaggtgagtgatccatatgctttttgaaggaactatggcctttggcaaggataaagcccycacaactgaaaacaggtcattcctcctaattactgggtcactgtgttggcctccaatgcagttgtgacccacccagatgtgaaaagcccttttcccctct

SEQ ID NO: 542749 - DNA, 201 bp, Homo sapiens
tgggaattaagagtcctgccctcaagtttacatttaggtgagaggacaatgaaaacaaataggtgaacaaatataccagataactagaaattgcaatatgkgccatgaagaaaacaaacgaggtttgtgtgtctgtaaggaggtactttgcataaggtgatcagagggagtcaatcatgatgataggggaggaatgtcaga

SEQ ID NO: 542750 - DNA, 201 bp, Homo sapiens
cttaaatagaaatgtattaataatgagtgttagagctaagagaaggcaaaatgtctacagaacacatgatttcaattaacaacagtgagtaaacgaatgakctggaaaaaaattatgatcgggcccatgatttttttttgtcgttttttaaaaattttgtttgtttttctcatactcatattattctaaggcccattgatt

SEQ ID NO: 542751 - DNA, 201 bp, Homo sapiens
aagcagtatgctaaatcttaagcatgaaacaaaagaaagataaaagtatctgattcagggactggttgttctgttgttctgggttttttttttttttttttggaagcttgttgaaaatctgtggcatcatacaaaacaaaaaagaatgcaaaactggtgccttaaatagaaatgtattaataatgagtgttagagctaaga

SEQ ID NO: 542752 - DNA, 201 bp, Homo sapiens
tcacttgaacctgggaggcagaggttgcagtgagccgagattgtgccactgctgtattccagtctgggtgatagagcgagactctgcctcaaaaaaattamattaaaatttaaaataaaaaattacttaaaaatttgattttacattcctcctattctcactttctggtgcccatacaacacataaattacattcttctct

SEQ ID NO: 542753 - DNA, 201 bp, Homo sapiens
ccactttttcttgcaatgattcatctaatggaggagcagaccctggagagaaacatatctcttcttgtcttcattttgttcttcttttattaaatcacccrcaggacaaccggatgctccagcaatagattatagaaaaaacagatgggtatttctgtgcagtcagaaggctcctgtgcccttttccagcataaaacgttt

SEQ ID NO: 542754 - DNA, 201 bp, Homo sapiens
ttttatcattatgacatgtcactttttatatttaatagtatttcttgcattaagttttaatttatctgatattatgtataactctaccaactttcttcagrttagtgttatgatggtctttttttcccatatctttattttcaaccttcttggtccttattagagtatttaatccatttacatttagtgtaattactggat

SEQ ID NO: 542755 - DNA, 201 bp, Homo sapiens
ctatatgtcgtctattgggaacagtcctgcttaaagcaattagcagggacaattaatttggagggaagtctctctccactcaacagcattcaaataccctmtgcattagccatgttttgaaaaactccaattgcctgagtcactgatagacaaacagaaatgcagactattttgtatgcagttttataaagaagtttctaa

SEQ ID NO: 542756 - DNA, 201 bp, Homo sapiens
ccgctaccatcctaatcctggcatcaactctgaactggactgagtcctccagcagcctggttccactgcttctattttttttccattgtctctctccattycattgtacacacagttgccaaaataatattttaaaatctgtatcactaatttaaacgcttgtggcttttcagtgtacttagaagaaaatccacacttgta

SEQ ID NO: 542757 - DNA, 201 bp, Homo sapiens
aggccatcttcttgcattcttctaaaacttaagagggatcatctgtcctcaaaaatataagaaattctgtaaatgtgtatttttgtgtatatatatatttratatttaaaattctgtatctatatatacttccaagaccccttagaacttacacggtacctgtaatttgtttcttttttatacttaagtacaagtaatgtt

SEQ ID NO: 542758 - DNA, 201 bp, Homo sapiens
ggtagaccttggatccagttctgcagccagtgagctgctcactcagacctgttgctcccctccagagcctccctttcttcatctggggtatgaaacaactrgaccagcttatctctgagatcccgctcagctctgaccctcctgttggagaaggcttgcattctgagactgcagtcccaagtagcaatctcttcggagggc

SEQ ID NO: 542759 - DNA, 201 bp, Homo sapiens
agcttttccatatcaactcatgattccacaaccattgctacgaggcaagagtagtatggaggatcacacactactcttagaaaccaccagctggaagggamttatatcactcctgcttacatttgatggctcacatagccatgcccaaattcagtagagcaagcatggccctcctgtgtacccagaaaggaaggagagcta

SEQ ID NO: 542760 - DNA, 201 bp, Homo sapiens
tataattcccctcaattctgatttttgccctttatcaaatcattttattcattccttcatccatccaacaaagatgttttatatgcctactattagcaacwatcagtagcttgttcctggagggaatgcagctgctccccgccaaaacaccatataattcactctagaaaactaaaatttcagatgctttgtcattgatta

SEQ ID NO: 542761 - DNA, 201 bp, Homo sapiens
tctaaggcatgtgaaataagatttttttttcctattcttacctcctatggtcccattttatggttttcatgcactactgtcagtcaaatatttatcatatrtctttcaatatctttccaatatttatcatatatctttccccttgtaggccttaactttatgacccactattaagcacgcagctgtatttccagaaaatgt

SEQ ID NO: 542762 - DNA, 201 bp, Homo sapiens
tcctcaagccctggcaatgactgtctgtttctgggagtttgcctcgtctggatatttcatatatatatatatatatatatatggaatcataaaaaatatgwagctgttccacatttttttttttgaaatggagtttcgctcttgtcacccaggctggagtgcaatggtgcgatctcagctcactgcaacctctgcctccca

SEQ ID NO: 542763 - DNA, 201 bp, Homo sapiens
atggaaactgaatctaggcaacgggtgatttgtgtagcttacaacctgaacagcaagatgttccaattcattctaacagatgtgtataagcacaagttatrtcagctgtgtcagatatttaacagatcctacatttattagctatataacagactctacattttcctaagtgcctaagaccaatcctggtagtcacttaag

SEQ ID NO: 542764 - DNA, 201 bp, Homo sapiens
tgtgttcttgagtgaacaaatttccttttcttcctttttggctcaagcacaataatgctgtcactgagacagtgactgagcactcaatgtccaagactaartcacatcaccacgactaagtaggcactatgtcctgggatgagtcttttaaactctggccatcaggttccttacttgttaaataagtaggttggcctaaaa

SEQ ID NO: 542765 - DNA, 201 bp, Homo sapiens
atgatctaggtaaaatccagggtttcaggtcagtgtccctggtgcagtgcaagaaagccttgctgacacacccttggcctgaagcagtgagcacatgagaytgtgtgacaacgcttcagagaaaaacagagatctgttcctccaactcagattgatttaacatccttgcttctccttttccttcctggctttacatatttg

SEQ ID NO: 542766 - DNA, 201 bp, Homo sapiens
gccaaaaataaaaggatttgatgctcatctgttggaggtaagtacaggaggcaaaaaaatggagtgtgactcactgctctgtagtaattaactctacacaytcacacacagtccccgtcagttcagcctggtagtttcagccagcctttttggactgtctctcctggtcagcatgtgtgttaacagaaagttgtgtgaagg

SEQ ID NO: 542767 - DNA, 201 bp, Homo sapiens
aaatccagggtttcaggtcagtgtccctggtgcagtgcaagaaagccttgctgacacacccttggcctgaagcagtgagcacatgagattgtgtgacaacrcttcagagaaaaacagagatctgttcctccaactcagattgatttaacatccttgcttctccttttccttcctggctttacatatttgtagggtttttac

SEQ ID NO: 542768 - DNA, 201 bp, Homo sapiens
aataaaaggatttgatgctcatctgttggaggtaagtacaggaggcaaaaaaatggagtgtgactcactgctctgtagtaattaactctacacactcacasacagtccccgtcagttcagcctggtagtttcagccagcctttttggactgtctctcctggtcagcatgtgtgttaacagaaagttgtgtgaaggatgagg

SEQ ID NO: 542769 - DNA, 201 bp, Homo sapiens
agatcaataaaacccaacagctcagcaaaggtgaggcagctgtgtctccctctggctgccttttctcccctcctctctcaccagaagccaacgcgtacacrctgagtggagaggccgcgaggacaagacagtgggacatgcgtgtgctggggaagtcgagaagcaggacaggaggcaggtctgagagatctggtttgtgtc

SEQ ID NO: 542770 - DNA, 201 bp, Homo sapiens
atatttgtagggtttttactccttctccagagcctactattttcctaagagttagtagcaaccataggatccacaagaaatgaaattattcatcaacaatractttggcactgcaaaagactgagtcaaaggttaaatcagtcacacagatatccaaggccaagttgaagatcacaagtatatcccatttagagatttgca

SEQ ID NO: 542771 - DNA, 201 bp, Homo sapiens
aatgggtattttttcagactctacatgattatcagaaatggctgccctggccaattgtatacctacgaagaggtattatgtagaagaacttatattcatcyacttaatgtggacctcaaatattaaggatgttcctaatgtgttctagaccggagtcagcaatacttttcataaagagccagatagtaaatatttctaggc

SEQ ID NO: 542772 - DNA, 201 bp, Homo sapiens
tttgatgctcatctgttggaggtaagtacaggaggcaaaaaaatggagtgtgactcactgctctgtagtaattaactctacacactcacacacagtccccrtcagttcagcctggtagtttcagccagcctttttggactgtctctcctggtcagcatgtgtgttaacagaaagttgtgtgaaggatgagggtacttactt

SEQ ID NO: 542773 - DNA, 201 bp, Homo sapiens
agaagcccgggactcctgagaacaataaggagtatgccaaggtgtccggggtcatggataacaacatcctggtgttggtgccagatccacatgctaaaaaygtggcttgctttgaagaatcagccaaagaggccccaccatcacttgaacagaatcaagctgagaaagccctggccaacttcactgcaacatcaagcaagt

SEQ ID NO: 542774 - DNA, 201 bp, Homo sapiens
gtagaaagggccatctggagggaagcagtgaccttcagtcagcccaaggtgacagccaggcagcaaggagatgagtaccctcagcctcactccttcccttsctccaacctcctaccaagcctccctgtgggtcaagctcatcctgggagtcagaaggcaagagagcccctagatgcagtccacatagttcagagcaggttg

SEQ ID NO: 542775 - DNA, 201 bp, Homo sapiens
tagggcccccctttccaaagatcttgacacatatgatctgaagtaggcagtggtgcccaggcatgatgccccaggaatacctactgctattgaagagctcyccccggttcccacagccttcagcatcagacctgcctttggattgggggagcatgctgagtgagccattattaggaagagggctgccttagaggactcaga

SEQ ID NO: 542776 - DNA, 201 bp, Homo sapiens
ggctgccctggccaattgtatacctacgaagaggtattatgtagaagaacttatattcatctacttaatgtggacctcaaatattaaggatgttcctaatrtgttctagaccggagtcagcaatacttttcataaagagccagatagtaaatatttctaggctttttgggccatatagcctctgtcacaattcctcaactc

SEQ ID NO: 542777 - DNA, 201 bp, Homo sapiens
agatggagattggtgagctgagtggagaagtgccatagagcggtgttttgccagagtgtctgcggattgctcatacctgggaaggattctttgtatggttyccttaggctgagggagggtatcagctttacagaccttgtgggattacaaaagggccaccacacactcttcaaccaatatgtgtctatcttgcattcaagg

SEQ ID NO: 542778 - DNA, 201 bp, Homo sapiens
gaactacatagtgtctggatcgtccctattgctgtctttcacctccacatcttgtcccacttgaagttcctcaaggatgatagcatgcacggagctgtcakctcatgacaacaatgccttctggaatacctcctgaaggatctgcctgaggctattttacagttaactttttttaataagtagaaggagtacactgtaaaa

SEQ ID NO: 542779 - DNA, 201 bp, Homo sapiens
aaagcagctgacttcctgtagccttgcagaaataacaatggggtgtgtgtgtgtgtgtgtagtgtgtgtagtgtgtgcagtgtgtgtgtgtgtgtgtgtgkacaatggtggggaacagttggcagagcaatgagcaagaaatgggaaacgacactcagaaaagcagcaacctaccctgagcaaatcaaagaatttcttaga

SEQ ID NO: 542780 - DNA, 201 bp, Homo sapiens
aattgaacaagcctccacccctgtgcagtgtatcttgagctgaggttcctgagtctaaatgtgagcagcctactgagccacgtgggcttgaaatacctcctctcaacgtcacttcactttattgctgacttggtgcagtctgaaatggaccaacatcagtttttgtcctcttgaacccttttttaaaaaacgaaaagtaat

SEQ ID NO: 542781 - DNA, 201 bp, Homo sapiens
catttggttaattcatgaatatttactcaatattaatactacatcatgaatctgttatcaagtcatatacagatttcttaaaaaatttcccttatttagcrtacttgtgaataacatcaataagcaagtatcttaagttaactatcaggttatatagcagatcctctcccccttttgtaactctttctgttacaagggatt

SEQ ID NO: 542782 - DNA, 201 bp, Homo sapiens
ggaataatagtgagctgagtggtttctgcctacacagagcttctaatatattgaggaaagagatctcaatcaaattcaattgcatttataagtatggtaargacaacaaaggagagagacattattctgtaggagaataaccctgtcaaagtgatgactgatttaagatcaaaatgggaaggtaaaattttctcagtacct

SEQ ID NO: 542783 - DNA, 201 bp, Homo sapiens
acaaagcaatgtaggcaaagagtttaacaccattgatggcttttagtaagaacttaatgttagcttttattattattactgcaaacgaccatgtgaccttsgatttcctctttaaggatcaattaaaaagaataatgaaaggatttttaaatttttagagtactataaaatatacgcaacatattaacatattaataatat

SEQ ID NO: 542784 - DNA, 201 bp, Homo sapiens
taccaccagcaattttggctttccaataaatattgagtgatgtccaaaagtcgtataattcaaaaagtctagggtaaggaacaagataaaagctaaccctygtgggtgttggtaaatcaataattaattggagatcttccatgatatttcctcataagaatcattgctaaaattgttgtaatgactacacagactcccaag

SEQ ID NO: 542785 - DNA, 201 bp, Homo sapiens
atactccctccatcacagagaccgagcctcatatgaaaacagtaagcagcacacaggaaactcatgctgtagatgaatttggagagccacctcaggttatytgcattatagaatgctaaacgcagactatgcaagaaaccagccacctagagagatctatatagaagtagagaaacttccataccaccagcaattttggct

SEQ ID NO: 542786 - DNA, 201 bp, Homo sapiens
ccccagcccctcatgttaaacaacctgagggctgtgactgggcaaaaaataaataaatacatttgcattcaacattgacaaaatacacacttaagtgagayttttttgcatcacaaaaaaataagtttttacttttttcaaaaagtaaaggttctttaaaagatatcatctagagtagaattaagggctattattagaaaa

SEQ ID NO: 542787 - DNA, 201 bp, Homo sapiens
caaaggtgtcagcagagtattcaaaaccacaggagaattgagtgtcagggctagcaactgtacggttccagagccaacccatgtcggaagggtcagagggkgggacagtcaccacaaccccagaagggagagttctgtagaaagggccatctggagggaagcagtgaccttcagtcagcccaaggtgacagccaggcagca

SEQ ID NO: 542788 - DNA, 201 bp, Homo sapiens
aagatcctttcgtttctaagagaaggaaggaattaggatttattgtgcatgtatttcataccaggtgctcatctacagttattgaatccttgcaacaatcrtatcaggtaaacgctgttattcttctcttacagatgaaaaatctaaaccttctaaaatgaaagtttgtccaagttaacatgaccaattaggagagcttgg

SEQ ID NO: 542789 - DNA, 201 bp, Homo sapiens
aatgggtgcagcacaccaacatggcacatgtatacacgtgtaacaaacctgcacgttgtgcagatgtaccctagaatttaaagtataataaaaaaaaaagkggggaaaagaaaagaaaagaggtttaattggctcacggttctgcaggctatacaggaagcatgatactggcatctgttcagcttctgtggaggcctcggg

SEQ ID NO: 542790 - DNA, 201 bp, Homo sapiens
gaccaattaggagagcttggattccaacccaaatctgttcagtatcaaagctcactctcttccatccttgccccttctcagctcacatagtagctttcagmaaacagtagctatctaccccagataaaattaagcctttttttccttaggagaggctagaaactgaatcttctaccccctttattggcatcacacaggcac

SEQ ID NO: 542791 - DNA, 201 bp, Homo sapiens
ttaatctgtaaatgagttctgatgttatgaaaattggatatggcaaattgtgttattaagtctattaagggatgaagaaggactcttctaaaagaataacrtagtctgagtggcagctctcacttaatagacatctacctagaaatgtttctgaacttaatggacacatgatataattcaaaattaatataagcacacagc

SEQ ID NO: 542792 - DNA, 201 bp, Homo sapiens
tggattccaacccaaatctgttcagtatcaaagctcactctcttccatccttgccccttctcagctcacatagtagctttcagaaaacagtagctatctamcccagataaaattaagcctttttttccttaggagaggctagaaactgaatcttctaccccctttattggcatcacacaggcacaaaaatcaccaattctc

SEQ ID NO: 542793 - DNA, 201 bp, Homo sapiens
ttgtgtggaccaaggaggaaagcaacccagacgacttctacttagaagcacaggcacatagagcctgtgttattggcacaggtatttctctcctaagagcyttttctgcttaagaaggcttgaggatctattcccattaatcataaaaaagggatttgctgggctaaattattttagcctcctctttatgccttacttcac

SEQ ID NO: 542794 - DNA, 201 bp, Homo sapiens
tcattgccttacaaatgagtataaaacttaaacctatgattaattccctgttgtttttctatctgtattatacatataaatatattttatatattgtcctyctgagatttcaagagcaattttcttctaattcttctaatttcttctatggattcaccatagtgaatccaccgacacgtctaccctgtgacaatcttgttc

SEQ ID NO: 542795 - DNA, 201 bp, Homo sapiens
tgcctgtttcttcctacactatgagctccttggggccatgaaattcatttgttttatctatatatactctctttgatatcccccaccctgacagctagtgyagtcctttctaaatagttgttactaaatatgtcaaatcaaatgcctacaaggactggttggtagaaccagattctggaagtgaccaagcaggtctagctt

SEQ ID NO: 542796 - DNA, 201 bp, Homo sapiens
catttcagtgaacatttgttgagggcctgacatgagctaggcacatggcaaagttttagagatgcaaaggtaaattaagacccctgtgttaattctcatgygggcaaagcaagcacattttttaagttgcaataatgcaacaatggtggtgtgtacatagtagggcaaaagcatagagaaagccatggaaatcctcaagcc

SEQ ID NO: 542797 - DNA, 201 bp, Homo sapiens
tgcccagcctacgcaacatagtaagacccagtctctacaaaaattttaaaaattagccagccatggtgacacgtacctgtagtcctacacacttgggaagstgaagccagaggattgcttgagcccaggaggtcgaggctgcagtgaaccgtgattgtgtcactgcactccagcctgggtgagagagcaagaccttgtctc

SEQ ID NO: 542798 - DNA, 201 bp, Homo sapiens
ataatgcaacaatggtggtgtgtacatagtagggcaaaagcatagagaaagccatggaaatcctcaagccaagttcaaagagtcctctaatgtatggcatrccacaacaaggaccttcaaagggtgcatttggtaagaaaaggcaacctccaaagattcatccaatcctaaggtttcatagagtagggacttcttccctta

SEQ ID NO: 542799 - DNA, 201 bp, Homo sapiens
aactgaagtagtaatataaaaaataacctttaatagttatggtcaaattacgcttcacttggataaacctcaaaatgtagtctgagtttttttgtgcacastttacaaatcctgggggaaaaatcttttttccacgttatctgaaaaactatatggcgaagataccgctgaaaaataatttgttttatgaaattcctgaaa

SEQ ID NO: 542800 - DNA, 201 bp, Homo sapiens
caatagacaaagttgttatgaatacagtagtgacttttatggcaaagtaaagttattttgtgtttggatgaacagcacattcacacacgtatataatatayacagagctccatctgtgaaaaaataatcttgtttgaagtcttgcaaaacttatgtcctcctcctactcttgccctgtattagttttgcaattagtaacaa

SEQ ID NO: 542801 - DNA, 201 bp, Homo sapiens
caggacaaccggatgctccagcaatagattatagaaaaaacagatgggtatttctgtgcagtcagaaggctcctgtgcccttttccagcataaaacgtttrtgaaaatcaattttcagtgcctgctgaaccaggctgatgtgagaactagctttccacagttcataatattcactccgggatgatttgacagggctgatat

SEQ ID NO: 542802 - DNA, 201 bp, Homo sapiens
tgaagtagtaatataaaaaataacctttaatagttatggtcaaattacgcttcacttggataaacctcaaaatgtagtctgagtttttttgtgcacagttyacaaatcctgggggaaaaatcttttttccacgttatctgaaaaactatatggcgaagataccgctgaaaaataatttgttttatgaaattcctgaaaagc

SEQ ID NO: 542803 - DNA, 201 bp, Homo sapiens
gaaaagttcactattacatataaggcatcatgtaggtgttgtagaggggaaaggaaagctgccattttgccctccgagggttcactaaaagtcactgacaraagttgaattaataggagaaaaggcatacaaatttatttgattatagttttatgtgacatgggagccttcagaatgaagacccaaagatacagaggaaac

SEQ ID NO: 542804 - DNA, 201 bp, Homo sapiens
gtgagataaagttgcctcctattggaggtgttatatggggagcatgctgagtcagctgttatcaggaggaaggctgccttagaggactcagagaatttacrtgtcaggtgatagcatgtaagtcagtggttttcaaccccagctttaatttagaatcatctagaaaggttttttttaaaatgcccatgtccttccaagtgg

SEQ ID NO: 542805 - DNA, 201 bp, Homo sapiens
atacccttagttatgtgaaagatatgcctttatatttctagtttgctaacaattttttatcttaactgattttaaaacttctcaaatttttttctacatcyattgatatgttcacatggcttttctctgttaattaatgtgtaacttattacagaaaattattttagagagtatattttaaggttaaagtacccttgcatt

SEQ ID NO: 542806 - DNA, 201 bp, Homo sapiens
tcaggaggctgaggtgggagaatcacctgacccagggaggtccaggctgcagtgagcggtgatcatgccactgcactccagcctgggcaacagaacaagaycccgtctcaaaaaaaaaaaaaaaaaaaaagcccaactcctggaaatcaaatggtacctgatgtgaggttttctccctgttatgttagcctcaggccatct

SEQ ID NO: 542807 - DNA, 201 bp, Homo sapiens
ccaactcctggaaatcaaatggtacctgatgtgaggttttctccctgttatgttagcctcaggccatctaacccaggtagaacaaggcaggtaaggaaacycagtgggccaaggaccccgaaggaagcccttaacacaatgcctaatactgaaaacaacggatgaatgtattcaaaatttgtttgcaagaaatgagacttt

SEQ ID NO: 542808 - DNA, 201 bp, Homo sapiens
gatattttaacatctatattttttatttgctctaattctccagtttattctccattccatgcaaatcttgaattgagatgcaagtttatcctaaattattwgaagaactgataatgggctaccaagaaaaaatacatacatgcaatatccaatttccaaactggctttggtaagacatatctttttgagaaatcatttcca

SEQ ID NO: 542809 - DNA, 201 bp, Homo sapiens
gttaatgcagaaaaattaatgcaattaatgcaaaatcttgtcactgtgctctctgccttttgtcctcatttcaggagtgtaatgaaacagctctgaagaasacaggacctgagttctaatccaggtcctgccagtttctagctgtgtgacctagagccaattacctaactctctgggtttccaaattctcaaagtgaggac

SEQ ID NO: 542810 - DNA, 201 bp, Homo sapiens
tattttaacatctatattttttatttgctctaattctccagtttattctccattccatgcaaatcttgaattgagatgcaagtttatcctaaattatttgragaactgataatgggctaccaagaaaaaatacatacatgcaatatccaatttccaaactggctttggtaagacatatctttttgagaaatcatttccatt

SEQ ID NO: 542811 - DNA, 201 bp, Homo sapiens
gacaggacctgagttctaatccaggtcctgccagtttctagctgtgtgacctagagccaattacctaactctctgggtttccaaattctcaaagtgaggayagtgatgtttcctctactgcagatgaaataatgtatatgaaaactctttaaaaaaccataatgggatataagaggttgctgttacatggcgggaagcagg

SEQ ID NO: 542812 - DNA, 201 bp, Homo sapiens
tacacttctgtatgtcaacccatgtgcatttctgggtgtgcagacttctatatgtacctgtgtatatattaacttttctatatggacctgatttcaaatgyctctctgtctgaacctgtatgtatatacttttatgtatgtctgtgtgtgttctgtgtatatccgtatgtgcacacttctctgcaggtacctgtgtgcata

SEQ ID NO: 542813 - DNA, 201 bp, Homo sapiens
attttatagtatgtggggttttttctttctaccacacatcttcaattctaagaggaacttttttctttgtttataattgttgaccaggattcattttattrttagcacttgttgaaaattgtagggctggcctggtgcagtagctcacgcctgtaatcccagcactttgggaggctgaggtcaggagtttgagaccagccc

SEQ ID NO: 542814 - DNA, 201 bp, Homo sapiens
cctgtgtgcatacaagtatgtacttccatgagtatgcacctgtgtatatttttgtgtgtgtgtgtggtgtgtgtacttttgatgcgggctctgtgtgggcrtctacatacctgtatatgtggttcctgtgtggttttctccgtgtttctgtgcattgagaaagtccattaatgttaacttgttcctctaatgcagatgaag

SEQ ID NO: 542815 - DNA, 201 bp, Homo sapiens
tagtatgtggggttttttctttctaccacacatcttcaattctaagaggaacttttttctttgtttataattgttgaccaggattcattttattattagcmcttgttgaaaattgtagggctggcctggtgcagtagctcacgcctgtaatcccagcactttgggaggctgaggtcaggagtttgagaccagccctggcca

SEQ ID NO: 542816 - DNA, 201 bp, Homo sapiens
tgctgtccctctttgaacctgacatccaagcaagagaaatgggagcccgcttgccaagagctttggggatttggcaactaaaaaattttacactcttggtrttatattttcacaccacctcactgagaccttctagcatccagtctggaactgggtacagctcttagataacagtggttgctcagaaccaggagaggagct

SEQ ID NO: 542817 - DNA, 201 bp, Homo sapiens
gattggtcacatactaagaggtagaagacaaaaggcccgggtatttggggggcttatagtacagtgggaagagtgagatgataaacagaaaaaggaattcstaatagaaaatggtaaagccaaagaaaaggtgcaagcaatgagtgctactggcatttgctgtatttctgcagttcagccagaccctcctttggagctggc

SEQ ID NO: 542818 - DNA, 201 bp, Homo sapiens
tttcatggagctgccaaaccaagtcctatctctatcacagtccctatagtggctattatactaacctttcaaaaattacaaagtcagaaatgagtcatttagccaatctcatgaattattttatagcatggtgacctgcatctttccgccagttcctgggccaaaaataaaaggatttgatgctcatctgttggaggtaag

SEQ ID NO: 542819 - DNA, 201 bp, Homo sapiens
gaaggaaacatttgtctaattgtaattttacaaatctaccctcctctcttgagcttcctgaaggtactattaataaacagtaaaataagaaagagaagctktcagagagagaaaaaggggaaagcagaggtcagaatgacccacaagagaaactaaatactcaagaaatcaatgatcaccctaattggcttccgagtgtgc

SEQ ID NO: 542820 - DNA, 201 bp, Homo sapiens
aacctaaacataaaagtaatctgcttttgacatataattttgtataatacgtatgaaaaaatgtgacagctaaggacttgaattaaatccctaaaaaacaccaattagccactcattaagccaagactttaattctatgatcaattagcactgtttatctgaattaagcttttttgtggtctaacaaaaagtttttttgtg

SEQ ID NO: 542821 - DNA, 201 bp, Homo sapiens
cttctgattgccttcttctttattgcttctttctctgttgttccttccttctcttgtttataacactaacagtcaaatctatctgtgtggaaatctatctrctatatagaacgctacatcacaatttacagaggggaaaatatttttgtcggcagtaacatttcactggaagaggcactatttggccacctaactctggga

SEQ ID NO: 542822 - DNA, 201 bp, Homo sapiens
gaagtaggcactcttatacccattttactgatcaggagaccggcttgcccaggatcctgcagctactgaatagaggggccagaactttgctggtttggtgmgcttcctggtacacaccagctgcctccaatctccctttgataatcctagccacatgccaccgcgggtgctctagtgtaggctggcaccaaccccacccag

SEQ ID NO: 542823 - DNA, 201 bp, Homo sapiens
aagtttctccaaaatatacacctagaggtggaattgttgggtcatgtaaaatgcatatcttaatatttcctagatgctgacaaattgcttcctctccaaarcagttttactgatgtgtacccttgccatcagtgtagtatttccatttctcgtcatctttatcactacctgatgcagtcagatattttaatgtttgacaat

SEQ ID NO: 542824 - DNA, 201 bp, Homo sapiens
tttactccccataacaaccttcttcttcttttttttttttttaaacggagtttctctctgtcacccaggctggagtgcagtggcgtgatctcggctcaccrcaacctctgcctccagggttcaagctattcttcagcctcagcctccctagtagctgggaatacaggcatgcaccatgacgcctggttaatttttgtattt

SEQ ID NO: 542825 - DNA, 201 bp, Homo sapiens
atttactccccataacaaccttcttcttcttttttttttttttaaacggagtttctctctgtcacccaggctggagtgcagtggcgtgatctcggctcacygcaacctctgcctccagggttcaagctattcttcagcctcagcctccctagtagctgggaatacaggcatgcaccatgacgcctggttaatttttgtatt

SEQ ID NO: 542826 - DNA, 201 bp, Homo sapiens
tggcccaaaatgaattccaggtaaagaggaataaaatatcagaaggcaagctgctgaaattagcaagagctgaactcgaaaagcccgactttccaggcacrgctagtttcttcctagcaagttcctgacggagctgggtggctgccccaggtgactgcagtagcaggagattaaggagacagcacctgcctgacaaaaaag

SEQ ID NO: 542827 - DNA, 201 bp, Homo sapiens
ctgaagcagagccttcacgctaagctttggagacaaagcttcttagagaatgtgcaacgtgggctgatcccaggctgcccaaggagcagctgacgagtgtraaagtgtttgctcaccgattagaatcagtcctttaaaaaataaataaggtatgttgatcttttatgtgatgattaaacaaatcagatggcccaaaatgaa

SEQ ID NO: 542828 - DNA, 201 bp, Homo sapiens
aacttctccatgtctgtcgctcactcagtgggctgaagcagagccttcacgctaagctttggagacaaagcttcttagagaatgtgcaacgtgggctgatmccaggctgcccaaggagcagctgacgagtgtaaaagtgtttgctcaccgattagaatcagtcctttaaaaaataaataaggtatgttgatcttttatgtg

SEQ ID NO: 542829 - DNA, 201 bp, Homo sapiens
ttctcacatttactccccataacaactttctttttttttttttaaacggagtttctctctgtcacccaggctggagtgcagtggcacgatctcagctcacyacaacctctgcctcccgggttcaagctattcttcagcctcagcctccctagtagctgggaatacaggcatgcaccatggcgcctggttaatttttgtatt

SEQ ID NO: 542830 - DNA, 201 bp, Homo sapiens
gaactagggcctgcatcgaattctgtctctcactcagctgatctgcattcctcctatagcatttccttataattaagaagagctcatagatttgggaactkcatgagcctctgtaaccttctggtgagggtgagaagctcagaactgcatttctatgcatttttccctagtctttcctgcttcggaggagaagccctgcaa

SEQ ID NO: 542831 - DNA, 201 bp, Homo sapiens
ggtgccttaaatagaaatgtattaataatgagtgttagagctaagagaaggcaaaatgtctacagaacacatgatttcaattaacaacagtgagtaaacgratgatctggaaaaaaattatgatcgggcccatgatttttttttgtcgttttttaaaaattttgtttgtttttctcatactcatattattctaaggcccat

SEQ ID NO: 542832 - DNA, 201 bp, Homo sapiens
agaactagggcctgcatcgaattctgtctctcactcagctgatctgcattcctcctatagcatttccttataattaagaagagctcatagatttgggaactgcatgagcctctgtaaccttctggtgagggtgagaagctcagaactgcatttctatgcatttttccctagtctttcctgcttcggaggagaagccctgca

SEQ ID NO: 542833 - DNA, 201 bp, Homo sapiens
ctaaaaaattttacactcttggtgttatattttcacaccacctcactgagaccttctagcatccagtctggaactgggtacagctcttagataacagtggytgctcagaaccaggagaggagctggctactctcctacctcttaccacacctcctaccccaaaaagatccatcaaattatagttttatagaccctatggga

SEQ ID NO: 542834 - DNA, 201 bp, Homo sapiens
ccttgtagggaaaagaaggtgaggttttttccttagcacattgctcatccaagagccaccatctcctagaagacatattgggacctaaggttgaaatgagrgctaaaccagatcatctctgtgcaagcattttgttacgctgacagtgagaccctcctgaaaatcatgggagagctgcattcttcttcagaaaggaaaata

SEQ ID NO: 542835 - DNA, 201 bp, Homo sapiens
cattgctcatccaagagccaccatctcctagaagacatattgggacctaaggttgaaatgagggctaaaccagatcatctctgtgcaagcattttgttacrctgacagtgagaccctcctgaaaatcatgggagagctgcattcttcttcagaaaggaaaatatttagttgctggtagagacagctggcccactttccaat

SEQ ID NO: 542836 - DNA, 201 bp, Homo sapiens
ttttgattctctacacagggtgtttttctcaatcacacagttgaatctcactggcttgtgcctttcacatgactaatgaaaccaaaatgtgcatcattttraagcatgtcctgttttccataaattccaatctctccacagcaattccatcacaaaacagcaaacaaatcaaaaaataaaaaacttcctgactgcccatct

SEQ ID NO: 542837 - DNA, 201 bp, Homo sapiens
attattaccagaatttattaccttttgtttatggggctttccaaacaggagaaagaaaccacgtggaggttcactagagtgcattgtgtggttcgctttgyggtaatgcatataacccagaagacttccagaaccttctcagcttgaaccttcaaagcctccctaatttggtggaatcagcatggttatgttgagattgta

SEQ ID NO: 542838 - DNA, 201 bp, Homo sapiens
aatgaaaccaaaatgtgcatcattttgaagcatgtcctgttttccataaattccaatctctccacagcaattccatcacaaaacagcaaacaaatcaaaamataaaaaacttcctgactgcccatctcctcaatgaaaatgttgtggttttaccatgatgacattttctttaattgtggtaaaatacacataacatagtat

SEQ ID NO: 542839 - DNA, 201 bp, Homo sapiens
aaatacctcctctcaacgtcacttcactttattgctgacttggtgcagtctgaaatggaccaacatcagtttttgtcctcttgaacccttttttaaaaaaygaaaagtaattcaacacgtatgtgaaatagctgctgcattgtgcatgacccctctgtgtgtggacaggtgaaagttccaatttcctgaggcaacccaatg

SEQ ID NO: 542840 - DNA, 201 bp, Homo sapiens
ttaactattcttaagtgtacagttcagcagtgttaagtatatcggattgttttgcaaccatctccagaaatcttttcatcttgcaaaactgaaacttccawagtatcttttaaaaggccattcttactgaagaattctcgcatagaattgaaatagctcatctctagctcttagctatgcagcccttctaatttttgtcga

SEQ ID NO: 542841 - DNA, 201 bp, Homo sapiens
ggctagtttcttgtactgctcagacacttgaccaggtttccaacctgcctcccttagtacattttagatctagacccttgtaagagtacttaaatggcacmaggtgggagggggcagtctcagtatatcccgtccatagtcaatggctgtgtttttatttactttaaaatacctcaaccaggctgggtgcagtggatcaca

SEQ ID NO: 542842 - DNA, 201 bp, Homo sapiens
taactattcttaagtgtacagttcagcagtgttaagtatatcggattgttttgcaaccatctccagaaatcttttcatcttgcaaaactgaaacttccaamgtatcttttaaaaggccattcttactgaagaattctcgcatagaattgaaatagctcatctctagctcttagctatgcagcccttctaatttttgtcgaa

SEQ ID NO: 542843 - DNA, 201 bp, Homo sapiens
tttattttgctttgagatggagtctcgctctgtcatccaggctggagtgcaatggcgccatctctgcttactgcaacctctgcttcccgggttcaagcgawtctgcttcccgagttcaagcgattctcctgcctcagcctcgtgaatattttaacacgttaatatttaagaatgtttcctcctggttgattcccactaaaa

SEQ ID NO: 542844 - DNA, 201 bp, Homo sapiens
aaaattgactcgtttcaggctgatgttctttctatgaaacagagattcctagttgtgaaacagtaaaaatctggcaagagtagctaaaatcaagagaagcmaatagtccagataatccactaacttcaaaatcagcctccttaattagctaaagttaattttaatataggcctctgtaattttattttcatcattgattgt

SEQ ID NO: 542845 - DNA, 201 bp, Homo sapiens
ccatctctgcttactgcaacctctgcttcccgggttcaagcgaatctgcttcccgagttcaagcgattctcctgcctcagcctcgtgaatattttaacacrttaatatttaagaatgtttcctcctggttgattcccactaaaatgcatgtgtccttccattaaaagagcccaagcactacagtgtcatttccatatctct

SEQ ID NO: 542846 - DNA, 201 bp, Homo sapiens
atgtccacagtgctgaggctgaggaagcctcttctagagattgtcctcccaagctgctcgtctctttttccttcaccaactaaggctttaccttgtacctragaaattcaattggcttttttgaaccttatatgggttcatacatgggcctcagagagtccacaaacttgcacaattctgttattgtgtatgtatttattc

SEQ ID NO: 542847 - DNA, 201 bp, Homo sapiens
tgctgaggctgaggaagcctcttctagagattgtcctcccaagctgctcgtctctttttccttcaccaactaaggctttaccttgtacctaagaaattcarttggcttttttgaaccttatatgggttcatacatgggcctcagagagtccacaaacttgcacaattctgttattgtgtatgtatttattctgcctgttgg

SEQ ID NO: 542848 - DNA, 201 bp, Homo sapiens
gagttcgagaccagcctgaccaacatggagaaaccctgtctctactaaaaatacaaaattagctgggcgtcgtggcgcatgcctgtaatcccagctactcrggcgcactggctcacgcctgtacttgggaggctgaggcaggagaatcgcttgagcccaggaggcagaggttgcagtgagctgagattgcgccattgcact

SEQ ID NO: 542849 - DNA, 201 bp, Homo sapiens
ctgggcaacaagagtgaaactctgtctcagaaaaaaaaaaaagactaggtagttatcttcctgggtggttttggctatgtagaaaatcactcttactctcrattaatttatgtaccaaatcatgctttgaaatatcccactgaaaaggtctaaattattgatatcttgggtcaagttctgacttgaaggcaaatagtagga

SEQ ID NO: 542850 - DNA, 201 bp, Homo sapiens
cgccaacagggcactggctggtgaaagttgccaataccagaggagtcttgatgaaatgccctctcttttcctcaaactctttctgcctactattcatagtwtctgtgttgtacccacccacctgccacttatcaatgactgaagaaaccaaagttattcaacaagccatgaagcaaattctaattgctccccacggccatc

SEQ ID NO: 542851 - DNA, 201 bp, Homo sapiens
catcctaaatgtggaagaatctgtgattttgagaatgattctggaatcagttatccagggtccagccaagtctgatacaccgatcctcagaaggttgtatyaataacaaaaagaaaccaggtttttgtattagatttgatggaagaggctgggggacagaaggtgatgtagcattttgttttctggggtgctgagattgtg

SEQ ID NO: 542852 - DNA, 201 bp, Homo sapiens
aatttggatttggaaaaagccaattccaagtcatcctaaatgtggaagaatctgtgattttgagaatgattctggaatcagttatccagggtccagccaartctgatacaccgatcctcagaaggttgtattaataacaaaaagaaaccaggtttttgtattagatttgatggaagaggctgggggacagaaggtgatgta

SEQ ID NO: 542853 - DNA, 201 bp, Homo sapiens
tccaaagattgcaattgtgcttactatccaagttaatggctgtaaatctaagagaattatgatgtgcctggtaaatattggttgttttgttttaagtcttcatggagaaaatggaaaagacattggcatgtaggatgaagtcacagcaggacagacaggtcctgcaagtgtttctttagatgcattgatattcataacatc

SEQ ID NO: 542854 - DNA, 201 bp, Homo sapiens
gggaatttgagaccagatatctggaaccaagcagcctcaccctattaagggaaagaaaaagaacagaagaaaagaggagaggagaagagaagagaagagaactaaaagtatctgcaaaaatattaaaggatttgaccgagatctctgagatgctccaaagattgcaattgtgcttactatccaagttaatggctgtaaatc

SEQ ID NO: 542855 - DNA, 201 bp, Homo sapiens
tgggaatttgagaccagatatctggaaccaagcagcctcaccctattaagggaaagaaaaagaacagaagaaaagaggagaggagaagagaagagaagagaactaaaagtatctgcaaaaatattaaaggatttgaccgagatctctgagatgctccaaagattgcaattgtgcttactatccaagttaatggctgtaaat

SEQ ID NO: 542856 - DNA, 201 bp, Homo sapiens
ggccaggtgcggtggcccatgcctgtaattggaggaactttgggaggccaaggtgggcagatcacttgaggccaggagtttgagaccatcctggccaacatggctaaaccctgtctctactaaaaatacaaaaaaaaaaaaaaattagccaggcatggtggtgtgcacctgtaatcccagctacttgggaggctgaggcat

SEQ ID NO: 542857 - DNA, 201 bp, Homo sapiens
atgggaatttgagaccagatatctggaaccaagcagcctcaccctattaagggaaagaaaaagaacagaagaaaagaggagaggagaagagaagagaagagaactaaaagtatctgcaaaaatattaaaggatttgaccgagatctctgagatgctccaaagattgcaattgtgcttactatccaagttaatggctgtaaa

SEQ ID NO: 542858 - DNA, 201 bp, Homo sapiens
tatgggaatttgagaccagatatctggaaccaagcagcctcaccctattaagggaaagaaaaagaacagaagaaaagaggagaggagaagagaagagaagagaactaaaagtatctgcaaaaatattaaaggatttgaccgagatctctgagatgctccaaagattgcaattgtgcttactatccaagttaatggctgtaa

SEQ ID NO: 542859 - DNA, 201 bp, Homo sapiens
ttatgggaatttgagaccagatatctggaaccaagcagcctcaccctattaagggaaagaaaaagaacagaagaaaagaggagaggagaagagaagagaagagaactaaaagtatctgcaaaaatattaaaggatttgaccgagatctctgagatgctccaaagattgcaattgtgcttactatccaagttaatggctgta

SEQ ID NO: 542860 - DNA, 201 bp, Homo sapiens
ttctttccagtgataaagctagttggtttatcctccaggactgctcagttctgaacagtgggtcttaagtactctttggatttctttgaaggctttttttwatttttgttgactacctctctactcattttgccccagaaaaaatgtagtcatttctttgataagtgaaatctaagaaaggcttatttcatttggtacatt

SEQ ID NO: 542861 - DNA, 201 bp, Homo sapiens
tttcactgcatatctaccttcaaaaatgtcttctctcaagttacttggtttctcaataactagcgtgaaagtaacagaccttccttccttcctaatgatartaacaacaagggatttacagaattgaagtttatataaggaaatgcattaagattttaacttaagtaagtgaactattcagcaatggctataaagacagta

SEQ ID NO: 542862 - DNA, 201 bp, Homo sapiens
caaacttgggcaagatacttaccctctctgggcttcgattttttttctgcaaagtttagggaattaattaattatatatatatattatagaaatatatatwatatatatataaatgtttaatgaggtggaagtgctgaatagtgcaagagaggagcagatgaaaatattaatttcagtggttcttaaaaattaggggtgat

SEQ ID NO: 542863 - DNA, 201 bp, Homo sapiens
cctgaccatcagctgtgcaaacttgggcaagatacttaccctctctgggcttcgattttttttctgcaaagtttagggaattaattaattatatatatatwttatagaaatatatataatatatatataaatgtttaatgaggtggaagtgctgaatagtgcaagagaggagcagatgaaaatattaatttcagtggttct

SEQ ID NO: 542864 - DNA, 201 bp, Homo sapiens
ttgaccgggcaagatttcccacctgaaatcgtgcttcacttgaccagggaagtgctgctaatcccaatcctgaccatcagctgtgcaaacttgggcaagawacttaccctctctgggcttcgattttttttctgcaaagtttagggaattaattaattatatatatatattatagaaatatatataatatatatataaatg

SEQ ID NO: 542865 - DNA, 201 bp, Homo sapiens
tccccctcctgtttgaaagtgaacacattgccaatgttttgagaatggcaaaagcaatagatacgaagctccatttttctaatatataaacaatatcatgwgagtaagggaagcgtgtgggaaagttgtccaagctcattcagtcccctaaatcctcgatactttaactgtctgagaaccaactgcataggcatcacctgg

SEQ ID NO: 542866 - DNA, 201 bp, Homo sapiens
atctgcttttgacatataattttgtataatacgtatgaaaaaatgtgacagctaaggacttgaattaaatccctaaaaaacaccaattagccactcattargccaagactttaattctatgatcaattagcactgtttatctgaattaagcttttttgtggtctaacaaaaagtttttttgtggtctatcaaggagacagc

SEQ ID NO: 542867 - DNA, 201 bp, Homo sapiens
gttctctctgcattccttctctgtctctttttcccttcctcatgccttttccttagctgatttccctaggacagaattattttctttttcggactgaatgrtaaagaagtatttgtttcctaagtcttcatttcaaaagcaacaggatagaactctctaagaaaaaaaaaaaacacaaatctctaaatgacattaaattac

SEQ ID NO: 542868 - DNA, 201 bp, Homo sapiens
tacaactgctgtggttgtatacacatatacagtttattaatctccctatttatcaacatctaattttcactgctttatgcatatagctgctgtaattgtayatatacatataatttattaatctccctatttatcagcatttaattttcattgccataaatgacaaaagttgtgtgtataccactgctataattttacaca

SEQ ID NO: 542869 - DNA, 201 bp, Homo sapiens
ctctcaccattccttccttctgggtatggggcaggaccctctctggaaagggggtcttatgacctacagtcaaacaagataggtcaggttatctacagtcrgtttttacacagaaagtctggtgtaaagttatagtaatatttttagactgtaaagctgactttggggcaagagggttccagtttccatgacctgccttgg

SEQ ID NO: 542870 - DNA, 201 bp, Homo sapiens
tctccccagtgtcctatgggaacaagatttacccagacacagctgactatgagaagtcttcagggatttacaacctgtctaagaacaaggccaatgggggrctcactttgcaacacgtccctatttgattgtcagaggacagatactctattaacaaaggaatttgcactggtattttcagggacacatcaagtaattgcc

SEQ ID NO: 542871 - DNA, 201 bp, Homo sapiens
gatagttcttcatcttctctagtcttatgtaaaatggagaatattatacctgatctgctcaaaggagagagaagagagactcagcaggtgtcacttataastcagaaataatatctgtttaattggagttttatctgtgaaggtagggtaggatcttggattgatattccaaatgactcctaggctgagaatgaagttcta

SEQ ID NO: 542872 - DNA, 201 bp, Homo sapiens
tatctagagcagtggttctcaaactttgttccacattagaattttaaccctcaggcggcaccccacgccattaaatcagaacatctagggatgggagccaracagccgtagtttttaaagtttctcagatgattccaatgtgcatcactggggactcactgtctaggaggtgattttaataaagccctgatccttgcttgc

SEQ ID NO: 542873 - DNA, 201 bp, Homo sapiens
caggcggcaccccacgccattaaatcagaacatctagggatgggagccaaacagccgtagtttttaaagtttctcagatgattccaatgtgcatcactggrgactcactgtctaggaggtgattttaataaagccctgatccttgcttgctttcttgccactttacttttcctccagtagaatgtaacaaaagacaccttt

SEQ ID NO: 542874 - DNA, 201 bp, Homo sapiens
ctcagatgattccaatgtgcatcactggggactcactgtctaggaggtgattttaataaagccctgatccttgcttgctttcttgccactttacttttccwccagtagaatgtaacaaaagacaccttttatttttcagttaattaaattaaatcccagttcattgaggttgtgctctaatttcatgccagaaggcaacca

SEQ ID NO: 542875 - DNA, 201 bp, Homo sapiens
gagaacaatgcatgcacattggaactttgtacacaaacagaaaaatataaatgactttgaattaccatcccaagcattgctaacgtagatgtgccattgaygaaagtctcatgtgttcttgagtgaacaaatttccttttcttcctttttggctcaagcacaataatgctgtcactgagacagtgactgagcactcaatgt

SEQ ID NO: 542876 - DNA, 201 bp, Homo sapiens
tactgcccaccaaccccctcccccactccccgcccttattcaccagagtgaccagaaagcaatatgatcttcacagcgccagatcttgctgtgataatccraggaaagaggagccatcaagccactcaagcaacatctcagctgctcagtaaatctttcaagagctcacccaagtcccaatctcagcttcctgatttcttt

SEQ ID NO: 542877 - DNA, 201 bp, Homo sapiens
gaaccaactgcataggcatcacctgggcagtgtttgaaaattccatttgcagaatcttaagcatcagaatctgcattttactaagatccccaaatgattcrattgcacactgaagtttgagaagcattgttctagacaaccatttccactaaaggttattttagttcatagtaacaatcctcttttggaaaggacagatca

SEQ ID NO: 542878 - DNA, 201 bp, Homo sapiens
cagaagctacttagtatcagagtaggctggggtactcataaatttggatttggaaaaagccaattccaagtcatcctaaatgtggaagaatctgtgatttygagaatgattctggaatcagttatccagggtccagccaagtctgatacaccgatcctcagaaggttgtattaataacaaaaagaaaccaggtttttgtat

SEQ ID NO: 542879 - DNA, 201 bp, Homo sapiens
tgtctcagccattttaaagccaattaactctgttcctgttcacacccttattaaaaatataattacagcagtagtctccagggactgtcattgggtaggcyttaccaaggtaaattagccaagaaataactaggctgtgtaacaccctctcagaccctggaaatcattttggttgcagaagctacttagtatcagagtagg

SEQ ID NO: 542880 - DNA, 201 bp, Homo sapiens
gaaaagccttgttcttggggagtatatccatgaaagtatctctatttcgttgcagtttcacattaagtaaaattagagtgcccttcacgaagaatatatawttgaaagccctcccactgactgctggacaaagcacttgtcagtcaacaaaccaggtagattgagtctgccctcagagtttttgtattctgagagtgacta

SEQ ID NO: 542881 - DNA, 201 bp, Homo sapiens
tctagttatgcacaaaaaggagtggtggcctcagaatacagagtcagactggctgttcgaattgtgcagtgtcaaggagagcactatgtattgccggcaartaaagtatgtccagaccggcgtggatacttgacctgtctctcagttctcttttgacccataatcttgagtacaaaacagctagtgctgtgcctgcagcta

SEQ ID NO: 542882 - DNA, 201 bp, Homo sapiens
tttactttggcaagtggaagatgactttgctaagcgatactctgctggggctcagggccagcactgctggagtaggaaaagggagacttcctggggcaagscttctcaatcttcctgccagcagcattgcagtcggagcggcactgaggtgtcaacaaaaggatgatgaactgtgtcagcagtgttagcaaatggctgaag

SEQ ID NO: 542883 - DNA, 201 bp, Homo sapiens
aattattaacagtaggctgtacctttcaccaggttgtaaaaggatgactgcgtagagccacagcattctccttgtcagtgtaggaaatgcagaggaggatgttacctccggcacttgcctctaagacacctaataaagatgaggaaggctccagcctgaagcgtgggtgaggtgtccagctgcccaaaggcgacaggtgag

SEQ ID NO: 542884 - DNA, 201 bp, Homo sapiens
agagagggaaactaaggcatacaaaagttatttgctcaaggtcaaacagcatggtaagaggaactgcaatttcattccaggtcttacggataccaagtccsatgcctgccagcttgcacctgttaagtcatgtgatacttaggaaatgtacacatcaccccagtgcagaggcctttatccacttcccttcattttgcctgg

SEQ ID NO: 542885 - DNA, 201 bp, Homo sapiens
tccggtcaactagttgctttataacaaaccaccccaaaatttgtttaaaacagctatcatttgattgtgctcacaagttctgtgagttaggaaataagacmcaacacagtggtcttatgtctgttgtgtaatgtctgggttctcagctgtgaacactcaaatggcttggaaactgaaatcagctggaggcttccttattca

SEQ ID NO: 542886 - DNA, 201 bp, Homo sapiens
tcaactagttgctttataacaaaccaccccaaaatttgtttaaaacagctatcatttgattgtgctcacaagttctgtgagttaggaaataagacacaacmcagtggtcttatgtctgttgtgtaatgtctgggttctcagctgtgaacactcaaatggcttggaaactgaaatcagctggaggcttccttattcatatgt

SEQ ID NO: 542887 - DNA, 201 bp, Homo sapiens
attttgaataggactaatgtgtttcctattttgaattgcaaaaaatataaacatatccatatttgataccaagaaattagtaattctgttggatgtgaaamgaacacgggttacataagaatatggtcataattgctagagatatatactgaaataggtaggagtaaaataacatgatgtctgggatttttttaaataaaa

SEQ ID NO: 542888 - DNA, 201 bp, Homo sapiens
cttaggagaggctagaaactgaatcttctaccccctttattggcatcacacaggcacaaaaatcaccaattctcaaaaaccctatactcccaagttcaacmcaaattgaatggttggaatattgttggtttgtatggaataattaacccacatctaaaaattaattatacaaagtgaagtggagattgaagcagttttcta

SEQ ID NO: 542889 - DNA, 201 bp, Homo sapiens
tgcctgtgttctagaaagaggggtcaggagcctagagtatgcagatgttgatggtattgagtgttctgtacacagaaccaagagactagagactttagagrccacaaaatgcttttcctaaagacctagaacatgaaggtttaatttatttccctttttctcctccatgtgttttggataggttggtaagtggaaatcaat

SEQ ID NO: 542890 - DNA, 201 bp, Homo sapiens
tttctaaaccattgacagtctgtggggtgccccattgtgttcctgacttcctattctcagaaggagttataacgatgacaatgatgcatgcatgagacatrgaggtcctccccagccctcggttaggaagtaaggcagccacccatgtactgaacacaatagtgctttggaaagagctctgttaaaagtgagtctcaaaaa

SEQ ID NO: 542891 - DNA, 201 bp, Homo sapiens
gaaagaataacaagacatcatagcagtgaactcagagcactatcactggcttttcacaggacatgagcaactttctcactggaggggtcagggatgcttgyatggtaggtgctcctgactgtgataacttcacttgagcctaccctgagaatgaccctgtgtggcagatgcacccaaatatatgttcagagttccaagcta

SEQ ID NO: 542892 - DNA, 201 bp, Homo sapiens
tggaggggtcagggatgcttgcatggtaggtgctcctgactgtgataacttcacttgagcctaccctgagaatgaccctgtgtggcagatgcacccaaatrtatgttcagagttccaagctaaggaattggaagtggccatcccagagattcattccttatctatgaggaacatctgaaccccagcccgtcccagggaatg

SEQ ID NO: 542893 - DNA, 201 bp, Homo sapiens
agttgatagggattcagcacatcactgctacactagaataaaacatgtgctgtgtccacattaggccaacaaaatcccataccatccaacttttttcactrattaaaaatactattaaattttaaattggttcatataagaagttgcagaaaaggtgtttgtaggcaaatccagctgactcacatataaatcatctgtatt

SEQ ID NO: 542894 - DNA, 201 bp, Homo sapiens
cactgctacactagaataaaacatgtgctgtgtccacattaggccaacaaaatcccataccatccaacttttttcactgattaaaaatactattaaatttyaaattggttcatataagaagttgcagaaaaggtgtttgtaggcaaatccagctgactcacatataaatcatctgtattagtttattagggctgacataac

SEQ ID NO: 542895 - DNA, 201 bp, Homo sapiens
caaaagaatgaaagaagccttgcttcaaaaaggtttagagggctaaataagagcacaaactggattttctgaaaactgacctgattgcctgggtaattaarctgtcactccagcaaaagcatttgtctccaaaaagtactgaggttgtctttcatcactctaagtctagacattctgaaacctccatcctctcctgcagag

SEQ ID NO: 542896 - DNA, 201 bp, Homo sapiens
atattgtttaccatagcctcagagatattgcctcgtggtgaaaccctataattcccctcaattctgatttttgccctttatcaaatcattttattcattcyttcatccatccaacaaagatgttttatatgcctactattagcaacaatcagtagcttgttcctggagggaatgcagctgctccccgccaaaacaccatat

SEQ ID NO: 542897 - DNA, 201 bp, Homo sapiens
tagtaaaaattgctatgccccagtgaattcagtttacaaaagcttacatacgtgaatgagacattggaaatgtggtttatagttaaggagaatggatcacrcggattatacctgtataacttccctagaaggttgataccactaagatattaacaccaaaaaactgaaaatagtatttttcatcttactttgttatgtacc

SEQ ID NO: 542898 - DNA, 201 bp, Homo sapiens
atgcaccatggcgcctggttaatttttgtatttttagtaaggatggggttttgccatgttggccagactggtctcaaactcctgacctcaagtggtccacstgcctcaacctcccaaagtgctgggatcacaggtgtaagccaccatgcctgaccagcacccttctgaagtaggtgctttcagaaatctgaaagcatagtg

SEQ ID NO: 542899 - DNA, 201 bp, Homo sapiens
acagttgagggagataccagaagaatttgtgtccacagagagattttgatggggctgactttgccgctgaccgactcacctcagaagcatggactcccttrcctccaagtccaaggcaatggggctctctccctcttgcctcttgaattcctgcatctcatttcactgggtaaacagggaggctcctgtgctccagcagga

SEQ ID NO: 542900 - DNA, 201 bp, Homo sapiens
tttatgacctaagaaaataagtccatagaaataaattggcttgaacagaaccatcaaaaacccctttcaatagacatctcaaatgaaataggtggttctamttcctgagaacacctaaagaacctttgtgtaaaagaagaaatcattatttccattcagtagcaatttttgaatggtgtaacttgctatctccttgcctat

SEQ ID NO: 542901 - DNA, 201 bp, Homo sapiens
gcaaaacaaacaaaaaagaatgattatggaggactcaatcttaaagtgtctccaagcatgtcttgttctgtctcaaaccttggcctcaacaatcaaagctstgtatcattatttgcaacacatgaatgctaaatggtatcatttctgactatggacctatgtgtagttaagttgtgtgtaggaatatgaggatagaaacta

SEQ ID NO: 542902 - DNA, 201 bp, Homo sapiens
tgtagggctggcctggtgcagtagctcacgcctgtaatcccagcactttgggaggctgaggtcaggagtttgagaccagccctggccaacatggtgaaacsctgtctctactaaaaatacaaaaattagctgggtgtggtggcgcacgactgtaatcccagctactcaggaggctgaggcaggagaatcacttgaacccag

SEQ ID NO: 542903 - DNA, 201 bp, Homo sapiens
cttaggatagtgtgtctgttagaattgtgttacactttgtgtcagttaccaaacctaattaaccaaggacttaagcacattaggggtttgtttttttttttcaggtattaaggaatccagatgtaagcaatacatgaatgatgaaatagccaaacaacagtgttggggacccagactccttctatctttgttctcagtcat

SEQ ID NO: 542904 - DNA, 201 bp, Homo sapiens
atgaggtcacattctaaggtactggaggacttcagcgtctctttcgggaggatgcaattcaacccataacaccatccaaacaaatgacattatgagaaggyttccatttttgtcctctgttgtggttagattcctgattttacataatttagagctaaaaatttacttcctgtctgaaaagtgatttttgacaaggattga

SEQ ID NO: 542905 - DNA, 201 bp, Homo sapiens
gggccttaaagaatctcaaagcacattatttgctcaatgctataatcttcccagctctggggagccagatcccctggcttatggagaccaaaagaaactayacatggcactctcgggctaaaaaacagtacatggactcatttccatcagctagagatgagtctatttgcccatgctaatatttcagttctcaacttaata

SEQ ID NO: 542906 - DNA, 201 bp, Homo sapiens
atatatcgaagcccattttaaaaagtagctgtaggttgggcatggtggttcacacctataatcccagcactttgggagtacgaggcaggcagatcattgasgccaggagtttgagaccagcctggccaacatggcaaaaccccatctctactaaaaatacaaaaacttcgccaggtgtaatgacatgtgcctgtagtccca

SEQ ID NO: 542907 - DNA, 201 bp, Homo sapiens
ctgtctgtcctgctccaaaagcaaatgcattttctatattatagaaaataatatagaaaatattaattgcaaagttaatcattcacattgtatcttgtcamttccgtgtcatggagcacaagtgtgtgtattgagtcaaaggtgatctgaagaaggcacacgtccatgtataagtgtgccgaagtagctgagatatgtaca

SEQ ID NO: 542908 - DNA, 201 bp, Homo sapiens
agcaaatgcattttctatattatagaaaataatatagaaaatattaattgcaaagttaatcattcacattgtatcttgtcacttccgtgtcatggagcacaagtgtgtgtattgagtcaaaggtgatctgaagaaggcacacgtccatgtataagtgtgccgaagtagctgagatatgtacatgacgtggagacagtgtga

SEQ ID NO: 542909 - DNA, 201 bp, Homo sapiens
aatgcattttctatattatagaaaataatatagaaaatattaattgcaaagttaatcattcacattgtatcttgtcacttccgtgtcatggagcacaagtrtgtgtattgagtcaaaggtgatctgaagaaggcacacgtccatgtataagtgtgccgaagtagctgagatatgtacatgacgtggagacagtgtgacttt

SEQ ID NO: 542910 - DNA, 201 bp, Homo sapiens
gctggagtgcagtgcaacctctgcctcccgggttcaagcgattctccttcctcagcctcccaaagagctgggattacaggcatgcaccaccacacctggcyaattattattattattattattattattattattattattattgtatttttagtagagacgggtttctccatgttggtcaggctggtctcaaactcccga

SEQ ID NO: 542911 - DNA, 201 bp, Homo sapiens
tcacaaatctttctagaaaaatgtttttgaaggagcatttcttttttcaggatactatggaattcataagaagttttcagtcagaagcaccattaaagagrggcattgtttcagctcaagatgcttcacttcaggaaagagtgttagctcaggtaaatacatggatcctgaaggcttttaagacatggacatattatattt

SEQ ID NO: 542912 - DNA, 201 bp, Homo sapiens
taaagatttttggaattctttgaagatagggctgggcggggtggctcatgcctgtaatcccagcactttgggaggctgagaccagcctggccaacatgacraaaccccgtctctactaaaaatacaaaaattagctgggcgtggtggtggatgcctgtaatcccagctatgtgggaggctgaggcaggaggatcccttgaa

SEQ ID NO: 542913 - DNA, 201 bp, Homo sapiens
gaagcatgtgatctttgttctcctttttgccctttgaagcatgtgatctttgtgacctactccctgttcttgcaccccctccccttttgaaatccttaatraaacttgctggctttaaggctcaggtgggcatcatggtcctaccaatatgtgatgtccccctcggacgcccagcagtaaaattcctctctttgtactctt

SEQ ID NO: 542914 - DNA, 201 bp, Homo sapiens
aaaccaaggacagaatgcacctgttcataggctacttagtagacaagggtaagaatgccacacacgggtattgaaaactacggaaaccaagattagatttsagagggaaaaataaatctagtgttctttatgtaaaggataatggtttttcaatgggattttttttctttatagcattgggaaagatattttaaagttttg

SEQ ID NO: 542915 - DNA, 201 bp, Homo sapiens
ggctcaggtgggcatcatggtcctaccaatatgtgatgtccccctcggacgcccagcagtaaaattcctctctttgtactctttctctttatttctcatcyggctgacacttatgaaaaatagaaagaacctatgttgaaatattgggggctggtccccccaataattgttaatctttctcagataatattatgaataaca

SEQ ID NO: 542916 - DNA, 201 bp, Homo sapiens
gctgaggtgatgctccgatgctggccccgcctggagggccctcggtttggagtcttaaatcggaggagctggaggaggtgggcatggggcgctggggagarggcagggggccgtccctggtgaataaaactcgggccagagccggagaaccccatcgtggtgatcaaattgtttgggccgtttttcttctccctcccacgg

SEQ ID NO: 542917 - DNA, 201 bp, Homo sapiens
gcacgggtaaggagcagataggaccatgagtctacggggtttgcaaagaggctcatttgcacaagggtcagtggttctctgtggtataaatggagaagacrgcatgtctgaacctgctgtagctgacaaattattactggaagtggaccagtgatgcctgatggcaagatatagagcagtagatttgtggctggggtagcc

SEQ ID NO: 542918 - DNA, 201 bp, Homo sapiens
tgtataatctccatattagcactcatatttgaatgagtaatgcgttgtcatatgctgtgttgtgctgtaataataatatagtactatacatctgcaagatrtaggacatatatgtactatttaagggatgtgaataactttctgaaacaatgaggcatagctctatgatgttgaaagaaaaataaaactatggccataaaa

SEQ ID NO: 542919 - DNA, 201 bp, Homo sapiens
gactaaatgaccttattctcattctttgcttaagtaaataactgcctccaatttttttttggtgaaaactcttagatacacaaaatgcagtttagataacmttgaattgtttagatgcatcctatgtctaaaaactatttaaacaacacatctacaccttgtgcagttatttttagatttgtataaacaatttgttctgac

SEQ ID NO: 542920 - DNA, 201 bp, Homo sapiens
gaaggttttactgaattcttagctaaattaatcccatttaaagattgatttacatgcaataatattcagaaatatttaatatataaagtaaatcttaattrgacaggttcttgaggtgaattaccatacccaagaattagctcctgatcagtaagacaattctgggaggaccagttataggaattgtgaattatagggact

SEQ ID NO: 542921 - DNA, 201 bp, Homo sapiens
tagtttttttctgtagtgaacaactaaaacagttcgtggaaaaacaaaagaaaggcttataaacatttgaagagatgccctcattcagaattagagaaatrcaaatgaattagcattttttacttactattatagattggccaagacctaatagaactttgtgttccttagattgtggagaaaatgcacttttaatgcact

SEQ ID NO: 542922 - DNA, 201 bp, Homo sapiens
aaaactagctttagagtaaggatgagaaacttgagtgtttttaatttaaagataaaagcctgtgttttacacattcttttttggtgttcatagcttcttcycatacaggtgccagacactgtttgtgcttttgatggatttttatttatatactttttttgcttatttttactttgagtggaatgttcattaatgtaaatt

SEQ ID NO: 542923 - DNA, 201 bp, Homo sapiens
caacatatagcagtgttctgctggtaacatctttttgttttttcataatcttaggagtttgtggtttgtctgtttaattcgtatcgatgacacgtgtatamtgaaccttaagggttcatttctctgttggtagtgtaaactgaagaaaatgactgaggcaagtctcaatcgatttagaggtttgttttgccaaggttgagg

SEQ ID NO: 542924 - DNA, 201 bp, Homo sapiens
agctatttgaaaaccacggagacctgacactgctcccctaaatattttggtgtacatctcttaaaaataaggacattctcctatgtaaagccccaataccrttatcacatcttaagaaaactaataatttttaataatatctaataattctgttcatatttaaatttttccatttgtgctcaaaatgccttttataacttt

SEQ ID NO: 542925 - DNA, 201 bp, Homo sapiens
tcatcccagatccctatgtaatgagtcttcagaatctgatgaaaaagtcaaaggaatatatagaaagagaacaatctagacgcagtctgagaggtagtatsaacagaattgttaatgagagtcatttagacaaagaacatgatgctgttgaagtggctgactgtgtaaaagagaaaggccagttgacaggcaaacactgtg

SEQ ID NO: 542926 - DNA, 201 bp, Homo sapiens
tggctcacgcctgtactcccagcattttgtgaggccaaggtgggtggatcacctgaggtcaggagtttgagaccagcctgaccaaacatggcgaaaccccrtctgtactgaaaatacaaaaattaggcatggtggtgcatgcctgtagttccagctacttgggaggctgagacaggcgaattgcttgaacctgggaggcag

SEQ ID NO: 542927 - DNA, 201 bp, Homo sapiens
tgagacaggcgaattgcttgaacctgggaggcagaggttgcagtgagctgagactgtgccattgcactccagtcgggttaacagagcaagacactgtctcaaaaaaaaaaaaaaaaaaagtatcaaccaacaaatgttaccaagataacgtgacttcatgagggagaatgtcactattaatttatcataccatttccaaaa

SEQ ID NO: 542928 - DNA, 201 bp, Homo sapiens
tcaaaagtcttacaggttcatatgccaaattacctagtccagagccaagtatgagtcctaaaatgcaccgaagacgttccaggacatcatcagcgtgtcayatacttataaataacccaataaatgcctgtgaattaagccctaaaggaaaagaacaggcaatggacttaattattcaagatactgatgaaaacacaaatg

SEQ ID NO: 542929 - DNA, 201 bp, Homo sapiens
caaaatgtctgaggcttgttgtgtagggtctatgactccgtctgttatttatttataagcaaaatgtgatgtttatggacctaatccacacttttatgttrtatttgataggtgaatattgcaacttttgaaataattttttaatgatatattttctatttgtgtaagtctacgataagtcttgactgttaacagtgattt

SEQ ID NO: 542930 - DNA, 201 bp, Homo sapiens
aattcataagaagttttcagtcagaagcaccattaaagagaggcattgtttcagctcaagatgcttcacttcaggaaagagtgttagctcaggtaaatacrtggatcctgaaggcttttaagacatggacatattatatttctccttttttatttaatcactgaaaataggtttcaatgaaaactattttaatctttttct

SEQ ID NO: 542931 - DNA, 201 bp, Homo sapiens
cttagatgaatttatttactaaatttgacaacattcaactcatataactgatagctggttaatcttaaaaacagttaatctttatattcagtgcctaaatrtattccttttctgatgtcctaaaggtttcttgggaataaagacttaatgggaaaaatatcttaataacttttttaaaaaattcttctttcttgaatgcag

SEQ ID NO: 542932 - DNA, 201 bp, Homo sapiens
ttaatctttatattcagtgcctaaatatattccttttctgatgtcctaaaggtttcttgggaataaagacttaatgggaaaaatatcttaataactttttwaaaaaattcttctttcttgaatgcagtctttaatatgcttagtacaggtcttccagtagtacaccagcttctaaatgatgatttgtttctgtcatcctgt

SEQ ID NO: 542933 - DNA, 201 bp, Homo sapiens
aaagctaatttaagctgggctgggagcagtggctcatgcttgttatcctagcagtctgggagggtgaggtgggtggatcacgaggtcaggagttcaagacyagcctggccaagatggtgaaatcctgtctctattaaaaatacaaaaataaaagatacaaaaagccgggtatgatggcgcgtgcctgctcagctactcagg

SEQ ID NO: 542934 - DNA, 201 bp, Homo sapiens
tcaaaaaaaagctaacttaagctgggcacagtggcatgctcctatggtcccaggtactcgggaggctgaggcaggaggatagcttaagcccagaaattcaraccagtatgggtaacatagtaagacccatctcaaaaaaataaataaataaaaaataaagctaaaaagcgaactttaatatttctgacctgttttttactc

SEQ ID NO: 542935 - DNA, 201 bp, Homo sapiens
gaggatcacctgagcccgggaggctgaggctgcggtgaaccctgatcatgccactgcactccaacctgggtgacagagtgagatactgtctttaaaaaaawaacaaaactatgatactgaatttttaaagagaccagagctattgtcttgtagaattccttagatcttggatttgtcccattgtttcctaatagtgttatt

SEQ ID NO: 542936 - DNA, 201 bp, Homo sapiens
gatactttcttctctcactggtttgaagggaaaagttagcttttgtaaagcatatgtataagaaaattatctaaaagcacaagggttagtctatatgttgracatttctttgctgataaaaacctaaggtttggactcttagtgagcaaaatacaagtatcatattaatatgctttagtcgatttgctctgatttgtggta

SEQ ID NO: 542937 - DNA, 201 bp, Homo sapiens
gaaggttgcagtgagccaagatccactgaacccagtaggcaaaggtagtgagccgagatcgagccactgcacaacagcctgggcaacagagtgagaccctstctcaaaaaaaaaaaatgtaatcccagcactttgggagcccgagatgggtgtatcacttgaggtcaggagttcgagaccagcctggccaacatggcgaaa

SEQ ID NO: 542938 - DNA, 201 bp, Homo sapiens
attataaagagatacaatgcttagaagccttccattttttaggtacattatatttttatcagaaggtagagtgaggtgaaagaaaagatgtattctgcttytgtaggcaaataatatattatctgtttattttatcattaaacctttggacattttttgaggcagcaaagagttaaattgtgcactggttagaaaattaaa

SEQ ID NO: 542939 - DNA, 201 bp, Homo sapiens
gggttttgctttttttgaaatctgagttagaaaacaggctccaagttaatttgaagtatatcagagtatgtgatttgaatcagttatcttagtgtgattgrcaaaggaaaagcaagcaaaatttacataattctaattatttaattcttagaattagactgcttcaaaaatacaaaacaagatgatttaactaaattaaaa

SEQ ID NO: 542940 - DNA, 201 bp, Homo sapiens
ctgtttcagttataataaagaaatcataagataagcgttgatgataatttttctgaaatatatttgcacttaactaattactaatgtactttactgttacstttgagaagcttcataatttgtgattttccatttcagttactccaaagagaatgtacttgcttgttagtaatgcccagtacttgaatcagaggatattta

SEQ ID NO: 542941 - DNA, 201 bp, Homo sapiens
tttcagctgcaacacagaagtctcttgataggaagaaatacatgaagtaagttttttgtatcatgtcatgttagttatcaaaccaattaattttagtcatytgttggtctatttgcatatttaaatttagaaataaagagttaatttttctgcagttgagctgatagaaatcccctttatataaagaaatttattaaaatc

SEQ ID NO: 542942 - DNA, 201 bp, Homo sapiens
gaaagagaacaatctagacgcaggctgagaggtagtattaagagaattgttaatgagagtcatagtgactctcatgtgacatagttgagtttggggtcctsagatattatttccctttcacagtagtatatagtgtgtgggtagtagatttcattttgcagattataattactgtccatattaagtttaaaaaatgtattg

SEQ ID NO: 542943 - DNA, 201 bp, Homo sapiens
tgctgtttattgcatatattattatccttggatgatagctatcctaggaggaacagttggtaatgttaataacatatgactagaagaaatttaagtgcttstattctaagattaaattgcacatggatatatgaatatatgtgtgtgtgtatacacatatatatgttcatatttgtatcagattagatgtttctttttata

SEQ ID NO: 542944 - DNA, 201 bp, Homo sapiens
ttcaggttagaaaagcacctaatgccagtgattttgatcagtgggagatggaaacagtttactctaattcagaagtcagaaacttgaatgttcctgctacrtttccaaatagctttccaagccatacggaacactctactgcagcaaagcttgataagatagctgggattttgccattggataatgaggaccaatgtaaaa

SEQ ID NO: 542945 - DNA, 201 bp, Homo sapiens
tgacaggcaaacactgtgtctcagttattcctgacaaaccaagccttaataaatcaaatgttcttctccaaggtgcttccactcaagcaagcagcatgagyatgccagttttagctagcttttcgaaagtggacatacctatacgaactggccatcccactgttctagagtctaattctgattttaaagttattcccactt

SEQ ID NO: 542946 - DNA, 201 bp, Homo sapiens
gctgttgttttctaaagatttacttatacatgagtgcatatttagacaattgaaagaaactaaataattgtgttctttttttttttttgagacagagtctygttctgttgcccaggctggagtgcattggtgtgatcttggctcactgcaatctccacctcctgggttcaagccattcttctgcctgagcctcccaagtag

SEQ ID NO: 542947 - DNA, 201 bp, Homo sapiens
aagttattcccacttttgttaccgaaaataatgttatcaaaagtcttacaggttcatatgccaaattacctagtccagagccaagtatgagtcctaaaatrcaccgaagacgttccaggacatcatcagcgtgtcatatacttataaataacccaataaatgcctgtgaattaagccctaaaggaaaagaacaggcaatgg

SEQ ID NO: 542948 - DNA, 201 bp, Homo sapiens
aatatgataatgtatattgcctagctcagtgtttgttccagagtaaaaactcattaaatggtatcattatagaaaacctcccattgagaagtaatactggttttgctctatttttaggagtatatgcaggaaaaatccaaagaaagcggccaaatgttgcgacaatttaagaagacaacattcattaggataaaatggggg

SEQ ID NO: 542949 - DNA, 201 bp, Homo sapiens
gctatataataataaatccagatttccggataagaatattgcctggttaaaattctgcattgcttaaagacacccatgtttaagatttttcatcactaacrtatccattaaaagtatcaactggccaggcagggtggctcacgcctgtactcccagcattttgtgaggccaaggtgggtggatcacctgaggtcaggagtt

SEQ ID NO: 542950 - DNA, 201 bp, Homo sapiens
tcgtgtaattggtccttcagtaaacactttaacatcaaattattagacaaagtatcagaaataaggctctgagtaggtggttcaagaacggttctttaggmcggcgcggttgcttacgcctgtaatcccagcactttgggaggccgaggtgggtggatcacttgaggtcaggagttcgagaccaaactgacaaacatggcg

SEQ ID NO: 542951 - DNA, 201 bp, Homo sapiens
cgatctcagctcactgcaacctccgcctcccaggttcaagcgattctcctgcttcagcctcccaagtagctgagattacaggcatgcgcttgtattttttyagtagagattcggtttcaccatgttggtcatgctggtctcgaactcctgacctcaagtgatccacctgccttggcctcccaaagtactgggattacagac

SEQ ID NO: 542952 - DNA, 201 bp, Homo sapiens
ctctctttgtactctttctctttatttctcatccggctgacacttatgaaaaatagaaagaacctatgttgaaatattgggggctggtccccccaataatygttaatctttctcagataatattatgaataacatgtaaatgaagcagtttgtgtgtttttgacttgcttgaaagtgagtggtttgacttctgataagtaa

SEQ ID NO: 542953 - DNA, 201 bp, Homo sapiens
ctaatgtactttactgttacgtttgagaagcttcataatttgtgattttccatttcagttactccaaagagaatgtacttgcttgttagtaatgcccagtwcttgaatcagaggatatttacacaatagaaccatacactgaatataattgcttattgtttgcatcttatgactctaaaaacattgaattctcagtgacaa

SEQ ID NO: 542954 - DNA, 201 bp, Homo sapiens
tgcttgagtctcagagtttgagactatagtgcactgtgactgaacctgtgaatagtcactggaatccagtttgggcaacatagtgagaccctgtctctttaaaaaaaaaaaaaaagatatgagagtaacctctgaacttcaaaatagaaaatttttaaaagtaaatattctttgatttaagtaggcttttttactacagtg

SEQ ID NO: 542955 - DNA, 201 bp, Homo sapiens
tcttgcaccccctccccttttgaaatccttaataaaacttgctggctttaaggctcaggtgggcatcatggtcctaccaatatgtgatgtccccctcggaygcccagcagtaaaattcctctctttgtactctttctctttatttctcatccggctgacacttatgaaaaatagaaagaacctatgttgaaatattggggg

SEQ ID NO: 542956 - DNA, 201 bp, Homo sapiens
aatcaaatcaggtatgtcaatcttcaggaaatcatttagaaaataaagttactcatggacttgttactgtggaaggtcagttaacatccgatgagagaggygcacacataatgaacagtacctgtgctgcgatgccaaagctgcatgaaccatatgccagcagtcagtgtatagcaagtccaaactttggaactgtgagtg

SEQ ID NO: 542957 - DNA, 201 bp, Homo sapiens
gacgcccagcagtaaaattcctctctttgtactctttctctttatttctcatccggctgacacttatgaaaaatagaaagaacctatgttgaaatattggrggctggtccccccaataattgttaatctttctcagataatattatgaataacatgtaaatgaagcagtttgtgtgtttttgacttgcttgaaagtgagtg

SEQ ID NO: 542958 - DNA, 201 bp, Homo sapiens
acatggtgaaaccccatctctactaaaaatacaaaaattagctgggcgtggtggcacgcgcctgtaagcccatctactccggaggctgaggcaggagaatygcttgaacccaggaggcggaggttgcagtgagccgagatcgcaccactgcactccagcctaggtgacagagcaagactccatctcaaaaaaaaaaaaaaa

SEQ ID NO: 542959 - DNA, 201 bp, Homo sapiens
atcacttgaacccgcaaggtggagattgcagtgaaccgagatcgtgccactgcactccagcctgggggacagagcgagattctgtttcttgaaacaagaaagagagagagaggagagagagagagagagagagagagagagagaaaggaaggaaggaaagaaaagaaaagagggagggagggaagggaagggaagggagaa

SEQ ID NO: 542960 - DNA, 201 bp, Homo sapiens
tcacttgaacccgcaaggtggagattgcagtgaaccgagatcgtgccactgcactccagcctgggggacagagcgagattctgtttcttgaaacaagaaagagagagagaggagagagagagagagagagagagagagagagaaaggaaggaaggaaagaaaagaaaagagggagggagggaagggaagggaagggagaag

SEQ ID NO: 542961 - DNA, 201 bp, Homo sapiens
cgcaaggtggagattgcagtgaaccgagatcgtgccactgcactccagcctgggggacagagcgagattctgtttcttgaaacaagaaagagagagagaggagagagagagagagagagagagagagagagaaaggaaggaaggaaagaaaagaaaagagggagggagggaagggaagggaagggagaaggaaggaaggat

SEQ ID NO: 542962 - DNA, 201 bp, Homo sapiens
ggactaaaatatgccctggtctcctgcagtaccctcaggcttactaggattgggaaattccaccctggtaaatttgtggtcggaccagttctctgctctcraaccctgtttccttttaagatgtttatcaagacaatacgtgcacagctgaacatagacccttatcagtagttctgattttgcccttgtcctgtttcctca

SEQ ID NO: 542963 - DNA, 201 bp, Homo sapiens
gccctaaaggaaaagaacaggcaatggacttaattattcaagatactgatgaaaacacaaatgtgcccgaaattatgccaaagttaccaactgatttagcrggagtttgttcaagcaaggtttatgtgggcaaaaatacatctgaagtcaaagaagatgtggttttaggtaaatcaaatcaggtatgtcaatcttcaggaa

SEQ ID NO: 542964 - DNA, 201 bp, Homo sapiens
aaggtggagattgcagtgaaccgagatcgtgccactgcactccagcctgggggacagagcgagattctgtttcttgaaacaagaaagagagagagaggagagagagagagagagagagagagagagagaaaggaaggaaggaaagaaaagaaaagagggagggagggaagggaagggaagggagaaggaaggaaggataat

SEQ ID NO: 542965 - DNA, 201 bp, Homo sapiens
gaaagagagagagaggagagagagagagagagagagagagagagagaaaggaaggaaggaaagaaaagaaaagagggagggagggaagggaagggaagggagaaggaaggaaggataatttgaggaagaaaaacttgaaataaataataattgctgataattacatgtacttttggctaagcctaaaatgatatcattttg

SEQ ID NO: 542966 - DNA, 201 bp, Homo sapiens
agtagctgggactacaggctcatgccaccatgcccggctaatttttgtattttttgtactgtagagatggagtttctggcatgttgcccaagctggtctcwaactcatgagcttgagtgagcctcccgtctcagcctcccaaagctgtgggattacaggcgtgagccacgacacccagccaggattttcttttttgagaca

SEQ ID NO: 542967 - DNA, 201 bp, Homo sapiens
aaagagagagagaggagagagagagagagagagagagagagagagaaaggaaggaaggaaagaaaagaaaagagggagggagggaagggaagggaagggagaaggaaggaaggataatttgaggaagaaaaacttgaaataaataataattgctgataattacatgtacttttggctaagcctaaaatgatatcattttgg

SEQ ID NO: 542968 - DNA, 201 bp, Homo sapiens
aagagagagagaggagagagagagagagagagagagagagagagaaaggaaggaaggaaagaaaagaaaagagggagggagggaagggaagggaagggagaaggaaggaaggataatttgaggaagaaaaacttgaaataaataataattgctgataattacatgtacttttggctaagcctaaaatgatatcattttggg

SEQ ID NO: 542969 - DNA, 201 bp, Homo sapiens
ttgaaaactacggaaaccaagattagatttgagagggaaaaataaatctagtgttctttatgtaaaggataatggtttttcaatgggattttttttctttmtagcattgggaaagatattttaaagttttgtcttcaaatgtaaccctcttggtgtactgttgtgtattctaattactgtcttaagttgggatgtttttac

SEQ ID NO: 542970 - DNA, 201 bp, Homo sapiens
tggggagccaacttggatcctccaagtagatagcatagcaaggcaagaggctgcctcagtgaatatcagaagtacataagaccaacagagtggaaatttcttttttttttttttgagatggagtttcactcttgttgcccaggctggagtgcaatggtgcgatctcagctcactgcaacctccgcctcccaggttcaagcg

SEQ ID NO: 542971 - DNA, 201 bp, Homo sapiens
ttaacaatgcagtggaattagaatggagaaaaataagtgactctagtttgctggaaacaatgctgtctcaagcggactcactccatacttcaaattcaaayagttctggtaaatatttaaaaatccttttacatttgggaaagtgatcctacggtaagatatttatttggcacactataagattatatctcctgttttcaa

SEQ ID NO: 542972 - DNA, 201 bp, Homo sapiens
gagatcctggaggacaagtgtcaaaaaaacaaatgatggtaggatgcagttgaggaccacatctgaaagttaagtagagtcaggagaatcttgtctgaatrtatagtcctgggtctgtcatttcagatcaggatgggatctgttgaatgagtgggtaaaggtgatgcaatacaggtcttactttattgagtagcatgaaat

SEQ ID NO: 542973 - DNA, 201 bp, Homo sapiens
ccacatctgaaagttaagtagagtcaggagaatcttgtctgaatatatagtcctgggtctgtcatttcagatcaggatgggatctgttgaatgagtgggtraaggtgatgcaatacaggtcttactttattgagtagcatgaaataaaaggagtgtggttcgaagtagagacccagctatatcttgattgtattatgtcag

SEQ ID NO: 542974 - DNA, 201 bp, Homo sapiens
aaaaaaaaaaagttaaaaaattaaaatttaaatcccaaacttcatttttgttgactttgttctacttgacatcagtagagcacttcttgctgaattgggtygggggtcgtcctcaggctcaagattcataccaatacctggccatatacctagtcacatgtcagaccagatgtgcccggaccttttgtaggacatgctatc

SEQ ID NO: 542975 - DNA, 201 bp, Homo sapiens
gagattcttgacaatgttcaggtgtgtgattttagctgtttcagttataataaagaaatcataagataagcgttgatgataatttttctgaaatatatttkcacttaactaattactaatgtactttactgttacgtttgagaagcttcataatttgtgattttccatttcagttactccaaagagaatgtacttgcttgt

SEQ ID NO: 542976 - DNA, 201 bp, Homo sapiens
tgaggcaggagaatcgcttgaacccaggaggcggaggttgcagtgagccgagatcgcaccactgcactccagcctaggtgacagagcaagactccatctcaaaaaaaaaaaaaaaaggatactgaatgtgaagtaatattcaagtcaatattcaagtgaagtaataaaaaactcagcagtggccaaaagggccttaatttt

SEQ ID NO: 542977 - DNA, 201 bp, Homo sapiens
cttctcctttattgatgcaaaaccagaatacgagacagcagatggacacacctatggtgtcctgtggaaatgaacaatttttggataacagttttgagaargttaaacggagacttgatttagatattgatggtttgcaaaaagaaaactgcccttatgtcataacaagtggaataactgaacaagaaaggcaacatttgc

SEQ ID NO: 542978 - DNA, 201 bp, Homo sapiens
gagagagagaggagagagagagagagagagagagagagagagaaaggaaggaaggaaagaaaagaaaagagggagggagggaagggaagggaagggagaaggaaggaaggataatttgaggaagaaaaacttgaaataaataataattgctgataattacatgtacttttggctaagcctaaaatgatatcattttgggac

SEQ ID NO: 542979 - DNA, 201 bp, Homo sapiens
cagatacctttattttaatactcttaattgacatttttgggaaaaaagtggtctttattcatatgggcacttaattttatttatcttattagaaagcatattagtcagctacagtttattgccatttgataggctttcttaaagattttcttgagacaaggtctggctctatcaccccagtttggagtgaagtggcatgac

SEQ ID NO: 542980 - DNA, 201 bp, Homo sapiens
tatgccagttttagctagcttttcgaaagtggacatacctatacgaactggccatcccactgttctagagtctaattctgattttaaagttattcccactwttgttaccgaaaataatgttatcaaaagtcttacaggttcatatgccaaattacctagtccagagccaagtatgagtcctaaaatgcaccgaagacgttc

SEQ ID NO: 542981 - DNA, 201 bp, Homo sapiens
agtgaaatcccatctctactaaaaaatacaaaatggtggtgtatggacctgtagtcccagctacttgggaaactgaggcaggagaatcacttgaacccgcraggtggagattgcagtgaaccgagatcgtgccactgcactccagcctgggggacagagcgagattctgtttcttgaaacaagaaagagagagagaggaga

SEQ ID NO: 542982 - DNA, 201 bp, Homo sapiens
cattaaagagaggcattgtttcagctcaagatgcttcacttcaggaaagagtgttagctcaggtaaatacatggatcctgaaggcttttaagacatggacatattatatttctccttttttatttaatcactgaaaataggtttcaatgaaaactattttaatctttttctataaataagtgtacatggtatatagtattc

SEQ ID NO: 542983 - DNA, 201 bp, Homo sapiens
aagcttgataagatagctgggattttgccattggataatgaggaccaatgtaaaactgatggaatagacttagctagagattcagaaggatttaattctcygaagcaatgtgatagttccaatattagtcatgtagaaaatgaagcttttccaaagacctcttcagcaaccccacaagaaactcttatttctgatggtccc

SEQ ID NO: 542984 - DNA, 201 bp, Homo sapiens
  misc_feature (1)...(201): n = A,T,C or G
ggaaattattgcagaagaatgcctttccctcattttataactttaaaaacttggattaaccactcaatgtccactttctttgacttacagtataaccatgnagccaattgtggcccactaaaatctacagaagttaatgtgggtcaccattttggtcagaagcatacattcctgtcagacaactagttgtctgacagaaat

SEQ ID NO: 542985 - DNA, 201 bp, Homo sapiens
attaaagagaggcattgtttcagctcaagatgcttcacttcaggaaagagtgttagctcaggtaaatacatggatcctgaaggcttttaagacatggacatattatatttctccttttttatttaatcactgaaaataggtttcaatgaaaactattttaatctttttctataaataagtgtacatggtatatagtattcc

SEQ ID NO: 542986 - DNA, 201 bp, Homo sapiens
atctaaacaagtacaaaagtctgttgctgttgttttctaaagatttacttatacatgagtgcatatttagacaattgaaagaaactaaataattgtgttctttttttttttttgagacagagtctcgttctgttgcccaggctggagtgcattggtgtgatcttggctcactgcaatctccacctcctgggttcaagccat

SEQ ID NO: 542987 - DNA, 201 bp, Homo sapiens
gaagaaaaacttgaaataaataataattgctgataattacatgtacttttggctaagcctaaaatgatatcattttgggacataattaaaaggtttagcaygttacaataaactgttcatgtataggaaatagaagagcaggagaaaatgttaaaagagaagaaggcaatgacagcggaagcctctgagttggacattaac

SEQ ID NO: 542988 - DNA, 201 bp, Homo sapiens
aggactaaaatatgccctggtctcctgcagtaccctcaggcttactaggattgggaaattccaccctggtaaatttgtggtcggaccagttctctgctctygaaccctgtttccttttaagatgtttatcaagacaatacgtgcacagctgaacatagacccttatcagtagttctgattttgcccttgtcctgtttcctc

SEQ ID NO: 542989 - DNA, 201 bp, Homo sapiens
cttaatcctgttatcttcataagctgaggatgtaggtcacctcaggaccactattgtgttaactctacaaattgattgcaaaacatgtgtgtttgaacaayaggaaatcagtgcaacttgaaaaagaacagaataacagcgtttttcagggaacaagggaagacaaccataactgactgcctgcgaggtcgggcaaaatag

SEQ ID NO: 542990 - DNA, 201 bp, Homo sapiens
tagtaggaagaagttttgttattgattaaactatttagaaaaaatagcattatatcttatttttttataacctgattataattttgactattttttttttmccatttctcattgcactataatttgtccctgatactttggtgtactgaatttttaagtactttgaggcctaccgaggacatatcctatttcatctttgca

SEQ ID NO: 542991 - DNA, 201 bp, Homo sapiens
gcaggaggattgcttgagtctcagagtttgagactatagtgcactgtgactgaacctgtgaatagtcactggaatccagtttgggcaacatagtgagaccytgtctctttaaaaaaaaaaaaaaagatatgagagtaacctctgaacttcaaaatagaaaatttttaaaagtaaatattctttgatttaagtaggcttttt

SEQ ID NO: 542992 - DNA, 201 bp, Homo sapiens
tgatggtcccttctcagtaaatgaacaacaggatctaccacttttggcagaagtcatcccagatccctatgtaatgagtcttcagaatctgatgaaaaagkcaaaggaatatatagaaagagaacaatctagacgcagtctgagaggtagtatgaacagaattgttaatgagagtcatttagacaaagaacatgatgctgt

SEQ ID NO: 542993 - DNA, 201 bp, Homo sapiens
taaaatgttaggaactagttccaaaggtaaggaatctttgaagcgtttgataccttctatgcagatacctttattttaatactcttaattgacatttttgrgaaaaaagtggtctttattcatatgggcacttaattttatttatcttattagaaagcatattagtcagctacagtttattgccatttgataggctttctt

SEQ ID NO: 542994 - DNA, 201 bp, Homo sapiens
aaaaatccaaagaaagcggccaaatgttgcgacaatttaagaagacaacattcattaggataaaatggggggaaggattattattcatgttattttccctrcccaagactttatttaaccctggactccgtttacacagacaaagtgacatcagaaggctgagcacttatctggatcatttggtcagtttggtaattcctg

SEQ ID NO: 542995 - DNA, 201 bp, Homo sapiens
gtcaggaggaagaagaaaacaagtctgaaagggggacaggggacattgagtcagtgagttgatgggaagaggactgaggggtgatggtagtggtgaagaaraaagttgttgggtttctttaggagggtgaagttggttgacttttctaacattgcttttgattttagagcactgggaggagggggaaagagctcaccctgc

SEQ ID NO: 542996 - DNA, 201 bp, Homo sapiens
aatcaaaaaaacccactcacaatactaaattagacttcagaggattcccgaagtcctgggaagagagaagtttaagggtttaaacttttttttttgctccygtcccctaccgcggtccccagttcccctggttgggttccatcttcatgtttccatcacttccttccttcccgttacactctcacgcttgctctttttgct

SEQ ID NO: 542997 - DNA, 201 bp, Homo sapiens
tgtaattgtgtttatcttaaattattgttaaaattaattcttatcatagggtgaggcagctgggaattttggaaaagctaatcaggcattaaaatgcttgygtgggataagaactggagttagatgagggcatggaaaggaagcttttatttttcattttgtaaccttctatattaaccatatacatctatttgtaatttt

SEQ ID NO: 542998 - DNA, 201 bp, Homo sapiens
ggtcaggcgtggtggctcacgcctgtagtcccagcactttgggatgccaaggtgggtggatcacctgaggttgggagttcgagaccagcctggccaacatygtgaaaccctgtatctactaaaaatacaaaaattagcctgatatggtggtggacacctgtaatcctagctactcgggaggctgaagcaggagaatctctt

SEQ ID NO: 542999 - DNA, 201 bp, Homo sapiens
acccgggaggtggaggttgcagtgagctgagatcgttccactgtactccagcctgggcgacagagtgagactctgtctcaaaaaaaaaaaaaaaaaaaaargaaggtatccaggtgtggggtgggtgaaagaaagaaaggaatattagataattccttggttttgagcttggatgtttgggtgatagttggtgctattcac

SEQ ID NO: 543000 - DNA, 201 bp, Homo sapiens
tgggacacattcaaagcagtgtggagagggaaatttatagcactaaatgcccacaagagaaagcaggaaagatccaaaattgacaccctaacatcacaatkaaaagaactagagaagcaagagcaaacattcaaaagctagcagaaggcaagaaataactaagatcagagcagaactgaaggagatagagacacaaaaaac

SEQ ID NO: 543001 - DNA, 201 bp, Homo sapiens; identical to SEQ ID NO: 365224

SEQ ID NO: 543002 - DNA, 201 bp, Homo sapiens
tcgtggcagacaccatgctgagggactccggaggggaaggtgagtcagccagtcagtcctcactccatgctgagcacccccttttgcaaagccttaggctragcattggaaggaaggcaggaaaggggatatatagacccttggggaaaaagcaagttatcaattagaatagtgcaaaattctcaagagattctgagtaaa

SEQ ID NO: 543003 - DNA, 201 bp, Homo sapiens
agattctagttaacacttttgtttttaaaaactaaggacaaatgaacaaaaaaccttgtatcatgtttgtttttatttataagttagccaatcccaattcygtttgctttattttcaaataaaaaaagatggaaattttgaggggtggtctaggggtgaatatggtaaaatggggctttaggccttatagctttttattaa

SEQ ID NO: 543004 - DNA, 201 bp, Homo sapiens
agacttcttcaggtaacttttacttaatcattatggctggaggatgggatggagggcaggctgaagaggtaggcaacgctggatcatacagagttttatcttttttttttttttttttgagacagagtcttgctctgtcacccaggctggagtgcagtggcacaatctcagctcactgcaagctccgcctcccgggttcac

SEQ ID NO: 543005 - DNA, 201 bp, Homo sapiens
caatagcaaagacctggaaccaacccaaatgtccaacaatgatagactggattaagaaaatgtggcacatatacaccatggaatactatgcagccataaaraagcatgagttcatgtcctttatagggacatggatgaagctggaaaccatcattctgagcaaactatcgcaaggacaaaaaaccaaacaccacatgttct

SEQ ID NO: 543006 - DNA, 201 bp, Homo sapiens
ttgcaaataaagtcgtataacaatcttaaacatatgtctttgagatgagttactgttttagacttgtctgtgtacaacactgatagactatcaacagtactgtgtgtgtgtgtgtgtgtgtgtgtgtgtgtgtgtgatggggtaccatacaaatatacttcagttcatctgaacaaaaattgcctgctgtgcttggatgct

SEQ ID NO: 543007 - DNA, 201 bp, Homo sapiens
gttctttatgtattagtaattctttctgataattatgatgttgaaactcaggtaaatttaaaattgacaatatctagaatgatagtcaaagatcatagatmatgaggctatagtgaactgaagaagtttattttttaaaccttgaaagtatcttatgagtcatctaatacaagtctagattatagaagagacaactgaaac

SEQ ID NO: 543008 - DNA, 201 bp, Homo sapiens
tagctttgggtgcattcctgaaagtgcaggctagaatctgtttattgatcaatttagtactgacacaagcctgtaatatgctgtaataaactttctgtttaaaaaaaaaaaaggttgaccatgtgtttataattgttaaagctgggtgatggatacatgagtgtttagtatattatcatttctagtattgaatatgtttaa

SEQ ID NO: 543009 - DNA, 201 bp, Homo sapiens
ggagtccacaaagacgaccaagacacagggccagagaagcaggaagagtggtcagtaagtgtcaaatgctacaaagagagcagaagtaaggatgattgtgwtcatcttatatataagccagtgccattctctttctgcagaagcctatttttgtaggttgaggacaaggagatttgcagggaagaggagagtaaccgccaa

SEQ ID NO: 543010 - DNA, 201 bp, Homo sapiens
tgcaaataaagtcgtataacaatcttaaacatatgtctttgagatgagttactgttttagacttgtctgtgtacaacactgatagactatcaacagtactgtgtgtgtgtgtgtgtgtgtgtgtgtgtgtgtgtgatggggtaccatacaaatatacttcagttcatctgaacaaaaattgcctgctgtgcttggatgctg

SEQ ID NO: 543011 - DNA, 201 bp, Homo sapiens
tgaggcaggagaattgcctgaactcaggaggtggagcttgcagtgagcccaaatcgcaccactgcactccagtctgggcgaaagagtgagactccatctcaaaaaaaaaaaaaaaaaaaaaaaaaatccaaaaagtacaaaaaattagccgggcgaggtggcgggtgcctgtagtcccggctactcgggaggctgaggcag

SEQ ID NO: 543012 - DNA, 201 bp, Homo sapiens
tggaattttttttgttttccctcagttctctctgatgagtatgcaggtagggactcttgagtcaaacttgcctgctcaattcattcaaatagaaaaagctytctgtattcagaggactagaaaagagttttgaggttggaaacaataccaagatccaatgtcttttgcccagctgaaattcagttttgttagcattctagg

SEQ ID NO: 543013 - DNA, 201 bp, Homo sapiens
aaaatccctttttcaccttgaacttactggggtagttttctccattgtcagtttatgctcaggcaatgcaagtgaaattttatattagtccattacaaacrtaattttattttattttattttatttatttatttttgagacagagtctcgctctgttgcccaggctggagagcagtggcatgatcttggctcactgcagt

SEQ ID NO: 543014 - DNA, 201 bp, Homo sapiens
aatggcgtgaacttgggaggcagagcttgcagtgagccgagatcgcgccactgctccagcctgggggacagaacgagactctatctcaaaaaaaaaaaaargaaaaaaaaaaaacaaaaaaacacacgggagatggaattggttaaatcacgtgactactggaaggtgagagataaaagcacaataaatatttccaaattt

SEQ ID NO: 543015 - DNA, 201 bp, Homo sapiens
atactgaacacatttattgagagtgatcatatttacagattcatggaatcagacaactggcggggctgcgatgctttcttagttttcctcattcattttcmaatagaatacctgaggtttactcaggatcacagaagtggttctgtgatagcttagtctagaattcagtcttcagcatgtactaggtgattaataaaggtg

SEQ ID NO: 543016 - DNA, 201 bp, Homo sapiens
cataattttattttattttattttatttatttatttttgagacagagtctcgctctgttgcccaggctggagagcagtggcatgatcttggctcactgcartctctgcctcccaggtccagtcaattctcctgcctcagactcctgagtagctgggattacaggtgcctgccaccacacctggctaatttttgtatttttt

SEQ ID NO: 543017 - DNA, 201 bp, Homo sapiens
gttgacagggcttcttaggaaagaattattaaacatgttggaatgaaagcagggagggactcagttggcagagtgggatgtagggattgtccactaggcasaaacacagccttcataataatcttcatggcttcctgcagcatttgcccctattccctttggaggaatctatctgcctttggaggtcccagccagccagtg

SEQ ID NO: 543018 - DNA, 201 bp, Homo sapiens
aaatgtgagcaattatacaatgcatatttgttgaataatttagctggagaaagcatcagaaaaatccattatgacaaatcttatcatttaaggtcatttckttagtagaatggtgattcttaaatttgggggaaacactgtttcctttgaaaagctgatgacagctatgaactctttcactagaaaatgcacaagcccatg

SEQ ID NO: 543019 - DNA, 201 bp, Homo sapiens
taaacatgttggaatgaaagcagggagggactcagttggcagagtgggatgtagggattgtccactaggcagaaacacagccttcataataatcttcatgrcttcctgcagcatttgcccctattccctttggaggaatctatctgcctttggaggtcccagccagccagtgtcaccgctcccctctggtgctcgcctatg

SEQ ID NO: 543020 - DNA, 201 bp, Homo sapiens
ggagtgcaatgacacgatctcagctcactgcaacctccacctcttgggttcaagcgattctcctgcctcagcctcccgagtagctgagattgcaggtgccygccaccatgtccagctaatttttctatttttagtagagatggggtttcgccatgttggccaggctggtcttgtgatccgcctgccttggcccccgaaagt

SEQ ID NO: 543021 - DNA, 201 bp, Homo sapiens
tgtgaaaaggcctaggaatcaatacctcgaaatcaatacatgaaaaaaatacaactaattataattggccctggaacacccttgtgaacagaaatgaccartgctgtagatgatgcacagtagtgaacctatccccccaaatgtatttacgtttgtaattgtgtttatcttaaattattgttaaaattaattcttatcata

SEQ ID NO: 543022 - DNA, 201 bp, Homo sapiens; identical to SEQ ID NO: 365230

SEQ ID NO: 543023 - DNA, 201 bp, Homo sapiens
ccgaatgcatctaggtaccaatggagccaactgtggtgggtaagtatggctaagtaggggaggaggaaacctgcatagagtcctcactgggcttccacagyccagtgtctagagagctctgtgctaagaggatattagaaggaaagaggggaactatgctaagggcacaaaagtgtgtaacaacatgatatgtttaggaac

SEQ ID NO: 543024 - DNA, 201 bp, Homo sapiens
caccctgagacaaacaacttctgttcctgttgttacagggaagaactgaggaggagggagcgggaaccggatggggagctcctggtgcacaggttctgaaygggtggaacactgaagggcaaggaggctaaacaaagttaagctcaactaattggctcatcaagaacacagtccccatgttgagggggaaaatgcagtaat

SEQ ID NO: 543025 - DNA, 201 bp, Homo sapiens
agtcacctagttaatacatataggtgtatgtaggtaaactcatgtagtgtgagggaggtaagagttgtgacagcatggttgatgtccctttggaaaggagrgtttttaaaacttagaaatagaatggtgataagaagtgccgtagaatttctgatctgctaagcttcaaattggttggtttgttggtagctgatgtggaaa

SEQ ID NO: 543026 - DNA, 201 bp, Homo sapiens
gagtcaggatgttaaggttttcatcaggagagaattgcagtgacctgggcactactgtactgatggtgggccttcctcaggggaagaggaaatattgcctmcctacaaataaacttgaataaatgtgaatgtgagggaagttattgctttgatgctttcaggctgtatactttcttttttttgagacagtctctgttgccc

SEQ ID NO: 543027 - DNA, 201 bp, Homo sapiens
cccgctccggccggaaactggcgcctgtttccggccggacagcagaaagccaccgatcctgaaccagccgccggagccggagtggcgaccgggtgcggagygggcaaaaagccactgggggaggccagtcccgatcagtcctttctggctccagctccagatcccgtgcggagcaacagctgcggtcgcagtctccaccac

SEQ ID NO: 543028 - DNA, 201 bp, Homo sapiens
cagaaagttattaaaatggctttacagttgcgttgcttttttttaaagagagaagattgaaatttattttgcagctatacacttggttttggattattcaygtgtataagttatttgagctgctaccacttcctctgacctaaggctgtggctaaaatgggtttggagaagaaattcttgcctgtactggggggtaggggg

SEQ ID NO: 543029 - DNA, 201 bp, Homo sapiens
tagtaagcattcaattatttgctgctcttgatgttgttaaatgtgaaatgtctcaccatacctcaagcctacaatatttatattagtaagatggaactctsagtgtagagagtttgcttccagtatataatcgcaaaataaatctcctcctgcccctctacaggttgcttttaactttgacagaggaagaattttccaaga

SEQ ID NO: 543030 - DNA, 201 bp, Homo sapiens
agttgatggatggaaatttcattttagattgttggatgtgtgtgtgtgtgtggtaatcaatgtagaactcactgtgatcatcacaattttttttgagacasagtctccctctatcacccagggtgaagtgcagtggtgcgatctcaactcactgcaacctgcacatcccgggttcaagtgattctcttgcctcagcctcta

SEQ ID NO: 543031 - DNA, 201 bp, Homo sapiens
cagcagaataatgacatagtccaaagtcttgcagcctttcagaaatatgggaatgatcagattcctttagctcctaacacaggccgagcgaatcagcagakgggagggggattcttttccggtgtgctcacagctttaactggagtggcagtaagttgatcactgtgttcctctgtgcccccccacacctcaccccccgac

SEQ ID NO: 543032 - DNA, 201 bp, Homo sapiens
gtagaaaacaacctaagtgcccctcattaggaacaagttgaataaataaggcacacccatgtaggcagccaccggaaaaggagacaaagactttgtgttamtaaggaacaaagtcctgtaatccataaggaacaaagtcctgtaatcccagcactttgggaggccgaggcaggctgatcacttgaggccaggagttccaga

SEQ ID NO: 543033 - DNA, 201 bp, Homo sapiens
acggaaagttgttaaacaagttattcacggcagcattgttggtaattgcagggagtagaaaacaacctaagtgcccctcattaggaacaagttgaataaayaaggcacacccatgtaggcagccaccggaaaaggagacaaagactttgtgttaataaggaacaaagtcctgtaatccataaggaacaaagtcctgtaatc

SEQ ID NO: 543034 - DNA, 201 bp, Homo sapiens
aaataggggtttcccccatgaaggggtgggttgcccctccacacctgtgggtgtttctcgttaggtggaacgagagacttggaaaagaaaaagacacaaartatagagaaagaaataaggaggcccaggagaccagcgttcagcatatggaggatcccgccagcctctgagtttccttagtatttattgatcattcttggg

SEQ ID NO: 543035 - DNA, 201 bp, Homo sapiens
tgtttgcgtccctgggtacttgagattagggagtggtgatgactcttaaggagtatgctgccttcaagcatctgtttaacaaagcacatcttgtaccgccsgtaatccatttaaccctgagttgacacagcacgtgtttcagagagcacggggttgggggtaaggttatagattaacagcatctcaaggcagaagaatttt

SEQ ID NO: 543036 - DNA, 201 bp, Homo sapiens
gttgccaggtgcagtggttcatgcctgtaatcctagaactttgggaggccaaggcaggtggatcacctgaggtcaggagttcgagaccagcctggccaacrtagtgaaacctcatctctaccaaaaatacaaaaattagccaggcgtggcggtgggtgcctgtaatcccagctactcgggaggctgaggcaggaggatcgc

SEQ ID NO: 543037 - DNA, 201 bp, Homo sapiens
cagcctaccaaagtactgggattataggtgtgagccactgtgcccatctaagaactttttttttttttttttttttttgaggcggagtcttgctctgtcayccaggctggagtgcaacagtgtgatctcggctcactgcaagctccgccttccgggttcacgccattcttctgcctcagcctcccgagtagctgggactat

SEQ ID NO: 543038 - DNA, 201 bp, Homo sapiens
gagtgcggtggcatgatctcggctcactgccacctccacctcccgagttcaagtgattcttctgcctcagcttcccaagtagctgggattacaggcatgcsccactacaagaggctaatttttgtgtgattagtagagatggggtttcaccatgttggccaggctggtctggaactcctgacctcaagtgatccacccgcc

SEQ ID NO: 543039 - DNA, 201 bp, Homo sapiens
aaattttttttttttaagatggagcttcacccttgttgcccgggctggagtgcattggcaaaatctcggctcactgcaacctccgcctcccaggttcaagygattctcctgcctcagcctcccaagtagctgggattacaggcatgtgccaccatgcctggctaattttgtatttttcgtagagacagagtttctccatgt

SEQ ID NO: 543040 - DNA, 201 bp, Homo sapiens
tgaggtggaggatcacctgagccgaggagtttgagaccagcctgggtaacatagcgagaccttgtccctacttaaaataataataataataataataatawttagccagatgtggtgatgtgtgcctgtggtcccagctactcaggaggatcacttgagacctggaggtcaaggctgcagttgagccacatttgcaccact

SEQ ID NO: 543041 - DNA, 201 bp, Homo sapiens
catgatcttggctcactgcaacctccacctcccaggttcaagcgattctcctgcctcagcctcccaagtagctgggactacaggtgcccaccaccacacckgctaattttttttgtatttttagtcgagacagggtttcaccatgttggtcaggctggtctcgaactcctgacctcaggcaatctgcctgcatcagcctcc

SEQ ID NO: 543042 - DNA, 201 bp, Homo sapiens
atcctcatggagctagaacgtgtcaaagcattaggcgtgaagcccccccagaatctctgggaatataaggtgaacactttaatttttttttttttttttttactttttatttttattttttgttaattttttttaatttcagggttttcttttttatttttgacagtttatgtacttatttatttatttattttattttga

SEQ ID NO: 543043 - DNA, 201 bp, Homo sapiens
aaattagctgggtatggtgggttgcacctgtagtcccagctactggggaggctgaggcaggagaattgcttgaacctgggaggtggaggttgcagtgagcygagatcacgccactgcactccatcctgggccagagagcaagactgtgtctcaaaaaaaaaaaaaaaaaattagcgcttcaatagaatgtcaatactttta

SEQ ID NO: 543044 - DNA, 201 bp, Homo sapiens
aggtcgcggtaggcagattgcttgagtttaggagttcgagatcagcctgggcaacatggcaaaatcccatctctgcagaaaattagccaggtgtggtggcrcacacctgtagtccaggctacataggaggctgaggcaggaggatcacctgagcctggggaggtcgaggctacagtgagccatgatctcaccactgcattc

SEQ ID NO: 543045 - DNA, 201 bp, Homo sapiens
gtaaatcagtcctttgaactaataaccgttattgattactttatcaggataatggcgtattaggaagacaggctttaagtcagaccatgatttttttttttcttttggtgtttccgcctggtttccaaccagggaccagaccatgatttaaaacatggctctgccctttactagttagaactccattttctcatctgtaaa

SEQ ID NO: 543046 - DNA, 201 bp, Homo sapiens
tacaggttgcttttaactttgacagaggaagaattttccaagacgccctataccatagaaaacagcagccacaggagagccatcctcatggagctagaacrtgtcaaagcattaggcgtgaagcccccccagaatctctgggaatataaggtgaacactttaatttttttttttttttttttactttttatttttattttt

SEQ ID NO: 543047 - DNA, 201 bp, Homo sapiens
tgggggaaggggcacagagcttccatgctctccacgggtgcactcccctccaggaacctcacatgctcagctatccagaagctcactgaatcctgtccccyggagtattgtgtttttgtttttgttttttcagacagggtctcactctgtagcccaggctggagtgcagtggcacaacctcaactcaactgcaatctctgt

SEQ ID NO: 543048 - DNA, 201 bp, Homo sapiens
tgctgttttgtagatttttccaaacccagtcattcttcccattcgtttttgaactaagtaattattgcttctcgcccttttggctaagatcaactaaactkggtaaataacagttatgatttcctaaacacaagtgtatccatatgaatggagcaccaggggtaggaatagaatgattctcctccccgcaatcctgcccct

SEQ ID NO: 543049 - DNA, 201 bp, Homo sapiens
aaaattagaagggtcaagggcatgagggtgaccttgaaacactgggacacccctaccactaccataccagtggaaaaggatttttccatctggccctgcgstttgggggcagagggtgatgtgggggcagaactcatctataccttcacgcccccagatgctccccagagctgcctggagcttggtgctgaggaaaggtgg

SEQ ID NO: 543050 - DNA, 201 bp, Homo sapiens
ttagtagaggagaggttttactgtcttggccaggctggtctcgaactcctgacctcgtgatccacccgcctcagcctcccaaaatgctaggattacaggcrtgagccaccaagcccggccaccttctttattaatatagttagagatagggtgtcccaagggcagcctggactcagctccctccattgtgtctgcagcccg

SEQ ID NO: 543051 - DNA, 201 bp, Homo sapiens
ttgaaggtcgcagggcaagggagtggtagagccaggatttggattcaggcagtcttcaaatcagtgatcttattaccacagaccacagaggtaggtgaggygactgagttgtgaaggaccttggcccagctcccacagtccttggggtctaaggcaaagctggggtcagaacccagaggtgcctgggacgatgctctagga

SEQ ID NO: 543052 - DNA, 201 bp, Homo sapiens
tattcactcacctgtttgtgcatagcctgatgctaggcaatgctggggacatgaggtgaatcacctggatagttcctgcccccatggtgcccccggtcccrtggggaaaaccaatacagactccaataattgtaatacagaacatgtggctagggtgaggtgtgttcaaggactgtgagatgaaatcttggtggacctccc

SEQ ID NO: 543053 - DNA, 201 bp, Homo sapiens
ccccacaatcctagtggataggacctcttttgacaggtaaggaaactgaggctcagagagatgaagtgacttgttgaaggtcgcagggcaagggagtggtwgagccaggatttggattcaggcagtcttcaaatcagtgatcttattaccacagaccacagaggtaggtgaggtgactgagttgtgaaggaccttggccca

SEQ ID NO: 543054 - DNA, 201 bp, Homo sapiens
acaaaattagaagggtcaagggcatgagggtgaccttgaaacactgggacacccctaccactaccataccagtggaaaaggatttttccatctggccctgyggtttgggggcagagggtgatgtgggggcagaactcatctataccttcacgcccccagatgctccccagagctgcctggagcttggtgctgaggaaaggt

SEQ ID NO: 543055 - DNA, 201 bp, Homo sapiens
ccaaaaaggggcttcaaaggtctaggacccccattggccccccgctggggatatcagacaaaattagaagggtcaagggcatgagggtgaccttgaaacaytgggacacccctaccactaccataccagtggaaaaggatttttccatctggccctgcggtttgggggcagagggtgatgtgggggcagaactcatctata

SEQ ID NO: 543056 - DNA, 201 bp, Homo sapiens
cggggctagacagggtggagtgagctcctcagtgcaagatacttcaaccctggagtatcttgtaccgtcagccttgcgagtggctgggaggctacagggtrgctggagaccctggctggtgtaggaagactggcaggatcctgatccaccccatgtactccctgcagtatttcctccaaagccgatcaccttgacggacga

SEQ ID NO: 543057 - DNA, 201 bp, Homo sapiens
gcagtcttcaaatcagtgatcttattaccacagaccacagaggtaggtgaggtgactgagttgtgaaggaccttggcccagctcccacagtccttggggtmtaaggcaaagctggggtcagaacccagaggtgcctgggacgatgctctaggagaaagtctggggtgcggggctagacagggtggagtgagctcctcagtg

SEQ ID NO: 543058 - DNA, 201 bp, Homo sapiens
tgaggtgactgagttgtgaaggaccttggcccagctcccacagtccttggggtctaaggcaaagctggggtcagaacccagaggtgcctgggacgatgctmtaggagaaagtctggggtgcggggctagacagggtggagtgagctcctcagtgcaagatacttcaaccctggagtatcttgtaccgtcagccttgcgagt

SEQ ID NO: 543059 - DNA, 201 bp, Homo sapiens
cctaccactaccataccagtggaaaaggatttttccatctggccctgcggtttgggggcagagggtgatgtgggggcagaactcatctataccttcacgcycccagatgctccccagagctgcctggagcttggtgctgaggaaaggtggaggtggaagacgagggatgcacagctcagaaggcaccagtgagacctggac

SEQ ID NO: 543060 - DNA, 201 bp, Homo sapiens
gtcattcaaccaacaaatatttattgtggattttaacttaatcagctatttatttatttatttatttatttatttatgagacagagtttctctcttgtcgyccaggctggagtgcagtggtgcgatctcggctcactgcaagctccgcctcccgggttcaaggagttctccttcgttcaagcagttctcctgcctcagcct

SEQ ID NO: 543061 - DNA, 201 bp, Homo sapiens
ccacccagcttcctctggggagcaaacaagtgagcggggttctccaatctggccagactgagctggggctggcaccagaacccaagccctcagcctcaaastcttcagaccctggcccaagacttaggcctcctcccacttctcagatggtgaattgaggtcccaaaaaggggcttcaaaggtctaggacccccattggcc

SEQ ID NO: 543062 - DNA, 201 bp, Homo sapiens
tggtgaattgaggtcccaaaaaggggcttcaaaggtctaggacccccattggccccccgctggggatatcagacaaaattagaagggtcaagggcatgagrgtgaccttgaaacactgggacacccctaccactaccataccagtggaaaaggatttttccatctggccctgcggtttgggggcagagggtgatgtggggg

SEQ ID NO: 543063 - DNA, 201 bp, Homo sapiens
tttcctccaaagccgatcaccttgacggacgagcggaaagcccagcagctgcagcgcatgctggacatgaaggtgaatcctgtgcagggcctggcctcccrctgggactatgagaagaagcagtggaagaagtgacttgcatccccagctgtctccctgaggctccgccctggctgggagcctctggcggcccctcccctc

SEQ ID NO: 543064 - DNA, 201 bp, Homo sapiens
tcaaaggtctaggacccccattggccccccgctggggatatcagacaaaattagaagggtcaagggcatgagggtgaccttgaaacactgggacacccctmccactaccataccagtggaaaaggatttttccatctggccctgcggtttgggggcagagggtgatgtgggggcagaactcatctataccttcacgccccc

SEQ ID NO: 543065 - DNA, 201 bp, Homo sapiens
acttcaaccctggagtatcttgtaccgtcagccttgcgagtggctgggaggctacagggtggctggagaccctggctggtgtaggaagactggcaggatcmtgatccaccccatgtactccctgcagtatttcctccaaagccgatcaccttgacggacgagcggaaagcccagcagctgcagcgcatgctggacatgaag

SEQ ID NO: 543066 - DNA, 201 bp, Homo sapiens
gagtggacgcacctgaggccccttccccacacccaactgcctccagtgtaccggctccagttcaatgagacctttgcggagatgaaccgtcgctccaatgwgtggaagacagtgatgggttgtgtcttcttcttcattggattcgcagctctggtgatttggtggcagcgggtctacggtgagtggcaacacctcatctgg

SEQ ID NO: 543067 - DNA, 201 bp, Homo sapiens
cacaatctgcccaacactttttagggccttcagatcattttcagacttttcatacggtttggtaaattctttgaattgttcccttagctccttaagatggygcccatctccatgcactctggcagcttcttgctgtagtcctgaaatatcttatctctagggtccaccatgatgagaagtgctatttgtttattgtttatt

SEQ ID NO: 543068 - DNA, 201 bp, Homo sapiens
caacacagccgggaccgttgtcgtcgtggtgatcacagcgtctgcggtggcactgataggctgttgctttgtcgctctctttgttagatatgtggattagrtcaataaagagacaatgaccctaacctcagagacagtgaagcacatggcaggaagttaacattttctgcagctctgaatcttagggtctgcccattggac

SEQ ID NO: 543069 - DNA, 201 bp, Homo sapiens
aggtccctgctttcttgtggactgttggcctggagttgctctcagcccctaaatgtcactctcaggtcctttcaagtggcttcctccaccttcaaagcagrcatttcttgtgctttgagttgctctgactttcccttctactaccagctggagaaaattctgtacttttcaagggctcatggaatttggttaggatcaacc

SEQ ID NO: 543070 - DNA, 201 bp, Homo sapiens
ctaatagtgtaggaaatcatcatttaagctcgcaggccctcagtttcctcatgaggcaaatggaaagaatgttatttaccttatagaaaagcaaacaaattagtggatgtgcttagcatagtgccccctagcacccgacaaagactcaaaatgtgatagctagtattataattgttaccatgggggtaatgataataacat

SEQ ID NO: 543071 - DNA, 201 bp, Homo sapiens
aagggtctagtaaattatccagcttaagtccttcatgatttcaagggctgaggggactatttaccactaccctcatgcttttttttgtttttcttcttttkttaagacaaagtctcactctgccacctgagctggagtgcagtggcatgatcatggctcactgcagcctcaaccttctgggctcaagcaagtcccagccct

SEQ ID NO: 543072 - DNA, 201 bp, Homo sapiens
tgcacccatcatgaatgctctgtctagcctgggaagcctggttcttaaagcacattttctaatgaatctactctcgatgccttcgcagcctaagggctttyggaactctgaagcaagacaaaccattcttatttctctgctctctactgttacatactgtcctcaaagcaacgaggcatcctggcccagcttaaatgtgaa

SEQ ID NO: 543073 - DNA, 201 bp, Homo sapiens
tagatgacatgttagtgggtgcagcgcaccagcatggcacatgtatacatatgtaactaacctgcacaatgtgcacatgtaccctaaaacttagagtatartaaaaaaaaaaaattaaaaaaaaaaaaaaacttttgctcaatagaaattaacttgttagctccggcctgtatgaaatacattaaaaatgaaattcttaca

SEQ ID NO: 543074 - DNA, 201 bp, Homo sapiens
aggaaacaacaggtgctggagaggatgtggagaaataggaacacttttacactgttggtgggactgtaaactagttcaaccattgtggaagtcagtgtggygattcctcagggatctagaactagaaataccatttgacccagccatcccattactgggtatatacccaaatgactataaatcatgctgtctataaagaca

SEQ ID NO: 543075 - DNA, 201 bp, Homo sapiens
ttctactaccagctggagaaaattctgtacttttcaagggctcatggaatttggttaggatcaaccaggtaatctccctttcaattaactcaaagtgagcrattaataaccttaattattaatatatctgcaaaatccctttgccatgtaacagcacataatcacagggatgacatcaggggaccaagatcatgacagaca

SEQ ID NO: 543076 - DNA, 201 bp, Homo sapiens
acggtgtgctgagccattacaacttagaactggaaatattagttctgtaaactttaagaaagctcaagacagccataaatggctccagaacgaggccaatyaatgcctgacctcctgcacagccttttcttcctgggattcttactgcctccatggggtctgaccaggaaatgaggcacctatcttcttgctcttggatcc

SEQ ID NO: 543077 - DNA, 201 bp, Homo sapiens
actccccctccaagagtcgcataggacaggggtcgtcccatccactcagaggctgctgtgaggatcacatgaaatcaactgagtggaagccttttgaaagkcatggaactcccacacgagtacaaaaataaatacaacagatacaacgaactttctagtaggggccacatgaaaaatgttgtagactctgaatgatcttgt

SEQ ID NO: 543078 - DNA, 201 bp, Homo sapiens
atatgtgtgcacccatcatgaatgctctgtctagcctgggaagcctggttcttaaagcacattttctaatgaatctactctcgatgccttcgcagcctaasggcttttggaactctgaagcaagacaaaccattcttatttctctgctctctactgttacatactgtcctcaaagcaacgaggcatcctggcccagcttaa

SEQ ID NO: 543079 - DNA, 201 bp, Homo sapiens
gagactttggtgcacccatcacctgagcagtacacactgcacccaatttgtagtctttttcccctcatcccctttccacacttaccccctgagtccccaaygtctgttgtgtcattcttatgcctttgcatcctcatagcttagctcccacttatgagttagaacatacaatgtttggttttccattcctgagttacttca

SEQ ID NO: 543080 - DNA, 201 bp, Homo sapiens
cctggtgaagataggtgctctaacaatttctattgataaacaaatgggtcaaggacaccacacacacacacacacacacacacacacacacacacacacasagagagagagagagagagagtagctggtacttatgttaactgtccaggatttagtatgtacctggtgggaataagtaggaagcatgcacctaatctgaca

SEQ ID NO: 543081 - DNA, 201 bp, Homo sapiens
agccagttgttaaatatttacctgaagtccactgattggagtaggaggggggttcggtgattaagtcacttgcccatagtccatagccggaaagtctcattgaatagattccaacttcattttcctaacttgaatctgacaattccttctgttttattataatttgttgaaattaattacaaggtcatgggagactttctg

SEQ ID NO: 543082 - DNA, 201 bp, Homo sapiens
atgtaacaaaaagtctgggagtacgtgtctgctggctttcagtgagctgctagatgtcagagccaacaatttaatgtttccttggcagctttaaggatgtwttgcctcctggatgcaagacaattgctacgggtccatagctcttgtttgtttcaagacaagaggaggggagaggagggtcagggagaaggaagggggaat

SEQ ID NO: 543083 - DNA, 201 bp, Homo sapiens
ataaactcctcaagtacaagaacattgtgtttcctgttcattgaccaccactatcttgaatagtgcttggaatatggaaggtgctcaaaaaatattggtgrgatggatattcagttttaacatcttaattttattaatgattaagctgtgttgttgagaggtaaagtggctaacccaaggtcacacagctggttagtggta

SEQ ID NO: 543084 - DNA, 201 bp, Homo sapiens
gttagttataaaagtgtgtaagtagttttcccttgagatcaagtgcttcctccagtattgtttactctgttcatttgcttagcatttttccaaaataaatrcaaaagtaaacttcgacactgctcatgtttgaattggcaaaatggttgagtatgatctgctgaaacgaggcctcattctataaacatgactgccttcaag

SEQ ID NO: 543085 - DNA, 201 bp, Homo sapiens
ttttttaatggcaagagggctgaattatttcagaagtttaaaccagatctcataaaatctatctccaattcctccatgtcgtcagttgctccctttaacayttaaatagtctccttttgagggtatgtttgtgaagttttctttctccctgatgactctgtacctttttcgcttgtaaattcatcactacccagtctccag

SEQ ID NO: 543086 - DNA, 201 bp, Homo sapiens
gtttcctcatgaggcaaatggaaagaatgttatttaccttatagaaaagcaaacaaattagtggatgtgcttagcatagtgccccctagcacccgacaaaractcaaaatgtgatagctagtattataattgttaccatgggggtaatgataataacatgtgcatccagggaggtggtgaggttgaaatacagtaacaggt

SEQ ID NO: 543087 - DNA, 201 bp, Homo sapiens
acgcttcaggctcagagaaacctggattcaaatcctgcctctctcacttggaagctgtgttacactggggatgttatttacttgtttattagttagcactyagaatgagttcatttttaggtgagataatatattcacaatgatacacaaaagtgcacactgtgtgctccctttaccatttactatctccctccagcccca

SEQ ID NO: 543088 - DNA, 201 bp, Homo sapiens
cgcaactagtgaacaagcgcctatgcagtgcttataacagagttggtgtttccactctaaaattaccacctcttcttatcaaaatttgcaactttcttccygtgaaaataggcttacagttccttaactggagcaatgatataaaagctacagagataactccaagtttaatccagctcagcatgaaactgcaaaaacact

SEQ ID NO: 543089 - DNA, 201 bp, Homo sapiens
caaaagccagctgttttcaacccacagataaggggattcttttgttcctggctcagtatcaaaggatgtctaaaaaggtgaatcttcagaagaaaggattktctgaaattattaaatgttatgaggcactgccagctgtaatttctccctctcttcttcccacagactttcagaaagttttggtatcctacattggattaa

SEQ ID NO: 543090 - DNA, 201 bp, Homo sapiens
cttgtaaaatgttttaaagcagaatttttcatttttaaaaattagttctgccactatactgatataagcaagccaagttgacctgctagaagaggaacccrgttaaaagtcaactgtctccagctcagcctgtcttgttgcttaattggatgttttctacatgctaggcattaagctgggtgatttcatagacacttcatc

SEQ ID NO: 543091 - DNA, 201 bp, Homo sapiens
ccatcagtgtgagagtgtttagtttcataattgattcaaatgtactgcaaataaggttgcttgtctacaaggtgtaagtccaataattatatgaatagatrtggaaaatgtcattcttaatagtcacgtttcaagtatctgttatttatcctctgattcttgtgttccaggagaatggggcagggaagagatgaggaatgt

SEQ ID NO: 543092 - DNA, 201 bp, Homo sapiens
gtgtaactgggtgggttataggagcaccacaccaggattggggacagctggctttccttcccaggtgccagcttttctgagcctcttaacctccacttacmtaagttgcagctgtgaagacactgaacaaagggatttctgctattgtctttatgtaagtccaggtggctgtgctataactccagggcattgcacaggctg

SEQ ID NO: 543093 - DNA, 201 bp, Homo sapiens
acccaagaattataatcatctaagagctggcttatgtctgtgagctttgtccttgtgcaacagttctgtcattcagacataggatgctcaatgtctcctayaccttggcctgaagctagcaccattctcattccctttgcccttgtgtccaaagcctcattctgggcctgaaactgccaagcagccactcgtgcttaacag

SEQ ID NO: 543094 - DNA, 201 bp, Homo sapiens
ccacctttatcagaagtcactgatgtctgcaccagaaggaacatctgaggaacagttactactttggtgctgagtaatttcttgcccataccaggaacacrtgtattttaaaacagaaactcaaaaaaggaataactaataatgggattttaaatatcagataattaggattgaatagattttgaggagcctttcctcagt

SEQ ID NO: 543095 - DNA, 201 bp, Homo sapiens
agataaagtttaaatatttttttccagtgtcttaatattctgttaggataattcccccagtggcccactttgctttcctggcatgtcgtgttgtactattstaacttgcagctacaactacttcaaaacagtagctttgggacaaataagacagttcttccctttttttttttttacccccttccctaagataagagagtg

SEQ ID NO: 543096 - DNA, 201 bp, Homo sapiens
gggctccacacttacagtctcatttaaccttaattacctctttaaaggccttgtcgacaaatacagtcccattgagggttagagtatcaacacaggaatctggggagtacagggacacaattgagcccataattgagccctttcacttttacccttgttgccgctgagtccagctcctgaagcttggatgggatgtggatg

SEQ ID NO: 543097 - DNA, 201 bp, Homo sapiens
gaaggaagtgggaagagatggggagaatccctgttaccattctcaggaggactcactctgtcactgtcagcctgcttcttgtgaagggaaagtgtggatgyatgtgagggccccttccccttccctttacctagccatagcacagcaggaaacctgcctcaagacctcttaaaaatttagcccaattgggaaaatgggacc

SEQ ID NO: 543098 - DNA, 201 bp, Homo sapiens
ctctctttcagattgtgtaccgcggggatccctatagtgcacacaactccacagagtttctcatctacgaaagaggagtcgaggttggatgttggggcttstgcatcaactccgtgttttcctcactttattcttgtaagtctttctctctcctaaggatgtcttctaaaagtttctggtctagcacaacttggatttgat

SEQ ID NO: 543099 - DNA, 201 bp, Homo sapiens
ggtcatgacagcatcagctctgtactctagaaagggtccctcaggcagggacatttgctccccagaggtggagaagcagagtgcatgagaagggttcttamtacattgcatttgtacctcaacagcctccaatctctctttcagattgtgtaccgcggggatccctatagtgcacacaactccacagagtttctcatctac

SEQ ID NO: 543100 - DNA, 201 bp, Homo sapiens
ctttatttcttaatgtaagctccattgagttcattgcttacttttgtaagcaatgataccagccgtttagcccatccctaaagaactgggggtcctggagwtttagctatgtcaatgcagccttttttacaatattaactgaaaaaccatgggtgccctttatagattttttaagattaggaaacagaagtcagaaggagc

SEQ ID NO: 543101 - DNA, 201 bp, Homo sapiens
aacctaaagattaagagcacagtgcttaaatcctggctgtaccacctctggattgcatgactttgggcatttacatttgtgttaaatgataaaataattcyatctacctacaagggtttcgtgcaggttgcaggggctaattcaggtaaagttacttagagtgtttgcaaccacataataagctgttgggtttaggccttg

SEQ ID NO: 543102 - DNA, 201 bp, Homo sapiens
catccttgggttggtgactgagttgggcatatcgaatttgcctgtcatgagttgattggatattttcgttcattttcagcgaactgcacagtgaattcatyagcttaaaatttgaaataaaactcaactaactgccagagaaatgagaccatgttcagatgaaatgatcagagaagagactagaattaagctgagcaatat

SEQ ID NO: 543103 - DNA, 201 bp, Homo sapiens
ctgctcgaaagtgctttcccaggtaccaattggcagttggcttttggcctccttgctttgttactctgatcgcaaacacacacccccagccctgactcccrtcacagaggtacccatcattacttgacactgtattattttttcatttatttatttctgtaggtctgaatcaaacagattttattcaactttttagaatga

SEQ ID NO: 543104 - DNA, 201 bp, Homo sapiens
aaaaaaaaaaatacaacaaatagggccaattgatgtgagctgtagcaatcatggcaggcttcaaaaaggaggggtggggttcaggccgggcatggtggatsatgcctgtaatctcagtgctttcgaggccaaggtggagcaatcatttgaggccaggggttcaaggatgcggtgacctatgactgtgccgctgtactccat

SEQ ID NO: 543105 - DNA, 201 bp, Homo sapiens
acagtagctcctattttaggatgagtgcagtgtttttcataactgtaagagtgcaacgaggaactaagaggtcattgggataaagccttcattttatctcratcacacaagtagagaaaatttgagattttaggtctcctaatgcctggactcaaccccctttccctacaccaggctgcctggaggagaatacttgtactc

SEQ ID NO: 543106 - DNA, 201 bp, Homo sapiens
ctcagtgggaagagcccgcctcaaagcacattcaggatgttggcagaatgcagttccatgtggttataggattgaggtccctgctttcttgtggactgttkgcctggagttgctctcagcccctaaatgtcactctcaggtcctttcaagtggcttcctccaccttcaaagcaggcatttcttgtgctttgagttgctctg

SEQ ID NO: 543107 - DNA, 201 bp, Homo sapiens
gtgtgtgtgtttgtgtgtgtgtgtgtataaacatatatatttgagttctacattgttcttacttctaactcaatgtaaggctcattaacatgtttctgctrtcattaggattcagagatataacctgggaggagacatctggctaagaacagggagctgactggctctctgtattaatgttctaatgaataaaaaattttc

SEQ ID NO: 543108 - DNA, 201 bp, Homo sapiens
ttctttctgtggttgaggaaaaagtagtaattctgcacttcattttggttataatcatttatttttacaggtaccatattgaacttgcagaaaaacagttrttttccttcaatccagggagatgtctatagtgtttaacactgattatcagaaaatgagtatagttatggtcagtgggctagatactgcaagactgatgaa

SEQ ID NO: 543109 - DNA, 201 bp, Homo sapiens
caccctgatagattatctacctctttgatgtccccttcgatagactgggactccccctccaagagtcgcataggacaggggtcgtcccatccactcagagkctgctgtgaggatcacatgaaatcaactgagtggaagccttttgaaaggcatggaactcccacacgagtacaaaaataaatacaacagatacaacgaact

SEQ ID NO: 543110 - DNA, 201 bp, Homo sapiens
tgaagccccacttacagaggttgcaaagggcattcccccacagcaaacccctcaggaccctccattgtcatcagatggaatgtacgagtatggttctatcragaaagttaaaaatggttacgtaaatccagagctggcaatgcagggagcaaaaaacaaaaatcatgctgaacaggtaaagatgcaacattttttctttac

SEQ ID NO: 543111 - DNA, 201 bp, Homo sapiens
gagccaaaacttgaacccacattgcctggctgtgtgtttttcagcctcttgctgtattgcttttccaatcatatccaggttgcctctgctgtcttcagggmgttttcccactgaaggggagtgtctatgcatgaggaaaatgaacgataatttgctaaatatgctaacatagcttttcttgctttccaggttttggaggtg

SEQ ID NO: 543112 - DNA, 201 bp, Homo sapiens
aggaactcctttagttctattttcttccttgattctctagcttgtgaagatattgtccttatctgagaaataaaatagagacttcactcatacacacacamaaaaaaaatcaaaaacaaaaatgaaagctgatctgttcagctagataagttgtggttggtaggcatgatgggagtttgacgtttaaagaattttgacagg

SEQ ID NO: 543113 - DNA, 201 bp, Homo sapiens
gaggatttatttcacatatcaattctttcaaatgagcaggggtcttctgctctatattcttccaactgaggcaatgagtaatgctcagttgaacaaaaatytgaaagatagaggcataagtgataagaaattgaatggcaatgtgaaaacccttgatctgtttacaaatgatagtttcgaaaaaggaatgtgtctgtcata

SEQ ID NO: 543114 - DNA, 201 bp, Homo sapiens
tcagtgcagtagctatcttctgcttctaggggaggctttggaattagggttactataggaagtcagcagggagctcagttttgggtctggttctgccatgstatgtgctggggcttgacgtggattatttgcattaatcctcactaaattcagatgaggaggcagcaccacccttgtttctcagagaagtgcccaagagca

SEQ ID NO: 543115 - DNA, 201 bp, Homo sapiens
tttctctctcctaaggatgtcttctaaaagtttctggtctagcacaacttggatttgatatttctatgtgtatttcctactgtttaaaataccagattctyaataaatctatggacgtcaggaaaaactatcaccttaaaaaggaccatataaagcatccttttttcatcatgaattctaggtgtcatttcctcactgatt

SEQ ID NO: 543116 - DNA, 201 bp, Homo sapiens
gcacttcaccatcatctgtcctttatctgtttatgtatatgctcatcacatataactaggccataaatttcttgcttccagagactatatgtcttacttcrctgtgccccattggccacagtttcttgtaattctgccttaaaacacttcagcattcaggacatgctaatgatgctttatttttggaatccaatgattaga

SEQ ID NO: 543117 - DNA, 201 bp, Homo sapiens
tttagtctgtcctccttcagaggtaaagtagcaaacagcacatagctagctctcatgacttgagctgtgtcagccctggtgctgagcttgccaagccacayacctgatgcctgcaggcaattacaggcagatggtaggtgcagagtttgatttagatggactctcttgagtttcctttcatcctttagattccttggtact

SEQ ID NO: 543118 - DNA, 201 bp, Homo sapiens
attctgtctaaactccaaagggaagggttataacagggtatgtccaacacctcccttctcatcatggcctgaactaggttttcaggtttctttgggatccycttggccaagaagggtgtccactcagtcagttggaggccttagaattttattattggtttgcagtactcatcctttaactgttctccagtctccagtttc

SEQ ID NO: 543119 - DNA, 201 bp, Homo sapiens
tggggccagcaatctgtgttttaacaagacatacaagcgatagttcaatatgccagactttgagaagcactgcgtttgactaccattgtacacgtgtgtcygtatgtgcagaagtgcgtaaaaggaggccttaaagcctgacctttgctggggctgggattggaagcatctccctcagcttttttaatagaattggaattg

SEQ ID NO: 543120 - DNA, 201 bp, Homo sapiens
attgttcatttaattttatactgcaatttttaaaacgtgtatataatctatgctattcttaagtttaaaaagcaaatggaaacaagagaaacaacaatgtrtcttttataggagattgggtaaacgattacagcgtatccgtagaatgaaaatccagctgttaaaaattgtgaggagctgaaattatatgaagaaagttgg

SEQ ID NO: 543121 - DNA, 201 bp, Homo sapiens
aagccagttgttaaatatttacctgaagtccactgattggagtaggaggggggttcggtgattaagtcacttgcccatagtccatagccggaaagtctcadtgaatagattccaacttcattttcctaacttgaatctgacaattccttctgttttattataatttgttgaaattaattacaaggtcatgggagactttct

SEQ ID NO: 543122 - DNA, 201 bp, Homo sapiens
aaacctaaagaaatatcagatcagcttgtctggtcaagctggtctttgaccagagcatatgtatcattttttttttattttaatttaaaattttttttttyttttcattgggaacacaacacatgtatcattttgactgctttttctgtactcagcctccaagagggcagaggtcatgtctgtcttgctcattgatgtatc

SEQ ID NO: 543123 - DNA, 201 bp, Homo sapiens
agttagttagaaactgctgtcacctggccactcaaaagagtgatgcttggcccagcagcattggtgtcagtggtgagcttgaaagaaatgcagaatctcargctccaccttagaccttcagaatcagaacttgcattttaacaaggtgcccacatgatttgcgtgcacattaaagtttaagaaggctgctctagaggaata

SEQ ID NO: 543124 - DNA, 201 bp, Homo sapiens
ttgattgacaaaatgttgtagaagacttaagttcaaatcttggttcctctagctgctgacttgtgttattcattcagtgaatcacaaatagctacttgctrtagggtaacctaaagattaagagcacagtgcttaaatcctggctgtaccacctctggattgcatgactttgggcatttacatttgtgttaaatgataaaa

SEQ ID NO: 543125 - DNA, 201 bp, Homo sapiens
tgtgttttctctggtaggtgacccaaacggcacatttccaaggtggccacaaatggcaaaatagcaattgcttttagttttaaagagggaaggattgtgcytaaataaatggagaaaagcgttatggaagagatcgcccctgagttgtgccttgaatgatagttaggatttgaatagagattttgggggaaaagtacttct

SEQ ID NO: 543126 - DNA, 201 bp, Homo sapiens
taaaaacataaataaataagcaaataaaataagacaaaaagttaaagtaagaatatagcacagagtaatgcatcttactctcaaagccatggatttgcacytctcttccaaatgtgtgccctgggaggtctccagttaagcaaaggaagtctgcacttccccagggtcagggccaaggcttcagggctgtcattgcttgcc

SEQ ID NO: 543127 - DNA, 201 bp, Homo sapiens
ataagagagtgctaataattctctaagttatagattatgtcaaggttttaaattaacacattaataaaggaaccaatggggaagatataagaagagtttcscccaggttcttgcaggaaatgtgtgtgtgtgtgtgtgtgtgtgtgtgtctagcaaaataaaaaatgctagactaaatatgaacctggttaaccttctaca

SEQ ID NO: 543128 - DNA, 201 bp, Homo sapiens
tctactctcgatgccttcgcagcctaagggcttttggaactctgaagcaagacaaaccattcttatttctctgctctctactgttacatactgtcctcaargcaacgaggcatcctggcccagcttaaatgtgaaagaagggcccaatgagagaaagggatgccaggattagaggtaggtggatggaaacagtgagcaata

SEQ ID NO: 543129 - DNA, 201 bp, Homo sapiens
aattgcaaacatacctccttcagtacaagcatttctcaggtctcctccattaaagtcatctgcaaacttcacaattactccataattaatttcaccatackttgtaaggggacttgcatggattttcaacgtgtctaatcttgctcgttcatttggcaaatcaatatgtatttttttctatctaatcttcctggatgcagc

SEQ ID NO: 543130 - DNA, 201 bp, Homo sapiens
cacaatctgttcccatcctactctccaagctttacttcccattactccttccacattctctgtgctctgaataatttttcatcatgtttccaggagcagcrggcaggtctgttttattccctgcatccctcactcctctaccactgccttgcatattgtaggtgttcaaaataaataccaatgggacaaatgaaggagcca

SEQ ID NO: 543131 - DNA, 201 bp, Homo sapiens
gcagcttcttgctgtagtcctgaaatatcttatctctagggtccaccatgatgagaagtgctatttgtttattgtttattgtctgtctctctaaccatcayataaactcctcaagtacaagaacattgtgtttcctgttcattgaccaccactatcttgaatagtgcttggaatatggaaggtgctcaaaaaatattggtg

SEQ ID NO: 543132 - DNA, 201 bp, Homo sapiens
agccaacaatttaatgtttccttggcagctttaaggatgtattgcctcctggatgcaagacaattgctacgggtccatagctcttgtttgtttcaagacargaggaggggagaggagggtcagggagaaggaagggggaatggggaaagagcctacattcactctttaaatgaagaaagcaaatctgccctagaaacctcc

SEQ ID NO: 543133 - DNA, 201 bp, Homo sapiens
cctgaaaaaaaatgtaaagctatttttatttggaaaaaagcaaaataaaagcaaggaagatgattttatggcaagaagtttaggtggaaattacaaaacgyggatgattctaaaacaggatttaggagaccaatgtttatttttcttttagctttgattgctaacccaaggaggaagctggtttgggccataagtgtcacc

SEQ ID NO: 543134 - DNA, 201 bp, Homo sapiens
atgtttccttggcagctttaaggatgtattgcctcctggatgcaagacaattgctacgggtccatagctcttgtttgtttcaagacaagaggaggggagargagggtcagggagaaggaagggggaatggggaaagagcctacattcactctttaaatgaagaaagcaaatctgccctagaaacctcccctctcccagagc
